United States Patent Application Publication US 2018/0305689 A1 - sequence listing, part 82

SEQ ID NO: 1202761 - RNA, 19 nt, Artificial Sequence
  Description of Artificial Sequence: Synthetic oligonucleotide
  Antisense strand to SEQ ID NO: 1202760
ucagugaccauaauggcac

SEQ ID NO: 1202762 - RNA, 19 nt, Artificial Sequence
  Description of Artificial Sequence: Synthetic oligonucleotide
  Sense strand starting at position 1352 of SEQ ID NO: 917026
ugccauuauggucacugaa

SEQ ID NO: 1202763 - RNA, 19 nt, Artificial Sequence
  Description of Artificial Sequence: Synthetic oligonucleotide
  Antisense strand to SEQ ID NO: 1202762
uucagugaccauaauggca

SEQ ID NO: 1202764 - RNA, 19 nt, Artificial Sequence
  Description of Artificial Sequence: Synthetic oligonucleotide
  Sense strand starting at position 1354 of SEQ ID NO: 917026
ccauuauggucacugaaga

SEQ ID NO: 1202765 - RNA, 19 nt, Artificial Sequence
  Description of Artificial Sequence: Synthetic oligonucleotide
  Antisense strand to SEQ ID NO: 1202764
ucuucagugaccauaaugg

SEQ ID NO: 1202766 - RNA, 19 nt, Artificial Sequence
  Description of Artificial Sequence: Synthetic oligonucleotide
  Sense strand starting at position 1355 of SEQ ID NO: 917026
cauuauggucacugaagag

SEQ ID NO: 1202767 - RNA, 19 nt, Artificial Sequence
  Description of Artificial Sequence: Synthetic oligonucleotide
  Antisense strand to SEQ ID NO: 1202766
cucuucagugaccauaaug

SEQ ID NO: 1202768 - RNA, 19 nt, Artificial Sequence
  Description of Artificial Sequence: Synthetic oligonucleotide
  Sense strand starting at position 1367 of SEQ ID NO: 917026
ugaagagcagucuaacuuu

SEQ ID NO: 1202769 - RNA, 19 nt, Artificial Sequence
  Description of Artificial Sequence: Synthetic oligonucleotide
  Antisense strand to SEQ ID NO: 1202768
aaaguuagacugcucuuca

SEQ ID NO: 1202770 - RNA, 19 nt, Artificial Sequence
  Description of Artificial Sequence: Synthetic oligonucleotide
  Sense strand starting at position 1370 of SEQ ID NO: 917026
agagcagucuaacuuuaug

SEQ ID NO: 1202771 - RNA, 19 nt, Artificial Sequence
  Description of Artificial Sequence: Synthetic oligonucleotide
  Antisense strand to SEQ ID NO: 1202770
cauaaaguuagacugcucu

SEQ ID NO: 1202772 - RNA, 19 nt, Artificial Sequence
  Description of Artificial Sequence: Synthetic oligonucleotide
  Sense strand starting at position 1633 of SEQ ID NO: 917026
cagccuagaugagauaaga

SEQ ID NO: 1202773 - RNA, 19 nt, Artificial Sequence
  Description of Artificial Sequence: Synthetic oligonucleotide
  Antisense strand to SEQ ID NO: 1202772
ucuuaucucaucuaggcug

SEQ ID NO: 1202774 - RNA, 19 nt, Artificial Sequence
  Description of Artificial Sequence: Synthetic oligonucleotide
  Sense strand starting at position 1793 of SEQ ID NO: 917026
gauggagucaaacgagguu

SEQ ID NO: 1202775 - RNA, 19 nt, Artificial Sequence
  Description of Artificial Sequence: Synthetic oligonucleotide
  Antisense strand to SEQ ID NO: 1202774
aaccucguuugacuccauc

SEQ ID NO: 1202776 - RNA, 19 nt, Artificial Sequence
  Description of Artificial Sequence: Synthetic oligonucleotide
  Sense strand starting at position 1875 of SEQ ID NO: 917026
caggacuucucaccgggua

SEQ ID NO: 1202777 - RNA, 19 nt, Artificial Sequence
  Description of Artificial Sequence: Synthetic oligonucleotide
  Antisense strand to SEQ ID NO: 1202776
uacccggugagaaguccug

SEQ ID NO: 1202778 - RNA, 19 nt, Artificial Sequence
  Description of Artificial Sequence: Synthetic oligonucleotide
  Sense strand starting at position 2016 of SEQ ID NO: 917026
gccagaauucuccagcgga

SEQ ID NO: 1202779 - RNA, 19 nt, Artificial Sequence
  Description of Artificial Sequence: Synthetic oligonucleotide
  Antisense strand to SEQ ID NO: 1202778
uccgcuggagaauucuggc

SEQ ID NO: 1202780 - RNA, 19 nt, Artificial Sequence
  Description of Artificial Sequence: Synthetic oligonucleotide
  Sense strand starting at position 2094 of SEQ ID NO: 917026
uugauuucuugagacgaca

SEQ ID NO: 1202781 - RNA, 19 nt, Artificial Sequence
  Description of Artificial Sequence: Synthetic oligonucleotide
  Antisense strand to SEQ ID NO: 1202780
ugucgucucaagaaaucaa

SEQ ID NO: 1202782 - RNA, 19 nt, Artificial Sequence
  Description of Artificial Sequence: Synthetic oligonucleotide
  Sense strand starting at position 2108 of SEQ ID NO: 917026
cgacacauuucauacggga

SEQ ID NO: 1202783 - RNA, 19 nt, Artificial Sequence
  Description of Artificial Sequence: Synthetic oligonucleotide
  Antisense strand to SEQ ID NO: 1202782
ucccguaugaaaugugucg

SEQ ID NO: 1202784 - RNA, 19 nt, Artificial Sequence
  Description of Artificial Sequence: Synthetic oligonucleotide
  Sense strand starting at position 2170 of SEQ ID NO: 917026
gaaauaaagucgucacaaa

SEQ ID NO: 1202785 - RNA, 19 nt, Artificial Sequence
  Description of Artificial Sequence: Synthetic oligonucleotide
  Antisense strand to SEQ ID NO: 1202784
uuugugacgacuuuauuuc

SEQ ID NO: 1202786 - RNA, 19 nt, Artificial Sequence
  Description of Artificial Sequence: Synthetic oligonucleotide
  Sense strand starting at position 2198 of SEQ ID NO: 917026
caagaaauguggguaacau

SEQ ID NO: 1202787 - RNA, 19 nt, Artificial Sequence
  Description of Artificial Sequence: Synthetic oligonucleotide
  Antisense strand to SEQ ID NO: 1202786
auguuacccacauuucuug

SEQ ID NO: 1202788 - RNA, 19 nt, Artificial Sequence
  Description of Artificial Sequence: Synthetic oligonucleotide
  Sense strand starting at position 97 of SEQ ID NO: 917027
ggagguggcuacuuuagau

SEQ ID NO: 1202789 - RNA, 19 nt, Artificial Sequence
  Description of Artificial Sequence: Synthetic oligonucleotide
  Antisense strand to SEQ ID NO: 1202788
aucuaaaguagccaccucc

SEQ ID NO: 1202790 - RNA, 19 nt, Artificial Sequence
  Description of Artificial Sequence: Synthetic oligonucleotide
  Sense strand starting at position 184 of SEQ ID NO: 917027
ugcccugauuuggaccaaa

SEQ ID NO: 1202791 - RNA, 19 nt, Artificial Sequence
  Description of Artificial Sequence: Synthetic oligonucleotide
  Antisense strand to SEQ ID NO: 1202790
uuugguccaaaucagggca

SEQ ID NO: 1202792 - RNA, 19 nt, Artificial Sequence
  Description of Artificial Sequence: Synthetic oligonucleotide
  Sense strand starting at position 338 of SEQ ID NO: 917027
agaagucucagugacaggu

SEQ ID NO: 1202793 - RNA, 19 nt, Artificial Sequence
  Description of Artificial Sequence: Synthetic oligonucleotide
  Antisense strand to SEQ ID NO: 1202792
accugucacugagacuucu

SEQ ID NO: 1202794 - RNA, 19 nt, Artificial Sequence
  Description of Artificial Sequence: Synthetic oligonucleotide
  Sense strand starting at position 521 of SEQ ID NO: 917027
ugugaccuuggcugggaaa

SEQ ID NO: 1202795 - RNA, 19 nt, Artificial Sequence
  Description of Artificial Sequence: Synthetic oligonucleotide
  Antisense strand to SEQ ID NO: 1202794
uuucccagccaaggucaca

SEQ ID NO: 1202796 - RNA, 19 nt, Artificial Sequence
  Description of Artificial Sequence: Synthetic oligonucleotide
  Sense strand starting at position 620 of SEQ ID NO: 917027
gcaaguuggugguuauaaa

SEQ ID NO: 1202797 - RNA, 19 nt, Artificial Sequence
  Description of Artificial Sequence: Synthetic oligonucleotide
  Antisense strand to SEQ ID NO: 1202796
uuuauaaccaccaacuugc

SEQ ID NO: 1202798 - RNA, 19 nt, Artificial Sequence
  Description of Artificial Sequence: Synthetic oligonucleotide
  Sense strand starting at position 621 of SEQ ID NO: 917027
caaguuggugguuauaaau

SEQ ID NO: 1202799 - RNA, 19 nt, Artificial Sequence
  Description of Artificial Sequence: Synthetic oligonucleotide
  Antisense strand to SEQ ID NO: 1202798
auuuauaaccaccaacuug

SEQ ID NO: 1202800 - RNA, 19 nt, Artificial Sequence
  Description of Artificial Sequence: Synthetic oligonucleotide
  Sense strand starting at position 633 of SEQ ID NO: 917027
uauaaauguccugggcuca

SEQ ID NO: 1202801 - RNA, 19 nt, Artificial Sequence
  Description of Artificial Sequence: Synthetic oligonucleotide
  Antisense strand to SEQ ID NO: 1202800
ugagcccaggacauuuaua

SEQ ID NO: 1202802 - RNA, 19 nt, Artificial Sequence
  Description of Artificial Sequence: Synthetic oligonucleotide
  Sense strand starting at position 634 of SEQ ID NO: 917027
auaaauguccugggcucau

SEQ ID NO: 1202803 - RNA, 19 nt, Artificial Sequence
  Description of Artificial Sequence: Synthetic oligonucleotide
  Antisense strand to SEQ ID NO: 1202802
augagcccaggacauuuau

SEQ ID NO: 1202804 - RNA, 19 nt, Artificial Sequence
  Description of Artificial Sequence: Synthetic oligonucleotide
  Sense strand starting at position 681 of SEQ ID NO: 917027
gugcucuaggcagacuuaa

SEQ ID NO: 1202805 - RNA, 19 nt, Artificial Sequence
  Description of Artificial Sequence: Synthetic oligonucleotide
  Antisense strand to SEQ ID NO: 1202804
uuaagucugccuagagcac

SEQ ID NO: 1202806 - RNA, 19 nt, Artificial Sequence
  Description of Artificial Sequence: Synthetic oligonucleotide
  Sense strand starting at position 788 of SEQ ID NO: 917027
aguccaaagguggguauaa

SEQ ID NO: 1202807 - RNA, 19 nt, Artificial Sequence
  Description of Artificial Sequence: Synthetic oligonucleotide
  Antisense strand to SEQ ID NO: 1202806
uuauacccaccuuuggacu

SEQ ID NO: 1202808 - RNA, 19 nt, Artificial Sequence
  Description of Artificial Sequence: Synthetic oligonucleotide
  Sense strand starting at position 789 of SEQ ID NO: 917027
guccaaagguggguauaaa

SEQ ID NO: 1202809 - RNA, 19 nt, Artificial Sequence
  Description of Artificial Sequence: Synthetic oligonucleotide
  Antisense strand to SEQ ID NO: 1202808
uuuauacccaccuuuggac

SEQ ID NO: 1202810 - RNA, 19 nt, Artificial Sequence
  Description of Artificial Sequence: Synthetic oligonucleotide
  Sense strand starting at position 810 of SEQ ID NO: 917027
uccugcuaugcugaauaua

SEQ ID NO: 1202811 - RNA, 19 nt, Artificial Sequence
  Description of Artificial Sequence: Synthetic oligonucleotide
  Antisense strand to SEQ ID NO: 1202810
uauauucagcauagcagga

SEQ ID NO: 1202812 - RNA, 19 nt, Artificial Sequence
  Description of Artificial Sequence: Synthetic oligonucleotide
  Sense strand starting at position 819 of SEQ ID NO: 917027
gcugaauauagugggaaac

SEQ ID NO: 1202813 - RNA, 19 nt, Artificial Sequence
  Description of Artificial Sequence: Synthetic oligonucleotide
  Antisense strand to SEQ ID NO: 1202812
guuucccacuauauucagc

SEQ ID NO: 1202814 - RNA, 19 nt, Artificial Sequence
  Description of Artificial Sequence: Synthetic oligonucleotide
  Sense strand starting at position 1069 of SEQ ID NO: 917027
ugaccuaucuguccaggga

SEQ ID NO: 1202815 - RNA, 19 nt, Artificial Sequence
  Description of Artificial Sequence: Synthetic oligonucleotide
  Antisense strand to SEQ ID NO: 1202814
ucccuggacagauagguca

SEQ ID NO: 1202816 - RNA, 19 nt, Artificial Sequence
  Description of Artificial Sequence: Synthetic oligonucleotide
  Sense strand starting at position 1072 of SEQ ID NO: 917027
ccuaucuguccagggaaca

SEQ ID NO: 1202817 - RNA, 19 nt, Artificial Sequence
  Description of Artificial Sequence: Synthetic oligonucleotide
  Antisense strand to SEQ ID NO: 1202816
uguucccuggacagauagg

SEQ ID NO: 1202818 - RNA, 19 nt, Artificial Sequence
  Description of Artificial Sequence: Synthetic oligonucleotide
  Sense strand starting at position 1073 of SEQ ID NO: 917027
cuaucuguccagggaacaa

SEQ ID NO: 1202819 - RNA, 19 nt, Artificial Sequence
  Description of Artificial Sequence: Synthetic oligonucleotide
  Antisense strand to SEQ ID NO: 1202818
uuguucccuggacagauag

SEQ ID NO: 1202820 - RNA, 19 nt, Artificial Sequence
  Description of Artificial Sequence: Synthetic oligonucleotide
  Sense strand starting at position 1329 of SEQ ID NO: 917027
ucacaauacuugccacgaa

SEQ ID NO: 1202821 - RNA, 19 nt, Artificial Sequence
  Description of Artificial Sequence: Synthetic oligonucleotide
  Antisense strand to SEQ ID NO: 1202820
uucguggcaaguauuguga

SEQ ID NO: 1202822 - RNA, 19 nt, Artificial Sequence
  Description of Artificial Sequence: Synthetic oligonucleotide
  Sense strand starting at position 1477 of SEQ ID NO: 917027
gcacauauggcuggugaaa

SEQ ID NO: 1202823 - RNA, 19 nt, Artificial Sequence
  Description of Artificial Sequence: Synthetic oligonucleotide
  Antisense strand to SEQ ID NO: 1202822
uuucaccagccauaugugc

SEQ ID NO: 1202824 - RNA, 19 nt, Artificial Sequence
  Description of Artificial Sequence: Synthetic oligonucleotide
  Sense strand starting at position 1593 of SEQ ID NO: 917027
acagccauguugucacaaa

SEQ ID NO: 1202825 - RNA, 19 nt, Artificial Sequence
  Description of Artificial Sequence: Synthetic oligonucleotide
  Antisense strand to SEQ ID NO: 1202824
uuugugacaacauggcugu

SEQ ID NO: 1202826 - RNA, 19 nt, Artificial Sequence
  Description of Artificial Sequence: Synthetic oligonucleotide
  Sense strand starting at position 1709 of SEQ ID NO: 917027
agaggcagcuacucgaauu

SEQ ID NO: 1202827 - RNA, 19 nt, Artificial Sequence
  Description of Artificial Sequence: Synthetic oligonucleotide
  Antisense strand to SEQ ID NO: 1202826
aauucgaguagcugccucu

SEQ ID NO: 1202828 - RNA, 19 nt, Artificial Sequence
  Description of Artificial Sequence: Synthetic oligonucleotide
  Sense strand starting at position 1721 of SEQ ID NO: 917027
ucgaauucaggguggacaa

SEQ ID NO: 1202829 - RNA, 19 nt, Artificial Sequence
  Description of Artificial Sequence: Synthetic oligonucleotide
  Antisense strand to SEQ ID NO: 1202828
uuguccacccugaauucga

SEQ ID NO: 1202830 - RNA, 19 nt, Artificial Sequence
  Description of Artificial Sequence: Synthetic oligonucleotide
  Sense strand starting at position 1722 of SEQ ID NO: 917027
cgaauucaggguggacaaa

SEQ ID NO: 1202831 - RNA, 19 nt, Artificial Sequence
  Description of Artificial Sequence: Synthetic oligonucleotide
  Antisense strand to SEQ ID NO: 1202830
uuuguccacccugaauucg

SEQ ID NO: 1202832 - RNA, 19 nt, Artificial Sequence
  Description of Artificial Sequence: Synthetic oligonucleotide
  Sense strand starting at position 2640 of SEQ ID NO: 917027
ggacaagccugucugauaa

SEQ ID NO: 1202833 - RNA, 19 nt, Artificial Sequence
  Description of Artificial Sequence: Synthetic oligonucleotide
  Antisense strand to SEQ ID NO: 1202832
uuaucagacaggcuugucc

SEQ ID NO: 1202834 - RNA, 19 nt, Artificial Sequence
  Description of Artificial Sequence: Synthetic oligonucleotide
  Sense strand starting at position 2767 of SEQ ID NO: 917027
aggucucucuaaucugaag

SEQ ID NO: 1202835 - RNA, 19 nt, Artificial Sequence
  Description of Artificial Sequence: Synthetic oligonucleotide
  Antisense strand to SEQ ID NO: 1202834
cuucagauuagagagaccu

SEQ ID NO: 1202836 - RNA, 19 nt, Artificial Sequence
  Description of Artificial Sequence: Synthetic oligonucleotide
  Sense strand starting at position 2918 of SEQ ID NO: 917027
gugcuuauccaaccguguu

SEQ ID NO: 1202837 - RNA, 19 nt, Artificial Sequence
  Description of Artificial Sequence: Synthetic oligonucleotide
  Antisense strand to SEQ ID NO: 1202836
aacacgguuggauaagcac

SEQ ID NO: 1202838 - RNA, 19 nt, Artificial Sequence
  Description of Artificial Sequence: Synthetic oligonucleotide
  Sense strand starting at position 3115 of SEQ ID NO: 917027
ccaauagucccgugagaug

SEQ ID NO: 1202839 - RNA, 19 nt, Artificial Sequence
  Description of Artificial Sequence: Synthetic oligonucleotide
  Antisense strand to SEQ ID NO: 1202838
caucucacgggacuauugg

SEQ ID NO: 1202840 - RNA, 19 nt, Artificial Sequence
  Description of Artificial Sequence: Synthetic oligonucleotide
  Sense strand starting at position 3239 of SEQ ID NO: 917027
aggagaaccuggagugaug

SEQ ID NO: 1202841 - RNA, 19 nt, Artificial Sequence
  Description of Artificial Sequence: Synthetic oligonucleotide
  Antisense strand to SEQ ID NO: 1202840
caucacuccagguucuccu

SEQ ID NO: 1202842 - RNA, 19 nt, Artificial Sequence
  Description of Artificial Sequence: Synthetic oligonucleotide
  Sense strand starting at position 3246 of SEQ ID NO: 917027
ccuggagugaugugacuga

SEQ ID NO: 1202843 - RNA, 19 nt, Artificial Sequence
  Description of Artificial Sequence: Synthetic oligonucleotide
  Antisense strand to SEQ ID NO: 1202842
ucagucacaucacuccagg

SEQ ID NO: 1202844 - RNA, 19 nt, Artificial Sequence
  Description of Artificial Sequence: Synthetic oligonucleotide
  Sense strand starting at position 3250 of SEQ ID NO: 917027
gagugaugugacugaguuu

SEQ ID NO: 1202845 - RNA, 19 nt, Artificial Sequence
  Description of Artificial Sequence: Synthetic oligonucleotide
  Antisense strand to SEQ ID NO: 1202844
aaacucagucacaucacuc

SEQ ID NO: 1202846 - RNA, 19 nt, Artificial Sequence
  Description of Artificial Sequence: Synthetic oligonucleotide
  Sense strand starting at position 3251 of SEQ ID NO: 917027
agugaugugacugaguuua

SEQ ID NO: 1202847 - RNA, 19 nt, Artificial Sequence
  Description of Artificial Sequence: Synthetic oligonucleotide
  Antisense strand to SEQ ID NO: 1202846
uaaacucagucacaucacu

SEQ ID NO: 1202848 - RNA, 19 nt, Artificial Sequence
  Description of Artificial Sequence: Synthetic oligonucleotide
  Sense strand starting at position 3253 of SEQ ID NO: 917027
ugaugugacugaguuuagu

SEQ ID NO: 1202849 - RNA, 19 nt, Artificial Sequence
  Description of Artificial Sequence: Synthetic oligonucleotide
  Antisense strand to SEQ ID NO: 1202848
acuaaacucagucacauca

SEQ ID NO: 1202850 - RNA, 19 nt, Artificial Sequence
  Description of Artificial Sequence: Synthetic oligonucleotide
  Sense strand starting at position 3332 of SEQ ID NO: 917027
ugcaauuggaagggugauu

SEQ ID NO: 1202851 - RNA, 19 nt, Artificial Sequence
  Description of Artificial Sequence: Synthetic oligonucleotide
  Antisense strand to SEQ ID NO: 1202850
aaucacccuuccaauugca

SEQ ID NO: 1202852 - RNA, 19 nt, Artificial Sequence
  Description of Artificial Sequence: Synthetic oligonucleotide
  Sense strand starting at position 3371 of SEQ ID NO: 917027
ugaggcaagggaugucaau

SEQ ID NO: 1202853 - RNA, 19 nt, Artificial Sequence
  Description of Artificial Sequence: Synthetic oligonucleotide
  Antisense strand to SEQ ID NO: 1202852
auugacaucccuugccuca

SEQ ID NO: 1202854 - RNA, 19 nt, Artificial Sequence
  Description of Artificial Sequence: Synthetic oligonucleotide
  Sense strand starting at position 3407 of SEQ ID NO: 917027
agaaguugggccgacacaa

SEQ ID NO: 1202855 - RNA, 19 nt, Artificial Sequence
  Description of Artificial Sequence: Synthetic oligonucleotide
  Antisense strand to SEQ ID NO: 1202854
uugugucggcccaacuucu

SEQ ID NO: 1202856 - RNA, 19 nt, Artificial Sequence
  Description of Artificial Sequence: Synthetic oligonucleotide
  Sense strand starting at position 3510 of SEQ ID NO: 917027
aacggaaacuaucaggaga

SEQ ID NO: 1202857 - RNA, 19 nt, Artificial Sequence
  Description of Artificial Sequence: Synthetic oligonucleotide
  Antisense strand to SEQ ID NO: 1202856
ucuccugauaguuuccguu

SEQ ID NO: 1202858 - RNA, 19 nt, Artificial Sequence
  Description of Artificial Sequence: Synthetic oligonucleotide
  Sense strand starting at position 3647 of SEQ ID NO: 917027
gguuuagauuuagaaagaa

SEQ ID NO: 1202859 - RNA, 19 nt, Artificial Sequence
  Description of Artificial Sequence: Synthetic oligonucleotide
  Antisense strand to SEQ ID NO: 1202858
uucuuucuaaaucuaaacc

SEQ ID NO: 1202860 - RNA, 19 nt, Artificial Sequence
  Description of Artificial Sequence: Synthetic oligonucleotide
  Sense strand starting at position 3663 of SEQ ID NO: 917027
gaaggagaucucugggcua

SEQ ID NO: 1202861 - RNA, 19 nt, Artificial Sequence
  Description of Artificial Sequence: Synthetic oligonucleotide
  Antisense strand to SEQ ID NO: 1202860
uagcccagagaucuccuuc

SEQ ID NO: 1202862 - RNA, 19 nt, Artificial Sequence
  Description of Artificial Sequence: Synthetic oligonucleotide
  Sense strand starting at position 3665 of SEQ ID NO: 917027
aggagaucucugggcuagu

SEQ ID NO: 1202863 - RNA, 19 nt, Artificial Sequence
  Description of Artificial Sequence: Synthetic oligonucleotide
  Antisense strand to SEQ ID NO: 1202862
acuagcccagagaucuccu

SEQ ID NO: 1202864 - RNA, 19 nt, Artificial Sequence
  Description of Artificial Sequence: Synthetic oligonucleotide
  Sense strand starting at position 3666 of SEQ ID NO: 917027
ggagaucucugggcuaguu

SEQ ID NO: 1202865 - RNA, 19 nt, Artificial Sequence
  Description of Artificial Sequence: Synthetic oligonucleotide
  Antisense strand to SEQ ID NO: 1202864
aacuagcccagagaucucc

SEQ ID NO: 1202866 - RNA, 19 nt, Artificial Sequence
  Description of Artificial Sequence: Synthetic oligonucleotide
  Sense strand starting at position 3753 of SEQ ID NO: 917027
cucggauccaauugguuga

SEQ ID NO: 1202867 - RNA, 19 nt, Artificial Sequence
  Description of Artificial Sequence: Synthetic oligonucleotide
  Antisense strand to SEQ ID NO: 1202866
ucaaccaauuggauccgag

SEQ ID NO: 1202868 - RNA, 19 nt, Artificial Sequence
  Description of Artificial Sequence: Synthetic oligonucleotide
  Sense strand starting at position 89 of SEQ ID NO: 917028
aaggaauauuagucuuguc

SEQ ID NO: 1202869 - RNA, 19 nt, Artificial Sequence
  Description of Artificial Sequence: Synthetic oligonucleotide
  Antisense strand to SEQ ID NO: 1202868
gacaagacuaauauuccuu

SEQ ID NO: 1202870 - RNA, 19 nt, Artificial Sequence
  Description of Artificial Sequence: Synthetic oligonucleotide
  Sense strand starting at position 181 of SEQ ID NO: 917028
ggaaauaugcauuguuaag

SEQ ID NO: 1202871 - RNA, 19 nt, Artificial Sequence
  Description of Artificial Sequence: Synthetic oligonucleotide
  Antisense strand to SEQ ID NO: 1202870
cuuaacaaugcauauuucc

SEQ ID NO: 1202872 - RNA, 19 nt, Artificial Sequence
  Description of Artificial Sequence: Synthetic oligonucleotide
  Sense strand starting at position 480 of SEQ ID NO: 917028
gcgaaauuaugacuaauug

SEQ ID NO: 1202873 - RNA, 19 nt, Artificial Sequence
  Description of Artificial Sequence: Synthetic oligonucleotide
  Antisense strand to SEQ ID NO: 1202872
caauuagucauaauuucgc

SEQ ID NO: 1202874 - RNA, 19 nt, Artificial Sequence
  Description of Artificial Sequence: Synthetic oligonucleotide
  Sense strand starting at position 606 of SEQ ID NO: 917028
cugucaauauuugacaaag

SEQ ID NO: 1202875 - RNA, 19 nt, Artificial Sequence
  Description of Artificial Sequence: Synthetic oligonucleotide
  Antisense strand to SEQ ID NO: 1202874
cuuugucaaauauugacag

SEQ ID NO: 1202876 - RNA, 19 nt, Artificial Sequence
  Description of Artificial Sequence: Synthetic oligonucleotide
  Sense strand starting at position 620 of SEQ ID NO: 917028
caaaguaagcuuugagaag

SEQ ID NO: 1202877 - RNA, 19 nt, Artificial Sequence
  Description of Artificial Sequence: Synthetic oligonucleotide
  Antisense strand to SEQ ID NO: 1202876
cuucucaaagcuuacuuug

SEQ ID NO: 1202878 - RNA, 19 nt, Artificial Sequence
  Description of Artificial Sequence: Synthetic oligonucleotide
  Sense strand starting at position 730 of SEQ ID NO: 917028
uuuagaagucuggauaguu

SEQ ID NO: 1202879 - RNA, 19 nt, Artificial Sequence
  Description of Artificial Sequence: Synthetic oligonucleotide
  Antisense strand to SEQ ID NO: 1202878
aacuauccagacuucuaaa

SEQ ID NO: 1202880 - RNA, 19 nt, Artificial Sequence
  Description of Artificial Sequence: Synthetic oligonucleotide
  Sense strand starting at position 818 of SEQ ID NO: 917028
aaaugaacaguuugagguu

SEQ ID NO: 1202881 - RNA, 19 nt, Artificial Sequence
  Description of Artificial Sequence: Synthetic oligonucleotide
  Antisense strand to SEQ ID NO: 1202880
aaccucaaacuguucauuu

SEQ ID NO: 1202882 - RNA, 19 nt, Artificial Sequence
  Description of Artificial Sequence: Synthetic oligonucleotide
  Sense strand starting at position 913 of SEQ ID NO: 917028
ggaggcuacagugagcaau

SEQ ID NO: 1202883 - RNA, 19 nt, Artificial Sequence
  Description of Artificial Sequence: Synthetic oligonucleotide
  Antisense strand to SEQ ID NO: 1202882
auugcucacuguagccucc

SEQ ID NO: 1202884 - RNA, 19 nt, Artificial Sequence
  Description of Artificial Sequence: Synthetic oligonucleotide
  Sense strand starting at position 1066 of SEQ ID NO: 917028
gagcauggacuuugauaau

SEQ ID NO: 1202885 - RNA, 19 nt, Artificial Sequence
  Description of Artificial Sequence: Synthetic oligonucleotide
  Antisense strand to SEQ ID NO: 1202884
auuaucaaaguccaugcuc

SEQ ID NO: 1202886 - RNA, 19 nt, Artificial Sequence
  Description of Artificial Sequence: Synthetic oligonucleotide
  Sense strand starting at position 1095 of SEQ ID NO: 917028
ugaauuuaauuagaccuga

SEQ ID NO: 1202887 - RNA, 19 nt, Artificial Sequence
  Description of Artificial Sequence: Synthetic oligonucleotide
  Antisense strand to SEQ ID NO: 1202886
ucaggucuaauuaaauuca

SEQ ID NO: 1202888 - RNA, 19 nt, Artificial Sequence
  Description of Artificial Sequence: Synthetic oligonucleotide
  Sense strand starting at position 1239 of SEQ ID NO: 917028
aguuuauuguuaccaggaa

SEQ ID NO: 1202889 - RNA, 19 nt, Artificial Sequence
  Description of Artificial Sequence: Synthetic oligonucleotide
  Antisense strand to SEQ ID NO: 1202888
uuccugguaacaauaaacu

SEQ ID NO: 1202890 - RNA, 19 nt, Artificial Sequence
  Description of Artificial Sequence: Synthetic oligonucleotide
  Sense strand starting at position 1243 of SEQ ID NO: 917028
uauuguuaccaggaaaugu

SEQ ID NO: 1202891 - RNA, 19 nt, Artificial Sequence
  Description of Artificial Sequence: Synthetic oligonucleotide
  Antisense strand to SEQ ID NO: 1202890
acauuuccugguaacaaua

SEQ ID NO: 1202892 - RNA, 19 nt, Artificial Sequence
  Description of Artificial Sequence: Synthetic oligonucleotide
  Sense strand starting at position 1516 of SEQ ID NO: 917028
auugaaauacugugugaca

SEQ ID NO: 1202893 - RNA, 19 nt, Artificial Sequence
  Description of Artificial Sequence: Synthetic oligonucleotide
  Antisense strand to SEQ ID NO: 1202892
ugucacacaguauuucaau

SEQ ID NO: 1202894 - RNA, 19 nt, Artificial Sequence
  Description of Artificial Sequence: Synthetic oligonucleotide
  Sense strand starting at position 1517 of SEQ ID NO: 917028
uugaaauacugugugacaa

SEQ ID NO: 1202895 - RNA, 19 nt, Artificial Sequence
  Description of Artificial Sequence: Synthetic oligonucleotide
  Antisense strand to SEQ ID NO: 1202894
uugucacacaguauuucaa

SEQ ID NO: 1202896 - RNA, 19 nt, Artificial Sequence
  Description of Artificial Sequence: Synthetic oligonucleotide
  Sense strand starting at position 1518 of SEQ ID NO: 917028
ugaaauacugugugacaau

SEQ ID NO: 1202897 - RNA, 19 nt, Artificial Sequence
  Description of Artificial Sequence: Synthetic oligonucleotide
  Antisense strand to SEQ ID NO: 1202896
auugucacacaguauuuca

SEQ ID NO: 1202898 - RNA, 19 nt, Artificial Sequence
  Description of Artificial Sequence: Synthetic oligonucleotide
  Sense strand starting at position 1608 of SEQ ID NO: 917028
uuugaugggcauugauuga

SEQ ID NO: 1202899 - RNA, 19 nt, Artificial Sequence
  Description of Artificial Sequence: Synthetic oligonucleotide
  Antisense strand to SEQ ID NO: 1202898
ucaaucaaugcccaucaaa

SEQ ID NO: 1202900 - RNA, 19 nt, Artificial Sequence
  Description of Artificial Sequence: Synthetic oligonucleotide
  Sense strand starting at position 1612 of SEQ ID NO: 917028
augggcauugauugaugau

SEQ ID NO: 1202901 - RNA, 19 nt, Artificial Sequence
  Description of Artificial Sequence: Synthetic oligonucleotide
  Antisense strand to SEQ ID NO: 1202900
aucaucaaucaaugcccau

SEQ ID NO: 1202902 - RNA, 19 nt, Artificial Sequence
  Description of Artificial Sequence: Synthetic oligonucleotide
  Sense strand starting at position 1613 of SEQ ID NO: 917028
ugggcauugauugaugauu

SEQ ID NO: 1202903 - RNA, 19 nt, Artificial Sequence
  Description of Artificial Sequence: Synthetic oligonucleotide
  Antisense strand to SEQ ID NO: 1202902
aaucaucaaucaaugccca

SEQ ID NO: 1202904 - RNA, 19 nt, Artificial Sequence
  Description of Artificial Sequence: Synthetic oligonucleotide
  Sense strand starting at position 1745 of SEQ ID NO: 917028
ggauuaaggguuuguggaa

SEQ ID NO: 1202905 - RNA, 19 nt, Artificial Sequence
  Description of Artificial Sequence: Synthetic oligonucleotide
  Antisense strand to SEQ ID NO: 1202904
uuccacaaacccuuaaucc

SEQ ID NO: 1202906 - RNA, 19 nt, Artificial Sequence
  Description of Artificial Sequence: Synthetic oligonucleotide
  Sense strand starting at position 1746 of SEQ ID NO: 917028
gauuaaggguuuguggaau

SEQ ID NO: 1202907 - RNA, 19 nt, Artificial Sequence
  Description of Artificial Sequence: Synthetic oligonucleotide
  Antisense strand to SEQ ID NO: 1202906
auuccacaaacccuuaauc

SEQ ID NO: 1202908 - RNA, 19 nt, Artificial Sequence
  Description of Artificial Sequence: Synthetic oligonucleotide
  Sense strand starting at position 1752 of SEQ ID NO: 917028
ggguuuguggaaugaacac

SEQ ID NO: 1202909 - RNA, 19 nt, Artificial Sequence
  Description of Artificial Sequence: Synthetic oligonucleotide
  Antisense strand to SEQ ID NO: 1202908
guguucauuccacaaaccc

SEQ ID NO: 1202910 - RNA, 19 nt, Artificial Sequence
  Description of Artificial Sequence: Synthetic oligonucleotide
  Sense strand starting at position 1806 of SEQ ID NO: 917028
auauauguagcucagaaac

SEQ ID NO: 1202911 - RNA, 19 nt, Artificial Sequence
  Description of Artificial Sequence: Synthetic oligonucleotide
  Antisense strand to SEQ ID NO: 1202910
guuucugagcuacauauau

SEQ ID NO: 1202912 - RNA, 19 nt, Artificial Sequence
  Description of Artificial Sequence: Synthetic oligonucleotide
  Sense strand starting at position 1847 of SEQ ID NO: 917028
gauuacaucuacuugggua

SEQ ID NO: 1202913 - RNA, 19 nt, Artificial Sequence
  Description of Artificial Sequence: Synthetic oligonucleotide
  Antisense strand to SEQ ID NO: 1202912
uacccaaguagauguaauc

SEQ ID NO: 1202914 - RNA, 19 nt, Artificial Sequence
  Description of Artificial Sequence: Synthetic oligonucleotide
  Sense strand starting at position 1849 of SEQ ID NO: 917028
uuacaucuacuuggguaau

SEQ ID NO: 1202915 - RNA, 19 nt, Artificial Sequence
  Description of Artificial Sequence: Synthetic oligonucleotide
  Antisense strand to SEQ ID NO: 1202914
auuacccaaguagauguaa

SEQ ID NO: 1202916 - RNA, 19 nt, Artificial Sequence
  Description of Artificial Sequence: Synthetic oligonucleotide
  Sense strand starting at position 1851 of SEQ ID NO: 917028
acaucuacuuggguaauua

SEQ ID NO: 1202917 - RNA, 19 nt, Artificial Sequence
  Description of Artificial Sequence: Synthetic oligonucleotide
  Antisense strand to SEQ ID NO: 1202916
uaauuacccaaguagaugu

SEQ ID NO: 1202918 - RNA, 19 nt, Artificial Sequence
  Description of Artificial Sequence: Synthetic oligonucleotide
  Sense strand starting at position 1855 of SEQ ID NO: 917028
cuacuuggguaauuauaac

SEQ ID NO: 1202919 - RNA, 19 nt, Artificial Sequence
  Description of Artificial Sequence: Synthetic oligonucleotide
  Antisense strand to SEQ ID NO: 1202918
guuauaauuacccaaguag

SEQ ID NO: 1202920 - RNA, 19 nt, Artificial Sequence
  Description of Artificial Sequence: Synthetic oligonucleotide
  Sense strand starting at position 1948 of SEQ ID NO: 917028
ucauccagucccugaaaug

SEQ ID NO: 1202921 - RNA, 19 nt, Artificial Sequence
  Description of Artificial Sequence: Synthetic oligonucleotide
  Antisense strand to SEQ ID NO: 1202920
cauuucagggacuggauga

SEQ ID NO: 1202922 - RNA, 19 nt, Artificial Sequence
  Description of Artificial Sequence: Synthetic oligonucleotide
  Sense strand starting at position 2139 of SEQ ID NO: 917028
gggucuuaagacugggauu

SEQ ID NO: 1202923 - RNA, 19 nt, Artificial Sequence
  Description of Artificial Sequence: Synthetic oligonucleotide
  Antisense strand to SEQ ID NO: 1202922
aaucccagucuuaagaccc

SEQ ID NO: 1202924 - RNA, 19 nt, Artificial Sequence
  Description of Artificial Sequence: Synthetic oligonucleotide
  Sense strand starting at position 2140 of SEQ ID NO: 917028
ggucuuaagacugggauuc

SEQ ID NO: 1202925 - RNA, 19 nt, Artificial Sequence
  Description of Artificial Sequence: Synthetic oligonucleotide
  Antisense strand to SEQ ID NO: 1202924
gaaucccagucuuaagacc

SEQ ID NO: 1202926 - RNA, 19 nt, Artificial Sequence
  Description of Artificial Sequence: Synthetic oligonucleotide
  Sense strand starting at position 2340 of SEQ ID NO: 917028
uggcuauguagggaucauu

SEQ ID NO: 1202927 - RNA, 19 nt, Artificial Sequence
  Description of Artificial Sequence: Synthetic oligonucleotide
  Antisense strand to SEQ ID NO: 1202926
aaugaucccuacauagcca

SEQ ID NO: 1202928 - RNA, 19 nt, Artificial Sequence
  Description of Artificial Sequence: Synthetic oligonucleotide
  Sense strand starting at position 2343 of SEQ ID NO: 917028
cuauguagggaucauucga

SEQ ID NO: 1202929 - RNA, 19 nt, Artificial Sequence
  Description of Artificial Sequence: Synthetic oligonucleotide
  Antisense strand to SEQ ID NO: 1202928
ucgaaugaucccuacauag

SEQ ID NO: 1202930 - RNA, 19 nt, Artificial Sequence
  Description of Artificial Sequence: Synthetic oligonucleotide
  Sense strand starting at position 2583 of SEQ ID NO: 917028
uuuagugaacuccaaguga

SEQ ID NO: 1202931 - RNA, 19 nt, Artificial Sequence
  Description of Artificial Sequence: Synthetic oligonucleotide
  Antisense strand to SEQ ID NO: 1202930
ucacuuggaguucacuaaa

SEQ ID NO: 1202932 - RNA, 19 nt, Artificial Sequence
  Description of Artificial Sequence: Synthetic oligonucleotide
  Sense strand starting at position 2613 of SEQ ID NO: 917028
cuuagagcacuuuaaugua

SEQ ID NO: 1202933 - RNA, 19 nt, Artificial Sequence
  Description of Artificial Sequence: Synthetic oligonucleotide
  Antisense strand to SEQ ID NO: 1202932
uacauuaaagugcucuaag

SEQ ID NO: 1202934 - RNA, 19 nt, Artificial Sequence
  Description of Artificial Sequence: Synthetic oligonucleotide
  Sense strand starting at position 2717 of SEQ ID NO: 917028
agcuaauccuaacugagau

SEQ ID NO: 1202935 - RNA, 19 nt, Artificial Sequence
  Description of Artificial Sequence: Synthetic oligonucleotide
  Antisense strand to SEQ ID NO: 1202934
aucucaguuaggauuagcu

SEQ ID NO: 1202936 - RNA, 19 nt, Artificial Sequence
  Description of Artificial Sequence: Synthetic oligonucleotide
  Sense strand starting at position 3153 of SEQ ID NO: 917028
guuccauugcaggauaaua

SEQ ID NO: 1202937 - RNA, 19 nt, Artificial Sequence
  Description of Artificial Sequence: Synthetic oligonucleotide
  Antisense strand to SEQ ID NO: 1202936
uauuauccugcaauggaac

SEQ ID NO: 1202938 - RNA, 19 nt, Artificial Sequence
  Description of Artificial Sequence: Synthetic oligonucleotide
  Sense strand starting at position 3155 of SEQ ID NO: 917028
uccauugcaggauaauauu

SEQ ID NO: 1202939 - RNA, 19 nt, Artificial Sequence
  Description of Artificial Sequence: Synthetic oligonucleotide
  Antisense strand to SEQ ID NO: 1202938
aauauuauccugcaaugga

SEQ ID NO: 1202940 - RNA, 19 nt, Artificial Sequence
  Description of Artificial Sequence: Synthetic oligonucleotide
  Sense strand starting at position 3277 of SEQ ID NO: 917028
guggaaguuauggguagaa

SEQ ID NO: 1202941 - RNA, 19 nt, Artificial Sequence
  Description of Artificial Sequence: Synthetic oligonucleotide
  Antisense strand to SEQ ID NO: 1202940
uucuacccauaacuuccac

SEQ ID NO: 1202942 - RNA, 19 nt, Artificial Sequence
  Description of Artificial Sequence: Synthetic oligonucleotide
  Sense strand starting at position 3303 of SEQ ID NO: 917028
ugagaugauugaguagagu

SEQ ID NO: 1202943 - RNA, 19 nt, Artificial Sequence
  Description of Artificial Sequence: Synthetic oligonucleotide
  Antisense strand to SEQ ID NO: 1202942
acucuacucaaucaucuca

SEQ ID NO: 1202944 - RNA, 19 nt, Artificial Sequence
  Description of Artificial Sequence: Synthetic oligonucleotide
  Sense strand starting at position 3799 of SEQ ID NO: 917028
auauguuggauugguauga

SEQ ID NO: 1202945 - RNA, 19 nt, Artificial Sequence
  Description of Artificial Sequence: Synthetic oligonucleotide
  Antisense strand to SEQ ID NO: 1202944
ucauaccaauccaacauau

SEQ ID NO: 1202946 - RNA, 19 nt, Artificial Sequence
  Description of Artificial Sequence: Synthetic oligonucleotide
  Sense strand starting at position 3803 of SEQ ID NO: 917028
guuggauugguaugacaaa

SEQ ID NO: 1202947 - RNA, 19 nt, Artificial Sequence
  Description of Artificial Sequence: Synthetic oligonucleotide
  Antisense strand to SEQ ID NO: 1202946
uuugucauaccaauccaac

SEQ ID NO: 1202948 - RNA, 19 nt, Artificial Sequence
  Description of Artificial Sequence: Synthetic oligonucleotide
  Sense strand starting at position 18 of SEQ ID NO: 917029
aauguaaaguugcuaguga

SEQ ID NO: 1202949 - RNA, 19 nt, Artificial Sequence
  Description of Artificial Sequence: Synthetic oligonucleotide
  Antisense strand to SEQ ID NO: 1202948
ucacuagcaacuuuacauu

SEQ ID NO: 1202950 - RNA, 19 nt, Artificial Sequence
  Description of Artificial Sequence: Synthetic oligonucleotide
  Sense strand starting at position 36 of SEQ ID NO: 917029
acuaauaccuaugccgaau

SEQ ID NO: 1202951 - RNA, 19 nt, Artificial Sequence
  Description of Artificial Sequence: Synthetic oligonucleotide
  Antisense strand to SEQ ID NO: 1202950
auucggcauagguauuagu

SEQ ID NO: 1202952 - RNA, 19 nt, Artificial Sequence
  Description of Artificial Sequence: Synthetic oligonucleotide
  Sense strand starting at position 47 of SEQ ID NO: 917029
ugccgaaugucccuagaaa

SEQ ID NO: 1202953 - RNA, 19 nt, Artificial Sequence
  Description of Artificial Sequence: Synthetic oligonucleotide
  Antisense strand to SEQ ID NO: 1202952
uuucuagggacauucggca

SEQ ID NO: 1202954 - RNA, 19 nt, Artificial Sequence
  Description of Artificial Sequence: Synthetic oligonucleotide
  Sense strand starting at position 48 of SEQ ID NO: 917029
gccgaaugucccuagaaac

SEQ ID NO: 1202955 - RNA, 19 nt, Artificial Sequence
  Description of Artificial Sequence: Synthetic oligonucleotide
  Antisense strand to SEQ ID NO: 1202954
guuucuagggacauucggc

SEQ ID NO: 1202956 - RNA, 19 nt, Artificial Sequence
  Description of Artificial Sequence: Synthetic oligonucleotide
  Sense strand starting at position 74 of SEQ ID NO: 917029
uuaucugaccaguguccua

SEQ ID NO: 1202957 - RNA, 19 nt, Artificial Sequence
  Description of Artificial Sequence: Synthetic oligonucleotide
  Antisense strand to SEQ ID NO: 1202956
uaggacacuggucagauaa

SEQ ID NO: 1202958 - RNA, 19 nt, Artificial Sequence
  Description of Artificial Sequence: Synthetic oligonucleotide
  Sense strand starting at position 81 of SEQ ID NO: 917029
accaguguccuacaaacua

SEQ ID NO: 1202959 - RNA, 19 nt, Artificial Sequence
  Description of Artificial Sequence: Synthetic oligonucleotide
  Antisense strand to SEQ ID NO: 1202958
uaguuuguaggacacuggu

SEQ ID NO: 1202960 - RNA, 19 nt, Artificial Sequence
  Description of Artificial Sequence: Synthetic oligonucleotide
  Sense strand starting at position 403 of SEQ ID NO: 917029
augacaucugucugaaaga

SEQ ID NO: 1202961 - RNA, 19 nt, Artificial Sequence
  Description of Artificial Sequence: Synthetic oligonucleotide
  Antisense strand to SEQ ID NO: 1202960
ucuuucagacagaugucau

SEQ ID NO: 1202962 - RNA, 19 nt, Artificial Sequence
  Description of Artificial Sequence: Synthetic oligonucleotide
  Sense strand starting at position 412 of SEQ ID NO: 917029
gucugaaagauauggguag

SEQ ID NO: 1202963 - RNA, 19 nt, Artificial Sequence
  Description of Artificial Sequence: Synthetic oligonucleotide
  Antisense strand to SEQ ID NO: 1202962
cuacccauaucuuucagac

SEQ ID NO: 1202964 - RNA, 19 nt, Artificial Sequence
  Description of Artificial Sequence: Synthetic oligonucleotide
  Sense strand starting at position 516 of SEQ ID NO: 917029
aacggugugcaacaauuau

SEQ ID NO: 1202965 - RNA, 19 nt, Artificial Sequence
  Description of Artificial Sequence: Synthetic oligonucleotide
  Antisense strand to SEQ ID NO: 1202964
auaauuguugcacaccguu

SEQ ID NO: 1202966 - RNA, 19 nt, Artificial Sequence
  Description of Artificial Sequence: Synthetic oligonucleotide
  Sense strand starting at position 558 of SEQ ID NO: 917029
ugagguucucuagaucauc

SEQ ID NO: 1202967 - RNA, 19 nt, Artificial Sequence
  Description of Artificial Sequence: Synthetic oligonucleotide
  Antisense strand to SEQ ID NO: 1202966
gaugaucuagagaaccuca

SEQ ID NO: 1202968 - RNA, 19 nt, Artificial Sequence
  Description of Artificial Sequence: Synthetic oligonucleotide
  Sense strand starting at position 566 of SEQ ID NO: 917029
ucuagaucauccucaugga

SEQ ID NO: 1202969 - RNA, 19 nt, Artificial Sequence
  Description of Artificial Sequence: Synthetic oligonucleotide
  Antisense strand to SEQ ID NO: 1202968
uccaugaggaugaucuaga

SEQ ID NO: 1202970 - RNA, 19 nt, Artificial Sequence
  Description of Artificial Sequence: Synthetic oligonucleotide
  Sense strand starting at position 643 of SEQ ID NO: 917029
uaaggaugaucuuugggua

SEQ ID NO: 1202971 - RNA, 19 nt, Artificial Sequence
  Description of Artificial Sequence: Synthetic oligonucleotide
  Antisense strand to SEQ ID NO: 1202970
uacccaaagaucauccuua

SEQ ID NO: 1202972 - RNA, 19 nt, Artificial Sequence
  Description of Artificial Sequence: Synthetic oligonucleotide
  Sense strand starting at position 679 of SEQ ID NO: 917029
gaaggaguucgagguuaag

SEQ ID NO: 1202973 - RNA, 19 nt, Artificial Sequence
  Description of Artificial Sequence: Synthetic oligonucleotide
  Antisense strand to SEQ ID NO: 1202972
cuuaaccucgaacuccuuc

SEQ ID NO: 1202974 - RNA, 19 nt, Artificial Sequence
  Description of Artificial Sequence: Synthetic oligonucleotide
  Sense strand starting at position 714 of SEQ ID NO: 917029
gcaaguaaguacuugaaag

SEQ ID NO: 1202975 - RNA, 19 nt, Artificial Sequence
  Description of Artificial Sequence: Synthetic oligonucleotide
  Antisense strand to SEQ ID NO: 1202974
cuuucaaguacuuacuugc

SEQ ID NO: 1202976 - RNA, 19 nt, Artificial Sequence
  Description of Artificial Sequence: Synthetic oligonucleotide
  Sense strand starting at position 854 of SEQ ID NO: 917029
ccuagauuccuuuauguuu

SEQ ID NO: 1202977 - RNA, 19 nt, Artificial Sequence
  Description of Artificial Sequence: Synthetic oligonucleotide
  Antisense strand to SEQ ID NO: 1202976
aaacauaaaggaaucuagg

SEQ ID NO: 1202978 - RNA, 19 nt, Artificial Sequence
  Description of Artificial Sequence: Synthetic oligonucleotide
  Sense strand starting at position 950 of SEQ ID NO: 917029
ucuuguuucguagauuaug

SEQ ID NO: 1202979 - RNA, 19 nt, Artificial Sequence
  Description of Artificial Sequence: Synthetic oligonucleotide
  Antisense strand to SEQ ID NO: 1202978
cauaaucuacgaaacaaga

SEQ ID NO: 1202980 - RNA, 19 nt, Artificial Sequence
  Description of Artificial Sequence: Synthetic oligonucleotide
  Sense strand starting at position 984 of SEQ ID NO: 917029
aggagacguguccaagauc

SEQ ID NO: 1202981 - RNA, 19 nt, Artificial Sequence
  Description of Artificial Sequence: Synthetic oligonucleotide
  Antisense strand to SEQ ID NO: 1202980
gaucuuggacacgucuccu

SEQ ID NO: 1202982 - RNA, 19 nt, Artificial Sequence
  Description of Artificial Sequence: Synthetic oligonucleotide
  Sense strand starting at position 993 of SEQ ID NO: 917029
guccaagaucccugagguc

SEQ ID NO: 1202983 - RNA, 19 nt, Artificial Sequence
  Description of Artificial Sequence: Synthetic oligonucleotide
  Antisense strand to SEQ ID NO: 1202982
gaccucagggaucuuggac

SEQ ID NO: 1202984 - RNA, 19 nt, Artificial Sequence
  Description of Artificial Sequence: Synthetic oligonucleotide
  Sense strand starting at position 1356 of SEQ ID NO: 917029
auggaauagugugugaaug

SEQ ID NO: 1202985 - RNA, 19 nt, Artificial Sequence
  Description of Artificial Sequence: Synthetic oligonucleotide
  Antisense strand to SEQ ID NO: 1202984
cauucacacacuauuccau

SEQ ID NO: 1202986 - RNA, 19 nt, Artificial Sequence
  Description of Artificial Sequence: Synthetic oligonucleotide
  Sense strand starting at position 1426 of SEQ ID NO: 917029
agguuagaauggcuaggau

SEQ ID NO: 1202987 - RNA, 19 nt, Artificial Sequence
  Description of Artificial Sequence: Synthetic oligonucleotide
  Antisense strand to SEQ ID NO: 1202986
auccuagccauucuaaccu

SEQ ID NO: 1202988 - RNA, 19 nt, Artificial Sequence
  Description of Artificial Sequence: Synthetic oligonucleotide
  Sense strand starting at position 1509 of SEQ ID NO: 917029
ucacuuccaguuuggaaga

SEQ ID NO: 1202989 - RNA, 19 nt, Artificial Sequence
  Description of Artificial Sequence: Synthetic oligonucleotide
  Antisense strand to SEQ ID NO: 1202988
ucuuccaaacuggaaguga

SEQ ID NO: 1202990 - RNA, 19 nt, Artificial Sequence
  Description of Artificial Sequence: Synthetic oligonucleotide
  Sense strand starting at position 1663 of SEQ ID NO: 917029
ccggaaguuccugggaauc

SEQ ID NO: 1202991 - RNA, 19 nt, Artificial Sequence
  Description of Artificial Sequence: Synthetic oligonucleotide
  Antisense strand to SEQ ID NO: 1202990
gauucccaggaacuuccgg

SEQ ID NO: 1202992 - RNA, 19 nt, Artificial Sequence
  Description of Artificial Sequence: Synthetic oligonucleotide
  Sense strand starting at position 1673 of SEQ ID NO: 917029
cugggaaucuucccggaac

SEQ ID NO: 1202993 - RNA, 19 nt, Artificial Sequence
  Description of Artificial Sequence: Synthetic oligonucleotide
  Antisense strand to SEQ ID NO: 1202992
guuccgggaagauucccag

SEQ ID NO: 1202994 - RNA, 19 nt, Artificial Sequence
  Description of Artificial Sequence: Synthetic oligonucleotide
  Sense strand starting at position 2003 of SEQ ID NO: 917029
gcgaaaugcguggcuaauc

SEQ ID NO: 1202995 - RNA, 19 nt, Artificial Sequence
  Description of Artificial Sequence: Synthetic oligonucleotide
  Antisense strand to SEQ ID NO: 1202994
gauuagccacgcauuucgc

SEQ ID NO: 1202996 - RNA, 19 nt, Artificial Sequence
  Description of Artificial Sequence: Synthetic oligonucleotide
  Sense strand starting at position 2205 of SEQ ID NO: 917029
ggaguuaggagagggcuaa

SEQ ID NO: 1202997 - RNA, 19 nt, Artificial Sequence
  Description of Artificial Sequence: Synthetic oligonucleotide
  Antisense strand to SEQ ID NO: 1202996
uuagcccucuccuaacucc

SEQ ID NO: 1202998 - RNA, 19 nt, Artificial Sequence
  Description of Artificial Sequence: Synthetic oligonucleotide
  Sense strand starting at position 2206 of SEQ ID NO: 917029
gaguuaggagagggcuaau

SEQ ID NO: 1202999 - RNA, 19 nt, Artificial Sequence
  Description of Artificial Sequence: Synthetic oligonucleotide
  Antisense strand to SEQ ID NO: 1202998
auuagcccucuccuaacuc

SEQ ID NO: 1203000 - RNA, 19 nt, Artificial Sequence
  Description of Artificial Sequence: Synthetic oligonucleotide
  Sense strand starting at position 2218 of SEQ ID NO: 917029
ggcuaauucccagggagac

SEQ ID NO: 1203001 - RNA, 19 nt, Artificial Sequence
  Description of Artificial Sequence: Synthetic oligonucleotide
  Antisense strand to SEQ ID NO: 1203000
gucucccugggaauuagcc

SEQ ID NO: 1203002 - RNA, 19 nt, Artificial Sequence
  Description of Artificial Sequence: Synthetic oligonucleotide
  Sense strand starting at position 2391 of SEQ ID NO: 917029
uuuguuauugcgucacgcu

SEQ ID NO: 1203003 - RNA, 19 nt, Artificial Sequence
  Description of Artificial Sequence: Synthetic oligonucleotide
  Antisense strand to SEQ ID NO: 1203002
agcgugacgcaauaacaaa

SEQ ID NO: 1203004 - RNA, 19 nt, Artificial Sequence
  Description of Artificial Sequence: Synthetic oligonucleotide
  Sense strand starting at position 2500 of SEQ ID NO: 917029
cacguuuguguguccucua

SEQ ID NO: 1203005 - RNA, 19 nt, Artificial Sequence
  Description of Artificial Sequence: Synthetic oligonucleotide
  Antisense strand to SEQ ID NO: 1203004
uagaggacacacaaacgug

SEQ ID NO: 1203006 - RNA, 19 nt, Artificial Sequence
  Description of Artificial Sequence: Synthetic oligonucleotide
  Sense strand starting at position 2704 of SEQ ID NO: 917029
gaggaagagucucauuuac

SEQ ID NO: 1203007 - RNA, 19 nt, Artificial Sequence
  Description of Artificial Sequence: Synthetic oligonucleotide
  Antisense strand to SEQ ID NO: 1203006
guaaaugagacucuuccuc

SEQ ID NO: 1203008 - RNA, 19 nt, Artificial Sequence
  Description of Artificial Sequence: Synthetic oligonucleotide
  Sense strand starting at position 2790 of SEQ ID NO: 917029
uaguaagugcuuugacaaa

SEQ ID NO: 1203009 - RNA, 19 nt, Artificial Sequence
  Description of Artificial Sequence: Synthetic oligonucleotide
  Antisense strand to SEQ ID NO: 1203008
uuugucaaagcacuuacua

SEQ ID NO: 1203010 - RNA, 19 nt, Artificial Sequence
  Description of Artificial Sequence: Synthetic oligonucleotide
  Sense strand starting at position 2910 of SEQ ID NO: 917029
augauuuaaguuugugugu

SEQ ID NO: 1203011 - RNA, 19 nt, Artificial Sequence
  Description of Artificial Sequence: Synthetic oligonucleotide
  Antisense strand to SEQ ID NO: 1203010
acacacaaacuuaaaucau

SEQ ID NO: 1203012 - RNA, 19 nt, Artificial Sequence
  Description of Artificial Sequence: Synthetic oligonucleotide
  Sense strand starting at position 2911 of SEQ ID NO: 917029
ugauuuaaguuugugugua

SEQ ID NO: 1203013 - RNA, 19 nt, Artificial Sequence
  Description of Artificial Sequence: Synthetic oligonucleotide
  Antisense strand to SEQ ID NO: 1203012
uacacacaaacuuaaauca

SEQ ID NO: 1203014 - RNA, 19 nt, Artificial Sequence
  Description of Artificial Sequence: Synthetic oligonucleotide
  Sense strand starting at position 2913 of SEQ ID NO: 917029
auuuaaguuuguguguacu

SEQ ID NO: 1203015 - RNA, 19 nt, Artificial Sequence
  Description of Artificial Sequence: Synthetic oligonucleotide
  Antisense strand to SEQ ID NO: 1203014
aguacacacaaacuuaaau

SEQ ID NO: 1203016 - RNA, 19 nt, Artificial Sequence
  Description of Artificial Sequence: Synthetic oligonucleotide
  Sense strand starting at position 3060 of SEQ ID NO: 917029
uaccucuuggguuguaaga

SEQ ID NO: 1203017 - RNA, 19 nt, Artificial Sequence
  Description of Artificial Sequence: Synthetic oligonucleotide
  Antisense strand to SEQ ID NO: 1203016
ucuuacaacccaagaggua

SEQ ID NO: 1203018 - RNA, 19 nt, Artificial Sequence
  Description of Artificial Sequence: Synthetic oligonucleotide
  Sense strand starting at position 3129 of SEQ ID NO: 917029
guaaacacucaauguuagu

SEQ ID NO: 1203019 - RNA, 19 nt, Artificial Sequence
  Description of Artificial Sequence: Synthetic oligonucleotide
  Antisense strand to SEQ ID NO: 1203018
acuaacauugaguguuuac

SEQ ID NO: 1203020 - RNA, 19 nt, Artificial Sequence
  Description of Artificial Sequence: Synthetic oligonucleotide
  Sense strand starting at position 3135 of SEQ ID NO: 917029
acucaauguuaguuauuac

SEQ ID NO: 1203021 - RNA, 19 nt, Artificial Sequence
  Description of Artificial Sequence: Synthetic oligonucleotide
  Antisense strand to SEQ ID NO: 1203020
guaauaacuaacauugagu

SEQ ID NO: 1203022 - RNA, 19 nt, Artificial Sequence
  Description of Artificial Sequence: Synthetic oligonucleotide
  Sense strand starting at position 3275 of SEQ ID NO: 917029
gauguuugacagggcgaga

SEQ ID NO: 1203023 - RNA, 19 nt, Artificial Sequence
  Description of Artificial Sequence: Synthetic oligonucleotide
  Antisense strand to SEQ ID NO: 1203022
ucucgcccugucaaacauc

SEQ ID NO: 1203024 - RNA, 19 nt, Artificial Sequence
  Description of Artificial Sequence: Synthetic oligonucleotide
  Sense strand starting at position 3293 of SEQ ID NO: 917029
agagguguuugggucuuga

SEQ ID NO: 1203025 - RNA, 19 nt, Artificial Sequence
  Description of Artificial Sequence: Synthetic oligonucleotide
  Antisense strand to SEQ ID NO: 1203024
ucaagacccaaacaccucu

SEQ ID NO: 1203026 - RNA, 19 nt, Artificial Sequence
  Description of Artificial Sequence: Synthetic oligonucleotide
  Sense strand starting at position 3552 of SEQ ID NO: 917029
uggcgaacuccugaccuua

SEQ ID NO: 1203027 - RNA, 19 nt, Artificial Sequence
  Description of Artificial Sequence: Synthetic oligonucleotide
  Antisense strand to SEQ ID NO: 1203026
uaaggucaggaguucgcca

SEQ ID NO: 1203028 - RNA, 19 nt, Artificial Sequence
  Description of Artificial Sequence: Synthetic oligonucleotide
  Sense strand starting at position 159 of SEQ ID NO: 917030
gagaaagauuggccaucuu

SEQ ID NO: 1203029 - RNA, 19 nt, Artificial Sequence
  Description of Artificial Sequence: Synthetic oligonucleotide
  Antisense strand to SEQ ID NO: 1203028
aagauggccaaucuuucuc

SEQ ID NO: 1203030 - RNA, 19 nt, Artificial Sequence
  Description of Artificial Sequence: Synthetic oligonucleotide
  Sense strand starting at position 196 of SEQ ID NO: 917030
ggccaauggaguugauuac

SEQ ID NO: 1203031 - RNA, 19 nt, Artificial Sequence
  Description of Artificial Sequence: Synthetic oligonucleotide
  Antisense strand to SEQ ID NO: 1203030
guaaucaacuccauuggcc

SEQ ID NO: 1203032 - RNA, 19 nt, Artificial Sequence
  Description of Artificial Sequence: Synthetic oligonucleotide
  Sense strand starting at position 203 of SEQ ID NO: 917030
ggaguugauuaccuauccu

SEQ ID NO: 1203033 - RNA, 19 nt, Artificial Sequence
  Description of Artificial Sequence: Synthetic oligonucleotide
  Antisense strand to SEQ ID NO: 1203032
aggauagguaaucaacucc

SEQ ID NO: 1203034 - RNA, 19 nt, Artificial Sequence
  Description of Artificial Sequence: Synthetic oligonucleotide
  Sense strand starting at position 217 of SEQ ID NO: 917030
auccuaucuucuuuaguga

SEQ ID NO: 1203035 - RNA, 19 nt, Artificial Sequence
  Description of Artificial Sequence: Synthetic oligonucleotide
  Antisense strand to SEQ ID NO: 1203034
ucacuaaagaagauaggau

SEQ ID NO: 1203036 - RNA, 19 nt, Artificial Sequence
  Description of Artificial Sequence: Synthetic oligonucleotide
  Sense strand starting at position 356 of SEQ ID NO: 917030
auuuaaguaucucaaggga

SEQ ID NO: 1203037 - RNA, 19 nt, Artificial Sequence
  Description of Artificial Sequence: Synthetic oligonucleotide
  Antisense strand to SEQ ID NO: 1203036
ucccuugagauacuuaaau

SEQ ID NO: 1203038 - RNA, 19 nt, Artificial Sequence
  Description of Artificial Sequence: Synthetic oligonucleotide
  Sense strand starting at position 407 of SEQ ID NO: 917030
auauauguagcaugagcua

SEQ ID NO: 1203039 - RNA, 19 nt, Artificial Sequence
  Description of Artificial Sequence: Synthetic oligonucleotide
  Antisense strand to SEQ ID NO: 1203038
uagcucaugcuacauauau

SEQ ID NO: 1203040 - RNA, 19 nt, Artificial Sequence
  Description of Artificial Sequence: Synthetic oligonucleotide
  Sense strand starting at position 672 of SEQ ID NO: 917030
auagguaugagaugucugu

SEQ ID NO: 1203041 - RNA, 19 nt, Artificial Sequence
  Description of Artificial Sequence: Synthetic oligonucleotide
  Antisense strand to SEQ ID NO: 1203040
acagacaucucauaccuau

SEQ ID NO: 1203042 - RNA, 19 nt, Artificial Sequence
  Description of Artificial Sequence: Synthetic oligonucleotide
  Sense strand starting at position 679 of SEQ ID NO: 917030
ugagaugucuguuuacuaa

SEQ ID NO: 1203043 - RNA, 19 nt, Artificial Sequence
  Description of Artificial Sequence: Synthetic oligonucleotide
  Antisense strand to SEQ ID NO: 1203042
uuaguaaacagacaucuca

SEQ ID NO: 1203044 - RNA, 19 nt, Artificial Sequence
  Description of Artificial Sequence: Synthetic oligonucleotide
  Sense strand starting at position 682 of SEQ ID NO: 917030
gaugucuguuuacuaaaga

SEQ ID NO: 1203045 - RNA, 19 nt, Artificial Sequence
  Description of Artificial Sequence: Synthetic oligonucleotide
  Antisense strand to SEQ ID NO: 1203044
ucuuuaguaaacagacauc

SEQ ID NO: 1203046 - RNA, 19 nt, Artificial Sequence
  Description of Artificial Sequence: Synthetic oligonucleotide
  Sense strand starting at position 730 of SEQ ID NO: 917030
ucauccuuggaguggauaa

SEQ ID NO: 1203047 - RNA, 19 nt, Artificial Sequence
  Description of Artificial Sequence: Synthetic oligonucleotide
  Antisense strand to SEQ ID NO: 1203046
uuauccacuccaaggauga

SEQ ID NO: 1203048 - RNA, 19 nt, Artificial Sequence
  Description of Artificial Sequence: Synthetic oligonucleotide
  Sense strand starting at position 933 of SEQ ID NO: 917030
guuaucaauuuguugguua

SEQ ID NO: 1203049 - RNA, 19 nt, Artificial Sequence
  Description of Artificial Sequence: Synthetic oligonucleotide
  Antisense strand to SEQ ID NO: 1203048
uaaccaacaaauugauaac

SEQ ID NO: 1203050 - RNA, 19 nt, Artificial Sequence
  Description of Artificial Sequence: Synthetic oligonucleotide
  Sense strand starting at position 952 of SEQ ID NO: 917030
ugucuaugucaauggacuu

SEQ ID NO: 1203051 - RNA, 19 nt, Artificial Sequence
  Description of Artificial Sequence: Synthetic oligonucleotide
  Antisense strand to SEQ ID NO: 1203050
aaguccauugacauagaca

SEQ ID NO: 1203052 - RNA, 19 nt, Artificial Sequence
  Description of Artificial Sequence: Synthetic oligonucleotide
  Sense strand starting at position 1174 of SEQ ID NO: 917030
ugaucuuuauugucccaca

SEQ ID NO: 1203053 - RNA, 19 nt, Artificial Sequence
  Description of Artificial Sequence: Synthetic oligonucleotide
  Antisense strand to SEQ ID NO: 1203052
ugugggacaauaaagauca

SEQ ID NO: 1203054 - RNA, 19 nt, Artificial Sequence
  Description of Artificial Sequence: Synthetic oligonucleotide
  Sense strand starting at position 1431 of SEQ ID NO: 917030
uugaguccuuggcucauuu

SEQ ID NO: 1203055 - RNA, 19 nt, Artificial Sequence
  Description of Artificial Sequence: Synthetic oligonucleotide
  Antisense strand to SEQ ID NO: 1203054
aaaugagccaaggacucaa

SEQ ID NO: 1203056 - RNA, 19 nt, Artificial Sequence
  Description of Artificial Sequence: Synthetic oligonucleotide
  Sense strand starting at position 1521 of SEQ ID NO: 917030
ucucuuauuucucuagugu

SEQ ID NO: 1203057 - RNA, 19 nt, Artificial Sequence
  Description of Artificial Sequence: Synthetic oligonucleotide
  Antisense strand to SEQ ID NO: 1203056
acacuagagaaauaagaga

SEQ ID NO: 1203058 - RNA, 19 nt, Artificial Sequence
  Description of Artificial Sequence: Synthetic oligonucleotide
  Sense strand starting at position 1544 of SEQ ID NO: 917030
ucuguucuuguuuaugaua

SEQ ID NO: 1203059 - RNA, 19 nt, Artificial Sequence
  Description of Artificial Sequence: Synthetic oligonucleotide
  Antisense strand to SEQ ID NO: 1203058
uaucauaaacaagaacaga

SEQ ID NO: 1203060 - RNA, 19 nt, Artificial Sequence
  Description of Artificial Sequence: Synthetic oligonucleotide
  Sense strand starting at position 1730 of SEQ ID NO: 917030
aggcuuguccugcaauaug

SEQ ID NO: 1203061 - RNA, 19 nt, Artificial Sequence
  Description of Artificial Sequence: Synthetic oligonucleotide
  Antisense strand to SEQ ID NO: 1203060
cauauugcaggacaagccu

SEQ ID NO: 1203062 - RNA, 19 nt, Artificial Sequence
  Description of Artificial Sequence: Synthetic oligonucleotide
  Sense strand starting at position 1756 of SEQ ID NO: 917030
gcaacuugccugcagagau

SEQ ID NO: 1203063 - RNA, 19 nt, Artificial Sequence
  Description of Artificial Sequence: Synthetic oligonucleotide
  Antisense strand to SEQ ID NO: 1203062
aucucugcaggcaaguugc

SEQ ID NO: 1203064 - RNA, 19 nt, Artificial Sequence
  Description of Artificial Sequence: Synthetic oligonucleotide
  Sense strand starting at position 1995 of SEQ ID NO: 917030
ggcacugggccaggauauu

SEQ ID NO: 1203065 - RNA, 19 nt, Artificial Sequence
  Description of Artificial Sequence: Synthetic oligonucleotide
  Antisense strand to SEQ ID NO: 1203064
aauauccuggcccagugcc

SEQ ID NO: 1203066 - RNA, 19 nt, Artificial Sequence
  Description of Artificial Sequence: Synthetic oligonucleotide
  Sense strand starting at position 2198 of SEQ ID NO: 917030
uggacauuguaucucuacu

SEQ ID NO: 1203067 - RNA, 19 nt, Artificial Sequence
  Description of Artificial Sequence: Synthetic oligonucleotide
  Antisense strand to SEQ ID NO: 1203066
aguagagauacaaugucca

SEQ ID NO: 1203068 - RNA, 19 nt, Artificial Sequence
  Description of Artificial Sequence: Synthetic oligonucleotide
  Sense strand starting at position 2447 of SEQ ID NO: 917030
cuugccuaucaugauaaga

SEQ ID NO: 1203069 - RNA, 19 nt, Artificial Sequence
  Description of Artificial Sequence: Synthetic oligonucleotide
  Antisense strand to SEQ ID NO: 1203068
ucuuaucaugauaggcaag

SEQ ID NO: 1203070 - RNA, 19 nt, Artificial Sequence
  Description of Artificial Sequence: Synthetic oligonucleotide
  Sense strand starting at position 2587 of SEQ ID NO: 917030
uaagguggacacuguaauu

SEQ ID NO: 1203071 - RNA, 19 nt, Artificial Sequence
  Description of Artificial Sequence: Synthetic oligonucleotide
  Antisense strand to SEQ ID NO: 1203070
aauuacaguguccaccuua

SEQ ID NO: 1203072 - RNA, 19 nt, Artificial Sequence
  Description of Artificial Sequence: Synthetic oligonucleotide
  Sense strand starting at position 2667 of SEQ ID NO: 917030
ccagguccucccggacaaa

SEQ ID NO: 1203073 - RNA, 19 nt, Artificial Sequence
  Description of Artificial Sequence: Synthetic oligonucleotide
  Antisense strand to SEQ ID NO: 1203072
uuuguccgggaggaccugg

SEQ ID NO: 1203074 - RNA, 19 nt, Artificial Sequence
  Description of Artificial Sequence: Synthetic oligonucleotide
  Sense strand starting at position 2811 of SEQ ID NO: 917030
gacugcuuuguguaaacag

SEQ ID NO: 1203075 - RNA, 19 nt, Artificial Sequence
  Description of Artificial Sequence: Synthetic oligonucleotide
  Antisense strand to SEQ ID NO: 1203074
cuguuuacacaaagcaguc

SEQ ID NO: 1203076 - RNA, 19 nt, Artificial Sequence
  Description of Artificial Sequence: Synthetic oligonucleotide
  Sense strand starting at position 2931 of SEQ ID NO: 917030
uuuagaaucuuugcuaagu

SEQ ID NO: 1203077 - RNA, 19 nt, Artificial Sequence
  Description of Artificial Sequence: Synthetic oligonucleotide
  Antisense strand to SEQ ID NO: 1203076
acuuagcaaagauucuaaa

SEQ ID NO: 1203078 - RNA, 19 nt, Artificial Sequence
  Description of Artificial Sequence: Synthetic oligonucleotide
  Sense strand starting at position 2932 of SEQ ID NO: 917030
uuagaaucuuugcuaaguu

SEQ ID NO: 1203079 - RNA, 19 nt, Artificial Sequence
  Description of Artificial Sequence: Synthetic oligonucleotide
  Antisense strand to SEQ ID NO: 1203078
aacuuagcaaagauucuaa

SEQ ID NO: 1203080 - RNA, 19 nt, Artificial Sequence
  Description of Artificial Sequence: Synthetic oligonucleotide
  Sense strand starting at position 3099 of SEQ ID NO: 917030
aggccaaauuuaggauuaa

SEQ ID NO: 1203081 - RNA, 19 nt, Artificial Sequence
  Description of Artificial Sequence: Synthetic oligonucleotide
  Antisense strand to SEQ ID NO: 1203080
uuaauccuaaauuuggccu

SEQ ID NO: 1203082 - RNA, 19 nt, Artificial Sequence
  Description of Artificial Sequence: Synthetic oligonucleotide
  Sense strand starting at position 3100 of SEQ ID NO: 917030
ggccaaauuuaggauuaau

SEQ ID NO: 1203083 - RNA, 19 nt, Artificial Sequence
  Description of Artificial Sequence: Synthetic oligonucleotide
  Antisense strand to SEQ ID NO: 1203082
auuaauccuaaauuuggcc

SEQ ID NO: 1203084 - RNA, 19 nt, Artificial Sequence
  Description of Artificial Sequence: Synthetic oligonucleotide
  Sense strand starting at position 3298 of SEQ ID NO: 917030
gauuauuuaucagaggcua

SEQ ID NO: 1203085 - RNA, 19 nt, Artificial Sequence
  Description of Artificial Sequence: Synthetic oligonucleotide
  Antisense strand to SEQ ID NO: 1203084
uagccucugauaaauaauc

SEQ ID NO: 1203086 - RNA, 19 nt, Artificial Sequence
  Description of Artificial Sequence: Synthetic oligonucleotide
  Sense strand starting at position 3428 of SEQ ID NO: 917030
aaagaauacuguguagucu

SEQ ID NO: 1203087 - RNA, 19 nt, Artificial Sequence
  Description of Artificial Sequence: Synthetic oligonucleotide
  Antisense strand to SEQ ID NO: 1203086
agacuacacaguauucuuu

SEQ ID NO: 1203088 - RNA, 19 nt, Artificial Sequence
  Description of Artificial Sequence: Synthetic oligonucleotide
  Sense strand starting at position 3429 of SEQ ID NO: 917030
aagaauacuguguagucuu

SEQ ID NO: 1203089 - RNA, 19 nt, Artificial Sequence
  Description of Artificial Sequence: Synthetic oligonucleotide
  Antisense strand to SEQ ID NO: 1203088
aagacuacacaguauucuu

SEQ ID NO: 1203090 - RNA, 19 nt, Artificial Sequence
  Description of Artificial Sequence: Synthetic oligonucleotide
  Sense strand starting at position 3447 of SEQ ID NO: 917030
uuaguugaaucacucuuga

SEQ ID NO: 1203091 - RNA, 19 nt, Artificial Sequence
  Description of Artificial Sequence: Synthetic oligonucleotide
  Antisense strand to SEQ ID NO: 1203090
ucaagagugauucaacuaa

SEQ ID NO: 1203092 - RNA, 19 nt, Artificial Sequence
  Description of Artificial Sequence: Synthetic oligonucleotide
  Sense strand starting at position 3485 of SEQ ID NO: 917030
aauggauguguuuguacag

SEQ ID NO: 1203093 - RNA, 19 nt, Artificial Sequence
  Description of Artificial Sequence: Synthetic oligonucleotide
  Antisense strand to SEQ ID NO: 1203092
cuguacaaacacauccauu

SEQ ID NO: 1203094 - RNA, 19 nt, Artificial Sequence
  Description of Artificial Sequence: Synthetic oligonucleotide
  Sense strand starting at position 3491 of SEQ ID NO: 917030
uguguuuguacaggagaau

SEQ ID NO: 1203095 - RNA, 19 nt, Artificial Sequence
  Description of Artificial Sequence: Synthetic oligonucleotide
  Antisense strand to SEQ ID NO: 1203094
auucuccuguacaaacaca

SEQ ID NO: 1203096 - RNA, 19 nt, Artificial Sequence
  Description of Artificial Sequence: Synthetic oligonucleotide
  Sense strand starting at position 3492 of SEQ ID NO: 917030
guguuuguacaggagaaug

SEQ ID NO: 1203097 - RNA, 19 nt, Artificial Sequence
  Description of Artificial Sequence: Synthetic oligonucleotide
  Antisense strand to SEQ ID NO: 1203096
cauucuccuguacaaacac

SEQ ID NO: 1203098 - RNA, 19 nt, Artificial Sequence
  Description of Artificial Sequence: Synthetic oligonucleotide
  Sense strand starting at position 3503 of SEQ ID NO: 917030
ggagaaugacuguguaaua

SEQ ID NO: 1203099 - RNA, 19 nt, Artificial Sequence
  Description of Artificial Sequence: Synthetic oligonucleotide
  Antisense strand to SEQ ID NO: 1203098
uauuacacagucauucucc

SEQ ID NO: 1203100 - RNA, 19 nt, Artificial Sequence
  Description of Artificial Sequence: Synthetic oligonucleotide
  Sense strand starting at position 3504 of SEQ ID NO: 917030
gagaaugacuguguaauag

SEQ ID NO: 1203101 - RNA, 19 nt, Artificial Sequence
  Description of Artificial Sequence: Synthetic oligonucleotide
  Antisense strand to SEQ ID NO: 1203100
cuauuacacagucauucuc

SEQ ID NO: 1203102 - RNA, 19 nt, Artificial Sequence
  Description of Artificial Sequence: Synthetic oligonucleotide
  Sense strand starting at position 3768 of SEQ ID NO: 917030
gugucaauagaaugagaau

SEQ ID NO: 1203103 - RNA, 19 nt, Artificial Sequence
  Description of Artificial Sequence: Synthetic oligonucleotide
  Antisense strand to SEQ ID NO: 1203102
auucucauucuauugacac

SEQ ID NO: 1203104 - RNA, 19 nt, Artificial Sequence
  Description of Artificial Sequence: Synthetic oligonucleotide
  Sense strand starting at position 3785 of SEQ ID NO: 917030
auuaauuucccuggcaguu

SEQ ID NO: 1203105 - RNA, 19 nt, Artificial Sequence
  Description of Artificial Sequence: Synthetic oligonucleotide
  Antisense strand to SEQ ID NO: 1203104
aacugccagggaaauuaau

SEQ ID NO: 1203106 - RNA, 19 nt, Artificial Sequence
  Description of Artificial Sequence: Synthetic oligonucleotide
  Sense strand starting at position 3854 of SEQ ID NO: 917030
cuuauugauuagguaauga

SEQ ID NO: 1203107 - RNA, 19 nt, Artificial Sequence
  Description of Artificial Sequence: Synthetic oligonucleotide
  Antisense strand to SEQ ID NO: 1203106
ucauuaccuaaucaauaag

SEQ ID NO: 1203108 - RNA, 19 nt, Artificial Sequence
  Description of Artificial Sequence: Synthetic oligonucleotide
  Sense strand starting at position 20 of SEQ ID NO: 917031
auucucucugaguaucauu

SEQ ID NO: 1203109 - RNA, 19 nt, Artificial Sequence
  Description of Artificial Sequence: Synthetic oligonucleotide
  Antisense strand to SEQ ID NO: 1203108
aaugauacucagagagaau

SEQ ID NO: 1203110 - RNA, 19 nt, Artificial Sequence
  Description of Artificial Sequence: Synthetic oligonucleotide
  Sense strand starting at position 385 of SEQ ID NO: 917031
ucacaagauuacguaugaa

SEQ ID NO: 1203111 - RNA, 19 nt, Artificial Sequence
  Description of Artificial Sequence: Synthetic oligonucleotide
  Antisense strand to SEQ ID NO: 1203110
uucauacguaaucuuguga

SEQ ID NO: 1203112 - RNA, 19 nt, Artificial Sequence
  Description of Artificial Sequence: Synthetic oligonucleotide
  Sense strand starting at position 388 of SEQ ID NO: 917031
caagauuacguaugaauua

SEQ ID NO: 1203113 - RNA, 19 nt, Artificial Sequence
  Description of Artificial Sequence: Synthetic oligonucleotide
  Antisense strand to SEQ ID NO: 1203112
uaauucauacguaaucuug

SEQ ID NO: 1203114 - RNA, 19 nt, Artificial Sequence
  Description of Artificial Sequence: Synthetic oligonucleotide
  Sense strand starting at position 425 of SEQ ID NO: 917031
uaauguaacgugcauagaa

SEQ ID NO: 1203115 - RNA, 19 nt, Artificial Sequence
  Description of Artificial Sequence: Synthetic oligonucleotide
  Antisense strand to SEQ ID NO: 1203114
uucuaugcacguuacauua

SEQ ID NO: 1203116 - RNA, 19 nt, Artificial Sequence
  Description of Artificial Sequence: Synthetic oligonucleotide
  Sense strand starting at position 723 of SEQ ID NO: 917031
guaggaagccgguguaauu

SEQ ID NO: 1203117 - RNA, 19 nt, Artificial Sequence
  Description of Artificial Sequence: Synthetic oligonucleotide
  Antisense strand to SEQ ID NO: 1203116
aauuacaccggcuuccuac

SEQ ID NO: 1203118 - RNA, 19 nt, Artificial Sequence
  Description of Artificial Sequence: Synthetic oligonucleotide
  Sense strand starting at position 733 of SEQ ID NO: 917031
gguguaauugucugccucu

SEQ ID NO: 1203119 - RNA, 19 nt, Artificial Sequence
  Description of Artificial Sequence: Synthetic oligonucleotide
  Antisense strand to SEQ ID NO: 1203118
agaggcagacaauuacacc

SEQ ID NO: 1203120 - RNA, 19 nt, Artificial Sequence
  Description of Artificial Sequence: Synthetic oligonucleotide
  Sense strand starting at position 734 of SEQ ID NO: 917031
guguaauugucugccucuc

SEQ ID NO: 1203121 - RNA, 19 nt, Artificial Sequence
  Description of Artificial Sequence: Synthetic oligonucleotide
  Antisense strand to SEQ ID NO: 1203120
gagaggcagacaauuacac

SEQ ID NO: 1203122 - RNA, 19 nt, Artificial Sequence
  Description of Artificial Sequence: Synthetic oligonucleotide
  Sense strand starting at position 788 of SEQ ID NO: 917031
ccaggcuauuguuugaaau

SEQ ID NO: 1203123 - RNA, 19 nt, Artificial Sequence
  Description of Artificial Sequence: Synthetic oligonucleotide
  Antisense strand to SEQ ID NO: 1203122
auuucaaacaauagccugg

SEQ ID NO: 1203124 - RNA, 19 nt, Artificial Sequence
  Description of Artificial Sequence: Synthetic oligonucleotide
  Sense strand starting at position 789 of SEQ ID NO: 917031
caggcuauuguuugaaauu

SEQ ID NO: 1203125 - RNA, 19 nt, Artificial Sequence
  Description of Artificial Sequence: Synthetic oligonucleotide
  Antisense strand to SEQ ID NO: 1203124
aauuucaaacaauagccug

SEQ ID NO: 1203126 - RNA, 19 nt, Artificial Sequence
  Description of Artificial Sequence: Synthetic oligonucleotide
  Sense strand starting at position 790 of SEQ ID NO: 917031
aggcuauuguuugaaauua

SEQ ID NO: 1203127 - RNA, 19 nt, Artificial Sequence
  Description of Artificial Sequence: Synthetic oligonucleotide
  Antisense strand to SEQ ID NO: 1203126
uaauuucaaacaauagccu

SEQ ID NO: 1203128 - RNA, 19 nt, Artificial Sequence
  Description of Artificial Sequence: Synthetic oligonucleotide
  Sense strand starting at position 858 of SEQ ID NO: 917031
ugcguaucucuauagcaaa

SEQ ID NO: 1203129 - RNA, 19 nt, Artificial Sequence
  Description of Artificial Sequence: Synthetic oligonucleotide
  Antisense strand to SEQ ID NO: 1203128
uuugcuauagagauacgca

SEQ ID NO: 1203130 - RNA, 19 nt, Artificial Sequence
  Description of Artificial Sequence: Synthetic oligonucleotide
  Sense strand starting at position 885 of SEQ ID NO: 917031
ucaacauucucuguggcua

SEQ ID NO: 1203131 - RNA, 19 nt, Artificial Sequence
  Description of Artificial Sequence: Synthetic oligonucleotide
  Antisense strand to SEQ ID NO: 1203130
uagccacagagaauguuga

SEQ ID NO: 1203132 - RNA, 19 nt, Artificial Sequence
  Description of Artificial Sequence: Synthetic oligonucleotide
  Sense strand starting at position 921 of SEQ ID NO: 917031
ggagcuggcagguauauau

SEQ ID NO: 1203133 - RNA, 19 nt, Artificial Sequence
  Description of Artificial Sequence: Synthetic oligonucleotide
  Antisense strand to SEQ ID NO: 1203132
auauauaccugccagcucc

SEQ ID NO: 1203134 - RNA, 19 nt, Artificial Sequence
  Description of Artificial Sequence: Synthetic oligonucleotide
  Sense strand starting at position 939 of SEQ ID NO: 917031
uagggauccucgcaugagu

SEQ ID NO: 1203135 - RNA, 19 nt, Artificial Sequence
  Description of Artificial Sequence: Synthetic oligonucleotide
  Antisense strand to SEQ ID NO: 1203134
acucaugcgaggaucccua

SEQ ID NO: 1203136 - RNA, 19 nt, Artificial Sequence
  Description of Artificial Sequence: Synthetic oligonucleotide
  Sense strand starting at position 970 of SEQ ID NO: 917031
ccacuaguccaggaaagcu

SEQ ID NO: 1203137 - RNA, 19 nt, Artificial Sequence
  Description of Artificial Sequence: Synthetic oligonucleotide
  Antisense strand to SEQ ID NO: 1203136
agcuuuccuggacuagugg

SEQ ID NO: 1203138 - RNA, 19 nt, Artificial Sequence
  Description of Artificial Sequence: Synthetic oligonucleotide
  Sense strand starting at position 1071 of SEQ ID NO: 917031
gggucucugaacuaagagu

SEQ ID NO: 1203139 - RNA, 19 nt, Artificial Sequence
  Description of Artificial Sequence: Synthetic oligonucleotide
  Antisense strand to SEQ ID NO: 1203138
acucuuaguucagagaccc

SEQ ID NO: 1203140 - RNA, 19 nt, Artificial Sequence
  Description of Artificial Sequence: Synthetic oligonucleotide
  Sense strand starting at position 1080 of SEQ ID NO: 917031
aacuaagaguuaccaggua

SEQ ID NO: 1203141 - RNA, 19 nt, Artificial Sequence
  Description of Artificial Sequence: Synthetic oligonucleotide
  Antisense strand to SEQ ID NO: 1203140
uaccugguaacucuuaguu

SEQ ID NO: 1203142 - RNA, 19 nt, Artificial Sequence
  Description of Artificial Sequence: Synthetic oligonucleotide
  Sense strand starting at position 1085 of SEQ ID NO: 917031
agaguuaccagguaaggca

SEQ ID NO: 1203143 - RNA, 19 nt, Artificial Sequence
  Description of Artificial Sequence: Synthetic oligonucleotide
  Antisense strand to SEQ ID NO: 1203142
ugccuuaccugguaacucu

SEQ ID NO: 1203144 - RNA, 19 nt, Artificial Sequence
  Description of Artificial Sequence: Synthetic oligonucleotide
  Sense strand starting at position 1216 of SEQ ID NO: 917031
gaagcagugacucguauau

SEQ ID NO: 1203145 - RNA, 19 nt, Artificial Sequence
  Description of Artificial Sequence: Synthetic oligonucleotide
  Antisense strand to SEQ ID NO: 1203144
auauacgagucacugcuuc

SEQ ID NO: 1203146 - RNA, 19 nt, Artificial Sequence
  Description of Artificial Sequence: Synthetic oligonucleotide
  Sense strand starting at position 1218 of SEQ ID NO: 917031
agcagugacucguauauuu

SEQ ID NO: 1203147 - RNA, 19 nt, Artificial Sequence
  Description of Artificial Sequence: Synthetic oligonucleotide
  Antisense strand to SEQ ID NO: 1203146
aaauauacgagucacugcu

SEQ ID NO: 1203148 - RNA, 19 nt, Artificial Sequence
  Description of Artificial Sequence: Synthetic oligonucleotide
  Sense strand starting at position 1309 of SEQ ID NO: 917031
gccgguuucuuguuuggau

SEQ ID NO: 1203149 - RNA, 19 nt, Artificial Sequence
  Description of Artificial Sequence: Synthetic oligonucleotide
  Antisense strand to SEQ ID NO: 1203148
auccaaacaagaaaccggc

SEQ ID NO: 1203150 - RNA, 19 nt, Artificial Sequence
  Description of Artificial Sequence: Synthetic oligonucleotide
  Sense strand starting at position 1383 of SEQ ID NO: 917031
ugggcuagaucuccaacuu

SEQ ID NO: 1203151 - RNA, 19 nt, Artificial Sequence
  Description of Artificial Sequence: Synthetic oligonucleotide
  Antisense strand to SEQ ID NO: 1203150
aaguuggagaucuagccca

SEQ ID NO: 1203152 - RNA, 19 nt, Artificial Sequence
  Description of Artificial Sequence: Synthetic oligonucleotide
  Sense strand starting at position 1384 of SEQ ID NO: 917031
gggcuagaucuccaacuuc

SEQ ID NO: 1203153 - RNA, 19 nt, Artificial Sequence
  Description of Artificial Sequence: Synthetic oligonucleotide
  Antisense strand to SEQ ID NO: 1203152
gaaguuggagaucuagccc

SEQ ID NO: 1203154 - RNA, 19 nt, Artificial Sequence
  Description of Artificial Sequence: Synthetic oligonucleotide
  Sense strand starting at position 1429 of SEQ ID NO: 917031
gagugcugaucuuccagca

SEQ ID NO: 1203155 - RNA, 19 nt, Artificial Sequence
  Description of Artificial Sequence: Synthetic oligonucleotide
  Antisense strand to SEQ ID NO: 1203154
ugcuggaagaucagcacuc

SEQ ID NO: 1203156 - RNA, 19 nt, Artificial Sequence
  Description of Artificial Sequence: Synthetic oligonucleotide
  Sense strand starting at position 2970 of SEQ ID NO: 917031
ggauuauaggcccggauuc

SEQ ID NO: 1203157 - RNA, 19 nt, Artificial Sequence
  Description of Artificial Sequence: Synthetic oligonucleotide
  Antisense strand to SEQ ID NO: 1203156
gaauccgggccuauaaucc

SEQ ID NO: 1203158 - RNA, 19 nt, Artificial Sequence
  Description of Artificial Sequence: Synthetic oligonucleotide
  Sense strand starting at position 2971 of SEQ ID NO: 917031
gauuauaggcccggauucu

SEQ ID NO: 1203159 - RNA, 19 nt, Artificial Sequence
  Description of Artificial Sequence: Synthetic oligonucleotide
  Antisense strand to SEQ ID NO: 1203158
agaauccgggccuauaauc

SEQ ID NO: 1203160 - RNA, 19 nt, Artificial Sequence
  Description of Artificial Sequence: Synthetic oligonucleotide
  Sense strand starting at position 2972 of SEQ ID NO: 917031
auuauaggcccggauucuu

SEQ ID NO: 1203161 - RNA, 19 nt, Artificial Sequence
  Description of Artificial Sequence: Synthetic oligonucleotide
  Antisense strand to SEQ ID NO: 1203160
aagaauccgggccuauaau

SEQ ID NO: 1203162 - RNA, 19 nt, Artificial Sequence
  Description of Artificial Sequence: Synthetic oligonucleotide
  Sense strand starting at position 3001 of SEQ ID NO: 917031
ggccuaaacuuguuuccaa

SEQ ID NO: 1203163 - RNA, 19 nt, Artificial Sequence
  Description of Artificial Sequence: Synthetic oligonucleotide
  Antisense strand to SEQ ID NO: 1203162
uuggaaacaaguuuaggcc

SEQ ID NO: 1203164 - RNA, 19 nt, Artificial Sequence
  Description of Artificial Sequence: Synthetic oligonucleotide
  Sense strand starting at position 3287 of SEQ ID NO: 917031
ugcaguaaacuaggaucau

SEQ ID NO: 1203165 - RNA, 19 nt, Artificial Sequence
  Description of Artificial Sequence: Synthetic oligonucleotide
  Antisense strand to SEQ ID NO: 1203164
augauccuaguuuacugca

SEQ ID NO: 1203166 - RNA, 19 nt, Artificial Sequence
  Description of Artificial Sequence: Synthetic oligonucleotide
  Sense strand starting at position 3288 of SEQ ID NO: 917031
gcaguaaacuaggaucaug

SEQ ID NO: 1203167 - RNA, 19 nt, Artificial Sequence
  Description of Artificial Sequence: Synthetic oligonucleotide
  Antisense strand to SEQ ID NO: 1203166
caugauccuaguuuacugc

SEQ ID NO: 1203168 - RNA, 19 nt, Artificial Sequence
  Description of Artificial Sequence: Synthetic oligonucleotide
  Sense strand starting at position 3449 of SEQ ID NO: 917031
uggcuauaaucacuagggu

SEQ ID NO: 1203169 - RNA, 19 nt, Artificial Sequence
  Description of Artificial Sequence: Synthetic oligonucleotide
  Antisense strand to SEQ ID NO: 1203168
acccuagugauuauagcca

SEQ ID NO: 1203170 - RNA, 19 nt, Artificial Sequence
  Description of Artificial Sequence: Synthetic oligonucleotide
  Sense strand starting at position 3475 of SEQ ID NO: 917031
gcuuucugcuaauuagacu

SEQ ID NO: 1203171 - RNA, 19 nt, Artificial Sequence
  Description of Artificial Sequence: Synthetic oligonucleotide
  Antisense strand to SEQ ID NO: 1203170
agucuaauuagcagaaagc

SEQ ID NO: 1203172 - RNA, 19 nt, Artificial Sequence
  Description of Artificial Sequence: Synthetic oligonucleotide
  Sense strand starting at position 3481 of SEQ ID NO: 917031
ugcuaauuagacuggaagu

SEQ ID NO: 1203173 - RNA, 19 nt, Artificial Sequence
  Description of Artificial Sequence: Synthetic oligonucleotide
  Antisense strand to SEQ ID NO: 1203172
acuuccagucuaauuagca

SEQ ID NO: 1203174 - RNA, 19 nt, Artificial Sequence
  Description of Artificial Sequence: Synthetic oligonucleotide
  Sense strand starting at position 3482 of SEQ ID NO: 917031
gcuaauuagacuggaaguu

SEQ ID NO: 1203175 - RNA, 19 nt, Artificial Sequence
  Description of Artificial Sequence: Synthetic oligonucleotide
  Antisense strand to SEQ ID NO: 1203174
aacuuccagucuaauuagc

SEQ ID NO: 1203176 - RNA, 19 nt, Artificial Sequence
  Description of Artificial Sequence: Synthetic oligonucleotide
  Sense strand starting at position 3491 of SEQ ID NO: 917031
acuggaaguuuccacucau

SEQ ID NO: 1203177 - RNA, 19 nt, Artificial Sequence
  Description of Artificial Sequence: Synthetic oligonucleotide
  Antisense strand to SEQ ID NO: 1203176
augaguggaaacuuccagu

SEQ ID NO: 1203178 - RNA, 19 nt, Artificial Sequence
  Description of Artificial Sequence: Synthetic oligonucleotide
  Sense strand starting at position 3715 of SEQ ID NO: 917031
ggcagaguuggguacaugu

SEQ ID NO: 1203179 - RNA, 19 nt, Artificial Sequence
  Description of Artificial Sequence: Synthetic oligonucleotide
  Antisense strand to SEQ ID NO: 1203178
acauguacccaacucugcc

SEQ ID NO: 1203180 - RNA, 19 nt, Artificial Sequence
  Description of Artificial Sequence: Synthetic oligonucleotide
  Sense strand starting at position 3724 of SEQ ID NO: 917031
ggguacauguacccagaaa

SEQ ID NO: 1203181 - RNA, 19 nt, Artificial Sequence
  Description of Artificial Sequence: Synthetic oligonucleotide
  Antisense strand to SEQ ID NO: 1203180
uuucuggguacauguaccc

SEQ ID NO: 1203182 - RNA, 19 nt, Artificial Sequence
  Description of Artificial Sequence: Synthetic oligonucleotide
  Sense strand starting at position 3769 of SEQ ID NO: 917031
gagauauacuaggauuguc

SEQ ID NO: 1203183 - RNA, 19 nt, Artificial Sequence
  Description of Artificial Sequence: Synthetic oligonucleotide
  Antisense strand to SEQ ID NO: 1203182
gacaauccuaguauaucuc

SEQ ID NO: 1203184 - RNA, 19 nt, Artificial Sequence
  Description of Artificial Sequence: Synthetic oligonucleotide
  Sense strand starting at position 3777 of SEQ ID NO: 917031
cuaggauugucugccagca

SEQ ID NO: 1203185 - RNA, 19 nt, Artificial Sequence
  Description of Artificial Sequence: Synthetic oligonucleotide
  Antisense strand to SEQ ID NO: 1203184
ugcuggcagacaauccuag

SEQ ID NO: 1203186 - RNA, 19 nt, Artificial Sequence
  Description of Artificial Sequence: Synthetic oligonucleotide
  Sense strand starting at position 3779 of SEQ ID NO: 917031
aggauugucugccagcaag

SEQ ID NO: 1203187 - RNA, 19 nt, Artificial Sequence
  Description of Artificial Sequence: Synthetic oligonucleotide
  Antisense strand to SEQ ID NO: 1203186
cuugcuggcagacaauccu

SEQ ID NO: 1203188 - RNA, 19 nt, Artificial Sequence
  Description of Artificial Sequence: Synthetic oligonucleotide
  Sense strand starting at position 170 of SEQ ID NO: 917032
gggaccaugugccugaauu

SEQ ID NO: 1203189 - RNA, 19 nt, Artificial Sequence
  Description of Artificial Sequence: Synthetic oligonucleotide
  Antisense strand to SEQ ID NO: 1203188
aauucaggcacaugguccc

SEQ ID NO: 1203190 - RNA, 19 nt, Artificial Sequence
  Description of Artificial Sequence: Synthetic oligonucleotide
  Sense strand starting at position 171 of SEQ ID NO: 917032
ggaccaugugccugaauug

SEQ ID NO: 1203191 - RNA, 19 nt, Artificial Sequence
  Description of Artificial Sequence: Synthetic oligonucleotide
  Antisense strand to SEQ ID NO: 1203190
caauucaggcacauggucc

SEQ ID NO: 1203192 - RNA, 19 nt, Artificial Sequence
  Description of Artificial Sequence: Synthetic oligonucleotide
  Sense strand starting at position 172 of SEQ ID NO: 917032
gaccaugugccugaauuga

SEQ ID NO: 1203193 - RNA, 19 nt, Artificial Sequence
  Description of Artificial Sequence: Synthetic oligonucleotide
  Antisense strand to SEQ ID NO: 1203192
ucaauucaggcacaugguc

SEQ ID NO: 1203194 - RNA, 19 nt, Artificial Sequence
  Description of Artificial Sequence: Synthetic oligonucleotide
  Sense strand starting at position 227 of SEQ ID NO: 917032
cgggaugcggaguauaauu

SEQ ID NO: 1203195 - RNA, 19 nt, Artificial Sequence
  Description of Artificial Sequence: Synthetic oligonucleotide
  Antisense strand to SEQ ID NO: 1203194
aauuauacuccgcaucccg

SEQ ID NO: 1203196 - RNA, 19 nt, Artificial Sequence
  Description of Artificial Sequence: Synthetic oligonucleotide
  Sense strand starting at position 235 of SEQ ID NO: 917032
ggaguauaauucuucuuug

SEQ ID NO: 1203197 - RNA, 19 nt, Artificial Sequence
  Description of Artificial Sequence: Synthetic oligonucleotide
  Antisense strand to SEQ ID NO: 1203196
caaagaagaauuauacucc

SEQ ID NO: 1203198 - RNA, 19 nt, Artificial Sequence
  Description of Artificial Sequence: Synthetic oligonucleotide
  Sense strand starting at position 299 of SEQ ID NO: 917032
ccagaucuucuccacugua

SEQ ID NO: 1203199 - RNA, 19 nt, Artificial Sequence
  Description of Artificial Sequence: Synthetic oligonucleotide
  Antisense strand to SEQ ID NO: 1203198
uacaguggagaagaucugg

SEQ ID NO: 1203200 - RNA, 19 nt, Artificial Sequence
  Description of Artificial Sequence: Synthetic oligonucleotide
  Sense strand starting at position 411 of SEQ ID NO: 917032
agcccaguggaaggauaau

SEQ ID NO: 1203201 - RNA, 19 nt, Artificial Sequence
  Description of Artificial Sequence: Synthetic oligonucleotide
  Antisense strand to SEQ ID NO: 1203200
auuauccuuccacugggcu

SEQ ID NO: 1203202 - RNA, 19 nt, Artificial Sequence
  Description of Artificial Sequence: Synthetic oligonucleotide
  Sense strand starting at position 503 of SEQ ID NO: 917032
cuuugcauccaauagaggu

SEQ ID NO: 1203203 - RNA, 19 nt, Artificial Sequence
  Description of Artificial Sequence: Synthetic oligonucleotide
  Antisense strand to SEQ ID NO: 1203202
accucuauuggaugcaaag

SEQ ID NO: 1203204 - RNA, 19 nt, Artificial Sequence
  Description of Artificial Sequence: Synthetic oligonucleotide
  Sense strand starting at position 825 of SEQ ID NO: 917032
cauuaaagagcuugugaag

SEQ ID NO: 1203205 - RNA, 19 nt, Artificial Sequence
  Description of Artificial Sequence: Synthetic oligonucleotide
  Antisense strand to SEQ ID NO: 1203204
cuucacaagcucuuuaaug

SEQ ID NO: 1203206 - RNA, 19 nt, Artificial Sequence
  Description of Artificial Sequence: Synthetic oligonucleotide
  Sense strand starting at position 956 of SEQ ID NO: 917032
cagucagcuccugacagaa

SEQ ID NO: 1203207 - RNA, 19 nt, Artificial Sequence
  Description of Artificial Sequence: Synthetic oligonucleotide
  Antisense strand to SEQ ID NO: 1203206
uucugucaggagcugacug

SEQ ID NO: 1203208 - RNA, 19 nt, Artificial Sequence
  Description of Artificial Sequence: Synthetic oligonucleotide
  Sense strand starting at position 1080 of SEQ ID NO: 917032
ggcagaaacucaccauguu

SEQ ID NO: 1203209 - RNA, 19 nt, Artificial Sequence
  Description of Artificial Sequence: Synthetic oligonucleotide
  Antisense strand to SEQ ID NO: 1203208
aacauggugaguuucugcc

SEQ ID NO: 1203210 - RNA, 19 nt, Artificial Sequence
  Description of Artificial Sequence: Synthetic oligonucleotide
  Sense strand starting at position 1081 of SEQ ID NO: 917032
gcagaaacucaccauguuu

SEQ ID NO: 1203211 - RNA, 19 nt, Artificial Sequence
  Description of Artificial Sequence: Synthetic oligonucleotide
  Antisense strand to SEQ ID NO: 1203210
aaacauggugaguuucugc

SEQ ID NO: 1203212 - RNA, 19 nt, Artificial Sequence
  Description of Artificial Sequence: Synthetic oligonucleotide
  Sense strand starting at position 1383 of SEQ ID NO: 917032
aagucucucggauaacaca

SEQ ID NO: 1203213 - RNA, 19 nt, Artificial Sequence
  Description of Artificial Sequence: Synthetic oligonucleotide
  Antisense strand to SEQ ID NO: 1203212
uguguuauccgagagacuu

SEQ ID NO: 1203214 - RNA, 19 nt, Artificial Sequence
  Description of Artificial Sequence: Synthetic oligonucleotide
  Sense strand starting at position 1944 of SEQ ID NO: 917032
guuugcauccuuuagacaa

SEQ ID NO: 1203215 - RNA, 19 nt, Artificial Sequence
  Description of Artificial Sequence: Synthetic oligonucleotide
  Antisense strand to SEQ ID NO: 1203214
uugucuaaaggaugcaaac

SEQ ID NO: 1203216 - RNA, 19 nt, Artificial Sequence
  Description of Artificial Sequence: Synthetic oligonucleotide
  Sense strand starting at position 2175 of SEQ ID NO: 917032
ucccucguaguauauuaaa

SEQ ID NO: 1203217 - RNA, 19 nt, Artificial Sequence
  Description of Artificial Sequence: Synthetic oligonucleotide
  Antisense strand to SEQ ID NO: 1203216
uuuaauauacuacgaggga

SEQ ID NO: 1203218 - RNA, 19 nt, Artificial Sequence
  Description of Artificial Sequence: Synthetic oligonucleotide
  Sense strand starting at position 2490 of SEQ ID NO: 917032
gugaacguagaguaguuau

SEQ ID NO: 1203219 - RNA, 19 nt, Artificial Sequence
  Description of Artificial Sequence: Synthetic oligonucleotide
  Antisense strand to SEQ ID NO: 1203218
auaacuacucuacguucac

SEQ ID NO: 1203220 - RNA, 19 nt, Artificial Sequence
  Description of Artificial Sequence: Synthetic oligonucleotide
  Sense strand starting at position 2493 of SEQ ID NO: 917032
aacguagaguaguuauaau

SEQ ID NO: 1203221 - RNA, 19 nt, Artificial Sequence
  Description of Artificial Sequence: Synthetic oligonucleotide
  Antisense strand to SEQ ID NO: 1203220
auuauaacuacucuacguu

SEQ ID NO: 1203222 - RNA, 19 nt, Artificial Sequence
  Description of Artificial Sequence: Synthetic oligonucleotide
  Sense strand starting at position 2504 of SEQ ID NO: 917032
guuauaaugguuuacuaga

SEQ ID NO: 1203223 - RNA, 19 nt, Artificial Sequence
  Description of Artificial Sequence: Synthetic oligonucleotide
  Antisense strand to SEQ ID NO: 1203222
ucuaguaaaccauuauaac

SEQ ID NO: 1203224 - RNA, 19 nt, Artificial Sequence
  Description of Artificial Sequence: Synthetic oligonucleotide
  Sense strand starting at position 2511 of SEQ ID NO: 917032
ugguuuacuagagguauuc

SEQ ID NO: 1203225 - RNA, 19 nt, Artificial Sequence
  Description of Artificial Sequence: Synthetic oligonucleotide
  Antisense strand to SEQ ID NO: 1203224
gaauaccucuaguaaacca

SEQ ID NO: 1203226 - RNA, 19 nt, Artificial Sequence
  Description of Artificial Sequence: Synthetic oligonucleotide
  Sense strand starting at position 2534 of SEQ ID NO: 917032
augagaagucuauguaaca

SEQ ID NO: 1203227 - RNA, 19 nt, Artificial Sequence
  Description of Artificial Sequence: Synthetic oligonucleotide
  Antisense strand to SEQ ID NO: 1203226
uguuacauagacuucucau

SEQ ID NO: 1203228 - RNA, 19 nt, Artificial Sequence
  Description of Artificial Sequence: Synthetic oligonucleotide
  Sense strand starting at position 2535 of SEQ ID NO: 917032
ugagaagucuauguaacac

SEQ ID NO: 1203229 - RNA, 19 nt, Artificial Sequence
  Description of Artificial Sequence: Synthetic oligonucleotide
  Antisense strand to SEQ ID NO: 1203228
guguuacauagacuucuca

SEQ ID NO: 1203230 - RNA, 19 nt, Artificial Sequence
  Description of Artificial Sequence: Synthetic oligonucleotide
  Sense strand starting at position 2563 of SEQ ID NO: 917032
gguacauuguccuuuggaa

SEQ ID NO: 1203231 - RNA, 19 nt, Artificial Sequence
  Description of Artificial Sequence: Synthetic oligonucleotide
  Antisense strand to SEQ ID NO: 1203230
uuccaaaggacaauguacc

SEQ ID NO: 1203232 - RNA, 19 nt, Artificial Sequence
  Description of Artificial Sequence: Synthetic oligonucleotide
  Sense strand starting at position 2565 of SEQ ID NO: 917032
uacauuguccuuuggaaug

SEQ ID NO: 1203233 - RNA, 19 nt, Artificial Sequence
  Description of Artificial Sequence: Synthetic oligonucleotide
  Antisense strand to SEQ ID NO: 1203232
cauuccaaaggacaaugua

SEQ ID NO: 1203234 - RNA, 19 nt, Artificial Sequence
  Description of Artificial Sequence: Synthetic oligonucleotide
  Sense strand starting at position 2570 of SEQ ID NO: 917032
uguccuuuggaaugaauca

SEQ ID NO: 1203235 - RNA, 19 nt, Artificial Sequence
  Description of Artificial Sequence: Synthetic oligonucleotide
  Antisense strand to SEQ ID NO: 1203234
ugauucauuccaaaggaca

SEQ ID NO: 1203236 - RNA, 19 nt, Artificial Sequence
  Description of Artificial Sequence: Synthetic oligonucleotide
  Sense strand starting at position 2659 of SEQ ID NO: 917032
gcaguuacauaucugaauu

SEQ ID NO: 1203237 - RNA, 19 nt, Artificial Sequence
  Description of Artificial Sequence: Synthetic oligonucleotide
  Antisense strand to SEQ ID NO: 1203236
aauucagauauguaacugc

SEQ ID NO: 1203238 - RNA, 19 nt, Artificial Sequence
  Description of Artificial Sequence: Synthetic oligonucleotide
  Sense strand starting at position 2801 of SEQ ID NO: 917032
ugugaaacaucagcucaau

SEQ ID NO: 1203239 - RNA, 19 nt, Artificial Sequence
  Description of Artificial Sequence: Synthetic oligonucleotide
  Antisense strand to SEQ ID NO: 1203238
auugagcugauguuucaca

SEQ ID NO: 1203240 - RNA, 19 nt, Artificial Sequence
  Description of Artificial Sequence: Synthetic oligonucleotide
  Sense strand starting at position 2880 of SEQ ID NO: 917032
ggcuucuaacugugggaau

SEQ ID NO: 1203241 - RNA, 19 nt, Artificial Sequence
  Description of Artificial Sequence: Synthetic oligonucleotide
  Antisense strand to SEQ ID NO: 1203240
auucccacaguuagaagcc

SEQ ID NO: 1203242 - RNA, 19 nt, Artificial Sequence
  Description of Artificial Sequence: Synthetic oligonucleotide
  Sense strand starting at position 3032 of SEQ ID NO: 917032
cuccauucucagcaacgau

SEQ ID NO: 1203243 - RNA, 19 nt, Artificial Sequence
  Description of Artificial Sequence: Synthetic oligonucleotide
  Antisense strand to SEQ ID NO: 1203242
aucguugcugagaauggag

SEQ ID NO: 1203244 - RNA, 19 nt, Artificial Sequence
  Description of Artificial Sequence: Synthetic oligonucleotide
  Sense strand starting at position 3052 of SEQ ID NO: 917032
cggaguaagucacuggacu

SEQ ID NO: 1203245 - RNA, 19 nt, Artificial Sequence
  Description of Artificial Sequence: Synthetic oligonucleotide
  Antisense strand to SEQ ID NO: 1203244
aguccagugacuuacuccg

SEQ ID NO: 1203246 - RNA, 19 nt, Artificial Sequence
  Description of Artificial Sequence: Synthetic oligonucleotide
  Sense strand starting at position 3053 of SEQ ID NO: 917032
ggaguaagucacuggacuu

SEQ ID NO: 1203247 - RNA, 19 nt, Artificial Sequence
  Description of Artificial Sequence: Synthetic oligonucleotide
  Antisense strand to SEQ ID NO: 1203246
aaguccagugacuuacucc

SEQ ID NO: 1203248 - RNA, 19 nt, Artificial Sequence
  Description of Artificial Sequence: Synthetic oligonucleotide
  Sense strand starting at position 3112 of SEQ ID NO: 917032
aaguuuggccacuaaaguu

SEQ ID NO: 1203249 - RNA, 19 nt, Artificial Sequence
  Description of Artificial Sequence: Synthetic oligonucleotide
  Antisense strand to SEQ ID NO: 1203248
aacuuuaguggccaaacuu

SEQ ID NO: 1203250 - RNA, 19 nt, Artificial Sequence
  Description of Artificial Sequence: Synthetic oligonucleotide
  Sense strand starting at position 3344 of SEQ ID NO: 917032
acaguucugcuuuacuuga

SEQ ID NO: 1203251 - RNA, 19 nt, Artificial Sequence
  Description of Artificial Sequence: Synthetic oligonucleotide
  Antisense strand to SEQ ID NO: 1203250
ucaaguaaagcagaacugu

SEQ ID NO: 1203252 - RNA, 19 nt, Artificial Sequence
  Description of Artificial Sequence: Synthetic oligonucleotide
  Sense strand starting at position 3374 of SEQ ID NO: 917032
ucaguaauauucucuggaa

SEQ ID NO: 1203253 - RNA, 19 nt, Artificial Sequence
  Description of Artificial Sequence: Synthetic oligonucleotide
  Antisense strand to SEQ ID NO: 1203252
uuccagagaauauuacuga

SEQ ID NO: 1203254 - RNA, 19 nt, Artificial Sequence
  Description of Artificial Sequence: Synthetic oligonucleotide
  Sense strand starting at position 3435 of SEQ ID NO: 917032
uuguauauuuccuaggaaa

SEQ ID NO: 1203255 - RNA, 19 nt, Artificial Sequence
  Description of Artificial Sequence: Synthetic oligonucleotide
  Antisense strand to SEQ ID NO: 1203254
uuuccuaggaaauauacaa

SEQ ID NO: 1203256 - RNA, 19 nt, Artificial Sequence
  Description of Artificial Sequence: Synthetic oligonucleotide
  Sense strand starting at position 3713 of SEQ ID NO: 917032
agaagcagaguuugaacau

SEQ ID NO: 1203257 - RNA, 19 nt, Artificial Sequence
  Description of Artificial Sequence: Synthetic oligonucleotide
  Antisense strand to SEQ ID NO: 1203256
auguucaaacucugcuucu

SEQ ID NO: 1203258 - RNA, 19 nt, Artificial Sequence
  Description of Artificial Sequence: Synthetic oligonucleotide
  Sense strand starting at position 3797 of SEQ ID NO: 917032
uuaugcaauuuccaaagga

SEQ ID NO: 1203259 - RNA, 19 nt, Artificial Sequence
  Description of Artificial Sequence: Synthetic oligonucleotide
  Antisense strand to SEQ ID NO: 1203258
uccuuuggaaauugcauaa

SEQ ID NO: 1203260 - RNA, 19 nt, Artificial Sequence
  Description of Artificial Sequence: Synthetic oligonucleotide
  Sense strand starting at position 3841 of SEQ ID NO: 917032
gugguugauucuuugaaau

SEQ ID NO: 1203261 - RNA, 19 nt, Artificial Sequence
  Description of Artificial Sequence: Synthetic oligonucleotide
  Antisense strand to SEQ ID NO: 1203260
auuucaaagaaucaaccac

SEQ ID NO: 1203262 - RNA, 19 nt, Artificial Sequence
  Description of Artificial Sequence: Synthetic oligonucleotide
  Sense strand starting at position 3881 of SEQ ID NO: 917032
uccuuauguaaaugagggu

SEQ ID NO: 1203263 - RNA, 19 nt, Artificial Sequence
  Description of Artificial Sequence: Synthetic oligonucleotide
  Antisense strand to SEQ ID NO: 1203262
acccucauuuacauaagga

SEQ ID NO: 1203264 - RNA, 19 nt, Artificial Sequence
  Description of Artificial Sequence: Synthetic oligonucleotide
  Sense strand starting at position 3885 of SEQ ID NO: 917032
uauguaaaugaggguuauu

SEQ ID NO: 1203265 - RNA, 19 nt, Artificial Sequence
  Description of Artificial Sequence: Synthetic oligonucleotide
  Antisense strand to SEQ ID NO: 1203264
aauaacccucauuuacaua

SEQ ID NO: 1203266 - RNA, 19 nt, Artificial Sequence
  Description of Artificial Sequence: Synthetic oligonucleotide
  Sense strand starting at position 3954 of SEQ ID NO: 917032
aggcacugauaaucucaaa

SEQ ID NO: 1203267 - RNA, 19 nt, Artificial Sequence
  Description of Artificial Sequence: Synthetic oligonucleotide
  Antisense strand to SEQ ID NO: 1203266
uuugagauuaucagugccu

SEQ ID NO: 1203268 - RNA, 19 nt, Artificial Sequence
  Description of Artificial Sequence: Synthetic oligonucleotide
  Sense strand starting at position 238 of SEQ ID NO: 917033
aucuauugaugacugucaa

SEQ ID NO: 1203269 - RNA, 19 nt, Artificial Sequence
  Description of Artificial Sequence: Synthetic oligonucleotide
  Antisense strand to SEQ ID NO: 1203268
uugacagucaucaauagau

SEQ ID NO: 1203270 - RNA, 19 nt, Artificial Sequence
  Description of Artificial Sequence: Synthetic oligonucleotide
  Sense strand starting at position 239 of SEQ ID NO: 917033
ucuauugaugacugucaag

SEQ ID NO: 1203271 - RNA, 19 nt, Artificial Sequence
  Description of Artificial Sequence: Synthetic oligonucleotide
  Antisense strand to SEQ ID NO: 1203270
cuugacagucaucaauaga

SEQ ID NO: 1203272 - RNA, 19 nt, Artificial Sequence
  Description of Artificial Sequence: Synthetic oligonucleotide
  Sense strand starting at position 246 of SEQ ID NO: 917033
augacugucaaguggaaca

SEQ ID NO: 1203273 - RNA, 19 nt, Artificial Sequence
  Description of Artificial Sequence: Synthetic oligonucleotide
  Antisense strand to SEQ ID NO: 1203272
uguuccacuugacagucau

SEQ ID NO: 1203274 - RNA, 19 nt, Artificial Sequence
  Description of Artificial Sequence: Synthetic oligonucleotide
  Sense strand starting at position 473 of SEQ ID NO: 917033
cuacucacguaaucugaaa

SEQ ID NO: 1203275 - RNA, 19 nt, Artificial Sequence
  Description of Artificial Sequence: Synthetic oligonucleotide
  Antisense strand to SEQ ID NO: 1203274
uuucagauuacgugaguag

SEQ ID NO: 1203276 - RNA, 19 nt, Artificial Sequence
  Description of Artificial Sequence: Synthetic oligonucleotide
  Sense strand starting at position 723 of SEQ ID NO: 917033
uagacuagguggucacauu

SEQ ID NO: 1203277 - RNA, 19 nt, Artificial Sequence
  Description of Artificial Sequence: Synthetic oligonucleotide
  Antisense strand to SEQ ID NO: 1203276
aaugugaccaccuagucua

SEQ ID NO: 1203278 - RNA, 19 nt, Artificial Sequence
  Description of Artificial Sequence: Synthetic oligonucleotide
  Sense strand starting at position 1031 of SEQ ID NO: 917033
cgauuuccguucccucaaa

SEQ ID NO: 1203279 - RNA, 19 nt, Artificial Sequence
  Description of Artificial Sequence: Synthetic oligonucleotide
  Antisense strand to SEQ ID NO: 1203278
uuugagggaacggaaaucg

SEQ ID NO: 1203280 - RNA, 19 nt, Artificial Sequence
  Description of Artificial Sequence: Synthetic oligonucleotide
  Sense strand starting at position 1733 of SEQ ID NO: 917033
cccugcuucccugaaagca

SEQ ID NO: 1203281 - RNA, 19 nt, Artificial Sequence
  Description of Artificial Sequence: Synthetic oligonucleotide
  Antisense strand to SEQ ID NO: 1203280
ugcuuucagggaagcaggg

SEQ ID NO: 1203282 - RNA, 19 nt, Artificial Sequence
  Description of Artificial Sequence: Synthetic oligonucleotide
  Sense strand starting at position 1846 of SEQ ID NO: 917033
aagcuaagagucgagguaa

SEQ ID NO: 1203283 - RNA, 19 nt, Artificial Sequence
  Description of Artificial Sequence: Synthetic oligonucleotide
  Antisense strand to SEQ ID NO: 1203282
uuaccucgacucuuagcuu

SEQ ID NO: 1203284 - RNA, 19 nt, Artificial Sequence
  Description of Artificial Sequence: Synthetic oligonucleotide
  Sense strand starting at position 2237 of SEQ ID NO: 917033
ccgugaaaugcagaaaguu

SEQ ID NO: 1203285 - RNA, 19 nt, Artificial Sequence
  Description of Artificial Sequence: Synthetic oligonucleotide
  Antisense strand to SEQ ID NO: 1203284
aacuuucugcauuucacgg

SEQ ID NO: 1203286 - RNA, 19 nt, Artificial Sequence
  Description of Artificial Sequence: Synthetic oligonucleotide
  Sense strand starting at position 2353 of SEQ ID NO: 917033
cgguacuuaccugauaaug

SEQ ID NO: 1203287 - RNA, 19 nt, Artificial Sequence
  Description of Artificial Sequence: Synthetic oligonucleotide
  Antisense strand to SEQ ID NO: 1203286
cauuaucagguaaguaccg

SEQ ID NO: 1203288 - RNA, 19 nt, Artificial Sequence
  Description of Artificial Sequence: Synthetic oligonucleotide
  Sense strand starting at position 2396 of SEQ ID NO: 917033
cgaauagguguacaugguu

SEQ ID NO: 1203289 - RNA, 19 nt, Artificial Sequence
  Description of Artificial Sequence: Synthetic oligonucleotide
  Antisense strand to SEQ ID NO: 1203288
aaccauguacaccuauucg

SEQ ID NO: 1203290 - RNA, 19 nt, Artificial Sequence
  Description of Artificial Sequence: Synthetic oligonucleotide
  Sense strand starting at position 2408 of SEQ ID NO: 917033
caugguuuacuguaaugac

SEQ ID NO: 1203291 - RNA, 19 nt, Artificial Sequence
  Description of Artificial Sequence: Synthetic oligonucleotide
  Antisense strand to SEQ ID NO: 1203290
gucauuacaguaaaccaug

SEQ ID NO: 1203292 - RNA, 19 nt, Artificial Sequence
  Description of Artificial Sequence: Synthetic oligonucleotide
  Sense strand starting at position 2422 of SEQ ID NO: 917033
augacuuguucuccaaagu

SEQ ID NO: 1203293 - RNA, 19 nt, Artificial Sequence
  Description of Artificial Sequence: Synthetic oligonucleotide
  Antisense strand to SEQ ID NO: 1203292
acuuuggagaacaagucau

SEQ ID NO: 1203294 - RNA, 19 nt, Artificial Sequence
  Description of Artificial Sequence: Synthetic oligonucleotide
  Sense strand starting at position 2423 of SEQ ID NO: 917033
ugacuuguucuccaaagua

SEQ ID NO: 1203295 - RNA, 19 nt, Artificial Sequence
  Description of Artificial Sequence: Synthetic oligonucleotide
  Antisense strand to SEQ ID NO: 1203294
uacuuuggagaacaaguca

SEQ ID NO: 1203296 - RNA, 19 nt, Artificial Sequence
  Description of Artificial Sequence: Synthetic oligonucleotide
  Sense strand starting at position 2454 of SEQ ID NO: 917033
gcuggaagcaaauaguauu

SEQ ID NO: 1203297 - RNA, 19 nt, Artificial Sequence
  Description of Artificial Sequence: Synthetic oligonucleotide
  Antisense strand to SEQ ID NO: 1203296
aauacuauuugcuuccagc

SEQ ID NO: 1203298 - RNA, 19 nt, Artificial Sequence
  Description of Artificial Sequence: Synthetic oligonucleotide
  Sense strand starting at position 2474 of SEQ ID NO: 917033
cagucauucgaagaguagu

SEQ ID NO: 1203299 - RNA, 19 nt, Artificial Sequence
  Description of Artificial Sequence: Synthetic oligonucleotide
  Antisense strand to SEQ ID NO: 1203298
acuacucuucgaaugacug

SEQ ID NO: 1203300 - RNA, 19 nt, Artificial Sequence
  Description of Artificial Sequence: Synthetic oligonucleotide
  Sense strand starting at position 2484 of SEQ ID NO: 917033
aagaguagugcccaagcau

SEQ ID NO: 1203301 - RNA, 19 nt, Artificial Sequence
  Description of Artificial Sequence: Synthetic oligonucleotide
  Antisense strand to SEQ ID NO: 1203300
augcuugggcacuacucuu

SEQ ID NO: 1203302 - RNA, 19 nt, Artificial Sequence
  Description of Artificial Sequence: Synthetic oligonucleotide
  Sense strand starting at position 2625 of SEQ ID NO: 917033
agcugaguugaagaaguga

SEQ ID NO: 1203303 - RNA, 19 nt, Artificial Sequence
  Description of Artificial Sequence: Synthetic oligonucleotide
  Antisense strand to SEQ ID NO: 1203302
ucacuucuucaacucagcu

SEQ ID NO: 1203304 - RNA, 19 nt, Artificial Sequence
  Description of Artificial Sequence: Synthetic oligonucleotide
  Sense strand starting at position 2699 of SEQ ID NO: 917033
ggauuccuugugcaacuua

SEQ ID NO: 1203305 - RNA, 19 nt, Artificial Sequence
  Description of Artificial Sequence: Synthetic oligonucleotide
  Antisense strand to SEQ ID NO: 1203304
uaaguugcacaaggaaucc

SEQ ID NO: 1203306 - RNA, 19 nt, Artificial Sequence
  Description of Artificial Sequence: Synthetic oligonucleotide
  Sense strand starting at position 2736 of SEQ ID NO: 917033
cggcuuggccuugugucaa

SEQ ID NO: 1203307 - RNA, 19 nt, Artificial Sequence
  Description of Artificial Sequence: Synthetic oligonucleotide
  Antisense strand to SEQ ID NO: 1203306
uugacacaaggccaagccg

SEQ ID NO: 1203308 - RNA, 19 nt, Artificial Sequence
  Description of Artificial Sequence: Synthetic oligonucleotide
  Sense strand starting at position 2758 of SEQ ID NO: 917033
acaucaauugguuauagcu

SEQ ID NO: 1203309 - RNA, 19 nt, Artificial Sequence
  Description of Artificial Sequence: Synthetic oligonucleotide
  Antisense strand to SEQ ID NO: 1203308
agcuauaaccaauugaugu

SEQ ID NO: 1203310 - RNA, 19 nt, Artificial Sequence
  Description of Artificial Sequence: Synthetic oligonucleotide
  Sense strand starting at position 2782 of SEQ ID NO: 917033
cuuggaggcccacauuaua

SEQ ID NO: 1203311 - RNA, 19 nt, Artificial Sequence
  Description of Artificial Sequence: Synthetic oligonucleotide
  Antisense strand to SEQ ID NO: 1203310
uauaaugugggccuccaag

SEQ ID NO: 1203312 - RNA, 19 nt, Artificial Sequence
  Description of Artificial Sequence: Synthetic oligonucleotide
  Sense strand starting at position 2863 of SEQ ID NO: 917033
auugcuaauccuuggaaau

SEQ ID NO: 1203313 - RNA, 19 nt, Artificial Sequence
  Description of Artificial Sequence: Synthetic oligonucleotide
  Antisense strand to SEQ ID NO: 1203312
auuuccaaggauuagcaau

SEQ ID NO: 1203314 - RNA, 19 nt, Artificial Sequence
  Description of Artificial Sequence: Synthetic oligonucleotide
  Sense strand starting at position 2864 of SEQ ID NO: 917033
uugcuaauccuuggaaaug

SEQ ID NO: 1203315 - RNA, 19 nt, Artificial Sequence
  Description of Artificial Sequence: Synthetic oligonucleotide
  Antisense strand to SEQ ID NO: 1203314
cauuuccaaggauuagcaa

SEQ ID NO: 1203316 - RNA, 19 nt, Artificial Sequence
  Description of Artificial Sequence: Synthetic oligonucleotide
  Sense strand starting at position 2882 of SEQ ID NO: 917033
gcagaaggugguuagguuu

SEQ ID NO: 1203317 - RNA, 19 nt, Artificial Sequence
  Description of Artificial Sequence: Synthetic oligonucleotide
  Antisense strand to SEQ ID NO: 1203316
aaaccuaaccaccuucugc

SEQ ID NO: 1203318 - RNA, 19 nt, Artificial Sequence
  Description of Artificial Sequence: Synthetic oligonucleotide
  Sense strand starting at position 2885 of SEQ ID NO: 917033
gaaggugguuagguuuaaa

SEQ ID NO: 1203319 - RNA, 19 nt, Artificial Sequence
  Description of Artificial Sequence: Synthetic oligonucleotide
  Antisense strand to SEQ ID NO: 1203318
uuuaaaccuaaccaccuuc

SEQ ID NO: 1203320 - RNA, 19 nt, Artificial Sequence
  Description of Artificial Sequence: Synthetic oligonucleotide
  Sense strand starting at position 2952 of SEQ ID NO: 917033
agaauaucugcccaguaua

SEQ ID NO: 1203321 - RNA, 19 nt, Artificial Sequence
  Description of Artificial Sequence: Synthetic oligonucleotide
  Antisense strand to SEQ ID NO: 1203320
uauacugggcagauauucu

SEQ ID NO: 1203322 - RNA, 19 nt, Artificial Sequence
  Description of Artificial Sequence: Synthetic oligonucleotide
  Sense strand starting at position 2955 of SEQ ID NO: 917033
auaucugcccaguauacga

SEQ ID NO: 1203323 - RNA, 19 nt, Artificial Sequence
  Description of Artificial Sequence: Synthetic oligonucleotide
  Antisense strand to SEQ ID NO: 1203322
ucguauacugggcagauau

SEQ ID NO: 1203324 - RNA, 19 nt, Artificial Sequence
  Description of Artificial Sequence: Synthetic oligonucleotide
  Sense strand starting at position 2962 of SEQ ID NO: 917033
cccaguauacgaggaagaa

SEQ ID NO: 1203325 - RNA, 19 nt, Artificial Sequence
  Description of Artificial Sequence: Synthetic oligonucleotide
  Antisense strand to SEQ ID NO: 1203324
uucuuccucguauacuggg

SEQ ID NO: 1203326 - RNA, 19 nt, Artificial Sequence
  Description of Artificial Sequence: Synthetic oligonucleotide
  Sense strand starting at position 3022 of SEQ ID NO: 917033
caguuauuagccuaugaag

SEQ ID NO: 1203327 - RNA, 19 nt, Artificial Sequence
  Description of Artificial Sequence: Synthetic oligonucleotide
  Antisense strand to SEQ ID NO: 1203326
cuucauaggcuaauaacug

SEQ ID NO: 1203328 - RNA, 19 nt, Artificial Sequence
  Description of Artificial Sequence: Synthetic oligonucleotide
  Sense strand starting at position 3024 of SEQ ID NO: 917033
guuauuagccuaugaagau

SEQ ID NO: 1203329 - RNA, 19 nt, Artificial Sequence
  Description of Artificial Sequence: Synthetic oligonucleotide
  Antisense strand to SEQ ID NO: 1203328
aucuucauaggcuaauaac

SEQ ID NO: 1203330 - RNA, 19 nt, Artificial Sequence
  Description of Artificial Sequence: Synthetic oligonucleotide
  Sense strand starting at position 3174 of SEQ ID NO: 917033
gguucuuguuuauuuccga

SEQ ID NO: 1203331 - RNA, 19 nt, Artificial Sequence
  Description of Artificial Sequence: Synthetic oligonucleotide
  Antisense strand to SEQ ID NO: 1203330
ucggaaauaaacaagaacc

SEQ ID NO: 1203332 - RNA, 19 nt, Artificial Sequence
  Description of Artificial Sequence: Synthetic oligonucleotide
  Sense strand starting at position 3175 of SEQ ID NO: 917033
guucuuguuuauuuccgau

SEQ ID NO: 1203333 - RNA, 19 nt, Artificial Sequence
  Description of Artificial Sequence: Synthetic oligonucleotide
  Antisense strand to SEQ ID NO: 1203332
aucggaaauaaacaagaac

SEQ ID NO: 1203334 - RNA, 19 nt, Artificial Sequence
  Description of Artificial Sequence: Synthetic oligonucleotide
  Sense strand starting at position 3198 of SEQ ID NO: 917033
uugguagucuuguuaaagg

SEQ ID NO: 1203335 - RNA, 19 nt, Artificial Sequence
  Description of Artificial Sequence: Synthetic oligonucleotide
  Antisense strand to SEQ ID NO: 1203334
ccuuuaacaagacuaccaa

SEQ ID NO: 1203336 - RNA, 19 nt, Artificial Sequence
  Description of Artificial Sequence: Synthetic oligonucleotide
  Sense strand starting at position 3464 of SEQ ID NO: 917033
cuugcuuuaacgggaagaa

SEQ ID NO: 1203337 - RNA, 19 nt, Artificial Sequence
  Description of Artificial Sequence: Synthetic oligonucleotide
  Antisense strand to SEQ ID NO: 1203336
uucuucccguuaaagcaag

SEQ ID NO: 1203338 - RNA, 19 nt, Artificial Sequence
  Description of Artificial Sequence: Synthetic oligonucleotide
  Sense strand starting at position 3465 of SEQ ID NO: 917033
uugcuuuaacgggaagaau

SEQ ID NO: 1203339 - RNA, 19 nt, Artificial Sequence
  Description of Artificial Sequence: Synthetic oligonucleotide
  Antisense strand to SEQ ID NO: 1203338
auucuucccguuaaagcaa

SEQ ID NO: 1203340 - RNA, 19 nt, Artificial Sequence
  Description of Artificial Sequence: Synthetic oligonucleotide
  Sense strand starting at position 3516 of SEQ ID NO: 917033
uuugcugucggcucugaau

SEQ ID NO: 1203341 - RNA, 19 nt, Artificial Sequence
  Description of Artificial Sequence: Synthetic oligonucleotide
  Antisense strand to SEQ ID NO: 1203340
auucagagccgacagcaaa

SEQ ID NO: 1203342 - RNA, 19 nt, Artificial Sequence
  Description of Artificial Sequence: Synthetic oligonucleotide
  Sense strand starting at position 3556 of SEQ ID NO: 917033
gcuaucucuggacaaauau

SEQ ID NO: 1203343 - RNA, 19 nt, Artificial Sequence
  Description of Artificial Sequence: Synthetic oligonucleotide
  Antisense strand to SEQ ID NO: 1203342
auauuuguccagagauagc

SEQ ID NO: 1203344 - RNA, 19 nt, Artificial Sequence
  Description of Artificial Sequence: Synthetic oligonucleotide
  Sense strand starting at position 3599 of SEQ ID NO: 917033
agguuucugcuagaaccau

SEQ ID NO: 1203345 - RNA, 19 nt, Artificial Sequence
  Description of Artificial Sequence: Synthetic oligonucleotide
  Antisense strand to SEQ ID NO: 1203344
augguucuagcagaaaccu

SEQ ID NO: 1203346 - RNA, 19 nt, Artificial Sequence
  Description of Artificial Sequence: Synthetic oligonucleotide
  Sense strand starting at position 3723 of SEQ ID NO: 917033
ucuagcucucugcagauua

SEQ ID NO: 1203347 - RNA, 19 nt, Artificial Sequence
  Description of Artificial Sequence: Synthetic oligonucleotide
  Antisense strand to SEQ ID NO: 1203346
uaaucugcagagagcuaga

SEQ ID NO: 1203348 - RNA, 19 nt, Artificial Sequence
  Description of Artificial Sequence: Synthetic oligonucleotide
  Sense strand starting at position 111 of SEQ ID NO: 917034
gggucucacuacuuuguga

SEQ ID NO: 1203349 - RNA, 19 nt, Artificial Sequence
  Description of Artificial Sequence: Synthetic oligonucleotide
  Antisense strand to SEQ ID NO: 1203348
ucacaaaguagugagaccc

SEQ ID NO: 1203350 - RNA, 19 nt, Artificial Sequence
  Description of Artificial Sequence: Synthetic oligonucleotide
  Sense strand starting at position 113 of SEQ ID NO: 917034
gucucacuacuuugugaau

SEQ ID NO: 1203351 - RNA, 19 nt, Artificial Sequence
  Description of Artificial Sequence: Synthetic oligonucleotide
  Antisense strand to SEQ ID NO: 1203350
auucacaaaguagugagac

SEQ ID NO: 1203352 - RNA, 19 nt, Artificial Sequence
  Description of Artificial Sequence: Synthetic oligonucleotide
  Sense strand starting at position 172 of SEQ ID NO: 917034
agcaauaaguuguuacagu

SEQ ID NO: 1203353 - RNA, 19 nt, Artificial Sequence
  Description of Artificial Sequence: Synthetic oligonucleotide
  Antisense strand to SEQ ID NO: 1203352
acuguaacaacuuauugcu

SEQ ID NO: 1203354 - RNA, 19 nt, Artificial Sequence
  Description of Artificial Sequence: Synthetic oligonucleotide
  Sense strand starting at position 173 of SEQ ID NO: 917034
gcaauaaguuguuacagug

SEQ ID NO: 1203355 - RNA, 19 nt, Artificial Sequence
  Description of Artificial Sequence: Synthetic oligonucleotide
  Antisense strand to SEQ ID NO: 1203354
cacuguaacaacuuauugc

SEQ ID NO: 1203356 - RNA, 19 nt, Artificial Sequence
  Description of Artificial Sequence: Synthetic oligonucleotide
  Sense strand starting at position 180 of SEQ ID NO: 917034
guuguuacagugcgacaua

SEQ ID NO: 1203357 - RNA, 19 nt, Artificial Sequence
  Description of Artificial Sequence: Synthetic oligonucleotide
  Antisense strand to SEQ ID NO: 1203356
uaugucgcacuguaacaac

SEQ ID NO: 1203358 - RNA, 19 nt, Artificial Sequence
  Description of Artificial Sequence: Synthetic oligonucleotide
  Sense strand starting at position 183 of SEQ ID NO: 917034
guuacagugcgacauauac

SEQ ID NO: 1203359 - RNA, 19 nt, Artificial Sequence
  Description of Artificial Sequence: Synthetic oligonucleotide
  Antisense strand to SEQ ID NO: 1203358
guauaugucgcacuguaac

SEQ ID NO: 1203360 - RNA, 19 nt, Artificial Sequence
  Description of Artificial Sequence: Synthetic oligonucleotide
  Sense strand starting at position 189 of SEQ ID NO: 917034
gugcgacauauacauguau

SEQ ID NO: 1203361 - RNA, 19 nt, Artificial Sequence
  Description of Artificial Sequence: Synthetic oligonucleotide
  Antisense strand to SEQ ID NO: 1203360
auacauguauaugucgcac

SEQ ID NO: 1203362 - RNA, 19 nt, Artificial Sequence
  Description of Artificial Sequence: Synthetic oligonucleotide
  Sense strand starting at position 531 of SEQ ID NO: 917034
ucaauacuucuggaagcuu

SEQ ID NO: 1203363 - RNA, 19 nt, Artificial Sequence
  Description of Artificial Sequence: Synthetic oligonucleotide
  Antisense strand to SEQ ID NO: 1203362
aagcuuccagaaguauuga

SEQ ID NO: 1203364 - RNA, 19 nt, Artificial Sequence
  Description of Artificial Sequence: Synthetic oligonucleotide
  Sense strand starting at position 600 of SEQ ID NO: 917034
cuaagaacacgugguacua

SEQ ID NO: 1203365 - RNA, 19 nt, Artificial Sequence
  Description of Artificial Sequence: Synthetic oligonucleotide
  Antisense strand to SEQ ID NO: 1203364
uaguaccacguguucuuag

SEQ ID NO: 1203366 - RNA, 19 nt, Artificial Sequence
  Description of Artificial Sequence: Synthetic oligonucleotide
  Sense strand starting at position 1152 of SEQ ID NO: 917034
ucgccagguuugucucgaa

SEQ ID NO: 1203367 - RNA, 19 nt, Artificial Sequence
  Description of Artificial Sequence: Synthetic oligonucleotide
  Antisense strand to SEQ ID NO: 1203366
uucgagacaaaccuggcga

SEQ ID NO: 1203368 - RNA, 19 nt, Artificial Sequence
  Description of Artificial Sequence: Synthetic oligonucleotide
  Sense strand starting at position 1156 of SEQ ID NO: 917034
cagguuugucucgaacaag

SEQ ID NO: 1203369 - RNA, 19 nt, Artificial Sequence
  Description of Artificial Sequence: Synthetic oligonucleotide
  Antisense strand to SEQ ID NO: 1203368
cuuguucgagacaaaccug

SEQ ID NO: 1203370 - RNA, 19 nt, Artificial Sequence
  Description of Artificial Sequence: Synthetic oligonucleotide
  Sense strand starting at position 1167 of SEQ ID NO: 917034
cgaacaagugcugggauua

SEQ ID NO: 1203371 - RNA, 19 nt, Artificial Sequence
  Description of Artificial Sequence: Synthetic oligonucleotide
  Antisense strand to SEQ ID NO: 1203370
uaaucccagcacuuguucg

SEQ ID NO: 1203372 - RNA, 19 nt, Artificial Sequence
  Description of Artificial Sequence: Synthetic oligonucleotide
  Sense strand starting at position 1317 of SEQ ID NO: 917034
aggauuaggcaacgugaaa

SEQ ID NO: 1203373 - RNA, 19 nt, Artificial Sequence
  Description of Artificial Sequence: Synthetic oligonucleotide
  Antisense strand to SEQ ID NO: 1203372
uuucacguugccuaauccu

SEQ ID NO: 1203374 - RNA, 19 nt, Artificial Sequence
  Description of Artificial Sequence: Synthetic oligonucleotide
  Sense strand starting at position 1576 of SEQ ID NO: 917034
uaaguucuuggaggccaau

SEQ ID NO: 1203375 - RNA, 19 nt, Artificial Sequence
  Description of Artificial Sequence: Synthetic oligonucleotide
  Antisense strand to SEQ ID NO: 1203374
auuggccuccaagaacuua

SEQ ID NO: 1203376 - RNA, 19 nt, Artificial Sequence
  Description of Artificial Sequence: Synthetic oligonucleotide
  Sense strand starting at position 2152 of SEQ ID NO: 917034
cgcugauuggcggauucaa

SEQ ID NO: 1203377 - RNA, 19 nt, Artificial Sequence
  Description of Artificial Sequence: Synthetic oligonucleotide
  Antisense strand to SEQ ID NO: 1203376
uugaauccgccaaucagcg

SEQ ID NO: 1203378 - RNA, 19 nt, Artificial Sequence
  Description of Artificial Sequence: Synthetic oligonucleotide
  Sense strand starting at position 2651 of SEQ ID NO: 917034
ccacucuaggucugaauca

SEQ ID NO: 1203379 - RNA, 19 nt, Artificial Sequence
  Description of Artificial Sequence: Synthetic oligonucleotide
  Antisense strand to SEQ ID NO: 1203378
ugauucagaccuagagugg

SEQ ID NO: 1203380 - RNA, 19 nt, Artificial Sequence
  Description of Artificial Sequence: Synthetic oligonucleotide
  Sense strand starting at position 2718 of SEQ ID NO: 917034
uuacguccucuuuaaauga

SEQ ID NO: 1203381 - RNA, 19 nt, Artificial Sequence
  Description of Artificial Sequence: Synthetic oligonucleotide
  Antisense strand to SEQ ID NO: 1203380
ucauuuaaagaggacguaa

SEQ ID NO: 1203382 - RNA, 19 nt, Artificial Sequence
  Description of Artificial Sequence: Synthetic oligonucleotide
  Sense strand starting at position 2748 of SEQ ID NO: 917034
cuaacagucuccucccgau

SEQ ID NO: 1203383 - RNA, 19 nt, Artificial Sequence
  Description of Artificial Sequence: Synthetic oligonucleotide
  Antisense strand to SEQ ID NO: 1203382
aucgggaggagacuguuag

SEQ ID NO: 1203384 - RNA, 19 nt, Artificial Sequence
  Description of Artificial Sequence: Synthetic oligonucleotide
  Sense strand starting at position 2819 of SEQ ID NO: 917034
uuugauugcuaacuaugca

SEQ ID NO: 1203385 - RNA, 19 nt, Artificial Sequence
  Description of Artificial Sequence: Synthetic oligonucleotide
  Antisense strand to SEQ ID NO: 1203384
ugcauaguuagcaaucaaa

SEQ ID NO: 1203386 - RNA, 19 nt, Artificial Sequence
  Description of Artificial Sequence: Synthetic oligonucleotide
  Sense strand starting at position 2826 of SEQ ID NO: 917034
gcuaacuaugcagaguagu

SEQ ID NO: 1203387 - RNA, 19 nt, Artificial Sequence
  Description of Artificial Sequence: Synthetic oligonucleotide
  Antisense strand to SEQ ID NO: 1203386
acuacucugcauaguuagc

SEQ ID NO: 1203388 - RNA, 19 nt, Artificial Sequence
  Description of Artificial Sequence: Synthetic oligonucleotide
  Sense strand starting at position 3230 of SEQ ID NO: 917034
aaaguagagcuccgaggaa

SEQ ID NO: 1203389 - RNA, 19 nt, Artificial Sequence
  Description of Artificial Sequence: Synthetic oligonucleotide
  Antisense strand to SEQ ID NO: 1203388
uuccucggagcucuacuuu

SEQ ID NO: 1203390 - RNA, 19 nt, Artificial Sequence
  Description of Artificial Sequence: Synthetic oligonucleotide
  Sense strand starting at position 3265 of SEQ ID NO: 917034
uaacuuguacugcgucaua

SEQ ID NO: 1203391 - RNA, 19 nt, Artificial Sequence
  Description of Artificial Sequence: Synthetic oligonucleotide
  Antisense strand to SEQ ID NO: 1203390
uaugacgcaguacaaguua

SEQ ID NO: 1203392 - RNA, 19 nt, Artificial Sequence
  Description of Artificial Sequence: Synthetic oligonucleotide
  Sense strand starting at position 3268 of SEQ ID NO: 917034
cuuguacugcgucauacua

SEQ ID NO: 1203393 - RNA, 19 nt, Artificial Sequence
  Description of Artificial Sequence: Synthetic oligonucleotide
  Antisense strand to SEQ ID NO: 1203392
uaguaugacgcaguacaag

SEQ ID NO: 1203394 - RNA, 19 nt, Artificial Sequence
  Description of Artificial Sequence: Synthetic oligonucleotide
  Sense strand starting at position 3300 of SEQ ID NO: 917034
gaccaucucugccaagguu

SEQ ID NO: 1203395 - RNA, 19 nt, Artificial Sequence
  Description of Artificial Sequence: Synthetic oligonucleotide
  Antisense strand to SEQ ID NO: 1203394
aaccuuggcagagaugguc

SEQ ID NO: 1203396 - RNA, 19 nt, Artificial Sequence
  Description of Artificial Sequence: Synthetic oligonucleotide
  Sense strand starting at position 3308 of SEQ ID NO: 917034
cugccaagguuucucagaa

SEQ ID NO: 1203397 - RNA, 19 nt, Artificial Sequence
  Description of Artificial Sequence: Synthetic oligonucleotide
  Antisense strand to SEQ ID NO: 1203396
uucugagaaaccuuggcag

SEQ ID NO: 1203398 - RNA, 19 nt, Artificial Sequence
  Description of Artificial Sequence: Synthetic oligonucleotide
  Sense strand starting at position 3309 of SEQ ID NO: 917034
ugccaagguuucucagaag

SEQ ID NO: 1203399 - RNA, 19 nt, Artificial Sequence
  Description of Artificial Sequence: Synthetic oligonucleotide
  Antisense strand to SEQ ID NO: 1203398
cuucugagaaaccuuggca

SEQ ID NO: 1203400 - RNA, 19 nt, Artificial Sequence
  Description of Artificial Sequence: Synthetic oligonucleotide
  Sense strand starting at position 3370 of SEQ ID NO: 917034
auguuaucuuagcucauga

SEQ ID NO: 1203401 - RNA, 19 nt, Artificial Sequence
  Description of Artificial Sequence: Synthetic oligonucleotide
  Antisense strand to SEQ ID NO: 1203400
ucaugagcuaagauaacau

SEQ ID NO: 1203402 - RNA, 19 nt, Artificial Sequence
  Description of Artificial Sequence: Synthetic oligonucleotide
  Sense strand starting at position 3372 of SEQ ID NO: 917034
guuaucuuagcucaugaau

SEQ ID NO: 1203403 - RNA, 19 nt, Artificial Sequence
  Description of Artificial Sequence: Synthetic oligonucleotide
  Antisense strand to SEQ ID NO: 1203402
auucaugagcuaagauaac

SEQ ID NO: 1203404 - RNA, 19 nt, Artificial Sequence
  Description of Artificial Sequence: Synthetic oligonucleotide
  Sense strand starting at position 3394 of SEQ ID NO: 917034
uugaccaucucugggagau

SEQ ID NO: 1203405 - RNA, 19 nt, Artificial Sequence
  Description of Artificial Sequence: Synthetic oligonucleotide
  Antisense strand to SEQ ID NO: 1203404
aucucccagagauggucaa

SEQ ID NO: 1203406 - RNA, 19 nt, Artificial Sequence
  Description of Artificial Sequence: Synthetic oligonucleotide
  Sense strand starting at position 3396 of SEQ ID NO: 917034
gaccaucucugggagauac

SEQ ID NO: 1203407 - RNA, 19 nt, Artificial Sequence
  Description of Artificial Sequence: Synthetic oligonucleotide
  Antisense strand to SEQ ID NO: 1203406
guaucucccagagaugguc

SEQ ID NO: 1203408 - RNA, 19 nt, Artificial Sequence
  Description of Artificial Sequence: Synthetic oligonucleotide
  Sense strand starting at position 3412 of SEQ ID NO: 917034
uacagaguuuauggaaaua

SEQ ID NO: 1203409 - RNA, 19 nt, Artificial Sequence
  Description of Artificial Sequence: Synthetic oligonucleotide
  Antisense strand to SEQ ID NO: 1203408
uauuuccauaaacucugua

SEQ ID NO: 1203410 - RNA, 19 nt, Artificial Sequence
  Description of Artificial Sequence: Synthetic oligonucleotide
  Sense strand starting at position 3423 of SEQ ID NO: 917034
uggaaauauugagggaaca

SEQ ID NO: 1203411 - RNA, 19 nt, Artificial Sequence
  Description of Artificial Sequence: Synthetic oligonucleotide
  Antisense strand to SEQ ID NO: 1203410
uguucccucaauauuucca

SEQ ID NO: 1203412 - RNA, 19 nt, Artificial Sequence
  Description of Artificial Sequence: Synthetic oligonucleotide
  Sense strand starting at position 3572 of SEQ ID NO: 917034
uguggaacauauguguaga

SEQ ID NO: 1203413 - RNA, 19 nt, Artificial Sequence
  Description of Artificial Sequence: Synthetic oligonucleotide
  Antisense strand to SEQ ID NO: 1203412
ucuacacauauguuccaca

SEQ ID NO: 1203414 - RNA, 19 nt, Artificial Sequence
  Description of Artificial Sequence: Synthetic oligonucleotide
  Sense strand starting at position 3574 of SEQ ID NO: 917034
uggaacauauguguagaga

SEQ ID NO: 1203415 - RNA, 19 nt, Artificial Sequence
  Description of Artificial Sequence: Synthetic oligonucleotide
  Antisense strand to SEQ ID NO: 1203414
ucucuacacauauguucca

SEQ ID NO: 1203416 - RNA, 19 nt, Artificial Sequence
  Description of Artificial Sequence: Synthetic oligonucleotide
  Sense strand starting at position 3648 of SEQ ID NO: 917034
cacaguauccgagaugcuu

SEQ ID NO: 1203417 - RNA, 19 nt, Artificial Sequence
  Description of Artificial Sequence: Synthetic oligonucleotide
  Antisense strand to SEQ ID NO: 1203416
aagcaucucggauacugug

SEQ ID NO: 1203418 - RNA, 19 nt, Artificial Sequence
  Description of Artificial Sequence: Synthetic oligonucleotide
  Sense strand starting at position 3656 of SEQ ID NO: 917034
ccgagaugcuuagggaaua

SEQ ID NO: 1203419 - RNA, 19 nt, Artificial Sequence
  Description of Artificial Sequence: Synthetic oligonucleotide
  Antisense strand to SEQ ID NO: 1203418
uauucccuaagcaucucgg

SEQ ID NO: 1203420 - RNA, 19 nt, Artificial Sequence
  Description of Artificial Sequence: Synthetic oligonucleotide
  Sense strand starting at position 3657 of SEQ ID NO: 917034
cgagaugcuuagggaauau

SEQ ID NO: 1203421 - RNA, 19 nt, Artificial Sequence
  Description of Artificial Sequence: Synthetic oligonucleotide
  Antisense strand to SEQ ID NO: 1203420
auauucccuaagcaucucg

SEQ ID NO: 1203422 - RNA, 19 nt, Artificial Sequence
  Description of Artificial Sequence: Synthetic oligonucleotide
  Sense strand starting at position 3668 of SEQ ID NO: 917034
gggaauauguuugugagca

SEQ ID NO: 1203423 - RNA, 19 nt, Artificial Sequence
  Description of Artificial Sequence: Synthetic oligonucleotide
  Antisense strand to SEQ ID NO: 1203422
ugcucacaaacauauuccc

SEQ ID NO: 1203424 - RNA, 19 nt, Artificial Sequence
  Description of Artificial Sequence: Synthetic oligonucleotide
  Sense strand starting at position 3670 of SEQ ID NO: 917034
gaauauguuugugagcaaa

SEQ ID NO: 1203425 - RNA, 19 nt, Artificial Sequence
  Description of Artificial Sequence: Synthetic oligonucleotide
  Antisense strand to SEQ ID NO: 1203424
uuugcucacaaacauauuc

SEQ ID NO: 1203426 - RNA, 19 nt, Artificial Sequence
  Description of Artificial Sequence: Synthetic oligonucleotide
  Sense strand starting at position 3701 of SEQ ID NO: 917034
gccucauggagagggaaua

SEQ ID NO: 1203427 - RNA, 19 nt, Artificial Sequence
  Description of Artificial Sequence: Synthetic oligonucleotide
  Antisense strand to SEQ ID NO: 1203426
uauucccucuccaugaggc

SEQ ID NO: 1203428 - RNA, 19 nt, Artificial Sequence
  Description of Artificial Sequence: Synthetic oligonucleotide
  Sense strand starting at position 27 of SEQ ID NO: 917035
agagcuaguuucuuucgga

SEQ ID NO: 1203429 - RNA, 19 nt, Artificial Sequence
  Description of Artificial Sequence: Synthetic oligonucleotide
  Antisense strand to SEQ ID NO: 1203428
uccgaaagaaacuagcucu

SEQ ID NO: 1203430 - RNA, 19 nt, Artificial Sequence
  Description of Artificial Sequence: Synthetic oligonucleotide
  Sense strand starting at position 28 of SEQ ID NO: 917035
gagcuaguuucuuucggaa

SEQ ID NO: 1203431 - RNA, 19 nt, Artificial Sequence
  Description of Artificial Sequence: Synthetic oligonucleotide
  Antisense strand to SEQ ID NO: 1203430
uuccgaaagaaacuagcuc

SEQ ID NO: 1203432 - RNA, 19 nt, Artificial Sequence
  Description of Artificial Sequence: Synthetic oligonucleotide
  Sense strand starting at position 32 of SEQ ID NO: 917035
uaguuucuuucggaagaac

SEQ ID NO: 1203433 - RNA, 19 nt, Artificial Sequence
  Description of Artificial Sequence: Synthetic oligonucleotide
  Antisense strand to SEQ ID NO: 1203432
guucuuccgaaagaaacua

SEQ ID NO: 1203434 - RNA, 19 nt, Artificial Sequence
  Description of Artificial Sequence: Synthetic oligonucleotide
  Sense strand starting at position 579 of SEQ ID NO: 917035
ucuuccucgacuugggaaa

SEQ ID NO: 1203435 - RNA, 19 nt, Artificial Sequence
  Description of Artificial Sequence: Synthetic oligonucleotide
  Antisense strand to SEQ ID NO: 1203434
uuucccaagucgaggaaga

SEQ ID NO: 1203436 - RNA, 19 nt, Artificial Sequence
  Description of Artificial Sequence: Synthetic oligonucleotide
  Sense strand starting at position 725 of SEQ ID NO: 917035
uuaaauaucuacuagugga

SEQ ID NO: 1203437 - RNA, 19 nt, Artificial Sequence
  Description of Artificial Sequence: Synthetic oligonucleotide
  Antisense strand to SEQ ID NO: 1203436
uccacuaguagauauuuaa

SEQ ID NO: 1203438 - RNA, 19 nt, Artificial Sequence
  Description of Artificial Sequence: Synthetic oligonucleotide
  Sense strand starting at position 886 of SEQ ID NO: 917035
ucucgagucgcuggaacua

SEQ ID NO: 1203439 - RNA, 19 nt, Artificial Sequence
  Description of Artificial Sequence: Synthetic oligonucleotide
  Antisense strand to SEQ ID NO: 1203438
uaguuccagcgacucgaga

SEQ ID NO: 1203440 - RNA, 19 nt, Artificial Sequence
  Description of Artificial Sequence: Synthetic oligonucleotide
  Sense strand starting at position 1067 of SEQ ID NO: 917035
ggauaauagacguguucca

SEQ ID NO: 1203441 - RNA, 19 nt, Artificial Sequence
  Description of Artificial Sequence: Synthetic oligonucleotide
  Antisense strand to SEQ ID NO: 1203440
uggaacacgucuauuaucc

SEQ ID NO: 1203442 - RNA, 19 nt, Artificial Sequence
  Description of Artificial Sequence: Synthetic oligonucleotide
  Sense strand starting at position 1097 of SEQ ID NO: 917035
cccaaaucuuugucuuggu

SEQ ID NO: 1203443 - RNA, 19 nt, Artificial Sequence
  Description of Artificial Sequence: Synthetic oligonucleotide
  Antisense strand to SEQ ID NO: 1203442
accaagacaaagauuuggg

SEQ ID NO: 1203444 - RNA, 19 nt, Artificial Sequence
  Description of Artificial Sequence: Synthetic oligonucleotide
  Sense strand starting at position 1098 of SEQ ID NO: 917035
ccaaaucuuugucuuggua

SEQ ID NO: 1203445 - RNA, 19 nt, Artificial Sequence
  Description of Artificial Sequence: Synthetic oligonucleotide
  Antisense strand to SEQ ID NO: 1203444
uaccaagacaaagauuugg

SEQ ID NO: 1203446 - RNA, 19 nt, Artificial Sequence
  Description of Artificial Sequence: Synthetic oligonucleotide
  Sense strand starting at position 1101 of SEQ ID NO: 917035
aaucuuugucuugguaaug

SEQ ID NO: 1203447 - RNA, 19 nt, Artificial Sequence
  Description of Artificial Sequence: Synthetic oligonucleotide
  Antisense strand to SEQ ID NO: 1203446
cauuaccaagacaaagauu

SEQ ID NO: 1203448 - RNA, 19 nt, Artificial Sequence
  Description of Artificial Sequence: Synthetic oligonucleotide
  Sense strand starting at position 1107 of SEQ ID NO: 917035
ugucuugguaauggaauaa

SEQ ID NO: 1203449 - RNA, 19 nt, Artificial Sequence
  Description of Artificial Sequence: Synthetic oligonucleotide
  Antisense strand to SEQ ID NO: 1203448
uuauuccauuaccaagaca

SEQ ID NO: 1203450 - RNA, 19 nt, Artificial Sequence
  Description of Artificial Sequence: Synthetic oligonucleotide
  Sense strand starting at position 1152 of SEQ ID NO: 917035
gggcuuaaauccucagaug

SEQ ID NO: 1203451 - RNA, 19 nt, Artificial Sequence
  Description of Artificial Sequence: Synthetic oligonucleotide
  Antisense strand to SEQ ID NO: 1203450
caucugaggauuuaagccc

SEQ ID NO: 1203452 - RNA, 19 nt, Artificial Sequence
  Description of Artificial Sequence: Synthetic oligonucleotide
  Sense strand starting at position 1163 of SEQ ID NO: 917035
cucagaugacgccaaaguu

SEQ ID NO: 1203453 - RNA, 19 nt, Artificial Sequence
  Description of Artificial Sequence: Synthetic oligonucleotide
  Antisense strand to SEQ ID NO: 1203452
aacuuuggcgucaucugag

SEQ ID NO: 1203454 - RNA, 19 nt, Artificial Sequence
  Description of Artificial Sequence: Synthetic oligonucleotide
  Sense strand starting at position 1409 of SEQ ID NO: 917035
cucggacucugcuccagaa

SEQ ID NO: 1203455 - RNA, 19 nt, Artificial Sequence
  Description of Artificial Sequence: Synthetic oligonucleotide
  Antisense strand to SEQ ID NO: 1203454
uucuggagcagaguccgag

SEQ ID NO: 1203456 - RNA, 19 nt, Artificial Sequence
  Description of Artificial Sequence: Synthetic oligonucleotide
  Sense strand starting at position 1411 of SEQ ID NO: 917035
cggacucugcuccagaauu

SEQ ID NO: 1203457 - RNA, 19 nt, Artificial Sequence
  Description of Artificial Sequence: Synthetic oligonucleotide
  Antisense strand to SEQ ID NO: 1203456
aauucuggagcagaguccg

SEQ ID NO: 1203458 - RNA, 19 nt, Artificial Sequence
  Description of Artificial Sequence: Synthetic oligonucleotide
  Sense strand starting at position 1597 of SEQ ID NO: 917035
gagggagcccgucacgaaa

SEQ ID NO: 1203459 - RNA, 19 nt, Artificial Sequence
  Description of Artificial Sequence: Synthetic oligonucleotide
  Antisense strand to SEQ ID NO: 1203458
uuucgugacgggcucccuc

SEQ ID NO: 1203460 - RNA, 19 nt, Artificial Sequence
  Description of Artificial Sequence: Synthetic oligonucleotide
  Sense strand starting at position 1681 of SEQ ID NO: 917035
cgccgcuccacuugagaaa

SEQ ID NO: 1203461 - RNA, 19 nt, Artificial Sequence
  Description of Artificial Sequence: Synthetic oligonucleotide
  Antisense strand to SEQ ID NO: 1203460
uuucucaaguggagcggcg

SEQ ID NO: 1203462 - RNA, 19 nt, Artificial Sequence
  Description of Artificial Sequence: Synthetic oligonucleotide
  Sense strand starting at position 2369 of SEQ ID NO: 917035
aggucugcccugugaggau

SEQ ID NO: 1203463 - RNA, 19 nt, Artificial Sequence
  Description of Artificial Sequence: Synthetic oligonucleotide
  Antisense strand to SEQ ID NO: 1203462
auccucacagggcagaccu

SEQ ID NO: 1203464 - RNA, 19 nt, Artificial Sequence
  Description of Artificial Sequence: Synthetic oligonucleotide
  Sense strand starting at position 2473 of SEQ ID NO: 917035
aucagucacucccagugaa

SEQ ID NO: 1203465 - RNA, 19 nt, Artificial Sequence
  Description of Artificial Sequence: Synthetic oligonucleotide
  Antisense strand to SEQ ID NO: 1203464
uucacugggagugacugau

SEQ ID NO: 1203466 - RNA, 19 nt, Artificial Sequence
  Description of Artificial Sequence: Synthetic oligonucleotide
  Sense strand starting at position 2565 of SEQ ID NO: 917035
uuaggucauuccuagaccu

SEQ ID NO: 1203467 - RNA, 19 nt, Artificial Sequence
  Description of Artificial Sequence: Synthetic oligonucleotide
  Antisense strand to SEQ ID NO: 1203466
aggucuaggaaugaccuaa

SEQ ID NO: 1203468 - RNA, 19 nt, Artificial Sequence
  Description of Artificial Sequence: Synthetic oligonucleotide
  Sense strand starting at position 2767 of SEQ ID NO: 917035
ccacuacugccuggcuauu

SEQ ID NO: 1203469 - RNA, 19 nt, Artificial Sequence
  Description of Artificial Sequence: Synthetic oligonucleotide
  Antisense strand to SEQ ID NO: 1203468
aauagccaggcaguagugg

SEQ ID NO: 1203470 - RNA, 19 nt, Artificial Sequence
  Description of Artificial Sequence: Synthetic oligonucleotide
  Sense strand starting at position 2909 of SEQ ID NO: 917035
ccuggagacucuuuccauc

SEQ ID NO: 1203471 - RNA, 19 nt, Artificial Sequence
  Description of Artificial Sequence: Synthetic oligonucleotide
  Antisense strand to SEQ ID NO: 1203470
gauggaaagagucuccagg

SEQ ID NO: 1203472 - RNA, 19 nt, Artificial Sequence
  Description of Artificial Sequence: Synthetic oligonucleotide
  Sense strand starting at position 2911 of SEQ ID NO: 917035
uggagacucuuuccaucua

SEQ ID NO: 1203473 - RNA, 19 nt, Artificial Sequence
  Description of Artificial Sequence: Synthetic oligonucleotide
  Antisense strand to SEQ ID NO: 1203472
uagauggaaagagucucca

SEQ ID NO: 1203474 - RNA, 19 nt, Artificial Sequence
  Description of Artificial Sequence: Synthetic oligonucleotide
  Sense strand starting at position 2944 of SEQ ID NO: 917035
gugggccuuccucaaacau

SEQ ID NO: 1203475 - RNA, 19 nt, Artificial Sequence
  Description of Artificial Sequence: Synthetic oligonucleotide
  Antisense strand to SEQ ID NO: 1203474
auguuugaggaaggcccac

SEQ ID NO: 1203476 - RNA, 19 nt, Artificial Sequence
  Description of Artificial Sequence: Synthetic oligonucleotide
  Sense strand starting at position 2986 of SEQ ID NO: 917035
ugucuaaauguguacucuu

SEQ ID NO: 1203477 - RNA, 19 nt, Artificial Sequence
  Description of Artificial Sequence: Synthetic oligonucleotide
  Antisense strand to SEQ ID NO: 1203476
aagaguacacauuuagaca

SEQ ID NO: 1203478 - RNA, 19 nt, Artificial Sequence
  Description of Artificial Sequence: Synthetic oligonucleotide
  Sense strand starting at position 2994 of SEQ ID NO: 917035
uguguacucuugucuccaa

SEQ ID NO: 1203479 - RNA, 19 nt, Artificial Sequence
  Description of Artificial Sequence: Synthetic oligonucleotide
  Antisense strand to SEQ ID NO: 1203478
uuggagacaagaguacaca

SEQ ID NO: 1203480 - RNA, 19 nt, Artificial Sequence
  Description of Artificial Sequence: Synthetic oligonucleotide
  Sense strand starting at position 2995 of SEQ ID NO: 917035
guguacucuugucuccaau

SEQ ID NO: 1203481 - RNA, 19 nt, Artificial Sequence
  Description of Artificial Sequence: Synthetic oligonucleotide
  Antisense strand to SEQ ID NO: 1203480
auuggagacaagaguacac

SEQ ID NO: 1203482 - RNA, 19 nt, Artificial Sequence
  Description of Artificial Sequence: Synthetic oligonucleotide
  Sense strand starting at position 2997 of SEQ ID NO: 917035
guacucuugucuccaauaa

SEQ ID NO: 1203483 - RNA, 19 nt, Artificial Sequence
  Description of Artificial Sequence: Synthetic oligonucleotide
  Antisense strand to SEQ ID NO: 1203482
uuauuggagacaagaguac

SEQ ID NO: 1203484 - RNA, 19 nt, Artificial Sequence
  Description of Artificial Sequence: Synthetic oligonucleotide
  Sense strand starting at position 3079 of SEQ ID NO: 917035
cauccugaguccugacaag

SEQ ID NO: 1203485 - RNA, 19 nt, Artificial Sequence
  Description of Artificial Sequence: Synthetic oligonucleotide
  Antisense strand to SEQ ID NO: 1203484
cuugucaggacucaggaug

SEQ ID NO: 1203486 - RNA, 19 nt, Artificial Sequence
  Description of Artificial Sequence: Synthetic oligonucleotide
  Sense strand starting at position 3090 of SEQ ID NO: 917035
cugacaagucacugcacaa

SEQ ID NO: 1203487 - RNA, 19 nt, Artificial Sequence
  Description of Artificial Sequence: Synthetic oligonucleotide
  Antisense strand to SEQ ID NO: 1203486
uugugcagugacuugucag

SEQ ID NO: 1203488 - RNA, 19 nt, Artificial Sequence
  Description of Artificial Sequence: Synthetic oligonucleotide
  Sense strand starting at position 3120 of SEQ ID NO: 917035
gcguucuaaggucaaaguu

SEQ ID NO: 1203489 - RNA, 19 nt, Artificial Sequence
  Description of Artificial Sequence: Synthetic oligonucleotide
  Antisense strand to SEQ ID NO: 1203488
aacuuugaccuuagaacgc

SEQ ID NO: 1203490 - RNA, 19 nt, Artificial Sequence
  Description of Artificial Sequence: Synthetic oligonucleotide
  Sense strand starting at position 3129 of SEQ ID NO: 917035
ggucaaaguuguuuccaca

SEQ ID NO: 1203491 - RNA, 19 nt, Artificial Sequence
  Description of Artificial Sequence: Synthetic oligonucleotide
  Antisense strand to SEQ ID NO: 1203490
uguggaaacaacuuugacc

SEQ ID NO: 1203492 - RNA, 19 nt, Artificial Sequence
  Description of Artificial Sequence: Synthetic oligonucleotide
  Sense strand starting at position 3159 of SEQ ID NO: 917035
ccuacaaguuaguacuuua

SEQ ID NO: 1203493 - RNA, 19 nt, Artificial Sequence
  Description of Artificial Sequence: Synthetic oligonucleotide
  Antisense strand to SEQ ID NO: 1203492
uaaaguacuaacuuguagg

SEQ ID NO: 1203494 - RNA, 19 nt, Artificial Sequence
  Description of Artificial Sequence: Synthetic oligonucleotide
  Sense strand starting at position 3162 of SEQ ID NO: 917035
acaaguuaguacuuuagga

SEQ ID NO: 1203495 - RNA, 19 nt, Artificial Sequence
  Description of Artificial Sequence: Synthetic oligonucleotide
  Antisense strand to SEQ ID NO: 1203494
uccuaaaguacuaacuugu

SEQ ID NO: 1203496 - RNA, 19 nt, Artificial Sequence
  Description of Artificial Sequence: Synthetic oligonucleotide
  Sense strand starting at position 3220 of SEQ ID NO: 917035
gcgugcacucacuguguga

SEQ ID NO: 1203497 - RNA, 19 nt, Artificial Sequence
  Description of Artificial Sequence: Synthetic oligonucleotide
  Antisense strand to SEQ ID NO: 1203496
ucacacagugagugcacgc

SEQ ID NO: 1203498 - RNA, 19 nt, Artificial Sequence
  Description of Artificial Sequence: Synthetic oligonucleotide
  Sense strand starting at position 3233 of SEQ ID NO: 917035
gugugaccugugcaugguu

SEQ ID NO: 1203499 - RNA, 19 nt, Artificial Sequence
  Description of Artificial Sequence: Synthetic oligonucleotide
  Antisense strand to SEQ ID NO: 1203498
aaccaugcacaggucacac

SEQ ID NO: 1203500 - RNA, 19 nt, Artificial Sequence
  Description of Artificial Sequence: Synthetic oligonucleotide
  Sense strand starting at position 3288 of SEQ ID NO: 917035
aguaaucccugcuugaucu

SEQ ID NO: 1203501 - RNA, 19 nt, Artificial Sequence
  Description of Artificial Sequence: Synthetic oligonucleotide
  Antisense strand to SEQ ID NO: 1203500
agaucaagcagggauuacu

SEQ ID NO: 1203502 - RNA, 19 nt, Artificial Sequence
  Description of Artificial Sequence: Synthetic oligonucleotide
  Sense strand starting at position 3289 of SEQ ID NO: 917035
guaaucccugcuugaucua

SEQ ID NO: 1203503 - RNA, 19 nt, Artificial Sequence
  Description of Artificial Sequence: Synthetic oligonucleotide
  Antisense strand to SEQ ID NO: 1203502
uagaucaagcagggauuac

SEQ ID NO: 1203504 - RNA, 19 nt, Artificial Sequence
  Description of Artificial Sequence: Synthetic oligonucleotide
  Sense strand starting at position 3329 of SEQ ID NO: 917035
guagguccagcugaaugaa

SEQ ID NO: 1203505 - RNA, 19 nt, Artificial Sequence
  Description of Artificial Sequence: Synthetic oligonucleotide
  Antisense strand to SEQ ID NO: 1203504
uucauucagcuggaccuac

SEQ ID NO: 1203506 - RNA, 19 nt, Artificial Sequence
  Description of Artificial Sequence: Synthetic oligonucleotide
  Sense strand starting at position 3339 of SEQ ID NO: 917035
cugaaugaaugcuaaauga

SEQ ID NO: 1203507 - RNA, 19 nt, Artificial Sequence
  Description of Artificial Sequence: Synthetic oligonucleotide
  Antisense strand to SEQ ID NO: 1203506
ucauuuagcauucauucag

SEQ ID NO: 1203508 - RNA, 19 nt, Artificial Sequence
  Description of Artificial Sequence: Synthetic oligonucleotide
  Sense strand starting at position 424 of SEQ ID NO: 917036
cuacauaauucugugcaga

SEQ ID NO: 1203509 - RNA, 19 nt, Artificial Sequence
  Description of Artificial Sequence: Synthetic oligonucleotide
  Antisense strand to SEQ ID NO: 1203508
ucugcacagaauuauguag

SEQ ID NO: 1203510 - RNA, 19 nt, Artificial Sequence
  Description of Artificial Sequence: Synthetic oligonucleotide
  Sense strand starting at position 426 of SEQ ID NO: 917036
acauaauucugugcagaaa

SEQ ID NO: 1203511 - RNA, 19 nt, Artificial Sequence
  Description of Artificial Sequence: Synthetic oligonucleotide
  Antisense strand to SEQ ID NO: 1203510
uuucugcacagaauuaugu

SEQ ID NO: 1203512 - RNA, 19 nt, Artificial Sequence
  Description of Artificial Sequence: Synthetic oligonucleotide
  Sense strand starting at position 821 of SEQ ID NO: 917036
gucuauuagcagcaagaac

SEQ ID NO: 1203513 - RNA, 19 nt, Artificial Sequence
  Description of Artificial Sequence: Synthetic oligonucleotide
  Antisense strand to SEQ ID NO: 1203512
guucuugcugcuaauagac

SEQ ID NO: 1203514 - RNA, 19 nt, Artificial Sequence
  Description of Artificial Sequence: Synthetic oligonucleotide
  Sense strand starting at position 908 of SEQ ID NO: 917036
ucgaaauuaaugcggauaa

SEQ ID NO: 1203515 - RNA, 19 nt, Artificial Sequence
  Description of Artificial Sequence: Synthetic oligonucleotide
  Antisense strand to SEQ ID NO: 1203514
uuauccgcauuaauuucga

SEQ ID NO: 1203516 - RNA, 19 nt, Artificial Sequence
  Description of Artificial Sequence: Synthetic oligonucleotide
  Sense strand starting at position 1029 of SEQ ID NO: 917036
aguguucaucugggagaaa

SEQ ID NO: 1203517 - RNA, 19 nt, Artificial Sequence
  Description of Artificial Sequence: Synthetic oligonucleotide
  Antisense strand to SEQ ID NO: 1203516
uuucucccagaugaacacu

SEQ ID NO: 1203518 - RNA, 19 nt, Artificial Sequence
  Description of Artificial Sequence: Synthetic oligonucleotide
  Sense strand starting at position 1040 of SEQ ID NO: 917036
gggagaaagacucgcuauu

SEQ ID NO: 1203519 - RNA, 19 nt, Artificial Sequence
  Description of Artificial Sequence: Synthetic oligonucleotide
  Antisense strand to SEQ ID NO: 1203518
aauagcgagucuuucuccc

SEQ ID NO: 1203520 - RNA, 19 nt, Artificial Sequence
  Description of Artificial Sequence: Synthetic oligonucleotide
  Sense strand starting at position 1042 of SEQ ID NO: 917036
gagaaagacucgcuauuaa

SEQ ID NO: 1203521 - RNA, 19 nt, Artificial Sequence
  Description of Artificial Sequence: Synthetic oligonucleotide
  Antisense strand to SEQ ID NO: 1203520
uuaauagcgagucuuucuc

SEQ ID NO: 1203522 - RNA, 19 nt, Artificial Sequence
  Description of Artificial Sequence: Synthetic oligonucleotide
  Sense strand starting at position 1061 of SEQ ID NO: 917036
caguaagagcuugaguuua

SEQ ID NO: 1203523 - RNA, 19 nt, Artificial Sequence
  Description of Artificial Sequence: Synthetic oligonucleotide
  Antisense strand to SEQ ID NO: 1203522
uaaacucaagcucuuacug

SEQ ID NO: 1203524 - RNA, 19 nt, Artificial Sequence
  Description of Artificial Sequence: Synthetic oligonucleotide
  Sense strand starting at position 1066 of SEQ ID NO: 917036
agagcuugaguuuacacua

SEQ ID NO: 1203525 - RNA, 19 nt, Artificial Sequence
  Description of Artificial Sequence: Synthetic oligonucleotide
  Antisense strand to SEQ ID NO: 1203524
uaguguaaacucaagcucu

SEQ ID NO: 1203526 - RNA, 19 nt, Artificial Sequence
  Description of Artificial Sequence: Synthetic oligonucleotide
  Sense strand starting at position 1081 of SEQ ID NO: 917036
acuagaacucguuaaguga

SEQ ID NO: 1203527 - RNA, 19 nt, Artificial Sequence
  Description of Artificial Sequence: Synthetic oligonucleotide
  Antisense strand to SEQ ID NO: 1203526
ucacuuaacgaguucuagu

SEQ ID NO: 1203528 - RNA, 19 nt, Artificial Sequence
  Description of Artificial Sequence: Synthetic oligonucleotide
  Sense strand starting at position 1090 of SEQ ID NO: 917036
cguuaagugaucgcgagua

SEQ ID NO: 1203529 - RNA, 19 nt, Artificial Sequence
  Description of Artificial Sequence: Synthetic oligonucleotide
  Antisense strand to SEQ ID NO: 1203528
uacucgcgaucacuuaacg

SEQ ID NO: 1203530 - RNA, 19 nt, Artificial Sequence
  Description of Artificial Sequence: Synthetic oligonucleotide
  Sense strand starting at position 1295 of SEQ ID NO: 917036
cgagauuucucagaacaua

SEQ ID NO: 1203531 - RNA, 19 nt, Artificial Sequence
  Description of Artificial Sequence: Synthetic oligonucleotide
  Antisense strand to SEQ ID NO: 1203530
uauguucugagaaaucucg

SEQ ID NO: 1203532 - RNA, 19 nt, Artificial Sequence
  Description of Artificial Sequence: Synthetic oligonucleotide
  Sense strand starting at position 1407 of SEQ ID NO: 917036
aucaaaguccuguaauauu

SEQ ID NO: 1203533 - RNA, 19 nt, Artificial Sequence
  Description of Artificial Sequence: Synthetic oligonucleotide
  Antisense strand to SEQ ID NO: 1203532
aauauuacaggacuuugau

SEQ ID NO: 1203534 - RNA, 19 nt, Artificial Sequence
  Description of Artificial Sequence: Synthetic oligonucleotide
  Sense strand starting at position 1418 of SEQ ID NO: 917036
guaauauucuccuuuggac

SEQ ID NO: 1203535 - RNA, 19 nt, Artificial Sequence
  Description of Artificial Sequence: Synthetic oligonucleotide
  Antisense strand to SEQ ID NO: 1203534
guccaaaggagaauauuac

SEQ ID NO: 1203536 - RNA, 19 nt, Artificial Sequence
  Description of Artificial Sequence: Synthetic oligonucleotide
  Sense strand starting at position 2153 of SEQ ID NO: 917036
ggacaugccgcagaaucua

SEQ ID NO: 1203537 - RNA, 19 nt, Artificial Sequence
  Description of Artificial Sequence: Synthetic oligonucleotide
  Antisense strand to SEQ ID NO: 1203536
uagauucugcggcaugucc

SEQ ID NO: 1203538 - RNA, 19 nt, Artificial Sequence
  Description of Artificial Sequence: Synthetic oligonucleotide
  Sense strand starting at position 2481 of SEQ ID NO: 917036
uuuagagacucaguguauc

SEQ ID NO: 1203539 - RNA, 19 nt, Artificial Sequence
  Description of Artificial Sequence: Synthetic oligonucleotide
  Antisense strand to SEQ ID NO: 1203538
gauacacugagucucuaaa

SEQ ID NO: 1203540 - RNA, 19 nt, Artificial Sequence
  Description of Artificial Sequence: Synthetic oligonucleotide
  Sense strand starting at position 2484 of SEQ ID NO: 917036
agagacucaguguaucuuu

SEQ ID NO: 1203541 - RNA, 19 nt, Artificial Sequence
  Description of Artificial Sequence: Synthetic oligonucleotide
  Antisense strand to SEQ ID NO: 1203540
aaagauacacugagucucu

SEQ ID NO: 1203542 - RNA, 19 nt, Artificial Sequence
  Description of Artificial Sequence: Synthetic oligonucleotide
  Sense strand starting at position 2565 of SEQ ID NO: 917036
cgauuauaccauugcaaau

SEQ ID NO: 1203543 - RNA, 19 nt, Artificial Sequence
  Description of Artificial Sequence: Synthetic oligonucleotide
  Antisense strand to SEQ ID NO: 1203542
auuugcaaugguauaaucg

SEQ ID NO: 1203544 - RNA, 19 nt, Artificial Sequence
  Description of Artificial Sequence: Synthetic oligonucleotide
  Sense strand starting at position 2643 of SEQ ID NO: 917036
uggacagauuuguaaggua

SEQ ID NO: 1203545 - RNA, 19 nt, Artificial Sequence
  Description of Artificial Sequence: Synthetic oligonucleotide
  Antisense strand to SEQ ID NO: 1203544
uaccuuacaaaucugucca

SEQ ID NO: 1203546 - RNA, 19 nt, Artificial Sequence
  Description of Artificial Sequence: Synthetic oligonucleotide
  Sense strand starting at position 2656 of SEQ ID NO: 917036
aagguagcagcagauauua

SEQ ID NO: 1203547 - RNA, 19 nt, Artificial Sequence
  Description of Artificial Sequence: Synthetic oligonucleotide
  Antisense strand to SEQ ID NO: 1203546
uaauaucugcugcuaccuu

SEQ ID NO: 1203548 - RNA, 19 nt, Artificial Sequence
  Description of Artificial Sequence: Synthetic oligonucleotide
  Sense strand starting at position 2712 of SEQ ID NO: 917036
uaguuccuuccugaaaggu

SEQ ID NO: 1203549 - RNA, 19 nt, Artificial Sequence
  Description of Artificial Sequence: Synthetic oligonucleotide
  Antisense strand to SEQ ID NO: 1203548
accuuucaggaaggaacua

SEQ ID NO: 1203550 - RNA, 19 nt, Artificial Sequence
  Description of Artificial Sequence: Synthetic oligonucleotide
  Sense strand starting at position 2937 of SEQ ID NO: 917036
gaugaacaggccugcaauu

SEQ ID NO: 1203551 - RNA, 19 nt, Artificial Sequence
  Description of Artificial Sequence: Synthetic oligonucleotide
  Antisense strand to SEQ ID NO: 1203550
aauugcaggccuguucauc

SEQ ID NO: 1203552 - RNA, 19 nt, Artificial Sequence
  Description of Artificial Sequence: Synthetic oligonucleotide
  Sense strand starting at position 3159 of SEQ ID NO: 917036
gacuacauugcugagcaga

SEQ ID NO: 1203553 - RNA, 19 nt, Artificial Sequence
  Description of Artificial Sequence: Synthetic oligonucleotide
  Antisense strand to SEQ ID NO: 1203552
ucugcucagcaauguaguc

SEQ ID NO: 1203554 - RNA, 19 nt, Artificial Sequence
  Description of Artificial Sequence: Synthetic oligonucleotide
  Sense strand starting at position 3161 of SEQ ID NO: 917036
cuacauugcugagcagaga

SEQ ID NO: 1203555 - RNA, 19 nt, Artificial Sequence
  Description of Artificial Sequence: Synthetic oligonucleotide
  Antisense strand to SEQ ID NO: 1203554
ucucugcucagcaauguag

SEQ ID NO: 1203556 - RNA, 19 nt, Artificial Sequence
  Description of Artificial Sequence: Synthetic oligonucleotide
  Sense strand starting at position 3310 of SEQ ID NO: 917036
gggaaaggccacuguauuc

SEQ ID NO: 1203557 - RNA, 19 nt, Artificial Sequence
  Description of Artificial Sequence: Synthetic oligonucleotide
  Antisense strand to SEQ ID NO: 1203556
gaauacaguggccuuuccc

SEQ ID NO: 1203558 - RNA, 19 nt, Artificial Sequence
  Description of Artificial Sequence: Synthetic oligonucleotide
  Sense strand starting at position 3344 of SEQ ID NO: 917036
aggaaugucuaguuagguu

SEQ ID NO: 1203559 - RNA, 19 nt, Artificial Sequence
  Description of Artificial Sequence: Synthetic oligonucleotide
  Antisense strand to SEQ ID NO: 1203558
aaccuaacuagacauuccu

SEQ ID NO: 1203560 - RNA, 19 nt, Artificial Sequence
  Description of Artificial Sequence: Synthetic oligonucleotide
  Sense strand starting at position 3405 of SEQ ID NO: 917036
aguacaauaguuugacuua

SEQ ID NO: 1203561 - RNA, 19 nt, Artificial Sequence
  Description of Artificial Sequence: Synthetic oligonucleotide
  Antisense strand to SEQ ID NO: 1203560
uaagucaaacuauuguacu

SEQ ID NO: 1203562 - RNA, 19 nt, Artificial Sequence
  Description of Artificial Sequence: Synthetic oligonucleotide
  Sense strand starting at position 3427 of SEQ ID NO: 917036
gcugcaagcgucuugggua

SEQ ID NO: 1203563 - RNA, 19 nt, Artificial Sequence
  Description of Artificial Sequence: Synthetic oligonucleotide
  Antisense strand to SEQ ID NO: 1203562
uacccaagacgcuugcagc

SEQ ID NO: 1203564 - RNA, 19 nt, Artificial Sequence
  Description of Artificial Sequence: Synthetic oligonucleotide
  Sense strand starting at position 3489 of SEQ ID NO: 917036
ucuauugugucuccauuua

SEQ ID NO: 1203565 - RNA, 19 nt, Artificial Sequence
  Description of Artificial Sequence: Synthetic oligonucleotide
  Antisense strand to SEQ ID NO: 1203564
uaaauggagacacaauaga

SEQ ID NO: 1203566 - RNA, 19 nt, Artificial Sequence
  Description of Artificial Sequence: Synthetic oligonucleotide
  Sense strand starting at position 3543 of SEQ ID NO: 917036
cuuagauuuguaugguagu

SEQ ID NO: 1203567 - RNA, 19 nt, Artificial Sequence
  Description of Artificial Sequence: Synthetic oligonucleotide
  Antisense strand to SEQ ID NO: 1203566
acuaccauacaaaucuaag

SEQ ID NO: 1203568 - RNA, 19 nt, Artificial Sequence
  Description of Artificial Sequence: Synthetic oligonucleotide
  Sense strand starting at position 3653 of SEQ ID NO: 917036
cuuuaagagguuuggaaau

SEQ ID NO: 1203569 - RNA, 19 nt, Artificial Sequence
  Description of Artificial Sequence: Synthetic oligonucleotide
  Antisense strand to SEQ ID NO: 1203568
auuuccaaaccucuuaaag

SEQ ID NO: 1203570 - RNA, 19 nt, Artificial Sequence
  Description of Artificial Sequence: Synthetic oligonucleotide
  Sense strand starting at position 3684 of SEQ ID NO: 917036
uugggaagucagcagguuu

SEQ ID NO: 1203571 - RNA, 19 nt, Artificial Sequence
  Description of Artificial Sequence: Synthetic oligonucleotide
  Antisense strand to SEQ ID NO: 1203570
aaaccugcugacuucccaa

SEQ ID NO: 1203572 - RNA, 19 nt, Artificial Sequence
  Description of Artificial Sequence: Synthetic oligonucleotide
  Sense strand starting at position 3710 of SEQ ID NO: 917036
aagacaagugucuguaaga

SEQ ID NO: 1203573 - RNA, 19 nt, Artificial Sequence
  Description of Artificial Sequence: Synthetic oligonucleotide
  Antisense strand to SEQ ID NO: 1203572
ucuuacagacacuugucuu

SEQ ID NO: 1203574 - RNA, 19 nt, Artificial Sequence
  Description of Artificial Sequence: Synthetic oligonucleotide
  Sense strand starting at position 3711 of SEQ ID NO: 917036
agacaagugucuguaagaa

SEQ ID NO: 1203575 - RNA, 19 nt, Artificial Sequence
  Description of Artificial Sequence: Synthetic oligonucleotide
  Antisense strand to SEQ ID NO: 1203574
uucuuacagacacuugucu

SEQ ID NO: 1203576 - RNA, 19 nt, Artificial Sequence
  Description of Artificial Sequence: Synthetic oligonucleotide
  Sense strand starting at position 3753 of SEQ ID NO: 917036
ugcagauaagaggguuuau

SEQ ID NO: 1203577 - RNA, 19 nt, Artificial Sequence
  Description of Artificial Sequence: Synthetic oligonucleotide
  Antisense strand to SEQ ID NO: 1203576
auaaacccucuuaucugca

SEQ ID NO: 1203578 - RNA, 19 nt, Artificial Sequence
  Description of Artificial Sequence: Synthetic oligonucleotide
  Sense strand starting at position 3878 of SEQ ID NO: 917036
gcugaauauggcuacccua

SEQ ID NO: 1203579 - RNA, 19 nt, Artificial Sequence
  Description of Artificial Sequence: Synthetic oligonucleotide
  Antisense strand to SEQ ID NO: 1203578
uaggguagccauauucagc

SEQ ID NO: 1203580 - RNA, 19 nt, Artificial Sequence
  Description of Artificial Sequence: Synthetic oligonucleotide
  Sense strand starting at position 3903 of SEQ ID NO: 917036
ccaaauugacaggguugua

SEQ ID NO: 1203581 - RNA, 19 nt, Artificial Sequence
  Description of Artificial Sequence: Synthetic oligonucleotide
  Antisense strand to SEQ ID NO: 1203580
uacaacccugucaauuugg

SEQ ID NO: 1203582 - RNA, 19 nt, Artificial Sequence
  Description of Artificial Sequence: Synthetic oligonucleotide
  Sense strand starting at position 3922 of SEQ ID NO: 917036
gcugcaugcagagauuaca

SEQ ID NO: 1203583 - RNA, 19 nt, Artificial Sequence
  Description of Artificial Sequence: Synthetic oligonucleotide
  Antisense strand to SEQ ID NO: 1203582
uguaaucucugcaugcagc

SEQ ID NO: 1203584 - RNA, 19 nt, Artificial Sequence
  Description of Artificial Sequence: Synthetic oligonucleotide
  Sense strand starting at position 3958 of SEQ ID NO: 917036
aguuuaaaguuccuaagag

SEQ ID NO: 1203585 - RNA, 19 nt, Artificial Sequence
  Description of Artificial Sequence: Synthetic oligonucleotide
  Antisense strand to SEQ ID NO: 1203584
cucuuaggaacuuuaaacu

SEQ ID NO: 1203586 - RNA, 19 nt, Artificial Sequence
  Description of Artificial Sequence: Synthetic oligonucleotide
  Sense strand starting at position 3973 of SEQ ID NO: 917036
agagaaagcacgugaauga

SEQ ID NO: 1203587 - RNA, 19 nt, Artificial Sequence
  Description of Artificial Sequence: Synthetic oligonucleotide
  Antisense strand to SEQ ID NO: 1203586
ucauucacgugcuuucucu

SEQ ID NO: 1203588 - RNA, 19 nt, Artificial Sequence
  Description of Artificial Sequence: Synthetic oligonucleotide
  Sense strand starting at position 48 of SEQ ID NO: 917037
aaguuaacgaguuggcaug

SEQ ID NO: 1203589 - RNA, 19 nt, Artificial Sequence
  Description of Artificial Sequence: Synthetic oligonucleotide
  Antisense strand to SEQ ID NO: 1203588
caugccaacucguuaacuu

SEQ ID NO: 1203590 - RNA, 19 nt, Artificial Sequence
  Description of Artificial Sequence: Synthetic oligonucleotide
  Sense strand starting at position 54 of SEQ ID NO: 917037
acgaguuggcauggaguuu

SEQ ID NO: 1203591 - RNA, 19 nt, Artificial Sequence
  Description of Artificial Sequence: Synthetic oligonucleotide
  Antisense strand to SEQ ID NO: 1203590
aaacuccaugccaacucgu

SEQ ID NO: 1203592 - RNA, 19 nt, Artificial Sequence
  Description of Artificial Sequence: Synthetic oligonucleotide
  Sense strand starting at position 545 of SEQ ID NO: 917037
ggacauagauaucaagaag

SEQ ID NO: 1203593 - RNA, 19 nt, Artificial Sequence
  Description of Artificial Sequence: Synthetic oligonucleotide
  Antisense strand to SEQ ID NO: 1203592
cuucuugauaucuaugucc

SEQ ID NO: 1203594 - RNA, 19 nt, Artificial Sequence
  Description of Artificial Sequence: Synthetic oligonucleotide
  Sense strand starting at position 593 of SEQ ID NO: 917037
uugggaugcaccugcucaa

SEQ ID NO: 1203595 - RNA, 19 nt, Artificial Sequence
  Description of Artificial Sequence: Synthetic oligonucleotide
  Antisense strand to SEQ ID NO: 1203594
uugagcaggugcaucccaa

SEQ ID NO: 1203596 - RNA, 19 nt, Artificial Sequence
  Description of Artificial Sequence: Synthetic oligonucleotide
  Sense strand starting at position 596 of SEQ ID NO: 917037
ggaugcaccugcucaaacu

SEQ ID NO: 1203597 - RNA, 19 nt, Artificial Sequence
  Description of Artificial Sequence: Synthetic oligonucleotide
  Antisense strand to SEQ ID NO: 1203596
aguuugagcaggugcaucc

SEQ ID NO: 1203598 - RNA, 19 nt, Artificial Sequence
  Description of Artificial Sequence: Synthetic oligonucleotide
  Sense strand starting at position 622 of SEQ ID NO: 917037
uguacuaauggccacaaau

SEQ ID NO: 1203599 - RNA, 19 nt, Artificial Sequence
  Description of Artificial Sequence: Synthetic oligonucleotide
  Antisense strand to SEQ ID NO: 1203598
auuuguggccauuaguaca

SEQ ID NO: 1203600 - RNA, 19 nt, Artificial Sequence
  Description of Artificial Sequence: Synthetic oligonucleotide
  Sense strand starting at position 716 of SEQ ID NO: 917037
ccuuaacuccagcaggaua

SEQ ID NO: 1203601 - RNA, 19 nt, Artificial Sequence
  Description of Artificial Sequence: Synthetic oligonucleotide
  Antisense strand to SEQ ID NO: 1203600
uauccugcuggaguuaagg

SEQ ID NO: 1203602 - RNA, 19 nt, Artificial Sequence
  Description of Artificial Sequence: Synthetic oligonucleotide
  Sense strand starting at position 718 of SEQ ID NO: 917037
uuaacuccagcaggauaua

SEQ ID NO: 1203603 - RNA, 19 nt, Artificial Sequence
  Description of Artificial Sequence: Synthetic oligonucleotide
  Antisense strand to SEQ ID NO: 1203602
uauauccugcuggaguuaa

SEQ ID NO: 1203604 - RNA, 19 nt, Artificial Sequence
  Description of Artificial Sequence: Synthetic oligonucleotide
  Sense strand starting at position 905 of SEQ ID NO: 917037
acuguaagccuuugaaaga

SEQ ID NO: 1203605 - RNA, 19 nt, Artificial Sequence
  Description of Artificial Sequence: Synthetic oligonucleotide
  Antisense strand to SEQ ID NO: 1203604
ucuuucaaaggcuuacagu

SEQ ID NO: 1203606 - RNA, 19 nt, Artificial Sequence
  Description of Artificial Sequence: Synthetic oligonucleotide
  Sense strand starting at position 1162 of SEQ ID NO: 917037
cucucaguauggcuggaaa

SEQ ID NO: 1203607 - RNA, 19 nt, Artificial Sequence
  Description of Artificial Sequence: Synthetic oligonucleotide
  Antisense strand to SEQ ID NO: 1203606
uuuccagccauacugagag

SEQ ID NO: 1203608 - RNA, 19 nt, Artificial Sequence
  Description of Artificial Sequence: Synthetic oligonucleotide
  Sense strand starting at position 1164 of SEQ ID NO: 917037
cucaguauggcuggaaaca

SEQ ID NO: 1203609 - RNA, 19 nt, Artificial Sequence
  Description of Artificial Sequence: Synthetic oligonucleotide
  Antisense strand to SEQ ID NO: 1203608
uguuuccagccauacugag

SEQ ID NO: 1203610 - RNA, 19 nt, Artificial Sequence
  Description of Artificial Sequence: Synthetic oligonucleotide
  Sense strand starting at position 1165 of SEQ ID NO: 917037
ucaguauggcuggaaacau

SEQ ID NO: 1203611 - RNA, 19 nt, Artificial Sequence
  Description of Artificial Sequence: Synthetic oligonucleotide
  Antisense strand to SEQ ID NO: 1203610
auguuuccagccauacuga

SEQ ID NO: 1203612 - RNA, 19 nt, Artificial Sequence
  Description of Artificial Sequence: Synthetic oligonucleotide
  Sense strand starting at position 1259 of SEQ ID NO: 917037
auuggcauuauccggacaa

SEQ ID NO: 1203613 - RNA, 19 nt, Artificial Sequence
  Description of Artificial Sequence: Synthetic oligonucleotide
  Antisense strand to SEQ ID NO: 1203612
uuguccggauaaugccaau

SEQ ID NO: 1203614 - RNA, 19 nt, Artificial Sequence
  Description of Artificial Sequence: Synthetic oligonucleotide
  Sense strand starting at position 1261 of SEQ ID NO: 917037
uggcauuauccggacaaug

SEQ ID NO: 1203615 - RNA, 19 nt, Artificial Sequence
  Description of Artificial Sequence: Synthetic oligonucleotide
  Antisense strand to SEQ ID NO: 1203614
cauuguccggauaaugcca

SEQ ID NO: 1203616 - RNA, 19 nt, Artificial Sequence
  Description of Artificial Sequence: Synthetic oligonucleotide
  Sense strand starting at position 1263 of SEQ ID NO: 917037
gcauuauccggacaaugga

SEQ ID NO: 1203617 - RNA, 19 nt, Artificial Sequence
  Description of Artificial Sequence: Synthetic oligonucleotide
  Antisense strand to SEQ ID NO: 1203616
uccauuguccggauaaugc

SEQ ID NO: 1203618 - RNA, 19 nt, Artificial Sequence
  Description of Artificial Sequence: Synthetic oligonucleotide
  Sense strand starting at position 1292 of SEQ ID NO: 917037
ggagcuuucucuucuggaa

SEQ ID NO: 1203619 - RNA, 19 nt, Artificial Sequence
  Description of Artificial Sequence: Synthetic oligonucleotide
  Antisense strand to SEQ ID NO: 1203618
uuccagaagagaaagcucc

SEQ ID NO: 1203620 - RNA, 19 nt, Artificial Sequence
  Description of Artificial Sequence: Synthetic oligonucleotide
  Sense strand starting at position 1333 of SEQ ID NO: 917037
ggaugauggugggagaaau

SEQ ID NO: 1203621 - RNA, 19 nt, Artificial Sequence
  Description of Artificial Sequence: Synthetic oligonucleotide
  Antisense strand to SEQ ID NO: 1203620
auuucucccaccaucaucc

SEQ ID NO: 1203622 - RNA, 19 nt, Artificial Sequence
  Description of Artificial Sequence: Synthetic oligonucleotide
  Sense strand starting at position 1391 of SEQ ID NO: 917037
aggcgugucggacaagauu

SEQ ID NO: 1203623 - RNA, 19 nt, Artificial Sequence
  Description of Artificial Sequence: Synthetic oligonucleotide
  Antisense strand to SEQ ID NO: 1203622
aaucuuguccgacacgccu

SEQ ID NO: 1203624 - RNA, 19 nt, Artificial Sequence
  Description of Artificial Sequence: Synthetic oligonucleotide
  Sense strand starting at position 1582 of SEQ ID NO: 917037
ccgagaucucgguucgguu

SEQ ID NO: 1203625 - RNA, 19 nt, Artificial Sequence
  Description of Artificial Sequence: Synthetic oligonucleotide
  Antisense strand to SEQ ID NO: 1203624
aaccgaaccgagaucucgg

SEQ ID NO: 1203626 - RNA, 19 nt, Artificial Sequence
  Description of Artificial Sequence: Synthetic oligonucleotide
  Sense strand starting at position 1583 of SEQ ID NO: 917037
cgagaucucgguucgguuu

SEQ ID NO: 1203627 - RNA, 19 nt, Artificial Sequence
  Description of Artificial Sequence: Synthetic oligonucleotide
  Antisense strand to SEQ ID NO: 1203626
aaaccgaaccgagaucucg

SEQ ID NO: 1203628 - RNA, 19 nt, Artificial Sequence
  Description of Artificial Sequence: Synthetic oligonucleotide
  Sense strand starting at position 1594 of SEQ ID NO: 917037
uucgguuuccgacagguuu

SEQ ID NO: 1203629 - RNA, 19 nt, Artificial Sequence
  Description of Artificial Sequence: Synthetic oligonucleotide
  Antisense strand to SEQ ID NO: 1203628
aaaccugucggaaaccgaa

SEQ ID NO: 1203630 - RNA, 19 nt, Artificial Sequence
  Description of Artificial Sequence: Synthetic oligonucleotide
  Sense strand starting at position 2093 of SEQ ID NO: 917037
cgaagucauagcccgugua

SEQ ID NO: 1203631 - RNA, 19 nt, Artificial Sequence
  Description of Artificial Sequence: Synthetic oligonucleotide
  Antisense strand to SEQ ID NO: 1203630
uacacgggcuaugacuucg

SEQ ID NO: 1203632 - RNA, 19 nt, Artificial Sequence
  Description of Artificial Sequence: Synthetic oligonucleotide
  Sense strand starting at position 2097 of SEQ ID NO: 917037
gucauagcccguguaucuu

SEQ ID NO: 1203633 - RNA, 19 nt, Artificial Sequence
  Description of Artificial Sequence: Synthetic oligonucleotide
  Antisense strand to SEQ ID NO: 1203632
aagauacacgggcuaugac

SEQ ID NO: 1203634 - RNA, 19 nt, Artificial Sequence
  Description of Artificial Sequence: Synthetic oligonucleotide
  Sense strand starting at position 2540 of SEQ ID NO: 917037
ccucuuugaccguagauga

SEQ ID NO: 1203635 - RNA, 19 nt, Artificial Sequence
  Description of Artificial Sequence: Synthetic oligonucleotide
  Antisense strand to SEQ ID NO: 1203634
ucaucuacggucaaagagg

SEQ ID NO: 1203636 - RNA, 19 nt, Artificial Sequence
  Description of Artificial Sequence: Synthetic oligonucleotide
  Sense strand starting at position 2556 of SEQ ID NO: 917037
ugaagcauacacugaacau

SEQ ID NO: 1203637 - RNA, 19 nt, Artificial Sequence
  Description of Artificial Sequence: Synthetic oligonucleotide
  Antisense strand to SEQ ID NO: 1203636
auguucaguguaugcuuca

SEQ ID NO: 1203638 - RNA, 19 nt, Artificial Sequence
  Description of Artificial Sequence: Synthetic oligonucleotide
  Sense strand starting at position 3268 of SEQ ID NO: 917037
gagcuacuggacgauuaca

SEQ ID NO: 1203639 - RNA, 19 nt, Artificial Sequence
  Description of Artificial Sequence: Synthetic oligonucleotide
  Antisense strand to SEQ ID NO: 1203638
uguaaucguccaguagcuc

SEQ ID NO: 1203640 - RNA, 19 nt, Artificial Sequence
  Description of Artificial Sequence: Synthetic oligonucleotide
  Sense strand starting at position 3278 of SEQ ID NO: 917037
acgauuacauagccuauua

SEQ ID NO: 1203641 - RNA, 19 nt, Artificial Sequence
  Description of Artificial Sequence: Synthetic oligonucleotide
  Antisense strand to SEQ ID NO: 1203640
uaauaggcuauguaaucgu

SEQ ID NO: 1203642 - RNA, 19 nt, Artificial Sequence
  Description of Artificial Sequence: Synthetic oligonucleotide
  Sense strand starting at position 3345 of SEQ ID NO: 917037
cagggaacaucuuuguguu

SEQ ID NO: 1203643 - RNA, 19 nt, Artificial Sequence
  Description of Artificial Sequence: Synthetic oligonucleotide
  Antisense strand to SEQ ID NO: 1203642
aacacaaagauguucccug

SEQ ID NO: 1203644 - RNA, 19 nt, Artificial Sequence
  Description of Artificial Sequence: Synthetic oligonucleotide
  Sense strand starting at position 3346 of SEQ ID NO: 917037
agggaacaucuuuguguuu

SEQ ID NO: 1203645 - RNA, 19 nt, Artificial Sequence
  Description of Artificial Sequence: Synthetic oligonucleotide
  Antisense strand to SEQ ID NO: 1203644
aaacacaaagauguucccu

SEQ ID NO: 1203646 - RNA, 19 nt, Artificial Sequence
  Description of Artificial Sequence: Synthetic oligonucleotide
  Sense strand starting at position 3351 of SEQ ID NO: 917037
acaucuuuguguuuauagu

SEQ ID NO: 1203647 - RNA, 19 nt, Artificial Sequence
  Description of Artificial Sequence: Synthetic oligonucleotide
  Antisense strand to SEQ ID NO: 1203646
acuauaaacacaaagaugu

SEQ ID NO: 1203648 - RNA, 19 nt, Artificial Sequence
  Description of Artificial Sequence: Synthetic oligonucleotide
  Sense strand starting at position 3352 of SEQ ID NO: 917037
caucuuuguguuuauaguu

SEQ ID NO: 1203649 - RNA, 19 nt, Artificial Sequence
  Description of Artificial Sequence: Synthetic oligonucleotide
  Antisense strand to SEQ ID NO: 1203648
aacuauaaacacaaagaug

SEQ ID NO: 1203650 - RNA, 19 nt, Artificial Sequence
  Description of Artificial Sequence: Synthetic oligonucleotide
  Sense strand starting at position 3411 of SEQ ID NO: 917037
aacugugguucccauuuga

SEQ ID NO: 1203651 - RNA, 19 nt, Artificial Sequence
  Description of Artificial Sequence: Synthetic oligonucleotide
  Antisense strand to SEQ ID NO: 1203650
ucaaaugggaaccacaguu

SEQ ID NO: 1203652 - RNA, 19 nt, Artificial Sequence
  Description of Artificial Sequence: Synthetic oligonucleotide
  Sense strand starting at position 3500 of SEQ ID NO: 917037
gucacuguucucuaucagu

SEQ ID NO: 1203653 - RNA, 19 nt, Artificial Sequence
  Description of Artificial Sequence: Synthetic oligonucleotide
  Antisense strand to SEQ ID NO: 1203652
acugauagagaacagugac

SEQ ID NO: 1203654 - RNA, 19 nt, Artificial Sequence
  Description of Artificial Sequence: Synthetic oligonucleotide
  Sense strand starting at position 3594 of SEQ ID NO: 917037
guuacaaggugacucaaau

SEQ ID NO: 1203655 - RNA, 19 nt, Artificial Sequence
  Description of Artificial Sequence: Synthetic oligonucleotide
  Antisense strand to SEQ ID NO: 1203654
auuugagucaccuuguaac

SEQ ID NO: 1203656 - RNA, 19 nt, Artificial Sequence
  Description of Artificial Sequence: Synthetic oligonucleotide
  Sense strand starting at position 3650 of SEQ ID NO: 917037
uagugaacuugucugguca

SEQ ID NO: 1203657 - RNA, 19 nt, Artificial Sequence
  Description of Artificial Sequence: Synthetic oligonucleotide
  Antisense strand to SEQ ID NO: 1203656
ugaccagacaaguucacua

SEQ ID NO: 1203658 - RNA, 19 nt, Artificial Sequence
  Description of Artificial Sequence: Synthetic oligonucleotide
  Sense strand starting at position 3654 of SEQ ID NO: 917037
gaacuugucuggucaccag

SEQ ID NO: 1203659 - RNA, 19 nt, Artificial Sequence
  Description of Artificial Sequence: Synthetic oligonucleotide
  Antisense strand to SEQ ID NO: 1203658
cuggugaccagacaaguuc

SEQ ID NO: 1203660 - RNA, 19 nt, Artificial Sequence
  Description of Artificial Sequence: Synthetic oligonucleotide
  Sense strand starting at position 3779 of SEQ ID NO: 917037
cuggguguuuauuugcuua

SEQ ID NO: 1203661 - RNA, 19 nt, Artificial Sequence
  Description of Artificial Sequence: Synthetic oligonucleotide
  Antisense strand to SEQ ID NO: 1203660
uaagcaaauaaacacccag

SEQ ID NO: 1203662 - RNA, 19 nt, Artificial Sequence
  Description of Artificial Sequence: Synthetic oligonucleotide
  Sense strand starting at position 3781 of SEQ ID NO: 917037
ggguguuuauuugcuuaaa

SEQ ID NO: 1203663 - RNA, 19 nt, Artificial Sequence
  Description of Artificial Sequence: Synthetic oligonucleotide
  Antisense strand to SEQ ID NO: 1203662
uuuaagcaaauaaacaccc

SEQ ID NO: 1203664 - RNA, 19 nt, Artificial Sequence
  Description of Artificial Sequence: Synthetic oligonucleotide
  Sense strand starting at position 3782 of SEQ ID NO: 917037
gguguuuauuugcuuaaac

SEQ ID NO: 1203665 - RNA, 19 nt, Artificial Sequence
  Description of Artificial Sequence: Synthetic oligonucleotide
  Antisense strand to SEQ ID NO: 1203664
guuuaagcaaauaaacacc

SEQ ID NO: 1203666 - RNA, 19 nt, Artificial Sequence
  Description of Artificial Sequence: Synthetic oligonucleotide
  Sense strand starting at position 3783 of SEQ ID NO: 917037
guguuuauuugcuuaaaca

SEQ ID NO: 1203667 - RNA, 19 nt, Artificial Sequence
  Description of Artificial Sequence: Synthetic oligonucleotide
  Antisense strand to SEQ ID NO: 1203666
uguuuaagcaaauaaacac

SEQ ID NO: 1203668 - RNA, 19 nt, Artificial Sequence
  Description of Artificial Sequence: Synthetic oligonucleotide
  Sense strand starting at position 2 of SEQ ID NO: 917038
cagaguucuagucaggguu

SEQ ID NO: 1203669 - RNA, 19 nt, Artificial Sequence
  Description of Artificial Sequence: Synthetic oligonucleotide
  Antisense strand to SEQ ID NO: 1203668
aacccugacuagaacucug

SEQ ID NO: 1203670 - RNA, 19 nt, Artificial Sequence
  Description of Artificial Sequence: Synthetic oligonucleotide
  Sense strand starting at position 5 of SEQ ID NO: 917038
aguucuagucaggguuaaa

SEQ ID NO: 1203671 - RNA, 19 nt, Artificial Sequence
  Description of Artificial Sequence: Synthetic oligonucleotide
  Antisense strand to SEQ ID NO: 1203670
uuuaacccugacuagaacu

SEQ ID NO: 1203672 - RNA, 19 nt, Artificial Sequence
  Description of Artificial Sequence: Synthetic oligonucleotide
  Sense strand starting at position 8 of SEQ ID NO: 917038
ucuagucaggguuaaauca

SEQ ID NO: 1203673 - RNA, 19 nt, Artificial Sequence
  Description of Artificial Sequence: Synthetic oligonucleotide
  Antisense strand to SEQ ID NO: 1203672
ugauuuaacccugacuaga

SEQ ID NO: 1203674 - RNA, 19 nt, Artificial Sequence
  Description of Artificial Sequence: Synthetic oligonucleotide
  Sense strand starting at position 15 of SEQ ID NO: 917038
aggguuaaaucauugcacu

SEQ ID NO: 1203675 - RNA, 19 nt, Artificial Sequence
  Description of Artificial Sequence: Synthetic oligonucleotide
  Antisense strand to SEQ ID NO: 1203674
agugcaaugauuuaacccu

SEQ ID NO: 1203676 - RNA, 19 nt, Artificial Sequence
  Description of Artificial Sequence: Synthetic oligonucleotide
  Sense strand starting at position 16 of SEQ ID NO: 917038
ggguuaaaucauugcacua

SEQ ID NO: 1203677 - RNA, 19 nt, Artificial Sequence
  Description of Artificial Sequence: Synthetic oligonucleotide
  Antisense strand to SEQ ID NO: 1203676
uagugcaaugauuuaaccc

SEQ ID NO: 1203678 - RNA, 19 nt, Artificial Sequence
  Description of Artificial Sequence: Synthetic oligonucleotide
  Sense strand starting at position 333 of SEQ ID NO: 917038
gggugaacucaguggaaca

SEQ ID NO: 1203679 - RNA, 19 nt, Artificial Sequence
  Description of Artificial Sequence: Synthetic oligonucleotide
  Antisense strand to SEQ ID NO: 1203678
uguuccacugaguucaccc

SEQ ID NO: 1203680 - RNA, 19 nt, Artificial Sequence
  Description of Artificial Sequence: Synthetic oligonucleotide
  Sense strand starting at position 334 of SEQ ID NO: 917038
ggugaacucaguggaacau

SEQ ID NO: 1203681 - RNA, 19 nt, Artificial Sequence
  Description of Artificial Sequence: Synthetic oligonucleotide
  Antisense strand to SEQ ID NO: 1203680
auguuccacugaguucacc

SEQ ID NO: 1203682 - RNA, 19 nt, Artificial Sequence
  Description of Artificial Sequence: Synthetic oligonucleotide
  Sense strand starting at position 922 of SEQ ID NO: 917038
uguggucgacgcguuuaau

SEQ ID NO: 1203683 - RNA, 19 nt, Artificial Sequence
  Description of Artificial Sequence: Synthetic oligonucleotide
  Antisense strand to SEQ ID NO: 1203682
auuaaacgcgucgaccaca

SEQ ID NO: 1203684 - RNA, 19 nt, Artificial Sequence
  Description of Artificial Sequence: Synthetic oligonucleotide
  Sense strand starting at position 923 of SEQ ID NO: 917038
guggucgacgcguuuaauc

SEQ ID NO: 1203685 - RNA, 19 nt, Artificial Sequence
  Description of Artificial Sequence: Synthetic oligonucleotide
  Antisense strand to SEQ ID NO: 1203684
gauuaaacgcgucgaccac

SEQ ID NO: 1203686 - RNA, 19 nt, Artificial Sequence
  Description of Artificial Sequence: Synthetic oligonucleotide
  Sense strand starting at position 946 of SEQ ID NO: 917038
uccuguacugccugagaga

SEQ ID NO: 1203687 - RNA, 19 nt, Artificial Sequence
  Description of Artificial Sequence: Synthetic oligonucleotide
  Antisense strand to SEQ ID NO: 1203686
ucucucaggcaguacagga

SEQ ID NO: 1203688 - RNA, 19 nt, Artificial Sequence
  Description of Artificial Sequence: Synthetic oligonucleotide
  Sense strand starting at position 998 of SEQ ID NO: 917038
auuuaauagucugugucca

SEQ ID NO: 1203689 - RNA, 19 nt, Artificial Sequence
  Description of Artificial Sequence: Synthetic oligonucleotide
  Antisense strand to SEQ ID NO: 1203688
uggacacagacuauuaaau

SEQ ID NO: 1203690 - RNA, 19 nt, Artificial Sequence
  Description of Artificial Sequence: Synthetic oligonucleotide
  Sense strand starting at position 1100 of SEQ ID NO: 917038
caggauuucugaggauuaa

SEQ ID NO: 1203691 - RNA, 19 nt, Artificial Sequence
  Description of Artificial Sequence: Synthetic oligonucleotide
  Antisense strand to SEQ ID NO: 1203690
uuaauccucagaaauccug

SEQ ID NO: 1203692 - RNA, 19 nt, Artificial Sequence
  Description of Artificial Sequence: Synthetic oligonucleotide
  Sense strand starting at position 1136 of SEQ ID NO: 917038
agagaagcauucuuacaua

SEQ ID NO: 1203693 - RNA, 19 nt, Artificial Sequence
  Description of Artificial Sequence: Synthetic oligonucleotide
  Antisense strand to SEQ ID NO: 1203692
uauguaagaaugcuucucu

SEQ ID NO: 1203694 - RNA, 19 nt, Artificial Sequence
  Description of Artificial Sequence: Synthetic oligonucleotide
  Sense strand starting at position 1990 of SEQ ID NO: 917038
acgugagggucuuuagaau

SEQ ID NO: 1203695 - RNA, 19 nt, Artificial Sequence
  Description of Artificial Sequence: Synthetic oligonucleotide
  Antisense strand to SEQ ID NO: 1203694
auucuaaagacccucacgu

SEQ ID NO: 1203696 - RNA, 19 nt, Artificial Sequence
  Description of Artificial Sequence: Synthetic oligonucleotide
  Sense strand starting at position 2097 of SEQ ID NO: 917038
cuccaaaggugauugaguu

SEQ ID NO: 1203697 - RNA, 19 nt, Artificial Sequence
  Description of Artificial Sequence: Synthetic oligonucleotide
  Antisense strand to SEQ ID NO: 1203696
aacucaaucaccuuuggag

SEQ ID NO: 1203698 - RNA, 19 nt, Artificial Sequence
  Description of Artificial Sequence: Synthetic oligonucleotide
  Sense strand starting at position 2146 of SEQ ID NO: 917038
ggucauggauuagucaguu

SEQ ID NO: 1203699 - RNA, 19 nt, Artificial Sequence
  Description of Artificial Sequence: Synthetic oligonucleotide
  Antisense strand to SEQ ID NO: 1203698
aacugacuaauccaugacc

SEQ ID NO: 1203700 - RNA, 19 nt, Artificial Sequence
  Description of Artificial Sequence: Synthetic oligonucleotide
  Sense strand starting at position 2164 of SEQ ID NO: 917038
uuggcaguucccuaaagga

SEQ ID NO: 1203701 - RNA, 19 nt, Artificial Sequence
  Description of Artificial Sequence: Synthetic oligonucleotide
  Antisense strand to SEQ ID NO: 1203700
uccuuuagggaacugccaa

SEQ ID NO: 1203702 - RNA, 19 nt, Artificial Sequence
  Description of Artificial Sequence: Synthetic oligonucleotide
  Sense strand starting at position 2292 of SEQ ID NO: 917038
auuagauucuaaguuuggu

SEQ ID NO: 1203703 - RNA, 19 nt, Artificial Sequence
  Description of Artificial Sequence: Synthetic oligonucleotide
  Antisense strand to SEQ ID NO: 1203702
accaaacuuagaaucuaau

SEQ ID NO: 1203704 - RNA, 19 nt, Artificial Sequence
  Description of Artificial Sequence: Synthetic oligonucleotide
  Sense strand starting at position 2295 of SEQ ID NO: 917038
agauucuaaguuugguauu

SEQ ID NO: 1203705 - RNA, 19 nt, Artificial Sequence
  Description of Artificial Sequence: Synthetic oligonucleotide
  Antisense strand to SEQ ID NO: 1203704
aauaccaaacuuagaaucu

SEQ ID NO: 1203706 - RNA, 19 nt, Artificial Sequence
  Description of Artificial Sequence: Synthetic oligonucleotide
  Sense strand starting at position 2445 of SEQ ID NO: 917038
acuagcaggcuaugaauau

SEQ ID NO: 1203707 - RNA, 19 nt, Artificial Sequence
  Description of Artificial Sequence: Synthetic oligonucleotide
  Antisense strand to SEQ ID NO: 1203706
auauucauagccugcuagu

SEQ ID NO: 1203708 - RNA, 19 nt, Artificial Sequence
  Description of Artificial Sequence: Synthetic oligonucleotide
  Sense strand starting at position 2504 of SEQ ID NO: 917038
gaaggaaugucuuucccac

SEQ ID NO: 1203709 - RNA, 19 nt, Artificial Sequence
  Description of Artificial Sequence: Synthetic oligonucleotide
  Antisense strand to SEQ ID NO: 1203708
gugggaaagacauuccuuc

SEQ ID NO: 1203710 - RNA, 19 nt, Artificial Sequence
  Description of Artificial Sequence: Synthetic oligonucleotide
  Sense strand starting at position 2506 of SEQ ID NO: 917038
aggaaugucuuucccacuu

SEQ ID NO: 1203711 - RNA, 19 nt, Artificial Sequence
  Description of Artificial Sequence: Synthetic oligonucleotide
  Antisense strand to SEQ ID NO: 1203710
aagugggaaagacauuccu

SEQ ID NO: 1203712 - RNA, 19 nt, Artificial Sequence
  Description of Artificial Sequence: Synthetic oligonucleotide
  Sense strand starting at position 2544 of SEQ ID NO: 917038
gaagcacucucagcugaga

SEQ ID NO: 1203713 - RNA, 19 nt, Artificial Sequence
  Description of Artificial Sequence: Synthetic oligonucleotide
  Antisense strand to SEQ ID NO: 1203712
ucucagcugagagugcuuc

SEQ ID NO: 1203714 - RNA, 19 nt, Artificial Sequence
  Description of Artificial Sequence: Synthetic oligonucleotide
  Sense strand starting at position 2638 of SEQ ID NO: 917038
aggcccuuccaaggugaaa

SEQ ID NO: 1203715 - RNA, 19 nt, Artificial Sequence
  Description of Artificial Sequence: Synthetic oligonucleotide
  Antisense strand to SEQ ID NO: 1203714
uuucaccuuggaagggccu

SEQ ID NO: 1203716 - RNA, 19 nt, Artificial Sequence
  Description of Artificial Sequence: Synthetic oligonucleotide
  Sense strand starting at position 2733 of SEQ ID NO: 917038
ccuguaaggugauuauuga

SEQ ID NO: 1203717 - RNA, 19 nt, Artificial Sequence
  Description of Artificial Sequence: Synthetic oligonucleotide
  Antisense strand to SEQ ID NO: 1203716
ucaauaaucaccuuacagg

SEQ ID NO: 1203718 - RNA, 19 nt, Artificial Sequence
  Description of Artificial Sequence: Synthetic oligonucleotide
  Sense strand starting at position 2743 of SEQ ID NO: 917038
gauuauugacaugaguguu

SEQ ID NO: 1203719 - RNA, 19 nt, Artificial Sequence
  Description of Artificial Sequence: Synthetic oligonucleotide
  Antisense strand to SEQ ID NO: 1203718
aacacucaugucaauaauc

SEQ ID NO: 1203720 - RNA, 19 nt, Artificial Sequence
  Description of Artificial Sequence: Synthetic oligonucleotide
  Sense strand starting at position 2749 of SEQ ID NO: 917038
ugacaugaguguuugauua

SEQ ID NO: 1203721 - RNA, 19 nt, Artificial Sequence
  Description of Artificial Sequence: Synthetic oligonucleotide
  Antisense strand to SEQ ID NO: 1203720
uaaucaaacacucauguca

SEQ ID NO: 1203722 - RNA, 19 nt, Artificial Sequence
  Description of Artificial Sequence: Synthetic oligonucleotide
  Sense strand starting at position 2753 of SEQ ID NO: 917038
augaguguuugauuauuga

SEQ ID NO: 1203723 - RNA, 19 nt, Artificial Sequence
  Description of Artificial Sequence: Synthetic oligonucleotide
  Antisense strand to SEQ ID NO: 1203722
ucaauaaucaaacacucau

SEQ ID NO: 1203724 - RNA, 19 nt, Artificial Sequence
  Description of Artificial Sequence: Synthetic oligonucleotide
  Sense strand starting at position 2756 of SEQ ID NO: 917038
aguguuugauuauugacau

SEQ ID NO: 1203725 - RNA, 19 nt, Artificial Sequence
  Description of Artificial Sequence: Synthetic oligonucleotide
  Antisense strand to SEQ ID NO: 1203724
augucaauaaucaaacacu

SEQ ID NO: 1203726 - RNA, 19 nt, Artificial Sequence
  Description of Artificial Sequence: Synthetic oligonucleotide
  Sense strand starting at position 2836 of SEQ ID NO: 917038
aggaaacaaugugauuuaa

SEQ ID NO: 1203727 - RNA, 19 nt, Artificial Sequence
  Description of Artificial Sequence: Synthetic oligonucleotide
  Antisense strand to SEQ ID NO: 1203726
uuaaaucacauuguuuccu

SEQ ID NO: 1203728 - RNA, 19 nt, Artificial Sequence
  Description of Artificial Sequence: Synthetic oligonucleotide
  Sense strand starting at position 2926 of SEQ ID NO: 917038
agccaaguucuguauuaau

SEQ ID NO: 1203729 - RNA, 19 nt, Artificial Sequence
  Description of Artificial Sequence: Synthetic oligonucleotide
  Antisense strand to SEQ ID NO: 1203728
auuaauacagaacuuggcu

SEQ ID NO: 1203730 - RNA, 19 nt, Artificial Sequence
  Description of Artificial Sequence: Synthetic oligonucleotide
  Sense strand starting at position 2955 of SEQ ID NO: 917038
gccuuuaucucauuuaguc

SEQ ID NO: 1203731 - RNA, 19 nt, Artificial Sequence
  Description of Artificial Sequence: Synthetic oligonucleotide
  Antisense strand to SEQ ID NO: 1203730
gacuaaaugagauaaaggc

SEQ ID NO: 1203732 - RNA, 19 nt, Artificial Sequence
  Description of Artificial Sequence: Synthetic oligonucleotide
  Sense strand starting at position 2976 of SEQ ID NO: 917038
ccgaaugacccaugaacca

SEQ ID NO: 1203733 - RNA, 19 nt, Artificial Sequence
  Description of Artificial Sequence: Synthetic oligonucleotide
  Antisense strand to SEQ ID NO: 1203732
ugguucaugggucauucgg

SEQ ID NO: 1203734 - RNA, 19 nt, Artificial Sequence
  Description of Artificial Sequence: Synthetic oligonucleotide
  Sense strand starting at position 3121 of SEQ ID NO: 917038
ugaagaggcuugccauuaa

SEQ ID NO: 1203735 - RNA, 19 nt, Artificial Sequence
  Description of Artificial Sequence: Synthetic oligonucleotide
  Antisense strand to SEQ ID NO: 1203734
uuaauggcaagccucuuca

SEQ ID NO: 1203736 - RNA, 19 nt, Artificial Sequence
  Description of Artificial Sequence: Synthetic oligonucleotide
  Sense strand starting at position 3154 of SEQ ID NO: 917038
gacagcucagagugauuau

SEQ ID NO: 1203737 - RNA, 19 nt, Artificial Sequence
  Description of Artificial Sequence: Synthetic oligonucleotide
  Antisense strand to SEQ ID NO: 1203736
auaaucacucugagcuguc

SEQ ID NO: 1203738 - RNA, 19 nt, Artificial Sequence
  Description of Artificial Sequence: Synthetic oligonucleotide
  Sense strand starting at position 3234 of SEQ ID NO: 917038
uuccuaagugagcaaauua

SEQ ID NO: 1203739 - RNA, 19 nt, Artificial Sequence
  Description of Artificial Sequence: Synthetic oligonucleotide
  Antisense strand to SEQ ID NO: 1203738
uaauuugcucacuuaggaa

SEQ ID NO: 1203740 - RNA, 19 nt, Artificial Sequence
  Description of Artificial Sequence: Synthetic oligonucleotide
  Sense strand starting at position 3254 of SEQ ID NO: 917038
agcaaagaugcccagagua

SEQ ID NO: 1203741 - RNA, 19 nt, Artificial Sequence
  Description of Artificial Sequence: Synthetic oligonucleotide
  Antisense strand to SEQ ID NO: 1203740
uacucugggcaucuuugcu

SEQ ID NO: 1203742 - RNA, 19 nt, Artificial Sequence
  Description of Artificial Sequence: Synthetic oligonucleotide
  Sense strand starting at position 3410 of SEQ ID NO: 917038
ucuauuuaguugcugguua

SEQ ID NO: 1203743 - RNA, 19 nt, Artificial Sequence
  Description of Artificial Sequence: Synthetic oligonucleotide
  Antisense strand to SEQ ID NO: 1203742
uaaccagcaacuaaauaga

SEQ ID NO: 1203744 - RNA, 19 nt, Artificial Sequence
  Description of Artificial Sequence: Synthetic oligonucleotide
  Sense strand starting at position 3412 of SEQ ID NO: 917038
uauuuaguugcugguuaau

SEQ ID NO: 1203745 - RNA, 19 nt, Artificial Sequence
  Description of Artificial Sequence: Synthetic oligonucleotide
  Antisense strand to SEQ ID NO: 1203744
auuaaccagcaacuaaaua

SEQ ID NO: 1203746 - RNA, 19 nt, Artificial Sequence
  Description of Artificial Sequence: Synthetic oligonucleotide
  Sense strand starting at position 3924 of SEQ ID NO: 917038
cugggagucuuccuggauu

SEQ ID NO: 1203747 - RNA, 19 nt, Artificial Sequence
  Description of Artificial Sequence: Synthetic oligonucleotide
  Antisense strand to SEQ ID NO: 1203746
aauccaggaagacucccag

SEQ ID NO: 1203748 - RNA, 19 nt, Artificial Sequence
  Description of Artificial Sequence: Synthetic oligonucleotide
  Sense strand starting at position 95 of SEQ ID NO: 917039
guuguagucagacagggua

SEQ ID NO: 1203749 - RNA, 19 nt, Artificial Sequence
  Description of Artificial Sequence: Synthetic oligonucleotide
  Antisense strand to SEQ ID NO: 1203748
uacccugucugacuacaac

SEQ ID NO: 1203750 - RNA, 19 nt, Artificial Sequence
  Description of Artificial Sequence: Synthetic oligonucleotide
  Sense strand starting at position 303 of SEQ ID NO: 917039
aggguagacucuuucugga

SEQ ID NO: 1203751 - RNA, 19 nt, Artificial Sequence
  Description of Artificial Sequence: Synthetic oligonucleotide
  Antisense strand to SEQ ID NO: 1203750
uccagaaagagucuacccu

SEQ ID NO: 1203752 - RNA, 19 nt, Artificial Sequence
  Description of Artificial Sequence: Synthetic oligonucleotide
  Sense strand starting at position 305 of SEQ ID NO: 917039
gguagacucuuucuggaug

SEQ ID NO: 1203753 - RNA, 19 nt, Artificial Sequence
  Description of Artificial Sequence: Synthetic oligonucleotide
  Antisense strand to SEQ ID NO: 1203752
cauccagaaagagucuacc

SEQ ID NO: 1203754 - RNA, 19 nt, Artificial Sequence
  Description of Artificial Sequence: Synthetic oligonucleotide
  Sense strand starting at position 379 of SEQ ID NO: 917039
ucugcuggucaggaggaau

SEQ ID NO: 1203755 - RNA, 19 nt, Artificial Sequence
  Description of Artificial Sequence: Synthetic oligonucleotide
  Antisense strand to SEQ ID NO: 1203754
auuccuccugaccagcaga

SEQ ID NO: 1203756 - RNA, 19 nt, Artificial Sequence
  Description of Artificial Sequence: Synthetic oligonucleotide
  Sense strand starting at position 418 of SEQ ID NO: 917039
uugcuuugacguucucgau

SEQ ID NO: 1203757 - RNA, 19 nt, Artificial Sequence
  Description of Artificial Sequence: Synthetic oligonucleotide
  Antisense strand to SEQ ID NO: 1203756
aucgagaacgucaaagcaa

SEQ ID NO: 1203758 - RNA, 19 nt, Artificial Sequence
  Description of Artificial Sequence: Synthetic oligonucleotide
  Sense strand starting at position 547 of SEQ ID NO: 917039
ggauguuguagucagacag

SEQ ID NO: 1203759 - RNA, 19 nt, Artificial Sequence
  Description of Artificial Sequence: Synthetic oligonucleotide
  Antisense strand to SEQ ID NO: 1203758
cugucugacuacaacaucc

SEQ ID NO: 1203760 - RNA, 19 nt, Artificial Sequence
  Description of Artificial Sequence: Synthetic oligonucleotide
  Sense strand starting at position 638 of SEQ ID NO: 917039
uuggaucuuugccuugaca

SEQ ID NO: 1203761 - RNA, 19 nt, Artificial Sequence
  Description of Artificial Sequence: Synthetic oligonucleotide
  Antisense strand to SEQ ID NO: 1203760
ugucaaggcaaagauccaa

SEQ ID NO: 1203762 - RNA, 19 nt, Artificial Sequence
  Description of Artificial Sequence: Synthetic oligonucleotide
  Sense strand starting at position 640 of SEQ ID NO: 917039
ggaucuuugccuugacauu

SEQ ID NO: 1203763 - RNA, 19 nt, Artificial Sequence
  Description of Artificial Sequence: Synthetic oligonucleotide
  Antisense strand to SEQ ID NO: 1203762
aaugucaaggcaaagaucc

SEQ ID NO: 1203764 - RNA, 19 nt, Artificial Sequence
  Description of Artificial Sequence: Synthetic oligonucleotide
  Sense strand starting at position 695 of SEQ ID NO: 917039
ggucuuaccagucagaguc

SEQ ID NO: 1203765 - RNA, 19 nt, Artificial Sequence
  Description of Artificial Sequence: Synthetic oligonucleotide
  Antisense strand to SEQ ID NO: 1203764
gacucugacugguaagacc

SEQ ID NO: 1203766 - RNA, 19 nt, Artificial Sequence
  Description of Artificial Sequence: Synthetic oligonucleotide
  Sense strand starting at position 719 of SEQ ID NO: 917039
gaagaucugcauugucuaa

SEQ ID NO: 1203767 - RNA, 19 nt, Artificial Sequence
  Description of Artificial Sequence: Synthetic oligonucleotide
  Antisense strand to SEQ ID NO: 1203766
uuagacaaugcagaucuuc

SEQ ID NO: 1203768 - RNA, 19 nt, Artificial Sequence
  Description of Artificial Sequence: Synthetic oligonucleotide
  Sense strand starting at position 721 of SEQ ID NO: 917039
agaucugcauugucuaaca

SEQ ID NO: 1203769 - RNA, 19 nt, Artificial Sequence
  Description of Artificial Sequence: Synthetic oligonucleotide
  Antisense strand to SEQ ID NO: 1203768
uguuagacaaugcagaucu

SEQ ID NO: 1203770 - RNA, 19 nt, Artificial Sequence
  Description of Artificial Sequence: Synthetic oligonucleotide
  Sense strand starting at position 767 of SEQ ID NO: 917039
cggacaauuuacuagucua

SEQ ID NO: 1203771 - RNA, 19 nt, Artificial Sequence
  Description of Artificial Sequence: Synthetic oligonucleotide
  Antisense strand to SEQ ID NO: 1203770
uagacuaguaaauuguccg

SEQ ID NO: 1203772 - RNA, 19 nt, Artificial Sequence
  Description of Artificial Sequence: Synthetic oligonucleotide
  Sense strand starting at position 1196 of SEQ ID NO: 917039
uucuccagucagugacaaa

SEQ ID NO: 1203773 - RNA, 19 nt, Artificial Sequence
  Description of Artificial Sequence: Synthetic oligonucleotide
  Antisense strand to SEQ ID NO: 1203772
uuugucacugacuggagaa

SEQ ID NO: 1203774 - RNA, 19 nt, Artificial Sequence
  Description of Artificial Sequence: Synthetic oligonucleotide
  Sense strand starting at position 1663 of SEQ ID NO: 917039
cggagaucccuccgcagaa

SEQ ID NO: 1203775 - RNA, 19 nt, Artificial Sequence
  Description of Artificial Sequence: Synthetic oligonucleotide
  Antisense strand to SEQ ID NO: 1203774
uucugcggagggaucuccg

SEQ ID NO: 1203776 - RNA, 19 nt, Artificial Sequence
  Description of Artificial Sequence: Synthetic oligonucleotide
  Sense strand starting at position 1664 of SEQ ID NO: 917039
ggagaucccuccgcagaau

SEQ ID NO: 1203777 - RNA, 19 nt, Artificial Sequence
  Description of Artificial Sequence: Synthetic oligonucleotide
  Antisense strand to SEQ ID NO: 1203776
auucugcggagggaucucc

SEQ ID NO: 1203778 - RNA, 19 nt, Artificial Sequence
  Description of Artificial Sequence: Synthetic oligonucleotide
  Sense strand starting at position 1713 of SEQ ID NO: 917039
uuccgcucucuggaaagaa

SEQ ID NO: 1203779 - RNA, 19 nt, Artificial Sequence
  Description of Artificial Sequence: Synthetic oligonucleotide
  Antisense strand to SEQ ID NO: 1203778
uucuuuccagagagcggaa

SEQ ID NO: 1203780 - RNA, 19 nt, Artificial Sequence
  Description of Artificial Sequence: Synthetic oligonucleotide
  Sense strand starting at position 2152 of SEQ ID NO: 917039
ugggucacauuugagguaa

SEQ ID NO: 1203781 - RNA, 19 nt, Artificial Sequence
  Description of Artificial Sequence: Synthetic oligonucleotide
  Antisense strand to SEQ ID NO: 1203780
uuaccucaaaugugaccca

SEQ ID NO: 1203782 - RNA, 19 nt, Artificial Sequence
  Description of Artificial Sequence: Synthetic oligonucleotide
  Sense strand starting at position 2154 of SEQ ID NO: 917039
ggucacauuugagguaaug

SEQ ID NO: 1203783 - RNA, 19 nt, Artificial Sequence
  Description of Artificial Sequence: Synthetic oligonucleotide
  Antisense strand to SEQ ID NO: 1203782
cauuaccucaaaugugacc

SEQ ID NO: 1203784 - RNA, 19 nt, Artificial Sequence
  Description of Artificial Sequence: Synthetic oligonucleotide
  Sense strand starting at position 2255 of SEQ ID NO: 917039
aggacaaugacucggcaga

SEQ ID NO: 1203785 - RNA, 19 nt, Artificial Sequence
  Description of Artificial Sequence: Synthetic oligonucleotide
  Antisense strand to SEQ ID NO: 1203784
ucugccgagucauuguccu

SEQ ID NO: 1203786 - RNA, 19 nt, Artificial Sequence
  Description of Artificial Sequence: Synthetic oligonucleotide
  Sense strand starting at position 2256 of SEQ ID NO: 917039
ggacaaugacucggcagau

SEQ ID NO: 1203787 - RNA, 19 nt, Artificial Sequence
  Description of Artificial Sequence: Synthetic oligonucleotide
  Antisense strand to SEQ ID NO: 1203786
aucugccgagucauugucc

SEQ ID NO: 1203788 - RNA, 19 nt, Artificial Sequence
  Description of Artificial Sequence: Synthetic oligonucleotide
  Sense strand starting at position 2257 of SEQ ID NO: 917039
gacaaugacucggcagauc

SEQ ID NO: 1203789 - RNA, 19 nt, Artificial Sequence
  Description of Artificial Sequence: Synthetic oligonucleotide
  Antisense strand to SEQ ID NO: 1203788
gaucugccgagucauuguc

SEQ ID NO: 1203790 - RNA, 19 nt, Artificial Sequence
  Description of Artificial Sequence: Synthetic oligonucleotide
  Sense strand starting at position 2302 of SEQ ID NO: 917039
gggaacgcucgagaacuuu

SEQ ID NO: 1203791 - RNA, 19 nt, Artificial Sequence
  Description of Artificial Sequence: Synthetic oligonucleotide
  Antisense strand to SEQ ID NO: 1203790
aaaguucucgagcguuccc

SEQ ID NO: 1203792 - RNA, 19 nt, Artificial Sequence
  Description of Artificial Sequence: Synthetic oligonucleotide
  Sense strand starting at position 2605 of SEQ ID NO: 917039
ggaauagaaucccaaccuu

SEQ ID NO: 1203793 - RNA, 19 nt, Artificial Sequence
  Description of Artificial Sequence: Synthetic oligonucleotide
  Antisense strand to SEQ ID NO: 1203792
aagguugggauucuauucc

SEQ ID NO: 1203794 - RNA, 19 nt, Artificial Sequence
  Description of Artificial Sequence: Synthetic oligonucleotide
  Sense strand starting at position 2640 of SEQ ID NO: 917039
gggugucaaauaugaaaug

SEQ ID NO: 1203795 - RNA, 19 nt, Artificial Sequence
  Description of Artificial Sequence: Synthetic oligonucleotide
  Antisense strand to SEQ ID NO: 1203794
cauuucauauuugacaccc

SEQ ID NO: 1203796 - RNA, 19 nt, Artificial Sequence
  Description of Artificial Sequence: Synthetic oligonucleotide
  Sense strand starting at position 2658 of SEQ ID NO: 917039
guaauucuacagggcaauu

SEQ ID NO: 1203797 - RNA, 19 nt, Artificial Sequence
  Description of Artificial Sequence: Synthetic oligonucleotide
  Antisense strand to SEQ ID NO: 1203796
aauugcccuguagaauuac

SEQ ID NO: 1203798 - RNA, 19 nt, Artificial Sequence
  Description of Artificial Sequence: Synthetic oligonucleotide
  Sense strand starting at position 2904 of SEQ ID NO: 917039
acaaauagucccuguuucu

SEQ ID NO: 1203799 - RNA, 19 nt, Artificial Sequence
  Description of Artificial Sequence: Synthetic oligonucleotide
  Antisense strand to SEQ ID NO: 1203798
agaaacagggacuauuugu

SEQ ID NO: 1203800 - RNA, 19 nt, Artificial Sequence
  Description of Artificial Sequence: Synthetic oligonucleotide
  Sense strand starting at position 3133 of SEQ ID NO: 917039
ccauguuucuguguauuua

SEQ ID NO: 1203801 - RNA, 19 nt, Artificial Sequence
  Description of Artificial Sequence: Synthetic oligonucleotide
  Antisense strand to SEQ ID NO: 1203800
uaaauacacagaaacaugg

SEQ ID NO: 1203802 - RNA, 19 nt, Artificial Sequence
  Description of Artificial Sequence: Synthetic oligonucleotide
  Sense strand starting at position 3157 of SEQ ID NO: 917039
auccaagaucugugcauug

SEQ ID NO: 1203803 - RNA, 19 nt, Artificial Sequence
  Description of Artificial Sequence: Synthetic oligonucleotide
  Antisense strand to SEQ ID NO: 1203802
caaugcacagaucuuggau

SEQ ID NO: 1203804 - RNA, 19 nt, Artificial Sequence
  Description of Artificial Sequence: Synthetic oligonucleotide
  Sense strand starting at position 3159 of SEQ ID NO: 917039
ccaagaucugugcauuguu

SEQ ID NO: 1203805 - RNA, 19 nt, Artificial Sequence
  Description of Artificial Sequence: Synthetic oligonucleotide
  Antisense strand to SEQ ID NO: 1203804
aacaaugcacagaucuugg

SEQ ID NO: 1203806 - RNA, 19 nt, Artificial Sequence
  Description of Artificial Sequence: Synthetic oligonucleotide
  Sense strand starting at position 3228 of SEQ ID NO: 917039
ucauguguuacugggaaau

SEQ ID NO: 1203807 - RNA, 19 nt, Artificial Sequence
  Description of Artificial Sequence: Synthetic oligonucleotide
  Antisense strand to SEQ ID NO: 1203806
auuucccaguaacacauga

SEQ ID NO: 1203808 - RNA, 19 nt, Artificial Sequence
  Description of Artificial Sequence: Synthetic oligonucleotide
  Sense strand starting at position 3343 of SEQ ID NO: 917039
cccuacauuucgggaagga

SEQ ID NO: 1203809 - RNA, 19 nt, Artificial Sequence
  Description of Artificial Sequence: Synthetic oligonucleotide
  Antisense strand to SEQ ID NO: 1203808
uccuucccgaaauguaggg

SEQ ID NO: 1203810 - RNA, 19 nt, Artificial Sequence
  Description of Artificial Sequence: Synthetic oligonucleotide
  Sense strand starting at position 3380 of SEQ ID NO: 917039
agcugagauucuuucugag

SEQ ID NO: 1203811 - RNA, 19 nt, Artificial Sequence
  Description of Artificial Sequence: Synthetic oligonucleotide
  Antisense strand to SEQ ID NO: 1203810
cucagaaagaaucucagcu

SEQ ID NO: 1203812 - RNA, 19 nt, Artificial Sequence
  Description of Artificial Sequence: Synthetic oligonucleotide
  Sense strand starting at position 3382 of SEQ ID NO: 917039
cugagauucuuucugaggu

SEQ ID NO: 1203813 - RNA, 19 nt, Artificial Sequence
  Description of Artificial Sequence: Synthetic oligonucleotide
  Antisense strand to SEQ ID NO: 1203812
accucagaaagaaucucag

SEQ ID NO: 1203814 - RNA, 19 nt, Artificial Sequence
  Description of Artificial Sequence: Synthetic oligonucleotide
  Sense strand starting at position 3451 of SEQ ID NO: 917039
gcugcaagccuugugauuc

SEQ ID NO: 1203815 - RNA, 19 nt, Artificial Sequence
  Description of Artificial Sequence: Synthetic oligonucleotide
  Antisense strand to SEQ ID NO: 1203814
gaaucacaaggcuugcagc

SEQ ID NO: 1203816 - RNA, 19 nt, Artificial Sequence
  Description of Artificial Sequence: Synthetic oligonucleotide
  Sense strand starting at position 3656 of SEQ ID NO: 917039
caauguugucucuagcaga

SEQ ID NO: 1203817 - RNA, 19 nt, Artificial Sequence
  Description of Artificial Sequence: Synthetic oligonucleotide
  Antisense strand to SEQ ID NO: 1203816
ucugcuagagacaacauug

SEQ ID NO: 1203818 - RNA, 19 nt, Artificial Sequence
  Description of Artificial Sequence: Synthetic oligonucleotide
  Sense strand starting at position 3706 of SEQ ID NO: 917039
ugacuuaaaugguuauuga

SEQ ID NO: 1203819 - RNA, 19 nt, Artificial Sequence
  Description of Artificial Sequence: Synthetic oligonucleotide
  Antisense strand to SEQ ID NO: 1203818
ucaauaaccauuuaaguca

SEQ ID NO: 1203820 - RNA, 19 nt, Artificial Sequence
  Description of Artificial Sequence: Synthetic oligonucleotide
  Sense strand starting at position 3798 of SEQ ID NO: 917039
gucugauguuucucuacaa

SEQ ID NO: 1203821 - RNA, 19 nt, Artificial Sequence
  Description of Artificial Sequence: Synthetic oligonucleotide
  Antisense strand to SEQ ID NO: 1203820
uuguagagaaacaucagac

SEQ ID NO: 1203822 - RNA, 19 nt, Artificial Sequence
  Description of Artificial Sequence: Synthetic oligonucleotide
  Sense strand starting at position 3872 of SEQ ID NO: 917039
ggagauauucuugguuguc

SEQ ID NO: 1203823 - RNA, 19 nt, Artificial Sequence
  Description of Artificial Sequence: Synthetic oligonucleotide
  Antisense strand to SEQ ID NO: 1203822
gacaaccaagaauaucucc

SEQ ID NO: 1203824 - RNA, 19 nt, Artificial Sequence
  Description of Artificial Sequence: Synthetic oligonucleotide
  Sense strand starting at position 3873 of SEQ ID NO: 917039
gagauauucuugguuguca

SEQ ID NO: 1203825 - RNA, 19 nt, Artificial Sequence
  Description of Artificial Sequence: Synthetic oligonucleotide
  Antisense strand to SEQ ID NO: 1203824
ugacaaccaagaauaucuc

SEQ ID NO: 1203826 - RNA, 19 nt, Artificial Sequence
  Description of Artificial Sequence: Synthetic oligonucleotide
  Sense strand starting at position 3875 of SEQ ID NO: 917039
gauauucuugguugucaca

SEQ ID NO: 1203827 - RNA, 19 nt, Artificial Sequence
  Description of Artificial Sequence: Synthetic oligonucleotide
  Antisense strand to SEQ ID NO: 1203826
ugugacaaccaagaauauc

SEQ ID NO: 1203828 - RNA, 19 nt, Artificial Sequence
  Description of Artificial Sequence: Synthetic oligonucleotide
  Sense strand starting at position 9 of SEQ ID NO: 917040
ggaccaugugacugcauua

SEQ ID NO: 1203829 - RNA, 19 nt, Artificial Sequence
  Description of Artificial Sequence: Synthetic oligonucleotide
  Antisense strand to SEQ ID NO: 1203828
uaaugcagucacauggucc

SEQ ID NO: 1203830 - RNA, 19 nt, Artificial Sequence
  Description of Artificial Sequence: Synthetic oligonucleotide
  Sense strand starting at position 14 of SEQ ID NO: 917040
augugacugcauuauaacu

SEQ ID NO: 1203831 - RNA, 19 nt, Artificial Sequence
  Description of Artificial Sequence: Synthetic oligonucleotide
  Antisense strand to SEQ ID NO: 1203830
aguuauaaugcagucacau

SEQ ID NO: 1203832 - RNA, 19 nt, Artificial Sequence
  Description of Artificial Sequence: Synthetic oligonucleotide
  Sense strand starting at position 210 of SEQ ID NO: 917040
acgucuuauuucucuacau

SEQ ID NO: 1203833 - RNA, 19 nt, Artificial Sequence
  Description of Artificial Sequence: Synthetic oligonucleotide
  Antisense strand to SEQ ID NO: 1203832
auguagagaaauaagacgu

SEQ ID NO: 1203834 - RNA, 19 nt, Artificial Sequence
  Description of Artificial Sequence: Synthetic oligonucleotide
  Sense strand starting at position 211 of SEQ ID NO: 917040
cgucuuauuucucuacauc

SEQ ID NO: 1203835 - RNA, 19 nt, Artificial Sequence
  Description of Artificial Sequence: Synthetic oligonucleotide
  Antisense strand to SEQ ID NO: 1203834
gauguagagaaauaagacg

SEQ ID NO: 1203836 - RNA, 19 nt, Artificial Sequence
  Description of Artificial Sequence: Synthetic oligonucleotide
  Sense strand starting at position 233 of SEQ ID NO: 917040
acccuuaggucagugacau

SEQ ID NO: 1203837 - RNA, 19 nt, Artificial Sequence
  Description of Artificial Sequence: Synthetic oligonucleotide
  Antisense strand to SEQ ID NO: 1203836
augucacugaccuaagggu

SEQ ID NO: 1203838 - RNA, 19 nt, Artificial Sequence
  Description of Artificial Sequence: Synthetic oligonucleotide
  Sense strand starting at position 234 of SEQ ID NO: 917040
cccuuaggucagugacauc

SEQ ID NO: 1203839 - RNA, 19 nt, Artificial Sequence
  Description of Artificial Sequence: Synthetic oligonucleotide
  Antisense strand to SEQ ID NO: 1203838
gaugucacugaccuaaggg

SEQ ID NO: 1203840 - RNA, 19 nt, Artificial Sequence
  Description of Artificial Sequence: Synthetic oligonucleotide
  Sense strand starting at position 244 of SEQ ID NO: 917040
agugacaucucccucaucu

SEQ ID NO: 1203841 - RNA, 19 nt, Artificial Sequence
  Description of Artificial Sequence: Synthetic oligonucleotide
  Antisense strand to SEQ ID NO: 1203840
agaugagggagaugucacu

SEQ ID NO: 1203842 - RNA, 19 nt, Artificial Sequence
  Description of Artificial Sequence: Synthetic oligonucleotide
  Sense strand starting at position 420 of SEQ ID NO: 917040
gcaauugagucacuuuaac

SEQ ID NO: 1203843 - RNA, 19 nt, Artificial Sequence
  Description of Artificial Sequence: Synthetic oligonucleotide
  Antisense strand to SEQ ID NO: 1203842
guuaaagugacucaauugc

SEQ ID NO: 1203844 - RNA, 19 nt, Artificial Sequence
  Description of Artificial Sequence: Synthetic oligonucleotide
  Sense strand starting at position 439 of SEQ ID NO: 917040
uggcgcauuuagucacaua

SEQ ID NO: 1203845 - RNA, 19 nt, Artificial Sequence
  Description of Artificial Sequence: Synthetic oligonucleotide
  Antisense strand to SEQ ID NO: 1203844
uaugugacuaaaugcgcca

SEQ ID NO: 1203846 - RNA, 19 nt, Artificial Sequence
  Description of Artificial Sequence: Synthetic oligonucleotide
  Sense strand starting at position 538 of SEQ ID NO: 917040
ucugaagacuugucgauau

SEQ ID NO: 1203847 - RNA, 19 nt, Artificial Sequence
  Description of Artificial Sequence: Synthetic oligonucleotide
  Antisense strand to SEQ ID NO: 1203846
auaucgacaagucuucaga

SEQ ID NO: 1203848 - RNA, 19 nt, Artificial Sequence
  Description of Artificial Sequence: Synthetic oligonucleotide
  Sense strand starting at position 865 of SEQ ID NO: 917040
ucggaacagcucugaaaga

SEQ ID NO: 1203849 - RNA, 19 nt, Artificial Sequence
  Description of Artificial Sequence: Synthetic oligonucleotide
  Antisense strand to SEQ ID NO: 1203848
ucuuucagagcuguuccga

SEQ ID NO: 1203850 - RNA, 19 nt, Artificial Sequence
  Description of Artificial Sequence: Synthetic oligonucleotide
  Sense strand starting at position 925 of SEQ ID NO: 917040
gcggaaacguauucagaag

SEQ ID NO: 1203851 - RNA, 19 nt, Artificial Sequence
  Description of Artificial Sequence: Synthetic oligonucleotide
  Antisense strand to SEQ ID NO: 1203850
cuucugaauacguuuccgc

SEQ ID NO: 1203852 - RNA, 19 nt, Artificial Sequence
  Description of Artificial Sequence: Synthetic oligonucleotide
  Sense strand starting at position 1596 of SEQ ID NO: 917040
ggcgguuaccuugaugauc

SEQ ID NO: 1203853 - RNA, 19 nt, Artificial Sequence
  Description of Artificial Sequence: Synthetic oligonucleotide
  Antisense strand to SEQ ID NO: 1203852
gaucaucaagguaaccgcc

SEQ ID NO: 1203854 - RNA, 19 nt, Artificial Sequence
  Description of Artificial Sequence: Synthetic oligonucleotide
  Sense strand starting at position 1870 of SEQ ID NO: 917040
gcggaagugacgcucuguu

SEQ ID NO: 1203855 - RNA, 19 nt, Artificial Sequence
  Description of Artificial Sequence: Synthetic oligonucleotide
  Antisense strand to SEQ ID NO: 1203854
aacagagcgucacuuccgc

SEQ ID NO: 1203856 - RNA, 19 nt, Artificial Sequence
  Description of Artificial Sequence: Synthetic oligonucleotide
  Sense strand starting at position 2369 of SEQ ID NO: 917040
cgggaagaaugguucugaa

SEQ ID NO: 1203857 - RNA, 19 nt, Artificial Sequence
  Description of Artificial Sequence: Synthetic oligonucleotide
  Antisense strand to SEQ ID NO: 1203856
uucagaaccauucuucccg

SEQ ID NO: 1203858 - RNA, 19 nt, Artificial Sequence
  Description of Artificial Sequence: Synthetic oligonucleotide
  Sense strand starting at position 2408 of SEQ ID NO: 917040
gacucagaauuguuaacag

SEQ ID NO: 1203859 - RNA, 19 nt, Artificial Sequence
  Description of Artificial Sequence: Synthetic oligonucleotide
  Antisense strand to SEQ ID NO: 1203858
cuguuaacaauucugaguc

SEQ ID NO: 1203860 - RNA, 19 nt, Artificial Sequence
  Description of Artificial Sequence: Synthetic oligonucleotide
  Sense strand starting at position 2417 of SEQ ID NO: 917040
uuguuaacaggacgaauga

SEQ ID NO: 1203861 - RNA, 19 nt, Artificial Sequence
  Description of Artificial Sequence: Synthetic oligonucleotide
  Antisense strand to SEQ ID NO: 1203860
ucauucguccuguuaacaa

SEQ ID NO: 1203862 - RNA, 19 nt, Artificial Sequence
  Description of Artificial Sequence: Synthetic oligonucleotide
  Sense strand starting at position 2454 of SEQ ID NO: 917040
aacccagaguaauccguaa

SEQ ID NO: 1203863 - RNA, 19 nt, Artificial Sequence
  Description of Artificial Sequence: Synthetic oligonucleotide
  Antisense strand to SEQ ID NO: 1203862
uuacggauuacucuggguu

SEQ ID NO: 1203864 - RNA, 19 nt, Artificial Sequence
  Description of Artificial Sequence: Synthetic oligonucleotide
  Sense strand starting at position 2456 of SEQ ID NO: 917040
cccagaguaauccguaaag

SEQ ID NO: 1203865 - RNA, 19 nt, Artificial Sequence
  Description of Artificial Sequence: Synthetic oligonucleotide
  Antisense strand to SEQ ID NO: 1203864
cuuuacggauuacucuggg

SEQ ID NO: 1203866 - RNA, 19 nt, Artificial Sequence
  Description of Artificial Sequence: Synthetic oligonucleotide
  Sense strand starting at position 2458 of SEQ ID NO: 917040
cagaguaauccguaaagca

SEQ ID NO: 1203867 - RNA, 19 nt, Artificial Sequence
  Description of Artificial Sequence: Synthetic oligonucleotide
  Antisense strand to SEQ ID NO: 1203866
ugcuuuacggauuacucug

SEQ ID NO: 1203868 - RNA, 19 nt, Artificial Sequence
  Description of Artificial Sequence: Synthetic oligonucleotide
  Sense strand starting at position 2465 of SEQ ID NO: 917040
auccguaaagcagagauua

SEQ ID NO: 1203869 - RNA, 19 nt, Artificial Sequence
  Description of Artificial Sequence: Synthetic oligonucleotide
  Antisense strand to SEQ ID NO: 1203868
uaaucucugcuuuacggau

SEQ ID NO: 1203870 - RNA, 19 nt, Artificial Sequence
  Description of Artificial Sequence: Synthetic oligonucleotide
  Sense strand starting at position 2659 of SEQ ID NO: 917040
aggcuuagauaguuaaccu

SEQ ID NO: 1203871 - RNA, 19 nt, Artificial Sequence
  Description of Artificial Sequence: Synthetic oligonucleotide
  Antisense strand to SEQ ID NO: 1203870
agguuaacuaucuaagccu

SEQ ID NO: 1203872 - RNA, 19 nt, Artificial Sequence
  Description of Artificial Sequence: Synthetic oligonucleotide
  Sense strand starting at position 2801 of SEQ ID NO: 917040
cgugccuuccaggaacuua

SEQ ID NO: 1203873 - RNA, 19 nt, Artificial Sequence
  Description of Artificial Sequence: Synthetic oligonucleotide
  Antisense strand to SEQ ID NO: 1203872
uaaguuccuggaaggcacg

SEQ ID NO: 1203874 - RNA, 19 nt, Artificial Sequence
  Description of Artificial Sequence: Synthetic oligonucleotide
  Sense strand starting at position 2873 of SEQ ID NO: 917040
aagggcugucuguaauaca

SEQ ID NO: 1203875 - RNA, 19 nt, Artificial Sequence
  Description of Artificial Sequence: Synthetic oligonucleotide
  Antisense strand to SEQ ID NO: 1203874
uguauuacagacagcccuu

SEQ ID NO: 1203876 - RNA, 19 nt, Artificial Sequence
  Description of Artificial Sequence: Synthetic oligonucleotide
  Sense strand starting at position 2922 of SEQ ID NO: 917040
ggcauuaacugcuugagaa

SEQ ID NO: 1203877 - RNA, 19 nt, Artificial Sequence
  Description of Artificial Sequence: Synthetic oligonucleotide
  Antisense strand to SEQ ID NO: 1203876
uucucaagcaguuaaugcc

SEQ ID NO: 1203878 - RNA, 19 nt, Artificial Sequence
  Description of Artificial Sequence: Synthetic oligonucleotide
  Sense strand starting at position 2923 of SEQ ID NO: 917040
gcauuaacugcuugagaac

SEQ ID NO: 1203879 - RNA, 19 nt, Artificial Sequence
  Description of Artificial Sequence: Synthetic oligonucleotide
  Antisense strand to SEQ ID NO: 1203878
guucucaagcaguuaaugc

SEQ ID NO: 1203880 - RNA, 19 nt, Artificial Sequence
  Description of Artificial Sequence: Synthetic oligonucleotide
  Sense strand starting at position 2944 of SEQ ID NO: 917040
agggaagccuucuuaaaua

SEQ ID NO: 1203881 - RNA, 19 nt, Artificial Sequence
  Description of Artificial Sequence: Synthetic oligonucleotide
  Antisense strand to SEQ ID NO: 1203880
uauuuaagaaggcuucccu

SEQ ID NO: 1203882 - RNA, 19 nt, Artificial Sequence
  Description of Artificial Sequence: Synthetic oligonucleotide
  Sense strand starting at position 2952 of SEQ ID NO: 917040
cuucuuaaauaagugaagu

SEQ ID NO: 1203883 - RNA, 19 nt, Artificial Sequence
  Description of Artificial Sequence: Synthetic oligonucleotide
  Antisense strand to SEQ ID NO: 1203882
acuucacuuauuuaagaag

SEQ ID NO: 1203884 - RNA, 19 nt, Artificial Sequence
  Description of Artificial Sequence: Synthetic oligonucleotide
  Sense strand starting at position 3025 of SEQ ID NO: 917040
uaggaaauggccugugaaa

SEQ ID NO: 1203885 - RNA, 19 nt, Artificial Sequence
  Description of Artificial Sequence: Synthetic oligonucleotide
  Antisense strand to SEQ ID NO: 1203884
uuucacaggccauuuccua

SEQ ID NO: 1203886 - RNA, 19 nt, Artificial Sequence
  Description of Artificial Sequence: Synthetic oligonucleotide
  Sense strand starting at position 3027 of SEQ ID NO: 917040
ggaaauggccugugaaaug

SEQ ID NO: 1203887 - RNA, 19 nt, Artificial Sequence
  Description of Artificial Sequence: Synthetic oligonucleotide
  Antisense strand to SEQ ID NO: 1203886
cauuucacaggccauuucc

SEQ ID NO: 1203888 - RNA, 19 nt, Artificial Sequence
  Description of Artificial Sequence: Synthetic oligonucleotide
  Sense strand starting at position 3038 of SEQ ID NO: 917040
gugaaauggcauugagcua

SEQ ID NO: 1203889 - RNA, 19 nt, Artificial Sequence
  Description of Artificial Sequence: Synthetic oligonucleotide
  Antisense strand to SEQ ID NO: 1203888
uagcucaaugccauuucac

SEQ ID NO: 1203890 - RNA, 19 nt, Artificial Sequence
  Description of Artificial Sequence: Synthetic oligonucleotide
  Sense strand starting at position 3039 of SEQ ID NO: 917040
ugaaauggcauugagcuau

SEQ ID NO: 1203891 - RNA, 19 nt, Artificial Sequence
  Description of Artificial Sequence: Synthetic oligonucleotide
  Antisense strand to SEQ ID NO: 1203890
auagcucaaugccauuuca

SEQ ID NO: 1203892 - RNA, 19 nt, Artificial Sequence
  Description of Artificial Sequence: Synthetic oligonucleotide
  Sense strand starting at position 3043 of SEQ ID NO: 917040
auggcauugagcuaugaga

SEQ ID NO: 1203893 - RNA, 19 nt, Artificial Sequence
  Description of Artificial Sequence: Synthetic oligonucleotide
  Antisense strand to SEQ ID NO: 1203892
ucucauagcucaaugccau

SEQ ID NO: 1203894 - RNA, 19 nt, Artificial Sequence
  Description of Artificial Sequence: Synthetic oligonucleotide
  Sense strand starting at position 3045 of SEQ ID NO: 917040
ggcauugagcuaugagaga

SEQ ID NO: 1203895 - RNA, 19 nt, Artificial Sequence
  Description of Artificial Sequence: Synthetic oligonucleotide
  Antisense strand to SEQ ID NO: 1203894
ucucucauagcucaaugcc

SEQ ID NO: 1203896 - RNA, 19 nt, Artificial Sequence
  Description of Artificial Sequence: Synthetic oligonucleotide
  Sense strand starting at position 3195 of SEQ ID NO: 917040
ugaaguagucucuauuauu

SEQ ID NO: 1203897 - RNA, 19 nt, Artificial Sequence
  Description of Artificial Sequence: Synthetic oligonucleotide
  Antisense strand to SEQ ID NO: 1203896
aauaauagagacuacuuca

SEQ ID NO: 1203898 - RNA, 19 nt, Artificial Sequence
  Description of Artificial Sequence: Synthetic oligonucleotide
  Sense strand starting at position 3248 of SEQ ID NO: 917040
agguaauaaugagaauuuc

SEQ ID NO: 1203899 - RNA, 19 nt, Artificial Sequence
  Description of Artificial Sequence: Synthetic oligonucleotide
  Antisense strand to SEQ ID NO: 1203898
gaaauucucauuauuaccu

SEQ ID NO: 1203900 - RNA, 19 nt, Artificial Sequence
  Description of Artificial Sequence: Synthetic oligonucleotide
  Sense strand starting at position 3290 of SEQ ID NO: 917040
gugguucugugacuagaag

SEQ ID NO: 1203901 - RNA, 19 nt, Artificial Sequence
  Description of Artificial Sequence: Synthetic oligonucleotide
  Antisense strand to SEQ ID NO: 1203900
cuucuagucacagaaccac

SEQ ID NO: 1203902 - RNA, 19 nt, Artificial Sequence
  Description of Artificial Sequence: Synthetic oligonucleotide
  Sense strand starting at position 3291 of SEQ ID NO: 917040
ugguucugugacuagaaga

SEQ ID NO: 1203903 - RNA, 19 nt, Artificial Sequence
  Description of Artificial Sequence: Synthetic oligonucleotide
  Antisense strand to SEQ ID NO: 1203902
ucuucuagucacagaacca

SEQ ID NO: 1203904 - RNA, 19 nt, Artificial Sequence
  Description of Artificial Sequence: Synthetic oligonucleotide
  Sense strand starting at position 3493 of SEQ ID NO: 917040
ccagaagauuggcuuccau

SEQ ID NO: 1203905 - RNA, 19 nt, Artificial Sequence
  Description of Artificial Sequence: Synthetic oligonucleotide
  Antisense strand to SEQ ID NO: 1203904
auggaagccaaucuucugg

SEQ ID NO: 1203906 - RNA, 19 nt, Artificial Sequence
  Description of Artificial Sequence: Synthetic oligonucleotide
  Sense strand starting at position 3700 of SEQ ID NO: 917040
gucaaauggcaucacaaua

SEQ ID NO: 1203907 - RNA, 19 nt, Artificial Sequence
  Description of Artificial Sequence: Synthetic oligonucleotide
  Antisense strand to SEQ ID NO: 1203906
uauugugaugccauuugac

SEQ ID NO: 1203908 - RNA, 19 nt, Artificial Sequence
  Description of Artificial Sequence: Synthetic oligonucleotide
  Sense strand starting at position 37 of SEQ ID NO: 917041
ugcuaaaugccauggagaa

SEQ ID NO: 1203909 - RNA, 19 nt, Artificial Sequence
  Description of Artificial Sequence: Synthetic oligonucleotide
  Antisense strand to SEQ ID NO: 1203908
uucuccauggcauuuagca

SEQ ID NO: 1203910 - RNA, 19 nt, Artificial Sequence
  Description of Artificial Sequence: Synthetic oligonucleotide
  Sense strand starting at position 38 of SEQ ID NO: 917041
gcuaaaugccauggagaac

SEQ ID NO: 1203911 - RNA, 19 nt, Artificial Sequence
  Description of Artificial Sequence: Synthetic oligonucleotide
  Antisense strand to SEQ ID NO: 1203910
guucuccauggcauuuagc

SEQ ID NO: 1203912 - RNA, 19 nt, Artificial Sequence
  Description of Artificial Sequence: Synthetic oligonucleotide
  Sense strand starting at position 185 of SEQ ID NO: 917041
guguaaaucgaggguaaua

SEQ ID NO: 1203913 - RNA, 19 nt, Artificial Sequence
  Description of Artificial Sequence: Synthetic oligonucleotide
  Antisense strand to SEQ ID NO: 1203912
uauuacccucgauuuacac

SEQ ID NO: 1203914 - RNA, 19 nt, Artificial Sequence
  Description of Artificial Sequence: Synthetic oligonucleotide
  Sense strand starting at position 279 of SEQ ID NO: 917041
acaacauugugauuaggau

SEQ ID NO: 1203915 - RNA, 19 nt, Artificial Sequence
  Description of Artificial Sequence: Synthetic oligonucleotide
  Antisense strand to SEQ ID NO: 1203914
auccuaaucacaauguugu

SEQ ID NO: 1203916 - RNA, 19 nt, Artificial Sequence
  Description of Artificial Sequence: Synthetic oligonucleotide
  Sense strand starting at position 356 of SEQ ID NO: 917041
auuguauuguccuuaagaa

SEQ ID NO: 1203917 - RNA, 19 nt, Artificial Sequence
  Description of Artificial Sequence: Synthetic oligonucleotide
  Antisense strand to SEQ ID NO: 1203916
uucuuaaggacaauacaau

SEQ ID NO: 1203918 - RNA, 19 nt, Artificial Sequence
  Description of Artificial Sequence: Synthetic oligonucleotide
  Sense strand starting at position 357 of SEQ ID NO: 917041
uuguauuguccuuaagaag

SEQ ID NO: 1203919 - RNA, 19 nt, Artificial Sequence
  Description of Artificial Sequence: Synthetic oligonucleotide
  Antisense strand to SEQ ID NO: 1203918
cuucuuaaggacaauacaa

SEQ ID NO: 1203920 - RNA, 19 nt, Artificial Sequence
  Description of Artificial Sequence: Synthetic oligonucleotide
  Sense strand starting at position 376 of SEQ ID NO: 917041
cuugcaaucuaguuaggga

SEQ ID NO: 1203921 - RNA, 19 nt, Artificial Sequence
  Description of Artificial Sequence: Synthetic oligonucleotide
  Antisense strand to SEQ ID NO: 1203920
ucccuaacuagauugcaag

SEQ ID NO: 1203922 - RNA, 19 nt, Artificial Sequence
  Description of Artificial Sequence: Synthetic oligonucleotide
  Sense strand starting at position 377 of SEQ ID NO: 917041
uugcaaucuaguuagggaa

SEQ ID NO: 1203923 - RNA, 19 nt, Artificial Sequence
  Description of Artificial Sequence: Synthetic oligonucleotide
  Antisense strand to SEQ ID NO: 1203922
uucccuaacuagauugcaa

SEQ ID NO: 1203924 - RNA, 19 nt, Artificial Sequence
  Description of Artificial Sequence: Synthetic oligonucleotide
  Sense strand starting at position 483 of SEQ ID NO: 917041
ugucaaguccuuuauaagu

SEQ ID NO: 1203925 - RNA, 19 nt, Artificial Sequence
  Description of Artificial Sequence: Synthetic oligonucleotide
  Antisense strand to SEQ ID NO: 1203924
acuuauaaaggacuugaca

SEQ ID NO: 1203926 - RNA, 19 nt, Artificial Sequence
  Description of Artificial Sequence: Synthetic oligonucleotide
  Sense strand starting at position 488 of SEQ ID NO: 917041
aguccuuuauaagugaucu

SEQ ID NO: 1203927 - RNA, 19 nt, Artificial Sequence
  Description of Artificial Sequence: Synthetic oligonucleotide
  Antisense strand to SEQ ID NO: 1203926
agaucacuuauaaaggacu

SEQ ID NO: 1203928 - RNA, 19 nt, Artificial Sequence
  Description of Artificial Sequence: Synthetic oligonucleotide
  Sense strand starting at position 562 of SEQ ID NO: 917041
agucuagaccauuaguaug

SEQ ID NO: 1203929 - RNA, 19 nt, Artificial Sequence
  Description of Artificial Sequence: Synthetic oligonucleotide
  Antisense strand to SEQ ID NO: 1203928
cauacuaauggucuagacu

SEQ ID NO: 1203930 - RNA, 19 nt, Artificial Sequence
  Description of Artificial Sequence: Synthetic oligonucleotide
  Sense strand starting at position 584 of SEQ ID NO: 917041
cagagucaaggcuguaaua

SEQ ID NO: 1203931 - RNA, 19 nt, Artificial Sequence
  Description of Artificial Sequence: Synthetic oligonucleotide
  Antisense strand to SEQ ID NO: 1203930
uauuacagccuugacucug

SEQ ID NO: 1203932 - RNA, 19 nt, Artificial Sequence
  Description of Artificial Sequence: Synthetic oligonucleotide
  Sense strand starting at position 586 of SEQ ID NO: 917041
gagucaaggcuguaauaac

SEQ ID NO: 1203933 - RNA, 19 nt, Artificial Sequence
  Description of Artificial Sequence: Synthetic oligonucleotide
  Antisense strand to SEQ ID NO: 1203932
guuauuacagccuugacuc

SEQ ID NO: 1203934 - RNA, 19 nt, Artificial Sequence
  Description of Artificial Sequence: Synthetic oligonucleotide
  Sense strand starting at position 695 of SEQ ID NO: 917041
gucccugugcaguaggaaa

SEQ ID NO: 1203935 - RNA, 19 nt, Artificial Sequence
  Description of Artificial Sequence: Synthetic oligonucleotide
  Antisense strand to SEQ ID NO: 1203934
uuuccuacugcacagggac

SEQ ID NO: 1203936 - RNA, 19 nt, Artificial Sequence
  Description of Artificial Sequence: Synthetic oligonucleotide
  Sense strand starting at position 814 of SEQ ID NO: 917041
cuaucaguucucgauaauc

SEQ ID NO: 1203937 - RNA, 19 nt, Artificial Sequence
  Description of Artificial Sequence: Synthetic oligonucleotide
  Antisense strand to SEQ ID NO: 1203936
gauuaucgagaacugauag

SEQ ID NO: 1203938 - RNA, 19 nt, Artificial Sequence
  Description of Artificial Sequence: Synthetic oligonucleotide
  Sense strand starting at position 816 of SEQ ID NO: 917041
aucaguucucgauaaucuu

SEQ ID NO: 1203939 - RNA, 19 nt, Artificial Sequence
  Description of Artificial Sequence: Synthetic oligonucleotide
  Antisense strand to SEQ ID NO: 1203938
aagauuaucgagaacugau

SEQ ID NO: 1203940 - RNA, 19 nt, Artificial Sequence
  Description of Artificial Sequence: Synthetic oligonucleotide
  Sense strand starting at position 1331 of SEQ ID NO: 917041
agaaguugagagugcaaga

SEQ ID NO: 1203941 - RNA, 19 nt, Artificial Sequence
  Description of Artificial Sequence: Synthetic oligonucleotide
  Antisense strand to SEQ ID NO: 1203940
ucuugcacucucaacuucu

SEQ ID NO: 1203942 - RNA, 19 nt, Artificial Sequence
  Description of Artificial Sequence: Synthetic oligonucleotide
  Sense strand starting at position 2529 of SEQ ID NO: 917041
agggcuuuggguggagaau

SEQ ID NO: 1203943 - RNA, 19 nt, Artificial Sequence
  Description of Artificial Sequence: Synthetic oligonucleotide
  Antisense strand to SEQ ID NO: 1203942
auucuccacccaaagcccu

SEQ ID NO: 1203944 - RNA, 19 nt, Artificial Sequence
  Description of Artificial Sequence: Synthetic oligonucleotide
  Sense strand starting at position 2530 of SEQ ID NO: 917041
gggcuuuggguggagaauu

SEQ ID NO: 1203945 - RNA, 19 nt, Artificial Sequence
  Description of Artificial Sequence: Synthetic oligonucleotide
  Antisense strand to SEQ ID NO: 1203944
aauucuccacccaaagccc

SEQ ID NO: 1203946 - RNA, 19 nt, Artificial Sequence
  Description of Artificial Sequence: Synthetic oligonucleotide
  Sense strand starting at position 2606 of SEQ ID NO: 917041
uugggcuugcggaguagau

SEQ ID NO: 1203947 - RNA, 19 nt, Artificial Sequence
  Description of Artificial Sequence: Synthetic oligonucleotide
  Antisense strand to SEQ ID NO: 1203946
aucuacuccgcaagcccaa

SEQ ID NO: 1203948 - RNA, 19 nt, Artificial Sequence
  Description of Artificial Sequence: Synthetic oligonucleotide
  Sense strand starting at position 2688 of SEQ ID NO: 917041
uggugauugcgaggagaac

SEQ ID NO: 1203949 - RNA, 19 nt, Artificial Sequence
  Description of Artificial Sequence: Synthetic oligonucleotide
  Antisense strand to SEQ ID NO: 1203948
guucuccucgcaaucacca

SEQ ID NO: 1203950 - RNA, 19 nt, Artificial Sequence
  Description of Artificial Sequence: Synthetic oligonucleotide
  Sense strand starting at position 2689 of SEQ ID NO: 917041
ggugauugcgaggagaaca

SEQ ID NO: 1203951 - RNA, 19 nt, Artificial Sequence
  Description of Artificial Sequence: Synthetic oligonucleotide
  Antisense strand to SEQ ID NO: 1203950
uguucuccucgcaaucacc

SEQ ID NO: 1203952 - RNA, 19 nt, Artificial Sequence
  Description of Artificial Sequence: Synthetic oligonucleotide
  Sense strand starting at position 2745 of SEQ ID NO: 917041
aaaugaggauuuggaggau

SEQ ID NO: 1203953 - RNA, 19 nt, Artificial Sequence
  Description of Artificial Sequence: Synthetic oligonucleotide
  Antisense strand to SEQ ID NO: 1203952
auccuccaaauccucauuu

SEQ ID NO: 1203954 - RNA, 19 nt, Artificial Sequence
  Description of Artificial Sequence: Synthetic oligonucleotide
  Sense strand starting at position 2950 of SEQ ID NO: 917041
gugcguucagugcuuggaa

SEQ ID NO: 1203955 - RNA, 19 nt, Artificial Sequence
  Description of Artificial Sequence: Synthetic oligonucleotide
  Antisense strand to SEQ ID NO: 1203954
uuccaagcacugaacgcac

SEQ ID NO: 1203956 - RNA, 19 nt, Artificial Sequence
  Description of Artificial Sequence: Synthetic oligonucleotide
  Sense strand starting at position 3042 of SEQ ID NO: 917041
ggguaccuaucuguaacuu

SEQ ID NO: 1203957 - RNA, 19 nt, Artificial Sequence
  Description of Artificial Sequence: Synthetic oligonucleotide
  Antisense strand to SEQ ID NO: 1203956
aaguuacagauagguaccc

SEQ ID NO: 1203958 - RNA, 19 nt, Artificial Sequence
  Description of Artificial Sequence: Synthetic oligonucleotide
  Sense strand starting at position 3092 of SEQ ID NO: 917041
agcggaggauguuucaaga

SEQ ID NO: 1203959 - RNA, 19 nt, Artificial Sequence
  Description of Artificial Sequence: Synthetic oligonucleotide
  Antisense strand to SEQ ID NO: 1203958
ucuugaaacauccuccgcu

SEQ ID NO: 1203960 - RNA, 19 nt, Artificial Sequence
  Description of Artificial Sequence: Synthetic oligonucleotide
  Sense strand starting at position 3174 of SEQ ID NO: 917041
cauugucccuggguagaga

SEQ ID NO: 1203961 - RNA, 19 nt, Artificial Sequence
  Description of Artificial Sequence: Synthetic oligonucleotide
  Antisense strand to SEQ ID NO: 1203960
ucucuacccagggacaaug

SEQ ID NO: 1203962 - RNA, 19 nt, Artificial Sequence
  Description of Artificial Sequence: Synthetic oligonucleotide
  Sense strand starting at position 3532 of SEQ ID NO: 917041
ggauuagacuaaugauuuc

SEQ ID NO: 1203963 - RNA, 19 nt, Artificial Sequence
  Description of Artificial Sequence: Synthetic oligonucleotide
  Antisense strand to SEQ ID NO: 1203962
gaaaucauuagucuaaucc

SEQ ID NO: 1203964 - RNA, 19 nt, Artificial Sequence
  Description of Artificial Sequence: Synthetic oligonucleotide
  Sense strand starting at position 3667 of SEQ ID NO: 917041
cuagaacauugagagaaau

SEQ ID NO: 1203965 - RNA, 19 nt, Artificial Sequence
  Description of Artificial Sequence: Synthetic oligonucleotide
  Antisense strand to SEQ ID NO: 1203964
auuucucucaauguucuag

SEQ ID NO: 1203966 - RNA, 19 nt, Artificial Sequence
  Description of Artificial Sequence: Synthetic oligonucleotide
  Sense strand starting at position 3686 of SEQ ID NO: 917041
agaccaagaguuuguguau

SEQ ID NO: 1203967 - RNA, 19 nt, Artificial Sequence
  Description of Artificial Sequence: Synthetic oligonucleotide
  Antisense strand to SEQ ID NO: 1203966
auacacaaacucuuggucu

SEQ ID NO: 1203968 - RNA, 19 nt, Artificial Sequence
  Description of Artificial Sequence: Synthetic oligonucleotide
  Sense strand starting at position 3689 of SEQ ID NO: 917041
ccaagaguuuguguauuaa

SEQ ID NO: 1203969 - RNA, 19 nt, Artificial Sequence
  Description of Artificial Sequence: Synthetic oligonucleotide
  Antisense strand to SEQ ID NO: 1203968
uuaauacacaaacucuugg

SEQ ID NO: 1203970 - RNA, 19 nt, Artificial Sequence
  Description of Artificial Sequence: Synthetic oligonucleotide
  Sense strand starting at position 3713 of SEQ ID NO: 917041
gggagagaaugucauuuga

SEQ ID NO: 1203971 - RNA, 19 nt, Artificial Sequence
  Description of Artificial Sequence: Synthetic oligonucleotide
  Antisense strand to SEQ ID NO: 1203970
ucaaaugacauucucuccc

SEQ ID NO: 1203972 - RNA, 19 nt, Artificial Sequence
  Description of Artificial Sequence: Synthetic oligonucleotide
  Sense strand starting at position 3797 of SEQ ID NO: 917041
ugacuuaguuuaguugaaa

SEQ ID NO: 1203973 - RNA, 19 nt, Artificial Sequence
  Description of Artificial Sequence: Synthetic oligonucleotide
  Antisense strand to SEQ ID NO: 1203972
uuucaacuaaacuaaguca

SEQ ID NO: 1203974 - RNA, 19 nt, Artificial Sequence
  Description of Artificial Sequence: Synthetic oligonucleotide
  Sense strand starting at position 3798 of SEQ ID NO: 917041
gacuuaguuuaguugaaau

SEQ ID NO: 1203975 - RNA, 19 nt, Artificial Sequence
  Description of Artificial Sequence: Synthetic oligonucleotide
  Antisense strand to SEQ ID NO: 1203974
auuucaacuaaacuaaguc

SEQ ID NO: 1203976 - RNA, 19 nt, Artificial Sequence
  Description of Artificial Sequence: Synthetic oligonucleotide
  Sense strand starting at position 3800 of SEQ ID NO: 917041
cuuaguuuaguugaaaugu

SEQ ID NO: 1203977 - RNA, 19 nt, Artificial Sequence
  Description of Artificial Sequence: Synthetic oligonucleotide
  Antisense strand to SEQ ID NO: 1203976
acauuucaacuaaacuaag

SEQ ID NO: 1203978 - RNA, 19 nt, Artificial Sequence
  Description of Artificial Sequence: Synthetic oligonucleotide
  Sense strand starting at position 3841 of SEQ ID NO: 917041
uagaaaugcccucaguuug

SEQ ID NO: 1203979 - RNA, 19 nt, Artificial Sequence
  Description of Artificial Sequence: Synthetic oligonucleotide
  Antisense strand to SEQ ID NO: 1203978
caaacugagggcauuucua

SEQ ID NO: 1203980 - RNA, 19 nt, Artificial Sequence
  Description of Artificial Sequence: Synthetic oligonucleotide
  Sense strand starting at position 3879 of SEQ ID NO: 917041
ucaauacaguguuucuuaa

SEQ ID NO: 1203981 - RNA, 19 nt, Artificial Sequence
  Description of Artificial Sequence: Synthetic oligonucleotide
  Antisense strand to SEQ ID NO: 1203980
uuaagaaacacuguauuga

SEQ ID NO: 1203982 - RNA, 19 nt, Artificial Sequence
  Description of Artificial Sequence: Synthetic oligonucleotide
  Sense strand starting at position 3898 of SEQ ID NO: 917041
acuucuuugcuguaggaau

SEQ ID NO: 1203983 - RNA, 19 nt, Artificial Sequence
  Description of Artificial Sequence: Synthetic oligonucleotide
  Antisense strand to SEQ ID NO: 1203982
auuccuacagcaaagaagu

SEQ ID NO: 1203984 - RNA, 19 nt, Artificial Sequence
  Description of Artificial Sequence: Synthetic oligonucleotide
  Sense strand starting at position 3958 of SEQ ID NO: 917041
agauaaagcugguuaaaua

SEQ ID NO: 1203985 - RNA, 19 nt, Artificial Sequence
  Description of Artificial Sequence: Synthetic oligonucleotide
  Antisense strand to SEQ ID NO: 1203984
uauuuaaccagcuuuaucu

SEQ ID NO: 1203986 - RNA, 19 nt, Artificial Sequence
  Description of Artificial Sequence: Synthetic oligonucleotide
  Sense strand starting at position 3968 of SEQ ID NO: 917041
gguuaaauaccuuagcuag

SEQ ID NO: 1203987 - RNA, 19 nt, Artificial Sequence
  Description of Artificial Sequence: Synthetic oligonucleotide
  Antisense strand to SEQ ID NO: 1203986
cuagcuaagguauuuaacc

SEQ ID NO: 1203988 - RNA, 19 nt, Artificial Sequence
  Description of Artificial Sequence: Synthetic oligonucleotide
  Sense strand starting at position 68 of SEQ ID NO: 917042
gcacuaucuguugauugaa

SEQ ID NO: 1203989 - RNA, 19 nt, Artificial Sequence
  Description of Artificial Sequence: Synthetic oligonucleotide
  Antisense strand to SEQ ID NO: 1203988
uucaaucaacagauagugc

SEQ ID NO: 1203990 - RNA, 19 nt, Artificial Sequence
  Description of Artificial Sequence: Synthetic oligonucleotide
  Sense strand starting at position 70 of SEQ ID NO: 917042
acuaucuguugauugaauu

SEQ ID NO: 1203991 - RNA, 19 nt, Artificial Sequence
  Description of Artificial Sequence: Synthetic oligonucleotide
  Antisense strand to SEQ ID NO: 1203990
aauucaaucaacagauagu

SEQ ID NO: 1203992 - RNA, 19 nt, Artificial Sequence
  Description of Artificial Sequence: Synthetic oligonucleotide
  Sense strand starting at position 71 of SEQ ID NO: 917042
cuaucuguugauugaauua

SEQ ID NO: 1203993 - RNA, 19 nt, Artificial Sequence
  Description of Artificial Sequence: Synthetic oligonucleotide
  Antisense strand to SEQ ID NO: 1203992
uaauucaaucaacagauag

SEQ ID NO: 1203994 - RNA, 19 nt, Artificial Sequence
  Description of Artificial Sequence: Synthetic oligonucleotide
  Sense strand starting at position 102 of SEQ ID NO: 917042
agcaucuagagugguacua

SEQ ID NO: 1203995 - RNA, 19 nt, Artificial Sequence
  Description of Artificial Sequence: Synthetic oligonucleotide
  Antisense strand to SEQ ID NO: 1203994
uaguaccacucuagaugcu

SEQ ID NO: 1203996 - RNA, 19 nt, Artificial Sequence
  Description of Artificial Sequence: Synthetic oligonucleotide
  Sense strand starting at position 127 of SEQ ID NO: 917042
cagcaucauccuuggacga

SEQ ID NO: 1203997 - RNA, 19 nt, Artificial Sequence
  Description of Artificial Sequence: Synthetic oligonucleotide
  Antisense strand to SEQ ID NO: 1203996
ucguccaaggaugaugcug

SEQ ID NO: 1203998 - RNA, 19 nt, Artificial Sequence
  Description of Artificial Sequence: Synthetic oligonucleotide
  Sense strand starting at position 146 of SEQ ID NO: 917042
gugagaaaguaggcauuca

SEQ ID NO: 1203999 - RNA, 19 nt, Artificial Sequence
  Description of Artificial Sequence: Synthetic oligonucleotide
  Antisense strand to SEQ ID NO: 1203998
ugaaugccuacuuucucac

SEQ ID NO: 1204000 - RNA, 19 nt, Artificial Sequence
  Description of Artificial Sequence: Synthetic oligonucleotide
  Sense strand starting at position 195 of SEQ ID NO: 917042
uggagcuggguaugagaaa

SEQ ID NO: 1204001 - RNA, 19 nt, Artificial Sequence
  Description of Artificial Sequence: Synthetic oligonucleotide
  Antisense strand to SEQ ID NO: 1204000
uuucucauacccagcucca

SEQ ID NO: 1204002 - RNA, 19 nt, Artificial Sequence
  Description of Artificial Sequence: Synthetic oligonucleotide
  Sense strand starting at position 483 of SEQ ID NO: 917042
auguguaguguauacacau

SEQ ID NO: 1204003 - RNA, 19 nt, Artificial Sequence
  Description of Artificial Sequence: Synthetic oligonucleotide
  Antisense strand to SEQ ID NO: 1204002
auguguauacacuacacau

SEQ ID NO: 1204004 - RNA, 19 nt, Artificial Sequence
  Description of Artificial Sequence: Synthetic oligonucleotide
  Sense strand starting at position 683 of SEQ ID NO: 917042
guagaauucuguucccaau

SEQ ID NO: 1204005 - RNA, 19 nt, Artificial Sequence
  Description of Artificial Sequence: Synthetic oligonucleotide
  Antisense strand to SEQ ID NO: 1204004
auugggaacagaauucuac

SEQ ID NO: 1204006 - RNA, 19 nt, Artificial Sequence
  Description of Artificial Sequence: Synthetic oligonucleotide
  Sense strand starting at position 700 of SEQ ID NO: 917042
auauauaaccugugguaua

SEQ ID NO: 1204007 - RNA, 19 nt, Artificial Sequence
  Description of Artificial Sequence: Synthetic oligonucleotide
  Antisense strand to SEQ ID NO: 1204006
uauaccacagguuauauau

SEQ ID NO: 1204008 - RNA, 19 nt, Artificial Sequence
  Description of Artificial Sequence: Synthetic oligonucleotide
  Sense strand starting at position 909 of SEQ ID NO: 917042
agccaagagcaguaacaaa

SEQ ID NO: 1204009 - RNA, 19 nt, Artificial Sequence
  Description of Artificial Sequence: Synthetic oligonucleotide
  Antisense strand to SEQ ID NO: 1204008
uuuguuacugcucuuggcu

SEQ ID NO: 1204010 - RNA, 19 nt, Artificial Sequence
  Description of Artificial Sequence: Synthetic oligonucleotide
  Sense strand starting at position 941 of SEQ ID NO: 917042
ugagucauguuucugacua

SEQ ID NO: 1204011 - RNA, 19 nt, Artificial Sequence
  Description of Artificial Sequence: Synthetic oligonucleotide
  Antisense strand to SEQ ID NO: 1204010
uagucagaaacaugacuca

SEQ ID NO: 1204012 - RNA, 19 nt, Artificial Sequence
  Description of Artificial Sequence: Synthetic oligonucleotide
  Sense strand starting at position 965 of SEQ ID NO: 917042
gcguuaugaaauggagaga

SEQ ID NO: 1204013 - RNA, 19 nt, Artificial Sequence
  Description of Artificial Sequence: Synthetic oligonucleotide
  Antisense strand to SEQ ID NO: 1204012
ucucuccauuucauaacgc

SEQ ID NO: 1204014 - RNA, 19 nt, Artificial Sequence
  Description of Artificial Sequence: Synthetic oligonucleotide
  Sense strand starting at position 984 of SEQ ID NO: 917042
augacaugucuuggguuua

SEQ ID NO: 1204015 - RNA, 19 nt, Artificial Sequence
  Description of Artificial Sequence: Synthetic oligonucleotide
  Antisense strand to SEQ ID NO: 1204014
uaaacccaagacaugucau

SEQ ID NO: 1204016 - RNA, 19 nt, Artificial Sequence
  Description of Artificial Sequence: Synthetic oligonucleotide
  Sense strand starting at position 995 of SEQ ID NO: 917042
uggguuuaaucaccacaga

SEQ ID NO: 1204017 - RNA, 19 nt, Artificial Sequence
  Description of Artificial Sequence: Synthetic oligonucleotide
  Antisense strand to SEQ ID NO: 1204016
ucuguggugauuaaaccca

SEQ ID NO: 1204018 - RNA, 19 nt, Artificial Sequence
  Description of Artificial Sequence: Synthetic oligonucleotide
  Sense strand starting at position 998 of SEQ ID NO: 917042
guuuaaucaccacagaugu

SEQ ID NO: 1204019 - RNA, 19 nt, Artificial Sequence
  Description of Artificial Sequence: Synthetic oligonucleotide
  Antisense strand to SEQ ID NO: 1204018
acaucuguggugauuaaac

SEQ ID NO: 1204020 - RNA, 19 nt, Artificial Sequence
  Description of Artificial Sequence: Synthetic oligonucleotide
  Sense strand starting at position 1080 of SEQ ID NO: 917042
guaauaaugaugugggucu

SEQ ID NO: 1204021 - RNA, 19 nt, Artificial Sequence
  Description of Artificial Sequence: Synthetic oligonucleotide
  Antisense strand to SEQ ID NO: 1204020
agacccacaucauuauuac

SEQ ID NO: 1204022 - RNA, 19 nt, Artificial Sequence
  Description of Artificial Sequence: Synthetic oligonucleotide
  Sense strand starting at position 1129 of SEQ ID NO: 917042
ugcgaacucugcuuauuua

SEQ ID NO: 1204023 - RNA, 19 nt, Artificial Sequence
  Description of Artificial Sequence: Synthetic oligonucleotide
  Antisense strand to SEQ ID NO: 1204022
uaaauaagcagaguucgca

SEQ ID NO: 1204024 - RNA, 19 nt, Artificial Sequence
  Description of Artificial Sequence: Synthetic oligonucleotide
  Sense strand starting at position 1130 of SEQ ID NO: 917042
gcgaacucugcuuauuuac

SEQ ID NO: 1204025 - RNA, 19 nt, Artificial Sequence
  Description of Artificial Sequence: Synthetic oligonucleotide
  Antisense strand to SEQ ID NO: 1204024
guaaauaagcagaguucgc

SEQ ID NO: 1204026 - RNA, 19 nt, Artificial Sequence
  Description of Artificial Sequence: Synthetic oligonucleotide
  Sense strand starting at position 2643 of SEQ ID NO: 917042
uuaagaaucggccauuaac

SEQ ID NO: 1204027 - RNA, 19 nt, Artificial Sequence
  Description of Artificial Sequence: Synthetic oligonucleotide
  Antisense strand to SEQ ID NO: 1204026
guuaauggccgauucuuaa

SEQ ID NO: 1204028 - RNA, 19 nt, Artificial Sequence
  Description of Artificial Sequence: Synthetic oligonucleotide
  Sense strand starting at position 2702 of SEQ ID NO: 917042
ucauauucuuccuuagguu

SEQ ID NO: 1204029 - RNA, 19 nt, Artificial Sequence
  Description of Artificial Sequence: Synthetic oligonucleotide
  Antisense strand to SEQ ID NO: 1204028
aaccuaaggaagaauauga

SEQ ID NO: 1204030 - RNA, 19 nt, Artificial Sequence
  Description of Artificial Sequence: Synthetic oligonucleotide
  Sense strand starting at position 2775 of SEQ ID NO: 917042
accuaaauguggcaauuua

SEQ ID NO: 1204031 - RNA, 19 nt, Artificial Sequence
  Description of Artificial Sequence: Synthetic oligonucleotide
  Antisense strand to SEQ ID NO: 1204030
uaaauugccacauuuaggu

SEQ ID NO: 1204032 - RNA, 19 nt, Artificial Sequence
  Description of Artificial Sequence: Synthetic oligonucleotide
  Sense strand starting at position 2805 of SEQ ID NO: 917042
gguuauugcuauucuaagg

SEQ ID NO: 1204033 - RNA, 19 nt, Artificial Sequence
  Description of Artificial Sequence: Synthetic oligonucleotide
  Antisense strand to SEQ ID NO: 1204032
ccuuagaauagcaauaacc

SEQ ID NO: 1204034 - RNA, 19 nt, Artificial Sequence
  Description of Artificial Sequence: Synthetic oligonucleotide
  Sense strand starting at position 2811 of SEQ ID NO: 917042
ugcuauucuaagggaagua

SEQ ID NO: 1204035 - RNA, 19 nt, Artificial Sequence
  Description of Artificial Sequence: Synthetic oligonucleotide
  Antisense strand to SEQ ID NO: 1204034
uacuucccuuagaauagca

SEQ ID NO: 1204036 - RNA, 19 nt, Artificial Sequence
  Description of Artificial Sequence: Synthetic oligonucleotide
  Sense strand starting at position 2835 of SEQ ID NO: 917042
ugacaaugguuccuaguag

SEQ ID NO: 1204037 - RNA, 19 nt, Artificial Sequence
  Description of Artificial Sequence: Synthetic oligonucleotide
  Antisense strand to SEQ ID NO: 1204036
cuacuaggaaccauuguca

SEQ ID NO: 1204038 - RNA, 19 nt, Artificial Sequence
  Description of Artificial Sequence: Synthetic oligonucleotide
  Sense strand starting at position 2842 of SEQ ID NO: 917042
gguuccuaguagucuagga

SEQ ID NO: 1204039 - RNA, 19 nt, Artificial Sequence
  Description of Artificial Sequence: Synthetic oligonucleotide
  Antisense strand to SEQ ID NO: 1204038
uccuagacuacuaggaacc

SEQ ID NO: 1204040 - RNA, 19 nt, Artificial Sequence
  Description of Artificial Sequence: Synthetic oligonucleotide
  Sense strand starting at position 2846 of SEQ ID NO: 917042
ccuaguagucuaggaccua

SEQ ID NO: 1204041 - RNA, 19 nt, Artificial Sequence
  Description of Artificial Sequence: Synthetic oligonucleotide
  Antisense strand to SEQ ID NO: 1204040
uagguccuagacuacuagg

SEQ ID NO: 1204042 - RNA, 19 nt, Artificial Sequence
  Description of Artificial Sequence: Synthetic oligonucleotide
  Sense strand starting at position 2863 of SEQ ID NO: 917042
uaggaauuagaagguguau

SEQ ID NO: 1204043 - RNA, 19 nt, Artificial Sequence
  Description of Artificial Sequence: Synthetic oligonucleotide
  Antisense strand to SEQ ID NO: 1204042
auacaccuucuaauuccua

SEQ ID NO: 1204044 - RNA, 19 nt, Artificial Sequence
  Description of Artificial Sequence: Synthetic oligonucleotide
  Sense strand starting at position 3443 of SEQ ID NO: 917042
agucaaguuuagccuaaca

SEQ ID NO: 1204045 - RNA, 19 nt, Artificial Sequence
  Description of Artificial Sequence: Synthetic oligonucleotide
  Antisense strand to SEQ ID NO: 1204044
uguuaggcuaaacuugacu

SEQ ID NO: 1204046 - RNA, 19 nt, Artificial Sequence
  Description of Artificial Sequence: Synthetic oligonucleotide
  Sense strand starting at position 3530 of SEQ ID NO: 917042
agagguauaaaccgaccau

SEQ ID NO: 1204047 - RNA, 19 nt, Artificial Sequence
  Description of Artificial Sequence: Synthetic oligonucleotide
  Antisense strand to SEQ ID NO: 1204046
auggucgguuuauaccucu

SEQ ID NO: 1204048 - RNA, 19 nt, Artificial Sequence
  Description of Artificial Sequence: Synthetic oligonucleotide
  Sense strand starting at position 3580 of SEQ ID NO: 917042
gccagauguagccaacugu

SEQ ID NO: 1204049 - RNA, 19 nt, Artificial Sequence
  Description of Artificial Sequence: Synthetic oligonucleotide
  Antisense strand to SEQ ID NO: 1204048
acaguuggcuacaucuggc

SEQ ID NO: 1204050 - RNA, 19 nt, Artificial Sequence
  Description of Artificial Sequence: Synthetic oligonucleotide
  Sense strand starting at position 3738 of SEQ ID NO: 917042
cugaaucugcugugauuau

SEQ ID NO: 1204051 - RNA, 19 nt, Artificial Sequence
  Description of Artificial Sequence: Synthetic oligonucleotide
  Antisense strand to SEQ ID NO: 1204050
auaaucacagcagauucag

SEQ ID NO: 1204052 - RNA, 19 nt, Artificial Sequence
  Description of Artificial Sequence: Synthetic oligonucleotide
  Sense strand starting at position 3875 of SEQ ID NO: 917042
agggauguauuagcaagau

SEQ ID NO: 1204053 - RNA, 19 nt, Artificial Sequence
  Description of Artificial Sequence: Synthetic oligonucleotide
  Antisense strand to SEQ ID NO: 1204052
aucuugcuaauacaucccu

SEQ ID NO: 1204054 - RNA, 19 nt, Artificial Sequence
  Description of Artificial Sequence: Synthetic oligonucleotide
  Sense strand starting at position 3879 of SEQ ID NO: 917042
auguauuagcaagaugugu

SEQ ID NO: 1204055 - RNA, 19 nt, Artificial Sequence
  Description of Artificial Sequence: Synthetic oligonucleotide
  Antisense strand to SEQ ID NO: 1204054
acacaucuugcuaauacau

SEQ ID NO: 1204056 - RNA, 19 nt, Artificial Sequence
  Description of Artificial Sequence: Synthetic oligonucleotide
  Sense strand starting at position 3888 of SEQ ID NO: 917042
caagaugugugguuguaca

SEQ ID NO: 1204057 - RNA, 19 nt, Artificial Sequence
  Description of Artificial Sequence: Synthetic oligonucleotide
  Antisense strand to SEQ ID NO: 1204056
uguacaaccacacaucuug

SEQ ID NO: 1204058 - RNA, 19 nt, Artificial Sequence
  Description of Artificial Sequence: Synthetic oligonucleotide
  Sense strand starting at position 3899 of SEQ ID NO: 917042
guuguacaucuugggaguu

SEQ ID NO: 1204059 - RNA, 19 nt, Artificial Sequence
  Description of Artificial Sequence: Synthetic oligonucleotide
  Antisense strand to SEQ ID NO: 1204058
aacucccaagauguacaac

SEQ ID NO: 1204060 - RNA, 19 nt, Artificial Sequence
  Description of Artificial Sequence: Synthetic oligonucleotide
  Sense strand starting at position 3911 of SEQ ID NO: 917042
gggaguugggugggaagua

SEQ ID NO: 1204061 - RNA, 19 nt, Artificial Sequence
  Description of Artificial Sequence: Synthetic oligonucleotide
  Antisense strand to SEQ ID NO: 1204060
uacuucccacccaacuccc

SEQ ID NO: 1204062 - RNA, 19 nt, Artificial Sequence
  Description of Artificial Sequence: Synthetic oligonucleotide
  Sense strand starting at position 3930 of SEQ ID NO: 917042
guuuacacauaguccaaua

SEQ ID NO: 1204063 - RNA, 19 nt, Artificial Sequence
  Description of Artificial Sequence: Synthetic oligonucleotide
  Antisense strand to SEQ ID NO: 1204062
uauuggacuauguguaaac

SEQ ID NO: 1204064 - RNA, 19 nt, Artificial Sequence
  Description of Artificial Sequence: Synthetic oligonucleotide
  Sense strand starting at position 3972 of SEQ ID NO: 917042
aaaggauagacguguaagu

SEQ ID NO: 1204065 - RNA, 19 nt, Artificial Sequence
  Description of Artificial Sequence: Synthetic oligonucleotide
  Antisense strand to SEQ ID NO: 1204064
acuuacacgucuauccuuu

SEQ ID NO: 1204066 - RNA, 19 nt, Artificial Sequence
  Description of Artificial Sequence: Synthetic oligonucleotide
  Sense strand starting at position 3974 of SEQ ID NO: 917042
aggauagacguguaaguug

SEQ ID NO: 1204067 - RNA, 19 nt, Artificial Sequence
  Description of Artificial Sequence: Synthetic oligonucleotide
  Antisense strand to SEQ ID NO: 1204066
caacuuacacgucuauccu

SEQ ID NO: 1204068 - RNA, 19 nt, Artificial Sequence
  Description of Artificial Sequence: Synthetic oligonucleotide
  Sense strand starting at position 204 of SEQ ID NO: 917043
gggcccugggcucaguaaa

SEQ ID NO: 1204069 - RNA, 19 nt, Artificial Sequence
  Description of Artificial Sequence: Synthetic oligonucleotide
  Antisense strand to SEQ ID NO: 1204068
uuuacugagcccagggccc

SEQ ID NO: 1204070 - RNA, 19 nt, Artificial Sequence
  Description of Artificial Sequence: Synthetic oligonucleotide
  Sense strand starting at position 233 of SEQ ID NO: 917043
agccauuagucagcacuuu

SEQ ID NO: 1204071 - RNA, 19 nt, Artificial Sequence
  Description of Artificial Sequence: Synthetic oligonucleotide
  Antisense strand to SEQ ID NO: 1204070
aaagugcugacuaauggcu

SEQ ID NO: 1204072 - RNA, 19 nt, Artificial Sequence
  Description of Artificial Sequence: Synthetic oligonucleotide
  Sense strand starting at position 966 of SEQ ID NO: 917043
ccaaguuuguuaucagugu

SEQ ID NO: 1204073 - RNA, 19 nt, Artificial Sequence
  Description of Artificial Sequence: Synthetic oligonucleotide
  Antisense strand to SEQ ID NO: 1204072
acacugauaacaaacuugg

SEQ ID NO: 1204074 - RNA, 19 nt, Artificial Sequence
  Description of Artificial Sequence: Synthetic oligonucleotide
  Sense strand starting at position 1121 of SEQ ID NO: 917043
uccaaaucgugcuucugaa

SEQ ID NO: 1204075 - RNA, 19 nt, Artificial Sequence
  Description of Artificial Sequence: Synthetic oligonucleotide
  Antisense strand to SEQ ID NO: 1204074
uucagaagcacgauuugga

SEQ ID NO: 1204076 - RNA, 19 nt, Artificial Sequence
  Description of Artificial Sequence: Synthetic oligonucleotide
  Sense strand starting at position 1220 of SEQ ID NO: 917043
gaugaucccgguugggaau

SEQ ID NO: 1204077 - RNA, 19 nt, Artificial Sequence
  Description of Artificial Sequence: Synthetic oligonucleotide
  Antisense strand to SEQ ID NO: 1204076
auucccaaccgggaucauc

SEQ ID NO: 1204078 - RNA, 19 nt, Artificial Sequence
  Description of Artificial Sequence: Synthetic oligonucleotide
  Sense strand starting at position 1355 of SEQ ID NO: 917043
aggguuuggacaggaaagu

SEQ ID NO: 1204079 - RNA, 19 nt, Artificial Sequence
  Description of Artificial Sequence: Synthetic oligonucleotide
  Antisense strand to SEQ ID NO: 1204078
acuuuccuguccaaacccu

SEQ ID NO: 1204080 - RNA, 19 nt, Artificial Sequence
  Description of Artificial Sequence: Synthetic oligonucleotide
  Sense strand starting at position 1435 of SEQ ID NO: 917043
ggagucugaacuggaaagu

SEQ ID NO: 1204081 - RNA, 19 nt, Artificial Sequence
  Description of Artificial Sequence: Synthetic oligonucleotide
  Antisense strand to SEQ ID NO: 1204080
acuuuccaguucagacucc

SEQ ID NO: 1204082 - RNA, 19 nt, Artificial Sequence
  Description of Artificial Sequence: Synthetic oligonucleotide
  Sense strand starting at position 2699 of SEQ ID NO: 917043
gaaauagaauggcugaguu

SEQ ID NO: 1204083 - RNA, 19 nt, Artificial Sequence
  Description of Artificial Sequence: Synthetic oligonucleotide
  Antisense strand to SEQ ID NO: 1204082
aacucagccauucuauuuc

SEQ ID NO: 1204084 - RNA, 19 nt, Artificial Sequence
  Description of Artificial Sequence: Synthetic oligonucleotide
  Sense strand starting at position 2707 of SEQ ID NO: 917043
auggcugaguuagagguua

SEQ ID NO: 1204085 - RNA, 19 nt, Artificial Sequence
  Description of Artificial Sequence: Synthetic oligonucleotide
  Antisense strand to SEQ ID NO: 1204084
uaaccucuaacucagccau

SEQ ID NO: 1204086 - RNA, 19 nt, Artificial Sequence
  Description of Artificial Sequence: Synthetic oligonucleotide
  Sense strand starting at position 2733 of SEQ ID NO: 917043
aaaguugaguuccauaaug

SEQ ID NO: 1204087 - RNA, 19 nt, Artificial Sequence
  Description of Artificial Sequence: Synthetic oligonucleotide
  Antisense strand to SEQ ID NO: 1204086
cauuauggaacucaacuuu

SEQ ID NO: 1204088 - RNA, 19 nt, Artificial Sequence
  Description of Artificial Sequence: Synthetic oligonucleotide
  Sense strand starting at position 2738 of SEQ ID NO: 917043
ugaguuccauaaugccaaa

SEQ ID NO: 1204089 - RNA, 19 nt, Artificial Sequence
  Description of Artificial Sequence: Synthetic oligonucleotide
  Antisense strand to SEQ ID NO: 1204088
uuuggcauuauggaacuca

SEQ ID NO: 1204090 - RNA, 19 nt, Artificial Sequence
  Description of Artificial Sequence: Synthetic oligonucleotide
  Sense strand starting at position 2834 of SEQ ID NO: 917043
gaggaaagguuagcuagau

SEQ ID NO: 1204091 - RNA, 19 nt, Artificial Sequence
  Description of Artificial Sequence: Synthetic oligonucleotide
  Antisense strand to SEQ ID NO: 1204090
aucuagcuaaccuuuccuc

SEQ ID NO: 1204092 - RNA, 19 nt, Artificial Sequence
  Description of Artificial Sequence: Synthetic oligonucleotide
  Sense strand starting at position 2907 of SEQ ID NO: 917043
aagggugaguucuccaaag

SEQ ID NO: 1204093 - RNA, 19 nt, Artificial Sequence
  Description of Artificial Sequence: Synthetic oligonucleotide
  Antisense strand to SEQ ID NO: 1204092
cuuuggagaacucacccuu

SEQ ID NO: 1204094 - RNA, 19 nt, Artificial Sequence
  Description of Artificial Sequence: Synthetic oligonucleotide
  Sense strand starting at position 2909 of SEQ ID NO: 917043
gggugaguucuccaaagau

SEQ ID NO: 1204095 - RNA, 19 nt, Artificial Sequence
  Description of Artificial Sequence: Synthetic oligonucleotide
  Antisense strand to SEQ ID NO: 1204094
aucuuuggagaacucaccc

SEQ ID NO: 1204096 - RNA, 19 nt, Artificial Sequence
  Description of Artificial Sequence: Synthetic oligonucleotide
  Sense strand starting at position 2980 of SEQ ID NO: 917043
uuaagaaagcgguaggauu

SEQ ID NO: 1204097 - RNA, 19 nt, Artificial Sequence
  Description of Artificial Sequence: Synthetic oligonucleotide
  Antisense strand to SEQ ID NO: 1204096
aauccuaccgcuuucuuaa

SEQ ID NO: 1204098 - RNA, 19 nt, Artificial Sequence
  Description of Artificial Sequence: Synthetic oligonucleotide
  Sense strand starting at position 2991 of SEQ ID NO: 917043
guaggauugggaugugugu

SEQ ID NO: 1204099 - RNA, 19 nt, Artificial Sequence
  Description of Artificial Sequence: Synthetic oligonucleotide
  Antisense strand to SEQ ID NO: 1204098
acacacaucccaauccuac

SEQ ID NO: 1204100 - RNA, 19 nt, Artificial Sequence
  Description of Artificial Sequence: Synthetic oligonucleotide
  Sense strand starting at position 3012 of SEQ ID NO: 917043
gugugaaacgccuguaaug

SEQ ID NO: 1204101 - RNA, 19 nt, Artificial Sequence
  Description of Artificial Sequence: Synthetic oligonucleotide
  Antisense strand to SEQ ID NO: 1204100
cauuacaggcguuucacac

SEQ ID NO: 1204102 - RNA, 19 nt, Artificial Sequence
  Description of Artificial Sequence: Synthetic oligonucleotide
  Sense strand starting at position 3014 of SEQ ID NO: 917043
gugaaacgccuguaaugug

SEQ ID NO: 1204103 - RNA, 19 nt, Artificial Sequence
  Description of Artificial Sequence: Synthetic oligonucleotide
  Antisense strand to SEQ ID NO: 1204102
cacauuacaggcguuucac

SEQ ID NO: 1204104 - RNA, 19 nt, Artificial Sequence
  Description of Artificial Sequence: Synthetic oligonucleotide
  Sense strand starting at position 3019 of SEQ ID NO: 917043
acgccuguaauguguacau

SEQ ID NO: 1204105 - RNA, 19 nt, Artificial Sequence
  Description of Artificial Sequence: Synthetic oligonucleotide
  Antisense strand to SEQ ID NO: 1204104
auguacacauuacaggcgu

SEQ ID NO: 1204106 - RNA, 19 nt, Artificial Sequence
  Description of Artificial Sequence: Synthetic oligonucleotide
  Sense strand starting at position 3031 of SEQ ID NO: 917043
uguacauggucguuccuaa

SEQ ID NO: 1204107 - RNA, 19 nt, Artificial Sequence
  Description of Artificial Sequence: Synthetic oligonucleotide
  Antisense strand to SEQ ID NO: 1204106
uuaggaacgaccauguaca

SEQ ID NO: 1204108 - RNA, 19 nt, Artificial Sequence
  Description of Artificial Sequence: Synthetic oligonucleotide
  Sense strand starting at position 3038 of SEQ ID NO: 917043
ggucguuccuaacuauaau

SEQ ID NO: 1204109 - RNA, 19 nt, Artificial Sequence
  Description of Artificial Sequence: Synthetic oligonucleotide
  Antisense strand to SEQ ID NO: 1204108
auuauaguuaggaacgacc

SEQ ID NO: 1204110 - RNA, 19 nt, Artificial Sequence
  Description of Artificial Sequence: Synthetic oligonucleotide
  Sense strand starting at position 3086 of SEQ ID NO: 917043
gcgcacuuuccagcgauua

SEQ ID NO: 1204111 - RNA, 19 nt, Artificial Sequence
  Description of Artificial Sequence: Synthetic oligonucleotide
  Antisense strand to SEQ ID NO: 1204110
uaaucgcuggaaagugcgc

SEQ ID NO: 1204112 - RNA, 19 nt, Artificial Sequence
  Description of Artificial Sequence: Synthetic oligonucleotide
  Sense strand starting at position 3087 of SEQ ID NO: 917043
cgcacuuuccagcgauuag

SEQ ID NO: 1204113 - RNA, 19 nt, Artificial Sequence
  Description of Artificial Sequence: Synthetic oligonucleotide
  Antisense strand to SEQ ID NO: 1204112
cuaaucgcuggaaagugcg

SEQ ID NO: 1204114 - RNA, 19 nt, Artificial Sequence
  Description of Artificial Sequence: Synthetic oligonucleotide
  Sense strand starting at position 3088 of SEQ ID NO: 917043
gcacuuuccagcgauuagu

SEQ ID NO: 1204115 - RNA, 19 nt, Artificial Sequence
  Description of Artificial Sequence: Synthetic oligonucleotide
  Antisense strand to SEQ ID NO: 1204114
acuaaucgcuggaaagugc

SEQ ID NO: 1204116 - RNA, 19 nt, Artificial Sequence
  Description of Artificial Sequence: Synthetic oligonucleotide
  Sense strand starting at position 3096 of SEQ ID NO: 917043
cagcgauuagugcauccau

SEQ ID NO: 1204117 - RNA, 19 nt, Artificial Sequence
  Description of Artificial Sequence: Synthetic oligonucleotide
  Antisense strand to SEQ ID NO: 1204116
auggaugcacuaaucgcug

SEQ ID NO: 1204118 - RNA, 19 nt, Artificial Sequence
  Description of Artificial Sequence: Synthetic oligonucleotide
  Sense strand starting at position 3116 of SEQ ID NO: 917043
caaugauuccacgaggcac

SEQ ID NO: 1204119 - RNA, 19 nt, Artificial Sequence
  Description of Artificial Sequence: Synthetic oligonucleotide
  Antisense strand to SEQ ID NO: 1204118
gugccucguggaaucauug

SEQ ID NO: 1204120 - RNA, 19 nt, Artificial Sequence
  Description of Artificial Sequence: Synthetic oligonucleotide
  Sense strand starting at position 3186 of SEQ ID NO: 917043
uggagaauguguccaaagu

SEQ ID NO: 1204121 - RNA, 19 nt, Artificial Sequence
  Description of Artificial Sequence: Synthetic oligonucleotide
  Antisense strand to SEQ ID NO: 1204120
acuuuggacacauucucca

SEQ ID NO: 1204122 - RNA, 19 nt, Artificial Sequence
  Description of Artificial Sequence: Synthetic oligonucleotide
  Sense strand starting at position 3187 of SEQ ID NO: 917043
ggagaauguguccaaaguc

SEQ ID NO: 1204123 - RNA, 19 nt, Artificial Sequence
  Description of Artificial Sequence: Synthetic oligonucleotide
  Antisense strand to SEQ ID NO: 1204122
gacuuuggacacauucucc

SEQ ID NO: 1204124 - RNA, 19 nt, Artificial Sequence
  Description of Artificial Sequence: Synthetic oligonucleotide
  Sense strand starting at position 3260 of SEQ ID NO: 917043
cagcgauugcucugggaga

SEQ ID NO: 1204125 - RNA, 19 nt, Artificial Sequence
  Description of Artificial Sequence: Synthetic oligonucleotide
  Antisense strand to SEQ ID NO: 1204124
ucucccagagcaaucgcug

SEQ ID NO: 1204126 - RNA, 19 nt, Artificial Sequence
  Description of Artificial Sequence: Synthetic oligonucleotide
  Sense strand starting at position 3262 of SEQ ID NO: 917043
gcgauugcucugggagaga

SEQ ID NO: 1204127 - RNA, 19 nt, Artificial Sequence
  Description of Artificial Sequence: Synthetic oligonucleotide
  Antisense strand to SEQ ID NO: 1204126
ucucucccagagcaaucgc

SEQ ID NO: 1204128 - RNA, 19 nt, Artificial Sequence
  Description of Artificial Sequence: Synthetic oligonucleotide
  Sense strand starting at position 3294 of SEQ ID NO: 917043
guuagugcuguucaccgua

SEQ ID NO: 1204129 - RNA, 19 nt, Artificial Sequence
  Description of Artificial Sequence: Synthetic oligonucleotide
  Antisense strand to SEQ ID NO: 1204128
uacggugaacagcacuaac

SEQ ID NO: 1204130 - RNA, 19 nt, Artificial Sequence
  Description of Artificial Sequence: Synthetic oligonucleotide
  Sense strand starting at position 3361 of SEQ ID NO: 917043
uuugcaaaugcaugauucu

SEQ ID NO: 1204131 - RNA, 19 nt, Artificial Sequence
  Description of Artificial Sequence: Synthetic oligonucleotide
  Antisense strand to SEQ ID NO: 1204130
agaaucaugcauuugcaaa

SEQ ID NO: 1204132 - RNA, 19 nt, Artificial Sequence
  Description of Artificial Sequence: Synthetic oligonucleotide
  Sense strand starting at position 3362 of SEQ ID NO: 917043
uugcaaaugcaugauucua

SEQ ID NO: 1204133 - RNA, 19 nt, Artificial Sequence
  Description of Artificial Sequence: Synthetic oligonucleotide
  Antisense strand to SEQ ID NO: 1204132
uagaaucaugcauuugcaa

SEQ ID NO: 1204134 - RNA, 19 nt, Artificial Sequence
  Description of Artificial Sequence: Synthetic oligonucleotide
  Sense strand starting at position 3364 of SEQ ID NO: 917043
gcaaaugcaugauucuaaa

SEQ ID NO: 1204135 - RNA, 19 nt, Artificial Sequence
  Description of Artificial Sequence: Synthetic oligonucleotide
  Antisense strand to SEQ ID NO: 1204134
uuuagaaucaugcauuugc

SEQ ID NO: 1204136 - RNA, 19 nt, Artificial Sequence
  Description of Artificial Sequence: Synthetic oligonucleotide
  Sense strand starting at position 3404 of SEQ ID NO: 917043
ucaguacaguccuaaagua

SEQ ID NO: 1204137 - RNA, 19 nt, Artificial Sequence
  Description of Artificial Sequence: Synthetic oligonucleotide
  Antisense strand to SEQ ID NO: 1204136
uacuuuaggacuguacuga

SEQ ID NO: 1204138 - RNA, 19 nt, Artificial Sequence
  Description of Artificial Sequence: Synthetic oligonucleotide
  Sense strand starting at position 3681 of SEQ ID NO: 917043
cguagucagccauagcauu

SEQ ID NO: 1204139 - RNA, 19 nt, Artificial Sequence
  Description of Artificial Sequence: Synthetic oligonucleotide
  Antisense strand to SEQ ID NO: 1204138
aaugcuauggcugacuacg

SEQ ID NO: 1204140 - RNA, 19 nt, Artificial Sequence
  Description of Artificial Sequence: Synthetic oligonucleotide
  Sense strand starting at position 3927 of SEQ ID NO: 917043
ggccgagauugcuagagau

SEQ ID NO: 1204141 - RNA, 19 nt, Artificial Sequence
  Description of Artificial Sequence: Synthetic oligonucleotide
  Antisense strand to SEQ ID NO: 1204140
aucucuagcaaucucggcc

SEQ ID NO: 1204142 - RNA, 19 nt, Artificial Sequence
  Description of Artificial Sequence: Synthetic oligonucleotide
  Sense strand starting at position 3933 of SEQ ID NO: 917043
gauugcuagagauggcgaa

SEQ ID NO: 1204143 - RNA, 19 nt, Artificial Sequence
  Description of Artificial Sequence: Synthetic oligonucleotide
  Antisense strand to SEQ ID NO: 1204142
uucgccaucucuagcaauc

SEQ ID NO: 1204144 - RNA, 19 nt, Artificial Sequence
  Description of Artificial Sequence: Synthetic oligonucleotide
  Sense strand starting at position 3952 of SEQ ID NO: 917043
gccuguacuccuggaaagu

SEQ ID NO: 1204145 - RNA, 19 nt, Artificial Sequence
  Description of Artificial Sequence: Synthetic oligonucleotide
  Antisense strand to SEQ ID NO: 1204144
acuuuccaggaguacaggc

SEQ ID NO: 1204146 - RNA, 19 nt, Artificial Sequence
  Description of Artificial Sequence: Synthetic oligonucleotide
  Sense strand starting at position 3953 of SEQ ID NO: 917043
ccuguacuccuggaaagua

SEQ ID NO: 1204147 - RNA, 19 nt, Artificial Sequence
  Description of Artificial Sequence: Synthetic oligonucleotide
  Antisense strand to SEQ ID NO: 1204146
uacuuuccaggaguacagg

SEQ ID NO: 1204148 - RNA, 19 nt, Artificial Sequence
  Description of Artificial Sequence: Synthetic oligonucleotide
  Sense strand starting at position 78 of SEQ ID NO: 917044
uuuacaaguugucucuuua

SEQ ID NO: 1204149 - RNA, 19 nt, Artificial Sequence
  Description of Artificial Sequence: Synthetic oligonucleotide
  Antisense strand to SEQ ID NO: 1204148
uaaagagacaacuuguaaa

SEQ ID NO: 1204150 - RNA, 19 nt, Artificial Sequence
  Description of Artificial Sequence: Synthetic oligonucleotide
  Sense strand starting at position 85 of SEQ ID NO: 917044
guugucucuuuauuaagac

SEQ ID NO: 1204151 - RNA, 19 nt, Artificial Sequence
  Description of Artificial Sequence: Synthetic oligonucleotide
  Antisense strand to SEQ ID NO: 1204150
gucuuaauaaagagacaac

SEQ ID NO: 1204152 - RNA, 19 nt, Artificial Sequence
  Description of Artificial Sequence: Synthetic oligonucleotide
  Sense strand starting at position 120 of SEQ ID NO: 917044
acugauuauucuguaacug

SEQ ID NO: 1204153 - RNA, 19 nt, Artificial Sequence
  Description of Artificial Sequence: Synthetic oligonucleotide
  Antisense strand to SEQ ID NO: 1204152
caguuacagaauaaucagu

SEQ ID NO: 1204154 - RNA, 19 nt, Artificial Sequence
  Description of Artificial Sequence: Synthetic oligonucleotide
  Sense strand starting at position 167 of SEQ ID NO: 917044
cuuagaggguacucaaaua

SEQ ID NO: 1204155 - RNA, 19 nt, Artificial Sequence
  Description of Artificial Sequence: Synthetic oligonucleotide
  Antisense strand to SEQ ID NO: 1204154
uauuugaguacccucuaag

SEQ ID NO: 1204156 - RNA, 19 nt, Artificial Sequence
  Description of Artificial Sequence: Synthetic oligonucleotide
  Sense strand starting at position 178 of SEQ ID NO: 917044
cucaaauaaucugcuggau

SEQ ID NO: 1204157 - RNA, 19 nt, Artificial Sequence
  Description of Artificial Sequence: Synthetic oligonucleotide
  Antisense strand to SEQ ID NO: 1204156
auccagcagauuauuugag

SEQ ID NO: 1204158 - RNA, 19 nt, Artificial Sequence
  Description of Artificial Sequence: Synthetic oligonucleotide
  Sense strand starting at position 198 of SEQ ID NO: 917044
gaaugaacgagacguuaag

SEQ ID NO: 1204159 - RNA, 19 nt, Artificial Sequence
  Description of Artificial Sequence: Synthetic oligonucleotide
  Antisense strand to SEQ ID NO: 1204158
cuuaacgucucguucauuc

SEQ ID NO: 1204160 - RNA, 19 nt, Artificial Sequence
  Description of Artificial Sequence: Synthetic oligonucleotide
  Sense strand starting at position 261 of SEQ ID NO: 917044
ggguuuggacaaugagcaa

SEQ ID NO: 1204161 - RNA, 19 nt, Artificial Sequence
  Description of Artificial Sequence: Synthetic oligonucleotide
  Antisense strand to SEQ ID NO: 1204160
uugcucauuguccaaaccc

SEQ ID NO: 1204162 - RNA, 19 nt, Artificial Sequence
  Description of Artificial Sequence: Synthetic oligonucleotide
  Sense strand starting at position 304 of SEQ ID NO: 917044
cugagugcccacugagaau

SEQ ID NO: 1204163 - RNA, 19 nt, Artificial Sequence
  Description of Artificial Sequence: Synthetic oligonucleotide
  Antisense strand to SEQ ID NO: 1204162
auucucagugggcacucag

SEQ ID NO: 1204164 - RNA, 19 nt, Artificial Sequence
  Description of Artificial Sequence: Synthetic oligonucleotide
  Sense strand starting at position 746 of SEQ ID NO: 917044
cgauccauccagggaaugu

SEQ ID NO: 1204165 - RNA, 19 nt, Artificial Sequence
  Description of Artificial Sequence: Synthetic oligonucleotide
  Antisense strand to SEQ ID NO: 1204164
acauucccuggauggaucg

SEQ ID NO: 1204166 - RNA, 19 nt, Artificial Sequence
  Description of Artificial Sequence: Synthetic oligonucleotide
  Sense strand starting at position 1137 of SEQ ID NO: 917044
caggaaaugccacggcuau

SEQ ID NO: 1204167 - RNA, 19 nt, Artificial Sequence
  Description of Artificial Sequence: Synthetic oligonucleotide
  Antisense strand to SEQ ID NO: 1204166
auagccguggcauuuccug

SEQ ID NO: 1204168 - RNA, 19 nt, Artificial Sequence
  Description of Artificial Sequence: Synthetic oligonucleotide
  Sense strand starting at position 2202 of SEQ ID NO: 917044
ggcugacuccuauagcaau

SEQ ID NO: 1204169 - RNA, 19 nt, Artificial Sequence
  Description of Artificial Sequence: Synthetic oligonucleotide
  Antisense strand to SEQ ID NO: 1204168
auugcuauaggagucagcc

SEQ ID NO: 1204170 - RNA, 19 nt, Artificial Sequence
  Description of Artificial Sequence: Synthetic oligonucleotide
  Sense strand starting at position 2458 of SEQ ID NO: 917044
caagauccuccacgauguu

SEQ ID NO: 1204171 - RNA, 19 nt, Artificial Sequence
  Description of Artificial Sequence: Synthetic oligonucleotide
  Antisense strand to SEQ ID NO: 1204170
aacaucguggaggaucuug

SEQ ID NO: 1204172 - RNA, 19 nt, Artificial Sequence
  Description of Artificial Sequence: Synthetic oligonucleotide
  Sense strand starting at position 2461 of SEQ ID NO: 917044
gauccuccacgauguuuaa

SEQ ID NO: 1204173 - RNA, 19 nt, Artificial Sequence
  Description of Artificial Sequence: Synthetic oligonucleotide
  Antisense strand to SEQ ID NO: 1204172
uuaaacaucguggaggauc

SEQ ID NO: 1204174 - RNA, 19 nt, Artificial Sequence
  Description of Artificial Sequence: Synthetic oligonucleotide
  Sense strand starting at position 2464 of SEQ ID NO: 917044
ccuccacgauguuuaaaua

SEQ ID NO: 1204175 - RNA, 19 nt, Artificial Sequence
  Description of Artificial Sequence: Synthetic oligonucleotide
  Antisense strand to SEQ ID NO: 1204174
uauuuaaacaucguggagg

SEQ ID NO: 1204176 - RNA, 19 nt, Artificial Sequence
  Description of Artificial Sequence: Synthetic oligonucleotide
  Sense strand starting at position 2536 of SEQ ID NO: 917044
cuccuccuggucugaaaga

SEQ ID NO: 1204177 - RNA, 19 nt, Artificial Sequence
  Description of Artificial Sequence: Synthetic oligonucleotide
  Antisense strand to SEQ ID NO: 1204176
ucuuucagaccaggaggag

SEQ ID NO: 1204178 - RNA, 19 nt, Artificial Sequence
  Description of Artificial Sequence: Synthetic oligonucleotide
  Sense strand starting at position 2629 of SEQ ID NO: 917044
ggcaacuaauucccaguaa

SEQ ID NO: 1204179 - RNA, 19 nt, Artificial Sequence
  Description of Artificial Sequence: Synthetic oligonucleotide
  Antisense strand to SEQ ID NO: 1204178
uuacugggaauuaguugcc

SEQ ID NO: 1204180 - RNA, 19 nt, Artificial Sequence
  Description of Artificial Sequence: Synthetic oligonucleotide
  Sense strand starting at position 2661 of SEQ ID NO: 917044
aagaauggccaguguuuac

SEQ ID NO: 1204181 - RNA, 19 nt, Artificial Sequence
  Description of Artificial Sequence: Synthetic oligonucleotide
  Antisense strand to SEQ ID NO: 1204180
guaaacacuggccauucuu

SEQ ID NO: 1204182 - RNA, 19 nt, Artificial Sequence
  Description of Artificial Sequence: Synthetic oligonucleotide
  Sense strand starting at position 2797 of SEQ ID NO: 917044
cagguaacauguccaaagu

SEQ ID NO: 1204183 - RNA, 19 nt, Artificial Sequence
  Description of Artificial Sequence: Synthetic oligonucleotide
  Antisense strand to SEQ ID NO: 1204182
acuuuggacauguuaccug

SEQ ID NO: 1204184 - RNA, 19 nt, Artificial Sequence
  Description of Artificial Sequence: Synthetic oligonucleotide
  Sense strand starting at position 2892 of SEQ ID NO: 917044
gcuauuaguggacaaugca

SEQ ID NO: 1204185 - RNA, 19 nt, Artificial Sequence
  Description of Artificial Sequence: Synthetic oligonucleotide
  Antisense strand to SEQ ID NO: 1204184
ugcauuguccacuaauagc

SEQ ID NO: 1204186 - RNA, 19 nt, Artificial Sequence
  Description of Artificial Sequence: Synthetic oligonucleotide
  Sense strand starting at position 3045 of SEQ ID NO: 917044
uagacauugggcuaggcua

SEQ ID NO: 1204187 - RNA, 19 nt, Artificial Sequence
  Description of Artificial Sequence: Synthetic oligonucleotide
  Antisense strand to SEQ ID NO: 1204186
uagccuagcccaaugucua

SEQ ID NO: 1204188 - RNA, 19 nt, Artificial Sequence
  Description of Artificial Sequence: Synthetic oligonucleotide
  Sense strand starting at position 3059 of SEQ ID NO: 917044
ggcuacaggagauguaaga

SEQ ID NO: 1204189 - RNA, 19 nt, Artificial Sequence
  Description of Artificial Sequence: Synthetic oligonucleotide
  Antisense strand to SEQ ID NO: 1204188
ucuuacaucuccuguagcc

SEQ ID NO: 1204190 - RNA, 19 nt, Artificial Sequence
  Description of Artificial Sequence: Synthetic oligonucleotide
  Sense strand starting at position 3142 of SEQ ID NO: 917044
gugguaggugcucaguaau

SEQ ID NO: 1204191 - RNA, 19 nt, Artificial Sequence
  Description of Artificial Sequence: Synthetic oligonucleotide
  Antisense strand to SEQ ID NO: 1204190
auuacugagcaccuaccac

SEQ ID NO: 1204192 - RNA, 19 nt, Artificial Sequence
  Description of Artificial Sequence: Synthetic oligonucleotide
  Sense strand starting at position 3145 of SEQ ID NO: 917044
guaggugcucaguaaugau

SEQ ID NO: 1204193 - RNA, 19 nt, Artificial Sequence
  Description of Artificial Sequence: Synthetic oligonucleotide
  Antisense strand to SEQ ID NO: 1204192
aucauuacugagcaccuac

SEQ ID NO: 1204194 - RNA, 19 nt, Artificial Sequence
  Description of Artificial Sequence: Synthetic oligonucleotide
  Sense strand starting at position 3149 of SEQ ID NO: 917044
gugcucaguaaugauugaa

SEQ ID NO: 1204195 - RNA, 19 nt, Artificial Sequence
  Description of Artificial Sequence: Synthetic oligonucleotide
  Antisense strand to SEQ ID NO: 1204194
uucaaucauuacugagcac

SEQ ID NO: 1204196 - RNA, 19 nt, Artificial Sequence
  Description of Artificial Sequence: Synthetic oligonucleotide
  Sense strand starting at position 3152 of SEQ ID NO: 917044
cucaguaaugauugaauga

SEQ ID NO: 1204197 - RNA, 19 nt, Artificial Sequence
  Description of Artificial Sequence: Synthetic oligonucleotide
  Antisense strand to SEQ ID NO: 1204196
ucauucaaucauuacugag

SEQ ID NO: 1204198 - RNA, 19 nt, Artificial Sequence
  Description of Artificial Sequence: Synthetic oligonucleotide
  Sense strand starting at position 3263 of SEQ ID NO: 917044
caagguagguuaguaugaa

SEQ ID NO: 1204199 - RNA, 19 nt, Artificial Sequence
  Description of Artificial Sequence: Synthetic oligonucleotide
  Antisense strand to SEQ ID NO: 1204198
uucauacuaaccuaccuug

SEQ ID NO: 1204200 - RNA, 19 nt, Artificial Sequence
  Description of Artificial Sequence: Synthetic oligonucleotide
  Sense strand starting at position 3271 of SEQ ID NO: 917044
guuaguaugaacuggaaga

SEQ ID NO: 1204201 - RNA, 19 nt, Artificial Sequence
  Description of Artificial Sequence: Synthetic oligonucleotide
  Antisense strand to SEQ ID NO: 1204200
ucuuccaguucauacuaac

SEQ ID NO: 1204202 - RNA, 19 nt, Artificial Sequence
  Description of Artificial Sequence: Synthetic oligonucleotide
  Sense strand starting at position 3353 of SEQ ID NO: 917044
gguuuauucugaccuggcu

SEQ ID NO: 1204203 - RNA, 19 nt, Artificial Sequence
  Description of Artificial Sequence: Synthetic oligonucleotide
  Antisense strand to SEQ ID NO: 1204202
agccaggucagaauaaacc

SEQ ID NO: 1204204 - RNA, 19 nt, Artificial Sequence
  Description of Artificial Sequence: Synthetic oligonucleotide
  Sense strand starting at position 3413 of SEQ ID NO: 917044
ugcacugagcuuuggaagu

SEQ ID NO: 1204205 - RNA, 19 nt, Artificial Sequence
  Description of Artificial Sequence: Synthetic oligonucleotide
  Antisense strand to SEQ ID NO: 1204204
acuuccaaagcucagugca

SEQ ID NO: 1204206 - RNA, 19 nt, Artificial Sequence
  Description of Artificial Sequence: Synthetic oligonucleotide
  Sense strand starting at position 3426 of SEQ ID NO: 917044
ggaaguuagccaugaccuc

SEQ ID NO: 1204207 - RNA, 19 nt, Artificial Sequence
  Description of Artificial Sequence: Synthetic oligonucleotide
  Antisense strand to SEQ ID NO: 1204206
gaggucauggcuaacuucc

SEQ ID NO: 1204208 - RNA, 19 nt, Artificial Sequence
  Description of Artificial Sequence: Synthetic oligonucleotide
  Sense strand starting at position 3427 of SEQ ID NO: 917044
gaaguuagccaugaccuca

SEQ ID NO: 1204209 - RNA, 19 nt, Artificial Sequence
  Description of Artificial Sequence: Synthetic oligonucleotide
  Antisense strand to SEQ ID NO: 1204208
ugaggucauggcuaacuuc

SEQ ID NO: 1204210 - RNA, 19 nt, Artificial Sequence
  Description of Artificial Sequence: Synthetic oligonucleotide
  Sense strand starting at position 3503 of SEQ ID NO: 917044
gggcuccuucucuagggau

SEQ ID NO: 1204211 - RNA, 19 nt, Artificial Sequence
  Description of Artificial Sequence: Synthetic oligonucleotide
  Antisense strand to SEQ ID NO: 1204210
aucccuagagaaggagccc

SEQ ID NO: 1204212 - RNA, 19 nt, Artificial Sequence
  Description of Artificial Sequence: Synthetic oligonucleotide
  Sense strand starting at position 3548 of SEQ ID NO: 917044
aggccugggccugauugau

SEQ ID NO: 1204213 - RNA, 19 nt, Artificial Sequence
  Description of Artificial Sequence: Synthetic oligonucleotide
  Antisense strand to SEQ ID NO: 1204212
aucaaucaggcccaggccu

SEQ ID NO: 1204214 - RNA, 19 nt, Artificial Sequence
  Description of Artificial Sequence: Synthetic oligonucleotide
  Sense strand starting at position 3746 of SEQ ID NO: 917044
ugcccaauuggguggcaua

SEQ ID NO: 1204215 - RNA, 19 nt, Artificial Sequence
  Description of Artificial Sequence: Synthetic oligonucleotide
  Antisense strand to SEQ ID NO: 1204214
uaugccacccaauugggca

SEQ ID NO: 1204216 - RNA, 19 nt, Artificial Sequence
  Description of Artificial Sequence: Synthetic oligonucleotide
  Sense strand starting at position 3792 of SEQ ID NO: 917044
cuguacugucuuugagaga

SEQ ID NO: 1204217 - RNA, 19 nt, Artificial Sequence
  Description of Artificial Sequence: Synthetic oligonucleotide
  Antisense strand to SEQ ID NO: 1204216
ucucucaaagacaguacag

SEQ ID NO: 1204218 - RNA, 19 nt, Artificial Sequence
  Description of Artificial Sequence: Synthetic oligonucleotide
  Sense strand starting at position 3797 of SEQ ID NO: 917044
cugucuuugagagauuagu

SEQ ID NO: 1204219 - RNA, 19 nt, Artificial Sequence
  Description of Artificial Sequence: Synthetic oligonucleotide
  Antisense strand to SEQ ID NO: 1204218
acuaaucucucaaagacag

SEQ ID NO: 1204220 - RNA, 19 nt, Artificial Sequence
  Description of Artificial Sequence: Synthetic oligonucleotide
  Sense strand starting at position 3912 of SEQ ID NO: 917044
ucaacagagugguuacuga

SEQ ID NO: 1204221 - RNA, 19 nt, Artificial Sequence
  Description of Artificial Sequence: Synthetic oligonucleotide
  Antisense strand to SEQ ID NO: 1204220
ucaguaaccacucuguuga

SEQ ID NO: 1204222 - RNA, 19 nt, Artificial Sequence
  Description of Artificial Sequence: Synthetic oligonucleotide
  Sense strand starting at position 3951 of SEQ ID NO: 917044
uaugcuacuugauugugaa

SEQ ID NO: 1204223 - RNA, 19 nt, Artificial Sequence
  Description of Artificial Sequence: Synthetic oligonucleotide
  Antisense strand to SEQ ID NO: 1204222
uucacaaucaaguagcaua

SEQ ID NO: 1204224 - RNA, 19 nt, Artificial Sequence
  Description of Artificial Sequence: Synthetic oligonucleotide
  Sense strand starting at position 3952 of SEQ ID NO: 917044
augcuacuugauugugaau

SEQ ID NO: 1204225 - RNA, 19 nt, Artificial Sequence
  Description of Artificial Sequence: Synthetic oligonucleotide
  Antisense strand to SEQ ID NO: 1204224
auucacaaucaaguagcau

SEQ ID NO: 1204226 - RNA, 19 nt, Artificial Sequence
  Description of Artificial Sequence: Synthetic oligonucleotide
  Sense strand starting at position 3958 of SEQ ID NO: 917044
cuugauugugaauggccaa

SEQ ID NO: 1204227 - RNA, 19 nt, Artificial Sequence
  Description of Artificial Sequence: Synthetic oligonucleotide
  Antisense strand to SEQ ID NO: 1204226
uuggccauucacaaucaag

SEQ ID NO: 1204228 - RNA, 19 nt, Artificial Sequence
  Description of Artificial Sequence: Synthetic oligonucleotide
  Sense strand starting at position 325 of SEQ ID NO: 917045
ccacgaacuucugaacaca

SEQ ID NO: 1204229 - RNA, 19 nt, Artificial Sequence
  Description of Artificial Sequence: Synthetic oligonucleotide
  Antisense strand to SEQ ID NO: 1204228
uguguucagaaguucgugg

SEQ ID NO: 1204230 - RNA, 19 nt, Artificial Sequence
  Description of Artificial Sequence: Synthetic oligonucleotide
  Sense strand starting at position 436 of SEQ ID NO: 917045
aagucaagagcuugaaagu

SEQ ID NO: 1204231 - RNA, 19 nt, Artificial Sequence
  Description of Artificial Sequence: Synthetic oligonucleotide
  Antisense strand to SEQ ID NO: 1204230
acuuucaagcucuugacuu

SEQ ID NO: 1204232 - RNA, 19 nt, Artificial Sequence
  Description of Artificial Sequence: Synthetic oligonucleotide
  Sense strand starting at position 466 of SEQ ID NO: 917045
ggcaguguggucaggucaa

SEQ ID NO: 1204233 - RNA, 19 nt, Artificial Sequence
  Description of Artificial Sequence: Synthetic oligonucleotide
  Antisense strand to SEQ ID NO: 1204232
uugaccugaccacacugcc

SEQ ID NO: 1204234 - RNA, 19 nt, Artificial Sequence
  Description of Artificial Sequence: Synthetic oligonucleotide
  Sense strand starting at position 513 of SEQ ID NO: 917045
agauuuaacugcuuugugu

SEQ ID NO: 1204235 - RNA, 19 nt, Artificial Sequence
  Description of Artificial Sequence: Synthetic oligonucleotide
  Antisense strand to SEQ ID NO: 1204234
acacaaagcaguuaaaucu

SEQ ID NO: 1204236 - RNA, 19 nt, Artificial Sequence
  Description of Artificial Sequence: Synthetic oligonucleotide
  Sense strand starting at position 519 of SEQ ID NO: 917045
aacugcuuugugugucagu

SEQ ID NO: 1204237 - RNA, 19 nt, Artificial Sequence
  Description of Artificial Sequence: Synthetic oligonucleotide
  Antisense strand to SEQ ID NO: 1204236
acugacacacaaagcaguu

SEQ ID NO: 1204238 - RNA, 19 nt, Artificial Sequence
  Description of Artificial Sequence: Synthetic oligonucleotide
  Sense strand starting at position 521 of SEQ ID NO: 917045
cugcuuugugugucaguuu

SEQ ID NO: 1204239 - RNA, 19 nt, Artificial Sequence
  Description of Artificial Sequence: Synthetic oligonucleotide
  Antisense strand to SEQ ID NO: 1204238
aaacugacacacaaagcag

SEQ ID NO: 1204240 - RNA, 19 nt, Artificial Sequence
  Description of Artificial Sequence: Synthetic oligonucleotide
  Sense strand starting at position 524 of SEQ ID NO: 917045
cuuugugugucaguuugaa

SEQ ID NO: 1204241 - RNA, 19 nt, Artificial Sequence
  Description of Artificial Sequence: Synthetic oligonucleotide
  Antisense strand to SEQ ID NO: 1204240
uucaaacugacacacaaag

SEQ ID NO: 1204242 - RNA, 19 nt, Artificial Sequence
  Description of Artificial Sequence: Synthetic oligonucleotide
  Sense strand starting at position 574 of SEQ ID NO: 917045
ggagguuaguuucaggauu

SEQ ID NO: 1204243 - RNA, 19 nt, Artificial Sequence
  Description of Artificial Sequence: Synthetic oligonucleotide
  Antisense strand to SEQ ID NO: 1204242
aauccugaaacuaaccucc

SEQ ID NO: 1204244 - RNA, 19 nt, Artificial Sequence
  Description of Artificial Sequence: Synthetic oligonucleotide
  Sense strand starting at position 647 of SEQ ID NO: 917045
acauaaauaccacguggua

SEQ ID NO: 1204245 - RNA, 19 nt, Artificial Sequence
  Description of Artificial Sequence: Synthetic oligonucleotide
  Antisense strand to SEQ ID NO: 1204244
uaccacgugguauuuaugu

SEQ ID NO: 1204246 - RNA, 19 nt, Artificial Sequence
  Description of Artificial Sequence: Synthetic oligonucleotide
  Sense strand starting at position 679 of SEQ ID NO: 917045
guaaauacaggcugaaaua

SEQ ID NO: 1204247 - RNA, 19 nt, Artificial Sequence
  Description of Artificial Sequence: Synthetic oligonucleotide
  Antisense strand to SEQ ID NO: 1204246
uauuucagccuguauuuac

SEQ ID NO: 1204248 - RNA, 19 nt, Artificial Sequence
  Description of Artificial Sequence: Synthetic oligonucleotide
  Sense strand starting at position 959 of SEQ ID NO: 917045
ucagauucucauuggaaac

SEQ ID NO: 1204249 - RNA, 19 nt, Artificial Sequence
  Description of Artificial Sequence: Synthetic oligonucleotide
  Antisense strand to SEQ ID NO: 1204248
guuuccaaugagaaucuga

SEQ ID NO: 1204250 - RNA, 19 nt, Artificial Sequence
  Description of Artificial Sequence: Synthetic oligonucleotide
  Sense strand starting at position 996 of SEQ ID NO: 917045
aagcuucuagugcaaguua

SEQ ID NO: 1204251 - RNA, 19 nt, Artificial Sequence
  Description of Artificial Sequence: Synthetic oligonucleotide
  Antisense strand to SEQ ID NO: 1204250
uaacuugcacuagaagcuu

SEQ ID NO: 1204252 - RNA, 19 nt, Artificial Sequence
  Description of Artificial Sequence: Synthetic oligonucleotide
  Sense strand starting at position 1007 of SEQ ID NO: 917045
gcaaguuauuuggaacauc

SEQ ID NO: 1204253 - RNA, 19 nt, Artificial Sequence
  Description of Artificial Sequence: Synthetic oligonucleotide
  Antisense strand to SEQ ID NO: 1204252
gauguuccaaauaacuugc

SEQ ID NO: 1204254 - RNA, 19 nt, Artificial Sequence
  Description of Artificial Sequence: Synthetic oligonucleotide
  Sense strand starting at position 1018 of SEQ ID NO: 917045
ggaacaucauuaguucuuu

SEQ ID NO: 1204255 - RNA, 19 nt, Artificial Sequence
  Description of Artificial Sequence: Synthetic oligonucleotide
  Antisense strand to SEQ ID NO: 1204254
aaagaacuaaugauguucc

SEQ ID NO: 1204256 - RNA, 19 nt, Artificial Sequence
  Description of Artificial Sequence: Synthetic oligonucleotide
  Sense strand starting at position 1023 of SEQ ID NO: 917045
aucauuaguucuuugucau

SEQ ID NO: 1204257 - RNA, 19 nt, Artificial Sequence
  Description of Artificial Sequence: Synthetic oligonucleotide
  Antisense strand to SEQ ID NO: 1204256
augacaaagaacuaaugau

SEQ ID NO: 1204258 - RNA, 19 nt, Artificial Sequence
  Description of Artificial Sequence: Synthetic oligonucleotide
  Sense strand starting at position 1024 of SEQ ID NO: 917045
ucauuaguucuuugucaug

SEQ ID NO: 1204259 - RNA, 19 nt, Artificial Sequence
  Description of Artificial Sequence: Synthetic oligonucleotide
  Antisense strand to SEQ ID NO: 1204258
caugacaaagaacuaauga

SEQ ID NO: 1204260 - RNA, 19 nt, Artificial Sequence
  Description of Artificial Sequence: Synthetic oligonucleotide
  Sense strand starting at position 1026 of SEQ ID NO: 917045
auuaguucuuugucauguu

SEQ ID NO: 1204261 - RNA, 19 nt, Artificial Sequence
  Description of Artificial Sequence: Synthetic oligonucleotide
  Antisense strand to SEQ ID NO: 1204260
aacaugacaaagaacuaau

SEQ ID NO: 1204262 - RNA, 19 nt, Artificial Sequence
  Description of Artificial Sequence: Synthetic oligonucleotide
  Sense strand starting at position 1035 of SEQ ID NO: 917045
uugucauguuauguccaaa

SEQ ID NO: 1204263 - RNA, 19 nt, Artificial Sequence
  Description of Artificial Sequence: Synthetic oligonucleotide
  Antisense strand to SEQ ID NO: 1204262
uuuggacauaacaugacaa

SEQ ID NO: 1204264 - RNA, 19 nt, Artificial Sequence
  Description of Artificial Sequence: Synthetic oligonucleotide
  Sense strand starting at position 1038 of SEQ ID NO: 917045
ucauguuauguccaaauuc

SEQ ID NO: 1204265 - RNA, 19 nt, Artificial Sequence
  Description of Artificial Sequence: Synthetic oligonucleotide
  Antisense strand to SEQ ID NO: 1204264
gaauuuggacauaacauga

SEQ ID NO: 1204266 - RNA, 19 nt, Artificial Sequence
  Description of Artificial Sequence: Synthetic oligonucleotide
  Sense strand starting at position 1113 of SEQ ID NO: 917045
aggucaauuccuugccucu

SEQ ID NO: 1204267 - RNA, 19 nt, Artificial Sequence
  Description of Artificial Sequence: Synthetic oligonucleotide
  Antisense strand to SEQ ID NO: 1204266
agaggcaaggaauugaccu

SEQ ID NO: 1204268 - RNA, 19 nt, Artificial Sequence
  Description of Artificial Sequence: Synthetic oligonucleotide
  Sense strand starting at position 1223 of SEQ ID NO: 917045
ccagccuuuccuggacaau

SEQ ID NO: 1204269 - RNA, 19 nt, Artificial Sequence
  Description of Artificial Sequence: Synthetic oligonucleotide
  Antisense strand to SEQ ID NO: 1204268
auuguccaggaaaggcugg

SEQ ID NO: 1204270 - RNA, 19 nt, Artificial Sequence
  Description of Artificial Sequence: Synthetic oligonucleotide
  Sense strand starting at position 1226 of SEQ ID NO: 917045
gccuuuccuggacaauaga

SEQ ID NO: 1204271 - RNA, 19 nt, Artificial Sequence
  Description of Artificial Sequence: Synthetic oligonucleotide
  Antisense strand to SEQ ID NO: 1204270
ucuauuguccaggaaaggc

SEQ ID NO: 1204272 - RNA, 19 nt, Artificial Sequence
  Description of Artificial Sequence: Synthetic oligonucleotide
  Sense strand starting at position 1236 of SEQ ID NO: 917045
gacaauagacuaugugacu

SEQ ID NO: 1204273 - RNA, 19 nt, Artificial Sequence
  Description of Artificial Sequence: Synthetic oligonucleotide
  Antisense strand to SEQ ID NO: 1204272
agucacauagucuauuguc

SEQ ID NO: 1204274 - RNA, 19 nt, Artificial Sequence
  Description of Artificial Sequence: Synthetic oligonucleotide
  Sense strand starting at position 1237 of SEQ ID NO: 917045
acaauagacuaugugacuu

SEQ ID NO: 1204275 - RNA, 19 nt, Artificial Sequence
  Description of Artificial Sequence: Synthetic oligonucleotide
  Antisense strand to SEQ ID NO: 1204274
aagucacauagucuauugu

SEQ ID NO: 1204276 - RNA, 19 nt, Artificial Sequence
  Description of Artificial Sequence: Synthetic oligonucleotide
  Sense strand starting at position 2841 of SEQ ID NO: 917045
agcuuugaucgcgccaaug

SEQ ID NO: 1204277 - RNA, 19 nt, Artificial Sequence
  Description of Artificial Sequence: Synthetic oligonucleotide
  Antisense strand to SEQ ID NO: 1204276
cauuggcgcgaucaaagcu

SEQ ID NO: 1204278 - RNA, 19 nt, Artificial Sequence
  Description of Artificial Sequence: Synthetic oligonucleotide
  Sense strand starting at position 2843 of SEQ ID NO: 917045
cuuugaucgcgccaaugca

SEQ ID NO: 1204279 - RNA, 19 nt, Artificial Sequence
  Description of Artificial Sequence: Synthetic oligonucleotide
  Antisense strand to SEQ ID NO: 1204278
ugcauuggcgcgaucaaag

SEQ ID NO: 1204280 - RNA, 19 nt, Artificial Sequence
  Description of Artificial Sequence: Synthetic oligonucleotide
  Sense strand starting at position 2947 of SEQ ID NO: 917045
ggguguugugggagugcaa

SEQ ID NO: 1204281 - RNA, 19 nt, Artificial Sequence
  Description of Artificial Sequence: Synthetic oligonucleotide
  Antisense strand to SEQ ID NO: 1204280
uugcacucccacaacaccc

SEQ ID NO: 1204282 - RNA, 19 nt, Artificial Sequence
  Description of Artificial Sequence: Synthetic oligonucleotide
  Sense strand starting at position 2954 of SEQ ID NO: 917045
gugggagugcaaugaacaa

SEQ ID NO: 1204283 - RNA, 19 nt, Artificial Sequence
  Description of Artificial Sequence: Synthetic oligonucleotide
  Antisense strand to SEQ ID NO: 1204282
uuguucauugcacucccac

SEQ ID NO: 1204284 - RNA, 19 nt, Artificial Sequence
  Description of Artificial Sequence: Synthetic oligonucleotide
  Sense strand starting at position 2976 of SEQ ID NO: 917045
aauaauauuguccgggcuu

SEQ ID NO: 1204285 - RNA, 19 nt, Artificial Sequence
  Description of Artificial Sequence: Synthetic oligonucleotide
  Antisense strand to SEQ ID NO: 1204284
aagcccggacaauauuauu

SEQ ID NO: 1204286 - RNA, 19 nt, Artificial Sequence
  Description of Artificial Sequence: Synthetic oligonucleotide
  Sense strand starting at position 2978 of SEQ ID NO: 917045
uaauauuguccgggcuuga

SEQ ID NO: 1204287 - RNA, 19 nt, Artificial Sequence
  Description of Artificial Sequence: Synthetic oligonucleotide
  Antisense strand to SEQ ID NO: 1204286
ucaagcccggacaauauua

SEQ ID NO: 1204288 - RNA, 19 nt, Artificial Sequence
  Description of Artificial Sequence: Synthetic oligonucleotide
  Sense strand starting at position 3020 of SEQ ID NO: 917045
acuguaauccgaggcaucu

SEQ ID NO: 1204289 - RNA, 19 nt, Artificial Sequence
  Description of Artificial Sequence: Synthetic oligonucleotide
  Antisense strand to SEQ ID NO: 1204288
agaugccucggauuacagu

SEQ ID NO: 1204290 - RNA, 19 nt, Artificial Sequence
  Description of Artificial Sequence: Synthetic oligonucleotide
  Sense strand starting at position 3184 of SEQ ID NO: 917045
ucgugccucagcuaggauu

SEQ ID NO: 1204291 - RNA, 19 nt, Artificial Sequence
  Description of Artificial Sequence: Synthetic oligonucleotide
  Antisense strand to SEQ ID NO: 1204290
aauccuagcugaggcacga

SEQ ID NO: 1204292 - RNA, 19 nt, Artificial Sequence
  Description of Artificial Sequence: Synthetic oligonucleotide
  Sense strand starting at position 3186 of SEQ ID NO: 917045
gugccucagcuaggauuau

SEQ ID NO: 1204293 - RNA, 19 nt, Artificial Sequence
  Description of Artificial Sequence: Synthetic oligonucleotide
  Antisense strand to SEQ ID NO: 1204292
auaauccuagcugaggcac

SEQ ID NO: 1204294 - RNA, 19 nt, Artificial Sequence
  Description of Artificial Sequence: Synthetic oligonucleotide
  Sense strand starting at position 3427 of SEQ ID NO: 917045
guugaacuguuauauacau

SEQ ID NO: 1204295 - RNA, 19 nt, Artificial Sequence
  Description of Artificial Sequence: Synthetic oligonucleotide
  Antisense strand to SEQ ID NO: 1204294
auguauauaacaguucaac

SEQ ID NO: 1204296 - RNA, 19 nt, Artificial Sequence
  Description of Artificial Sequence: Synthetic oligonucleotide
  Sense strand starting at position 3518 of SEQ ID NO: 917045
auguaucaggcuuguggga

SEQ ID NO: 1204297 - RNA, 19 nt, Artificial Sequence
  Description of Artificial Sequence: Synthetic oligonucleotide
  Antisense strand to SEQ ID NO: 1204296
ucccacaagccugauacau

SEQ ID NO: 1204298 - RNA, 19 nt, Artificial Sequence
  Description of Artificial Sequence: Synthetic oligonucleotide
  Sense strand starting at position 3536 of SEQ ID NO: 917045
agacuuucgggucauagag

SEQ ID NO: 1204299 - RNA, 19 nt, Artificial Sequence
  Description of Artificial Sequence: Synthetic oligonucleotide
  Antisense strand to SEQ ID NO: 1204298
cucuaugacccgaaagucu

SEQ ID NO: 1204300 - RNA, 19 nt, Artificial Sequence
  Description of Artificial Sequence: Synthetic oligonucleotide
  Sense strand starting at position 3542 of SEQ ID NO: 917045
ucgggucauagagguuaaa

SEQ ID NO: 1204301 - RNA, 19 nt, Artificial Sequence
  Description of Artificial Sequence: Synthetic oligonucleotide
  Antisense strand to SEQ ID NO: 1204300
uuuaaccucuaugacccga

SEQ ID NO: 1204302 - RNA, 19 nt, Artificial Sequence
  Description of Artificial Sequence: Synthetic oligonucleotide
  Sense strand starting at position 3567 of SEQ ID NO: 917045
cgauuugucuuccaaauga

SEQ ID NO: 1204303 - RNA, 19 nt, Artificial Sequence
  Description of Artificial Sequence: Synthetic oligonucleotide
  Antisense strand to SEQ ID NO: 1204302
ucauuuggaagacaaaucg

SEQ ID NO: 1204304 - RNA, 19 nt, Artificial Sequence
  Description of Artificial Sequence: Synthetic oligonucleotide
  Sense strand starting at position 3673 of SEQ ID NO: 917045
uuugguucuuucuccaaag

SEQ ID NO: 1204305 - RNA, 19 nt, Artificial Sequence
  Description of Artificial Sequence: Synthetic oligonucleotide
  Antisense strand to SEQ ID NO: 1204304
cuuuggagaaagaaccaaa

SEQ ID NO: 1204306 - RNA, 19 nt, Artificial Sequence
  Description of Artificial Sequence: Synthetic oligonucleotide
  Sense strand starting at position 3954 of SEQ ID NO: 917045
guggcaugcauuugcaauc

SEQ ID NO: 1204307 - RNA, 19 nt, Artificial Sequence
  Description of Artificial Sequence: Synthetic oligonucleotide
  Antisense strand to SEQ ID NO: 1204306
gauugcaaaugcaugccac

SEQ ID NO: 1204308 - RNA, 19 nt, Artificial Sequence
  Description of Artificial Sequence: Synthetic oligonucleotide
  Sense strand starting at position 123 of SEQ ID NO: 917046
acauaaauaccacguggua

SEQ ID NO: 1204309 - RNA, 19 nt, Artificial Sequence
  Description of Artificial Sequence: Synthetic oligonucleotide
  Antisense strand to SEQ ID NO: 1204308
uaccacgugguauuuaugu

SEQ ID NO: 1204310 - RNA, 19 nt, Artificial Sequence
  Description of Artificial Sequence: Synthetic oligonucleotide
  Sense strand starting at position 155 of SEQ ID NO: 917046
guaaauacaggcugaaaua

SEQ ID NO: 1204311 - RNA, 19 nt, Artificial Sequence
  Description of Artificial Sequence: Synthetic oligonucleotide
  Antisense strand to SEQ ID NO: 1204310
uauuucagccuguauuuac

SEQ ID NO: 1204312 - RNA, 19 nt, Artificial Sequence
  Description of Artificial Sequence: Synthetic oligonucleotide
  Sense strand starting at position 435 of SEQ ID NO: 917046
ucagauucucauuggaaac

SEQ ID NO: 1204313 - RNA, 19 nt, Artificial Sequence
  Description of Artificial Sequence: Synthetic oligonucleotide
  Antisense strand to SEQ ID NO: 1204312
guuuccaaugagaaucuga

SEQ ID NO: 1204314 - RNA, 19 nt, Artificial Sequence
  Description of Artificial Sequence: Synthetic oligonucleotide
  Sense strand starting at position 472 of SEQ ID NO: 917046
aagcuucuagugcaaguua

SEQ ID NO: 1204315 - RNA, 19 nt, Artificial Sequence
  Description of Artificial Sequence: Synthetic oligonucleotide
  Antisense strand to SEQ ID NO: 1204314
uaacuugcacuagaagcuu

SEQ ID NO: 1204316 - RNA, 19 nt, Artificial Sequence
  Description of Artificial Sequence: Synthetic oligonucleotide
  Sense strand starting at position 483 of SEQ ID NO: 917046
gcaaguuauuuggaacauc

SEQ ID NO: 1204317 - RNA, 19 nt, Artificial Sequence
  Description of Artificial Sequence: Synthetic oligonucleotide
  Antisense strand to SEQ ID NO: 1204316
gauguuccaaauaacuugc

SEQ ID NO: 1204318 - RNA, 19 nt, Artificial Sequence
  Description of Artificial Sequence: Synthetic oligonucleotide
  Sense strand starting at position 494 of SEQ ID NO: 917046
ggaacaucauuaguucuuu

SEQ ID NO: 1204319 - RNA, 19 nt, Artificial Sequence
  Description of Artificial Sequence: Synthetic oligonucleotide
  Antisense strand to SEQ ID NO: 1204318
aaagaacuaaugauguucc

SEQ ID NO: 1204320 - RNA, 19 nt, Artificial Sequence
  Description of Artificial Sequence: Synthetic oligonucleotide
  Sense strand starting at position 499 of SEQ ID NO: 917046
aucauuaguucuuugucau

SEQ ID NO: 1204321 - RNA, 19 nt, Artificial Sequence
  Description of Artificial Sequence: Synthetic oligonucleotide
  Antisense strand to SEQ ID NO: 1204320
augacaaagaacuaaugau

SEQ ID NO: 1204322 - RNA, 19 nt, Artificial Sequence
  Description of Artificial Sequence: Synthetic oligonucleotide
  Sense strand starting at position 500 of SEQ ID NO: 917046
ucauuaguucuuugucaug

SEQ ID NO: 1204323 - RNA, 19 nt, Artificial Sequence
  Description of Artificial Sequence: Synthetic oligonucleotide
  Antisense strand to SEQ ID NO: 1204322
caugacaaagaacuaauga

SEQ ID NO: 1204324 - RNA, 19 nt, Artificial Sequence
  Description of Artificial Sequence: Synthetic oligonucleotide
  Sense strand starting at position 502 of SEQ ID NO: 917046
auuaguucuuugucauguu

SEQ ID NO: 1204325 - RNA, 19 nt, Artificial Sequence
  Description of Artificial Sequence: Synthetic oligonucleotide
  Antisense strand to SEQ ID NO: 1204324
aacaugacaaagaacuaau

SEQ ID NO: 1204326 - RNA, 19 nt, Artificial Sequence
  Description of Artificial Sequence: Synthetic oligonucleotide
  Sense strand starting at position 511 of SEQ ID NO: 917046
uugucauguuauguccaaa

SEQ ID NO: 1204327 - RNA, 19 nt, Artificial Sequence
  Description of Artificial Sequence: Synthetic oligonucleotide
  Antisense strand to SEQ ID NO: 1204326
uuuggacauaacaugacaa

SEQ ID NO: 1204328 - RNA, 19 nt, Artificial Sequence
  Description of Artificial Sequence: Synthetic oligonucleotide
  Sense strand starting at position 514 of SEQ ID NO: 917046
ucauguuauguccaaauuc

SEQ ID NO: 1204329 - RNA, 19 nt, Artificial Sequence
  Description of Artificial Sequence: Synthetic oligonucleotide
  Antisense strand to SEQ ID NO: 1204328
gaauuuggacauaacauga

SEQ ID NO: 1204330 - RNA, 19 nt, Artificial Sequence
  Description of Artificial Sequence: Synthetic oligonucleotide
  Sense strand starting at position 589 of SEQ ID NO: 917046
aggucaauuccuugccucu

SEQ ID NO: 1204331 - RNA, 19 nt, Artificial Sequence
  Description of Artificial Sequence: Synthetic oligonucleotide
  Antisense strand to SEQ ID NO: 1204330
agaggcaaggaauugaccu

SEQ ID NO: 1204332 - RNA, 19 nt, Artificial Sequence
  Description of Artificial Sequence: Synthetic oligonucleotide
  Sense strand starting at position 699 of SEQ ID NO: 917046
ccagccuuuccuggacaau

SEQ ID NO: 1204333 - RNA, 19 nt, Artificial Sequence
  Description of Artificial Sequence: Synthetic oligonucleotide
  Antisense strand to SEQ ID NO: 1204332
auuguccaggaaaggcugg

SEQ ID NO: 1204334 - RNA, 19 nt, Artificial Sequence
  Description of Artificial Sequence: Synthetic oligonucleotide
  Sense strand starting at position 702 of SEQ ID NO: 917046
gccuuuccuggacaauaga

SEQ ID NO: 1204335 - RNA, 19 nt, Artificial Sequence
  Description of Artificial Sequence: Synthetic oligonucleotide
  Antisense strand to SEQ ID NO: 1204334
ucuauuguccaggaaaggc

SEQ ID NO: 1204336 - RNA, 19 nt, Artificial Sequence
  Description of Artificial Sequence: Synthetic oligonucleotide
  Sense strand starting at position 712 of SEQ ID NO: 917046
gacaauagacuaugugacu

SEQ ID NO: 1204337 - RNA, 19 nt, Artificial Sequence
  Description of Artificial Sequence: Synthetic oligonucleotide
  Antisense strand to SEQ ID NO: 1204336
agucacauagucuauuguc

SEQ ID NO: 1204338 - RNA, 19 nt, Artificial Sequence
  Description of Artificial Sequence: Synthetic oligonucleotide
  Sense strand starting at position 713 of SEQ ID NO: 917046
acaauagacuaugugacuu

SEQ ID NO: 1204339 - RNA, 19 nt, Artificial Sequence
  Description of Artificial Sequence: Synthetic oligonucleotide
  Antisense strand to SEQ ID NO: 1204338
aagucacauagucuauugu

SEQ ID NO: 1204340 - RNA, 19 nt, Artificial Sequence
  Description of Artificial Sequence: Synthetic oligonucleotide
  Sense strand starting at position 2317 of SEQ ID NO: 917046
agcuuugaucgcgccaaug

SEQ ID NO: 1204341 - RNA, 19 nt, Artificial Sequence
  Description of Artificial Sequence: Synthetic oligonucleotide
  Antisense strand to SEQ ID NO: 1204340
cauuggcgcgaucaaagcu

SEQ ID NO: 1204342 - RNA, 19 nt, Artificial Sequence
  Description of Artificial Sequence: Synthetic oligonucleotide
  Sense strand starting at position 2319 of SEQ ID NO: 917046
cuuugaucgcgccaaugca

SEQ ID NO: 1204343 - RNA, 19 nt, Artificial Sequence
  Description of Artificial Sequence: Synthetic oligonucleotide
  Antisense strand to SEQ ID NO: 1204342
ugcauuggcgcgaucaaag

SEQ ID NO: 1204344 - RNA, 19 nt, Artificial Sequence
  Description of Artificial Sequence: Synthetic oligonucleotide
  Sense strand starting at position 2423 of SEQ ID NO: 917046
ggguguugugggagugcaa

SEQ ID NO: 1204345 - RNA, 19 nt, Artificial Sequence
  Description of Artificial Sequence: Synthetic oligonucleotide
  Antisense strand to SEQ ID NO: 1204344
uugcacucccacaacaccc

SEQ ID NO: 1204346 - RNA, 19 nt, Artificial Sequence
  Description of Artificial Sequence: Synthetic oligonucleotide
  Sense strand starting at position 2430 of SEQ ID NO: 917046
gugggagugcaaugaacaa

SEQ ID NO: 1204347 - RNA, 19 nt, Artificial Sequence
  Description of Artificial Sequence: Synthetic oligonucleotide
  Antisense strand to SEQ ID NO: 1204346
uuguucauugcacucccac

SEQ ID NO: 1204348 - RNA, 19 nt, Artificial Sequence
  Description of Artificial Sequence: Synthetic oligonucleotide
  Sense strand starting at position 2452 of SEQ ID NO: 917046
aauaauauuguccgggcuu

SEQ ID NO: 1204349 - RNA, 19 nt, Artificial Sequence
  Description of Artificial Sequence: Synthetic oligonucleotide
  Antisense strand to SEQ ID NO: 1204348
aagcccggacaauauuauu

SEQ ID NO: 1204350 - RNA, 19 nt, Artificial Sequence
  Description of Artificial Sequence: Synthetic oligonucleotide
  Sense strand starting at position 2454 of SEQ ID NO: 917046
uaauauuguccgggcuuga

SEQ ID NO: 1204351 - RNA, 19 nt, Artificial Sequence
  Description of Artificial Sequence: Synthetic oligonucleotide
  Antisense strand to SEQ ID NO: 1204350
ucaagcccggacaauauua

SEQ ID NO: 1204352 - RNA, 19 nt, Artificial Sequence
  Description of Artificial Sequence: Synthetic oligonucleotide
  Sense strand starting at position 2496 of SEQ ID NO: 917046
acuguaauccgaggcaucu

SEQ ID NO: 1204353 - RNA, 19 nt, Artificial Sequence
  Description of Artificial Sequence: Synthetic oligonucleotide
  Antisense strand to SEQ ID NO: 1204352
agaugccucggauuacagu

SEQ ID NO: 1204354 - RNA, 19 nt, Artificial Sequence
  Description of Artificial Sequence: Synthetic oligonucleotide
  Sense strand starting at position 2660 of SEQ ID NO: 917046
ucgugccucagcuaggauu

SEQ ID NO: 1204355 - RNA, 19 nt, Artificial Sequence
  Description of Artificial Sequence: Synthetic oligonucleotide
  Antisense strand to SEQ ID NO: 1204354
aauccuagcugaggcacga

SEQ ID NO: 1204356 - RNA, 19 nt, Artificial Sequence
  Description of Artificial Sequence: Synthetic oligonucleotide
  Sense strand starting at position 2662 of SEQ ID NO: 917046
gugccucagcuaggauuau

SEQ ID NO: 1204357 - RNA, 19 nt, Artificial Sequence
  Description of Artificial Sequence: Synthetic oligonucleotide
  Antisense strand to SEQ ID NO: 1204356
auaauccuagcugaggcac

SEQ ID NO: 1204358 - RNA, 19 nt, Artificial Sequence
  Description of Artificial Sequence: Synthetic oligonucleotide
  Sense strand starting at position 2994 of SEQ ID NO: 917046
auguaucaggcuuguggga

SEQ ID NO: 1204359 - RNA, 19 nt, Artificial Sequence
  Description of Artificial Sequence: Synthetic oligonucleotide
  Antisense strand to SEQ ID NO: 1204358
ucccacaagccugauacau

SEQ ID NO: 1204360 - RNA, 19 nt, Artificial Sequence
  Description of Artificial Sequence: Synthetic oligonucleotide
  Sense strand starting at position 3012 of SEQ ID NO: 917046
agacuuucgggucauagag

SEQ ID NO: 1204361 - RNA, 19 nt, Artificial Sequence
  Description of Artificial Sequence: Synthetic oligonucleotide
  Antisense strand to SEQ ID NO: 1204360
cucuaugacccgaaagucu

SEQ ID NO: 1204362 - RNA, 19 nt, Artificial Sequence
  Description of Artificial Sequence: Synthetic oligonucleotide
  Sense strand starting at position 3018 of SEQ ID NO: 917046
ucgggucauagagguuaaa

SEQ ID NO: 1204363 - RNA, 19 nt, Artificial Sequence
  Description of Artificial Sequence: Synthetic oligonucleotide
  Antisense strand to SEQ ID NO: 1204362
uuuaaccucuaugacccga

SEQ ID NO: 1204364 - RNA, 19 nt, Artificial Sequence
  Description of Artificial Sequence: Synthetic oligonucleotide
  Sense strand starting at position 3043 of SEQ ID NO: 917046
cgauuugucuuccaaauga

SEQ ID NO: 1204365 - RNA, 19 nt, Artificial Sequence
  Description of Artificial Sequence: Synthetic oligonucleotide
  Antisense strand to SEQ ID NO: 1204364
ucauuuggaagacaaaucg

SEQ ID NO: 1204366 - RNA, 19 nt, Artificial Sequence
  Description of Artificial Sequence: Synthetic oligonucleotide
  Sense strand starting at position 3149 of SEQ ID NO: 917046
uuugguucuuucuccaaag

SEQ ID NO: 1204367 - RNA, 19 nt, Artificial Sequence
  Description of Artificial Sequence: Synthetic oligonucleotide
  Antisense strand to SEQ ID NO: 1204366
cuuuggagaaagaaccaaa

SEQ ID NO: 1204368 - RNA, 19 nt, Artificial Sequence
  Description of Artificial Sequence: Synthetic oligonucleotide
  Sense strand starting at position 3430 of SEQ ID NO: 917046
guggcaugcauuugcaauc

SEQ ID NO: 1204369 - RNA, 19 nt, Artificial Sequence
  Description of Artificial Sequence: Synthetic oligonucleotide
  Antisense strand to SEQ ID NO: 1204368
gauugcaaaugcaugccac

SEQ ID NO: 1204370 - RNA, 19 nt, Artificial Sequence
  Description of Artificial Sequence: Synthetic oligonucleotide
  Sense strand starting at position 3593 of SEQ ID NO: 917046
agacaauccuuagguuaaa

SEQ ID NO: 1204371 - RNA, 19 nt, Artificial Sequence
  Description of Artificial Sequence: Synthetic oligonucleotide
  Antisense strand to SEQ ID NO: 1204370
uuuaaccuaaggauugucu

SEQ ID NO: 1204372 - RNA, 19 nt, Artificial Sequence
  Description of Artificial Sequence: Synthetic oligonucleotide
  Sense strand starting at position 3719 of SEQ ID NO: 917046
agcacaauugcuggacaca

SEQ ID NO: 1204373 - RNA, 19 nt, Artificial Sequence
  Description of Artificial Sequence: Synthetic oligonucleotide
  Antisense strand to SEQ ID NO: 1204372
uguguccagcaauugugcu

SEQ ID NO: 1204374 - RNA, 19 nt, Artificial Sequence
  Description of Artificial Sequence: Synthetic oligonucleotide
  Sense strand starting at position 3804 of SEQ ID NO: 917046
gucucagcucaggaucuuu

SEQ ID NO: 1204375 - RNA, 19 nt, Artificial Sequence
  Description of Artificial Sequence: Synthetic oligonucleotide
  Antisense strand to SEQ ID NO: 1204374
aaagauccugagcugagac

SEQ ID NO: 1204376 - RNA, 19 nt, Artificial Sequence
  Description of Artificial Sequence: Synthetic oligonucleotide
  Sense strand starting at position 3812 of SEQ ID NO: 917046
ucaggaucuuucccugaaa

SEQ ID NO: 1204377 - RNA, 19 nt, Artificial Sequence
  Description of Artificial Sequence: Synthetic oligonucleotide
  Antisense strand to SEQ ID NO: 1204376
uuucagggaaagauccuga

SEQ ID NO: 1204378 - RNA, 19 nt, Artificial Sequence
  Description of Artificial Sequence: Synthetic oligonucleotide
  Sense strand starting at position 3919 of SEQ ID NO: 917046
acaauuucuuuagagacag

SEQ ID NO: 1204379 - RNA, 19 nt, Artificial Sequence
  Description of Artificial Sequence: Synthetic oligonucleotide
  Antisense strand to SEQ ID NO: 1204378
cugucucuaaagaaauugu

SEQ ID NO: 1204380 - RNA, 19 nt, Artificial Sequence
  Description of Artificial Sequence: Synthetic oligonucleotide
  Sense strand starting at position 3959 of SEQ ID NO: 917046
guguguuucugucuccauc

SEQ ID NO: 1204381 - RNA, 19 nt, Artificial Sequence
  Description of Artificial Sequence: Synthetic oligonucleotide
  Antisense strand to SEQ ID NO: 1204380
gauggagacagaaacacac

SEQ ID NO: 1204382 - RNA, 19 nt, Artificial Sequence
  Description of Artificial Sequence: Synthetic oligonucleotide
  Sense strand starting at position 3978 of SEQ ID NO: 917046
cccgaaauguaaccugagu

SEQ ID NO: 1204383 - RNA, 19 nt, Artificial Sequence
  Description of Artificial Sequence: Synthetic oligonucleotide
  Antisense strand to SEQ ID NO: 1204382
acucagguuacauuucggg

SEQ ID NO: 1204384 - RNA, 19 nt, Artificial Sequence
  Description of Artificial Sequence: Synthetic oligonucleotide
  Sense strand starting at position 3980 of SEQ ID NO: 917046
cgaaauguaaccugaguga

SEQ ID NO: 1204385 - RNA, 19 nt, Artificial Sequence
  Description of Artificial Sequence: Synthetic oligonucleotide
  Antisense strand to SEQ ID NO: 1204384
ucacucagguuacauuucg

SEQ ID NO: 1204386 - RNA, 19 nt, Artificial Sequence
  Description of Artificial Sequence: Synthetic oligonucleotide
  Sense strand starting at position 3983 of SEQ ID NO: 917046
aauguaaccugagugaaga

SEQ ID NO: 1204387 - RNA, 19 nt, Artificial Sequence
  Description of Artificial Sequence: Synthetic oligonucleotide
  Antisense strand to SEQ ID NO: 1204386
ucuucacucagguuacauu

SEQ ID NO: 1204388 - RNA, 19 nt, Artificial Sequence
  Description of Artificial Sequence: Synthetic oligonucleotide
  Sense strand starting at position 12 of SEQ ID NO: 917047
gguaaacauggguguccua

SEQ ID NO: 1204389 - RNA, 19 nt, Artificial Sequence
  Description of Artificial Sequence: Synthetic oligonucleotide
  Antisense strand to SEQ ID NO: 1204388
uaggacacccauguuuacc

SEQ ID NO: 1204390 - RNA, 19 nt, Artificial Sequence
  Description of Artificial Sequence: Synthetic oligonucleotide
  Sense strand starting at position 19 of SEQ ID NO: 917047
auggguguccuaggaaaug

SEQ ID NO: 1204391 - RNA, 19 nt, Artificial Sequence
  Description of Artificial Sequence: Synthetic oligonucleotide
  Antisense strand to SEQ ID NO: 1204390
cauuuccuaggacacccau

SEQ ID NO: 1204392 - RNA, 19 nt, Artificial Sequence
  Description of Artificial Sequence: Synthetic oligonucleotide
  Sense strand starting at position 394 of SEQ ID NO: 917047
auuauuaagucacuugaag

SEQ ID NO: 1204393 - RNA, 19 nt, Artificial Sequence
  Description of Artificial Sequence: Synthetic oligonucleotide
  Antisense strand to SEQ ID NO: 1204392
cuucaagugacuuaauaau

SEQ ID NO: 1204394 - RNA, 19 nt, Artificial Sequence
  Description of Artificial Sequence: Synthetic oligonucleotide
  Sense strand starting at position 459 of SEQ ID NO: 917047
agggauuucuaucauacaa

SEQ ID NO: 1204395 - RNA, 19 nt, Artificial Sequence
  Description of Artificial Sequence: Synthetic oligonucleotide
  Antisense strand to SEQ ID NO: 1204394
uuguaugauagaaaucccu

SEQ ID NO: 1204396 - RNA, 19 nt, Artificial Sequence
  Description of Artificial Sequence: Synthetic oligonucleotide
  Sense strand starting at position 877 of SEQ ID NO: 917047
uaugguaacaguggaaagu

SEQ ID NO: 1204397 - RNA, 19 nt, Artificial Sequence
  Description of Artificial Sequence: Synthetic oligonucleotide
  Antisense strand to SEQ ID NO: 1204396
acuuuccacuguuaccaua

SEQ ID NO: 1204398 - RNA, 19 nt, Artificial Sequence
  Description of Artificial Sequence: Synthetic oligonucleotide
  Sense strand starting at position 981 of SEQ ID NO: 917047
uaaguuauuguagaugcca

SEQ ID NO: 1204399 - RNA, 19 nt, Artificial Sequence
  Description of Artificial Sequence: Synthetic oligonucleotide
  Antisense strand to SEQ ID NO: 1204398
uggcaucuacaauaacuua

SEQ ID NO: 1204400 - RNA, 19 nt, Artificial Sequence
  Description of Artificial Sequence: Synthetic oligonucleotide
  Sense strand starting at position 990 of SEQ ID NO: 917047
guagaugccacuugauaug

SEQ ID NO: 1204401 - RNA, 19 nt, Artificial Sequence
  Description of Artificial Sequence: Synthetic oligonucleotide
  Antisense strand to SEQ ID NO: 1204400
cauaucaaguggcaucuac

SEQ ID NO: 1204402 - RNA, 19 nt, Artificial Sequence
  Description of Artificial Sequence: Synthetic oligonucleotide
  Sense strand starting at position 999 of SEQ ID NO: 917047
acuugauauggucgacaag

SEQ ID NO: 1204403 - RNA, 19 nt, Artificial Sequence
  Description of Artificial Sequence: Synthetic oligonucleotide
  Antisense strand to SEQ ID NO: 1204402
cuugucgaccauaucaagu

SEQ ID NO: 1204404 - RNA, 19 nt, Artificial Sequence
  Description of Artificial Sequence: Synthetic oligonucleotide
  Sense strand starting at position 1000 of SEQ ID NO: 917047
cuugauauggucgacaagu

SEQ ID NO: 1204405 - RNA, 19 nt, Artificial Sequence
  Description of Artificial Sequence: Synthetic oligonucleotide
  Antisense strand to SEQ ID NO: 1204404
acuugucgaccauaucaag

SEQ ID NO: 1204406 - RNA, 19 nt, Artificial Sequence
  Description of Artificial Sequence: Synthetic oligonucleotide
  Sense strand starting at position 1002 of SEQ ID NO: 917047
ugauauggucgacaagugu

SEQ ID NO: 1204407 - RNA, 19 nt, Artificial Sequence
  Description of Artificial Sequence: Synthetic oligonucleotide
  Antisense strand to SEQ ID NO: 1204406
acacuugucgaccauauca

SEQ ID NO: 1204408 - RNA, 19 nt, Artificial Sequence
  Description of Artificial Sequence: Synthetic oligonucleotide
  Sense strand starting at position 1006 of SEQ ID NO: 917047
auggucgacaagugugaaa

SEQ ID NO: 1204409 - RNA, 19 nt, Artificial Sequence
  Description of Artificial Sequence: Synthetic oligonucleotide
  Antisense strand to SEQ ID NO: 1204408
uuucacacuugucgaccau

SEQ ID NO: 1204410 - RNA, 19 nt, Artificial Sequence
  Description of Artificial Sequence: Synthetic oligonucleotide
  Sense strand starting at position 1054 of SEQ ID NO: 917047
auguauaaccuuugguauu

SEQ ID NO: 1204411 - RNA, 19 nt, Artificial Sequence
  Description of Artificial Sequence: Synthetic oligonucleotide
  Antisense strand to SEQ ID NO: 1204410
aauaccaaagguuauacau

SEQ ID NO: 1204412 - RNA, 19 nt, Artificial Sequence
  Description of Artificial Sequence: Synthetic oligonucleotide
  Sense strand starting at position 1434 of SEQ ID NO: 917047
agaaguaaagccggugaga

SEQ ID NO: 1204413 - RNA, 19 nt, Artificial Sequence
  Description of Artificial Sequence: Synthetic oligonucleotide
  Antisense strand to SEQ ID NO: 1204412
ucucaccggcuuuacuucu

SEQ ID NO: 1204414 - RNA, 19 nt, Artificial Sequence
  Description of Artificial Sequence: Synthetic oligonucleotide
  Sense strand starting at position 2426 of SEQ ID NO: 917047
gaacccaagcucggugaau

SEQ ID NO: 1204415 - RNA, 19 nt, Artificial Sequence
  Description of Artificial Sequence: Synthetic oligonucleotide
  Antisense strand to SEQ ID NO: 1204414
auucaccgagcuuggguuc

SEQ ID NO: 1204416 - RNA, 19 nt, Artificial Sequence
  Description of Artificial Sequence: Synthetic oligonucleotide
  Sense strand starting at position 2427 of SEQ ID NO: 917047
aacccaagcucggugaaua

SEQ ID NO: 1204417 - RNA, 19 nt, Artificial Sequence
  Description of Artificial Sequence: Synthetic oligonucleotide
  Antisense strand to SEQ ID NO: 1204416
uauucaccgagcuuggguu

SEQ ID NO: 1204418 - RNA, 19 nt, Artificial Sequence
  Description of Artificial Sequence: Synthetic oligonucleotide
  Sense strand starting at position 2611 of SEQ ID NO: 917047
ccaguucaucggugaacag

SEQ ID NO: 1204419 - RNA, 19 nt, Artificial Sequence
  Description of Artificial Sequence: Synthetic oligonucleotide
  Antisense strand to SEQ ID NO: 1204418
cuguucaccgaugaacugg

SEQ ID NO: 1204420 - RNA, 19 nt, Artificial Sequence
  Description of Artificial Sequence: Synthetic oligonucleotide
  Sense strand starting at position 2697 of SEQ ID NO: 917047
uuguuuauacaggauagua

SEQ ID NO: 1204421 - RNA, 19 nt, Artificial Sequence
  Description of Artificial Sequence: Synthetic oligonucleotide
  Antisense strand to SEQ ID NO: 1204420
uacuauccuguauaaacaa

SEQ ID NO: 1204422 - RNA, 19 nt, Artificial Sequence
  Description of Artificial Sequence: Synthetic oligonucleotide
  Sense strand starting at position 2744 of SEQ ID NO: 917047
ugccguacaccugaaauga

SEQ ID NO: 1204423 - RNA, 19 nt, Artificial Sequence
  Description of Artificial Sequence: Synthetic oligonucleotide
  Antisense strand to SEQ ID NO: 1204422
ucauuucagguguacggca

SEQ ID NO: 1204424 - RNA, 19 nt, Artificial Sequence
  Description of Artificial Sequence: Synthetic oligonucleotide
  Sense strand starting at position 2781 of SEQ ID NO: 917047
uuugaagucaacgauuaug

SEQ ID NO: 1204425 - RNA, 19 nt, Artificial Sequence
  Description of Artificial Sequence: Synthetic oligonucleotide
  Antisense strand to SEQ ID NO: 1204424
cauaaucguugacuucaaa

SEQ ID NO: 1204426 - RNA, 19 nt, Artificial Sequence
  Description of Artificial Sequence: Synthetic oligonucleotide
  Sense strand starting at position 2784 of SEQ ID NO: 917047
gaagucaacgauuauguua

SEQ ID NO: 1204427 - RNA, 19 nt, Artificial Sequence
  Description of Artificial Sequence: Synthetic oligonucleotide
  Antisense strand to SEQ ID NO: 1204426
uaacauaaucguugacuuc

SEQ ID NO: 1204428 - RNA, 19 nt, Artificial Sequence
  Description of Artificial Sequence: Synthetic oligonucleotide
  Sense strand starting at position 2787 of SEQ ID NO: 917047
gucaacgauuauguuacaa

SEQ ID NO: 1204429 - RNA, 19 nt, Artificial Sequence
  Description of Artificial Sequence: Synthetic oligonucleotide
  Antisense strand to SEQ ID NO: 1204428
uuguaacauaaucguugac

SEQ ID NO: 1204430 - RNA, 19 nt, Artificial Sequence
  Description of Artificial Sequence: Synthetic oligonucleotide
  Sense strand starting at position 2868 of SEQ ID NO: 917047
uggagaggcugguucaaga

SEQ ID NO: 1204431 - RNA, 19 nt, Artificial Sequence
  Description of Artificial Sequence: Synthetic oligonucleotide
  Antisense strand to SEQ ID NO: 1204430
ucuugaaccagccucucca

SEQ ID NO: 1204432 - RNA, 19 nt, Artificial Sequence
  Description of Artificial Sequence: Synthetic oligonucleotide
  Sense strand starting at position 2887 of SEQ ID NO: 917047
gcccacaugcuauacagua

SEQ ID NO: 1204433 - RNA, 19 nt, Artificial Sequence
  Description of Artificial Sequence: Synthetic oligonucleotide
  Antisense strand to SEQ ID NO: 1204432
uacuguauagcaugugggc

SEQ ID NO: 1204434 - RNA, 19 nt, Artificial Sequence
  Description of Artificial Sequence: Synthetic oligonucleotide
  Sense strand starting at position 3008 of SEQ ID NO: 917047
ugguuagcacaguacugau

SEQ ID NO: 1204435 - RNA, 19 nt, Artificial Sequence
  Description of Artificial Sequence: Synthetic oligonucleotide
  Antisense strand to SEQ ID NO: 1204434
aucaguacugugcuaacca

SEQ ID NO: 1204436 - RNA, 19 nt, Artificial Sequence
  Description of Artificial Sequence: Synthetic oligonucleotide
  Sense strand starting at position 3083 of SEQ ID NO: 917047
uuaaguauucccgagcaug

SEQ ID NO: 1204437 - RNA, 19 nt, Artificial Sequence
  Description of Artificial Sequence: Synthetic oligonucleotide
  Antisense strand to SEQ ID NO: 1204436
caugcucgggaauacuuaa

SEQ ID NO: 1204438 - RNA, 19 nt, Artificial Sequence
  Description of Artificial Sequence: Synthetic oligonucleotide
  Sense strand starting at position 3086 of SEQ ID NO: 917047
aguauucccgagcaugaug

SEQ ID NO: 1204439 - RNA, 19 nt, Artificial Sequence
  Description of Artificial Sequence: Synthetic oligonucleotide
  Antisense strand to SEQ ID NO: 1204438
caucaugcucgggaauacu

SEQ ID NO: 1204440 - RNA, 19 nt, Artificial Sequence
  Description of Artificial Sequence: Synthetic oligonucleotide
  Sense strand starting at position 3212 of SEQ ID NO: 917047
gugagaaugcgauaaaggu

SEQ ID NO: 1204441 - RNA, 19 nt, Artificial Sequence
  Description of Artificial Sequence: Synthetic oligonucleotide
  Antisense strand to SEQ ID NO: 1204440
accuuuaucgcauucucac

SEQ ID NO: 1204442 - RNA, 19 nt, Artificial Sequence
  Description of Artificial Sequence: Synthetic oligonucleotide
  Sense strand starting at position 3222 of SEQ ID NO: 917047
gauaaagguagguguaguu

SEQ ID NO: 1204443 - RNA, 19 nt, Artificial Sequence
  Description of Artificial Sequence: Synthetic oligonucleotide
  Antisense strand to SEQ ID NO: 1204442
aacuacaccuaccuuuauc

SEQ ID NO: 1204444 - RNA, 19 nt, Artificial Sequence
  Description of Artificial Sequence: Synthetic oligonucleotide
  Sense strand starting at position 3247 of SEQ ID NO: 917047
guaggaagugcugaaucca

SEQ ID NO: 1204445 - RNA, 19 nt, Artificial Sequence
  Description of Artificial Sequence: Synthetic oligonucleotide
  Antisense strand to SEQ ID NO: 1204444
uggauucagcacuuccuac

SEQ ID NO: 1204446 - RNA, 19 nt, Artificial Sequence
  Description of Artificial Sequence: Synthetic oligonucleotide
  Sense strand starting at position 3256 of SEQ ID NO: 917047
gcugaauccaagugaaagu

SEQ ID NO: 1204447 - RNA, 19 nt, Artificial Sequence
  Description of Artificial Sequence: Synthetic oligonucleotide
  Antisense strand to SEQ ID NO: 1204446
acuuucacuuggauucagc

SEQ ID NO: 1204448 - RNA, 19 nt, Artificial Sequence
  Description of Artificial Sequence: Synthetic oligonucleotide
  Sense strand starting at position 3267 of SEQ ID NO: 917047
gugaaaguaguguauauug

SEQ ID NO: 1204449 - RNA, 19 nt, Artificial Sequence
  Description of Artificial Sequence: Synthetic oligonucleotide
  Antisense strand to SEQ ID NO: 1204448
caauauacacuacuuucac

SEQ ID NO: 1204450 - RNA, 19 nt, Artificial Sequence
  Description of Artificial Sequence: Synthetic oligonucleotide
  Sense strand starting at position 3278 of SEQ ID NO: 917047
guauauuggcauuaugauu

SEQ ID NO: 1204451 - RNA, 19 nt, Artificial Sequence
  Description of Artificial Sequence: Synthetic oligonucleotide
  Antisense strand to SEQ ID NO: 1204450
aaucauaaugccaauauac

SEQ ID NO: 1204452 - RNA, 19 nt, Artificial Sequence
  Description of Artificial Sequence: Synthetic oligonucleotide
  Sense strand starting at position 3285 of SEQ ID NO: 917047
ggcauuaugauuuguguau

SEQ ID NO: 1204453 - RNA, 19 nt, Artificial Sequence
  Description of Artificial Sequence: Synthetic oligonucleotide
  Antisense strand to SEQ ID NO: 1204452
auacacaaaucauaaugcc

SEQ ID NO: 1204454 - RNA, 19 nt, Artificial Sequence
  Description of Artificial Sequence: Synthetic oligonucleotide
  Sense strand starting at position 3286 of SEQ ID NO: 917047
gcauuaugauuuguguaua

SEQ ID NO: 1204455 - RNA, 19 nt, Artificial Sequence
  Description of Artificial Sequence: Synthetic oligonucleotide
  Antisense strand to SEQ ID NO: 1204454
uauacacaaaucauaaugc

SEQ ID NO: 1204456 - RNA, 19 nt, Artificial Sequence
  Description of Artificial Sequence: Synthetic oligonucleotide
  Sense strand starting at position 3297 of SEQ ID NO: 917047
uguguauaucaguauuaug

SEQ ID NO: 1204457 - RNA, 19 nt, Artificial Sequence
  Description of Artificial Sequence: Synthetic oligonucleotide
  Antisense strand to SEQ ID NO: 1204456
cauaauacugauauacaca

SEQ ID NO: 1204458 - RNA, 19 nt, Artificial Sequence
  Description of Artificial Sequence: Synthetic oligonucleotide
  Sense strand starting at position 3321 of SEQ ID NO: 917047
gauugcuuauuucugcgua

SEQ ID NO: 1204459 - RNA, 19 nt, Artificial Sequence
  Description of Artificial Sequence: Synthetic oligonucleotide
  Antisense strand to SEQ ID NO: 1204458
uacgcagaaauaagcaauc

SEQ ID NO: 1204460 - RNA, 19 nt, Artificial Sequence
  Description of Artificial Sequence: Synthetic oligonucleotide
  Sense strand starting at position 3324 of SEQ ID NO: 917047
ugcuuauuucugcguaaua

SEQ ID NO: 1204461 - RNA, 19 nt, Artificial Sequence
  Description of Artificial Sequence: Synthetic oligonucleotide
  Antisense strand to SEQ ID NO: 1204460
uauuacgcagaaauaagca

SEQ ID NO: 1204462 - RNA, 19 nt, Artificial Sequence
  Description of Artificial Sequence: Synthetic oligonucleotide
  Sense strand starting at position 3325 of SEQ ID NO: 917047
gcuuauuucugcguaauaa

SEQ ID NO: 1204463 - RNA, 19 nt, Artificial Sequence
  Description of Artificial Sequence: Synthetic oligonucleotide
  Antisense strand to SEQ ID NO: 1204462
uuauuacgcagaaauaagc

SEQ ID NO: 1204464 - RNA, 19 nt, Artificial Sequence
  Description of Artificial Sequence: Synthetic oligonucleotide
  Sense strand starting at position 3566 of SEQ ID NO: 917047
gagcuacauggauguaagu

SEQ ID NO: 1204465 - RNA, 19 nt, Artificial Sequence
  Description of Artificial Sequence: Synthetic oligonucleotide
  Antisense strand to SEQ ID NO: 1204464
acuuacauccauguagcuc

SEQ ID NO: 1204466 - RNA, 19 nt, Artificial Sequence
  Description of Artificial Sequence: Synthetic oligonucleotide
  Sense strand starting at position 3615 of SEQ ID NO: 917047
guucuugcccuuuaauuga

SEQ ID NO: 1204467 - RNA, 19 nt, Artificial Sequence
  Description of Artificial Sequence: Synthetic oligonucleotide
  Antisense strand to SEQ ID NO: 1204466
ucaauuaaagggcaagaac

SEQ ID NO: 1204468 - RNA, 19 nt, Artificial Sequence
  Description of Artificial Sequence: Synthetic oligonucleotide
  Sense strand starting at position 935 of SEQ ID NO: 917048
aguaguuaugguuauugau

SEQ ID NO: 1204469 - RNA, 19 nt, Artificial Sequence
  Description of Artificial Sequence: Synthetic oligonucleotide
  Antisense strand to SEQ ID NO: 1204468
aucaauaaccauaacuacu

SEQ ID NO: 1204470 - RNA, 19 nt, Artificial Sequence
  Description of Artificial Sequence: Synthetic oligonucleotide
  Sense strand starting at position 959 of SEQ ID NO: 917048
uauuucugaugaggaaaug

SEQ ID NO: 1204471 - RNA, 19 nt, Artificial Sequence
  Description of Artificial Sequence: Synthetic oligonucleotide
  Antisense strand to SEQ ID NO: 1204470
cauuuccucaucagaaaua

SEQ ID NO: 1204472 - RNA, 19 nt, Artificial Sequence
  Description of Artificial Sequence: Synthetic oligonucleotide
  Sense strand starting at position 1119 of SEQ ID NO: 917048
ugacuuggucucuguugaa

SEQ ID NO: 1204473 - RNA, 19 nt, Artificial Sequence
  Description of Artificial Sequence: Synthetic oligonucleotide
  Antisense strand to SEQ ID NO: 1204472
uucaacagagaccaaguca

SEQ ID NO: 1204474 - RNA, 19 nt, Artificial Sequence
  Description of Artificial Sequence: Synthetic oligonucleotide
  Sense strand starting at position 1126 of SEQ ID NO: 917048
gucucuguugaacaucaaa

SEQ ID NO: 1204475 - RNA, 19 nt, Artificial Sequence
  Description of Artificial Sequence: Synthetic oligonucleotide
  Antisense strand to SEQ ID NO: 1204474
uuugauguucaacagagac

SEQ ID NO: 1204476 - RNA, 19 nt, Artificial Sequence
  Description of Artificial Sequence: Synthetic oligonucleotide
  Sense strand starting at position 1465 of SEQ ID NO: 917048
cugauuaaggcacaugagu

SEQ ID NO: 1204477 - RNA, 19 nt, Artificial Sequence
  Description of Artificial Sequence: Synthetic oligonucleotide
  Antisense strand to SEQ ID NO: 1204476
acucaugugccuuaaucag

SEQ ID NO: 1204478 - RNA, 19 nt, Artificial Sequence
  Description of Artificial Sequence: Synthetic oligonucleotide
  Sense strand starting at position 1829 of SEQ ID NO: 917048
gcuguuuagagugagcaua

SEQ ID NO: 1204479 - RNA, 19 nt, Artificial Sequence
  Description of Artificial Sequence: Synthetic oligonucleotide
  Antisense strand to SEQ ID NO: 1204478
uaugcucacucuaaacagc

SEQ ID NO: 1204480 - RNA, 19 nt, Artificial Sequence
  Description of Artificial Sequence: Synthetic oligonucleotide
  Sense strand starting at position 1831 of SEQ ID NO: 917048
uguuuagagugagcauaau

SEQ ID NO: 1204481 - RNA, 19 nt, Artificial Sequence
  Description of Artificial Sequence: Synthetic oligonucleotide
  Antisense strand to SEQ ID NO: 1204480
auuaugcucacucuaaaca

SEQ ID NO: 1204482 - RNA, 19 nt, Artificial Sequence
  Description of Artificial Sequence: Synthetic oligonucleotide
  Sense strand starting at position 2002 of SEQ ID NO: 917048
acugacaaguguuuggauu

SEQ ID NO: 1204483 - RNA, 19 nt, Artificial Sequence
  Description of Artificial Sequence: Synthetic oligonucleotide
  Antisense strand to SEQ ID NO: 1204482
aauccaaacacuugucagu

SEQ ID NO: 1204484 - RNA, 19 nt, Artificial Sequence
  Description of Artificial Sequence: Synthetic oligonucleotide
  Sense strand starting at position 2008 of SEQ ID NO: 917048
aaguguuuggauuggaugu

SEQ ID NO: 1204485 - RNA, 19 nt, Artificial Sequence
  Description of Artificial Sequence: Synthetic oligonucleotide
  Antisense strand to SEQ ID NO: 1204484
acauccaauccaaacacuu

SEQ ID NO: 1204486 - RNA, 19 nt, Artificial Sequence
  Description of Artificial Sequence: Synthetic oligonucleotide
  Sense strand starting at position 2015 of SEQ ID NO: 917048
uggauuggaugucuuuaga

SEQ ID NO: 1204487 - RNA, 19 nt, Artificial Sequence
  Description of Artificial Sequence: Synthetic oligonucleotide
  Antisense strand to SEQ ID NO: 1204486
ucuaaagacauccaaucca

SEQ ID NO: 1204488 - RNA, 19 nt, Artificial Sequence
  Description of Artificial Sequence: Synthetic oligonucleotide
  Sense strand starting at position 2059 of SEQ ID NO: 917048
agcuguggccaggaaucau

SEQ ID NO: 1204489 - RNA, 19 nt, Artificial Sequence
  Description of Artificial Sequence: Synthetic oligonucleotide
  Antisense strand to SEQ ID NO: 1204488
augauuccuggccacagcu

SEQ ID NO: 1204490 - RNA, 19 nt, Artificial Sequence
  Description of Artificial Sequence: Synthetic oligonucleotide
  Sense strand starting at position 2147 of SEQ ID NO: 917048
acuugugauugacuccagu

SEQ ID NO: 1204491 - RNA, 19 nt, Artificial Sequence
  Description of Artificial Sequence: Synthetic oligonucleotide
  Antisense strand to SEQ ID NO: 1204490
acuggagucaaucacaagu

SEQ ID NO: 1204492 - RNA, 19 nt, Artificial Sequence
  Description of Artificial Sequence: Synthetic oligonucleotide
  Sense strand starting at position 2150 of SEQ ID NO: 917048
ugugauugacuccaguaug

SEQ ID NO: 1204493 - RNA, 19 nt, Artificial Sequence
  Description of Artificial Sequence: Synthetic oligonucleotide
  Antisense strand to SEQ ID NO: 1204492
cauacuggagucaaucaca

SEQ ID NO: 1204494 - RNA, 19 nt, Artificial Sequence
  Description of Artificial Sequence: Synthetic oligonucleotide
  Sense strand starting at position 2221 of SEQ ID NO: 917048
guuguugcucauuaauauu

SEQ ID NO: 1204495 - RNA, 19 nt, Artificial Sequence
  Description of Artificial Sequence: Synthetic oligonucleotide
  Antisense strand to SEQ ID NO: 1204494
aauauuaaugagcaacaac

SEQ ID NO: 1204496 - RNA, 19 nt, Artificial Sequence
  Description of Artificial Sequence: Synthetic oligonucleotide
  Sense strand starting at position 2266 of SEQ ID NO: 917048
ugaguaccacuguauaauu

SEQ ID NO: 1204497 - RNA, 19 nt, Artificial Sequence
  Description of Artificial Sequence: Synthetic oligonucleotide
  Antisense strand to SEQ ID NO: 1204496
aauuauacagugguacuca

SEQ ID NO: 1204498 - RNA, 19 nt, Artificial Sequence
  Description of Artificial Sequence: Synthetic oligonucleotide
  Sense strand starting at position 2305 of SEQ ID NO: 917048
uguuuaaaguuauccaaug

SEQ ID NO: 1204499 - RNA, 19 nt, Artificial Sequence
  Description of Artificial Sequence: Synthetic oligonucleotide
  Antisense strand to SEQ ID NO: 1204498
cauuggauaacuuuaaaca

SEQ ID NO: 1204500 - RNA, 19 nt, Artificial Sequence
  Description of Artificial Sequence: Synthetic oligonucleotide
  Sense strand starting at position 2306 of SEQ ID NO: 917048
guuuaaaguuauccaaugu

SEQ ID NO: 1204501 - RNA, 19 nt, Artificial Sequence
  Description of Artificial Sequence: Synthetic oligonucleotide
  Antisense strand to SEQ ID NO: 1204500
acauuggauaacuuuaaac

SEQ ID NO: 1204502 - RNA, 19 nt, Artificial Sequence
  Description of Artificial Sequence: Synthetic oligonucleotide
  Sense strand starting at position 2345 of SEQ ID NO: 917048
cuacuauacccgcaaugga

SEQ ID NO: 1204503 - RNA, 19 nt, Artificial Sequence
  Description of Artificial Sequence: Synthetic oligonucleotide
  Antisense strand to SEQ ID NO: 1204502
uccauugcggguauaguag

SEQ ID NO: 1204504 - RNA, 19 nt, Artificial Sequence
  Description of Artificial Sequence: Synthetic oligonucleotide
  Sense strand starting at position 2546 of SEQ ID NO: 917048
cucauaggauuguugcaaa

SEQ ID NO: 1204505 - RNA, 19 nt, Artificial Sequence
  Description of Artificial Sequence: Synthetic oligonucleotide
  Antisense strand to SEQ ID NO: 1204504
uuugcaacaauccuaugag

SEQ ID NO: 1204506 - RNA, 19 nt, Artificial Sequence
  Description of Artificial Sequence: Synthetic oligonucleotide
  Sense strand starting at position 2639 of SEQ ID NO: 917048
auggauucgaugugagauu

SEQ ID NO: 1204507 - RNA, 19 nt, Artificial Sequence
  Description of Artificial Sequence: Synthetic oligonucleotide
  Antisense strand to SEQ ID NO: 1204506
aaucucacaucgaauccau

SEQ ID NO: 1204508 - RNA, 19 nt, Artificial Sequence
  Description of Artificial Sequence: Synthetic oligonucleotide
  Sense strand starting at position 2804 of SEQ ID NO: 917048
gccaguugccaucauggau

SEQ ID NO: 1204509 - RNA, 19 nt, Artificial Sequence
  Description of Artificial Sequence: Synthetic oligonucleotide
  Antisense strand to SEQ ID NO: 1204508
auccaugauggcaacuggc

SEQ ID NO: 1204510 - RNA, 19 nt, Artificial Sequence
  Description of Artificial Sequence: Synthetic oligonucleotide
  Sense strand starting at position 2811 of SEQ ID NO: 917048
gccaucauggaucaucuua

SEQ ID NO: 1204511 - RNA, 19 nt, Artificial Sequence
  Description of Artificial Sequence: Synthetic oligonucleotide
  Antisense strand to SEQ ID NO: 1204510
uaagaugauccaugauggc

SEQ ID NO: 1204512 - RNA, 19 nt, Artificial Sequence
  Description of Artificial Sequence: Synthetic oligonucleotide
  Sense strand starting at position 2818 of SEQ ID NO: 917048
uggaucaucuuaguaguuu

SEQ ID NO: 1204513 - RNA, 19 nt, Artificial Sequence
  Description of Artificial Sequence: Synthetic oligonucleotide
  Antisense strand to SEQ ID NO: 1204512
aaacuacuaagaugaucca

SEQ ID NO: 1204514 - RNA, 19 nt, Artificial Sequence
  Description of Artificial Sequence: Synthetic oligonucleotide
  Sense strand starting at position 3076 of SEQ ID NO: 917048
cugggaugagccugugauc

SEQ ID NO: 1204515 - RNA, 19 nt, Artificial Sequence
  Description of Artificial Sequence: Synthetic oligonucleotide
  Antisense strand to SEQ ID NO: 1204514
gaucacaggcucaucccag

SEQ ID NO: 1204516 - RNA, 19 nt, Artificial Sequence
  Description of Artificial Sequence: Synthetic oligonucleotide
  Sense strand starting at position 3386 of SEQ ID NO: 917048
uguucuaguacuugggaca

SEQ ID NO: 1204517 - RNA, 19 nt, Artificial Sequence
  Description of Artificial Sequence: Synthetic oligonucleotide
  Antisense strand to SEQ ID NO: 1204516
ugucccaaguacuagaaca

SEQ ID NO: 1204518 - RNA, 19 nt, Artificial Sequence
  Description of Artificial Sequence: Synthetic oligonucleotide
  Sense strand starting at position 3410 of SEQ ID NO: 917048
gugaaaccucauggagcuu

SEQ ID NO: 1204519 - RNA, 19 nt, Artificial Sequence
  Description of Artificial Sequence: Synthetic oligonucleotide
  Antisense strand to SEQ ID NO: 1204518
aagcuccaugagguuucac

SEQ ID NO: 1204520 - RNA, 19 nt, Artificial Sequence
  Description of Artificial Sequence: Synthetic oligonucleotide
  Sense strand starting at position 3451 of SEQ ID NO: 917048
ucuagugagagguggcuua

SEQ ID NO: 1204521 - RNA, 19 nt, Artificial Sequence
  Description of Artificial Sequence: Synthetic oligonucleotide
  Antisense strand to SEQ ID NO: 1204520
uaagccaccucucacuaga

SEQ ID NO: 1204522 - RNA, 19 nt, Artificial Sequence
  Description of Artificial Sequence: Synthetic oligonucleotide
  Sense strand starting at position 3538 of SEQ ID NO: 917048
gggucagggcuguagaauu

SEQ ID NO: 1204523 - RNA, 19 nt, Artificial Sequence
  Description of Artificial Sequence: Synthetic oligonucleotide
  Antisense strand to SEQ ID NO: 1204522
aauucuacagcccugaccc

SEQ ID NO: 1204524 - RNA, 19 nt, Artificial Sequence
  Description of Artificial Sequence: Synthetic oligonucleotide
  Sense strand starting at position 3561 of SEQ ID NO: 917048
caauaacgcuuguugaaag

SEQ ID NO: 1204525 - RNA, 19 nt, Artificial Sequence
  Description of Artificial Sequence: Synthetic oligonucleotide
  Antisense strand to SEQ ID NO: 1204524
cuuucaacaagcguuauug

SEQ ID NO: 1204526 - RNA, 19 nt, Artificial Sequence
  Description of Artificial Sequence: Synthetic oligonucleotide
  Sense strand starting at position 3649 of SEQ ID NO: 917048
uuagcuccacgaugacaau

SEQ ID NO: 1204527 - RNA, 19 nt, Artificial Sequence
  Description of Artificial Sequence: Synthetic oligonucleotide
  Antisense strand to SEQ ID NO: 1204526
auugucaucguggagcuaa

SEQ ID NO: 1204528 - RNA, 19 nt, Artificial Sequence
  Description of Artificial Sequence: Synthetic oligonucleotide
  Sense strand starting at position 3660 of SEQ ID NO: 917048
augacaaugacaggucgaa

SEQ ID NO: 1204529 - RNA, 19 nt, Artificial Sequence
  Description of Artificial Sequence: Synthetic oligonucleotide
  Antisense strand to SEQ ID NO: 1204528
uucgaccugucauugucau

SEQ ID NO: 1204530 - RNA, 19 nt, Artificial Sequence
  Description of Artificial Sequence: Synthetic oligonucleotide
  Sense strand starting at position 3672 of SEQ ID NO: 917048
ggucgaauuuguucuguca

SEQ ID NO: 1204531 - RNA, 19 nt, Artificial Sequence
  Description of Artificial Sequence: Synthetic oligonucleotide
  Antisense strand to SEQ ID NO: 1204530
ugacagaacaaauucgacc

SEQ ID NO: 1204532 - RNA, 19 nt, Artificial Sequence
  Description of Artificial Sequence: Synthetic oligonucleotide
  Sense strand starting at position 3675 of SEQ ID NO: 917048
cgaauuuguucugucauac

SEQ ID NO: 1204533 - RNA, 19 nt, Artificial Sequence
  Description of Artificial Sequence: Synthetic oligonucleotide
  Antisense strand to SEQ ID NO: 1204532
guaugacagaacaaauucg

SEQ ID NO: 1204534 - RNA, 19 nt, Artificial Sequence
  Description of Artificial Sequence: Synthetic oligonucleotide
  Sense strand starting at position 3729 of SEQ ID NO: 917048
cucaguaaaccguacuuaa

SEQ ID NO: 1204535 - RNA, 19 nt, Artificial Sequence
  Description of Artificial Sequence: Synthetic oligonucleotide
  Antisense strand to SEQ ID NO: 1204534
uuaaguacgguuuacugag

SEQ ID NO: 1204536 - RNA, 19 nt, Artificial Sequence
  Description of Artificial Sequence: Synthetic oligonucleotide
  Sense strand starting at position 3732 of SEQ ID NO: 917048
aguaaaccguacuuaaaug

SEQ ID NO: 1204537 - RNA, 19 nt, Artificial Sequence
  Description of Artificial Sequence: Synthetic oligonucleotide
  Antisense strand to SEQ ID NO: 1204536
cauuuaaguacgguuuacu

SEQ ID NO: 1204538 - RNA, 19 nt, Artificial Sequence
  Description of Artificial Sequence: Synthetic oligonucleotide
  Sense strand starting at position 3747 of SEQ ID NO: 917048
aaugcaugccuguauuugu

SEQ ID NO: 1204539 - RNA, 19 nt, Artificial Sequence
  Description of Artificial Sequence: Synthetic oligonucleotide
  Antisense strand to SEQ ID NO: 1204538
acaaauacaggcaugcauu

SEQ ID NO: 1204540 - RNA, 19 nt, Artificial Sequence
  Description of Artificial Sequence: Synthetic oligonucleotide
  Sense strand starting at position 3777 of SEQ ID NO: 917048
ggguuucaagaguguuaua

SEQ ID NO: 1204541 - RNA, 19 nt, Artificial Sequence
  Description of Artificial Sequence: Synthetic oligonucleotide
  Antisense strand to SEQ ID NO: 1204540
uauaacacucuugaaaccc

SEQ ID NO: 1204542 - RNA, 19 nt, Artificial Sequence
  Description of Artificial Sequence: Synthetic oligonucleotide
  Sense strand starting at position 3786 of SEQ ID NO: 917048
gaguguuauacggauaaca

SEQ ID NO: 1204543 - RNA, 19 nt, Artificial Sequence
  Description of Artificial Sequence: Synthetic oligonucleotide
  Antisense strand to SEQ ID NO: 1204542
uguuauccguauaacacuc

SEQ ID NO: 1204544 - RNA, 19 nt, Artificial Sequence
  Description of Artificial Sequence: Synthetic oligonucleotide
  Sense strand starting at position 3788 of SEQ ID NO: 917048
guguuauacggauaacauu

SEQ ID NO: 1204545 - RNA, 19 nt, Artificial Sequence
  Description of Artificial Sequence: Synthetic oligonucleotide
  Antisense strand to SEQ ID NO: 1204544
aauguuauccguauaacac

SEQ ID NO: 1204546 - RNA, 19 nt, Artificial Sequence
  Description of Artificial Sequence: Synthetic oligonucleotide
  Sense strand starting at position 3902 of SEQ ID NO: 917048
uaggcaucccagugauaca

SEQ ID NO: 1204547 - RNA, 19 nt, Artificial Sequence
  Description of Artificial Sequence: Synthetic oligonucleotide
  Antisense strand to SEQ ID NO: 1204546
uguaucacugggaugccua

SEQ ID NO: 1204548 - RNA, 19 nt, Artificial Sequence
  Description of Artificial Sequence: Synthetic oligonucleotide
  Sense strand starting at position 44 of SEQ ID NO: 917049
gacagugucuugcucuagu

SEQ ID NO: 1204549 - RNA, 19 nt, Artificial Sequence
  Description of Artificial Sequence: Synthetic oligonucleotide
  Antisense strand to SEQ ID NO: 1204548
acuagagcaagacacuguc

SEQ ID NO: 1204550 - RNA, 19 nt, Artificial Sequence
  Description of Artificial Sequence: Synthetic oligonucleotide
  Sense strand starting at position 182 of SEQ ID NO: 917049
accacaugcccagguaauu

SEQ ID NO: 1204551 - RNA, 19 nt, Artificial Sequence
  Description of Artificial Sequence: Synthetic oligonucleotide
  Antisense strand to SEQ ID NO: 1204550
aauuaccugggcauguggu

SEQ ID NO: 1204552 - RNA, 19 nt, Artificial Sequence
  Description of Artificial Sequence: Synthetic oligonucleotide
  Sense strand starting at position 330 of SEQ ID NO: 917049
gcuggugaaagguauucuu

SEQ ID NO: 1204553 - RNA, 19 nt, Artificial Sequence
  Description of Artificial Sequence: Synthetic oligonucleotide
  Antisense strand to SEQ ID NO: 1204552
aagaauaccuuucaccagc

SEQ ID NO: 1204554 - RNA, 19 nt, Artificial Sequence
  Description of Artificial Sequence: Synthetic oligonucleotide
  Sense strand starting at position 333 of SEQ ID NO: 917049
ggugaaagguauucuugaa

SEQ ID NO: 1204555 - RNA, 19 nt, Artificial Sequence
  Description of Artificial Sequence: Synthetic oligonucleotide
  Antisense strand to SEQ ID NO: 1204554
uucaagaauaccuuucacc

SEQ ID NO: 1204556 - RNA, 19 nt, Artificial Sequence
  Description of Artificial Sequence: Synthetic oligonucleotide
  Sense strand starting at position 337 of SEQ ID NO: 917049
aaagguauucuugaaguuu

SEQ ID NO: 1204557 - RNA, 19 nt, Artificial Sequence
  Description of Artificial Sequence: Synthetic oligonucleotide
  Antisense strand to SEQ ID NO: 1204556
aaacuucaagaauaccuuu

SEQ ID NO: 1204558 - RNA, 19 nt, Artificial Sequence
  Description of Artificial Sequence: Synthetic oligonucleotide
  Sense strand starting at position 405 of SEQ ID NO: 917049
cuggaaagauuauaaagga

SEQ ID NO: 1204559 - RNA, 19 nt, Artificial Sequence
  Description of Artificial Sequence: Synthetic oligonucleotide
  Antisense strand to SEQ ID NO: 1204558
uccuuuauaaucuuuccag

SEQ ID NO: 1204560 - RNA, 19 nt, Artificial Sequence
  Description of Artificial Sequence: Synthetic oligonucleotide
  Sense strand starting at position 418 of SEQ ID NO: 917049
aaaggacugucauggaagu

SEQ ID NO: 1204561 - RNA, 19 nt, Artificial Sequence
  Description of Artificial Sequence: Synthetic oligonucleotide
  Antisense strand to SEQ ID NO: 1204560
acuuccaugacaguccuuu

SEQ ID NO: 1204562 - RNA, 19 nt, Artificial Sequence
  Description of Artificial Sequence: Synthetic oligonucleotide
  Sense strand starting at position 435 of SEQ ID NO: 917049
gugcuaaggugcuuuacca

SEQ ID NO: 1204563 - RNA, 19 nt, Artificial Sequence
  Description of Artificial Sequence: Synthetic oligonucleotide
  Antisense strand to SEQ ID NO: 1204562
ugguaaagcaccuuagcac

SEQ ID NO: 1204564 - RNA, 19 nt, Artificial Sequence
  Description of Artificial Sequence: Synthetic oligonucleotide
  Sense strand starting at position 442 of SEQ ID NO: 917049
ggugcuuuaccagugcuuu

SEQ ID NO: 1204565 - RNA, 19 nt, Artificial Sequence
  Description of Artificial Sequence: Synthetic oligonucleotide
  Antisense strand to SEQ ID NO: 1204564
aaagcacugguaaagcacc

SEQ ID NO: 1204566 - RNA, 19 nt, Artificial Sequence
  Description of Artificial Sequence: Synthetic oligonucleotide
  Sense strand starting at position 443 of SEQ ID NO: 917049
gugcuuuaccagugcuuua

SEQ ID NO: 1204567 - RNA, 19 nt, Artificial Sequence
  Description of Artificial Sequence: Synthetic oligonucleotide
  Antisense strand to SEQ ID NO: 1204566
uaaagcacugguaaagcac

SEQ ID NO: 1204568 - RNA, 19 nt, Artificial Sequence
  Description of Artificial Sequence: Synthetic oligonucleotide
  Sense strand starting at position 479 of SEQ ID NO: 917049
acuaauauuuaaggguaca

SEQ ID NO: 1204569 - RNA, 19 nt, Artificial Sequence
  Description of Artificial Sequence: Synthetic oligonucleotide
  Antisense strand to SEQ ID NO: 1204568
uguacccuuaaauauuagu

SEQ ID NO: 1204570 - RNA, 19 nt, Artificial Sequence
  Description of Artificial Sequence: Synthetic oligonucleotide
  Sense strand starting at position 626 of SEQ ID NO: 917049
ggaacauggcucugaauca

SEQ ID NO: 1204571 - RNA, 19 nt, Artificial Sequence
  Description of Artificial Sequence: Synthetic oligonucleotide
  Antisense strand to SEQ ID NO: 1204570
ugauucagagccauguucc

SEQ ID NO: 1204572 - RNA, 19 nt, Artificial Sequence
  Description of Artificial Sequence: Synthetic oligonucleotide
  Sense strand starting at position 637 of SEQ ID NO: 917049
cugaaucaugccugucugu

SEQ ID NO: 1204573 - RNA, 19 nt, Artificial Sequence
  Description of Artificial Sequence: Synthetic oligonucleotide
  Antisense strand to SEQ ID NO: 1204572
acagacaggcaugauucag

SEQ ID NO: 1204574 - RNA, 19 nt, Artificial Sequence
  Description of Artificial Sequence: Synthetic oligonucleotide
  Sense strand starting at position 731 of SEQ ID NO: 917049
aggacuuguccaugacuuu

SEQ ID NO: 1204575 - RNA, 19 nt, Artificial Sequence
  Description of Artificial Sequence: Synthetic oligonucleotide
  Antisense strand to SEQ ID NO: 1204574
aaagucauggacaaguccu

SEQ ID NO: 1204576 - RNA, 19 nt, Artificial Sequence
  Description of Artificial Sequence: Synthetic oligonucleotide
  Sense strand starting at position 732 of SEQ ID NO: 917049
ggacuuguccaugacuuug

SEQ ID NO: 1204577 - RNA, 19 nt, Artificial Sequence
  Description of Artificial Sequence: Synthetic oligonucleotide
  Antisense strand to SEQ ID NO: 1204576
caaagucauggacaagucc

SEQ ID NO: 1204578 - RNA, 19 nt, Artificial Sequence
  Description of Artificial Sequence: Synthetic oligonucleotide
  Sense strand starting at position 814 of SEQ ID NO: 917049
augacaucacgaggagagu

SEQ ID NO: 1204579 - RNA, 19 nt, Artificial Sequence
  Description of Artificial Sequence: Synthetic oligonucleotide
  Antisense strand to SEQ ID NO: 1204578
acucuccucgugaugucau

SEQ ID NO: 1204580 - RNA, 19 nt, Artificial Sequence
  Description of Artificial Sequence: Synthetic oligonucleotide
  Sense strand starting at position 876 of SEQ ID NO: 917049
cugcuaugaggucagcuau

SEQ ID NO: 1204581 - RNA, 19 nt, Artificial Sequence
  Description of Artificial Sequence: Synthetic oligonucleotide
  Antisense strand to SEQ ID NO: 1204580
auagcugaccucauagcag

SEQ ID NO: 1204582 - RNA, 19 nt, Artificial Sequence
  Description of Artificial Sequence: Synthetic oligonucleotide
  Sense strand starting at position 896 of SEQ ID NO: 917049
gggccacacuuccuaucua

SEQ ID NO: 1204583 - RNA, 19 nt, Artificial Sequence
  Description of Artificial Sequence: Synthetic oligonucleotide
  Antisense strand to SEQ ID NO: 1204582
uagauaggaaguguggccc

SEQ ID NO: 1204584 - RNA, 19 nt, Artificial Sequence
  Description of Artificial Sequence: Synthetic oligonucleotide
  Sense strand starting at position 1270 of SEQ ID NO: 917049
gacagaaguggcgauccau

SEQ ID NO: 1204585 - RNA, 19 nt, Artificial Sequence
  Description of Artificial Sequence: Synthetic oligonucleotide
  Antisense strand to SEQ ID NO: 1204584
auggaucgccacuucuguc

SEQ ID NO: 1204586 - RNA, 19 nt, Artificial Sequence
  Description of Artificial Sequence: Synthetic oligonucleotide
  Sense strand starting at position 1276 of SEQ ID NO: 917049
aguggcgauccauauuaga

SEQ ID NO: 1204587 - RNA, 19 nt, Artificial Sequence
  Description of Artificial Sequence: Synthetic oligonucleotide
  Antisense strand to SEQ ID NO: 1204586
ucuaauauggaucgccacu

SEQ ID NO: 1204588 - RNA, 19 nt, Artificial Sequence
  Description of Artificial Sequence: Synthetic oligonucleotide
  Sense strand starting at position 1279 of SEQ ID NO: 917049
ggcgauccauauuagacua

SEQ ID NO: 1204589 - RNA, 19 nt, Artificial Sequence
  Description of Artificial Sequence: Synthetic oligonucleotide
  Antisense strand to SEQ ID NO: 1204588
uagucuaauauggaucgcc

SEQ ID NO: 1204590 - RNA, 19 nt, Artificial Sequence
  Description of Artificial Sequence: Synthetic oligonucleotide
  Sense strand starting at position 1281 of SEQ ID NO: 917049
cgauccauauuagacuaga

SEQ ID NO: 1204591 - RNA, 19 nt, Artificial Sequence
  Description of Artificial Sequence: Synthetic oligonucleotide
  Antisense strand to SEQ ID NO: 1204590
ucuagucuaauauggaucg

SEQ ID NO: 1204592 - RNA, 19 nt, Artificial Sequence
  Description of Artificial Sequence: Synthetic oligonucleotide
  Sense strand starting at position 1408 of SEQ ID NO: 917049
uccagaaacugauaugauu

SEQ ID NO: 1204593 - RNA, 19 nt, Artificial Sequence
  Description of Artificial Sequence: Synthetic oligonucleotide
  Antisense strand to SEQ ID NO: 1204592
aaucauaucaguuucugga

SEQ ID NO: 1204594 - RNA, 19 nt, Artificial Sequence
  Description of Artificial Sequence: Synthetic oligonucleotide
  Sense strand starting at position 1547 of SEQ ID NO: 917049
ccggguguccugggaacaa

SEQ ID NO: 1204595 - RNA, 19 nt, Artificial Sequence
  Description of Artificial Sequence: Synthetic oligonucleotide
  Antisense strand to SEQ ID NO: 1204594
uuguucccaggacacccgg

SEQ ID NO: 1204596 - RNA, 19 nt, Artificial Sequence
  Description of Artificial Sequence: Synthetic oligonucleotide
  Sense strand starting at position 2281 of SEQ ID NO: 917049
gggucaggccucugcuaua

SEQ ID NO: 1204597 - RNA, 19 nt, Artificial Sequence
  Description of Artificial Sequence: Synthetic oligonucleotide
  Antisense strand to SEQ ID NO: 1204596
uauagcagaggccugaccc

SEQ ID NO: 1204598 - RNA, 19 nt, Artificial Sequence
  Description of Artificial Sequence: Synthetic oligonucleotide
  Sense strand starting at position 2305 of SEQ ID NO: 917049
uuauuauuguggccagagu

SEQ ID NO: 1204599 - RNA, 19 nt, Artificial Sequence
  Description of Artificial Sequence: Synthetic oligonucleotide
  Antisense strand to SEQ ID NO: 1204598
acucuggccacaauaauaa

SEQ ID NO: 1204600 - RNA, 19 nt, Artificial Sequence
  Description of Artificial Sequence: Synthetic oligonucleotide
  Sense strand starting at position 2324 of SEQ ID NO: 917049
ggaaauaggucgcagagga

SEQ ID NO: 1204601 - RNA, 19 nt, Artificial Sequence
  Description of Artificial Sequence: Synthetic oligonucleotide
  Antisense strand to SEQ ID NO: 1204600
uccucugcgaccuauuucc

SEQ ID NO: 1204602 - RNA, 19 nt, Artificial Sequence
  Description of Artificial Sequence: Synthetic oligonucleotide
  Sense strand starting at position 2362 of SEQ ID NO: 917049
aggcccaucucugacgaua

SEQ ID NO: 1204603 - RNA, 19 nt, Artificial Sequence
  Description of Artificial Sequence: Synthetic oligonucleotide
  Antisense strand to SEQ ID NO: 1204602
uaucgucagagaugggccu

SEQ ID NO: 1204604 - RNA, 19 nt, Artificial Sequence
  Description of Artificial Sequence: Synthetic oligonucleotide
  Sense strand starting at position 2365 of SEQ ID NO: 917049
cccaucucugacgauauca

SEQ ID NO: 1204605 - RNA, 19 nt, Artificial Sequence
  Description of Artificial Sequence: Synthetic oligonucleotide
  Antisense strand to SEQ ID NO: 1204604
ugauaucgucagagauggg

SEQ ID NO: 1204606 - RNA, 19 nt, Artificial Sequence
  Description of Artificial Sequence: Synthetic oligonucleotide
  Sense strand starting at position 2367 of SEQ ID NO: 917049
caucucugacgauaucagu

SEQ ID NO: 1204607 - RNA, 19 nt, Artificial Sequence
  Description of Artificial Sequence: Synthetic oligonucleotide
  Antisense strand to SEQ ID NO: 1204606
acugauaucgucagagaug

SEQ ID NO: 1204608 - RNA, 19 nt, Artificial Sequence
  Description of Artificial Sequence: Synthetic oligonucleotide
  Sense strand starting at position 2370 of SEQ ID NO: 917049
cucugacgauaucaguaga

SEQ ID NO: 1204609 - RNA, 19 nt, Artificial Sequence
  Description of Artificial Sequence: Synthetic oligonucleotide
  Antisense strand to SEQ ID NO: 1204608
ucuacugauaucgucagag

SEQ ID NO: 1204610 - RNA, 19 nt, Artificial Sequence
  Description of Artificial Sequence: Synthetic oligonucleotide
  Sense strand starting at position 2385 of SEQ ID NO: 917049
uagagaaaucaacgucuuu

SEQ ID NO: 1204611 - RNA, 19 nt, Artificial Sequence
  Description of Artificial Sequence: Synthetic oligonucleotide
  Antisense strand to SEQ ID NO: 1204610
aaagacguugauuucucua

SEQ ID NO: 1204612 - RNA, 19 nt, Artificial Sequence
  Description of Artificial Sequence: Synthetic oligonucleotide
  Sense strand starting at position 2397 of SEQ ID NO: 917049
cgucuuuaauagccaacaa

SEQ ID NO: 1204613 - RNA, 19 nt, Artificial Sequence
  Description of Artificial Sequence: Synthetic oligonucleotide
  Antisense strand to SEQ ID NO: 1204612
uuguuggcuauuaaagacg

SEQ ID NO: 1204614 - RNA, 19 nt, Artificial Sequence
  Description of Artificial Sequence: Synthetic oligonucleotide
  Sense strand starting at position 2443 of SEQ ID NO: 917049
uagagcuaaguauguuaca

SEQ ID NO: 1204615 - RNA, 19 nt, Artificial Sequence
  Description of Artificial Sequence: Synthetic oligonucleotide
  Antisense strand to SEQ ID NO: 1204614
uguaacauacuuagcucua

SEQ ID NO: 1204616 - RNA, 19 nt, Artificial Sequence
  Description of Artificial Sequence: Synthetic oligonucleotide
  Sense strand starting at position 2444 of SEQ ID NO: 917049
agagcuaaguauguuacau

SEQ ID NO: 1204617 - RNA, 19 nt, Artificial Sequence
  Description of Artificial Sequence: Synthetic oligonucleotide
  Antisense strand to SEQ ID NO: 1204616
auguaacauacuuagcucu

SEQ ID NO: 1204618 - RNA, 19 nt, Artificial Sequence
  Description of Artificial Sequence: Synthetic oligonucleotide
  Sense strand starting at position 2561 of SEQ ID NO: 917049
gcagcuuguaaguggugaa

SEQ ID NO: 1204619 - RNA, 19 nt, Artificial Sequence
  Description of Artificial Sequence: Synthetic oligonucleotide
  Antisense strand to SEQ ID NO: 1204618
uucaccacuuacaagcugc

SEQ ID NO: 1204620 - RNA, 19 nt, Artificial Sequence
  Description of Artificial Sequence: Synthetic oligonucleotide
  Sense strand starting at position 2562 of SEQ ID NO: 917049
cagcuuguaaguggugaaa

SEQ ID NO: 1204621 - RNA, 19 nt, Artificial Sequence
  Description of Artificial Sequence: Synthetic oligonucleotide
  Antisense strand to SEQ ID NO: 1204620
uuucaccacuuacaagcug

SEQ ID NO: 1204622 - RNA, 19 nt, Artificial Sequence
  Description of Artificial Sequence: Synthetic oligonucleotide
  Sense strand starting at position 2598 of SEQ ID NO: 917049
gucugucugucuccagaau

SEQ ID NO: 1204623 - RNA, 19 nt, Artificial Sequence
  Description of Artificial Sequence: Synthetic oligonucleotide
  Antisense strand to SEQ ID NO: 1204622
auucuggagacagacagac

SEQ ID NO: 1204624 - RNA, 19 nt, Artificial Sequence
  Description of Artificial Sequence: Synthetic oligonucleotide
  Sense strand starting at position 3068 of SEQ ID NO: 917049
cacggauugcuugagguca

SEQ ID NO: 1204625 - RNA, 19 nt, Artificial Sequence
  Description of Artificial Sequence: Synthetic oligonucleotide
  Antisense strand to SEQ ID NO: 1204624
ugaccucaagcaauccgug

SEQ ID NO: 1204626 - RNA, 19 nt, Artificial Sequence
  Description of Artificial Sequence: Synthetic oligonucleotide
  Sense strand starting at position 3526 of SEQ ID NO: 917049
auaugucauuucuauguga

SEQ ID NO: 1204627 - RNA, 19 nt, Artificial Sequence
  Description of Artificial Sequence: Synthetic oligonucleotide
  Antisense strand to SEQ ID NO: 1204626
ucacauagaaaugacauau

SEQ ID NO: 1204628 - RNA, 19 nt, Artificial Sequence
  Description of Artificial Sequence: Synthetic oligonucleotide
  Sense strand starting at position 71 of SEQ ID NO: 917050
gauucaaguguguagagga

SEQ ID NO: 1204629 - RNA, 19 nt, Artificial Sequence
  Description of Artificial Sequence: Synthetic oligonucleotide
  Antisense strand to SEQ ID NO: 1204628
uccucuacacacuugaauc

SEQ ID NO: 1204630 - RNA, 19 nt, Artificial Sequence
  Description of Artificial Sequence: Synthetic oligonucleotide
  Sense strand starting at position 78 of SEQ ID NO: 917050
guguguagaggagaaguuu

SEQ ID NO: 1204631 - RNA, 19 nt, Artificial Sequence
  Description of Artificial Sequence: Synthetic oligonucleotide
  Antisense strand to SEQ ID NO: 1204630
aaacuucuccucuacacac

SEQ ID NO: 1204632 - RNA, 19 nt, Artificial Sequence
  Description of Artificial Sequence: Synthetic oligonucleotide
  Sense strand starting at position 86 of SEQ ID NO: 917050
aggagaaguuugguagagu

SEQ ID NO: 1204633 - RNA, 19 nt, Artificial Sequence
  Description of Artificial Sequence: Synthetic oligonucleotide
  Antisense strand to SEQ ID NO: 1204632
acucuaccaaacuucuccu

SEQ ID NO: 1204634 - RNA, 19 nt, Artificial Sequence
  Description of Artificial Sequence: Synthetic oligonucleotide
  Sense strand starting at position 380 of SEQ ID NO: 917050
aacuguaugcacuggacua

SEQ ID NO: 1204635 - RNA, 19 nt, Artificial Sequence
  Description of Artificial Sequence: Synthetic oligonucleotide
  Antisense strand to SEQ ID NO: 1204634
uaguccagugcauacaguu

SEQ ID NO: 1204636 - RNA, 19 nt, Artificial Sequence
  Description of Artificial Sequence: Synthetic oligonucleotide
  Sense strand starting at position 433 of SEQ ID NO: 917050
uuggauagcccacagugau

SEQ ID NO: 1204637 - RNA, 19 nt, Artificial Sequence
  Description of Artificial Sequence: Synthetic oligonucleotide
  Antisense strand to SEQ ID NO: 1204636
aucacugugggcuauccaa

SEQ ID NO: 1204638 - RNA, 19 nt, Artificial Sequence
  Description of Artificial Sequence: Synthetic oligonucleotide
  Sense strand starting at position 436 of SEQ ID NO: 917050
gauagcccacagugauaaa

SEQ ID NO: 1204639 - RNA, 19 nt, Artificial Sequence
  Description of Artificial Sequence: Synthetic oligonucleotide
  Antisense strand to SEQ ID NO: 1204638
uuuaucacugugggcuauc

SEQ ID NO: 1204640 - RNA, 19 nt, Artificial Sequence
  Description of Artificial Sequence: Synthetic oligonucleotide
  Sense strand starting at position 652 of SEQ ID NO: 917050
auugaaucucauugagauu

SEQ ID NO: 1204641 - RNA, 19 nt, Artificial Sequence
  Description of Artificial Sequence: Synthetic oligonucleotide
  Antisense strand to SEQ ID NO: 1204640
aaucucaaugagauucaau

SEQ ID NO: 1204642 - RNA, 19 nt, Artificial Sequence
  Description of Artificial Sequence: Synthetic oligonucleotide
  Sense strand starting at position 683 of SEQ ID NO: 917050
cuaagcaugugcuuaacuu

SEQ ID NO: 1204643 - RNA, 19 nt, Artificial Sequence
  Description of Artificial Sequence: Synthetic oligonucleotide
  Antisense strand to SEQ ID NO: 1204642
aaguuaagcacaugcuuag

SEQ ID NO: 1204644 - RNA, 19 nt, Artificial Sequence
  Description of Artificial Sequence: Synthetic oligonucleotide
  Sense strand starting at position 878 of SEQ ID NO: 917050
aggucuuauuuccaugcaa

SEQ ID NO: 1204645 - RNA, 19 nt, Artificial Sequence
  Description of Artificial Sequence: Synthetic oligonucleotide
  Antisense strand to SEQ ID NO: 1204644
uugcauggaaauaagaccu

SEQ ID NO: 1204646 - RNA, 19 nt, Artificial Sequence
  Description of Artificial Sequence: Synthetic oligonucleotide
  Sense strand starting at position 908 of SEQ ID NO: 917050
cccguuacuugcccagaua

SEQ ID NO: 1204647 - RNA, 19 nt, Artificial Sequence
  Description of Artificial Sequence: Synthetic oligonucleotide
  Antisense strand to SEQ ID NO: 1204646
uaucugggcaaguaacggg

SEQ ID NO: 1204648 - RNA, 19 nt, Artificial Sequence
  Description of Artificial Sequence: Synthetic oligonucleotide
  Sense strand starting at position 911 of SEQ ID NO: 917050
guuacuugcccagauacaa

SEQ ID NO: 1204649 - RNA, 19 nt, Artificial Sequence
  Description of Artificial Sequence: Synthetic oligonucleotide
  Antisense strand to SEQ ID NO: 1204648
uuguaucugggcaaguaac

SEQ ID NO: 1204650 - RNA, 19 nt, Artificial Sequence
  Description of Artificial Sequence: Synthetic oligonucleotide
  Sense strand starting at position 967 of SEQ ID NO: 917050
gaggacuggucugaggaga

SEQ ID NO: 1204651 - RNA, 19 nt, Artificial Sequence
  Description of Artificial Sequence: Synthetic oligonucleotide
  Antisense strand to SEQ ID NO: 1204650
ucuccucagaccaguccuc

SEQ ID NO: 1204652 - RNA, 19 nt, Artificial Sequence
  Description of Artificial Sequence: Synthetic oligonucleotide
  Sense strand starting at position 1037 of SEQ ID NO: 917050
gcgagcuaccaguagaauu

SEQ ID NO: 1204653 - RNA, 19 nt, Artificial Sequence
  Description of Artificial Sequence: Synthetic oligonucleotide
  Antisense strand to SEQ ID NO: 1204652
aauucuacugguagcucgc

SEQ ID NO: 1204654 - RNA, 19 nt, Artificial Sequence
  Description of Artificial Sequence: Synthetic oligonucleotide
  Sense strand starting at position 1078 of SEQ ID NO: 917050
uuggaacaguuacuauaua

SEQ ID NO: 1204655 - RNA, 19 nt, Artificial Sequence
  Description of Artificial Sequence: Synthetic oligonucleotide
  Antisense strand to SEQ ID NO: 1204654
uauauaguaacuguuccaa

SEQ ID NO: 1204656 - RNA, 19 nt, Artificial Sequence
  Description of Artificial Sequence: Synthetic oligonucleotide
  Sense strand starting at position 1141 of SEQ ID NO: 917050
acucuuaaauuugaacgua

SEQ ID NO: 1204657 - RNA, 19 nt, Artificial Sequence
  Description of Artificial Sequence: Synthetic oligonucleotide
  Antisense strand to SEQ ID NO: 1204656
uacguucaaauuuaagagu

SEQ ID NO: 1204658 - RNA, 19 nt, Artificial Sequence
  Description of Artificial Sequence: Synthetic oligonucleotide
  Sense strand starting at position 1223 of SEQ ID NO: 917050
uggcauucuuucccaucga

SEQ ID NO: 1204659 - RNA, 19 nt, Artificial Sequence
  Description of Artificial Sequence: Synthetic oligonucleotide
  Antisense strand to SEQ ID NO: 1204658
ucgaugggaaagaaugcca

SEQ ID NO: 1204660 - RNA, 19 nt, Artificial Sequence
  Description of Artificial Sequence: Synthetic oligonucleotide
  Sense strand starting at position 1311 of SEQ ID NO: 917050
ggaccgaucgauggagaga

SEQ ID NO: 1204661 - RNA, 19 nt, Artificial Sequence
  Description of Artificial Sequence: Synthetic oligonucleotide
  Antisense strand to SEQ ID NO: 1204660
ucucuccaucgaucggucc

SEQ ID NO: 1204662 - RNA, 19 nt, Artificial Sequence
  Description of Artificial Sequence: Synthetic oligonucleotide
  Sense strand starting at position 2258 of SEQ ID NO: 917050
cugugagccgcagaaucau

SEQ ID NO: 1204663 - RNA, 19 nt, Artificial Sequence
  Description of Artificial Sequence: Synthetic oligonucleotide
  Antisense strand to SEQ ID NO: 1204662
augauucugcggcucacag

SEQ ID NO: 1204664 - RNA, 19 nt, Artificial Sequence
  Description of Artificial Sequence: Synthetic oligonucleotide
  Sense strand starting at position 2300 of SEQ ID NO: 917050
uggaauuucugcgauuuac

SEQ ID NO: 1204665 - RNA, 19 nt, Artificial Sequence
  Description of Artificial Sequence: Synthetic oligonucleotide
  Antisense strand to SEQ ID NO: 1204664
guaaaucgcagaaauucca

SEQ ID NO: 1204666 - RNA, 19 nt, Artificial Sequence
  Description of Artificial Sequence: Synthetic oligonucleotide
  Sense strand starting at position 2311 of SEQ ID NO: 917050
cgauuuacacaacgucgaa

SEQ ID NO: 1204667 - RNA, 19 nt, Artificial Sequence
  Description of Artificial Sequence: Synthetic oligonucleotide
  Antisense strand to SEQ ID NO: 1204666
uucgacguuguguaaaucg

SEQ ID NO: 1204668 - RNA, 19 nt, Artificial Sequence
  Description of Artificial Sequence: Synthetic oligonucleotide
  Sense strand starting at position 2325 of SEQ ID NO: 917050
ucgaauuguuuggcagaaa

SEQ ID NO: 1204669 - RNA, 19 nt, Artificial Sequence
  Description of Artificial Sequence: Synthetic oligonucleotide
  Antisense strand to SEQ ID NO: 1204668
uuucugccaaacaauucga

SEQ ID NO: 1204670 - RNA, 19 nt, Artificial Sequence
  Description of Artificial Sequence: Synthetic oligonucleotide
  Sense strand starting at position 2349 of SEQ ID NO: 917050
ggcaaacuccguuaucuuu

SEQ ID NO: 1204671 - RNA, 19 nt, Artificial Sequence
  Description of Artificial Sequence: Synthetic oligonucleotide
  Antisense strand to SEQ ID NO: 1204670
aaagauaacggaguuugcc

SEQ ID NO: 1204672 - RNA, 19 nt, Artificial Sequence
  Description of Artificial Sequence: Synthetic oligonucleotide
  Sense strand starting at position 2452 of SEQ ID NO: 917050
cgaugacggcugugaauug

SEQ ID NO: 1204673 - RNA, 19 nt, Artificial Sequence
  Description of Artificial Sequence: Synthetic oligonucleotide
  Antisense strand to SEQ ID NO: 1204672
caauucacagccgucaucg

SEQ ID NO: 1204674 - RNA, 19 nt, Artificial Sequence
  Description of Artificial Sequence: Synthetic oligonucleotide
  Sense strand starting at position 2680 of SEQ ID NO: 917050
aacucugagccagauuguu

SEQ ID NO: 1204675 - RNA, 19 nt, Artificial Sequence
  Description of Artificial Sequence: Synthetic oligonucleotide
  Antisense strand to SEQ ID NO: 1204674
aacaaucuggcucagaguu

SEQ ID NO: 1204676 - RNA, 19 nt, Artificial Sequence
  Description of Artificial Sequence: Synthetic oligonucleotide
  Sense strand starting at position 2852 of SEQ ID NO: 917050
uauguaagacaagguauaa

SEQ ID NO: 1204677 - RNA, 19 nt, Artificial Sequence
  Description of Artificial Sequence: Synthetic oligonucleotide
  Antisense strand to SEQ ID NO: 1204676
uuauaccuugucuuacaua

SEQ ID NO: 1204678 - RNA, 19 nt, Artificial Sequence
  Description of Artificial Sequence: Synthetic oligonucleotide
  Sense strand starting at position 2920 of SEQ ID NO: 917050
agugguaugaccugaauaa

SEQ ID NO: 1204679 - RNA, 19 nt, Artificial Sequence
  Description of Artificial Sequence: Synthetic oligonucleotide
  Antisense strand to SEQ ID NO: 1204678
uuauucaggucauaccacu

SEQ ID NO: 1204680 - RNA, 19 nt, Artificial Sequence
  Description of Artificial Sequence: Synthetic oligonucleotide
  Sense strand starting at position 3024 of SEQ ID NO: 917050
ggaaauggcuaauuaaggu

SEQ ID NO: 1204681 - RNA, 19 nt, Artificial Sequence
  Description of Artificial Sequence: Synthetic oligonucleotide
  Antisense strand to SEQ ID NO: 1204680
accuuaauuagccauuucc

SEQ ID NO: 1204682 - RNA, 19 nt, Artificial Sequence
  Description of Artificial Sequence: Synthetic oligonucleotide
  Sense strand starting at position 3032 of SEQ ID NO: 917050
cuaauuaaggucugacaua

SEQ ID NO: 1204683 - RNA, 19 nt, Artificial Sequence
  Description of Artificial Sequence: Synthetic oligonucleotide
  Antisense strand to SEQ ID NO: 1204682
uaugucagaccuuaauuag

SEQ ID NO: 1204684 - RNA, 19 nt, Artificial Sequence
  Description of Artificial Sequence: Synthetic oligonucleotide
  Sense strand starting at position 3376 of SEQ ID NO: 917050
ggaaguucuuauguuaaca

SEQ ID NO: 1204685 - RNA, 19 nt, Artificial Sequence
  Description of Artificial Sequence: Synthetic oligonucleotide
  Antisense strand to SEQ ID NO: 1204684
uguuaacauaagaacuucc

SEQ ID NO: 1204686 - RNA, 19 nt, Artificial Sequence
  Description of Artificial Sequence: Synthetic oligonucleotide
  Sense strand starting at position 3456 of SEQ ID NO: 917050
guacauuaagguuacaacu

SEQ ID NO: 1204687 - RNA, 19 nt, Artificial Sequence
  Description of Artificial Sequence: Synthetic oligonucleotide
  Antisense strand to SEQ ID NO: 1204686
aguuguaaccuuaauguac

SEQ ID NO: 1204688 - RNA, 19 nt, Artificial Sequence
  Description of Artificial Sequence: Synthetic oligonucleotide
  Sense strand starting at position 3561 of SEQ ID NO: 917050
agugcauaauaauucugau

SEQ ID NO: 1204689 - RNA, 19 nt, Artificial Sequence
  Description of Artificial Sequence: Synthetic oligonucleotide
  Antisense strand to SEQ ID NO: 1204688
aucagaauuauuaugcacu

SEQ ID NO: 1204690 - RNA, 19 nt, Artificial Sequence
  Description of Artificial Sequence: Synthetic oligonucleotide
  Sense strand starting at position 3617 of SEQ ID NO: 917050
aucuaaccucuauguugua

SEQ ID NO: 1204691 - RNA, 19 nt, Artificial Sequence
  Description of Artificial Sequence: Synthetic oligonucleotide
  Antisense strand to SEQ ID NO: 1204690
uacaacauagagguuagau

SEQ ID NO: 1204692 - RNA, 19 nt, Artificial Sequence
  Description of Artificial Sequence: Synthetic oligonucleotide
  Sense strand starting at position 3719 of SEQ ID NO: 917050
guauuucuggcaugcaaua

SEQ ID NO: 1204693 - RNA, 19 nt, Artificial Sequence
  Description of Artificial Sequence: Synthetic oligonucleotide
  Antisense strand to SEQ ID NO: 1204692
uauugcaugccagaaauac

SEQ ID NO: 1204694 - RNA, 19 nt, Artificial Sequence
  Description of Artificial Sequence: Synthetic oligonucleotide
  Sense strand starting at position 3745 of SEQ ID NO: 917050
uccuguaauuccuugaaag

SEQ ID NO: 1204695 - RNA, 19 nt, Artificial Sequence
  Description of Artificial Sequence: Synthetic oligonucleotide
  Antisense strand to SEQ ID NO: 1204694
cuuucaaggaauuacagga

SEQ ID NO: 1204696 - RNA, 19 nt, Artificial Sequence
  Description of Artificial Sequence: Synthetic oligonucleotide
  Sense strand starting at position 3746 of SEQ ID NO: 917050
ccuguaauuccuugaaagc

SEQ ID NO: 1204697 - RNA, 19 nt, Artificial Sequence
  Description of Artificial Sequence: Synthetic oligonucleotide
  Antisense strand to SEQ ID NO: 1204696
gcuuucaaggaauuacagg

SEQ ID NO: 1204698 - RNA, 19 nt, Artificial Sequence
  Description of Artificial Sequence: Synthetic oligonucleotide
  Sense strand starting at position 3747 of SEQ ID NO: 917050
cuguaauuccuugaaagca

SEQ ID NO: 1204699 - RNA, 19 nt, Artificial Sequence
  Description of Artificial Sequence: Synthetic oligonucleotide
  Antisense strand to SEQ ID NO: 1204698
ugcuuucaaggaauuacag

SEQ ID NO: 1204700 - RNA, 19 nt, Artificial Sequence
  Description of Artificial Sequence: Synthetic oligonucleotide
  Sense strand starting at position 3826 of SEQ ID NO: 917050
ucuggaaggucguuuggga

SEQ ID NO: 1204701 - RNA, 19 nt, Artificial Sequence
  Description of Artificial Sequence: Synthetic oligonucleotide
  Antisense strand to SEQ ID NO: 1204700
ucccaaacgaccuuccaga

SEQ ID NO: 1204702 - RNA, 19 nt, Artificial Sequence
  Description of Artificial Sequence: Synthetic oligonucleotide
  Sense strand starting at position 3833 of SEQ ID NO: 917050
ggucguuugggagauagga

SEQ ID NO: 1204703 - RNA, 19 nt, Artificial Sequence
  Description of Artificial Sequence: Synthetic oligonucleotide
  Antisense strand to SEQ ID NO: 1204702
uccuaucucccaaacgacc

SEQ ID NO: 1204704 - RNA, 19 nt, Artificial Sequence
  Description of Artificial Sequence: Synthetic oligonucleotide
  Sense strand starting at position 3849 of SEQ ID NO: 917050
ggaagagucuuaguugccu

SEQ ID NO: 1204705 - RNA, 19 nt, Artificial Sequence
  Description of Artificial Sequence: Synthetic oligonucleotide
  Antisense strand to SEQ ID NO: 1204704
aggcaacuaagacucuucc

SEQ ID NO: 1204706 - RNA, 19 nt, Artificial Sequence
  Description of Artificial Sequence: Synthetic oligonucleotide
  Sense strand starting at position 3864 of SEQ ID NO: 917050
gccucccucugaucuagua

SEQ ID NO: 1204707 - RNA, 19 nt, Artificial Sequence
  Description of Artificial Sequence: Synthetic oligonucleotide
  Antisense strand to SEQ ID NO: 1204706
uacuagaucagagggaggc

SEQ ID NO: 1204708 - RNA, 19 nt, Artificial Sequence
  Description of Artificial Sequence: Synthetic oligonucleotide
  Sense strand starting at position 2 of SEQ ID NO: 917051
gucauuccagcacaucuau

SEQ ID NO: 1204709 - RNA, 19 nt, Artificial Sequence
  Description of Artificial Sequence: Synthetic oligonucleotide
  Antisense strand to SEQ ID NO: 1204708
auagaugugcuggaaugac

SEQ ID NO: 1204710 - RNA, 19 nt, Artificial Sequence
  Description of Artificial Sequence: Synthetic oligonucleotide
  Sense strand starting at position 11 of SEQ ID NO: 917051
gcacaucuaugaucugauc

SEQ ID NO: 1204711 - RNA, 19 nt, Artificial Sequence
  Description of Artificial Sequence: Synthetic oligonucleotide
  Antisense strand to SEQ ID NO: 1204710
gaucagaucauagaugugc

SEQ ID NO: 1204712 - RNA, 19 nt, Artificial Sequence
  Description of Artificial Sequence: Synthetic oligonucleotide
  Sense strand starting at position 32 of SEQ ID NO: 917051
gcaaguauaucguuagacu

SEQ ID NO: 1204713 - RNA, 19 nt, Artificial Sequence
  Description of Artificial Sequence: Synthetic oligonucleotide
  Antisense strand to SEQ ID NO: 1204712
agucuaacgauauacuugc

SEQ ID NO: 1204714 - RNA, 19 nt, Artificial Sequence
  Description of Artificial Sequence: Synthetic oligonucleotide
  Sense strand starting at position 33 of SEQ ID NO: 917051
caaguauaucguuagacua

SEQ ID NO: 1204715 - RNA, 19 nt, Artificial Sequence
  Description of Artificial Sequence: Synthetic oligonucleotide
  Antisense strand to SEQ ID NO: 1204714
uagucuaacgauauacuug

SEQ ID NO: 1204716 - RNA, 19 nt, Artificial Sequence
  Description of Artificial Sequence: Synthetic oligonucleotide
  Sense strand starting at position 130 of SEQ ID NO: 917051
aauugcugugaauguuaca

SEQ ID NO: 1204717 - RNA, 19 nt, Artificial Sequence
  Description of Artificial Sequence: Synthetic oligonucleotide
  Antisense strand to SEQ ID NO: 1204716
uguaacauucacagcaauu

SEQ ID NO: 1204718 - RNA, 19 nt, Artificial Sequence
  Description of Artificial Sequence: Synthetic oligonucleotide
  Sense strand starting at position 176 of SEQ ID NO: 917051
agccauuauuuguagaauc

SEQ ID NO: 1204719 - RNA, 19 nt, Artificial Sequence
  Description of Artificial Sequence: Synthetic oligonucleotide
  Antisense strand to SEQ ID NO: 1204718
gauucuacaaauaauggcu

SEQ ID NO: 1204720 - RNA, 19 nt, Artificial Sequence
  Description of Artificial Sequence: Synthetic oligonucleotide
  Sense strand starting at position 184 of SEQ ID NO: 917051
uuuguagaauccuccugua

SEQ ID NO: 1204721 - RNA, 19 nt, Artificial Sequence
  Description of Artificial Sequence: Synthetic oligonucleotide
  Antisense strand to SEQ ID NO: 1204720
uacaggaggauucuacaaa

SEQ ID NO: 1204722 - RNA, 19 nt, Artificial Sequence
  Description of Artificial Sequence: Synthetic oligonucleotide
  Sense strand starting at position 271 of SEQ ID NO: 917051
gaauuauucgggcacacga

SEQ ID NO: 1204723 - RNA, 19 nt, Artificial Sequence
  Description of Artificial Sequence: Synthetic oligonucleotide
  Antisense strand to SEQ ID NO: 1204722
ucgugugcccgaauaauuc

SEQ ID NO: 1204724 - RNA, 19 nt, Artificial Sequence
  Description of Artificial Sequence: Synthetic oligonucleotide
  Sense strand starting at position 287 of SEQ ID NO: 917051
cgauuuauuuccuaucuug

SEQ ID NO: 1204725 - RNA, 19 nt, Artificial Sequence
  Description of Artificial Sequence: Synthetic oligonucleotide
  Antisense strand to SEQ ID NO: 1204724
caagauaggaaauaaaucg

SEQ ID NO: 1204726 - RNA, 19 nt, Artificial Sequence
  Description of Artificial Sequence: Synthetic oligonucleotide
  Sense strand starting at position 337 of SEQ ID NO: 917051
cgcuaaucucccuggacca

SEQ ID NO: 1204727 - RNA, 19 nt, Artificial Sequence
  Description of Artificial Sequence: Synthetic oligonucleotide
  Antisense strand to SEQ ID NO: 1204726
ugguccagggagauuagcg

SEQ ID NO: 1204728 - RNA, 19 nt, Artificial Sequence
  Description of Artificial Sequence: Synthetic oligonucleotide
  Sense strand starting at position 384 of SEQ ID NO: 917051
guuuguucugccuaacacu

SEQ ID NO: 1204729 - RNA, 19 nt, Artificial Sequence
  Description of Artificial Sequence: Synthetic oligonucleotide
  Antisense strand to SEQ ID NO: 1204728
aguguuaggcagaacaaac

SEQ ID NO: 1204730 - RNA, 19 nt, Artificial Sequence
  Description of Artificial Sequence: Synthetic oligonucleotide
  Sense strand starting at position 543 of SEQ ID NO: 917051
caguuagucggguacuaga

SEQ ID NO: 1204731 - RNA, 19 nt, Artificial Sequence
  Description of Artificial Sequence: Synthetic oligonucleotide
  Antisense strand to SEQ ID NO: 1204730
ucuaguacccgacuaacug

SEQ ID NO: 1204732 - RNA, 19 nt, Artificial Sequence
  Description of Artificial Sequence: Synthetic oligonucleotide
  Sense strand starting at position 643 of SEQ ID NO: 917051
gauucaaguguguagagga

SEQ ID NO: 1204733 - RNA, 19 nt, Artificial Sequence
  Description of Artificial Sequence: Synthetic oligonucleotide
  Antisense strand to SEQ ID NO: 1204732
uccucuacacacuugaauc

SEQ ID NO: 1204734 - RNA, 19 nt, Artificial Sequence
  Description of Artificial Sequence: Synthetic oligonucleotide
  Sense strand starting at position 650 of SEQ ID NO: 917051
guguguagaggagaaguuu

SEQ ID NO: 1204735 - RNA, 19 nt, Artificial Sequence
  Description of Artificial Sequence: Synthetic oligonucleotide
  Antisense strand to SEQ ID NO: 1204734
aaacuucuccucuacacac

SEQ ID NO: 1204736 - RNA, 19 nt, Artificial Sequence
  Description of Artificial Sequence: Synthetic oligonucleotide
  Sense strand starting at position 658 of SEQ ID NO: 917051
aggagaaguuugguagagu

SEQ ID NO: 1204737 - RNA, 19 nt, Artificial Sequence
  Description of Artificial Sequence: Synthetic oligonucleotide
  Antisense strand to SEQ ID NO: 1204736
acucuaccaaacuucuccu

SEQ ID NO: 1204738 - RNA, 19 nt, Artificial Sequence
  Description of Artificial Sequence: Synthetic oligonucleotide
  Sense strand starting at position 952 of SEQ ID NO: 917051
aacuguaugcacuggacua

SEQ ID NO: 1204739 - RNA, 19 nt, Artificial Sequence
  Description of Artificial Sequence: Synthetic oligonucleotide
  Antisense strand to SEQ ID NO: 1204738
uaguccagugcauacaguu

SEQ ID NO: 1204740 - RNA, 19 nt, Artificial Sequence
  Description of Artificial Sequence: Synthetic oligonucleotide
  Sense strand starting at position 1005 of SEQ ID NO: 917051
uuggauagcccacagugau

SEQ ID NO: 1204741 - RNA, 19 nt, Artificial Sequence
  Description of Artificial Sequence: Synthetic oligonucleotide
  Antisense strand to SEQ ID NO: 1204740
aucacugugggcuauccaa

SEQ ID NO: 1204742 - RNA, 19 nt, Artificial Sequence
  Description of Artificial Sequence: Synthetic oligonucleotide
  Sense strand starting at position 1008 of SEQ ID NO: 917051
gauagcccacagugauaaa

SEQ ID NO: 1204743 - RNA, 19 nt, Artificial Sequence
  Description of Artificial Sequence: Synthetic oligonucleotide
  Antisense strand to SEQ ID NO: 1204742
uuuaucacugugggcuauc

SEQ ID NO: 1204744 - RNA, 19 nt, Artificial Sequence
  Description of Artificial Sequence: Synthetic oligonucleotide
  Sense strand starting at position 1224 of SEQ ID NO: 917051
auugaaucucauugagauu

SEQ ID NO: 1204745 - RNA, 19 nt, Artificial Sequence
  Description of Artificial Sequence: Synthetic oligonucleotide
  Antisense strand to SEQ ID NO: 1204744
aaucucaaugagauucaau

SEQ ID NO: 1204746 - RNA, 19 nt, Artificial Sequence
  Description of Artificial Sequence: Synthetic oligonucleotide
  Sense strand starting at position 1255 of SEQ ID NO: 917051
cuaagcaugugcuuaacuu

SEQ ID NO: 1204747 - RNA, 19 nt, Artificial Sequence
  Description of Artificial Sequence: Synthetic oligonucleotide
  Antisense strand to SEQ ID NO: 1204746
aaguuaagcacaugcuuag

SEQ ID NO: 1204748 - RNA, 19 nt, Artificial Sequence
  Description of Artificial Sequence: Synthetic oligonucleotide
  Sense strand starting at position 1450 of SEQ ID NO: 917051
aggucuuauuuccaugcaa

SEQ ID NO: 1204749 - RNA, 19 nt, Artificial Sequence
  Description of Artificial Sequence: Synthetic oligonucleotide
  Antisense strand to SEQ ID NO: 1204748
uugcauggaaauaagaccu

SEQ ID NO: 1204750 - RNA, 19 nt, Artificial Sequence
  Description of Artificial Sequence: Synthetic oligonucleotide
  Sense strand starting at position 1483 of SEQ ID NO: 917051
guuacuugcccagauacaa

SEQ ID NO: 1204751 - RNA, 19 nt, Artificial Sequence
  Description of Artificial Sequence: Synthetic oligonucleotide
  Antisense strand to SEQ ID NO: 1204750
uuguaucugggcaaguaac

SEQ ID NO: 1204752 - RNA, 19 nt, Artificial Sequence
  Description of Artificial Sequence: Synthetic oligonucleotide
  Sense strand starting at position 1539 of SEQ ID NO: 917051
gaggacuggucugaggaga

SEQ ID NO: 1204753 - RNA, 19 nt, Artificial Sequence
  Description of Artificial Sequence: Synthetic oligonucleotide
  Antisense strand to SEQ ID NO: 1204752
ucuccucagaccaguccuc

SEQ ID NO: 1204754 - RNA, 19 nt, Artificial Sequence
  Description of Artificial Sequence: Synthetic oligonucleotide
  Sense strand starting at position 1609 of SEQ ID NO: 917051
gcgagcuaccaguagaauu

SEQ ID NO: 1204755 - RNA, 19 nt, Artificial Sequence
  Description of Artificial Sequence: Synthetic oligonucleotide
  Antisense strand to SEQ ID NO: 1204754
aauucuacugguagcucgc

SEQ ID NO: 1204756 - RNA, 19 nt, Artificial Sequence
  Description of Artificial Sequence: Synthetic oligonucleotide
  Sense strand starting at position 1650 of SEQ ID NO: 917051
uuggaacaguuacuauaua

SEQ ID NO: 1204757 - RNA, 19 nt, Artificial Sequence
  Description of Artificial Sequence: Synthetic oligonucleotide
  Antisense strand to SEQ ID NO: 1204756
uauauaguaacuguuccaa

SEQ ID NO: 1204758 - RNA, 19 nt, Artificial Sequence
  Description of Artificial Sequence: Synthetic oligonucleotide
  Sense strand starting at position 1713 of SEQ ID NO: 917051
acucuuaaauuugaacgua

SEQ ID NO: 1204759 - RNA, 19 nt, Artificial Sequence
  Description of Artificial Sequence: Synthetic oligonucleotide
  Antisense strand to SEQ ID NO: 1204758
uacguucaaauuuaagagu

SEQ ID NO: 1204760 - RNA, 19 nt, Artificial Sequence
  Description of Artificial Sequence: Synthetic oligonucleotide
  Sense strand starting at position 1795 of SEQ ID NO: 917051
uggcauucuuucccaucga

SEQ ID NO: 1204761 - RNA, 19 nt, Artificial Sequence
  Description of Artificial Sequence: Synthetic oligonucleotide
  Antisense strand to SEQ ID NO: 1204760
ucgaugggaaagaaugcca

SEQ ID NO: 1204762 - RNA, 19 nt, Artificial Sequence
  Description of Artificial Sequence: Synthetic oligonucleotide
  Sense strand starting at position 1883 of SEQ ID NO: 917051
ggaccgaucgauggagaga

SEQ ID NO: 1204763 - RNA, 19 nt, Artificial Sequence
  Description of Artificial Sequence: Synthetic oligonucleotide
  Antisense strand to SEQ ID NO: 1204762
ucucuccaucgaucggucc

SEQ ID NO: 1204764 - RNA, 19 nt, Artificial Sequence
  Description of Artificial Sequence: Synthetic oligonucleotide
  Sense strand starting at position 2830 of SEQ ID NO: 917051
cugugagccgcagaaucau

SEQ ID NO: 1204765 - RNA, 19 nt, Artificial Sequence
  Description of Artificial Sequence: Synthetic oligonucleotide
  Antisense strand to SEQ ID NO: 1204764
augauucugcggcucacag

SEQ ID NO: 1204766 - RNA, 19 nt, Artificial Sequence
  Description of Artificial Sequence: Synthetic oligonucleotide
  Sense strand starting at position 2872 of SEQ ID NO: 917051
uggaauuucugcgauuuac

SEQ ID NO: 1204767 - RNA, 19 nt, Artificial Sequence
  Description of Artificial Sequence: Synthetic oligonucleotide
  Antisense strand to SEQ ID NO: 1204766
guaaaucgcagaaauucca

SEQ ID NO: 1204768 - RNA, 19 nt, Artificial Sequence
  Description of Artificial Sequence: Synthetic oligonucleotide
  Sense strand starting at position 2883 of SEQ ID NO: 917051
cgauuuacacaacgucgaa

SEQ ID NO: 1204769 - RNA, 19 nt, Artificial Sequence
  Description of Artificial Sequence: Synthetic oligonucleotide
  Antisense strand to SEQ ID NO: 1204768
uucgacguuguguaaaucg

SEQ ID NO: 1204770 - RNA, 19 nt, Artificial Sequence
  Description of Artificial Sequence: Synthetic oligonucleotide
  Sense strand starting at position 2897 of SEQ ID NO: 917051
ucgaauuguuuggcagaaa

SEQ ID NO: 1204771 - RNA, 19 nt, Artificial Sequence
  Description of Artificial Sequence: Synthetic oligonucleotide
  Antisense strand to SEQ ID NO: 1204770
uuucugccaaacaauucga

SEQ ID NO: 1204772 - RNA, 19 nt, Artificial Sequence
  Description of Artificial Sequence: Synthetic oligonucleotide
  Sense strand starting at position 2921 of SEQ ID NO: 917051
ggcaaacuccguuaucuuu

SEQ ID NO: 1204773 - RNA, 19 nt, Artificial Sequence
  Description of Artificial Sequence: Synthetic oligonucleotide
  Antisense strand to SEQ ID NO: 1204772
aaagauaacggaguuugcc

SEQ ID NO: 1204774 - RNA, 19 nt, Artificial Sequence
  Description of Artificial Sequence: Synthetic oligonucleotide
  Sense strand starting at position 3024 of SEQ ID NO: 917051
cgaugacggcugugaauug

SEQ ID NO: 1204775 - RNA, 19 nt, Artificial Sequence
  Description of Artificial Sequence: Synthetic oligonucleotide
  Antisense strand to SEQ ID NO: 1204774
caauucacagccgucaucg

SEQ ID NO: 1204776 - RNA, 19 nt, Artificial Sequence
  Description of Artificial Sequence: Synthetic oligonucleotide
  Sense strand starting at position 3252 of SEQ ID NO: 917051
aacucugagccagauuguu

SEQ ID NO: 1204777 - RNA, 19 nt, Artificial Sequence
  Description of Artificial Sequence: Synthetic oligonucleotide
  Antisense strand to SEQ ID NO: 1204776
aacaaucuggcucagaguu

SEQ ID NO: 1204778 - RNA, 19 nt, Artificial Sequence
  Description of Artificial Sequence: Synthetic oligonucleotide
  Sense strand starting at position 3424 of SEQ ID NO: 917051
uauguaagacaagguauaa

SEQ ID NO: 1204779 - RNA, 19 nt, Artificial Sequence
  Description of Artificial Sequence: Synthetic oligonucleotide
  Antisense strand to SEQ ID NO: 1204778
uuauaccuugucuuacaua

SEQ ID NO: 1204780 - RNA, 19 nt, Artificial Sequence
  Description of Artificial Sequence: Synthetic oligonucleotide
  Sense strand starting at position 3492 of SEQ ID NO: 917051
agugguaugaccugaauaa

SEQ ID NO: 1204781 - RNA, 19 nt, Artificial Sequence
  Description of Artificial Sequence: Synthetic oligonucleotide
  Antisense strand to SEQ ID NO: 1204780
uuauucaggucauaccacu

SEQ ID NO: 1204782 - RNA, 19 nt, Artificial Sequence
  Description of Artificial Sequence: Synthetic oligonucleotide
  Sense strand starting at position 3596 of SEQ ID NO: 917051
ggaaauggcuaauuaaggu

SEQ ID NO: 1204783 - RNA, 19 nt, Artificial Sequence
  Description of Artificial Sequence: Synthetic oligonucleotide
  Antisense strand to SEQ ID NO: 1204782
accuuaauuagccauuucc

SEQ ID NO: 1204784 - RNA, 19 nt, Artificial Sequence
  Description of Artificial Sequence: Synthetic oligonucleotide
  Sense strand starting at position 3604 of SEQ ID NO: 917051
cuaauuaaggucugacaua

SEQ ID NO: 1204785 - RNA, 19 nt, Artificial Sequence
  Description of Artificial Sequence: Synthetic oligonucleotide
  Antisense strand to SEQ ID NO: 1204784
uaugucagaccuuaauuag

SEQ ID NO: 1204786 - RNA, 19 nt, Artificial Sequence
  Description of Artificial Sequence: Synthetic oligonucleotide
  Sense strand starting at position 3948 of SEQ ID NO: 917051
ggaaguucuuauguuaaca

SEQ ID NO: 1204787 - RNA, 19 nt, Artificial Sequence
  Description of Artificial Sequence: Synthetic oligonucleotide
  Antisense strand to SEQ ID NO: 1204786
uguuaacauaagaacuucc

SEQ ID NO: 1204788 - RNA, 19 nt, Artificial Sequence
  Description of Artificial Sequence: Synthetic oligonucleotide
  Sense strand starting at position 34 of SEQ ID NO: 917052
aacucugagccagauuguu

SEQ ID NO: 1204789 - RNA, 19 nt, Artificial Sequence
  Description of Artificial Sequence: Synthetic oligonucleotide
  Antisense strand to SEQ ID NO: 1204788
aacaaucuggcucagaguu

SEQ ID NO: 1204790 - RNA, 19 nt, Artificial Sequence
  Description of Artificial Sequence: Synthetic oligonucleotide
  Sense strand starting at position 206 of SEQ ID NO: 917052
uauguaagacaagguauaa

SEQ ID NO: 1204791 - RNA, 19 nt, Artificial Sequence
  Description of Artificial Sequence: Synthetic oligonucleotide
  Antisense strand to SEQ ID NO: 1204790
uuauaccuugucuuacaua

SEQ ID NO: 1204792 - RNA, 19 nt, Artificial Sequence
  Description of Artificial Sequence: Synthetic oligonucleotide
  Sense strand starting at position 274 of SEQ ID NO: 917052
agugguaugaccugaauaa

SEQ ID NO: 1204793 - RNA, 19 nt, Artificial Sequence
  Description of Artificial Sequence: Synthetic oligonucleotide
  Antisense strand to SEQ ID NO: 1204792
uuauucaggucauaccacu

SEQ ID NO: 1204794 - RNA, 19 nt, Artificial Sequence
  Description of Artificial Sequence: Synthetic oligonucleotide
  Sense strand starting at position 378 of SEQ ID NO: 917052
ggaaauggcuaauuaaggu

SEQ ID NO: 1204795 - RNA, 19 nt, Artificial Sequence
  Description of Artificial Sequence: Synthetic oligonucleotide
  Antisense strand to SEQ ID NO: 1204794
accuuaauuagccauuucc

SEQ ID NO: 1204796 - RNA, 19 nt, Artificial Sequence
  Description of Artificial Sequence: Synthetic oligonucleotide
  Sense strand starting at position 386 of SEQ ID NO: 917052
cuaauuaaggucugacaua

SEQ ID NO: 1204797 - RNA, 19 nt, Artificial Sequence
  Description of Artificial Sequence: Synthetic oligonucleotide
  Antisense strand to SEQ ID NO: 1204796
uaugucagaccuuaauuag

SEQ ID NO: 1204798 - RNA, 19 nt, Artificial Sequence
  Description of Artificial Sequence: Synthetic oligonucleotide
  Sense strand starting at position 730 of SEQ ID NO: 917052
ggaaguucuuauguuaaca

SEQ ID NO: 1204799 - RNA, 19 nt, Artificial Sequence
  Description of Artificial Sequence: Synthetic oligonucleotide
  Antisense strand to SEQ ID NO: 1204798
uguuaacauaagaacuucc

SEQ ID NO: 1204800 - RNA, 19 nt, Artificial Sequence
  Description of Artificial Sequence: Synthetic oligonucleotide
  Sense strand starting at position 810 of SEQ ID NO: 917052
guacauuaagguuacaacu

SEQ ID NO: 1204801 - RNA, 19 nt, Artificial Sequence
  Description of Artificial Sequence: Synthetic oligonucleotide
  Antisense strand to SEQ ID NO: 1204800
aguuguaaccuuaauguac

SEQ ID NO: 1204802 - RNA, 19 nt, Artificial Sequence
  Description of Artificial Sequence: Synthetic oligonucleotide
  Sense strand starting at position 915 of SEQ ID NO: 917052
agugcauaauaauucugau

SEQ ID NO: 1204803 - RNA, 19 nt, Artificial Sequence
  Description of Artificial Sequence: Synthetic oligonucleotide
  Antisense strand to SEQ ID NO: 1204802
aucagaauuauuaugcacu

SEQ ID NO: 1204804 - RNA, 19 nt, Artificial Sequence
  Description of Artificial Sequence: Synthetic oligonucleotide
  Sense strand starting at position 971 of SEQ ID NO: 917052
aucuaaccucuauguugua

SEQ ID NO: 1204805 - RNA, 19 nt, Artificial Sequence
  Description of Artificial Sequence: Synthetic oligonucleotide
  Antisense strand to SEQ ID NO: 1204804
uacaacauagagguuagau

SEQ ID NO: 1204806 - RNA, 19 nt, Artificial Sequence
  Description of Artificial Sequence: Synthetic oligonucleotide
  Sense strand starting at position 1073 of SEQ ID NO: 917052
guauuucuggcaugcaaua

SEQ ID NO: 1204807 - RNA, 19 nt, Artificial Sequence
  Description of Artificial Sequence: Synthetic oligonucleotide
  Antisense strand to SEQ ID NO: 1204806
uauugcaugccagaaauac

SEQ ID NO: 1204808 - RNA, 19 nt, Artificial Sequence
  Description of Artificial Sequence: Synthetic oligonucleotide
  Sense strand starting at position 1099 of SEQ ID NO: 917052
uccuguaauuccuugaaag

SEQ ID NO: 1204809 - RNA, 19 nt, Artificial Sequence
  Description of Artificial Sequence: Synthetic oligonucleotide
  Antisense strand to SEQ ID NO: 1204808
cuuucaaggaauuacagga

SEQ ID NO: 1204810 - RNA, 19 nt, Artificial Sequence
  Description of Artificial Sequence: Synthetic oligonucleotide
  Sense strand starting at position 1100 of SEQ ID NO: 917052
ccuguaauuccuugaaagc

SEQ ID NO: 1204811 - RNA, 19 nt, Artificial Sequence
  Description of Artificial Sequence: Synthetic oligonucleotide
  Antisense strand to SEQ ID NO: 1204810
gcuuucaaggaauuacagg

SEQ ID NO: 1204812 - RNA, 19 nt, Artificial Sequence
  Description of Artificial Sequence: Synthetic oligonucleotide
  Sense strand starting at position 1101 of SEQ ID NO: 917052
cuguaauuccuugaaagca

SEQ ID NO: 1204813 - RNA, 19 nt, Artificial Sequence
  Description of Artificial Sequence: Synthetic oligonucleotide
  Antisense strand to SEQ ID NO: 1204812
ugcuuucaaggaauuacag

SEQ ID NO: 1204814 - RNA, 19 nt, Artificial Sequence
  Description of Artificial Sequence: Synthetic oligonucleotide
  Sense strand starting at position 1180 of SEQ ID NO: 917052
ucuggaaggucguuuggga

SEQ ID NO: 1204815 - RNA, 19 nt, Artificial Sequence
  Description of Artificial Sequence: Synthetic oligonucleotide
  Antisense strand to SEQ ID NO: 1204814
ucccaaacgaccuuccaga

SEQ ID NO: 1204816 - RNA, 19 nt, Artificial Sequence
  Description of Artificial Sequence: Synthetic oligonucleotide
  Sense strand starting at position 1187 of SEQ ID NO: 917052
ggucguuugggagauagga

SEQ ID NO: 1204817 - RNA, 19 nt, Artificial Sequence
  Description of Artificial Sequence: Synthetic oligonucleotide
  Antisense strand to SEQ ID NO: 1204816
uccuaucucccaaacgacc

SEQ ID NO: 1204818 - RNA, 19 nt, Artificial Sequence
  Description of Artificial Sequence: Synthetic oligonucleotide
  Sense strand starting at position 1203 of SEQ ID NO: 917052
ggaagagucuuaguugccu

SEQ ID NO: 1204819 - RNA, 19 nt, Artificial Sequence
  Description of Artificial Sequence: Synthetic oligonucleotide
  Antisense strand to SEQ ID NO: 1204818
aggcaacuaagacucuucc

SEQ ID NO: 1204820 - RNA, 19 nt, Artificial Sequence
  Description of Artificial Sequence: Synthetic oligonucleotide
  Sense strand starting at position 1218 of SEQ ID NO: 917052
gccucccucugaucuagua

SEQ ID NO: 1204821 - RNA, 19 nt, Artificial Sequence
  Description of Artificial Sequence: Synthetic oligonucleotide
  Antisense strand to SEQ ID NO: 1204820
uacuagaucagagggaggc

SEQ ID NO: 1204822 - RNA, 19 nt, Artificial Sequence
  Description of Artificial Sequence: Synthetic oligonucleotide
  Sense strand starting at position 1366 of SEQ ID NO: 917052
gccuuaauacaaugaugua

SEQ ID NO: 1204823 - RNA, 19 nt, Artificial Sequence
  Description of Artificial Sequence: Synthetic oligonucleotide
  Antisense strand to SEQ ID NO: 1204822
uacaucauuguauuaaggc

SEQ ID NO: 1204824 - RNA, 19 nt, Artificial Sequence
  Description of Artificial Sequence: Synthetic oligonucleotide
  Sense strand starting at position 1449 of SEQ ID NO: 917052
guaauuaaagagcagaugu

SEQ ID NO: 1204825 - RNA, 19 nt, Artificial Sequence
  Description of Artificial Sequence: Synthetic oligonucleotide
  Antisense strand to SEQ ID NO: 1204824
acaucugcucuuuaauuac

SEQ ID NO: 1204826 - RNA, 19 nt, Artificial Sequence
  Description of Artificial Sequence: Synthetic oligonucleotide
  Sense strand starting at position 1824 of SEQ ID NO: 917052
ggauaacucagaggucagu

SEQ ID NO: 1204827 - RNA, 19 nt, Artificial Sequence
  Description of Artificial Sequence: Synthetic oligonucleotide
  Antisense strand to SEQ ID NO: 1204826
acugaccucugaguuaucc

SEQ ID NO: 1204828 - RNA, 19 nt, Artificial Sequence
  Description of Artificial Sequence: Synthetic oligonucleotide
  Sense strand starting at position 1871 of SEQ ID NO: 917052
ggcaaaugcugaucuccua

SEQ ID NO: 1204829 - RNA, 19 nt, Artificial Sequence
  Description of Artificial Sequence: Synthetic oligonucleotide
  Antisense strand to SEQ ID NO: 1204828
uaggagaucagcauuugcc

SEQ ID NO: 1204830 - RNA, 19 nt, Artificial Sequence
  Description of Artificial Sequence: Synthetic oligonucleotide
  Sense strand starting at position 1952 of SEQ ID NO: 917052
ucagguuuggcuuaaacuc

SEQ ID NO: 1204831 - RNA, 19 nt, Artificial Sequence
  Description of Artificial Sequence: Synthetic oligonucleotide
  Antisense strand to SEQ ID NO: 1204830
gaguuuaagccaaaccuga

SEQ ID NO: 1204832 - RNA, 19 nt, Artificial Sequence
  Description of Artificial Sequence: Synthetic oligonucleotide
  Sense strand starting at position 1980 of SEQ ID NO: 917052
ggaaacugcuuuccugaag

SEQ ID NO: 1204833 - RNA, 19 nt, Artificial Sequence
  Description of Artificial Sequence: Synthetic oligonucleotide
  Antisense strand to SEQ ID NO: 1204832
cuucaggaaagcaguuucc

SEQ ID NO: 1204834 - RNA, 19 nt, Artificial Sequence
  Description of Artificial Sequence: Synthetic oligonucleotide
  Sense strand starting at position 1981 of SEQ ID NO: 917052
gaaacugcuuuccugaagu

SEQ ID NO: 1204835 - RNA, 19 nt, Artificial Sequence
  Description of Artificial Sequence: Synthetic oligonucleotide
  Antisense strand to SEQ ID NO: 1204834
acuucaggaaagcaguuuc

SEQ ID NO: 1204836 - RNA, 19 nt, Artificial Sequence
  Description of Artificial Sequence: Synthetic oligonucleotide
  Sense strand starting at position 2071 of SEQ ID NO: 917052
ccgaguucugagccugcuu

SEQ ID NO: 1204837 - RNA, 19 nt, Artificial Sequence
  Description of Artificial Sequence: Synthetic oligonucleotide
  Antisense strand to SEQ ID NO: 1204836
aagcaggcucagaacucgg

SEQ ID NO: 1204838 - RNA, 19 nt, Artificial Sequence
  Description of Artificial Sequence: Synthetic oligonucleotide
  Sense strand starting at position 2181 of SEQ ID NO: 917052
ugcugaaaugccuaaugaa

SEQ ID NO: 1204839 - RNA, 19 nt, Artificial Sequence
  Description of Artificial Sequence: Synthetic oligonucleotide
  Antisense strand to SEQ ID NO: 1204838
uucauuaggcauuucagca

SEQ ID NO: 1204840 - RNA, 19 nt, Artificial Sequence
  Description of Artificial Sequence: Synthetic oligonucleotide
  Sense strand starting at position 2203 of SEQ ID NO: 917052
accagaaguuccuuagcau

SEQ ID NO: 1204841 - RNA, 19 nt, Artificial Sequence
  Description of Artificial Sequence: Synthetic oligonucleotide
  Antisense strand to SEQ ID NO: 1204840
augcuaaggaacuucuggu

SEQ ID NO: 1204842 - RNA, 19 nt, Artificial Sequence
  Description of Artificial Sequence: Synthetic oligonucleotide
  Sense strand starting at position 2204 of SEQ ID NO: 917052
ccagaaguuccuuagcaua

SEQ ID NO: 1204843 - RNA, 19 nt, Artificial Sequence
  Description of Artificial Sequence: Synthetic oligonucleotide
  Antisense strand to SEQ ID NO: 1204842
uaugcuaaggaacuucugg

SEQ ID NO: 1204844 - RNA, 19 nt, Artificial Sequence
  Description of Artificial Sequence: Synthetic oligonucleotide
  Sense strand starting at position 2206 of SEQ ID NO: 917052
agaaguuccuuagcauaau

SEQ ID NO: 1204845 - RNA, 19 nt, Artificial Sequence
  Description of Artificial Sequence: Synthetic oligonucleotide
  Antisense strand to SEQ ID NO: 1204844
auuaugcuaaggaacuucu

SEQ ID NO: 1204846 - RNA, 19 nt, Artificial Sequence
  Description of Artificial Sequence: Synthetic oligonucleotide
  Sense strand starting at position 2352 of SEQ ID NO: 917052
aaaccuaauggauguguaa

SEQ ID NO: 1204847 - RNA, 19 nt, Artificial Sequence
  Description of Artificial Sequence: Synthetic oligonucleotide
  Antisense strand to SEQ ID NO: 1204846
uuacacauccauuagguuu

SEQ ID NO: 1204848 - RNA, 19 nt, Artificial Sequence
  Description of Artificial Sequence: Synthetic oligonucleotide
  Sense strand starting at position 2355 of SEQ ID NO: 917052
ccuaauggauguguaacua

SEQ ID NO: 1204849 - RNA, 19 nt, Artificial Sequence
  Description of Artificial Sequence: Synthetic oligonucleotide
  Antisense strand to SEQ ID NO: 1204848
uaguuacacauccauuagg

SEQ ID NO: 1204850 - RNA, 19 nt, Artificial Sequence
  Description of Artificial Sequence: Synthetic oligonucleotide
  Sense strand starting at position 2363 of SEQ ID NO: 917052
auguguaacuacucaauuc

SEQ ID NO: 1204851 - RNA, 19 nt, Artificial Sequence
  Description of Artificial Sequence: Synthetic oligonucleotide
  Antisense strand to SEQ ID NO: 1204850
gaauugaguaguuacacau

SEQ ID NO: 1204852 - RNA, 19 nt, Artificial Sequence
  Description of Artificial Sequence: Synthetic oligonucleotide
  Sense strand starting at position 2404 of SEQ ID NO: 917052
ugcccuuuguauccugaga

SEQ ID NO: 1204853 - RNA, 19 nt, Artificial Sequence
  Description of Artificial Sequence: Synthetic oligonucleotide
  Antisense strand to SEQ ID NO: 1204852
ucucaggauacaaagggca

SEQ ID NO: 1204854 - RNA, 19 nt, Artificial Sequence
  Description of Artificial Sequence: Synthetic oligonucleotide
  Sense strand starting at position 2578 of SEQ ID NO: 917052
uuaugagcuugugaaauuu

SEQ ID NO: 1204855 - RNA, 19 nt, Artificial Sequence
  Description of Artificial Sequence: Synthetic oligonucleotide
  Antisense strand to SEQ ID NO: 1204854
aaauuucacaagcucauaa

SEQ ID NO: 1204856 - RNA, 19 nt, Artificial Sequence
  Description of Artificial Sequence: Synthetic oligonucleotide
  Sense strand starting at position 2940 of SEQ ID NO: 917052
aagcuauggccuuagugga

SEQ ID NO: 1204857 - RNA, 19 nt, Artificial Sequence
  Description of Artificial Sequence: Synthetic oligonucleotide
  Antisense strand to SEQ ID NO: 1204856
uccacuaaggccauagcuu

SEQ ID NO: 1204858 - RNA, 19 nt, Artificial Sequence
  Description of Artificial Sequence: Synthetic oligonucleotide
  Sense strand starting at position 2947 of SEQ ID NO: 917052
ggccuuaguggaggaaagu

SEQ ID NO: 1204859 - RNA, 19 nt, Artificial Sequence
  Description of Artificial Sequence: Synthetic oligonucleotide
  Antisense strand to SEQ ID NO: 1204858
acuuuccuccacuaaggcc

SEQ ID NO: 1204860 - RNA, 19 nt, Artificial Sequence
  Description of Artificial Sequence: Synthetic oligonucleotide
  Sense strand starting at position 3093 of SEQ ID NO: 917052
uuuauuugguggucuguca

SEQ ID NO: 1204861 - RNA, 19 nt, Artificial Sequence
  Description of Artificial Sequence: Synthetic oligonucleotide
  Antisense strand to SEQ ID NO: 1204860
ugacagaccaccaaauaaa

SEQ ID NO: 1204862 - RNA, 19 nt, Artificial Sequence
  Description of Artificial Sequence: Synthetic oligonucleotide
  Sense strand starting at position 3101 of SEQ ID NO: 917052
guggucugucagggaaacu

SEQ ID NO: 1204863 - RNA, 19 nt, Artificial Sequence
  Description of Artificial Sequence: Synthetic oligonucleotide
  Antisense strand to SEQ ID NO: 1204862
aguuucccugacagaccac

SEQ ID NO: 1204864 - RNA, 19 nt, Artificial Sequence
  Description of Artificial Sequence: Synthetic oligonucleotide
  Sense strand starting at position 3102 of SEQ ID NO: 917052
uggucugucagggaaacuu

SEQ ID NO: 1204865 - RNA, 19 nt, Artificial Sequence
  Description of Artificial Sequence: Synthetic oligonucleotide
  Antisense strand to SEQ ID NO: 1204864
aaguuucccugacagacca

SEQ ID NO: 1204866 - RNA, 19 nt, Artificial Sequence
  Description of Artificial Sequence: Synthetic oligonucleotide
  Sense strand starting at position 3121 of SEQ ID NO: 917052
guaccuugcaggugaauuu

SEQ ID NO: 1204867 - RNA, 19 nt, Artificial Sequence
  Description of Artificial Sequence: Synthetic oligonucleotide
  Antisense strand to SEQ ID NO: 1204866
aaauucaccugcaagguac

SEQ ID NO: 1204868 - RNA, 19 nt, Artificial Sequence
  Description of Artificial Sequence: Synthetic oligonucleotide
  Sense strand starting at position 51 of SEQ ID NO: 917053
ugccuuuguaaagagugau

SEQ ID NO: 1204869 - RNA, 19 nt, Artificial Sequence
  Description of Artificial Sequence: Synthetic oligonucleotide
  Antisense strand to SEQ ID NO: 1204868
aucacucuuuacaaaggca

SEQ ID NO: 1204870 - RNA, 19 nt, Artificial Sequence
  Description of Artificial Sequence: Synthetic oligonucleotide
  Sense strand starting at position 54 of SEQ ID NO: 917053
cuuuguaaagagugaugga

SEQ ID NO: 1204871 - RNA, 19 nt, Artificial Sequence
  Description of Artificial Sequence: Synthetic oligonucleotide
  Antisense strand to SEQ ID NO: 1204870
uccaucacucuuuacaaag

SEQ ID NO: 1204872 - RNA, 19 nt, Artificial Sequence
  Description of Artificial Sequence: Synthetic oligonucleotide
  Sense strand starting at position 116 of SEQ ID NO: 917053
gauccaaggcuuugagcaa

SEQ ID NO: 1204873 - RNA, 19 nt, Artificial Sequence
  Description of Artificial Sequence: Synthetic oligonucleotide
  Antisense strand to SEQ ID NO: 1204872
uugcucaaagccuuggauc

SEQ ID NO: 1204874 - RNA, 19 nt, Artificial Sequence
  Description of Artificial Sequence: Synthetic oligonucleotide
  Sense strand starting at position 123 of SEQ ID NO: 917053
ggcuuugagcaacaacaga

SEQ ID NO: 1204875 - RNA, 19 nt, Artificial Sequence
  Description of Artificial Sequence: Synthetic oligonucleotide
  Antisense strand to SEQ ID NO: 1204874
ucuguuguugcucaaagcc

SEQ ID NO: 1204876 - RNA, 19 nt, Artificial Sequence
  Description of Artificial Sequence: Synthetic oligonucleotide
  Sense strand starting at position 165 of SEQ ID NO: 917053
cucaguggccuugaacauu

SEQ ID NO: 1204877 - RNA, 19 nt, Artificial Sequence
  Description of Artificial Sequence: Synthetic oligonucleotide
  Antisense strand to SEQ ID NO: 1204876
aauguucaaggccacugag

SEQ ID NO: 1204878 - RNA, 19 nt, Artificial Sequence
  Description of Artificial Sequence: Synthetic oligonucleotide
  Sense strand starting at position 181 of SEQ ID NO: 917053
auuucucugcugugauaug

SEQ ID NO: 1204879 - RNA, 19 nt, Artificial Sequence
  Description of Artificial Sequence: Synthetic oligonucleotide
  Antisense strand to SEQ ID NO: 1204878
cauaucacagcagagaaau

SEQ ID NO: 1204880 - RNA, 19 nt, Artificial Sequence
  Description of Artificial Sequence: Synthetic oligonucleotide
  Sense strand starting at position 356 of SEQ ID NO: 917053
accaaauaugcuggaaguu

SEQ ID NO: 1204881 - RNA, 19 nt, Artificial Sequence
  Description of Artificial Sequence: Synthetic oligonucleotide
  Antisense strand to SEQ ID NO: 1204880
aacuuccagcauauuuggu

SEQ ID NO: 1204882 - RNA, 19 nt, Artificial Sequence
  Description of Artificial Sequence: Synthetic oligonucleotide
  Sense strand starting at position 366 of SEQ ID NO: 917053
cuggaaguugguuagcaaa

SEQ ID NO: 1204883 - RNA, 19 nt, Artificial Sequence
  Description of Artificial Sequence: Synthetic oligonucleotide
  Antisense strand to SEQ ID NO: 1204882
uuugcuaaccaacuuccag

SEQ ID NO: 1204884 - RNA, 19 nt, Artificial Sequence
  Description of Artificial Sequence: Synthetic oligonucleotide
  Sense strand starting at position 368 of SEQ ID NO: 917053
ggaaguugguuagcaaaga

SEQ ID NO: 1204885 - RNA, 19 nt, Artificial Sequence
  Description of Artificial Sequence: Synthetic oligonucleotide
  Antisense strand to SEQ ID NO: 1204884
ucuuugcuaaccaacuucc

SEQ ID NO: 1204886 - RNA, 19 nt, Artificial Sequence
  Description of Artificial Sequence: Synthetic oligonucleotide
  Sense strand starting at position 584 of SEQ ID NO: 917053
ggagcucugaagugauuaa

SEQ ID NO: 1204887 - RNA, 19 nt, Artificial Sequence
  Description of Artificial Sequence: Synthetic oligonucleotide
  Antisense strand to SEQ ID NO: 1204886
uuaaucacuucagagcucc

SEQ ID NO: 1204888 - RNA, 19 nt, Artificial Sequence
  Description of Artificial Sequence: Synthetic oligonucleotide
  Sense strand starting at position 596 of SEQ ID NO: 917053
ugauuaaacuccucuguug

SEQ ID NO: 1204889 - RNA, 19 nt, Artificial Sequence
  Description of Artificial Sequence: Synthetic oligonucleotide
  Antisense strand to SEQ ID NO: 1204888
caacagaggaguuuaauca

SEQ ID NO: 1204890 - RNA, 19 nt, Artificial Sequence
  Description of Artificial Sequence: Synthetic oligonucleotide
  Sense strand starting at position 598 of SEQ ID NO: 917053
auuaaacuccucuguugga

SEQ ID NO: 1204891 - RNA, 19 nt, Artificial Sequence
  Description of Artificial Sequence: Synthetic oligonucleotide
  Antisense strand to SEQ ID NO: 1204890
uccaacagaggaguuuaau

SEQ ID NO: 1204892 - RNA, 19 nt, Artificial Sequence
  Description of Artificial Sequence: Synthetic oligonucleotide
  Sense strand starting at position 599 of SEQ ID NO: 917053
uuaaacuccucuguuggaa

SEQ ID NO: 1204893 - RNA, 19 nt, Artificial Sequence
  Description of Artificial Sequence: Synthetic oligonucleotide
  Antisense strand to SEQ ID NO: 1204892
uuccaacagaggaguuuaa

SEQ ID NO: 1204894 - RNA, 19 nt, Artificial Sequence
  Description of Artificial Sequence: Synthetic oligonucleotide
  Sense strand starting at position 721 of SEQ ID NO: 917053
gucugaggcccagaucaaa

SEQ ID NO: 1204895 - RNA, 19 nt, Artificial Sequence
  Description of Artificial Sequence: Synthetic oligonucleotide
  Antisense strand to SEQ ID NO: 1204894
uuugaucugggccucagac

SEQ ID NO: 1204896 - RNA, 19 nt, Artificial Sequence
  Description of Artificial Sequence: Synthetic oligonucleotide
  Sense strand starting at position 873 of SEQ ID NO: 917053
cugguucuggcagaauaca

SEQ ID NO: 1204897 - RNA, 19 nt, Artificial Sequence
  Description of Artificial Sequence: Synthetic oligonucleotide
  Antisense strand to SEQ ID NO: 1204896
uguauucugccagaaccag

SEQ ID NO: 1204898 - RNA, 19 nt, Artificial Sequence
  Description of Artificial Sequence: Synthetic oligonucleotide
  Sense strand starting at position 1078 of SEQ ID NO: 917053
uguguaacuagccaagagu

SEQ ID NO: 1204899 - RNA, 19 nt, Artificial Sequence
  Description of Artificial Sequence: Synthetic oligonucleotide
  Antisense strand to SEQ ID NO: 1204898
acucuuggcuaguuacaca

SEQ ID NO: 1204900 - RNA, 19 nt, Artificial Sequence
  Description of Artificial Sequence: Synthetic oligonucleotide
  Sense strand starting at position 1352 of SEQ ID NO: 917053
aguccacucccagacuauu

SEQ ID NO: 1204901 - RNA, 19 nt, Artificial Sequence
  Description of Artificial Sequence: Synthetic oligonucleotide
  Antisense strand to SEQ ID NO: 1204900
aauagucugggaguggacu

SEQ ID NO: 1204902 - RNA, 19 nt, Artificial Sequence
  Description of Artificial Sequence: Synthetic oligonucleotide
  Sense strand starting at position 1578 of SEQ ID NO: 917053
ggcagugagugacuacaau

SEQ ID NO: 1204903 - RNA, 19 nt, Artificial Sequence
  Description of Artificial Sequence: Synthetic oligonucleotide
  Antisense strand to SEQ ID NO: 1204902
auuguagucacucacugcc

SEQ ID NO: 1204904 - RNA, 19 nt, Artificial Sequence
  Description of Artificial Sequence: Synthetic oligonucleotide
  Sense strand starting at position 1790 of SEQ ID NO: 917053
gaaggaagucgugcucguu

SEQ ID NO: 1204905 - RNA, 19 nt, Artificial Sequence
  Description of Artificial Sequence: Synthetic oligonucleotide
  Antisense strand to SEQ ID NO: 1204904
aacgagcacgacuuccuuc

SEQ ID NO: 1204906 - RNA, 19 nt, Artificial Sequence
  Description of Artificial Sequence: Synthetic oligonucleotide
  Sense strand starting at position 2014 of SEQ ID NO: 917053
caaugagcgccacucguua

SEQ ID NO: 1204907 - RNA, 19 nt, Artificial Sequence
  Description of Artificial Sequence: Synthetic oligonucleotide
  Antisense strand to SEQ ID NO: 1204906
uaacgaguggcgcucauug

SEQ ID NO: 1204908 - RNA, 19 nt, Artificial Sequence
  Description of Artificial Sequence: Synthetic oligonucleotide
  Sense strand starting at position 2116 of SEQ ID NO: 917053
gacugacgccaaugagaag

SEQ ID NO: 1204909 - RNA, 19 nt, Artificial Sequence
  Description of Artificial Sequence: Synthetic oligonucleotide
  Antisense strand to SEQ ID NO: 1204908
cuucucauuggcgucaguc

SEQ ID NO: 1204910 - RNA, 19 nt, Artificial Sequence
  Description of Artificial Sequence: Synthetic oligonucleotide
  Sense strand starting at position 2142 of SEQ ID NO: 917053
aaggcaauugaugguugaa

SEQ ID NO: 1204911 - RNA, 19 nt, Artificial Sequence
  Description of Artificial Sequence: Synthetic oligonucleotide
  Antisense strand to SEQ ID NO: 1204910
uucaaccaucaauugccuu

SEQ ID NO: 1204912 - RNA, 19 nt, Artificial Sequence
  Description of Artificial Sequence: Synthetic oligonucleotide
  Sense strand starting at position 2144 of SEQ ID NO: 917053
ggcaauugaugguugaaag

SEQ ID NO: 1204913 - RNA, 19 nt, Artificial Sequence
  Description of Artificial Sequence: Synthetic oligonucleotide
  Antisense strand to SEQ ID NO: 1204912
cuuucaaccaucaauugcc

SEQ ID NO: 1204914 - RNA, 19 nt, Artificial Sequence
  Description of Artificial Sequence: Synthetic oligonucleotide
  Sense strand starting at position 2145 of SEQ ID NO: 917053
gcaauugaugguugaaaga

SEQ ID NO: 1204915 - RNA, 19 nt, Artificial Sequence
  Description of Artificial Sequence: Synthetic oligonucleotide
  Antisense strand to SEQ ID NO: 1204914
ucuuucaaccaucaauugc

SEQ ID NO: 1204916 - RNA, 19 nt, Artificial Sequence
  Description of Artificial Sequence: Synthetic oligonucleotide
  Sense strand starting at position 2373 of SEQ ID NO: 917053
gacaguugucuugguauuu

SEQ ID NO: 1204917 - RNA, 19 nt, Artificial Sequence
  Description of Artificial Sequence: Synthetic oligonucleotide
  Antisense strand to SEQ ID NO: 1204916
aaauaccaagacaacuguc

SEQ ID NO: 1204918 - RNA, 19 nt, Artificial Sequence
  Description of Artificial Sequence: Synthetic oligonucleotide
  Sense strand starting at position 2378 of SEQ ID NO: 917053
uugucuugguauuuguaaa

SEQ ID NO: 1204919 - RNA, 19 nt, Artificial Sequence
  Description of Artificial Sequence: Synthetic oligonucleotide
  Antisense strand to SEQ ID NO: 1204918
uuuacaaauaccaagacaa

SEQ ID NO: 1204920 - RNA, 19 nt, Artificial Sequence
  Description of Artificial Sequence: Synthetic oligonucleotide
  Sense strand starting at position 2379 of SEQ ID NO: 917053
ugucuugguauuuguaaag

SEQ ID NO: 1204921 - RNA, 19 nt, Artificial Sequence
  Description of Artificial Sequence: Synthetic oligonucleotide
  Antisense strand to SEQ ID NO: 1204920
cuuuacaaauaccaagaca

SEQ ID NO: 1204922 - RNA, 19 nt, Artificial Sequence
  Description of Artificial Sequence: Synthetic oligonucleotide
  Sense strand starting at position 2450 of SEQ ID NO: 917053
gcugucaaccaauaaagcu

SEQ ID NO: 1204923 - RNA, 19 nt, Artificial Sequence
  Description of Artificial Sequence: Synthetic oligonucleotide
  Antisense strand to SEQ ID NO: 1204922
agcuuuauugguugacagc

SEQ ID NO: 1204924 - RNA, 19 nt, Artificial Sequence
  Description of Artificial Sequence: Synthetic oligonucleotide
  Sense strand starting at position 2512 of SEQ ID NO: 917053
gugcgcauaauaguguaau

SEQ ID NO: 1204925 - RNA, 19 nt, Artificial Sequence
  Description of Artificial Sequence: Synthetic oligonucleotide
  Antisense strand to SEQ ID NO: 1204924
auuacacuauuaugcgcac

SEQ ID NO: 1204926 - RNA, 19 nt, Artificial Sequence
  Description of Artificial Sequence: Synthetic oligonucleotide
  Sense strand starting at position 2518 of SEQ ID NO: 917053
auaauaguguaaucacuca

SEQ ID NO: 1204927 - RNA, 19 nt, Artificial Sequence
  Description of Artificial Sequence: Synthetic oligonucleotide
  Antisense strand to SEQ ID NO: 1204926
ugagugauuacacuauuau

SEQ ID NO: 1204928 - RNA, 19 nt, Artificial Sequence
  Description of Artificial Sequence: Synthetic oligonucleotide
  Sense strand starting at position 2553 of SEQ ID NO: 917053
aauaauucguucuugagac

SEQ ID NO: 1204929 - RNA, 19 nt, Artificial Sequence
  Description of Artificial Sequence: Synthetic oligonucleotide
  Antisense strand to SEQ ID NO: 1204928
gucucaagaacgaauuauu

SEQ ID NO: 1204930 - RNA, 19 nt, Artificial Sequence
  Description of Artificial Sequence: Synthetic oligonucleotide
  Sense strand starting at position 2555 of SEQ ID NO: 917053
uaauucguucuugagacua

SEQ ID NO: 1204931 - RNA, 19 nt, Artificial Sequence
  Description of Artificial Sequence: Synthetic oligonucleotide
  Antisense strand to SEQ ID NO: 1204930
uagucucaagaacgaauua

SEQ ID NO: 1204932 - RNA, 19 nt, Artificial Sequence
  Description of Artificial Sequence: Synthetic oligonucleotide
  Sense strand starting at position 2642 of SEQ ID NO: 917053
gaaguacccuuaucaagga

SEQ ID NO: 1204933 - RNA, 19 nt, Artificial Sequence
  Description of Artificial Sequence: Synthetic oligonucleotide
  Antisense strand to SEQ ID NO: 1204932
uccuugauaaggguacuuc

SEQ ID NO: 1204934 - RNA, 19 nt, Artificial Sequence
  Description of Artificial Sequence: Synthetic oligonucleotide
  Sense strand starting at position 2841 of SEQ ID NO: 917053
ugguaacuucgggaguuga

SEQ ID NO: 1204935 - RNA, 19 nt, Artificial Sequence
  Description of Artificial Sequence: Synthetic oligonucleotide
  Antisense strand to SEQ ID NO: 1204934
ucaacucccgaaguuacca

SEQ ID NO: 1204936 - RNA, 19 nt, Artificial Sequence
  Description of Artificial Sequence: Synthetic oligonucleotide
  Sense strand starting at position 3091 of SEQ ID NO: 917053
agaccugagucacuucuca

SEQ ID NO: 1204937 - RNA, 19 nt, Artificial Sequence
  Description of Artificial Sequence: Synthetic oligonucleotide
  Antisense strand to SEQ ID NO: 1204936
ugagaagugacucaggucu

SEQ ID NO: 1204938 - RNA, 19 nt, Artificial Sequence
  Description of Artificial Sequence: Synthetic oligonucleotide
  Sense strand starting at position 3154 of SEQ ID NO: 917053
gcaacuccugguugagaug

SEQ ID NO: 1204939 - RNA, 19 nt, Artificial Sequence
  Description of Artificial Sequence: Synthetic oligonucleotide
  Antisense strand to SEQ ID NO: 1204938
caucucaaccaggaguugc

SEQ ID NO: 1204940 - RNA, 19 nt, Artificial Sequence
  Description of Artificial Sequence: Synthetic oligonucleotide
  Sense strand starting at position 3165 of SEQ ID NO: 917053
uugagaugggcucagccaa

SEQ ID NO: 1204941 - RNA, 19 nt, Artificial Sequence
  Description of Artificial Sequence: Synthetic oligonucleotide
  Antisense strand to SEQ ID NO: 1204940
uuggcugagcccaucucaa

SEQ ID NO: 1204942 - RNA, 19 nt, Artificial Sequence
  Description of Artificial Sequence: Synthetic oligonucleotide
  Sense strand starting at position 3313 of SEQ ID NO: 917053
ggcagagaaugucugaauu

SEQ ID NO: 1204943 - RNA, 19 nt, Artificial Sequence
  Description of Artificial Sequence: Synthetic oligonucleotide
  Antisense strand to SEQ ID NO: 1204942
aauucagacauucucugcc

SEQ ID NO: 1204944 - RNA, 19 nt, Artificial Sequence
  Description of Artificial Sequence: Synthetic oligonucleotide
  Sense strand starting at position 3446 of SEQ ID NO: 917053
ggcaauuccuuccuggaau

SEQ ID NO: 1204945 - RNA, 19 nt, Artificial Sequence
  Description of Artificial Sequence: Synthetic oligonucleotide
  Antisense strand to SEQ ID NO: 1204944
auuccaggaaggaauugcc

SEQ ID NO: 1204946 - RNA, 19 nt, Artificial Sequence
  Description of Artificial Sequence: Synthetic oligonucleotide
  Sense strand starting at position 3659 of SEQ ID NO: 917053
agcguugggcccagggaau

SEQ ID NO: 1204947 - RNA, 19 nt, Artificial Sequence
  Description of Artificial Sequence: Synthetic oligonucleotide
  Antisense strand to SEQ ID NO: 1204946
auucccugggcccaacgcu

SEQ ID NO: 1204948 - RNA, 19 nt, Artificial Sequence
  Description of Artificial Sequence: Synthetic oligonucleotide
  Sense strand starting at position 57 of SEQ ID NO: 917054
ugccuuuguaaagagugau

SEQ ID NO: 1204949 - RNA, 19 nt, Artificial Sequence
  Description of Artificial Sequence: Synthetic oligonucleotide
  Antisense strand to SEQ ID NO: 1204948
aucacucuuuacaaaggca

SEQ ID NO: 1204950 - RNA, 19 nt, Artificial Sequence
  Description of Artificial Sequence: Synthetic oligonucleotide
  Sense strand starting at position 60 of SEQ ID NO: 917054
cuuuguaaagagugaugga

SEQ ID NO: 1204951 - RNA, 19 nt, Artificial Sequence
  Description of Artificial Sequence: Synthetic oligonucleotide
  Antisense strand to SEQ ID NO: 1204950
uccaucacucuuuacaaag

SEQ ID NO: 1204952 - RNA, 19 nt, Artificial Sequence
  Description of Artificial Sequence: Synthetic oligonucleotide
  Sense strand starting at position 122 of SEQ ID NO: 917054
gauccaaggcuuugagcaa

SEQ ID NO: 1204953 - RNA, 19 nt, Artificial Sequence
  Description of Artificial Sequence: Synthetic oligonucleotide
  Antisense strand to SEQ ID NO: 1204952
uugcucaaagccuuggauc

SEQ ID NO: 1204954 - RNA, 19 nt, Artificial Sequence
  Description of Artificial Sequence: Synthetic oligonucleotide
  Sense strand starting at position 129 of SEQ ID NO: 917054
ggcuuugagcaacaacaga

SEQ ID NO: 1204955 - RNA, 19 nt, Artificial Sequence
  Description of Artificial Sequence: Synthetic oligonucleotide
  Antisense strand to SEQ ID NO: 1204954
ucuguuguugcucaaagcc

SEQ ID NO: 1204956 - RNA, 19 nt, Artificial Sequence
  Description of Artificial Sequence: Synthetic oligonucleotide
  Sense strand starting at position 171 of SEQ ID NO: 917054
cucaguggccuugaacauu

SEQ ID NO: 1204957 - RNA, 19 nt, Artificial Sequence
  Description of Artificial Sequence: Synthetic oligonucleotide
  Antisense strand to SEQ ID NO: 1204956
aauguucaaggccacugag

SEQ ID NO: 1204958 - RNA, 19 nt, Artificial Sequence
  Description of Artificial Sequence: Synthetic oligonucleotide
  Sense strand starting at position 187 of SEQ ID NO: 917054
auuucucugcugugauaug

SEQ ID NO: 1204959 - RNA, 19 nt, Artificial Sequence
  Description of Artificial Sequence: Synthetic oligonucleotide
  Antisense strand to SEQ ID NO: 1204958
cauaucacagcagagaaau

SEQ ID NO: 1204960 - RNA, 19 nt, Artificial Sequence
  Description of Artificial Sequence: Synthetic oligonucleotide
  Sense strand starting at position 362 of SEQ ID NO: 917054
accaaauaugcuggaaguu

SEQ ID NO: 1204961 - RNA, 19 nt, Artificial Sequence
  Description of Artificial Sequence: Synthetic oligonucleotide
  Antisense strand to SEQ ID NO: 1204960
aacuuccagcauauuuggu

SEQ ID NO: 1204962 - RNA, 19 nt, Artificial Sequence
  Description of Artificial Sequence: Synthetic oligonucleotide
  Sense strand starting at position 372 of SEQ ID NO: 917054
cuggaaguugguuagcaaa

SEQ ID NO: 1204963 - RNA, 19 nt, Artificial Sequence
  Description of Artificial Sequence: Synthetic oligonucleotide
  Antisense strand to SEQ ID NO: 1204962
uuugcuaaccaacuuccag

SEQ ID NO: 1204964 - RNA, 19 nt, Artificial Sequence
  Description of Artificial Sequence: Synthetic oligonucleotide
  Sense strand starting at position 374 of SEQ ID NO: 917054
ggaaguugguuagcaaaga

SEQ ID NO: 1204965 - RNA, 19 nt, Artificial Sequence
  Description of Artificial Sequence: Synthetic oligonucleotide
  Antisense strand to SEQ ID NO: 1204964
ucuuugcuaaccaacuucc

SEQ ID NO: 1204966 - RNA, 19 nt, Artificial Sequence
  Description of Artificial Sequence: Synthetic oligonucleotide
  Sense strand starting at position 590 of SEQ ID NO: 917054
ggagcucugaagugauuaa

SEQ ID NO: 1204967 - RNA, 19 nt, Artificial Sequence
  Description of Artificial Sequence: Synthetic oligonucleotide
  Antisense strand to SEQ ID NO: 1204966
uuaaucacuucagagcucc

SEQ ID NO: 1204968 - RNA, 19 nt, Artificial Sequence
  Description of Artificial Sequence: Synthetic oligonucleotide
  Sense strand starting at position 602 of SEQ ID NO: 917054
ugauuaaacuccucuguug

SEQ ID NO: 1204969 - RNA, 19 nt, Artificial Sequence
  Description of Artificial Sequence: Synthetic oligonucleotide
  Antisense strand to SEQ ID NO: 1204968
caacagaggaguuuaauca

SEQ ID NO: 1204970 - RNA, 19 nt, Artificial Sequence
  Description of Artificial Sequence: Synthetic oligonucleotide
  Sense strand starting at position 604 of SEQ ID NO: 917054
auuaaacuccucuguugga

SEQ ID NO: 1204971 - RNA, 19 nt, Artificial Sequence
  Description of Artificial Sequence: Synthetic oligonucleotide
  Antisense strand to SEQ ID NO: 1204970
uccaacagaggaguuuaau

SEQ ID NO: 1204972 - RNA, 19 nt, Artificial Sequence
  Description of Artificial Sequence: Synthetic oligonucleotide
  Sense strand starting at position 605 of SEQ ID NO: 917054
uuaaacuccucuguuggaa

SEQ ID NO: 1204973 - RNA, 19 nt, Artificial Sequence
  Description of Artificial Sequence: Synthetic oligonucleotide
  Antisense strand to SEQ ID NO: 1204972
uuccaacagaggaguuuaa

SEQ ID NO: 1204974 - RNA, 19 nt, Artificial Sequence
  Description of Artificial Sequence: Synthetic oligonucleotide
  Sense strand starting at position 727 of SEQ ID NO: 917054
gucugaggcccagaucaaa

SEQ ID NO: 1204975 - RNA, 19 nt, Artificial Sequence
  Description of Artificial Sequence: Synthetic oligonucleotide
  Antisense strand to SEQ ID NO: 1204974
uuugaucugggccucagac

SEQ ID NO: 1204976 - RNA, 19 nt, Artificial Sequence
  Description of Artificial Sequence: Synthetic oligonucleotide
  Sense strand starting at position 879 of SEQ ID NO: 917054
cugguucuggcagaauaca

SEQ ID NO: 1204977 - RNA, 19 nt, Artificial Sequence
  Description of Artificial Sequence: Synthetic oligonucleotide
  Antisense strand to SEQ ID NO: 1204976
uguauucugccagaaccag

SEQ ID NO: 1204978 - RNA, 19 nt, Artificial Sequence
  Description of Artificial Sequence: Synthetic oligonucleotide
  Sense strand starting at position 1084 of SEQ ID NO: 917054
uguguaacuagccaagagu

SEQ ID NO: 1204979 - RNA, 19 nt, Artificial Sequence
  Description of Artificial Sequence: Synthetic oligonucleotide
  Antisense strand to SEQ ID NO: 1204978
acucuuggcuaguuacaca

SEQ ID NO: 1204980 - RNA, 19 nt, Artificial Sequence
  Description of Artificial Sequence: Synthetic oligonucleotide
  Sense strand starting at position 1358 of SEQ ID NO: 917054
aguccacucccagacuauu

SEQ ID NO: 1204981 - RNA, 19 nt, Artificial Sequence
  Description of Artificial Sequence: Synthetic oligonucleotide
  Antisense strand to SEQ ID NO: 1204980
aauagucugggaguggacu

SEQ ID NO: 1204982 - RNA, 19 nt, Artificial Sequence
  Description of Artificial Sequence: Synthetic oligonucleotide
  Sense strand starting at position 1584 of SEQ ID NO: 917054
ggcagugagugacuacaau

SEQ ID NO: 1204983 - RNA, 19 nt, Artificial Sequence
  Description of Artificial Sequence: Synthetic oligonucleotide
  Antisense strand to SEQ ID NO: 1204982
auuguagucacucacugcc

SEQ ID NO: 1204984 - RNA, 19 nt, Artificial Sequence
  Description of Artificial Sequence: Synthetic oligonucleotide
  Sense strand starting at position 1796 of SEQ ID NO: 917054
gaaggaagucgugcucguu

SEQ ID NO: 1204985 - RNA, 19 nt, Artificial Sequence
  Description of Artificial Sequence: Synthetic oligonucleotide
  Antisense strand to SEQ ID NO: 1204984
aacgagcacgacuuccuuc

SEQ ID NO: 1204986 - RNA, 19 nt, Artificial Sequence
  Description of Artificial Sequence: Synthetic oligonucleotide
  Sense strand starting at position 2020 of SEQ ID NO: 917054
caaugagcgccacucguua

SEQ ID NO: 1204987 - RNA, 19 nt, Artificial Sequence
  Description of Artificial Sequence: Synthetic oligonucleotide
  Antisense strand to SEQ ID NO: 1204986
uaacgaguggcgcucauug

SEQ ID NO: 1204988 - RNA, 19 nt, Artificial Sequence
  Description of Artificial Sequence: Synthetic oligonucleotide
  Sense strand starting at position 2122 of SEQ ID NO: 917054
gacugacgccaaugagaag

SEQ ID NO: 1204989 - RNA, 19 nt, Artificial Sequence
  Description of Artificial Sequence: Synthetic oligonucleotide
  Antisense strand to SEQ ID NO: 1204988
cuucucauuggcgucaguc

SEQ ID NO: 1204990 - RNA, 19 nt, Artificial Sequence
  Description of Artificial Sequence: Synthetic oligonucleotide
  Sense strand starting at position 2148 of SEQ ID NO: 917054
aaggcaauugaugguugaa

SEQ ID NO: 1204991 - RNA, 19 nt, Artificial Sequence
  Description of Artificial Sequence: Synthetic oligonucleotide
  Antisense strand to SEQ ID NO: 1204990
uucaaccaucaauugccuu

SEQ ID NO: 1204992 - RNA, 19 nt, Artificial Sequence
  Description of Artificial Sequence: Synthetic oligonucleotide
  Sense strand starting at position 2150 of SEQ ID NO: 917054
ggcaauugaugguugaaag

SEQ ID NO: 1204993 - RNA, 19 nt, Artificial Sequence
  Description of Artificial Sequence: Synthetic oligonucleotide
  Antisense strand to SEQ ID NO: 1204992
cuuucaaccaucaauugcc

SEQ ID NO: 1204994 - RNA, 19 nt, Artificial Sequence
  Description of Artificial Sequence: Synthetic oligonucleotide
  Sense strand starting at position 2151 of SEQ ID NO: 917054
gcaauugaugguugaaaga

SEQ ID NO: 1204995 - RNA, 19 nt, Artificial Sequence
  Description of Artificial Sequence: Synthetic oligonucleotide
  Antisense strand to SEQ ID NO: 1204994
ucuuucaaccaucaauugc

SEQ ID NO: 1204996 - RNA, 19 nt, Artificial Sequence
  Description of Artificial Sequence: Synthetic oligonucleotide
  Sense strand starting at position 2379 of SEQ ID NO: 917054
gacaguugucuugguauuu

SEQ ID NO: 1204997 - RNA, 19 nt, Artificial Sequence
  Description of Artificial Sequence: Synthetic oligonucleotide
  Antisense strand to SEQ ID NO: 1204996
aaauaccaagacaacuguc

SEQ ID NO: 1204998 - RNA, 19 nt, Artificial Sequence
  Description of Artificial Sequence: Synthetic oligonucleotide
  Sense strand starting at position 2384 of SEQ ID NO: 917054
uugucuugguauuuguaaa

SEQ ID NO: 1204999 - RNA, 19 nt, Artificial Sequence
  Description of Artificial Sequence: Synthetic oligonucleotide
  Antisense strand to SEQ ID NO: 1204998
uuuacaaauaccaagacaa

SEQ ID NO: 1205000 - RNA, 19 nt, Artificial Sequence
  Description of Artificial Sequence: Synthetic oligonucleotide
  Sense strand starting at position 2385 of SEQ ID NO: 917054
ugucuugguauuuguaaag

SEQ ID NO: 1205001 - RNA, 19 nt, Artificial Sequence
  Description of Artificial Sequence: Synthetic oligonucleotide
  Antisense strand to SEQ ID NO: 1205000
cuuuacaaauaccaagaca

SEQ ID NO: 1205002 - RNA, 19 nt, Artificial Sequence
  Description of Artificial Sequence: Synthetic oligonucleotide
  Sense strand starting at position 2456 of SEQ ID NO: 917054
gcugucaaccaauaaagcu

SEQ ID NO: 1205003 - RNA, 19 nt, Artificial Sequence
  Description of Artificial Sequence: Synthetic oligonucleotide
  Antisense strand to SEQ ID NO: 1205002
agcuuuauugguugacagc

SEQ ID NO: 1205004 - RNA, 19 nt, Artificial Sequence
  Description of Artificial Sequence: Synthetic oligonucleotide
  Sense strand starting at position 2518 of SEQ ID NO: 917054
gugcgcauaauaguguaau

SEQ ID NO: 1205005 - RNA, 19 nt, Artificial Sequence
  Description of Artificial Sequence: Synthetic oligonucleotide
  Antisense strand to SEQ ID NO: 1205004
auuacacuauuaugcgcac

SEQ ID NO: 1205006 - RNA, 19 nt, Artificial Sequence
  Description of Artificial Sequence: Synthetic oligonucleotide
  Sense strand starting at position 2524 of SEQ ID NO: 917054
auaauaguguaaucacuca

SEQ ID NO: 1205007 - RNA, 19 nt, Artificial Sequence
  Description of Artificial Sequence: Synthetic oligonucleotide
  Antisense strand to SEQ ID NO: 1205006
ugagugauuacacuauuau

SEQ ID NO: 1205008 - RNA, 19 nt, Artificial Sequence
  Description of Artificial Sequence: Synthetic oligonucleotide
  Sense strand starting at position 2559 of SEQ ID NO: 917054
aauaauucguucuugagac

SEQ ID NO: 1205009 - RNA, 19 nt, Artificial Sequence
  Description of Artificial Sequence: Synthetic oligonucleotide
  Antisense strand to SEQ ID NO: 1205008
gucucaagaacgaauuauu

SEQ ID NO: 1205010 - RNA, 19 nt, Artificial Sequence
  Description of Artificial Sequence: Synthetic oligonucleotide
  Sense strand starting at position 2561 of SEQ ID NO: 917054
uaauucguucuugagacua

SEQ ID NO: 1205011 - RNA, 19 nt, Artificial Sequence
  Description of Artificial Sequence: Synthetic oligonucleotide
  Antisense strand to SEQ ID NO: 1205010
uagucucaagaacgaauua

SEQ ID NO: 1205012 - RNA, 19 nt, Artificial Sequence
  Description of Artificial Sequence: Synthetic oligonucleotide
  Sense strand starting at position 2648 of SEQ ID NO: 917054
gaaguacccuuaucaagga

SEQ ID NO: 1205013 - RNA, 19 nt, Artificial Sequence
  Description of Artificial Sequence: Synthetic oligonucleotide
  Antisense strand to SEQ ID NO: 1205012
uccuugauaaggguacuuc

SEQ ID NO: 1205014 - RNA, 19 nt, Artificial Sequence
  Description of Artificial Sequence: Synthetic oligonucleotide
  Sense strand starting at position 2847 of SEQ ID NO: 917054
ugguaacuucgggaguuga

SEQ ID NO: 1205015 - RNA, 19 nt, Artificial Sequence
  Description of Artificial Sequence: Synthetic oligonucleotide
  Antisense strand to SEQ ID NO: 1205014
ucaacucccgaaguuacca

SEQ ID NO: 1205016 - RNA, 19 nt, Artificial Sequence
  Description of Artificial Sequence: Synthetic oligonucleotide
  Sense strand starting at position 3097 of SEQ ID NO: 917054
agaccugagucacuucuca

SEQ ID NO: 1205017 - RNA, 19 nt, Artificial Sequence
  Description of Artificial Sequence: Synthetic oligonucleotide
  Antisense strand to SEQ ID NO: 1205016
ugagaagugacucaggucu

SEQ ID NO: 1205018 - RNA, 19 nt, Artificial Sequence
  Description of Artificial Sequence: Synthetic oligonucleotide
  Sense strand starting at position 3160 of SEQ ID NO: 917054
gcaacuccugguugagaug

SEQ ID NO: 1205019 - RNA, 19 nt, Artificial Sequence
  Description of Artificial Sequence: Synthetic oligonucleotide
  Antisense strand to SEQ ID NO: 1205018
caucucaaccaggaguugc

SEQ ID NO: 1205020 - RNA, 19 nt, Artificial Sequence
  Description of Artificial Sequence: Synthetic oligonucleotide
  Sense strand starting at position 3171 of SEQ ID NO: 917054
uugagaugggcucagccaa

SEQ ID NO: 1205021 - RNA, 19 nt, Artificial Sequence
  Description of Artificial Sequence: Synthetic oligonucleotide
  Antisense strand to SEQ ID NO: 1205020
uuggcugagcccaucucaa

SEQ ID NO: 1205022 - RNA, 19 nt, Artificial Sequence
  Description of Artificial Sequence: Synthetic oligonucleotide
  Sense strand starting at position 3319 of SEQ ID NO: 917054
ggcagagaaugucugaauu

SEQ ID NO: 1205023 - RNA, 19 nt, Artificial Sequence
  Description of Artificial Sequence: Synthetic oligonucleotide
  Antisense strand to SEQ ID NO: 1205022
aauucagacauucucugcc

SEQ ID NO: 1205024 - RNA, 19 nt, Artificial Sequence
  Description of Artificial Sequence: Synthetic oligonucleotide
  Sense strand starting at position 3452 of SEQ ID NO: 917054
ggcaauuccuuccuggaau

SEQ ID NO: 1205025 - RNA, 19 nt, Artificial Sequence
  Description of Artificial Sequence: Synthetic oligonucleotide
  Antisense strand to SEQ ID NO: 1205024
auuccaggaaggaauugcc

SEQ ID NO: 1205026 - RNA, 19 nt, Artificial Sequence
  Description of Artificial Sequence: Synthetic oligonucleotide
  Sense strand starting at position 3665 of SEQ ID NO: 917054
agcguugggcccagggaau

SEQ ID NO: 1205027 - RNA, 19 nt, Artificial Sequence
  Description of Artificial Sequence: Synthetic oligonucleotide
  Antisense strand to SEQ ID NO: 1205026
auucccugggcccaacgcu

SEQ ID NO: 1205028 - RNA, 19 nt, Artificial Sequence
  Description of Artificial Sequence: Synthetic oligonucleotide
  Sense strand starting at position 23 of SEQ ID NO: 917055
gagauuggaucgccaaggu

SEQ ID NO: 1205029 - RNA, 19 nt, Artificial Sequence
  Description of Artificial Sequence: Synthetic oligonucleotide
  Antisense strand to SEQ ID NO: 1205028
accuuggcgauccaaucuc

SEQ ID NO: 1205030 - RNA, 19 nt, Artificial Sequence
  Description of Artificial Sequence: Synthetic oligonucleotide
  Sense strand starting at position 77 of SEQ ID NO: 917055
ggaauaacgacaugaugca

SEQ ID NO: 1205031 - RNA, 19 nt, Artificial Sequence
  Description of Artificial Sequence: Synthetic oligonucleotide
  Antisense strand to SEQ ID NO: 1205030
ugcaucaugucguuauucc

SEQ ID NO: 1205032 - RNA, 19 nt, Artificial Sequence
  Description of Artificial Sequence: Synthetic oligonucleotide
  Sense strand starting at position 447 of SEQ ID NO: 917055
agagucagaguaugguuaa

SEQ ID NO: 1205033 - RNA, 19 nt, Artificial Sequence
  Description of Artificial Sequence: Synthetic oligonucleotide
  Antisense strand to SEQ ID NO: 1205032
uuaaccauacucugacucu

SEQ ID NO: 1205034 - RNA, 19 nt, Artificial Sequence
  Description of Artificial Sequence: Synthetic oligonucleotide
  Sense strand starting at position 791 of SEQ ID NO: 917055
guggcuacuguaugaaaca

SEQ ID NO: 1205035 - RNA, 19 nt, Artificial Sequence
  Description of Artificial Sequence: Synthetic oligonucleotide
  Antisense strand to SEQ ID NO: 1205034
uguuucauacaguagccac

SEQ ID NO: 1205036 - RNA, 19 nt, Artificial Sequence
  Description of Artificial Sequence: Synthetic oligonucleotide
  Sense strand starting at position 900 of SEQ ID NO: 917055
cuugaagauugacuaguau

SEQ ID NO: 1205037 - RNA, 19 nt, Artificial Sequence
  Description of Artificial Sequence: Synthetic oligonucleotide
  Antisense strand to SEQ ID NO: 1205036
auacuagucaaucuucaag

SEQ ID NO: 1205038 - RNA, 19 nt, Artificial Sequence
  Description of Artificial Sequence: Synthetic oligonucleotide
  Sense strand starting at position 1276 of SEQ ID NO: 917055
uuagucucgcuagaucuau

SEQ ID NO: 1205039 - RNA, 19 nt, Artificial Sequence
  Description of Artificial Sequence: Synthetic oligonucleotide
  Antisense strand to SEQ ID NO: 1205038
auagaucuagcgagacuaa

SEQ ID NO: 1205040 - RNA, 19 nt, Artificial Sequence
  Description of Artificial Sequence: Synthetic oligonucleotide
  Sense strand starting at position 1431 of SEQ ID NO: 917055
cgcuguauauuugcccuua

SEQ ID NO: 1205041 - RNA, 19 nt, Artificial Sequence
  Description of Artificial Sequence: Synthetic oligonucleotide
  Antisense strand to SEQ ID NO: 1205040
uaagggcaaauauacagcg

SEQ ID NO: 1205042 - RNA, 19 nt, Artificial Sequence
  Description of Artificial Sequence: Synthetic oligonucleotide
  Sense strand starting at position 1481 of SEQ ID NO: 917055
ccaauucggucuuuaaaga

SEQ ID NO: 1205043 - RNA, 19 nt, Artificial Sequence
  Description of Artificial Sequence: Synthetic oligonucleotide
  Antisense strand to SEQ ID NO: 1205042
ucuuuaaagaccgaauugg

SEQ ID NO: 1205044 - RNA, 19 nt, Artificial Sequence
  Description of Artificial Sequence: Synthetic oligonucleotide
  Sense strand starting at position 1482 of SEQ ID NO: 917055
caauucggucuuuaaagau

SEQ ID NO: 1205045 - RNA, 19 nt, Artificial Sequence
  Description of Artificial Sequence: Synthetic oligonucleotide
  Antisense strand to SEQ ID NO: 1205044
aucuuuaaagaccgaauug

SEQ ID NO: 1205046 - RNA, 19 nt, Artificial Sequence
  Description of Artificial Sequence: Synthetic oligonucleotide
  Sense strand starting at position 1527 of SEQ ID NO: 917055
agcaaucuccuggaauagu

SEQ ID NO: 1205047 - RNA, 19 nt, Artificial Sequence
  Description of Artificial Sequence: Synthetic oligonucleotide
  Antisense strand to SEQ ID NO: 1205046
acuauuccaggagauugcu

SEQ ID NO: 1205048 - RNA, 19 nt, Artificial Sequence
  Description of Artificial Sequence: Synthetic oligonucleotide
  Sense strand starting at position 2144 of SEQ ID NO: 917055
ucgguaaagguuuagaaga

SEQ ID NO: 1205049 - RNA, 19 nt, Artificial Sequence
  Description of Artificial Sequence: Synthetic oligonucleotide
  Antisense strand to SEQ ID NO: 1205048
ucuucuaaaccuuuaccga

SEQ ID NO: 1205050 - RNA, 19 nt, Artificial Sequence
  Description of Artificial Sequence: Synthetic oligonucleotide
  Sense strand starting at position 2193 of SEQ ID NO: 917055
accuguaaucguuaucaac

SEQ ID NO: 1205051 - RNA, 19 nt, Artificial Sequence
  Description of Artificial Sequence: Synthetic oligonucleotide
  Antisense strand to SEQ ID NO: 1205050
guugauaacgauuacaggu

SEQ ID NO: 1205052 - RNA, 19 nt, Artificial Sequence
  Description of Artificial Sequence: Synthetic oligonucleotide
  Sense strand starting at position 2274 of SEQ ID NO: 917055
caguaaagcuuauuaggga

SEQ ID NO: 1205053 - RNA, 19 nt, Artificial Sequence
  Description of Artificial Sequence: Synthetic oligonucleotide
  Antisense strand to SEQ ID NO: 1205052
ucccuaauaagcuuuacug

SEQ ID NO: 1205054 - RNA, 19 nt, Artificial Sequence
  Description of Artificial Sequence: Synthetic oligonucleotide
  Sense strand starting at position 2281 of SEQ ID NO: 917055
gcuuauuagggauguuaau

SEQ ID NO: 1205055 - RNA, 19 nt, Artificial Sequence
  Description of Artificial Sequence: Synthetic oligonucleotide
  Antisense strand to SEQ ID NO: 1205054
auuaacaucccuaauaagc

SEQ ID NO: 1205056 - RNA, 19 nt, Artificial Sequence
  Description of Artificial Sequence: Synthetic oligonucleotide
  Sense strand starting at position 2293 of SEQ ID NO: 917055
uguuaauacaaaggaggua

SEQ ID NO: 1205057 - RNA, 19 nt, Artificial Sequence
  Description of Artificial Sequence: Synthetic oligonucleotide
  Antisense strand to SEQ ID NO: 1205056
uaccuccuuuguauuaaca

SEQ ID NO: 1205058 - RNA, 19 nt, Artificial Sequence
  Description of Artificial Sequence: Synthetic oligonucleotide
  Sense strand starting at position 2646 of SEQ ID NO: 917055
gccgguacuguguauauuu

SEQ ID NO: 1205059 - RNA, 19 nt, Artificial Sequence
  Description of Artificial Sequence: Synthetic oligonucleotide
  Antisense strand to SEQ ID NO: 1205058
aaauauacacaguaccggc

SEQ ID NO: 1205060 - RNA, 19 nt, Artificial Sequence
  Description of Artificial Sequence: Synthetic oligonucleotide
  Sense strand starting at position 2752 of SEQ ID NO: 917055
accacuacgcuguaaauaa

SEQ ID NO: 1205061 - RNA, 19 nt, Artificial Sequence
  Description of Artificial Sequence: Synthetic oligonucleotide
  Antisense strand to SEQ ID NO: 1205060
uuauuuacagcguaguggu

SEQ ID NO: 1205062 - RNA, 19 nt, Artificial Sequence
  Description of Artificial Sequence: Synthetic oligonucleotide
  Sense strand starting at position 2818 of SEQ ID NO: 917055
gcacaaccgcuguuaaugu

SEQ ID NO: 1205063 - RNA, 19 nt, Artificial Sequence
  Description of Artificial Sequence: Synthetic oligonucleotide
  Antisense strand to SEQ ID NO: 1205062
acauuaacagcgguugugc

SEQ ID NO: 1205064 - RNA, 19 nt, Artificial Sequence
  Description of Artificial Sequence: Synthetic oligonucleotide
  Sense strand starting at position 2988 of SEQ ID NO: 917055
uugagaguccucuguggac

SEQ ID NO: 1205065 - RNA, 19 nt, Artificial Sequence
  Description of Artificial Sequence: Synthetic oligonucleotide
  Antisense strand to SEQ ID NO: 1205064
guccacagaggacucucaa

SEQ ID NO: 1205066 - RNA, 19 nt, Artificial Sequence
  Description of Artificial Sequence: Synthetic oligonucleotide
  Sense strand starting at position 2990 of SEQ ID NO: 917055
gagaguccucuguggacca

SEQ ID NO: 1205067 - RNA, 19 nt, Artificial Sequence
  Description of Artificial Sequence: Synthetic oligonucleotide
  Antisense strand to SEQ ID NO: 1205066
ugguccacagaggacucuc

SEQ ID NO: 1205068 - RNA, 19 nt, Artificial Sequence
  Description of Artificial Sequence: Synthetic oligonucleotide
  Sense strand starting at position 3325 of SEQ ID NO: 917055
cuggaaauacuuggucuga

SEQ ID NO: 1205069 - RNA, 19 nt, Artificial Sequence
  Description of Artificial Sequence: Synthetic oligonucleotide
  Antisense strand to SEQ ID NO: 1205068
ucagaccaaguauuuccag

SEQ ID NO: 1205070 - RNA, 19 nt, Artificial Sequence
  Description of Artificial Sequence: Synthetic oligonucleotide
  Sense strand starting at position 3329 of SEQ ID NO: 917055
aaauacuuggucugagaug

SEQ ID NO: 1205071 - RNA, 19 nt, Artificial Sequence
  Description of Artificial Sequence: Synthetic oligonucleotide
  Antisense strand to SEQ ID NO: 1205070
caucucagaccaaguauuu

SEQ ID NO: 1205072 - RNA, 19 nt, Artificial Sequence
  Description of Artificial Sequence: Synthetic oligonucleotide
  Sense strand starting at position 3356 of SEQ ID NO: 917055
uuagucaaggagugauguu

SEQ ID NO: 1205073 - RNA, 19 nt, Artificial Sequence
  Description of Artificial Sequence: Synthetic oligonucleotide
  Antisense strand to SEQ ID NO: 1205072
aacaucacuccuugacuaa

SEQ ID NO: 1205074 - RNA, 19 nt, Artificial Sequence
  Description of Artificial Sequence: Synthetic oligonucleotide
  Sense strand starting at position 3357 of SEQ ID NO: 917055
uagucaaggagugauguua

SEQ ID NO: 1205075 - RNA, 19 nt, Artificial Sequence
  Description of Artificial Sequence: Synthetic oligonucleotide
  Antisense strand to SEQ ID NO: 1205074
uaacaucacuccuugacua

SEQ ID NO: 1205076 - RNA, 19 nt, Artificial Sequence
  Description of Artificial Sequence: Synthetic oligonucleotide
  Sense strand starting at position 3365 of SEQ ID NO: 917055
gagugauguuaaguagaca

SEQ ID NO: 1205077 - RNA, 19 nt, Artificial Sequence
  Description of Artificial Sequence: Synthetic oligonucleotide
  Antisense strand to SEQ ID NO: 1205076
ugucuacuuaacaucacuc

SEQ ID NO: 1205078 - RNA, 19 nt, Artificial Sequence
  Description of Artificial Sequence: Synthetic oligonucleotide
  Sense strand starting at position 3385 of SEQ ID NO: 917055
uuggauauauuguuguaca

SEQ ID NO: 1205079 - RNA, 19 nt, Artificial Sequence
  Description of Artificial Sequence: Synthetic oligonucleotide
  Antisense strand to SEQ ID NO: 1205078
uguacaacaauauauccaa

SEQ ID NO: 1205080 - RNA, 19 nt, Artificial Sequence
  Description of Artificial Sequence: Synthetic oligonucleotide
  Sense strand starting at position 3428 of SEQ ID NO: 917055
gcagacgugacuuaaauac

SEQ ID NO: 1205081 - RNA, 19 nt, Artificial Sequence
  Description of Artificial Sequence: Synthetic oligonucleotide
  Antisense strand to SEQ ID NO: 1205080
guauuuaagucacgucugc

SEQ ID NO: 1205082 - RNA, 19 nt, Artificial Sequence
  Description of Artificial Sequence: Synthetic oligonucleotide
  Sense strand starting at position 3447 of SEQ ID NO: 917055
accuaaauaccucaagugu

SEQ ID NO: 1205083 - RNA, 19 nt, Artificial Sequence
  Description of Artificial Sequence: Synthetic oligonucleotide
  Antisense strand to SEQ ID NO: 1205082
acacuugagguauuuaggu

SEQ ID NO: 1205084 - RNA, 19 nt, Artificial Sequence
  Description of Artificial Sequence: Synthetic oligonucleotide
  Sense strand starting at position 3462 of SEQ ID NO: 917055
gugugaggcauuugcgacu

SEQ ID NO: 1205085 - RNA, 19 nt, Artificial Sequence
  Description of Artificial Sequence: Synthetic oligonucleotide
  Antisense strand to SEQ ID NO: 1205084
agucgcaaaugccucacac

SEQ ID NO: 1205086 - RNA, 19 nt, Artificial Sequence
  Description of Artificial Sequence: Synthetic oligonucleotide
  Sense strand starting at position 3512 of SEQ ID NO: 917055
uaguuauggcauggaagca

SEQ ID NO: 1205087 - RNA, 19 nt, Artificial Sequence
  Description of Artificial Sequence: Synthetic oligonucleotide
  Antisense strand to SEQ ID NO: 1205086
ugcuuccaugccauaacua

SEQ ID NO: 1205088 - RNA, 19 nt, Artificial Sequence
  Description of Artificial Sequence: Synthetic oligonucleotide
  Sense strand starting at position 3550 of SEQ ID NO: 917055
cugcaaauucgaggauaga

SEQ ID NO: 1205089 - RNA, 19 nt, Artificial Sequence
  Description of Artificial Sequence: Synthetic oligonucleotide
  Antisense strand to SEQ ID NO: 1205088
ucuauccucgaauuugcag

SEQ ID NO: 1205090 - RNA, 19 nt, Artificial Sequence
  Description of Artificial Sequence: Synthetic oligonucleotide
  Sense strand starting at position 3565 of SEQ ID NO: 917055
uagagaagugguugcugga

SEQ ID NO: 1205091 - RNA, 19 nt, Artificial Sequence
  Description of Artificial Sequence: Synthetic oligonucleotide
  Antisense strand to SEQ ID NO: 1205090
uccagcaaccacuucucua

SEQ ID NO: 1205092 - RNA, 19 nt, Artificial Sequence
  Description of Artificial Sequence: Synthetic oligonucleotide
  Sense strand starting at position 3618 of SEQ ID NO: 917055
aguacagucuaguuggaag

SEQ ID NO: 1205093 - RNA, 19 nt, Artificial Sequence
  Description of Artificial Sequence: Synthetic oligonucleotide
  Antisense strand to SEQ ID NO: 1205092
cuuccaacuagacuguacu

SEQ ID NO: 1205094 - RNA, 19 nt, Artificial Sequence
  Description of Artificial Sequence: Synthetic oligonucleotide
  Sense strand starting at position 3620 of SEQ ID NO: 917055
uacagucuaguuggaagaa

SEQ ID NO: 1205095 - RNA, 19 nt, Artificial Sequence
  Description of Artificial Sequence: Synthetic oligonucleotide
  Antisense strand to SEQ ID NO: 1205094
uucuuccaacuagacugua

SEQ ID NO: 1205096 - RNA, 19 nt, Artificial Sequence
  Description of Artificial Sequence: Synthetic oligonucleotide
  Sense strand starting at position 3644 of SEQ ID NO: 917055
gugaaauaugcauggauug

SEQ ID NO: 1205097 - RNA, 19 nt, Artificial Sequence
  Description of Artificial Sequence: Synthetic oligonucleotide
  Antisense strand to SEQ ID NO: 1205096
caauccaugcauauuucac

SEQ ID NO: 1205098 - RNA, 19 nt, Artificial Sequence
  Description of Artificial Sequence: Synthetic oligonucleotide
  Sense strand starting at position 3645 of SEQ ID NO: 917055
ugaaauaugcauggauuga

SEQ ID NO: 1205099 - RNA, 19 nt, Artificial Sequence
  Description of Artificial Sequence: Synthetic oligonucleotide
  Antisense strand to SEQ ID NO: 1205098
ucaauccaugcauauuuca

SEQ ID NO: 1205100 - RNA, 19 nt, Artificial Sequence
  Description of Artificial Sequence: Synthetic oligonucleotide
  Sense strand starting at position 3707 of SEQ ID NO: 917055
uguuauuggcauuaucaca

SEQ ID NO: 1205101 - RNA, 19 nt, Artificial Sequence
  Description of Artificial Sequence: Synthetic oligonucleotide
  Antisense strand to SEQ ID NO: 1205100
ugugauaaugccaauaaca

SEQ ID NO: 1205102 - RNA, 19 nt, Artificial Sequence
  Description of Artificial Sequence: Synthetic oligonucleotide
  Sense strand starting at position 3743 of SEQ ID NO: 917055
accacaggguuguucuaaa

SEQ ID NO: 1205103 - RNA, 19 nt, Artificial Sequence
  Description of Artificial Sequence: Synthetic oligonucleotide
  Antisense strand to SEQ ID NO: 1205102
uuuagaacaacccuguggu

SEQ ID NO: 1205104 - RNA, 19 nt, Artificial Sequence
  Description of Artificial Sequence: Synthetic oligonucleotide
  Sense strand starting at position 3970 of SEQ ID NO: 917055
guuagaagccugcaguuaa

SEQ ID NO: 1205105 - RNA, 19 nt, Artificial Sequence
  Description of Artificial Sequence: Synthetic oligonucleotide
  Antisense strand to SEQ ID NO: 1205104
uuaacugcaggcuucuaac

SEQ ID NO: 1205106 - RNA, 19 nt, Artificial Sequence
  Description of Artificial Sequence: Synthetic oligonucleotide
  Sense strand starting at position 3982 of SEQ ID NO: 917055
caguuaacugaggguagaa

SEQ ID NO: 1205107 - RNA, 19 nt, Artificial Sequence
  Description of Artificial Sequence: Synthetic oligonucleotide
  Antisense strand to SEQ ID NO: 1205106
uucuacccucaguuaacug

SEQ ID NO: 1205108 - RNA, 19 nt, Artificial Sequence
  Description of Artificial Sequence: Synthetic oligonucleotide
  Sense strand starting at position 124 of SEQ ID NO: 917056
cuccuugauuaagugaauu

SEQ ID NO: 1205109 - RNA, 19 nt, Artificial Sequence
  Description of Artificial Sequence: Synthetic oligonucleotide
  Antisense strand to SEQ ID NO: 1205108
aauucacuuaaucaaggag

SEQ ID NO: 1205110 - RNA, 19 nt, Artificial Sequence
  Description of Artificial Sequence: Synthetic oligonucleotide
  Sense strand starting at position 386 of SEQ ID NO: 917056
gaagcaguccaggauggua

SEQ ID NO: 1205111 - RNA, 19 nt, Artificial Sequence
  Description of Artificial Sequence: Synthetic oligonucleotide
  Antisense strand to SEQ ID NO: 1205110
uaccauccuggacugcuuc

SEQ ID NO: 1205112 - RNA, 19 nt, Artificial Sequence
  Description of Artificial Sequence: Synthetic oligonucleotide
  Sense strand starting at position 488 of SEQ ID NO: 917056
cguagauacuaucuggaag

SEQ ID NO: 1205113 - RNA, 19 nt, Artificial Sequence
  Description of Artificial Sequence: Synthetic oligonucleotide
  Antisense strand to SEQ ID NO: 1205112
cuuccagauaguaucuacg

SEQ ID NO: 1205114 - RNA, 19 nt, Artificial Sequence
  Description of Artificial Sequence: Synthetic oligonucleotide
  Sense strand starting at position 605 of SEQ ID NO: 917056
gugaaauggcuaugaagua

SEQ ID NO: 1205115 - RNA, 19 nt, Artificial Sequence
  Description of Artificial Sequence: Synthetic oligonucleotide
  Antisense strand to SEQ ID NO: 1205114
uacuucauagccauuucac

SEQ ID NO: 1205116 - RNA, 19 nt, Artificial Sequence
  Description of Artificial Sequence: Synthetic oligonucleotide
  Sense strand starting at position 643 of SEQ ID NO: 917056
uuacuacuuguugggaguu

SEQ ID NO: 1205117 - RNA, 19 nt, Artificial Sequence
  Description of Artificial Sequence: Synthetic oligonucleotide
  Antisense strand to SEQ ID NO: 1205116
aacucccaacaaguaguaa

SEQ ID NO: 1205118 - RNA, 19 nt, Artificial Sequence
  Description of Artificial Sequence: Synthetic oligonucleotide
  Sense strand starting at position 841 of SEQ ID NO: 917056
guuuguuuagccguaguuu

SEQ ID NO: 1205119 - RNA, 19 nt, Artificial Sequence
  Description of Artificial Sequence: Synthetic oligonucleotide
  Antisense strand to SEQ ID NO: 1205118
aaacuacggcuaaacaaac

SEQ ID NO: 1205120 - RNA, 19 nt, Artificial Sequence
  Description of Artificial Sequence: Synthetic oligonucleotide
  Sense strand starting at position 961 of SEQ ID NO: 917056
ccaacuauuugguaagacu

SEQ ID NO: 1205121 - RNA, 19 nt, Artificial Sequence
  Description of Artificial Sequence: Synthetic oligonucleotide
  Antisense strand to SEQ ID NO: 1205120
agucuuaccaaauaguugg

SEQ ID NO: 1205122 - RNA, 19 nt, Artificial Sequence
  Description of Artificial Sequence: Synthetic oligonucleotide
  Sense strand starting at position 968 of SEQ ID NO: 917056
uuugguaagacucggugau

SEQ ID NO: 1205123 - RNA, 19 nt, Artificial Sequence
  Description of Artificial Sequence: Synthetic oligonucleotide
  Antisense strand to SEQ ID NO: 1205122
aucaccgagucuuaccaaa

SEQ ID NO: 1205124 - RNA, 19 nt, Artificial Sequence
  Description of Artificial Sequence: Synthetic oligonucleotide
  Sense strand starting at position 969 of SEQ ID NO: 917056
uugguaagacucggugaua

SEQ ID NO: 1205125 - RNA, 19 nt, Artificial Sequence
  Description of Artificial Sequence: Synthetic oligonucleotide
  Antisense strand to SEQ ID NO: 1205124
uaucaccgagucuuaccaa

SEQ ID NO: 1205126 - RNA, 19 nt, Artificial Sequence
  Description of Artificial Sequence: Synthetic oligonucleotide
  Sense strand starting at position 970 of SEQ ID NO: 917056
ugguaagacucggugauag

SEQ ID NO: 1205127 - RNA, 19 nt, Artificial Sequence
  Description of Artificial Sequence: Synthetic oligonucleotide
  Antisense strand to SEQ ID NO: 1205126
cuaucaccgagucuuacca

SEQ ID NO: 1205128 - RNA, 19 nt, Artificial Sequence
  Description of Artificial Sequence: Synthetic oligonucleotide
  Sense strand starting at position 972 of SEQ ID NO: 917056
guaagacucggugauagaa

SEQ ID NO: 1205129 - RNA, 19 nt, Artificial Sequence
  Description of Artificial Sequence: Synthetic oligonucleotide
  Antisense strand to SEQ ID NO: 1205128
uucuaucaccgagucuuac

SEQ ID NO: 1205130 - RNA, 19 nt, Artificial Sequence
  Description of Artificial Sequence: Synthetic oligonucleotide
  Sense strand starting at position 1003 of SEQ ID NO: 917056
uacgaauggccuugguaug

SEQ ID NO: 1205131 - RNA, 19 nt, Artificial Sequence
  Description of Artificial Sequence: Synthetic oligonucleotide
  Antisense strand to SEQ ID NO: 1205130
cauaccaaggccauucgua

SEQ ID NO: 1205132 - RNA, 19 nt, Artificial Sequence
  Description of Artificial Sequence: Synthetic oligonucleotide
  Sense strand starting at position 1004 of SEQ ID NO: 917056
acgaauggccuugguauga

SEQ ID NO: 1205133 - RNA, 19 nt, Artificial Sequence
  Description of Artificial Sequence: Synthetic oligonucleotide
  Antisense strand to SEQ ID NO: 1205132
ucauaccaaggccauucgu

SEQ ID NO: 1205134 - RNA, 19 nt, Artificial Sequence
  Description of Artificial Sequence: Synthetic oligonucleotide
  Sense strand starting at position 1223 of SEQ ID NO: 917056
ccaugacugucuuuccuga

SEQ ID NO: 1205135 - RNA, 19 nt, Artificial Sequence
  Description of Artificial Sequence: Synthetic oligonucleotide
  Antisense strand to SEQ ID NO: 1205134
ucaggaaagacagucaugg

SEQ ID NO: 1205136 - RNA, 19 nt, Artificial Sequence
  Description of Artificial Sequence: Synthetic oligonucleotide
  Sense strand starting at position 1334 of SEQ ID NO: 917056
ccgagucuccacuauacca

SEQ ID NO: 1205137 - RNA, 19 nt, Artificial Sequence
  Description of Artificial Sequence: Synthetic oligonucleotide
  Antisense strand to SEQ ID NO: 1205136
ugguauaguggagacucgg

SEQ ID NO: 1205138 - RNA, 19 nt, Artificial Sequence
  Description of Artificial Sequence: Synthetic oligonucleotide
  Sense strand starting at position 1382 of SEQ ID NO: 917056
aggagagggugcaaugauu

SEQ ID NO: 1205139 - RNA, 19 nt, Artificial Sequence
  Description of Artificial Sequence: Synthetic oligonucleotide
  Antisense strand to SEQ ID NO: 1205138
aaucauugcacccucuccu

SEQ ID NO: 1205140 - RNA, 19 nt, Artificial Sequence
  Description of Artificial Sequence: Synthetic oligonucleotide
  Sense strand starting at position 1580 of SEQ ID NO: 917056
gggcgagaguugucaagga

SEQ ID NO: 1205141 - RNA, 19 nt, Artificial Sequence
  Description of Artificial Sequence: Synthetic oligonucleotide
  Antisense strand to SEQ ID NO: 1205140
uccuugacaacucucgccc

SEQ ID NO: 1205142 - RNA, 19 nt, Artificial Sequence
  Description of Artificial Sequence: Synthetic oligonucleotide
  Sense strand starting at position 1584 of SEQ ID NO: 917056
gagaguugucaaggaggug

SEQ ID NO: 1205143 - RNA, 19 nt, Artificial Sequence
  Description of Artificial Sequence: Synthetic oligonucleotide
  Antisense strand to SEQ ID NO: 1205142
caccuccuugacaacucuc

SEQ ID NO: 1205144 - RNA, 19 nt, Artificial Sequence
  Description of Artificial Sequence: Synthetic oligonucleotide
  Sense strand starting at position 1791 of SEQ ID NO: 917056
ccggccuccgccuuuauua

SEQ ID NO: 1205145 - RNA, 19 nt, Artificial Sequence
  Description of Artificial Sequence: Synthetic oligonucleotide
  Antisense strand to SEQ ID NO: 1205144
uaauaaaggcggaggccgg

SEQ ID NO: 1205146 - RNA, 19 nt, Artificial Sequence
  Description of Artificial Sequence: Synthetic oligonucleotide
  Sense strand starting at position 1979 of SEQ ID NO: 917056
gaucaaugcgaccauaguu

SEQ ID NO: 1205147 - RNA, 19 nt, Artificial Sequence
  Description of Artificial Sequence: Synthetic oligonucleotide
  Antisense strand to SEQ ID NO: 1205146
aacuauggucgcauugauc

SEQ ID NO: 1205148 - RNA, 19 nt, Artificial Sequence
  Description of Artificial Sequence: Synthetic oligonucleotide
  Sense strand starting at position 2058 of SEQ ID NO: 917056
gcgcuucagcaguuuguua

SEQ ID NO: 1205149 - RNA, 19 nt, Artificial Sequence
  Description of Artificial Sequence: Synthetic oligonucleotide
  Antisense strand to SEQ ID NO: 1205148
uaacaaacugcugaagcgc

SEQ ID NO: 1205150 - RNA, 19 nt, Artificial Sequence
  Description of Artificial Sequence: Synthetic oligonucleotide
  Sense strand starting at position 2458 of SEQ ID NO: 917056
uggaaaccauccuagauuu

SEQ ID NO: 1205151 - RNA, 19 nt, Artificial Sequence
  Description of Artificial Sequence: Synthetic oligonucleotide
  Antisense strand to SEQ ID NO: 1205150
aaaucuaggaugguuucca

SEQ ID NO: 1205152 - RNA, 19 nt, Artificial Sequence
  Description of Artificial Sequence: Synthetic oligonucleotide
  Sense strand starting at position 2537 of SEQ ID NO: 917056
uuggcauuccagugauuau

SEQ ID NO: 1205153 - RNA, 19 nt, Artificial Sequence
  Description of Artificial Sequence: Synthetic oligonucleotide
  Antisense strand to SEQ ID NO: 1205152
auaaucacuggaaugccaa

SEQ ID NO: 1205154 - RNA, 19 nt, Artificial Sequence
  Description of Artificial Sequence: Synthetic oligonucleotide
  Sense strand starting at position 2832 of SEQ ID NO: 917056
auaagagaaucgcuugaag

SEQ ID NO: 1205155 - RNA, 19 nt, Artificial Sequence
  Description of Artificial Sequence: Synthetic oligonucleotide
  Antisense strand to SEQ ID NO: 1205154
cuucaagcgauucucuuau

SEQ ID NO: 1205156 - RNA, 19 nt, Artificial Sequence
  Description of Artificial Sequence: Synthetic oligonucleotide
  Sense strand starting at position 2946 of SEQ ID NO: 917056
gguugcaaauuaucuguga

SEQ ID NO: 1205157 - RNA, 19 nt, Artificial Sequence
  Description of Artificial Sequence: Synthetic oligonucleotide
  Antisense strand to SEQ ID NO: 1205156
ucacagauaauuugcaacc

SEQ ID NO: 1205158 - RNA, 19 nt, Artificial Sequence
  Description of Artificial Sequence: Synthetic oligonucleotide
  Sense strand starting at position 2949 of SEQ ID NO: 917056
ugcaaauuaucugugacaa

SEQ ID NO: 1205159 - RNA, 19 nt, Artificial Sequence
  Description of Artificial Sequence: Synthetic oligonucleotide
  Antisense strand to SEQ ID NO: 1205158
uugucacagauaauuugca

SEQ ID NO: 1205160 - RNA, 19 nt, Artificial Sequence
  Description of Artificial Sequence: Synthetic oligonucleotide
  Sense strand starting at position 2950 of SEQ ID NO: 917056
gcaaauuaucugugacaaa

SEQ ID NO: 1205161 - RNA, 19 nt, Artificial Sequence
  Description of Artificial Sequence: Synthetic oligonucleotide
  Antisense strand to SEQ ID NO: 1205160
uuugucacagauaauuugc

SEQ ID NO: 1205162 - RNA, 19 nt, Artificial Sequence
  Description of Artificial Sequence: Synthetic oligonucleotide
  Sense strand starting at position 3111 of SEQ ID NO: 917056
cacagagacugauuguuaa

SEQ ID NO: 1205163 - RNA, 19 nt, Artificial Sequence
  Description of Artificial Sequence: Synthetic oligonucleotide
  Antisense strand to SEQ ID NO: 1205162
uuaacaaucagucucugug

SEQ ID NO: 1205164 - RNA, 19 nt, Artificial Sequence
  Description of Artificial Sequence: Synthetic oligonucleotide
  Sense strand starting at position 3149 of SEQ ID NO: 917056
agucuuggauguccacuaa

SEQ ID NO: 1205165 - RNA, 19 nt, Artificial Sequence
  Description of Artificial Sequence: Synthetic oligonucleotide
  Antisense strand to SEQ ID NO: 1205164
uuaguggacauccaagacu

SEQ ID NO: 1205166 - RNA, 19 nt, Artificial Sequence
  Description of Artificial Sequence: Synthetic oligonucleotide
  Sense strand starting at position 3179 of SEQ ID NO: 917056
uguaguccucugugcauuu

SEQ ID NO: 1205167 - RNA, 19 nt, Artificial Sequence
  Description of Artificial Sequence: Synthetic oligonucleotide
  Antisense strand to SEQ ID NO: 1205166
aaaugcacagaggacuaca

SEQ ID NO: 1205168 - RNA, 19 nt, Artificial Sequence
  Description of Artificial Sequence: Synthetic oligonucleotide
  Sense strand starting at position 3197 of SEQ ID NO: 917056
ucauaagggcuuuggugau

SEQ ID NO: 1205169 - RNA, 19 nt, Artificial Sequence
  Description of Artificial Sequence: Synthetic oligonucleotide
  Antisense strand to SEQ ID NO: 1205168
aucaccaaagcccuuauga

SEQ ID NO: 1205170 - RNA, 19 nt, Artificial Sequence
  Description of Artificial Sequence: Synthetic oligonucleotide
  Sense strand starting at position 3226 of SEQ ID NO: 917056
cuaagaguguuccucucca

SEQ ID NO: 1205171 - RNA, 19 nt, Artificial Sequence
  Description of Artificial Sequence: Synthetic oligonucleotide
  Antisense strand to SEQ ID NO: 1205170
uggagaggaacacucuuag

SEQ ID NO: 1205172 - RNA, 19 nt, Artificial Sequence
  Description of Artificial Sequence: Synthetic oligonucleotide
  Sense strand starting at position 3295 of SEQ ID NO: 917056
ugcucaugagcagguauga

SEQ ID NO: 1205173 - RNA, 19 nt, Artificial Sequence
  Description of Artificial Sequence: Synthetic oligonucleotide
  Antisense strand to SEQ ID NO: 1205172
ucauaccugcucaugagca

SEQ ID NO: 1205174 - RNA, 19 nt, Artificial Sequence
  Description of Artificial Sequence: Synthetic oligonucleotide
  Sense strand starting at position 3311 of SEQ ID NO: 917056
ugacaaauauaguuugacu

SEQ ID NO: 1205175 - RNA, 19 nt, Artificial Sequence
  Description of Artificial Sequence: Synthetic oligonucleotide
  Antisense strand to SEQ ID NO: 1205174
agucaaacuauauuuguca

SEQ ID NO: 1205176 - RNA, 19 nt, Artificial Sequence
  Description of Artificial Sequence: Synthetic oligonucleotide
  Sense strand starting at position 3324 of SEQ ID NO: 917056
uugacugcugucugacuaa

SEQ ID NO: 1205177 - RNA, 19 nt, Artificial Sequence
  Description of Artificial Sequence: Synthetic oligonucleotide
  Antisense strand to SEQ ID NO: 1205176
uuagucagacagcagucaa

SEQ ID NO: 1205178 - RNA, 19 nt, Artificial Sequence
  Description of Artificial Sequence: Synthetic oligonucleotide
  Sense strand starting at position 3423 of SEQ ID NO: 917056
gccuccuaagaucaaugau

SEQ ID NO: 1205179 - RNA, 19 nt, Artificial Sequence
  Description of Artificial Sequence: Synthetic oligonucleotide
  Antisense strand to SEQ ID NO: 1205178
aucauugaucuuaggaggc

SEQ ID NO: 1205180 - RNA, 19 nt, Artificial Sequence
  Description of Artificial Sequence: Synthetic oligonucleotide
  Sense strand starting at position 3516 of SEQ ID NO: 917056
ugucacaagucuucuuaag

SEQ ID NO: 1205181 - RNA, 19 nt, Artificial Sequence
  Description of Artificial Sequence: Synthetic oligonucleotide
  Antisense strand to SEQ ID NO: 1205180
cuuaagaagacuugugaca

SEQ ID NO: 1205182 - RNA, 19 nt, Artificial Sequence
  Description of Artificial Sequence: Synthetic oligonucleotide
  Sense strand starting at position 3518 of SEQ ID NO: 917056
ucacaagucuucuuaagga

SEQ ID NO: 1205183 - RNA, 19 nt, Artificial Sequence
  Description of Artificial Sequence: Synthetic oligonucleotide
  Antisense strand to SEQ ID NO: 1205182
uccuuaagaagacuuguga

SEQ ID NO: 1205184 - RNA, 19 nt, Artificial Sequence
  Description of Artificial Sequence: Synthetic oligonucleotide
  Sense strand starting at position 3538 of SEQ ID NO: 917056
acaauugcacuuggaaaca

SEQ ID NO: 1205185 - RNA, 19 nt, Artificial Sequence
  Description of Artificial Sequence: Synthetic oligonucleotide
  Antisense strand to SEQ ID NO: 1205184
uguuuccaagugcaauugu

SEQ ID NO: 1205186 - RNA, 19 nt, Artificial Sequence
  Description of Artificial Sequence: Synthetic oligonucleotide
  Sense strand starting at position 3567 of SEQ ID NO: 917056
aucauauguguuuauccca

SEQ ID NO: 1205187 - RNA, 19 nt, Artificial Sequence
  Description of Artificial Sequence: Synthetic oligonucleotide
  Antisense strand to SEQ ID NO: 1205186
ugggauaaacacauaugau

SEQ ID NO: 1205188 - RNA, 19 nt, Artificial Sequence
  Description of Artificial Sequence: Synthetic oligonucleotide
  Sense strand starting at position 21 of SEQ ID NO: 917057
cccgaccuuccauaauguu

SEQ ID NO: 1205189 - RNA, 19 nt, Artificial Sequence
  Description of Artificial Sequence: Synthetic oligonucleotide
  Antisense strand to SEQ ID NO: 1205188
aacauuauggaaggucggg

SEQ ID NO: 1205190 - RNA, 19 nt, Artificial Sequence
  Description of Artificial Sequence: Synthetic oligonucleotide
  Sense strand starting at position 216 of SEQ ID NO: 917057
cagagcauagacugugaau

SEQ ID NO: 1205191 - RNA, 19 nt, Artificial Sequence
  Description of Artificial Sequence: Synthetic oligonucleotide
  Antisense strand to SEQ ID NO: 1205190
auucacagucuaugcucug

SEQ ID NO: 1205192 - RNA, 19 nt, Artificial Sequence
  Description of Artificial Sequence: Synthetic oligonucleotide
  Sense strand starting at position 218 of SEQ ID NO: 917057
gagcauagacugugaauuc

SEQ ID NO: 1205193 - RNA, 19 nt, Artificial Sequence
  Description of Artificial Sequence: Synthetic oligonucleotide
  Antisense strand to SEQ ID NO: 1205192
gaauucacagucuaugcuc

SEQ ID NO: 1205194 - RNA, 19 nt, Artificial Sequence
  Description of Artificial Sequence: Synthetic oligonucleotide
  Sense strand starting at position 391 of SEQ ID NO: 917057
gggagaaaugugcagucuu

SEQ ID NO: 1205195 - RNA, 19 nt, Artificial Sequence
  Description of Artificial Sequence: Synthetic oligonucleotide
  Antisense strand to SEQ ID NO: 1205194
aagacugcacauuucuccc

SEQ ID NO: 1205196 - RNA, 19 nt, Artificial Sequence
  Description of Artificial Sequence: Synthetic oligonucleotide
  Sense strand starting at position 587 of SEQ ID NO: 917057
acucccuagccugaguuaa

SEQ ID NO: 1205197 - RNA, 19 nt, Artificial Sequence
  Description of Artificial Sequence: Synthetic oligonucleotide
  Antisense strand to SEQ ID NO: 1205196
uuaacucaggcuagggagu

SEQ ID NO: 1205198 - RNA, 19 nt, Artificial Sequence
  Description of Artificial Sequence: Synthetic oligonucleotide
  Sense strand starting at position 589 of SEQ ID NO: 917057
ucccuagccugaguuaaag

SEQ ID NO: 1205199 - RNA, 19 nt, Artificial Sequence
  Description of Artificial Sequence: Synthetic oligonucleotide
  Antisense strand to SEQ ID NO: 1205198
cuuuaacucaggcuaggga

SEQ ID NO: 1205200 - RNA, 19 nt, Artificial Sequence
  Description of Artificial Sequence: Synthetic oligonucleotide
  Sense strand starting at position 757 of SEQ ID NO: 917057
cuccuuaucccaggagaaa

SEQ ID NO: 1205201 - RNA, 19 nt, Artificial Sequence
  Description of Artificial Sequence: Synthetic oligonucleotide
  Antisense strand to SEQ ID NO: 1205200
uuucuccugggauaaggag

SEQ ID NO: 1205202 - RNA, 19 nt, Artificial Sequence
  Description of Artificial Sequence: Synthetic oligonucleotide
  Sense strand starting at position 1169 of SEQ ID NO: 917057
ucuggucccugggugaaga

SEQ ID NO: 1205203 - RNA, 19 nt, Artificial Sequence
  Description of Artificial Sequence: Synthetic oligonucleotide
  Antisense strand to SEQ ID NO: 1205202
ucuucacccagggaccaga

SEQ ID NO: 1205204 - RNA, 19 nt, Artificial Sequence
  Description of Artificial Sequence: Synthetic oligonucleotide
  Sense strand starting at position 1364 of SEQ ID NO: 917057
uugacaggcuguccugaaa

SEQ ID NO: 1205205 - RNA, 19 nt, Artificial Sequence
  Description of Artificial Sequence: Synthetic oligonucleotide
  Antisense strand to SEQ ID NO: 1205204
uuucaggacagccugucaa

SEQ ID NO: 1205206 - RNA, 19 nt, Artificial Sequence
  Description of Artificial Sequence: Synthetic oligonucleotide
  Sense strand starting at position 1392 of SEQ ID NO: 917057
gccaauuaggucuaaacuc

SEQ ID NO: 1205207 - RNA, 19 nt, Artificial Sequence
  Description of Artificial Sequence: Synthetic oligonucleotide
  Antisense strand to SEQ ID NO: 1205206
gaguuuagaccuaauuggc

SEQ ID NO: 1205208 - RNA, 19 nt, Artificial Sequence
  Description of Artificial Sequence: Synthetic oligonucleotide
  Sense strand starting at position 1400 of SEQ ID NO: 917057
ggucuaaacucauugguag

SEQ ID NO: 1205209 - RNA, 19 nt, Artificial Sequence
  Description of Artificial Sequence: Synthetic oligonucleotide
  Antisense strand to SEQ ID NO: 1205208
cuaccaaugaguuuagacc

SEQ ID NO: 1205210 - RNA, 19 nt, Artificial Sequence
  Description of Artificial Sequence: Synthetic oligonucleotide
  Sense strand starting at position 1494 of SEQ ID NO: 917057
auaccugggcccuguaaga

SEQ ID NO: 1205211 - RNA, 19 nt, Artificial Sequence
  Description of Artificial Sequence: Synthetic oligonucleotide
  Antisense strand to SEQ ID NO: 1205210
ucuuacagggcccagguau

SEQ ID NO: 1205212 - RNA, 19 nt, Artificial Sequence
  Description of Artificial Sequence: Synthetic oligonucleotide
  Sense strand starting at position 1666 of SEQ ID NO: 917057
agcggagcauuucuccuaa

SEQ ID NO: 1205213 - RNA, 19 nt, Artificial Sequence
  Description of Artificial Sequence: Synthetic oligonucleotide
  Antisense strand to SEQ ID NO: 1205212
uuaggagaaaugcuccgcu

SEQ ID NO: 1205214 - RNA, 19 nt, Artificial Sequence
  Description of Artificial Sequence: Synthetic oligonucleotide
  Sense strand starting at position 1800 of SEQ ID NO: 917057
aaguuuaccgcugagacuu

SEQ ID NO: 1205215 - RNA, 19 nt, Artificial Sequence
  Description of Artificial Sequence: Synthetic oligonucleotide
  Antisense strand to SEQ ID NO: 1205214
aagucucagcgguaaacuu

SEQ ID NO: 1205216 - RNA, 19 nt, Artificial Sequence
  Description of Artificial Sequence: Synthetic oligonucleotide
  Sense strand starting at position 1813 of SEQ ID NO: 917057
agacuuagacucuaaugcu

SEQ ID NO: 1205217 - RNA, 19 nt, Artificial Sequence
  Description of Artificial Sequence: Synthetic oligonucleotide
  Antisense strand to SEQ ID NO: 1205216
agcauuagagucuaagucu

SEQ ID NO: 1205218 - RNA, 19 nt, Artificial Sequence
  Description of Artificial Sequence: Synthetic oligonucleotide
  Sense strand starting at position 2233 of SEQ ID NO: 917057
gggacagaguugucgauga

SEQ ID NO: 1205219 - RNA, 19 nt, Artificial Sequence
  Description of Artificial Sequence: Synthetic oligonucleotide
  Antisense strand to SEQ ID NO: 1205218
ucaucgacaacucuguccc

SEQ ID NO: 1205220 - RNA, 19 nt, Artificial Sequence
  Description of Artificial Sequence: Synthetic oligonucleotide
  Sense strand starting at position 2235 of SEQ ID NO: 917057
gacagaguugucgaugauu

SEQ ID NO: 1205221 - RNA, 19 nt, Artificial Sequence
  Description of Artificial Sequence: Synthetic oligonucleotide
  Antisense strand to SEQ ID NO: 1205220
aaucaucgacaacucuguc

SEQ ID NO: 1205222 - RNA, 19 nt, Artificial Sequence
  Description of Artificial Sequence: Synthetic oligonucleotide
  Sense strand starting at position 2238 of SEQ ID NO: 917057
agaguugucgaugauuaua

SEQ ID NO: 1205223 - RNA, 19 nt, Artificial Sequence
  Description of Artificial Sequence: Synthetic oligonucleotide
  Antisense strand to SEQ ID NO: 1205222
uauaaucaucgacaacucu

SEQ ID NO: 1205224 - RNA, 19 nt, Artificial Sequence
  Description of Artificial Sequence: Synthetic oligonucleotide
  Sense strand starting at position 2247 of SEQ ID NO: 917057
gaugauuauaggugcggau

SEQ ID NO: 1205225 - RNA, 19 nt, Artificial Sequence
  Description of Artificial Sequence: Synthetic oligonucleotide
  Antisense strand to SEQ ID NO: 1205224
auccgcaccuauaaucauc

SEQ ID NO: 1205226 - RNA, 19 nt, Artificial Sequence
  Description of Artificial Sequence: Synthetic oligonucleotide
  Sense strand starting at position 2847 of SEQ ID NO: 917057
cucuaucugcuagaggaca

SEQ ID NO: 1205227 - RNA, 19 nt, Artificial Sequence
  Description of Artificial Sequence: Synthetic oligonucleotide
  Antisense strand to SEQ ID NO: 1205226
uguccucuagcagauagag

SEQ ID NO: 1205228 - RNA, 19 nt, Artificial Sequence
  Description of Artificial Sequence: Synthetic oligonucleotide
  Sense strand starting at position 2993 of SEQ ID NO: 917057
cuccuuuagccagggaaga

SEQ ID NO: 1205229 - RNA, 19 nt, Artificial Sequence
  Description of Artificial Sequence: Synthetic oligonucleotide
  Antisense strand to SEQ ID NO: 1205228
ucuucccuggcuaaaggag

SEQ ID NO: 1205230 - RNA, 19 nt, Artificial Sequence
  Description of Artificial Sequence: Synthetic oligonucleotide
  Sense strand starting at position 2994 of SEQ ID NO: 917057
uccuuuagccagggaagau

SEQ ID NO: 1205231 - RNA, 19 nt, Artificial Sequence
  Description of Artificial Sequence: Synthetic oligonucleotide
  Antisense strand to SEQ ID NO: 1205230
aucuucccuggcuaaagga

SEQ ID NO: 1205232 - RNA, 19 nt, Artificial Sequence
  Description of Artificial Sequence: Synthetic oligonucleotide
  Sense strand starting at position 3097 of SEQ ID NO: 917057
aagugauaugcccaacaug

SEQ ID NO: 1205233 - RNA, 19 nt, Artificial Sequence
  Description of Artificial Sequence: Synthetic oligonucleotide
  Antisense strand to SEQ ID NO: 1205232
cauguugggcauaucacuu

SEQ ID NO: 1205234 - RNA, 19 nt, Artificial Sequence
  Description of Artificial Sequence: Synthetic oligonucleotide
  Sense strand starting at position 3100 of SEQ ID NO: 917057
ugauaugcccaacaugacu

SEQ ID NO: 1205235 - RNA, 19 nt, Artificial Sequence
  Description of Artificial Sequence: Synthetic oligonucleotide
  Antisense strand to SEQ ID NO: 1205234
agucauguugggcauauca

SEQ ID NO: 1205236 - RNA, 19 nt, Artificial Sequence
  Description of Artificial Sequence: Synthetic oligonucleotide
  Sense strand starting at position 3114 of SEQ ID NO: 917057
ugacucagcuaaucaauga

SEQ ID NO: 1205237 - RNA, 19 nt, Artificial Sequence
  Description of Artificial Sequence: Synthetic oligonucleotide
  Antisense strand to SEQ ID NO: 1205236
ucauugauuagcugaguca

SEQ ID NO: 1205238 - RNA, 19 nt, Artificial Sequence
  Description of Artificial Sequence: Synthetic oligonucleotide
  Sense strand starting at position 3118 of SEQ ID NO: 917057
ucagcuaaucaaugaagga

SEQ ID NO: 1205239 - RNA, 19 nt, Artificial Sequence
  Description of Artificial Sequence: Synthetic oligonucleotide
  Antisense strand to SEQ ID NO: 1205238
uccuucauugauuagcuga

SEQ ID NO: 1205240 - RNA, 19 nt, Artificial Sequence
  Description of Artificial Sequence: Synthetic oligonucleotide
  Sense strand starting at position 3177 of SEQ ID NO: 917057
cugaaccauuucugagaca

SEQ ID NO: 1205241 - RNA, 19 nt, Artificial Sequence
  Description of Artificial Sequence: Synthetic oligonucleotide
  Antisense strand to SEQ ID NO: 1205240
ugucucagaaaugguucag

SEQ ID NO: 1205242 - RNA, 19 nt, Artificial Sequence
  Description of Artificial Sequence: Synthetic oligonucleotide
  Sense strand starting at position 3288 of SEQ ID NO: 917057
aacagugaaguuuguuaag

SEQ ID NO: 1205243 - RNA, 19 nt, Artificial Sequence
  Description of Artificial Sequence: Synthetic oligonucleotide
  Antisense strand to SEQ ID NO: 1205242
cuuaacaaacuucacuguu

SEQ ID NO: 1205244 - RNA, 19 nt, Artificial Sequence
  Description of Artificial Sequence: Synthetic oligonucleotide
  Sense strand starting at position 3452 of SEQ ID NO: 917057
gccagucugauggauggau

SEQ ID NO: 1205245 - RNA, 19 nt, Artificial Sequence
  Description of Artificial Sequence: Synthetic oligonucleotide
  Antisense strand to SEQ ID NO: 1205244
auccauccaucagacuggc

SEQ ID NO: 1205246 - RNA, 19 nt, Artificial Sequence
  Description of Artificial Sequence: Synthetic oligonucleotide
  Sense strand starting at position 3466 of SEQ ID NO: 917057
uggauucucuaccuguaau

SEQ ID NO: 1205247 - RNA, 19 nt, Artificial Sequence
  Description of Artificial Sequence: Synthetic oligonucleotide
  Antisense strand to SEQ ID NO: 1205246
auuacagguagagaaucca

SEQ ID NO: 1205248 - RNA, 19 nt, Artificial Sequence
  Description of Artificial Sequence: Synthetic oligonucleotide
  Sense strand starting at position 3536 of SEQ ID NO: 917057
gugauucuugugggaagaa

SEQ ID NO: 1205249 - RNA, 19 nt, Artificial Sequence
  Description of Artificial Sequence: Synthetic oligonucleotide
  Antisense strand to SEQ ID NO: 1205248
uucuucccacaagaaucac

SEQ ID NO: 1205250 - RNA, 19 nt, Artificial Sequence
  Description of Artificial Sequence: Synthetic oligonucleotide
  Sense strand starting at position 3577 of SEQ ID NO: 917057
ccaccaauaccuugggaca

SEQ ID NO: 1205251 - RNA, 19 nt, Artificial Sequence
  Description of Artificial Sequence: Synthetic oligonucleotide
  Antisense strand to SEQ ID NO: 1205250
ugucccaagguauuggugg

SEQ ID NO: 1205252 - RNA, 19 nt, Artificial Sequence
  Description of Artificial Sequence: Synthetic oligonucleotide
  Sense strand starting at position 3615 of SEQ ID NO: 917057
gccucugaaagagguugaa

SEQ ID NO: 1205253 - RNA, 19 nt, Artificial Sequence
  Description of Artificial Sequence: Synthetic oligonucleotide
  Antisense strand to SEQ ID NO: 1205252
uucaaccucuuucagaggc

SEQ ID NO: 1205254 - RNA, 19 nt, Artificial Sequence
  Description of Artificial Sequence: Synthetic oligonucleotide
  Sense strand starting at position 3702 of SEQ ID NO: 917057
guggaagaugcguacuaag

SEQ ID NO: 1205255 - RNA, 19 nt, Artificial Sequence
  Description of Artificial Sequence: Synthetic oligonucleotide
  Antisense strand to SEQ ID NO: 1205254
cuuaguacgcaucuuccac

SEQ ID NO: 1205256 - RNA, 19 nt, Artificial Sequence
  Description of Artificial Sequence: Synthetic oligonucleotide
  Sense strand starting at position 3711 of SEQ ID NO: 917057
gcguacuaaguauuccgua

SEQ ID NO: 1205257 - RNA, 19 nt, Artificial Sequence
  Description of Artificial Sequence: Synthetic oligonucleotide
  Antisense strand to SEQ ID NO: 1205256
uacggaauacuuaguacgc

SEQ ID NO: 1205258 - RNA, 19 nt, Artificial Sequence
  Description of Artificial Sequence: Synthetic oligonucleotide
  Sense strand starting at position 3724 of SEQ ID NO: 917057
uccguaguaacugagaguu

SEQ ID NO: 1205259 - RNA, 19 nt, Artificial Sequence
  Description of Artificial Sequence: Synthetic oligonucleotide
  Antisense strand to SEQ ID NO: 1205258
aacucucaguuacuacgga

SEQ ID NO: 1205260 - RNA, 19 nt, Artificial Sequence
  Description of Artificial Sequence: Synthetic oligonucleotide
  Sense strand starting at position 3730 of SEQ ID NO: 917057
guaacugagaguuagucuu

SEQ ID NO: 1205261 - RNA, 19 nt, Artificial Sequence
  Description of Artificial Sequence: Synthetic oligonucleotide
  Antisense strand to SEQ ID NO: 1205260
aagacuaacucucaguuac

SEQ ID NO: 1205262 - RNA, 19 nt, Artificial Sequence
  Description of Artificial Sequence: Synthetic oligonucleotide
  Sense strand starting at position 3768 of SEQ ID NO: 917057
aggagagguacuuguaauu

SEQ ID NO: 1205263 - RNA, 19 nt, Artificial Sequence
  Description of Artificial Sequence: Synthetic oligonucleotide
  Antisense strand to SEQ ID NO: 1205262
aauuacaaguaccucuccu

SEQ ID NO: 1205264 - RNA, 19 nt, Artificial Sequence
  Description of Artificial Sequence: Synthetic oligonucleotide
  Sense strand starting at position 3823 of SEQ ID NO: 917057
uggaauaucuuacuugauc

SEQ ID NO: 1205265 - RNA, 19 nt, Artificial Sequence
  Description of Artificial Sequence: Synthetic oligonucleotide
  Antisense strand to SEQ ID NO: 1205264
gaucaaguaagauauucca

SEQ ID NO: 1205266 - RNA, 19 nt, Artificial Sequence
  Description of Artificial Sequence: Synthetic oligonucleotide
  Sense strand starting at position 3824 of SEQ ID NO: 917057
ggaauaucuuacuugaucu

SEQ ID NO: 1205267 - RNA, 19 nt, Artificial Sequence
  Description of Artificial Sequence: Synthetic oligonucleotide
  Antisense strand to SEQ ID NO: 1205266
agaucaaguaagauauucc

SEQ ID NO: 1205268 - RNA, 19 nt, Artificial Sequence
  Description of Artificial Sequence: Synthetic oligonucleotide
  Sense strand starting at position 1 of SEQ ID NO: 917058
ggaaaccggaauugguaua

SEQ ID NO: 1205269 - RNA, 19 nt, Artificial Sequence
  Description of Artificial Sequence: Synthetic oligonucleotide
  Antisense strand to SEQ ID NO: 1205268
uauaccaauuccgguuucc

SEQ ID NO: 1205270 - RNA, 19 nt, Artificial Sequence
  Description of Artificial Sequence: Synthetic oligonucleotide
  Sense strand starting at position 6 of SEQ ID NO: 917058
ccggaauugguauaaccuu

SEQ ID NO: 1205271 - RNA, 19 nt, Artificial Sequence
  Description of Artificial Sequence: Synthetic oligonucleotide
  Antisense strand to SEQ ID NO: 1205270
aagguuauaccaauuccgg

SEQ ID NO: 1205272 - RNA, 19 nt, Artificial Sequence
  Description of Artificial Sequence: Synthetic oligonucleotide
  Sense strand starting at position 116 of SEQ ID NO: 917058
aggcuuauaucacuguuga

SEQ ID NO: 1205273 - RNA, 19 nt, Artificial Sequence
  Description of Artificial Sequence: Synthetic oligonucleotide
  Antisense strand to SEQ ID NO: 1205272
ucaacagugauauaagccu

SEQ ID NO: 1205274 - RNA, 19 nt, Artificial Sequence
  Description of Artificial Sequence: Synthetic oligonucleotide
  Sense strand starting at position 117 of SEQ ID NO: 917058
ggcuuauaucacuguugau

SEQ ID NO: 1205275 - RNA, 19 nt, Artificial Sequence
  Description of Artificial Sequence: Synthetic oligonucleotide
  Antisense strand to SEQ ID NO: 1205274
aucaacagugauauaagcc

SEQ ID NO: 1205276 - RNA, 19 nt, Artificial Sequence
  Description of Artificial Sequence: Synthetic oligonucleotide
  Sense strand starting at position 129 of SEQ ID NO: 917058
uguugauuacaaugguauu

SEQ ID NO: 1205277 - RNA, 19 nt, Artificial Sequence
  Description of Artificial Sequence: Synthetic oligonucleotide
  Antisense strand to SEQ ID NO: 1205276
aauaccauuguaaucaaca

SEQ ID NO: 1205278 - RNA, 19 nt, Artificial Sequence
  Description of Artificial Sequence: Synthetic oligonucleotide
  Sense strand starting at position 232 of SEQ ID NO: 917058
ucacgauaaagucaaguga

SEQ ID NO: 1205279 - RNA, 19 nt, Artificial Sequence
  Description of Artificial Sequence: Synthetic oligonucleotide
  Antisense strand to SEQ ID NO: 1205278
ucacuugacuuuaucguga

SEQ ID NO: 1205280 - RNA, 19 nt, Artificial Sequence
  Description of Artificial Sequence: Synthetic oligonucleotide
  Sense strand starting at position 397 of SEQ ID NO: 917058
uguuaauaguuaccaucuu

SEQ ID NO: 1205281 - RNA, 19 nt, Artificial Sequence
  Description of Artificial Sequence: Synthetic oligonucleotide
  Antisense strand to SEQ ID NO: 1205280
aagaugguaacuauuaaca

SEQ ID NO: 1205282 - RNA, 19 nt, Artificial Sequence
  Description of Artificial Sequence: Synthetic oligonucleotide
  Sense strand starting at position 470 of SEQ ID NO: 917058
auguuccuugagcauauau

SEQ ID NO: 1205283 - RNA, 19 nt, Artificial Sequence
  Description of Artificial Sequence: Synthetic oligonucleotide
  Antisense strand to SEQ ID NO: 1205282
auauaugcucaaggaacau

SEQ ID NO: 1205284 - RNA, 19 nt, Artificial Sequence
  Description of Artificial Sequence: Synthetic oligonucleotide
  Sense strand starting at position 472 of SEQ ID NO: 917058
guuccuugagcauauauua

SEQ ID NO: 1205285 - RNA, 19 nt, Artificial Sequence
  Description of Artificial Sequence: Synthetic oligonucleotide
  Antisense strand to SEQ ID NO: 1205284
uaauauaugcucaaggaac

SEQ ID NO: 1205286 - RNA, 19 nt, Artificial Sequence
  Description of Artificial Sequence: Synthetic oligonucleotide
  Sense strand starting at position 593 of SEQ ID NO: 917058
cuauaaacauugccucgau

SEQ ID NO: 1205287 - RNA, 19 nt, Artificial Sequence
  Description of Artificial Sequence: Synthetic oligonucleotide
  Antisense strand to SEQ ID NO: 1205286
aucgaggcaauguuuauag

SEQ ID NO: 1205288 - RNA, 19 nt, Artificial Sequence
  Description of Artificial Sequence: Synthetic oligonucleotide
  Sense strand starting at position 637 of SEQ ID NO: 917058
ccauuauuccauuacgucu

SEQ ID NO: 1205289 - RNA, 19 nt, Artificial Sequence
  Description of Artificial Sequence: Synthetic oligonucleotide
  Antisense strand to SEQ ID NO: 1205288
agacguaauggaauaaugg

SEQ ID NO: 1205290 - RNA, 19 nt, Artificial Sequence
  Description of Artificial Sequence: Synthetic oligonucleotide
  Sense strand starting at position 644 of SEQ ID NO: 917058
uccauuacgucucucauuu

SEQ ID NO: 1205291 - RNA, 19 nt, Artificial Sequence
  Description of Artificial Sequence: Synthetic oligonucleotide
  Antisense strand to SEQ ID NO: 1205290
aaaugagagacguaaugga

SEQ ID NO: 1205292 - RNA, 19 nt, Artificial Sequence
  Description of Artificial Sequence: Synthetic oligonucleotide
  Sense strand starting at position 830 of SEQ ID NO: 917058
uucccaagcuuggcauaau

SEQ ID NO: 1205293 - RNA, 19 nt, Artificial Sequence
  Description of Artificial Sequence: Synthetic oligonucleotide
  Antisense strand to SEQ ID NO: 1205292
auuaugccaagcuugggaa

SEQ ID NO: 1205294 - RNA, 19 nt, Artificial Sequence
  Description of Artificial Sequence: Synthetic oligonucleotide
  Sense strand starting at position 1098 of SEQ ID NO: 917058
gaaaguaaagcguauacau

SEQ ID NO: 1205295 - RNA, 19 nt, Artificial Sequence
  Description of Artificial Sequence: Synthetic oligonucleotide
  Antisense strand to SEQ ID NO: 1205294
auguauacgcuuuacuuuc

SEQ ID NO: 1205296 - RNA, 19 nt, Artificial Sequence
  Description of Artificial Sequence: Synthetic oligonucleotide
  Sense strand starting at position 1147 of SEQ ID NO: 917058
uugaccugugucugaugga

SEQ ID NO: 1205297 - RNA, 19 nt, Artificial Sequence
  Description of Artificial Sequence: Synthetic oligonucleotide
  Antisense strand to SEQ ID NO: 1205296
uccaucagacacaggucaa

SEQ ID NO: 1205298 - RNA, 19 nt, Artificial Sequence
  Description of Artificial Sequence: Synthetic oligonucleotide
  Sense strand starting at position 1373 of SEQ ID NO: 917058
gacuuuaaaccguguuaga

SEQ ID NO: 1205299 - RNA, 19 nt, Artificial Sequence
  Description of Artificial Sequence: Synthetic oligonucleotide
  Antisense strand to SEQ ID NO: 1205298
ucuaacacgguuuaaaguc

SEQ ID NO: 1205300 - RNA, 19 nt, Artificial Sequence
  Description of Artificial Sequence: Synthetic oligonucleotide
  Sense strand starting at position 1437 of SEQ ID NO: 917058
ugaacagugaccugaagca

SEQ ID NO: 1205301 - RNA, 19 nt, Artificial Sequence
  Description of Artificial Sequence: Synthetic oligonucleotide
  Antisense strand to SEQ ID NO: 1205300
ugcuucaggucacuguuca

SEQ ID NO: 1205302 - RNA, 19 nt, Artificial Sequence
  Description of Artificial Sequence: Synthetic oligonucleotide
  Sense strand starting at position 1501 of SEQ ID NO: 917058
cuaaguugugacuaucuaa

SEQ ID NO: 1205303 - RNA, 19 nt, Artificial Sequence
  Description of Artificial Sequence: Synthetic oligonucleotide
  Antisense strand to SEQ ID NO: 1205302
uuagauagucacaacuuag

SEQ ID NO: 1205304 - RNA, 19 nt, Artificial Sequence
  Description of Artificial Sequence: Synthetic oligonucleotide
  Sense strand starting at position 2765 of SEQ ID NO: 917058
ggcucugcaccaggugaaa

SEQ ID NO: 1205305 - RNA, 19 nt, Artificial Sequence
  Description of Artificial Sequence: Synthetic oligonucleotide
  Antisense strand to SEQ ID NO: 1205304
uuucaccuggugcagagcc

SEQ ID NO: 1205306 - RNA, 19 nt, Artificial Sequence
  Description of Artificial Sequence: Synthetic oligonucleotide
  Sense strand starting at position 2779 of SEQ ID NO: 917058
ugaaaugcgaugugugaag

SEQ ID NO: 1205307 - RNA, 19 nt, Artificial Sequence
  Description of Artificial Sequence: Synthetic oligonucleotide
  Antisense strand to SEQ ID NO: 1205306
cuucacacaucgcauuuca

SEQ ID NO: 1205308 - RNA, 19 nt, Artificial Sequence
  Description of Artificial Sequence: Synthetic oligonucleotide
  Sense strand starting at position 2851 of SEQ ID NO: 917058
uaguguagauucccaaguu

SEQ ID NO: 1205309 - RNA, 19 nt, Artificial Sequence
  Description of Artificial Sequence: Synthetic oligonucleotide
  Antisense strand to SEQ ID NO: 1205308
aacuugggaaucuacacua

SEQ ID NO: 1205310 - RNA, 19 nt, Artificial Sequence
  Description of Artificial Sequence: Synthetic oligonucleotide
  Sense strand starting at position 2975 of SEQ ID NO: 917058
uuuaaagaggcguagacau

SEQ ID NO: 1205311 - RNA, 19 nt, Artificial Sequence
  Description of Artificial Sequence: Synthetic oligonucleotide
  Antisense strand to SEQ ID NO: 1205310
augucuacgccucuuuaaa

SEQ ID NO: 1205312 - RNA, 19 nt, Artificial Sequence
  Description of Artificial Sequence: Synthetic oligonucleotide
  Sense strand starting at position 3107 of SEQ ID NO: 917058
guuuguuucuaccugauua

SEQ ID NO: 1205313 - RNA, 19 nt, Artificial Sequence
  Description of Artificial Sequence: Synthetic oligonucleotide
  Antisense strand to SEQ ID NO: 1205312
uaaucagguagaaacaaac

SEQ ID NO: 1205314 - RNA, 19 nt, Artificial Sequence
  Description of Artificial Sequence: Synthetic oligonucleotide
  Sense strand starting at position 3111 of SEQ ID NO: 917058
guuucuaccugauuagggu

SEQ ID NO: 1205315 - RNA, 19 nt, Artificial Sequence
  Description of Artificial Sequence: Synthetic oligonucleotide
  Antisense strand to SEQ ID NO: 1205314
acccuaaucagguagaaac

SEQ ID NO: 1205316 - RNA, 19 nt, Artificial Sequence
  Description of Artificial Sequence: Synthetic oligonucleotide
  Sense strand starting at position 3194 of SEQ ID NO: 917058
ucuaucuuuguguggauuu

SEQ ID NO: 1205317 - RNA, 19 nt, Artificial Sequence
  Description of Artificial Sequence: Synthetic oligonucleotide
  Antisense strand to SEQ ID NO: 1205316
aaauccacacaaagauaga

SEQ ID NO: 1205318 - RNA, 19 nt, Artificial Sequence
  Description of Artificial Sequence: Synthetic oligonucleotide
  Sense strand starting at position 3230 of SEQ ID NO: 917058
uguguuucugaacauucuu

SEQ ID NO: 1205319 - RNA, 19 nt, Artificial Sequence
  Description of Artificial Sequence: Synthetic oligonucleotide
  Antisense strand to SEQ ID NO: 1205318
aagaauguucagaaacaca

SEQ ID NO: 1205320 - RNA, 19 nt, Artificial Sequence
  Description of Artificial Sequence: Synthetic oligonucleotide
  Sense strand starting at position 3301 of SEQ ID NO: 917058
uucguaaguacauagguua

SEQ ID NO: 1205321 - RNA, 19 nt, Artificial Sequence
  Description of Artificial Sequence: Synthetic oligonucleotide
  Antisense strand to SEQ ID NO: 1205320
uaaccuauguacuuacgaa

SEQ ID NO: 1205322 - RNA, 19 nt, Artificial Sequence
  Description of Artificial Sequence: Synthetic oligonucleotide
  Sense strand starting at position 3304 of SEQ ID NO: 917058
guaaguacauagguuaauu

SEQ ID NO: 1205323 - RNA, 19 nt, Artificial Sequence
  Description of Artificial Sequence: Synthetic oligonucleotide
  Antisense strand to SEQ ID NO: 1205322
aauuaaccuauguacuuac

SEQ ID NO: 1205324 - RNA, 19 nt, Artificial Sequence
  Description of Artificial Sequence: Synthetic oligonucleotide
  Sense strand starting at position 3336 of SEQ ID NO: 917058
uuauguauuaaguagagug

SEQ ID NO: 1205325 - RNA, 19 nt, Artificial Sequence
  Description of Artificial Sequence: Synthetic oligonucleotide
  Antisense strand to SEQ ID NO: 1205324
cacucuacuuaauacauaa

SEQ ID NO: 1205326 - RNA, 19 nt, Artificial Sequence
  Description of Artificial Sequence: Synthetic oligonucleotide
  Sense strand starting at position 3341 of SEQ ID NO: 917058
uauuaaguagaguguuaug

SEQ ID NO: 1205327 - RNA, 19 nt, Artificial Sequence
  Description of Artificial Sequence: Synthetic oligonucleotide
  Antisense strand to SEQ ID NO: 1205326
cauaacacucuacuuaaua

SEQ ID NO: 1205328 - RNA, 19 nt, Artificial Sequence
  Description of Artificial Sequence: Synthetic oligonucleotide
  Sense strand starting at position 3348 of SEQ ID NO: 917058
uagaguguuauggguuauu

SEQ ID NO: 1205329 - RNA, 19 nt, Artificial Sequence
  Description of Artificial Sequence: Synthetic oligonucleotide
  Antisense strand to SEQ ID NO: 1205328
aauaacccauaacacucua

SEQ ID NO: 1205330 - RNA, 19 nt, Artificial Sequence
  Description of Artificial Sequence: Synthetic oligonucleotide
  Sense strand starting at position 3409 of SEQ ID NO: 917058
agugaaauaguuuaaagcu

SEQ ID NO: 1205331 - RNA, 19 nt, Artificial Sequence
  Description of Artificial Sequence: Synthetic oligonucleotide
  Antisense strand to SEQ ID NO: 1205330
agcuuuaaacuauuucacu

SEQ ID NO: 1205332 - RNA, 19 nt, Artificial Sequence
  Description of Artificial Sequence: Synthetic oligonucleotide
  Sense strand starting at position 3431 of SEQ ID NO: 917058
ucucaagguuacuuccaga

SEQ ID NO: 1205333 - RNA, 19 nt, Artificial Sequence
  Description of Artificial Sequence: Synthetic oligonucleotide
  Antisense strand to SEQ ID NO: 1205332
ucuggaaguaaccuugaga

SEQ ID NO: 1205334 - RNA, 19 nt, Artificial Sequence
  Description of Artificial Sequence: Synthetic oligonucleotide
  Sense strand starting at position 3533 of SEQ ID NO: 917058
gcacucaaauguucugauu

SEQ ID NO: 1205335 - RNA, 19 nt, Artificial Sequence
  Description of Artificial Sequence: Synthetic oligonucleotide
  Antisense strand to SEQ ID NO: 1205334
aaucagaacauuugagugc

SEQ ID NO: 1205336 - RNA, 19 nt, Artificial Sequence
  Description of Artificial Sequence: Synthetic oligonucleotide
  Sense strand starting at position 3585 of SEQ ID NO: 917058
guugcauugcucccuguga

SEQ ID NO: 1205337 - RNA, 19 nt, Artificial Sequence
  Description of Artificial Sequence: Synthetic oligonucleotide
  Antisense strand to SEQ ID NO: 1205336
ucacagggagcaaugcaac

SEQ ID NO: 1205338 - RNA, 19 nt, Artificial Sequence
  Description of Artificial Sequence: Synthetic oligonucleotide
  Sense strand starting at position 3592 of SEQ ID NO: 917058
ugcucccugugaucagauu

SEQ ID NO: 1205339 - RNA, 19 nt, Artificial Sequence
  Description of Artificial Sequence: Synthetic oligonucleotide
  Antisense strand to SEQ ID NO: 1205338
aaucugaucacagggagca

SEQ ID NO: 1205340 - RNA, 19 nt, Artificial Sequence
  Description of Artificial Sequence: Synthetic oligonucleotide
  Sense strand starting at position 3593 of SEQ ID NO: 917058
gcucccugugaucagauua

SEQ ID NO: 1205341 - RNA, 19 nt, Artificial Sequence
  Description of Artificial Sequence: Synthetic oligonucleotide
  Antisense strand to SEQ ID NO: 1205340
uaaucugaucacagggagc

SEQ ID NO: 1205342 - RNA, 19 nt, Artificial Sequence
  Description of Artificial Sequence: Synthetic oligonucleotide
  Sense strand starting at position 3779 of SEQ ID NO: 917058
ccuacauuucugugccuua

SEQ ID NO: 1205343 - RNA, 19 nt, Artificial Sequence
  Description of Artificial Sequence: Synthetic oligonucleotide
  Antisense strand to SEQ ID NO: 1205342
uaaggcacagaaauguagg

SEQ ID NO: 1205344 - RNA, 19 nt, Artificial Sequence
  Description of Artificial Sequence: Synthetic oligonucleotide
  Sense strand starting at position 3908 of SEQ ID NO: 917058
gugucuuauauguaucagu

SEQ ID NO: 1205345 - RNA, 19 nt, Artificial Sequence
  Description of Artificial Sequence: Synthetic oligonucleotide
  Antisense strand to SEQ ID NO: 1205344
acugauacauauaagacac

SEQ ID NO: 1205346 - RNA, 19 nt, Artificial Sequence
  Description of Artificial Sequence: Synthetic oligonucleotide
  Sense strand starting at position 3961 of SEQ ID NO: 917058
ggcacagaagcauguaauu

SEQ ID NO: 1205347 - RNA, 19 nt, Artificial Sequence
  Description of Artificial Sequence: Synthetic oligonucleotide
  Antisense strand to SEQ ID NO: 1205346
aauuacaugcuucugugcc

SEQ ID NO: 1205348 - RNA, 19 nt, Artificial Sequence
  Description of Artificial Sequence: Synthetic oligonucleotide
  Sense strand starting at position 142 of SEQ ID NO: 917059
gaaagaacuggcuaaugcu

SEQ ID NO: 1205349 - RNA, 19 nt, Artificial Sequence
  Description of Artificial Sequence: Synthetic oligonucleotide
  Antisense strand to SEQ ID NO: 1205348
agcauuagccaguucuuuc

SEQ ID NO: 1205350 - RNA, 19 nt, Artificial Sequence
  Description of Artificial Sequence: Synthetic oligonucleotide
  Sense strand starting at position 284 of SEQ ID NO: 917059
ugucuucucccauggauag

SEQ ID NO: 1205351 - RNA, 19 nt, Artificial Sequence
  Description of Artificial Sequence: Synthetic oligonucleotide
  Antisense strand to SEQ ID NO: 1205350
cuauccaugggagaagaca

SEQ ID NO: 1205352 - RNA, 19 nt, Artificial Sequence
  Description of Artificial Sequence: Synthetic oligonucleotide
  Sense strand starting at position 295 of SEQ ID NO: 917059
auggauaggugucucgaaa

SEQ ID NO: 1205353 - RNA, 19 nt, Artificial Sequence
  Description of Artificial Sequence: Synthetic oligonucleotide
  Antisense strand to SEQ ID NO: 1205352
uuucgagacaccuauccau

SEQ ID NO: 1205354 - RNA, 19 nt, Artificial Sequence
  Description of Artificial Sequence: Synthetic oligonucleotide
  Sense strand starting at position 317 of SEQ ID NO: 917059
cuguaaacggauuacuuua

SEQ ID NO: 1205355 - RNA, 19 nt, Artificial Sequence
  Description of Artificial Sequence: Synthetic oligonucleotide
  Antisense strand to SEQ ID NO: 1205354
uaaaguaauccguuuacag

SEQ ID NO: 1205356 - RNA, 19 nt, Artificial Sequence
  Description of Artificial Sequence: Synthetic oligonucleotide
  Sense strand starting at position 319 of SEQ ID NO: 917059
guaaacggauuacuuuaaa

SEQ ID NO: 1205357 - RNA, 19 nt, Artificial Sequence
  Description of Artificial Sequence: Synthetic oligonucleotide
  Antisense strand to SEQ ID NO: 1205356
uuuaaaguaauccguuuac

SEQ ID NO: 1205358 - RNA, 19 nt, Artificial Sequence
  Description of Artificial Sequence: Synthetic oligonucleotide
  Sense strand starting at position 337 of SEQ ID NO: 917059
auuggagucuguuuagaag

SEQ ID NO: 1205359 - RNA, 19 nt, Artificial Sequence
  Description of Artificial Sequence: Synthetic oligonucleotide
  Antisense strand to SEQ ID NO: 1205358
cuucuaaacagacuccaau

SEQ ID NO: 1205360 - RNA, 19 nt, Artificial Sequence
  Description of Artificial Sequence: Synthetic oligonucleotide
  Sense strand starting at position 448 of SEQ ID NO: 917059
uuugucaugcaauaguaau

SEQ ID NO: 1205361 - RNA, 19 nt, Artificial Sequence
  Description of Artificial Sequence: Synthetic oligonucleotide
  Antisense strand to SEQ ID NO: 1205360
auuacuauugcaugacaaa

SEQ ID NO: 1205362 - RNA, 19 nt, Artificial Sequence
  Description of Artificial Sequence: Synthetic oligonucleotide
  Sense strand starting at position 1144 of SEQ ID NO: 917059
gggugauugcuugaaggug

SEQ ID NO: 1205363 - RNA, 19 nt, Artificial Sequence
  Description of Artificial Sequence: Synthetic oligonucleotide
  Antisense strand to SEQ ID NO: 1205362
caccuucaagcaaucaccc

SEQ ID NO: 1205364 - RNA, 19 nt, Artificial Sequence
  Description of Artificial Sequence: Synthetic oligonucleotide
  Sense strand starting at position 1430 of SEQ ID NO: 917059
aaguuaaacggguacgaaa

SEQ ID NO: 1205365 - RNA, 19 nt, Artificial Sequence
  Description of Artificial Sequence: Synthetic oligonucleotide
  Antisense strand to SEQ ID NO: 1205364
uuucguacccguuuaacuu

SEQ ID NO: 1205366 - RNA, 19 nt, Artificial Sequence
  Description of Artificial Sequence: Synthetic oligonucleotide
  Sense strand starting at position 1538 of SEQ ID NO: 917059
guaggaaccgucuggaaac

SEQ ID NO: 1205367 - RNA, 19 nt, Artificial Sequence
  Description of Artificial Sequence: Synthetic oligonucleotide
  Antisense strand to SEQ ID NO: 1205366
guuuccagacgguuccuac

SEQ ID NO: 1205368 - RNA, 19 nt, Artificial Sequence
  Description of Artificial Sequence: Synthetic oligonucleotide
  Sense strand starting at position 1578 of SEQ ID NO: 917059
cggaacauucgagguauag

SEQ ID NO: 1205369 - RNA, 19 nt, Artificial Sequence
  Description of Artificial Sequence: Synthetic oligonucleotide
  Antisense strand to SEQ ID NO: 1205368
cuauaccucgaauguuccg

SEQ ID NO: 1205370 - RNA, 19 nt, Artificial Sequence
  Description of Artificial Sequence: Synthetic oligonucleotide
  Sense strand starting at position 2016 of SEQ ID NO: 917059
cagaaauugccguacggag

SEQ ID NO: 1205371 - RNA, 19 nt, Artificial Sequence
  Description of Artificial Sequence: Synthetic oligonucleotide
  Antisense strand to SEQ ID NO: 1205370
cuccguacggcaauuucug

SEQ ID NO: 1205372 - RNA, 19 nt, Artificial Sequence
  Description of Artificial Sequence: Synthetic oligonucleotide
  Sense strand starting at position 2055 of SEQ ID NO: 917059
gccguaaagccguuuggga

SEQ ID NO: 1205373 - RNA, 19 nt, Artificial Sequence
  Description of Artificial Sequence: Synthetic oligonucleotide
  Antisense strand to SEQ ID NO: 1205372
ucccaaacggcuuuacggc

SEQ ID NO: 1205374 - RNA, 19 nt, Artificial Sequence
  Description of Artificial Sequence: Synthetic oligonucleotide
  Sense strand starting at position 2429 of SEQ ID NO: 917059
gugugacuuagaggcagau

SEQ ID NO: 1205375 - RNA, 19 nt, Artificial Sequence
  Description of Artificial Sequence: Synthetic oligonucleotide
  Antisense strand to SEQ ID NO: 1205374
aucugccucuaagucacac

SEQ ID NO: 1205376 - RNA, 19 nt, Artificial Sequence
  Description of Artificial Sequence: Synthetic oligonucleotide
  Sense strand starting at position 2435 of SEQ ID NO: 917059
cuuagaggcagauguaaua

SEQ ID NO: 1205377 - RNA, 19 nt, Artificial Sequence
  Description of Artificial Sequence: Synthetic oligonucleotide
  Antisense strand to SEQ ID NO: 1205376
uauuacaucugccucuaag

SEQ ID NO: 1205378 - RNA, 19 nt, Artificial Sequence
  Description of Artificial Sequence: Synthetic oligonucleotide
  Sense strand starting at position 2444 of SEQ ID NO: 917059
agauguaauauggguggua

SEQ ID NO: 1205379 - RNA, 19 nt, Artificial Sequence
  Description of Artificial Sequence: Synthetic oligonucleotide
  Antisense strand to SEQ ID NO: 1205378
uaccacccauauuacaucu

SEQ ID NO: 1205380 - RNA, 19 nt, Artificial Sequence
  Description of Artificial Sequence: Synthetic oligonucleotide
  Sense strand starting at position 2445 of SEQ ID NO: 917059
gauguaauaugggugguau

SEQ ID NO: 1205381 - RNA, 19 nt, Artificial Sequence
  Description of Artificial Sequence: Synthetic oligonucleotide
  Antisense strand to SEQ ID NO: 1205380
auaccacccauauuacauc

SEQ ID NO: 1205382 - RNA, 19 nt, Artificial Sequence
  Description of Artificial Sequence: Synthetic oligonucleotide
  Sense strand starting at position 2446 of SEQ ID NO: 917059
auguaauaugggugguauc

SEQ ID NO: 1205383 - RNA, 19 nt, Artificial Sequence
  Description of Artificial Sequence: Synthetic oligonucleotide
  Antisense strand to SEQ ID NO: 1205382
gauaccacccauauuacau

SEQ ID NO: 1205384 - RNA, 19 nt, Artificial Sequence
  Description of Artificial Sequence: Synthetic oligonucleotide
  Sense strand starting at position 2453 of SEQ ID NO: 917059
augggugguauccgggaaa

SEQ ID NO: 1205385 - RNA, 19 nt, Artificial Sequence
  Description of Artificial Sequence: Synthetic oligonucleotide
  Antisense strand to SEQ ID NO: 1205384
uuucccggauaccacccau

SEQ ID NO: 1205386 - RNA, 19 nt, Artificial Sequence
  Description of Artificial Sequence: Synthetic oligonucleotide
  Sense strand starting at position 2455 of SEQ ID NO: 917059
gggugguauccgggaaaua

SEQ ID NO: 1205387 - RNA, 19 nt, Artificial Sequence
  Description of Artificial Sequence: Synthetic oligonucleotide
  Antisense strand to SEQ ID NO: 1205386
uauuucccggauaccaccc

SEQ ID NO: 1205388 - RNA, 19 nt, Artificial Sequence
  Description of Artificial Sequence: Synthetic oligonucleotide
  Sense strand starting at position 2456 of SEQ ID NO: 917059
ggugguauccgggaaauag

SEQ ID NO: 1205389 - RNA, 19 nt, Artificial Sequence
  Description of Artificial Sequence: Synthetic oligonucleotide
  Antisense strand to SEQ ID NO: 1205388
cuauuucccggauaccacc

SEQ ID NO: 1205390 - RNA, 19 nt, Artificial Sequence
  Description of Artificial Sequence: Synthetic oligonucleotide
  Sense strand starting at position 2466 of SEQ ID NO: 917059
gggaaauagaguuguacca

SEQ ID NO: 1205391 - RNA, 19 nt, Artificial Sequence
  Description of Artificial Sequence: Synthetic oligonucleotide
  Antisense strand to SEQ ID NO: 1205390
ugguacaacucuauuuccc

SEQ ID NO: 1205392 - RNA, 19 nt, Artificial Sequence
  Description of Artificial Sequence: Synthetic oligonucleotide
  Sense strand starting at position 2718 of SEQ ID NO: 917059
uuuguuuggaggcaaugaa

SEQ ID NO: 1205393 - RNA, 19 nt, Artificial Sequence
  Description of Artificial Sequence: Synthetic oligonucleotide
  Antisense strand to SEQ ID NO: 1205392
uucauugccuccaaacaaa

SEQ ID NO: 1205394 - RNA, 19 nt, Artificial Sequence
  Description of Artificial Sequence: Synthetic oligonucleotide
  Sense strand starting at position 2736 of SEQ ID NO: 917059
aauggaaaugcguguaaag

SEQ ID NO: 1205395 - RNA, 19 nt, Artificial Sequence
  Description of Artificial Sequence: Synthetic oligonucleotide
  Antisense strand to SEQ ID NO: 1205394
cuuuacacgcauuuccauu

SEQ ID NO: 1205396 - RNA, 19 nt, Artificial Sequence
  Description of Artificial Sequence: Synthetic oligonucleotide
  Sense strand starting at position 2738 of SEQ ID NO: 917059
uggaaaugcguguaaagag

SEQ ID NO: 1205397 - RNA, 19 nt, Artificial Sequence
  Description of Artificial Sequence: Synthetic oligonucleotide
  Antisense strand to SEQ ID NO: 1205396
cucuuuacacgcauuucca

SEQ ID NO: 1205398 - RNA, 19 nt, Artificial Sequence
  Description of Artificial Sequence: Synthetic oligonucleotide
  Sense strand starting at position 2747 of SEQ ID NO: 917059
guguaaagagcccaguaau

SEQ ID NO: 1205399 - RNA, 19 nt, Artificial Sequence
  Description of Artificial Sequence: Synthetic oligonucleotide
  Antisense strand to SEQ ID NO: 1205398
auuacugggcucuuuacac

SEQ ID NO: 1205400 - RNA, 19 nt, Artificial Sequence
  Description of Artificial Sequence: Synthetic oligonucleotide
  Sense strand starting at position 2758 of SEQ ID NO: 917059
ccaguaauagauggaaugu

SEQ ID NO: 1205401 - RNA, 19 nt, Artificial Sequence
  Description of Artificial Sequence: Synthetic oligonucleotide
  Antisense strand to SEQ ID NO: 1205400
acauuccaucuauuacugg

SEQ ID NO: 1205402 - RNA, 19 nt, Artificial Sequence
  Description of Artificial Sequence: Synthetic oligonucleotide
  Sense strand starting at position 2793 of SEQ ID NO: 917059
uuguaaacggcgcuuucaa

SEQ ID NO: 1205403 - RNA, 19 nt, Artificial Sequence
  Description of Artificial Sequence: Synthetic oligonucleotide
  Antisense strand to SEQ ID NO: 1205402
uugaaagcgccguuuacaa

SEQ ID NO: 1205404 - RNA, 19 nt, Artificial Sequence
  Description of Artificial Sequence: Synthetic oligonucleotide
  Sense strand starting at position 3127 of SEQ ID NO: 917059
gaacauuaacaaugucgua

SEQ ID NO: 1205405 - RNA, 19 nt, Artificial Sequence
  Description of Artificial Sequence: Synthetic oligonucleotide
  Antisense strand to SEQ ID NO: 1205404
uacgacauuguuaauguuc

SEQ ID NO: 1205406 - RNA, 19 nt, Artificial Sequence
  Description of Artificial Sequence: Synthetic oligonucleotide
  Sense strand starting at position 3199 of SEQ ID NO: 917059
ucuggcugcccucaaacau

SEQ ID NO: 1205407 - RNA, 19 nt, Artificial Sequence
  Description of Artificial Sequence: Synthetic oligonucleotide
  Antisense strand to SEQ ID NO: 1205406
auguuugagggcagccaga

SEQ ID NO: 1205408 - RNA, 19 nt, Artificial Sequence
  Description of Artificial Sequence: Synthetic oligonucleotide
  Sense strand starting at position 3216 of SEQ ID NO: 917059
aucagagauguauguugga

SEQ ID NO: 1205409 - RNA, 19 nt, Artificial Sequence
  Description of Artificial Sequence: Synthetic oligonucleotide
  Antisense strand to SEQ ID NO: 1205408
uccaacauacaucucugau

SEQ ID NO: 1205410 - RNA, 19 nt, Artificial Sequence
  Description of Artificial Sequence: Synthetic oligonucleotide
  Sense strand starting at position 3262 of SEQ ID NO: 917059
uugugacuuggcuaucaag

SEQ ID NO: 1205411 - RNA, 19 nt, Artificial Sequence
  Description of Artificial Sequence: Synthetic oligonucleotide
  Antisense strand to SEQ ID NO: 1205410
cuugauagccaagucacaa

SEQ ID NO: 1205412 - RNA, 19 nt, Artificial Sequence
  Description of Artificial Sequence: Synthetic oligonucleotide
  Sense strand starting at position 3472 of SEQ ID NO: 917059
uuuauugagcccugacuau

SEQ ID NO: 1205413 - RNA, 19 nt, Artificial Sequence
  Description of Artificial Sequence: Synthetic oligonucleotide
  Antisense strand to SEQ ID NO: 1205412
auagucagggcucaauaaa

SEQ ID NO: 1205414 - RNA, 19 nt, Artificial Sequence
  Description of Artificial Sequence: Synthetic oligonucleotide
  Sense strand starting at position 3537 of SEQ ID NO: 917059
agcauuagucuguaagaua

SEQ ID NO: 1205415 - RNA, 19 nt, Artificial Sequence
  Description of Artificial Sequence: Synthetic oligonucleotide
  Antisense strand to SEQ ID NO: 1205414
uaucuuacagacuaaugcu

SEQ ID NO: 1205416 - RNA, 19 nt, Artificial Sequence
  Description of Artificial Sequence: Synthetic oligonucleotide
  Sense strand starting at position 3572 of SEQ ID NO: 917059
ucucuugaguccucugaau

SEQ ID NO: 1205417 - RNA, 19 nt, Artificial Sequence
  Description of Artificial Sequence: Synthetic oligonucleotide
  Antisense strand to SEQ ID NO: 1205416
auucagaggacucaagaga

SEQ ID NO: 1205418 - RNA, 19 nt, Artificial Sequence
  Description of Artificial Sequence: Synthetic oligonucleotide
  Sense strand starting at position 3578 of SEQ ID NO: 917059
gaguccucugaaugcugaa

SEQ ID NO: 1205419 - RNA, 19 nt, Artificial Sequence
  Description of Artificial Sequence: Synthetic oligonucleotide
  Antisense strand to SEQ ID NO: 1205418
uucagcauucagaggacuc

SEQ ID NO: 1205420 - RNA, 19 nt, Artificial Sequence
  Description of Artificial Sequence: Synthetic oligonucleotide
  Sense strand starting at position 3597 of SEQ ID NO: 917059
cuagucuugugauuuguuu

SEQ ID NO: 1205421 - RNA, 19 nt, Artificial Sequence
  Description of Artificial Sequence: Synthetic oligonucleotide
  Antisense strand to SEQ ID NO: 1205420
aaacaaaucacaagacuag

SEQ ID NO: 1205422 - RNA, 19 nt, Artificial Sequence
  Description of Artificial Sequence: Synthetic oligonucleotide
  Sense strand starting at position 3747 of SEQ ID NO: 917059
aaguuaacagaucacguau

SEQ ID NO: 1205423 - RNA, 19 nt, Artificial Sequence
  Description of Artificial Sequence: Synthetic oligonucleotide
  Antisense strand to SEQ ID NO: 1205422
auacgugaucuguuaacuu

SEQ ID NO: 1205424 - RNA, 19 nt, Artificial Sequence
  Description of Artificial Sequence: Synthetic oligonucleotide
  Sense strand starting at position 3906 of SEQ ID NO: 917059
ugcagauaagcuugauuga

SEQ ID NO: 1205425 - RNA, 19 nt, Artificial Sequence
  Description of Artificial Sequence: Synthetic oligonucleotide
  Antisense strand to SEQ ID NO: 1205424
ucaaucaagcuuaucugca

SEQ ID NO: 1205426 - RNA, 19 nt, Artificial Sequence
  Description of Artificial Sequence: Synthetic oligonucleotide
  Sense strand starting at position 3907 of SEQ ID NO: 917059
gcagauaagcuugauugau

SEQ ID NO: 1205427 - RNA, 19 nt, Artificial Sequence
  Description of Artificial Sequence: Synthetic oligonucleotide
  Antisense strand to SEQ ID NO: 1205426
aucaaucaagcuuaucugc

SEQ ID NO: 1205428 - RNA, 19 nt, Artificial Sequence
  Description of Artificial Sequence: Synthetic oligonucleotide
  Sense strand starting at position 250 of SEQ ID NO: 917060
acuguugguccugagaaag

SEQ ID NO: 1205429 - RNA, 19 nt, Artificial Sequence
  Description of Artificial Sequence: Synthetic oligonucleotide
  Antisense strand to SEQ ID NO: 1205428
cuuucucaggaccaacagu

SEQ ID NO: 1205430 - RNA, 19 nt, Artificial Sequence
  Description of Artificial Sequence: Synthetic oligonucleotide
  Sense strand starting at position 256 of SEQ ID NO: 917060
gguccugagaaaggaguua

SEQ ID NO: 1205431 - RNA, 19 nt, Artificial Sequence
  Description of Artificial Sequence: Synthetic oligonucleotide
  Antisense strand to SEQ ID NO: 1205430
uaacuccuuucucaggacc

SEQ ID NO: 1205432 - RNA, 19 nt, Artificial Sequence
  Description of Artificial Sequence: Synthetic oligonucleotide
  Sense strand starting at position 267 of SEQ ID NO: 917060
aggaguuaaucacuguccu

SEQ ID NO: 1205433 - RNA, 19 nt, Artificial Sequence
  Description of Artificial Sequence: Synthetic oligonucleotide
  Antisense strand to SEQ ID NO: 1205432
aggacagugauuaacuccu

SEQ ID NO: 1205434 - RNA, 19 nt, Artificial Sequence
  Description of Artificial Sequence: Synthetic oligonucleotide
  Sense strand starting at position 268 of SEQ ID NO: 917060
ggaguuaaucacuguccug

SEQ ID NO: 1205435 - RNA, 19 nt, Artificial Sequence
  Description of Artificial Sequence: Synthetic oligonucleotide
  Antisense strand to SEQ ID NO: 1205434
caggacagugauuaacucc

SEQ ID NO: 1205436 - RNA, 19 nt, Artificial Sequence
  Description of Artificial Sequence: Synthetic oligonucleotide
  Sense strand starting at position 271 of SEQ ID NO: 917060
guuaaucacuguccugaac

SEQ ID NO: 1205437 - RNA, 19 nt, Artificial Sequence
  Description of Artificial Sequence: Synthetic oligonucleotide
  Antisense strand to SEQ ID NO: 1205436
guucaggacagugauuaac

SEQ ID NO: 1205438 - RNA, 19 nt, Artificial Sequence
  Description of Artificial Sequence: Synthetic oligonucleotide
  Sense strand starting at position 739 of SEQ ID NO: 917060
guaacuuuccaaggccaua

SEQ ID NO: 1205439 - RNA, 19 nt, Artificial Sequence
  Description of Artificial Sequence: Synthetic oligonucleotide
  Antisense strand to SEQ ID NO: 1205438
uauggccuuggaaaguuac

SEQ ID NO: 1205440 - RNA, 19 nt, Artificial Sequence
  Description of Artificial Sequence: Synthetic oligonucleotide
  Sense strand starting at position 1004 of SEQ ID NO: 917060
ugauacaauccaugauguu

SEQ ID NO: 1205441 - RNA, 19 nt, Artificial Sequence
  Description of Artificial Sequence: Synthetic oligonucleotide
  Antisense strand to SEQ ID NO: 1205440
aacaucauggauuguauca

SEQ ID NO: 1205442 - RNA, 19 nt, Artificial Sequence
  Description of Artificial Sequence: Synthetic oligonucleotide
  Sense strand starting at position 1121 of SEQ ID NO: 917060
ggguucuguucucuacaag

SEQ ID NO: 1205443 - RNA, 19 nt, Artificial Sequence
  Description of Artificial Sequence: Synthetic oligonucleotide
  Antisense strand to SEQ ID NO: 1205442
cuuguagagaacagaaccc

SEQ ID NO: 1205444 - RNA, 19 nt, Artificial Sequence
  Description of Artificial Sequence: Synthetic oligonucleotide
  Sense strand starting at position 1122 of SEQ ID NO: 917060
gguucuguucucuacaaga

SEQ ID NO: 1205445 - RNA, 19 nt, Artificial Sequence
  Description of Artificial Sequence: Synthetic oligonucleotide
  Antisense strand to SEQ ID NO: 1205444
ucuuguagagaacagaacc

SEQ ID NO: 1205446 - RNA, 19 nt, Artificial Sequence
  Description of Artificial Sequence: Synthetic oligonucleotide
  Sense strand starting at position 1170 of SEQ ID NO: 917060
uuguacugucaguaacuua

SEQ ID NO: 1205447 - RNA, 19 nt, Artificial Sequence
  Description of Artificial Sequence: Synthetic oligonucleotide
  Antisense strand to SEQ ID NO: 1205446
uaaguuacugacaguacaa

SEQ ID NO: 1205448 - RNA, 19 nt, Artificial Sequence
  Description of Artificial Sequence: Synthetic oligonucleotide
  Sense strand starting at position 1181 of SEQ ID NO: 917060
guaacuuagggugacugau

SEQ ID NO: 1205449 - RNA, 19 nt, Artificial Sequence
  Description of Artificial Sequence: Synthetic oligonucleotide
  Antisense strand to SEQ ID NO: 1205448
aucagucacccuaaguuac

SEQ ID NO: 1205450 - RNA, 19 nt, Artificial Sequence
  Description of Artificial Sequence: Synthetic oligonucleotide
  Sense strand starting at position 1267 of SEQ ID NO: 917060
uccugacucccuugugaaa

SEQ ID NO: 1205451 - RNA, 19 nt, Artificial Sequence
  Description of Artificial Sequence: Synthetic oligonucleotide
  Antisense strand to SEQ ID NO: 1205450
uuucacaagggagucagga

SEQ ID NO: 1205452 - RNA, 19 nt, Artificial Sequence
  Description of Artificial Sequence: Synthetic oligonucleotide
  Sense strand starting at position 1288 of SEQ ID NO: 917060
ggugcuacuagagaaguua

SEQ ID NO: 1205453 - RNA, 19 nt, Artificial Sequence
  Description of Artificial Sequence: Synthetic oligonucleotide
  Antisense strand to SEQ ID NO: 1205452
uaacuucucuaguagcacc

SEQ ID NO: 1205454 - RNA, 19 nt, Artificial Sequence
  Description of Artificial Sequence: Synthetic oligonucleotide
  Sense strand starting at position 1383 of SEQ ID NO: 917060
aggugcagguguuucaaga

SEQ ID NO: 1205455 - RNA, 19 nt, Artificial Sequence
  Description of Artificial Sequence: Synthetic oligonucleotide
  Antisense strand to SEQ ID NO: 1205454
ucuugaaacaccugcaccu

SEQ ID NO: 1205456 - RNA, 19 nt, Artificial Sequence
  Description of Artificial Sequence: Synthetic oligonucleotide
  Sense strand starting at position 1416 of SEQ ID NO: 917060
cacguaugaucccuguaau

SEQ ID NO: 1205457 - RNA, 19 nt, Artificial Sequence
  Description of Artificial Sequence: Synthetic oligonucleotide
  Antisense strand to SEQ ID NO: 1205456
auuacagggaucauacgug

SEQ ID NO: 1205458 - RNA, 19 nt, Artificial Sequence
  Description of Artificial Sequence: Synthetic oligonucleotide
  Sense strand starting at position 1417 of SEQ ID NO: 917060
acguaugaucccuguaaug

SEQ ID NO: 1205459 - RNA, 19 nt, Artificial Sequence
  Description of Artificial Sequence: Synthetic oligonucleotide
  Antisense strand to SEQ ID NO: 1205458
cauuacagggaucauacgu

SEQ ID NO: 1205460 - RNA, 19 nt, Artificial Sequence
  Description of Artificial Sequence: Synthetic oligonucleotide
  Sense strand starting at position 1419 of SEQ ID NO: 917060
guaugaucccuguaaugaa

SEQ ID NO: 1205461 - RNA, 19 nt, Artificial Sequence
  Description of Artificial Sequence: Synthetic oligonucleotide
  Antisense strand to SEQ ID NO: 1205460
uucauuacagggaucauac

SEQ ID NO: 1205462 - RNA, 19 nt, Artificial Sequence
  Description of Artificial Sequence: Synthetic oligonucleotide
  Sense strand starting at position 1498 of SEQ ID NO: 917060
ggaggaaacaccugacgua

SEQ ID NO: 1205463 - RNA, 19 nt, Artificial Sequence
  Description of Artificial Sequence: Synthetic oligonucleotide
  Antisense strand to SEQ ID NO: 1205462
uacgucagguguuuccucc

SEQ ID NO: 1205464 - RNA, 19 nt, Artificial Sequence
  Description of Artificial Sequence: Synthetic oligonucleotide
  Sense strand starting at position 1536 of SEQ ID NO: 917060
gggcuaucacaguggcuua

SEQ ID NO: 1205465 - RNA, 19 nt, Artificial Sequence
  Description of Artificial Sequence: Synthetic oligonucleotide
  Antisense strand to SEQ ID NO: 1205464
uaagccacugugauagccc

SEQ ID NO: 1205466 - RNA, 19 nt, Artificial Sequence
  Description of Artificial Sequence: Synthetic oligonucleotide
  Sense strand starting at position 1549 of SEQ ID NO: 917060
ggcuuacucugcucucaca

SEQ ID NO: 1205467 - RNA, 19 nt, Artificial Sequence
  Description of Artificial Sequence: Synthetic oligonucleotide
  Antisense strand to SEQ ID NO: 1205466
ugugagagcagaguaagcc

SEQ ID NO: 1205468 - RNA, 19 nt, Artificial Sequence
  Description of Artificial Sequence: Synthetic oligonucleotide
  Sense strand starting at position 2076 of SEQ ID NO: 917060
cccggugguuauucagauu

SEQ ID NO: 1205469 - RNA, 19 nt, Artificial Sequence
  Description of Artificial Sequence: Synthetic oligonucleotide
  Antisense strand to SEQ ID NO: 1205468
aaucugaauaaccaccggg

SEQ ID NO: 1205470 - RNA, 19 nt, Artificial Sequence
  Description of Artificial Sequence: Synthetic oligonucleotide
  Sense strand starting at position 2138 of SEQ ID NO: 917060
gagucgucgggcgcugaaa

SEQ ID NO: 1205471 - RNA, 19 nt, Artificial Sequence
  Description of Artificial Sequence: Synthetic oligonucleotide
  Antisense strand to SEQ ID NO: 1205470
uuucagcgcccgacgacuc

SEQ ID NO: 1205472 - RNA, 19 nt, Artificial Sequence
  Description of Artificial Sequence: Synthetic oligonucleotide
  Sense strand starting at position 2271 of SEQ ID NO: 917060
ugggcagacuucgucucaa

SEQ ID NO: 1205473 - RNA, 19 nt, Artificial Sequence
  Description of Artificial Sequence: Synthetic oligonucleotide
  Antisense strand to SEQ ID NO: 1205472
uugagacgaagucugccca

SEQ ID NO: 1205474 - RNA, 19 nt, Artificial Sequence
  Description of Artificial Sequence: Synthetic oligonucleotide
  Sense strand starting at position 2369 of SEQ ID NO: 917060
gcaagaugauaucuuaagg

SEQ ID NO: 1205475 - RNA, 19 nt, Artificial Sequence
  Description of Artificial Sequence: Synthetic oligonucleotide
  Antisense strand to SEQ ID NO: 1205474
ccuuaagauaucaucuugc

SEQ ID NO: 1205476 - RNA, 19 nt, Artificial Sequence
  Description of Artificial Sequence: Synthetic oligonucleotide
  Sense strand starting at position 2385 of SEQ ID NO: 917060
aggcuaaacuuggauagga

SEQ ID NO: 1205477 - RNA, 19 nt, Artificial Sequence
  Description of Artificial Sequence: Synthetic oligonucleotide
  Antisense strand to SEQ ID NO: 1205476
uccuauccaaguuuagccu

SEQ ID NO: 1205478 - RNA, 19 nt, Artificial Sequence
  Description of Artificial Sequence: Synthetic oligonucleotide
  Sense strand starting at position 2590 of SEQ ID NO: 917060
gucagaaguuucuuagcuu

SEQ ID NO: 1205479 - RNA, 19 nt, Artificial Sequence
  Description of Artificial Sequence: Synthetic oligonucleotide
  Antisense strand to SEQ ID NO: 1205478
aagcuaagaaacuucugac

SEQ ID NO: 1205480 - RNA, 19 nt, Artificial Sequence
  Description of Artificial Sequence: Synthetic oligonucleotide
  Sense strand starting at position 2594 of SEQ ID NO: 917060
gaaguuucuuagcuuugca

SEQ ID NO: 1205481 - RNA, 19 nt, Artificial Sequence
  Description of Artificial Sequence: Synthetic oligonucleotide
  Antisense strand to SEQ ID NO: 1205480
ugcaaagcuaagaaacuuc

SEQ ID NO: 1205482 - RNA, 19 nt, Artificial Sequence
  Description of Artificial Sequence: Synthetic oligonucleotide
  Sense strand starting at position 2670 of SEQ ID NO: 917060
gggaaucuugaguggacuu

SEQ ID NO: 1205483 - RNA, 19 nt, Artificial Sequence
  Description of Artificial Sequence: Synthetic oligonucleotide
  Antisense strand to SEQ ID NO: 1205482
aaguccacucaagauuccc

SEQ ID NO: 1205484 - RNA, 19 nt, Artificial Sequence
  Description of Artificial Sequence: Synthetic oligonucleotide
  Sense strand starting at position 2671 of SEQ ID NO: 917060
ggaaucuugaguggacuuu

SEQ ID NO: 1205485 - RNA, 19 nt, Artificial Sequence
  Description of Artificial Sequence: Synthetic oligonucleotide
  Antisense strand to SEQ ID NO: 1205484
aaaguccacucaagauucc

SEQ ID NO: 1205486 - RNA, 19 nt, Artificial Sequence
  Description of Artificial Sequence: Synthetic oligonucleotide
  Sense strand starting at position 2804 of SEQ ID NO: 917060
ccauguuaccucugaguug

SEQ ID NO: 1205487 - RNA, 19 nt, Artificial Sequence
  Description of Artificial Sequence: Synthetic oligonucleotide
  Antisense strand to SEQ ID NO: 1205486
caacucagagguaacaugg

SEQ ID NO: 1205488 - RNA, 19 nt, Artificial Sequence
  Description of Artificial Sequence: Synthetic oligonucleotide
  Sense strand starting at position 2815 of SEQ ID NO: 917060
cugaguuguagugaggauc

SEQ ID NO: 1205489 - RNA, 19 nt, Artificial Sequence
  Description of Artificial Sequence: Synthetic oligonucleotide
  Antisense strand to SEQ ID NO: 1205488
gauccucacuacaacucag

SEQ ID NO: 1205490 - RNA, 19 nt, Artificial Sequence
  Description of Artificial Sequence: Synthetic oligonucleotide
  Sense strand starting at position 2818 of SEQ ID NO: 917060
aguuguagugaggaucaau

SEQ ID NO: 1205491 - RNA, 19 nt, Artificial Sequence
  Description of Artificial Sequence: Synthetic oligonucleotide
  Antisense strand to SEQ ID NO: 1205490
auugauccucacuacaacu

SEQ ID NO: 1205492 - RNA, 19 nt, Artificial Sequence
  Description of Artificial Sequence: Synthetic oligonucleotide
  Sense strand starting at position 2889 of SEQ ID NO: 917060
ggaacuuaauugcucaaua

SEQ ID NO: 1205493 - RNA, 19 nt, Artificial Sequence
  Description of Artificial Sequence: Synthetic oligonucleotide
  Antisense strand to SEQ ID NO: 1205492
uauugagcaauuaaguucc

SEQ ID NO: 1205494 - RNA, 19 nt, Artificial Sequence
  Description of Artificial Sequence: Synthetic oligonucleotide
  Sense strand starting at position 2961 of SEQ ID NO: 917060
gccuuugggaucuggucaa

SEQ ID NO: 1205495 - RNA, 19 nt, Artificial Sequence
  Description of Artificial Sequence: Synthetic oligonucleotide
  Antisense strand to SEQ ID NO: 1205494
uugaccagaucccaaaggc

SEQ ID NO: 1205496 - RNA, 19 nt, Artificial Sequence
  Description of Artificial Sequence: Synthetic oligonucleotide
  Sense strand starting at position 2990 of SEQ ID NO: 917060
uuccuucuuugagugcaaa

SEQ ID NO: 1205497 - RNA, 19 nt, Artificial Sequence
  Description of Artificial Sequence: Synthetic oligonucleotide
  Antisense strand to SEQ ID NO: 1205496
uuugcacucaaagaaggaa

SEQ ID NO: 1205498 - RNA, 19 nt, Artificial Sequence
  Description of Artificial Sequence: Synthetic oligonucleotide
  Sense strand starting at position 2991 of SEQ ID NO: 917060
uccuucuuugagugcaaag

SEQ ID NO: 1205499 - RNA, 19 nt, Artificial Sequence
  Description of Artificial Sequence: Synthetic oligonucleotide
  Antisense strand to SEQ ID NO: 1205498
cuuugcacucaaagaagga

SEQ ID NO: 1205500 - RNA, 19 nt, Artificial Sequence
  Description of Artificial Sequence: Synthetic oligonucleotide
  Sense strand starting at position 3355 of SEQ ID NO: 917060
aucauagagucugaacaag

SEQ ID NO: 1205501 - RNA, 19 nt, Artificial Sequence
  Description of Artificial Sequence: Synthetic oligonucleotide
  Antisense strand to SEQ ID NO: 1205500
cuuguucagacucuaugau

SEQ ID NO: 1205502 - RNA, 19 nt, Artificial Sequence
  Description of Artificial Sequence: Synthetic oligonucleotide
  Sense strand starting at position 3367 of SEQ ID NO: 917060
gaacaagcagagugauauu

SEQ ID NO: 1205503 - RNA, 19 nt, Artificial Sequence
  Description of Artificial Sequence: Synthetic oligonucleotide
  Antisense strand to SEQ ID NO: 1205502
aauaucacucugcuuguuc

SEQ ID NO: 1205504 - RNA, 19 nt, Artificial Sequence
  Description of Artificial Sequence: Synthetic oligonucleotide
  Sense strand starting at position 3376 of SEQ ID NO: 917060
gagugauauuuguggaugg

SEQ ID NO: 1205505 - RNA, 19 nt, Artificial Sequence
  Description of Artificial Sequence: Synthetic oligonucleotide
  Antisense strand to SEQ ID NO: 1205504
ccauccacaaauaucacuc

SEQ ID NO: 1205506 - RNA, 19 nt, Artificial Sequence
  Description of Artificial Sequence: Synthetic oligonucleotide
  Sense strand starting at position 3831 of SEQ ID NO: 917060
gguucucagccucaacaga

SEQ ID NO: 1205507 - RNA, 19 nt, Artificial Sequence
  Description of Artificial Sequence: Synthetic oligonucleotide
  Antisense strand to SEQ ID NO: 1205506
ucuguugaggcugagaacc

SEQ ID NO: 1205508 - RNA, 19 nt, Artificial Sequence
  Description of Artificial Sequence: Synthetic oligonucleotide
  Sense strand starting at position 150 of SEQ ID NO: 917061
caacguuauuaugugucaa

SEQ ID NO: 1205509 - RNA, 19 nt, Artificial Sequence
  Description of Artificial Sequence: Synthetic oligonucleotide
  Antisense strand to SEQ ID NO: 1205508
uugacacauaauaacguug

SEQ ID NO: 1205510 - RNA, 19 nt, Artificial Sequence
  Description of Artificial Sequence: Synthetic oligonucleotide
  Sense strand starting at position 168 of SEQ ID NO: 917061
aguuacaaagcccaugaau

SEQ ID NO: 1205511 - RNA, 19 nt, Artificial Sequence
  Description of Artificial Sequence: Synthetic oligonucleotide
  Antisense strand to SEQ ID NO: 1205510
auucaugggcuuuguaacu

SEQ ID NO: 1205512 - RNA, 19 nt, Artificial Sequence
  Description of Artificial Sequence: Synthetic oligonucleotide
  Sense strand starting at position 192 of SEQ ID NO: 917061
ggguguauuaauggaaaga

SEQ ID NO: 1205513 - RNA, 19 nt, Artificial Sequence
  Description of Artificial Sequence: Synthetic oligonucleotide
  Antisense strand to SEQ ID NO: 1205512
ucuuuccauuaauacaccc

SEQ ID NO: 1205514 - RNA, 19 nt, Artificial Sequence
  Description of Artificial Sequence: Synthetic oligonucleotide
  Sense strand starting at position 203 of SEQ ID NO: 917061
uggaaagacugauaccauc

SEQ ID NO: 1205515 - RNA, 19 nt, Artificial Sequence
  Description of Artificial Sequence: Synthetic oligonucleotide
  Antisense strand to SEQ ID NO: 1205514
gaugguaucagucuuucca

SEQ ID NO: 1205516 - RNA, 19 nt, Artificial Sequence
  Description of Artificial Sequence: Synthetic oligonucleotide
  Sense strand starting at position 240 of SEQ ID NO: 917061
uguagcuccggacaaugau

SEQ ID NO: 1205517 - RNA, 19 nt, Artificial Sequence
  Description of Artificial Sequence: Synthetic oligonucleotide
  Antisense strand to SEQ ID NO: 1205516
aucauuguccggagcuaca

SEQ ID NO: 1205518 - RNA, 19 nt, Artificial Sequence
  Description of Artificial Sequence: Synthetic oligonucleotide
  Sense strand starting at position 248 of SEQ ID NO: 917061
cggacaaugaucuguugag

SEQ ID NO: 1205519 - RNA, 19 nt, Artificial Sequence
  Description of Artificial Sequence: Synthetic oligonucleotide
  Antisense strand to SEQ ID NO: 1205518
cucaacagaucauuguccg

SEQ ID NO: 1205520 - RNA, 19 nt, Artificial Sequence
  Description of Artificial Sequence: Synthetic oligonucleotide
  Sense strand starting at position 252 of SEQ ID NO: 917061
caaugaucuguugaggguu

SEQ ID NO: 1205521 - RNA, 19 nt, Artificial Sequence
  Description of Artificial Sequence: Synthetic oligonucleotide
  Antisense strand to SEQ ID NO: 1205520
aacccucaacagaucauug

SEQ ID NO: 1205522 - RNA, 19 nt, Artificial Sequence
  Description of Artificial Sequence: Synthetic oligonucleotide
  Sense strand starting at position 323 of SEQ ID NO: 917061
uggcuuggugcugaacaau

SEQ ID NO: 1205523 - RNA, 19 nt, Artificial Sequence
  Description of Artificial Sequence: Synthetic oligonucleotide
  Antisense strand to SEQ ID NO: 1205522
auuguucagcaccaagcca

SEQ ID NO: 1205524 - RNA, 19 nt, Artificial Sequence
  Description of Artificial Sequence: Synthetic oligonucleotide
  Sense strand starting at position 511 of SEQ ID NO: 917061
agaucagacuuuccgagaa

SEQ ID NO: 1205525 - RNA, 19 nt, Artificial Sequence
  Description of Artificial Sequence: Synthetic oligonucleotide
  Antisense strand to SEQ ID NO: 1205524
uucucggaaagucugaucu

SEQ ID NO: 1205526 - RNA, 19 nt, Artificial Sequence
  Description of Artificial Sequence: Synthetic oligonucleotide
  Sense strand starting at position 521 of SEQ ID NO: 917061
uuccgagaaugaguccaaa

SEQ ID NO: 1205527 - RNA, 19 nt, Artificial Sequence
  Description of Artificial Sequence: Synthetic oligonucleotide
  Antisense strand to SEQ ID NO: 1205526
uuuggacucauucucggaa

SEQ ID NO: 1205528 - RNA, 19 nt, Artificial Sequence
  Description of Artificial Sequence: Synthetic oligonucleotide
  Sense strand starting at position 531 of SEQ ID NO: 917061
gaguccaaauggguugaga

SEQ ID NO: 1205529 - RNA, 19 nt, Artificial Sequence
  Description of Artificial Sequence: Synthetic oligonucleotide
  Antisense strand to SEQ ID NO: 1205528
ucucaacccauuuggacuc

SEQ ID NO: 1205530 - RNA, 19 nt, Artificial Sequence
  Description of Artificial Sequence: Synthetic oligonucleotide
  Sense strand starting at position 533 of SEQ ID NO: 917061
guccaaauggguugagaga

SEQ ID NO: 1205531 - RNA, 19 nt, Artificial Sequence
  Description of Artificial Sequence: Synthetic oligonucleotide
  Antisense strand to SEQ ID NO: 1205530
ucucucaacccauuuggac

SEQ ID NO: 1205532 - RNA, 19 nt, Artificial Sequence
  Description of Artificial Sequence: Synthetic oligonucleotide
  Sense strand starting at position 564 of SEQ ID NO: 917061
acugcaaaucugcaaggau

SEQ ID NO: 1205533 - RNA, 19 nt, Artificial Sequence
  Description of Artificial Sequence: Synthetic oligonucleotide
  Antisense strand to SEQ ID NO: 1205532
auccuugcagauuugcagu

SEQ ID NO: 1205534 - RNA, 19 nt, Artificial Sequence
  Description of Artificial Sequence: Synthetic oligonucleotide
  Sense strand starting at position 567 of SEQ ID NO: 917061
gcaaaucugcaaggaugaa

SEQ ID NO: 1205535 - RNA, 19 nt, Artificial Sequence
  Description of Artificial Sequence: Synthetic oligonucleotide
  Antisense strand to SEQ ID NO: 1205534
uucauccuugcagauuugc

SEQ ID NO: 1205536 - RNA, 19 nt, Artificial Sequence
  Description of Artificial Sequence: Synthetic oligonucleotide
  Sense strand starting at position 587 of SEQ ID NO: 917061
ucaguuacccgagagcaaa

SEQ ID NO: 1205537 - RNA, 19 nt, Artificial Sequence
  Description of Artificial Sequence: Synthetic oligonucleotide
  Antisense strand to SEQ ID NO: 1205536
uuugcucucggguaacuga

SEQ ID NO: 1205538 - RNA, 19 nt, Artificial Sequence
  Description of Artificial Sequence: Synthetic oligonucleotide
  Sense strand starting at position 1299 of SEQ ID NO: 917061
cgacucagcccuuauuacu

SEQ ID NO: 1205539 - RNA, 19 nt, Artificial Sequence
  Description of Artificial Sequence: Synthetic oligonucleotide
  Antisense strand to SEQ ID NO: 1205538
aguaauaagggcugagucg

SEQ ID NO: 1205540 - RNA, 19 nt, Artificial Sequence
  Description of Artificial Sequence: Synthetic oligonucleotide
  Sense strand starting at position 2120 of SEQ ID NO: 917061
cccuaugauugggcuguga

SEQ ID NO: 1205541 - RNA, 19 nt, Artificial Sequence
  Description of Artificial Sequence: Synthetic oligonucleotide
  Antisense strand to SEQ ID NO: 1205540
ucacagcccaaucauaggg

SEQ ID NO: 1205542 - RNA, 19 nt, Artificial Sequence
  Description of Artificial Sequence: Synthetic oligonucleotide
  Sense strand starting at position 2180 of SEQ ID NO: 917061
gcgccaugaggucauaaga

SEQ ID NO: 1205543 - RNA, 19 nt, Artificial Sequence
  Description of Artificial Sequence: Synthetic oligonucleotide
  Antisense strand to SEQ ID NO: 1205542
ucuuaugaccucauggcgc

SEQ ID NO: 1205544 - RNA, 19 nt, Artificial Sequence
  Description of Artificial Sequence: Synthetic oligonucleotide
  Sense strand starting at position 2217 of SEQ ID NO: 917061
gagagauaccgcgauccaa

SEQ ID NO: 1205545 - RNA, 19 nt, Artificial Sequence
  Description of Artificial Sequence: Synthetic oligonucleotide
  Antisense strand to SEQ ID NO: 1205544
uuggaucgcgguaucucuc

SEQ ID NO: 1205546 - RNA, 19 nt, Artificial Sequence
  Description of Artificial Sequence: Synthetic oligonucleotide
  Sense strand starting at position 2329 of SEQ ID NO: 917061
uuaggugucauugguuacu

SEQ ID NO: 1205547 - RNA, 19 nt, Artificial Sequence
  Description of Artificial Sequence: Synthetic oligonucleotide
  Antisense strand to SEQ ID NO: 1205546
aguaaccaaugacaccuaa

SEQ ID NO: 1205548 - RNA, 19 nt, Artificial Sequence
  Description of Artificial Sequence: Synthetic oligonucleotide
  Sense strand starting at position 2334 of SEQ ID NO: 917061
ugucauugguuacuuggaa

SEQ ID NO: 1205549 - RNA, 19 nt, Artificial Sequence
  Description of Artificial Sequence: Synthetic oligonucleotide
  Antisense strand to SEQ ID NO: 1205548
uuccaaguaaccaaugaca

SEQ ID NO: 1205550 - RNA, 19 nt, Artificial Sequence
  Description of Artificial Sequence: Synthetic oligonucleotide
  Sense strand starting at position 2335 of SEQ ID NO: 917061
gucauugguuacuuggaau

SEQ ID NO: 1205551 - RNA, 19 nt, Artificial Sequence
  Description of Artificial Sequence: Synthetic oligonucleotide
  Antisense strand to SEQ ID NO: 1205550
auuccaaguaaccaaugac

SEQ ID NO: 1205552 - RNA, 19 nt, Artificial Sequence
  Description of Artificial Sequence: Synthetic oligonucleotide
  Sense strand starting at position 2404 of SEQ ID NO: 917061
uguacugggcauugaguau

SEQ ID NO: 1205553 - RNA, 19 nt, Artificial Sequence
  Description of Artificial Sequence: Synthetic oligonucleotide
  Antisense strand to SEQ ID NO: 1205552
auacucaaugcccaguaca

SEQ ID NO: 1205554 - RNA, 19 nt, Artificial Sequence
  Description of Artificial Sequence: Synthetic oligonucleotide
  Sense strand starting at position 2410 of SEQ ID NO: 917061
gggcauugaguauacaguu

SEQ ID NO: 1205555 - RNA, 19 nt, Artificial Sequence
  Description of Artificial Sequence: Synthetic oligonucleotide
  Antisense strand to SEQ ID NO: 1205554
aacuguauacucaaugccc

SEQ ID NO: 1205556 - RNA, 19 nt, Artificial Sequence
  Description of Artificial Sequence: Synthetic oligonucleotide
  Sense strand starting at position 2572 of SEQ ID NO: 917061
gguaguaagagauggcacu

SEQ ID NO: 1205557 - RNA, 19 nt, Artificial Sequence
  Description of Artificial Sequence: Synthetic oligonucleotide
  Antisense strand to SEQ ID NO: 1205556
agugccaucucuuacuacc

SEQ ID NO: 1205558 - RNA, 19 nt, Artificial Sequence
  Description of Artificial Sequence: Synthetic oligonucleotide
  Sense strand starting at position 2573 of SEQ ID NO: 917061
guaguaagagauggcacuu

SEQ ID NO: 1205559 - RNA, 19 nt, Artificial Sequence
  Description of Artificial Sequence: Synthetic oligonucleotide
  Antisense strand to SEQ ID NO: 1205558
aagugccaucucuuacuac

SEQ ID NO: 1205560 - RNA, 19 nt, Artificial Sequence
  Description of Artificial Sequence: Synthetic oligonucleotide
  Sense strand starting at position 2597 of SEQ ID NO: 917061
gaagguggcgucuaaggaa

SEQ ID NO: 1205561 - RNA, 19 nt, Artificial Sequence
  Description of Artificial Sequence: Synthetic oligonucleotide
  Antisense strand to SEQ ID NO: 1205560
uuccuuagacgccaccuuc

SEQ ID NO: 1205562 - RNA, 19 nt, Artificial Sequence
  Description of Artificial Sequence: Synthetic oligonucleotide
  Sense strand starting at position 2605 of SEQ ID NO: 917061
cgucuaaggaaaugugaag

SEQ ID NO: 1205563 - RNA, 19 nt, Artificial Sequence
  Description of Artificial Sequence: Synthetic oligonucleotide
  Antisense strand to SEQ ID NO: 1205562
cuucacauuuccuuagacg

SEQ ID NO: 1205564 - RNA, 19 nt, Artificial Sequence
  Description of Artificial Sequence: Synthetic oligonucleotide
  Sense strand starting at position 2739 of SEQ ID NO: 917061
ccaguaaggcuggagcauu

SEQ ID NO: 1205565 - RNA, 19 nt, Artificial Sequence
  Description of Artificial Sequence: Synthetic oligonucleotide
  Antisense strand to SEQ ID NO: 1205564
aaugcuccagccuuacugg

SEQ ID NO: 1205566 - RNA, 19 nt, Artificial Sequence
  Description of Artificial Sequence: Synthetic oligonucleotide
  Sense strand starting at position 2919 of SEQ ID NO: 917061
gggaacucauuauccuacu

SEQ ID NO: 1205567 - RNA, 19 nt, Artificial Sequence
  Description of Artificial Sequence: Synthetic oligonucleotide
  Antisense strand to SEQ ID NO: 1205566
aguaggauaaugaguuccc

SEQ ID NO: 1205568 - RNA, 19 nt, Artificial Sequence
  Description of Artificial Sequence: Synthetic oligonucleotide
  Sense strand starting at position 3184 of SEQ ID NO: 917061
aaaugcuuaucggcagacu

SEQ ID NO: 1205569 - RNA, 19 nt, Artificial Sequence
  Description of Artificial Sequence: Synthetic oligonucleotide
  Antisense strand to SEQ ID NO: 1205568
agucugccgauaagcauuu

SEQ ID NO: 1205570 - RNA, 19 nt, Artificial Sequence
  Description of Artificial Sequence: Synthetic oligonucleotide
  Sense strand starting at position 3185 of SEQ ID NO: 917061
aaugcuuaucggcagacuu

SEQ ID NO: 1205571 - RNA, 19 nt, Artificial Sequence
  Description of Artificial Sequence: Synthetic oligonucleotide
  Antisense strand to SEQ ID NO: 1205570
aagucugccgauaagcauu

SEQ ID NO: 1205572 - RNA, 19 nt, Artificial Sequence
  Description of Artificial Sequence: Synthetic oligonucleotide
  Sense strand starting at position 3206 of SEQ ID NO: 917061
gggcuuuguguauaaagcu

SEQ ID NO: 1205573 - RNA, 19 nt, Artificial Sequence
  Description of Artificial Sequence: Synthetic oligonucleotide
  Antisense strand to SEQ ID NO: 1205572
agcuuuauacacaaagccc

SEQ ID NO: 1205574 - RNA, 19 nt, Artificial Sequence
  Description of Artificial Sequence: Synthetic oligonucleotide
  Sense strand starting at position 3213 of SEQ ID NO: 917061
guguauaaagcugauucuu

SEQ ID NO: 1205575 - RNA, 19 nt, Artificial Sequence
  Description of Artificial Sequence: Synthetic oligonucleotide
  Antisense strand to SEQ ID NO: 1205574
aagaaucagcuuuauacac

SEQ ID NO: 1205576 - RNA, 19 nt, Artificial Sequence
  Description of Artificial Sequence: Synthetic oligonucleotide
  Sense strand starting at position 3215 of SEQ ID NO: 917061
guauaaagcugauucuucu

SEQ ID NO: 1205577 - RNA, 19 nt, Artificial Sequence
  Description of Artificial Sequence: Synthetic oligonucleotide
  Antisense strand to SEQ ID NO: 1205576
agaagaaucagcuuuauac

SEQ ID NO: 1205578 - RNA, 19 nt, Artificial Sequence
  Description of Artificial Sequence: Synthetic oligonucleotide
  Sense strand starting at position 3231 of SEQ ID NO: 917061
ucugcaacuccauggguaa

SEQ ID NO: 1205579 - RNA, 19 nt, Artificial Sequence
  Description of Artificial Sequence: Synthetic oligonucleotide
  Antisense strand to SEQ ID NO: 1205578
uuacccauggaguugcaga

SEQ ID NO: 1205580 - RNA, 19 nt, Artificial Sequence
  Description of Artificial Sequence: Synthetic oligonucleotide
  Sense strand starting at position 3232 of SEQ ID NO: 917061
cugcaacuccauggguaaa

SEQ ID NO: 1205581 - RNA, 19 nt, Artificial Sequence
  Description of Artificial Sequence: Synthetic oligonucleotide
  Antisense strand to SEQ ID NO: 1205580
uuuacccauggaguugcag

SEQ ID NO: 1205582 - RNA, 19 nt, Artificial Sequence
  Description of Artificial Sequence: Synthetic oligonucleotide
  Sense strand starting at position 3258 of SEQ ID NO: 917061
gucuguguucuccauccau

SEQ ID NO: 1205583 - RNA, 19 nt, Artificial Sequence
  Description of Artificial Sequence: Synthetic oligonucleotide
  Antisense strand to SEQ ID NO: 1205582
auggauggagaacacagac

SEQ ID NO: 1205584 - RNA, 19 nt, Artificial Sequence
  Description of Artificial Sequence: Synthetic oligonucleotide
  Sense strand starting at position 3264 of SEQ ID NO: 917061
guucuccauccauacguua

SEQ ID NO: 1205585 - RNA, 19 nt, Artificial Sequence
  Description of Artificial Sequence: Synthetic oligonucleotide
  Antisense strand to SEQ ID NO: 1205584
uaacguauggauggagaac

SEQ ID NO: 1205586 - RNA, 19 nt, Artificial Sequence
  Description of Artificial Sequence: Synthetic oligonucleotide
  Sense strand starting at position 3684 of SEQ ID NO: 917061
ucauauaauccguaagcua

SEQ ID NO: 1205587 - RNA, 19 nt, Artificial Sequence
  Description of Artificial Sequence: Synthetic oligonucleotide
  Antisense strand to SEQ ID NO: 1205586
uagcuuacggauuauauga

SEQ ID NO: 1205588 - RNA, 19 nt, Artificial Sequence
  Description of Artificial Sequence: Synthetic oligonucleotide
  Sense strand starting at position 40 of SEQ ID NO: 917062
ggaggaucagugcagugau

SEQ ID NO: 1205589 - RNA, 19 nt, Artificial Sequence
  Description of Artificial Sequence: Synthetic oligonucleotide
  Antisense strand to SEQ ID NO: 1205588
aucacugcacugauccucc

SEQ ID NO: 1205590 - RNA, 19 nt, Artificial Sequence
  Description of Artificial Sequence: Synthetic oligonucleotide
  Sense strand starting at position 90 of SEQ ID NO: 917062
gcgagagccuggcucgaaa

SEQ ID NO: 1205591 - RNA, 19 nt, Artificial Sequence
  Description of Artificial Sequence: Synthetic oligonucleotide
  Antisense strand to SEQ ID NO: 1205590
uuucgagccaggcucucgc

SEQ ID NO: 1205592 - RNA, 19 nt, Artificial Sequence
  Description of Artificial Sequence: Synthetic oligonucleotide
  Sense strand starting at position 117 of SEQ ID NO: 917062
uggccauagcaguggagau

SEQ ID NO: 1205593 - RNA, 19 nt, Artificial Sequence
  Description of Artificial Sequence: Synthetic oligonucleotide
  Antisense strand to SEQ ID NO: 1205592
aucuccacugcuauggcca

SEQ ID NO: 1205594 - RNA, 19 nt, Artificial Sequence
  Description of Artificial Sequence: Synthetic oligonucleotide
  Sense strand starting at position 118 of SEQ ID NO: 917062
ggccauagcaguggagaua

SEQ ID NO: 1205595 - RNA, 19 nt, Artificial Sequence
  Description of Artificial Sequence: Synthetic oligonucleotide
  Antisense strand to SEQ ID NO: 1205594
uaucuccacugcuauggcc

SEQ ID NO: 1205596 - RNA, 19 nt, Artificial Sequence
  Description of Artificial Sequence: Synthetic oligonucleotide
  Sense strand starting at position 164 of SEQ ID NO: 917062
gccugaaagccaggucauu

SEQ ID NO: 1205597 - RNA, 19 nt, Artificial Sequence
  Description of Artificial Sequence: Synthetic oligonucleotide
  Antisense strand to SEQ ID NO: 1205596
aaugaccuggcuuucaggc

SEQ ID NO: 1205598 - RNA, 19 nt, Artificial Sequence
  Description of Artificial Sequence: Synthetic oligonucleotide
  Sense strand starting at position 175 of SEQ ID NO: 917062
aggucauuccagcaggaug

SEQ ID NO: 1205599 - RNA, 19 nt, Artificial Sequence
  Description of Artificial Sequence: Synthetic oligonucleotide
  Antisense strand to SEQ ID NO: 1205598
cauccugcuggaaugaccu

SEQ ID NO: 1205600 - RNA, 19 nt, Artificial Sequence
  Description of Artificial Sequence: Synthetic oligonucleotide
  Sense strand starting at position 232 of SEQ ID NO: 917062
guguucaucgugcaggaaa

SEQ ID NO: 1205601 - RNA, 19 nt, Artificial Sequence
  Description of Artificial Sequence: Synthetic oligonucleotide
  Antisense strand to SEQ ID NO: 1205600
uuuccugcacgaugaacac

SEQ ID NO: 1205602 - RNA, 19 nt, Artificial Sequence
  Description of Artificial Sequence: Synthetic oligonucleotide
  Sense strand starting at position 234 of SEQ ID NO: 917062
guucaucgugcaggaaaca

SEQ ID NO: 1205603 - RNA, 19 nt, Artificial Sequence
  Description of Artificial Sequence: Synthetic oligonucleotide
  Antisense strand to SEQ ID NO: 1205602
uguuuccugcacgaugaac

SEQ ID NO: 1205604 - RNA, 19 nt, Artificial Sequence
  Description of Artificial Sequence: Synthetic oligonucleotide
  Sense strand starting at position 353 of SEQ ID NO: 917062
agugauuacucagccaaau

SEQ ID NO: 1205605 - RNA, 19 nt, Artificial Sequence
  Description of Artificial Sequence: Synthetic oligonucleotide
  Antisense strand to SEQ ID NO: 1205604
auuuggcugaguaaucacu

SEQ ID NO: 1205606 - RNA, 19 nt, Artificial Sequence
  Description of Artificial Sequence: Synthetic oligonucleotide
  Sense strand starting at position 440 of SEQ ID NO: 917062
ggaacaaauuugggcucau

SEQ ID NO: 1205607 - RNA, 19 nt, Artificial Sequence
  Description of Artificial Sequence: Synthetic oligonucleotide
  Antisense strand to SEQ ID NO: 1205606
augagcccaaauuuguucc

SEQ ID NO: 1205608 - RNA, 19 nt, Artificial Sequence
  Description of Artificial Sequence: Synthetic oligonucleotide
  Sense strand starting at position 451 of SEQ ID NO: 917062
gggcucauaugcccuagau

SEQ ID NO: 1205609 - RNA, 19 nt, Artificial Sequence
  Description of Artificial Sequence: Synthetic oligonucleotide
  Antisense strand to SEQ ID NO: 1205608
aucuagggcauaugagccc

SEQ ID NO: 1205610 - RNA, 19 nt, Artificial Sequence
  Description of Artificial Sequence: Synthetic oligonucleotide
  Sense strand starting at position 453 of SEQ ID NO: 917062
gcucauaugcccuagauaa

SEQ ID NO: 1205611 - RNA, 19 nt, Artificial Sequence
  Description of Artificial Sequence: Synthetic oligonucleotide
  Antisense strand to SEQ ID NO: 1205610
uuaucuagggcauaugagc

SEQ ID NO: 1205612 - RNA, 19 nt, Artificial Sequence
  Description of Artificial Sequence: Synthetic oligonucleotide
  Sense strand starting at position 609 of SEQ ID NO: 917062
auuguaugagccuaauaau

SEQ ID NO: 1205613 - RNA, 19 nt, Artificial Sequence
  Description of Artificial Sequence: Synthetic oligonucleotide
  Antisense strand to SEQ ID NO: 1205612
auuauuaggcucauacaau

SEQ ID NO: 1205614 - RNA, 19 nt, Artificial Sequence
  Description of Artificial Sequence: Synthetic oligonucleotide
  Sense strand starting at position 612 of SEQ ID NO: 917062
guaugagccuaauaauuag

SEQ ID NO: 1205615 - RNA, 19 nt, Artificial Sequence
  Description of Artificial Sequence: Synthetic oligonucleotide
  Antisense strand to SEQ ID NO: 1205614
cuaauuauuaggcucauac

SEQ ID NO: 1205616 - RNA, 19 nt, Artificial Sequence
  Description of Artificial Sequence: Synthetic oligonucleotide
  Sense strand starting at position 639 of SEQ ID NO: 917062
ggcacuugcugcuaagaag

SEQ ID NO: 1205617 - RNA, 19 nt, Artificial Sequence
  Description of Artificial Sequence: Synthetic oligonucleotide
  Antisense strand to SEQ ID NO: 1205616
cuucuuagcagcaagugcc

SEQ ID NO: 1205618 - RNA, 19 nt, Artificial Sequence
  Description of Artificial Sequence: Synthetic oligonucleotide
  Sense strand starting at position 855 of SEQ ID NO: 917062
aggcaugcuggugaauuaa

SEQ ID NO: 1205619 - RNA, 19 nt, Artificial Sequence
  Description of Artificial Sequence: Synthetic oligonucleotide
  Antisense strand to SEQ ID NO: 1205618
uuaauucaccagcaugccu

SEQ ID NO: 1205620 - RNA, 19 nt, Artificial Sequence
  Description of Artificial Sequence: Synthetic oligonucleotide
  Sense strand starting at position 1193 of SEQ ID NO: 917062
gugggagucucgaguuuga

SEQ ID NO: 1205621 - RNA, 19 nt, Artificial Sequence
  Description of Artificial Sequence: Synthetic oligonucleotide
  Antisense strand to SEQ ID NO: 1205620
ucaaacucgagacucccac

SEQ ID NO: 1205622 - RNA, 19 nt, Artificial Sequence
  Description of Artificial Sequence: Synthetic oligonucleotide
  Sense strand starting at position 1204 of SEQ ID NO: 917062
gaguuugagcaccagcgua

SEQ ID NO: 1205623 - RNA, 19 nt, Artificial Sequence
  Description of Artificial Sequence: Synthetic oligonucleotide
  Antisense strand to SEQ ID NO: 1205622
uacgcuggugcucaaacuc

SEQ ID NO: 1205624 - RNA, 19 nt, Artificial Sequence
  Description of Artificial Sequence: Synthetic oligonucleotide
  Sense strand starting at position 1218 of SEQ ID NO: 917062
gcguaucaguuacuacuaa

SEQ ID NO: 1205625 - RNA, 19 nt, Artificial Sequence
  Description of Artificial Sequence: Synthetic oligonucleotide
  Antisense strand to SEQ ID NO: 1205624
uuaguaguaacugauacgc

SEQ ID NO: 1205626 - RNA, 19 nt, Artificial Sequence
  Description of Artificial Sequence: Synthetic oligonucleotide
  Sense strand starting at position 1219 of SEQ ID NO: 917062
cguaucaguuacuacuaaa

SEQ ID NO: 1205627 - RNA, 19 nt, Artificial Sequence
  Description of Artificial Sequence: Synthetic oligonucleotide
  Antisense strand to SEQ ID NO: 1205626
uuuaguaguaacugauacg

SEQ ID NO: 1205628 - RNA, 19 nt, Artificial Sequence
  Description of Artificial Sequence: Synthetic oligonucleotide
  Sense strand starting at position 1248 of SEQ ID NO: 917062
gaauuuacauccgacgcuu

SEQ ID NO: 1205629 - RNA, 19 nt, Artificial Sequence
  Description of Artificial Sequence: Synthetic oligonucleotide
  Antisense strand to SEQ ID NO: 1205628
aagcgucggauguaaauuc

SEQ ID NO: 1205630 - RNA, 19 nt, Artificial Sequence
  Description of Artificial Sequence: Synthetic oligonucleotide
  Sense strand starting at position 1250 of SEQ ID NO: 917062
auuuacauccgacgcuuaa

SEQ ID NO: 1205631 - RNA, 19 nt, Artificial Sequence
  Description of Artificial Sequence: Synthetic oligonucleotide
  Antisense strand to SEQ ID NO: 1205630
uuaagcgucggauguaaau

SEQ ID NO: 1205632 - RNA, 19 nt, Artificial Sequence
  Description of Artificial Sequence: Synthetic oligonucleotide
  Sense strand starting at position 1496 of SEQ ID NO: 917062
ggcggagucggagggaauu

SEQ ID NO: 1205633 - RNA, 19 nt, Artificial Sequence
  Description of Artificial Sequence: Synthetic oligonucleotide
  Antisense strand to SEQ ID NO: 1205632
aauucccuccgacuccgcc

SEQ ID NO: 1205634 - RNA, 19 nt, Artificial Sequence
  Description of Artificial Sequence: Synthetic oligonucleotide
  Sense strand starting at position 2261 of SEQ ID NO: 917062
cugagcgucucgagggauu

SEQ ID NO: 1205635 - RNA, 19 nt, Artificial Sequence
  Description of Artificial Sequence: Synthetic oligonucleotide
  Antisense strand to SEQ ID NO: 1205634
aaucccucgagacgcucag

SEQ ID NO: 1205636 - RNA, 19 nt, Artificial Sequence
  Description of Artificial Sequence: Synthetic oligonucleotide
  Sense strand starting at position 2404 of SEQ ID NO: 917062
ccgguucuccagugaacug

SEQ ID NO: 1205637 - RNA, 19 nt, Artificial Sequence
  Description of Artificial Sequence: Synthetic oligonucleotide
  Antisense strand to SEQ ID NO: 1205636
caguucacuggagaaccgg

SEQ ID NO: 1205638 - RNA, 19 nt, Artificial Sequence
  Description of Artificial Sequence: Synthetic oligonucleotide
  Sense strand starting at position 2462 of SEQ ID NO: 917062
caggacguguuucucaaga

SEQ ID NO: 1205639 - RNA, 19 nt, Artificial Sequence
  Description of Artificial Sequence: Synthetic oligonucleotide
  Antisense strand to SEQ ID NO: 1205638
ucuugagaaacacguccug

SEQ ID NO: 1205640 - RNA, 19 nt, Artificial Sequence
  Description of Artificial Sequence: Synthetic oligonucleotide
  Sense strand starting at position 2525 of SEQ ID NO: 917062
cagucagauucccaggcua

SEQ ID NO: 1205641 - RNA, 19 nt, Artificial Sequence
  Description of Artificial Sequence: Synthetic oligonucleotide
  Antisense strand to SEQ ID NO: 1205640
uagccugggaaucugacug

SEQ ID NO: 1205642 - RNA, 19 nt, Artificial Sequence
  Description of Artificial Sequence: Synthetic oligonucleotide
  Sense strand starting at position 2527 of SEQ ID NO: 917062
gucagauucccaggcuaag

SEQ ID NO: 1205643 - RNA, 19 nt, Artificial Sequence
  Description of Artificial Sequence: Synthetic oligonucleotide
  Antisense strand to SEQ ID NO: 1205642
cuuagccugggaaucugac

SEQ ID NO: 1205644 - RNA, 19 nt, Artificial Sequence
  Description of Artificial Sequence: Synthetic oligonucleotide
  Sense strand starting at position 2601 of SEQ ID NO: 917062
uugauauccucaggaagag

SEQ ID NO: 1205645 - RNA, 19 nt, Artificial Sequence
  Description of Artificial Sequence: Synthetic oligonucleotide
  Antisense strand to SEQ ID NO: 1205644
cucuuccugaggauaucaa

SEQ ID NO: 1205646 - RNA, 19 nt, Artificial Sequence
  Description of Artificial Sequence: Synthetic oligonucleotide
  Sense strand starting at position 2639 of SEQ ID NO: 917062
aggagaaacuuccuguuuc

SEQ ID NO: 1205647 - RNA, 19 nt, Artificial Sequence
  Description of Artificial Sequence: Synthetic oligonucleotide
  Antisense strand to SEQ ID NO: 1205646
gaaacaggaaguuucuccu

SEQ ID NO: 1205648 - RNA, 19 nt, Artificial Sequence
  Description of Artificial Sequence: Synthetic oligonucleotide
  Sense strand starting at position 3011 of SEQ ID NO: 917062
uugaaaugcuucuuccaug

SEQ ID NO: 1205649 - RNA, 19 nt, Artificial Sequence
  Description of Artificial Sequence: Synthetic oligonucleotide
  Antisense strand to SEQ ID NO: 1205648
cauggaagaagcauuucaa

SEQ ID NO: 1205650 - RNA, 19 nt, Artificial Sequence
  Description of Artificial Sequence: Synthetic oligonucleotide
  Sense strand starting at position 3012 of SEQ ID NO: 917062
ugaaaugcuucuuccauga

SEQ ID NO: 1205651 - RNA, 19 nt, Artificial Sequence
  Description of Artificial Sequence: Synthetic oligonucleotide
  Antisense strand to SEQ ID NO: 1205650
ucauggaagaagcauuuca

SEQ ID NO: 1205652 - RNA, 19 nt, Artificial Sequence
  Description of Artificial Sequence: Synthetic oligonucleotide
  Sense strand starting at position 3016 of SEQ ID NO: 917062
augcuucuuccaugaggaa

SEQ ID NO: 1205653 - RNA, 19 nt, Artificial Sequence
  Description of Artificial Sequence: Synthetic oligonucleotide
  Antisense strand to SEQ ID NO: 1205652
uuccucauggaagaagcau

SEQ ID NO: 1205654 - RNA, 19 nt, Artificial Sequence
  Description of Artificial Sequence: Synthetic oligonucleotide
  Sense strand starting at position 3017 of SEQ ID NO: 917062
ugcuucuuccaugaggaaa

SEQ ID NO: 1205655 - RNA, 19 nt, Artificial Sequence
  Description of Artificial Sequence: Synthetic oligonucleotide
  Antisense strand to SEQ ID NO: 1205654
uuuccucauggaagaagca

SEQ ID NO: 1205656 - RNA, 19 nt, Artificial Sequence
  Description of Artificial Sequence: Synthetic oligonucleotide
  Sense strand starting at position 3030 of SEQ ID NO: 917062
aggaaauccucuugaaacc

SEQ ID NO: 1205657 - RNA, 19 nt, Artificial Sequence
  Description of Artificial Sequence: Synthetic oligonucleotide
  Antisense strand to SEQ ID NO: 1205656
gguuucaagaggauuuccu

SEQ ID NO: 1205658 - RNA, 19 nt, Artificial Sequence
  Description of Artificial Sequence: Synthetic oligonucleotide
  Sense strand starting at position 3061 of SEQ ID NO: 917062
aaauguuucuccuggugaa

SEQ ID NO: 1205659 - RNA, 19 nt, Artificial Sequence
  Description of Artificial Sequence: Synthetic oligonucleotide
  Antisense strand to SEQ ID NO: 1205658
uucaccaggagaaacauuu

SEQ ID NO: 1205660 - RNA, 19 nt, Artificial Sequence
  Description of Artificial Sequence: Synthetic oligonucleotide
  Sense strand starting at position 3062 of SEQ ID NO: 917062
aauguuucuccuggugaac

SEQ ID NO: 1205661 - RNA, 19 nt, Artificial Sequence
  Description of Artificial Sequence: Synthetic oligonucleotide
  Antisense strand to SEQ ID NO: 1205660
guucaccaggagaaacauu

SEQ ID NO: 1205662 - RNA, 19 nt, Artificial Sequence
  Description of Artificial Sequence: Synthetic oligonucleotide
  Sense strand starting at position 3530 of SEQ ID NO: 917062
agguaaggaguucgagagu

SEQ ID NO: 1205663 - RNA, 19 nt, Artificial Sequence
  Description of Artificial Sequence: Synthetic oligonucleotide
  Antisense strand to SEQ ID NO: 1205662
acucucgaacuccuuaccu

SEQ ID NO: 1205664 - RNA, 19 nt, Artificial Sequence
  Description of Artificial Sequence: Synthetic oligonucleotide
  Sense strand starting at position 3531 of SEQ ID NO: 917062
gguaaggaguucgagagua

SEQ ID NO: 1205665 - RNA, 19 nt, Artificial Sequence
  Description of Artificial Sequence: Synthetic oligonucleotide
  Antisense strand to SEQ ID NO: 1205664
uacucucgaacuccuuacc

SEQ ID NO: 1205666 - RNA, 19 nt, Artificial Sequence
  Description of Artificial Sequence: Synthetic oligonucleotide
  Sense strand starting at position 3788 of SEQ ID NO: 917062
ucagauucuugacaggaau

SEQ ID NO: 1205667 - RNA, 19 nt, Artificial Sequence
  Description of Artificial Sequence: Synthetic oligonucleotide
  Antisense strand to SEQ ID NO: 1205666
auuccugucaagaaucuga

SEQ ID NO: 1205668 - RNA, 19 nt, Artificial Sequence
  Description of Artificial Sequence: Synthetic oligonucleotide
  Sense strand starting at position 73 of SEQ ID NO: 917063
gagacuuuggagcagucau

SEQ ID NO: 1205669 - RNA, 19 nt, Artificial Sequence
  Description of Artificial Sequence: Synthetic oligonucleotide
  Antisense strand to SEQ ID NO: 1205668
augacugcuccaaagucuc

SEQ ID NO: 1205670 - RNA, 19 nt, Artificial Sequence
  Description of Artificial Sequence: Synthetic oligonucleotide
  Sense strand starting at position 142 of SEQ ID NO: 917063
aggugaccuccacaaucuu

SEQ ID NO: 1205671 - RNA, 19 nt, Artificial Sequence
  Description of Artificial Sequence: Synthetic oligonucleotide
  Antisense strand to SEQ ID NO: 1205670
aagauuguggaggucaccu

SEQ ID NO: 1205672 - RNA, 19 nt, Artificial Sequence
  Description of Artificial Sequence: Synthetic oligonucleotide
  Sense strand starting at position 285 of SEQ ID NO: 917063
ggcaccuggucucuggaau

SEQ ID NO: 1205673 - RNA, 19 nt, Artificial Sequence
  Description of Artificial Sequence: Synthetic oligonucleotide
  Antisense strand to SEQ ID NO: 1205672
auuccagagaccaggugcc

SEQ ID NO: 1205674 - RNA, 19 nt, Artificial Sequence
  Description of Artificial Sequence: Synthetic oligonucleotide
  Sense strand starting at position 286 of SEQ ID NO: 917063
gcaccuggucucuggaaua

SEQ ID NO: 1205675 - RNA, 19 nt, Artificial Sequence
  Description of Artificial Sequence: Synthetic oligonucleotide
  Antisense strand to SEQ ID NO: 1205674
uauuccagagaccaggugc

SEQ ID NO: 1205676 - RNA, 19 nt, Artificial Sequence
  Description of Artificial Sequence: Synthetic oligonucleotide
  Sense strand starting at position 291 of SEQ ID NO: 917063
uggucucuggaauacaagu

SEQ ID NO: 1205677 - RNA, 19 nt, Artificial Sequence
  Description of Artificial Sequence: Synthetic oligonucleotide
  Antisense strand to SEQ ID NO: 1205676
acuuguauuccagagacca

SEQ ID NO: 1205678 - RNA, 19 nt, Artificial Sequence
  Description of Artificial Sequence: Synthetic oligonucleotide
  Sense strand starting at position 394 of SEQ ID NO: 917063
accugcugauucccggaaa

SEQ ID NO: 1205679 - RNA, 19 nt, Artificial Sequence
  Description of Artificial Sequence: Synthetic oligonucleotide
  Antisense strand to SEQ ID NO: 1205678
uuuccgggaaucagcaggu

SEQ ID NO: 1205680 - RNA, 19 nt, Artificial Sequence
  Description of Artificial Sequence: Synthetic oligonucleotide
  Sense strand starting at position 397 of SEQ ID NO: 917063
ugcugauucccggaaaggu

SEQ ID NO: 1205681 - RNA, 19 nt, Artificial Sequence
  Description of Artificial Sequence: Synthetic oligonucleotide
  Antisense strand to SEQ ID NO: 1205680
accuuuccgggaaucagca

SEQ ID NO: 1205682 - RNA, 19 nt, Artificial Sequence
  Description of Artificial Sequence: Synthetic oligonucleotide
  Sense strand starting at position 507 of SEQ ID NO: 917063
gcaaaucuggcaggaauca

SEQ ID NO: 1205683 - RNA, 19 nt, Artificial Sequence
  Description of Artificial Sequence: Synthetic oligonucleotide
  Antisense strand to SEQ ID NO: 1205682
ugauuccugccagauuugc

SEQ ID NO: 1205684 - RNA, 19 nt, Artificial Sequence
  Description of Artificial Sequence: Synthetic oligonucleotide
  Sense strand starting at position 637 of SEQ ID NO: 917063
aaagauugauccucgugac

SEQ ID NO: 1205685 - RNA, 19 nt, Artificial Sequence
  Description of Artificial Sequence: Synthetic oligonucleotide
  Antisense strand to SEQ ID NO: 1205684
gucacgaggaucaaucuuu

SEQ ID NO: 1205686 - RNA, 19 nt, Artificial Sequence
  Description of Artificial Sequence: Synthetic oligonucleotide
  Sense strand starting at position 1087 of SEQ ID NO: 917063
ggagaugcccagcaaaugu

SEQ ID NO: 1205687 - RNA, 19 nt, Artificial Sequence
  Description of Artificial Sequence: Synthetic oligonucleotide
  Antisense strand to SEQ ID NO: 1205686
acauuugcugggcaucucc

SEQ ID NO: 1205688 - RNA, 19 nt, Artificial Sequence
  Description of Artificial Sequence: Synthetic oligonucleotide
  Sense strand starting at position 1284 of SEQ ID NO: 917063
agaaucugcugccugagau

SEQ ID NO: 1205689 - RNA, 19 nt, Artificial Sequence
  Description of Artificial Sequence: Synthetic oligonucleotide
  Antisense strand to SEQ ID NO: 1205688
aucucaggcagcagauucu

SEQ ID NO: 1205690 - RNA, 19 nt, Artificial Sequence
  Description of Artificial Sequence: Synthetic oligonucleotide
  Sense strand starting at position 1285 of SEQ ID NO: 917063
gaaucugcugccugagauu

SEQ ID NO: 1205691 - RNA, 19 nt, Artificial Sequence
  Description of Artificial Sequence: Synthetic oligonucleotide
  Antisense strand to SEQ ID NO: 1205690
aaucucaggcagcagauuc

SEQ ID NO: 1205692 - RNA, 19 nt, Artificial Sequence
  Description of Artificial Sequence: Synthetic oligonucleotide
  Sense strand starting at position 1366 of SEQ ID NO: 917063
cugugauacaucuguggaa

SEQ ID NO: 1205693 - RNA, 19 nt, Artificial Sequence
  Description of Artificial Sequence: Synthetic oligonucleotide
  Antisense strand to SEQ ID NO: 1205692
uuccacagauguaucacag

SEQ ID NO: 1205694 - RNA, 19 nt, Artificial Sequence
  Description of Artificial Sequence: Synthetic oligonucleotide
  Sense strand starting at position 1367 of SEQ ID NO: 917063
ugugauacaucuguggaag

SEQ ID NO: 1205695 - RNA, 19 nt, Artificial Sequence
  Description of Artificial Sequence: Synthetic oligonucleotide
  Antisense strand to SEQ ID NO: 1205694
cuuccacagauguaucaca

SEQ ID NO: 1205696 - RNA, 19 nt, Artificial Sequence
  Description of Artificial Sequence: Synthetic oligonucleotide
  Sense strand starting at position 1368 of SEQ ID NO: 917063
gugauacaucuguggaagg

SEQ ID NO: 1205697 - RNA, 19 nt, Artificial Sequence
  Description of Artificial Sequence: Synthetic oligonucleotide
  Antisense strand to SEQ ID NO: 1205696
ccuuccacagauguaucac

SEQ ID NO: 1205698 - RNA, 19 nt, Artificial Sequence
  Description of Artificial Sequence: Synthetic oligonucleotide
  Sense strand starting at position 1602 of SEQ ID NO: 917063
uaggaucaucccuggcuga

SEQ ID NO: 1205699 - RNA, 19 nt, Artificial Sequence
  Description of Artificial Sequence: Synthetic oligonucleotide
  Antisense strand to SEQ ID NO: 1205698
ucagccagggaugauccua

SEQ ID NO: 1205700 - RNA, 19 nt, Artificial Sequence
  Description of Artificial Sequence: Synthetic oligonucleotide
  Sense strand starting at position 1603 of SEQ ID NO: 917063
aggaucaucccuggcugaa

SEQ ID NO: 1205701 - RNA, 19 nt, Artificial Sequence
  Description of Artificial Sequence: Synthetic oligonucleotide
  Antisense strand to SEQ ID NO: 1205700
uucagccagggaugauccu

SEQ ID NO: 1205702 - RNA, 19 nt, Artificial Sequence
  Description of Artificial Sequence: Synthetic oligonucleotide
  Sense strand starting at position 1647 of SEQ ID NO: 917063
cuucuaguccagcgacaga

SEQ ID NO: 1205703 - RNA, 19 nt, Artificial Sequence
  Description of Artificial Sequence: Synthetic oligonucleotide
  Antisense strand to SEQ ID NO: 1205702
ucugucgcuggacuagaag

SEQ ID NO: 1205704 - RNA, 19 nt, Artificial Sequence
  Description of Artificial Sequence: Synthetic oligonucleotide
  Sense strand starting at position 1780 of SEQ ID NO: 917063
cuccaaggucccugggaaa

SEQ ID NO: 1205705 - RNA, 19 nt, Artificial Sequence
  Description of Artificial Sequence: Synthetic oligonucleotide
  Antisense strand to SEQ ID NO: 1205704
uuucccagggaccuuggag

SEQ ID NO: 1205706 - RNA, 19 nt, Artificial Sequence
  Description of Artificial Sequence: Synthetic oligonucleotide
  Sense strand starting at position 2079 of SEQ ID NO: 917063
cugauaaagcuuuguagag

SEQ ID NO: 1205707 - RNA, 19 nt, Artificial Sequence
  Description of Artificial Sequence: Synthetic oligonucleotide
  Antisense strand to SEQ ID NO: 1205706
cucuacaaagcuuuaucag

SEQ ID NO: 1205708 - RNA, 19 nt, Artificial Sequence
  Description of Artificial Sequence: Synthetic oligonucleotide
  Sense strand starting at position 2080 of SEQ ID NO: 917063
ugauaaagcuuuguagagu

SEQ ID NO: 1205709 - RNA, 19 nt, Artificial Sequence
  Description of Artificial Sequence: Synthetic oligonucleotide
  Antisense strand to SEQ ID NO: 1205708
acucuacaaagcuuuauca

SEQ ID NO: 1205710 - RNA, 19 nt, Artificial Sequence
  Description of Artificial Sequence: Synthetic oligonucleotide
  Sense strand starting at position 2091 of SEQ ID NO: 917063
uguagaguuuggagggaga

SEQ ID NO: 1205711 - RNA, 19 nt, Artificial Sequence
  Description of Artificial Sequence: Synthetic oligonucleotide
  Antisense strand to SEQ ID NO: 1205710
ucucccuccaaacucuaca

SEQ ID NO: 1205712 - RNA, 19 nt, Artificial Sequence
  Description of Artificial Sequence: Synthetic oligonucleotide
  Sense strand starting at position 2175 of SEQ ID NO: 917063
acacuugaucccuggucuu

SEQ ID NO: 1205713 - RNA, 19 nt, Artificial Sequence
  Description of Artificial Sequence: Synthetic oligonucleotide
  Antisense strand to SEQ ID NO: 1205712
aagaccagggaucaagugu

SEQ ID NO: 1205714 - RNA, 19 nt, Artificial Sequence
  Description of Artificial Sequence: Synthetic oligonucleotide
  Sense strand starting at position 2181 of SEQ ID NO: 917063
gaucccuggucuuccuaga

SEQ ID NO: 1205715 - RNA, 19 nt, Artificial Sequence
  Description of Artificial Sequence: Synthetic oligonucleotide
  Antisense strand to SEQ ID NO: 1205714
ucuaggaagaccagggauc

SEQ ID NO: 1205716 - RNA, 19 nt, Artificial Sequence
  Description of Artificial Sequence: Synthetic oligonucleotide
  Sense strand starting at position 2224 of SEQ ID NO: 917063
aggaaugcugguuguuuca

SEQ ID NO: 1205717 - RNA, 19 nt, Artificial Sequence
  Description of Artificial Sequence: Synthetic oligonucleotide
  Antisense strand to SEQ ID NO: 1205716
ugaaacaaccagcauuccu

SEQ ID NO: 1205718 - RNA, 19 nt, Artificial Sequence
  Description of Artificial Sequence: Synthetic oligonucleotide
  Sense strand starting at position 2310 of SEQ ID NO: 917063
gcuggacuccagggaaguu

SEQ ID NO: 1205719 - RNA, 19 nt, Artificial Sequence
  Description of Artificial Sequence: Synthetic oligonucleotide
  Antisense strand to SEQ ID NO: 1205718
aacuucccuggaguccagc

SEQ ID NO: 1205720 - RNA, 19 nt, Artificial Sequence
  Description of Artificial Sequence: Synthetic oligonucleotide
  Sense strand starting at position 2421 of SEQ ID NO: 917063
cgguccuggcccugacaaa

SEQ ID NO: 1205721 - RNA, 19 nt, Artificial Sequence
  Description of Artificial Sequence: Synthetic oligonucleotide
  Antisense strand to SEQ ID NO: 1205720
uuugucagggccaggaccg

SEQ ID NO: 1205722 - RNA, 19 nt, Artificial Sequence
  Description of Artificial Sequence: Synthetic oligonucleotide
  Sense strand starting at position 2465 of SEQ ID NO: 917063
gguugaauggaucggcuaa

SEQ ID NO: 1205723 - RNA, 19 nt, Artificial Sequence
  Description of Artificial Sequence: Synthetic oligonucleotide
  Antisense strand to SEQ ID NO: 1205722
uuagccgauccauucaacc

SEQ ID NO: 1205724 - RNA, 19 nt, Artificial Sequence
  Description of Artificial Sequence: Synthetic oligonucleotide
  Sense strand starting at position 2466 of SEQ ID NO: 917063
guugaauggaucggcuaaa

SEQ ID NO: 1205725 - RNA, 19 nt, Artificial Sequence
  Description of Artificial Sequence: Synthetic oligonucleotide
  Antisense strand to SEQ ID NO: 1205724
uuuagccgauccauucaac

SEQ ID NO: 1205726 - RNA, 19 nt, Artificial Sequence
  Description of Artificial Sequence: Synthetic oligonucleotide
  Sense strand starting at position 2541 of SEQ ID NO: 917063
augguuugagucuaauacu

SEQ ID NO: 1205727 - RNA, 19 nt, Artificial Sequence
  Description of Artificial Sequence: Synthetic oligonucleotide
  Antisense strand to SEQ ID NO: 1205726
aguauuagacucaaaccau

SEQ ID NO: 1205728 - RNA, 19 nt, Artificial Sequence
  Description of Artificial Sequence: Synthetic oligonucleotide
  Sense strand starting at position 2825 of SEQ ID NO: 917063
aggcaugucuggguaugga

SEQ ID NO: 1205729 - RNA, 19 nt, Artificial Sequence
  Description of Artificial Sequence: Synthetic oligonucleotide
  Antisense strand to SEQ ID NO: 1205728
uccauacccagacaugccu

SEQ ID NO: 1205730 - RNA, 19 nt, Artificial Sequence
  Description of Artificial Sequence: Synthetic oligonucleotide
  Sense strand starting at position 2828 of SEQ ID NO: 917063
caugucuggguauggaaga

SEQ ID NO: 1205731 - RNA, 19 nt, Artificial Sequence
  Description of Artificial Sequence: Synthetic oligonucleotide
  Antisense strand to SEQ ID NO: 1205730
ucuuccauacccagacaug

SEQ ID NO: 1205732 - RNA, 19 nt, Artificial Sequence
  Description of Artificial Sequence: Synthetic oligonucleotide
  Sense strand starting at position 2877 of SEQ ID NO: 917063
gcccuaagacuuugagaaa

SEQ ID NO: 1205733 - RNA, 19 nt, Artificial Sequence
  Description of Artificial Sequence: Synthetic oligonucleotide
  Antisense strand to SEQ ID NO: 1205732
uuucucaaagucuuagggc

SEQ ID NO: 1205734 - RNA, 19 nt, Artificial Sequence
  Description of Artificial Sequence: Synthetic oligonucleotide
  Sense strand starting at position 2880 of SEQ ID NO: 917063
cuaagacuuugagaaacca

SEQ ID NO: 1205735 - RNA, 19 nt, Artificial Sequence
  Description of Artificial Sequence: Synthetic oligonucleotide
  Antisense strand to SEQ ID NO: 1205734
ugguuucucaaagucuuag

SEQ ID NO: 1205736 - RNA, 19 nt, Artificial Sequence
  Description of Artificial Sequence: Synthetic oligonucleotide
  Sense strand starting at position 3006 of SEQ ID NO: 917063
gcagaaucagcaugagaca

SEQ ID NO: 1205737 - RNA, 19 nt, Artificial Sequence
  Description of Artificial Sequence: Synthetic oligonucleotide
  Antisense strand to SEQ ID NO: 1205736
ugucucaugcugauucugc

SEQ ID NO: 1205738 - RNA, 19 nt, Artificial Sequence
  Description of Artificial Sequence: Synthetic oligonucleotide
  Sense strand starting at position 3430 of SEQ ID NO: 917063
cuuuaaaugcugugcuaaa

SEQ ID NO: 1205739 - RNA, 19 nt, Artificial Sequence
  Description of Artificial Sequence: Synthetic oligonucleotide
  Antisense strand to SEQ ID NO: 1205738
uuuagcacagcauuuaaag

SEQ ID NO: 1205740 - RNA, 19 nt, Artificial Sequence
  Description of Artificial Sequence: Synthetic oligonucleotide
  Sense strand starting at position 3431 of SEQ ID NO: 917063
uuuaaaugcugugcuaaau

SEQ ID NO: 1205741 - RNA, 19 nt, Artificial Sequence
  Description of Artificial Sequence: Synthetic oligonucleotide
  Antisense strand to SEQ ID NO: 1205740
auuuagcacagcauuuaaa

SEQ ID NO: 1205742 - RNA, 19 nt, Artificial Sequence
  Description of Artificial Sequence: Synthetic oligonucleotide
  Sense strand starting at position 3475 of SEQ ID NO: 917063
guugaucugggaggaaagu

SEQ ID NO: 1205743 - RNA, 19 nt, Artificial Sequence
  Description of Artificial Sequence: Synthetic oligonucleotide
  Antisense strand to SEQ ID NO: 1205742
acuuuccucccagaucaac

SEQ ID NO: 1205744 - RNA, 19 nt, Artificial Sequence
  Description of Artificial Sequence: Synthetic oligonucleotide
  Sense strand starting at position 3484 of SEQ ID NO: 917063
ggaggaaaguaaggaauau

SEQ ID NO: 1205745 - RNA, 19 nt, Artificial Sequence
  Description of Artificial Sequence: Synthetic oligonucleotide
  Antisense strand to SEQ ID NO: 1205744
auauuccuuacuuuccucc

SEQ ID NO: 1205746 - RNA, 19 nt, Artificial Sequence
  Description of Artificial Sequence: Synthetic oligonucleotide
  Sense strand starting at position 3696 of SEQ ID NO: 917063
ggaaacaucuuccaaacag

SEQ ID NO: 1205747 - RNA, 19 nt, Artificial Sequence
  Description of Artificial Sequence: Synthetic oligonucleotide
  Antisense strand to SEQ ID NO: 1205746
cuguuuggaagauguuucc

SEQ ID NO: 1205748 - RNA, 19 nt, Artificial Sequence
  Description of Artificial Sequence: Synthetic oligonucleotide
  Sense strand starting at position 56 of SEQ ID NO: 917064
auuagaaauucugugagac

SEQ ID NO: 1205749 - RNA, 19 nt, Artificial Sequence
  Description of Artificial Sequence: Synthetic oligonucleotide
  Antisense strand to SEQ ID NO: 1205748
gucucacagaauuucuaau

SEQ ID NO: 1205750 - RNA, 19 nt, Artificial Sequence
  Description of Artificial Sequence: Synthetic oligonucleotide
  Sense strand starting at position 57 of SEQ ID NO: 917064
uuagaaauucugugagacu

SEQ ID NO: 1205751 - RNA, 19 nt, Artificial Sequence
  Description of Artificial Sequence: Synthetic oligonucleotide
  Antisense strand to SEQ ID NO: 1205750
agucucacagaauuucuaa

SEQ ID NO: 1205752 - RNA, 19 nt, Artificial Sequence
  Description of Artificial Sequence: Synthetic oligonucleotide
  Sense strand starting at position 92 of SEQ ID NO: 917064
ugacuuuaauguccaagaa

SEQ ID NO: 1205753 - RNA, 19 nt, Artificial Sequence
  Description of Artificial Sequence: Synthetic oligonucleotide
  Antisense strand to SEQ ID NO: 1205752
uucuuggacauuaaaguca

SEQ ID NO: 1205754 - RNA, 19 nt, Artificial Sequence
  Description of Artificial Sequence: Synthetic oligonucleotide
  Sense strand starting at position 196 of SEQ ID NO: 917064
uccucaagucaucaguuua

SEQ ID NO: 1205755 - RNA, 19 nt, Artificial Sequence
  Description of Artificial Sequence: Synthetic oligonucleotide
  Antisense strand to SEQ ID NO: 1205754
uaaacugaugacuugagga

SEQ ID NO: 1205756 - RNA, 19 nt, Artificial Sequence
  Description of Artificial Sequence: Synthetic oligonucleotide
  Sense strand starting at position 529 of SEQ ID NO: 917064
agauauaaugcuugacucu

SEQ ID NO: 1205757 - RNA, 19 nt, Artificial Sequence
  Description of Artificial Sequence: Synthetic oligonucleotide
  Antisense strand to SEQ ID NO: 1205756
agagucaagcauuauaucu

SEQ ID NO: 1205758 - RNA, 19 nt, Artificial Sequence
  Description of Artificial Sequence: Synthetic oligonucleotide
  Sense strand starting at position 585 of SEQ ID NO: 917064
aaauuagugcuauacugag

SEQ ID NO: 1205759 - RNA, 19 nt, Artificial Sequence
  Description of Artificial Sequence: Synthetic oligonucleotide
  Antisense strand to SEQ ID NO: 1205758
cucaguauagcacuaauuu

SEQ ID NO: 1205760 - RNA, 19 nt, Artificial Sequence
  Description of Artificial Sequence: Synthetic oligonucleotide
  Sense strand starting at position 805 of SEQ ID NO: 917064
aagcgcagucuuuccagua

SEQ ID NO: 1205761 - RNA, 19 nt, Artificial Sequence
  Description of Artificial Sequence: Synthetic oligonucleotide
  Antisense strand to SEQ ID NO: 1205760
uacuggaaagacugcgcuu

SEQ ID NO: 1205762 - RNA, 19 nt, Artificial Sequence
  Description of Artificial Sequence: Synthetic oligonucleotide
  Sense strand starting at position 820 of SEQ ID NO: 917064
aguaauaaaggcggacaaa

SEQ ID NO: 1205763 - RNA, 19 nt, Artificial Sequence
  Description of Artificial Sequence: Synthetic oligonucleotide
  Antisense strand to SEQ ID NO: 1205762
uuuguccgccuuuauuacu

SEQ ID NO: 1205764 - RNA, 19 nt, Artificial Sequence
  Description of Artificial Sequence: Synthetic oligonucleotide
  Sense strand starting at position 1003 of SEQ ID NO: 917064
ucaagacagcgguaucaaa

SEQ ID NO: 1205765 - RNA, 19 nt, Artificial Sequence
  Description of Artificial Sequence: Synthetic oligonucleotide
  Antisense strand to SEQ ID NO: 1205764
uuugauaccgcugucuuga

SEQ ID NO: 1205766 - RNA, 19 nt, Artificial Sequence
  Description of Artificial Sequence: Synthetic oligonucleotide
  Sense strand starting at position 1073 of SEQ ID NO: 917064
auaacaaagcucugaugau

SEQ ID NO: 1205767 - RNA, 19 nt, Artificial Sequence
  Description of Artificial Sequence: Synthetic oligonucleotide
  Antisense strand to SEQ ID NO: 1205766
aucaucagagcuuuguuau

SEQ ID NO: 1205768 - RNA, 19 nt, Artificial Sequence
  Description of Artificial Sequence: Synthetic oligonucleotide
  Sense strand starting at position 2286 of SEQ ID NO: 917064
uacguugagccguccgaga

SEQ ID NO: 1205769 - RNA, 19 nt, Artificial Sequence
  Description of Artificial Sequence: Synthetic oligonucleotide
  Antisense strand to SEQ ID NO: 1205768
ucucggacggcucaacgua

SEQ ID NO: 1205770 - RNA, 19 nt, Artificial Sequence
  Description of Artificial Sequence: Synthetic oligonucleotide
  Sense strand starting at position 2308 of SEQ ID NO: 917064
guacauucugcagauaaag

SEQ ID NO: 1205771 - RNA, 19 nt, Artificial Sequence
  Description of Artificial Sequence: Synthetic oligonucleotide
  Antisense strand to SEQ ID NO: 1205770
cuuuaucugcagaauguac

SEQ ID NO: 1205772 - RNA, 19 nt, Artificial Sequence
  Description of Artificial Sequence: Synthetic oligonucleotide
  Sense strand starting at position 2322 of SEQ ID NO: 917064
uaaagaagcguucugcguu

SEQ ID NO: 1205773 - RNA, 19 nt, Artificial Sequence
  Description of Artificial Sequence: Synthetic oligonucleotide
  Antisense strand to SEQ ID NO: 1205772
aacgcagaacgcuucuuua

SEQ ID NO: 1205774 - RNA, 19 nt, Artificial Sequence
  Description of Artificial Sequence: Synthetic oligonucleotide
  Sense strand starting at position 2414 of SEQ ID NO: 917064
gggugucuccguguguaaa

SEQ ID NO: 1205775 - RNA, 19 nt, Artificial Sequence
  Description of Artificial Sequence: Synthetic oligonucleotide
  Antisense strand to SEQ ID NO: 1205774
uuuacacacggagacaccc

SEQ ID NO: 1205776 - RNA, 19 nt, Artificial Sequence
  Description of Artificial Sequence: Synthetic oligonucleotide
  Sense strand starting at position 2513 of SEQ ID NO: 917064
guggaaauuuaauagacag

SEQ ID NO: 1205777 - RNA, 19 nt, Artificial Sequence
  Description of Artificial Sequence: Synthetic oligonucleotide
  Antisense strand to SEQ ID NO: 1205776
cugucuauuaaauuuccac

SEQ ID NO: 1205778 - RNA, 19 nt, Artificial Sequence
  Description of Artificial Sequence: Synthetic oligonucleotide
  Sense strand starting at position 2599 of SEQ ID NO: 917064
uuauaugggcggugauuua

SEQ ID NO: 1205779 - RNA, 19 nt, Artificial Sequence
  Description of Artificial Sequence: Synthetic oligonucleotide
  Antisense strand to SEQ ID NO: 1205778
uaaaucaccgcccauauaa

SEQ ID NO: 1205780 - RNA, 19 nt, Artificial Sequence
  Description of Artificial Sequence: Synthetic oligonucleotide
  Sense strand starting at position 2685 of SEQ ID NO: 917064
aguggcaagguugauauau

SEQ ID NO: 1205781 - RNA, 19 nt, Artificial Sequence
  Description of Artificial Sequence: Synthetic oligonucleotide
  Antisense strand to SEQ ID NO: 1205780
auauaucaaccuugccacu

SEQ ID NO: 1205782 - RNA, 19 nt, Artificial Sequence
  Description of Artificial Sequence: Synthetic oligonucleotide
  Sense strand starting at position 2850 of SEQ ID NO: 917064
ccuuaaagguaaguuuaaa

SEQ ID NO: 1205783 - RNA, 19 nt, Artificial Sequence
  Description of Artificial Sequence: Synthetic oligonucleotide
  Antisense strand to SEQ ID NO: 1205782
uuuaaacuuaccuuuaagg

SEQ ID NO: 1205784 - RNA, 19 nt, Artificial Sequence
  Description of Artificial Sequence: Synthetic oligonucleotide
  Sense strand starting at position 2889 of SEQ ID NO: 917064
aggauacgcuugguuauuu

SEQ ID NO: 1205785 - RNA, 19 nt, Artificial Sequence
  Description of Artificial Sequence: Synthetic oligonucleotide
  Antisense strand to SEQ ID NO: 1205784
aaauaaccaagcguauccu

SEQ ID NO: 1205786 - RNA, 19 nt, Artificial Sequence
  Description of Artificial Sequence: Synthetic oligonucleotide
  Sense strand starting at position 2893 of SEQ ID NO: 917064
uacgcuugguuauuucuaa

SEQ ID NO: 1205787 - RNA, 19 nt, Artificial Sequence
  Description of Artificial Sequence: Synthetic oligonucleotide
  Antisense strand to SEQ ID NO: 1205786
uuagaaauaaccaagcgua

SEQ ID NO: 1205788 - RNA, 19 nt, Artificial Sequence
  Description of Artificial Sequence: Synthetic oligonucleotide
  Sense strand starting at position 2894 of SEQ ID NO: 917064
acgcuugguuauuucuaau

SEQ ID NO: 1205789 - RNA, 19 nt, Artificial Sequence
  Description of Artificial Sequence: Synthetic oligonucleotide
  Antisense strand to SEQ ID NO: 1205788
auuagaaauaaccaagcgu

SEQ ID NO: 1205790 - RNA, 19 nt, Artificial Sequence
  Description of Artificial Sequence: Synthetic oligonucleotide
  Sense strand starting at position 2919 of SEQ ID NO: 917064
cugacuaucccauguagga

SEQ ID NO: 1205791 - RNA, 19 nt, Artificial Sequence
  Description of Artificial Sequence: Synthetic oligonucleotide
  Antisense strand to SEQ ID NO: 1205790
uccuacaugggauagucag

SEQ ID NO: 1205792 - RNA, 19 nt, Artificial Sequence
  Description of Artificial Sequence: Synthetic oligonucleotide
  Sense strand starting at position 3017 of SEQ ID NO: 917064
ugcccuugaagguauaaga

SEQ ID NO: 1205793 - RNA, 19 nt, Artificial Sequence
  Description of Artificial Sequence: Synthetic oligonucleotide
  Antisense strand to SEQ ID NO: 1205792
ucuuauaccuucaagggca

SEQ ID NO: 1205794 - RNA, 19 nt, Artificial Sequence
  Description of Artificial Sequence: Synthetic oligonucleotide
  Sense strand starting at position 3120 of SEQ ID NO: 917064
gagauauuguagguuaaag

SEQ ID NO: 1205795 - RNA, 19 nt, Artificial Sequence
  Description of Artificial Sequence: Synthetic oligonucleotide
  Antisense strand to SEQ ID NO: 1205794
cuuuaaccuacaauaucuc

SEQ ID NO: 1205796 - RNA, 19 nt, Artificial Sequence
  Description of Artificial Sequence: Synthetic oligonucleotide
  Sense strand starting at position 3122 of SEQ ID NO: 917064
gauauuguagguuaaagcu

SEQ ID NO: 1205797 - RNA, 19 nt, Artificial Sequence
  Description of Artificial Sequence: Synthetic oligonucleotide
  Antisense strand to SEQ ID NO: 1205796
agcuuuaaccuacaauauc

SEQ ID NO: 1205798 - RNA, 19 nt, Artificial Sequence
  Description of Artificial Sequence: Synthetic oligonucleotide
  Sense strand starting at position 3235 of SEQ ID NO: 917064
acacauuagugaucauagu

SEQ ID NO: 1205799 - RNA, 19 nt, Artificial Sequence
  Description of Artificial Sequence: Synthetic oligonucleotide
  Antisense strand to SEQ ID NO: 1205798
acuaugaucacuaaugugu

SEQ ID NO: 1205800 - RNA, 19 nt, Artificial Sequence
  Description of Artificial Sequence: Synthetic oligonucleotide
  Sense strand starting at position 3399 of SEQ ID NO: 917064
cuuguacuuggaugggaga

SEQ ID NO: 1205801 - RNA, 19 nt, Artificial Sequence
  Description of Artificial Sequence: Synthetic oligonucleotide
  Antisense strand to SEQ ID NO: 1205800
ucucccauccaaguacaag

SEQ ID NO: 1205802 - RNA, 19 nt, Artificial Sequence
  Description of Artificial Sequence: Synthetic oligonucleotide
  Sense strand starting at position 3401 of SEQ ID NO: 917064
uguacuuggaugggagaau

SEQ ID NO: 1205803 - RNA, 19 nt, Artificial Sequence
  Description of Artificial Sequence: Synthetic oligonucleotide
  Antisense strand to SEQ ID NO: 1205802
auucucccauccaaguaca

SEQ ID NO: 1205804 - RNA, 19 nt, Artificial Sequence
  Description of Artificial Sequence: Synthetic oligonucleotide
  Sense strand starting at position 3440 of SEQ ID NO: 917064
uggcaucaacagcauauua

SEQ ID NO: 1205805 - RNA, 19 nt, Artificial Sequence
  Description of Artificial Sequence: Synthetic oligonucleotide
  Antisense strand to SEQ ID NO: 1205804
uaauaugcuguugaugcca

SEQ ID NO: 1205806 - RNA, 19 nt, Artificial Sequence
  Description of Artificial Sequence: Synthetic oligonucleotide
  Sense strand starting at position 3482 of SEQ ID NO: 917064
aagaguccucaugggaauu

SEQ ID NO: 1205807 - RNA, 19 nt, Artificial Sequence
  Description of Artificial Sequence: Synthetic oligonucleotide
  Antisense strand to SEQ ID NO: 1205806
aauucccaugaggacucuu

SEQ ID NO: 1205808 - RNA, 19 nt, Artificial Sequence
  Description of Artificial Sequence: Synthetic oligonucleotide
  Sense strand starting at position 3483 of SEQ ID NO: 917064
agaguccucaugggaauua

SEQ ID NO: 1205809 - RNA, 19 nt, Artificial Sequence
  Description of Artificial Sequence: Synthetic oligonucleotide
  Antisense strand to SEQ ID NO: 1205808
uaauucccaugaggacucu

SEQ ID NO: 1205810 - RNA, 19 nt, Artificial Sequence
  Description of Artificial Sequence: Synthetic oligonucleotide
  Sense strand starting at position 3494 of SEQ ID NO: 917064
gggaauuauugguuggcaa

SEQ ID NO: 1205811 - RNA, 19 nt, Artificial Sequence
  Description of Artificial Sequence: Synthetic oligonucleotide
  Antisense strand to SEQ ID NO: 1205810
uugccaaccaauaauuccc

SEQ ID NO: 1205812 - RNA, 19 nt, Artificial Sequence
  Description of Artificial Sequence: Synthetic oligonucleotide
  Sense strand starting at position 3495 of SEQ ID NO: 917064
ggaauuauugguuggcaaa

SEQ ID NO: 1205813 - RNA, 19 nt, Artificial Sequence
  Description of Artificial Sequence: Synthetic oligonucleotide
  Antisense strand to SEQ ID NO: 1205812
uuugccaaccaauaauucc

SEQ ID NO: 1205814 - RNA, 19 nt, Artificial Sequence
  Description of Artificial Sequence: Synthetic oligonucleotide
  Sense strand starting at position 3496 of SEQ ID NO: 917064
gaauuauugguuggcaaag

SEQ ID NO: 1205815 - RNA, 19 nt, Artificial Sequence
  Description of Artificial Sequence: Synthetic oligonucleotide
  Antisense strand to SEQ ID NO: 1205814
cuuugccaaccaauaauuc

SEQ ID NO: 1205816 - RNA, 19 nt, Artificial Sequence
  Description of Artificial Sequence: Synthetic oligonucleotide
  Sense strand starting at position 3603 of SEQ ID NO: 917064
agugaaauggcccaccuaa

SEQ ID NO: 1205817 - RNA, 19 nt, Artificial Sequence
  Description of Artificial Sequence: Synthetic oligonucleotide
  Antisense strand to SEQ ID NO: 1205816
uuaggugggccauuucacu

SEQ ID NO: 1205818 - RNA, 19 nt, Artificial Sequence
  Description of Artificial Sequence: Synthetic oligonucleotide
  Sense strand starting at position 3723 of SEQ ID NO: 917064
aaugacaaaugcuuugagu

SEQ ID NO: 1205819 - RNA, 19 nt, Artificial Sequence
  Description of Artificial Sequence: Synthetic oligonucleotide
  Antisense strand to SEQ ID NO: 1205818
acucaaagcauuugucauu

SEQ ID NO: 1205820 - RNA, 19 nt, Artificial Sequence
  Description of Artificial Sequence: Synthetic oligonucleotide
  Sense strand starting at position 3865 of SEQ ID NO: 917064
guugauugcagugacugaa

SEQ ID NO: 1205821 - RNA, 19 nt, Artificial Sequence
  Description of Artificial Sequence: Synthetic oligonucleotide
  Antisense strand to SEQ ID NO: 1205820
uucagucacugcaaucaac

SEQ ID NO: 1205822 - RNA, 19 nt, Artificial Sequence
  Description of Artificial Sequence: Synthetic oligonucleotide
  Sense strand starting at position 3868 of SEQ ID NO: 917064
gauugcagugacugaaaca

SEQ ID NO: 1205823 - RNA, 19 nt, Artificial Sequence
  Description of Artificial Sequence: Synthetic oligonucleotide
  Antisense strand to SEQ ID NO: 1205822
uguuucagucacugcaauc

SEQ ID NO: 1205824 - RNA, 19 nt, Artificial Sequence
  Description of Artificial Sequence: Synthetic oligonucleotide
  Sense strand starting at position 3881 of SEQ ID NO: 917064
gaaacaggaccuugauguu

SEQ ID NO: 1205825 - RNA, 19 nt, Artificial Sequence
  Description of Artificial Sequence: Synthetic oligonucleotide
  Antisense strand to SEQ ID NO: 1205824
aacaucaagguccuguuuc

SEQ ID NO: 1205826 - RNA, 19 nt, Artificial Sequence
  Description of Artificial Sequence: Synthetic oligonucleotide
  Sense strand starting at position 3951 of SEQ ID NO: 917064
ucaguagacguuuacagau

SEQ ID NO: 1205827 - RNA, 19 nt, Artificial Sequence
  Description of Artificial Sequence: Synthetic oligonucleotide
  Antisense strand to SEQ ID NO: 1205826
aucuguaaacgucuacuga

SEQ ID NO: 1205828 - RNA, 19 nt, Artificial Sequence
  Description of Artificial Sequence: Synthetic oligonucleotide
  Sense strand starting at position 337 of SEQ ID NO: 917065
ucacauuugugggaaaccu

SEQ ID NO: 1205829 - RNA, 19 nt, Artificial Sequence
  Description of Artificial Sequence: Synthetic oligonucleotide
  Antisense strand to SEQ ID NO: 1205828
agguuucccacaaauguga

SEQ ID NO: 1205830 - RNA, 19 nt, Artificial Sequence
  Description of Artificial Sequence: Synthetic oligonucleotide
  Sense strand starting at position 676 of SEQ ID NO: 917065
auguauuuguggcccagau

SEQ ID NO: 1205831 - RNA, 19 nt, Artificial Sequence
  Description of Artificial Sequence: Synthetic oligonucleotide
  Antisense strand to SEQ ID NO: 1205830
aucugggccacaaauacau

SEQ ID NO: 1205832 - RNA, 19 nt, Artificial Sequence
  Description of Artificial Sequence: Synthetic oligonucleotide
  Sense strand starting at position 716 of SEQ ID NO: 917065
ccugucaacuuucugggaa

SEQ ID NO: 1205833 - RNA, 19 nt, Artificial Sequence
  Description of Artificial Sequence: Synthetic oligonucleotide
  Antisense strand to SEQ ID NO: 1205832
uucccagaaaguugacagg

SEQ ID NO: 1205834 - RNA, 19 nt, Artificial Sequence
  Description of Artificial Sequence: Synthetic oligonucleotide
  Sense strand starting at position 717 of SEQ ID NO: 917065
cugucaacuuucugggaau

SEQ ID NO: 1205835 - RNA, 19 nt, Artificial Sequence
  Description of Artificial Sequence: Synthetic oligonucleotide
  Antisense strand to SEQ ID NO: 1205834
auucccagaaaguugacag

SEQ ID NO: 1205836 - RNA, 19 nt, Artificial Sequence
  Description of Artificial Sequence: Synthetic oligonucleotide
  Sense strand starting at position 718 of SEQ ID NO: 917065
ugucaacuuucugggaaua

SEQ ID NO: 1205837 - RNA, 19 nt, Artificial Sequence
  Description of Artificial Sequence: Synthetic oligonucleotide
  Antisense strand to SEQ ID NO: 1205836
uauucccagaaaguugaca

SEQ ID NO: 1205838 - RNA, 19 nt, Artificial Sequence
  Description of Artificial Sequence: Synthetic oligonucleotide
  Sense strand starting at position 719 of SEQ ID NO: 917065
gucaacuuucugggaauaa

SEQ ID NO: 1205839 - RNA, 19 nt, Artificial Sequence
  Description of Artificial Sequence: Synthetic oligonucleotide
  Antisense strand to SEQ ID NO: 1205838
uuauucccagaaaguugac

SEQ ID NO: 1205840 - RNA, 19 nt, Artificial Sequence
  Description of Artificial Sequence: Synthetic oligonucleotide
  Sense strand starting at position 720 of SEQ ID NO: 917065
ucaacuuucugggaauaaa

SEQ ID NO: 1205841 - RNA, 19 nt, Artificial Sequence
  Description of Artificial Sequence: Synthetic oligonucleotide
  Antisense strand to SEQ ID NO: 1205840
uuuauucccagaaaguuga

SEQ ID NO: 1205842 - RNA, 19 nt, Artificial Sequence
  Description of Artificial Sequence: Synthetic oligonucleotide
  Sense strand starting at position 849 of SEQ ID NO: 917065
aggguagccuagugguuaa

SEQ ID NO: 1205843 - RNA, 19 nt, Artificial Sequence
  Description of Artificial Sequence: Synthetic oligonucleotide
  Antisense strand to SEQ ID NO: 1205842
uuaaccacuaggcuacccu

SEQ ID NO: 1205844 - RNA, 19 nt, Artificial Sequence
  Description of Artificial Sequence: Synthetic oligonucleotide
  Sense strand starting at position 884 of SEQ ID NO: 917065
gucagcuuguccuagcauu

SEQ ID NO: 1205845 - RNA, 19 nt, Artificial Sequence
  Description of Artificial Sequence: Synthetic oligonucleotide
  Antisense strand to SEQ ID NO: 1205844
aaugcuaggacaagcugac

SEQ ID NO: 1205846 - RNA, 19 nt, Artificial Sequence
  Description of Artificial Sequence: Synthetic oligonucleotide
  Sense strand starting at position 921 of SEQ ID NO: 917065
guacuugcucugugaccuu

SEQ ID NO: 1205847 - RNA, 19 nt, Artificial Sequence
  Description of Artificial Sequence: Synthetic oligonucleotide
  Antisense strand to SEQ ID NO: 1205846
aaggucacagagcaaguac

SEQ ID NO: 1205848 - RNA, 19 nt, Artificial Sequence
  Description of Artificial Sequence: Synthetic oligonucleotide
  Sense strand starting at position 1001 of SEQ ID NO: 917065
ccuaaauucuaggguuguu

SEQ ID NO: 1205849 - RNA, 19 nt, Artificial Sequence
  Description of Artificial Sequence: Synthetic oligonucleotide
  Antisense strand to SEQ ID NO: 1205848
aacaacccuagaauuuagg

SEQ ID NO: 1205850 - RNA, 19 nt, Artificial Sequence
  Description of Artificial Sequence: Synthetic oligonucleotide
  Sense strand starting at position 1006 of SEQ ID NO: 917065
auucuaggguuguuguaga

SEQ ID NO: 1205851 - RNA, 19 nt, Artificial Sequence
  Description of Artificial Sequence: Synthetic oligonucleotide
  Antisense strand to SEQ ID NO: 1205850
ucuacaacaacccuagaau

SEQ ID NO: 1205852 - RNA, 19 nt, Artificial Sequence
  Description of Artificial Sequence: Synthetic oligonucleotide
  Sense strand starting at position 1011 of SEQ ID NO: 917065
aggguuguuguagagaagu

SEQ ID NO: 1205853 - RNA, 19 nt, Artificial Sequence
  Description of Artificial Sequence: Synthetic oligonucleotide
  Antisense strand to SEQ ID NO: 1205852
acuucucuacaacaacccu

SEQ ID NO: 1205854 - RNA, 19 nt, Artificial Sequence
  Description of Artificial Sequence: Synthetic oligonucleotide
  Sense strand starting at position 1013 of SEQ ID NO: 917065
gguuguuguagagaaguga

SEQ ID NO: 1205855 - RNA, 19 nt, Artificial Sequence
  Description of Artificial Sequence: Synthetic oligonucleotide
  Antisense strand to SEQ ID NO: 1205854
ucacuucucuacaacaacc

SEQ ID NO: 1205856 - RNA, 19 nt, Artificial Sequence
  Description of Artificial Sequence: Synthetic oligonucleotide
  Sense strand starting at position 1017 of SEQ ID NO: 917065
guuguagagaagugauaac

SEQ ID NO: 1205857 - RNA, 19 nt, Artificial Sequence
  Description of Artificial Sequence: Synthetic oligonucleotide
  Antisense strand to SEQ ID NO: 1205856
guuaucacuucucuacaac

SEQ ID NO: 1205858 - RNA, 19 nt, Artificial Sequence
  Description of Artificial Sequence: Synthetic oligonucleotide
  Sense strand starting at position 1087 of SEQ ID NO: 917065
agcaguuguuauuauuuga

SEQ ID NO: 1205859 - RNA, 19 nt, Artificial Sequence
  Description of Artificial Sequence: Synthetic oligonucleotide
  Antisense strand to SEQ ID NO: 1205858
ucaaauaauaacaacugcu

SEQ ID NO: 1205860 - RNA, 19 nt, Artificial Sequence
  Description of Artificial Sequence: Synthetic oligonucleotide
  Sense strand starting at position 1143 of SEQ ID NO: 917065
uugaaagccuucuggcaua

SEQ ID NO: 1205861 - RNA, 19 nt, Artificial Sequence
  Description of Artificial Sequence: Synthetic oligonucleotide
  Antisense strand to SEQ ID NO: 1205860
uaugccagaaggcuuucaa

SEQ ID NO: 1205862 - RNA, 19 nt, Artificial Sequence
  Description of Artificial Sequence: Synthetic oligonucleotide
  Sense strand starting at position 1277 of SEQ ID NO: 917065
acauuagaauaagagaacu

SEQ ID NO: 1205863 - RNA, 19 nt, Artificial Sequence
  Description of Artificial Sequence: Synthetic oligonucleotide
  Antisense strand to SEQ ID NO: 1205862
aguucucuuauucuaaugu

SEQ ID NO: 1205864 - RNA, 19 nt, Artificial Sequence
  Description of Artificial Sequence: Synthetic oligonucleotide
  Sense strand starting at position 1447 of SEQ ID NO: 917065
gauaaaugaguuugaggcu

SEQ ID NO: 1205865 - RNA, 19 nt, Artificial Sequence
  Description of Artificial Sequence: Synthetic oligonucleotide
  Antisense strand to SEQ ID NO: 1205864
agccucaaacucauuuauc

SEQ ID NO: 1205866 - RNA, 19 nt, Artificial Sequence
  Description of Artificial Sequence: Synthetic oligonucleotide
  Sense strand starting at position 1456 of SEQ ID NO: 917065
guuugaggcucugagaggu

SEQ ID NO: 1205867 - RNA, 19 nt, Artificial Sequence
  Description of Artificial Sequence: Synthetic oligonucleotide
  Antisense strand to SEQ ID NO: 1205866
accucucagagccucaaac

SEQ ID NO: 1205868 - RNA, 19 nt, Artificial Sequence
  Description of Artificial Sequence: Synthetic oligonucleotide
  Sense strand starting at position 1511 of SEQ ID NO: 917065
cgagauuucucuggcacuu

SEQ ID NO: 1205869 - RNA, 19 nt, Artificial Sequence
  Description of Artificial Sequence: Synthetic oligonucleotide
  Antisense strand to SEQ ID NO: 1205868
aagugccagagaaaucucg

SEQ ID NO: 1205870 - RNA, 19 nt, Artificial Sequence
  Description of Artificial Sequence: Synthetic oligonucleotide
  Sense strand starting at position 2244 of SEQ ID NO: 917065
aaguaugaacucggauaca

SEQ ID NO: 1205871 - RNA, 19 nt, Artificial Sequence
  Description of Artificial Sequence: Synthetic oligonucleotide
  Antisense strand to SEQ ID NO: 1205870
uguauccgaguucauacuu

SEQ ID NO: 1205872 - RNA, 19 nt, Artificial Sequence
  Description of Artificial Sequence: Synthetic oligonucleotide
  Sense strand starting at position 2345 of SEQ ID NO: 917065
ccgcguguugcagacaauu

SEQ ID NO: 1205873 - RNA, 19 nt, Artificial Sequence
  Description of Artificial Sequence: Synthetic oligonucleotide
  Antisense strand to SEQ ID NO: 1205872
aauugucugcaacacgcgg

SEQ ID NO: 1205874 - RNA, 19 nt, Artificial Sequence
  Description of Artificial Sequence: Synthetic oligonucleotide
  Sense strand starting at position 2416 of SEQ ID NO: 917065
gcacaaagcguuuccgcaa

SEQ ID NO: 1205875 - RNA, 19 nt, Artificial Sequence
  Description of Artificial Sequence: Synthetic oligonucleotide
  Antisense strand to SEQ ID NO: 1205874
uugcggaaacgcuuugugc

SEQ ID NO: 1205876 - RNA, 19 nt, Artificial Sequence
  Description of Artificial Sequence: Synthetic oligonucleotide
  Sense strand starting at position 2417 of SEQ ID NO: 917065
cacaaagcguuuccgcaaa

SEQ ID NO: 1205877 - RNA, 19 nt, Artificial Sequence
  Description of Artificial Sequence: Synthetic oligonucleotide
  Antisense strand to SEQ ID NO: 1205876
uuugcggaaacgcuuugug

SEQ ID NO: 1205878 - RNA, 19 nt, Artificial Sequence
  Description of Artificial Sequence: Synthetic oligonucleotide
  Sense strand starting at position 2437 of SEQ ID NO: 917065
ccggucuggcuauaucuau

SEQ ID NO: 1205879 - RNA, 19 nt, Artificial Sequence
  Description of Artificial Sequence: Synthetic oligonucleotide
  Antisense strand to SEQ ID NO: 1205878
auagauauagccagaccgg

SEQ ID NO: 1205880 - RNA, 19 nt, Artificial Sequence
  Description of Artificial Sequence: Synthetic oligonucleotide
  Sense strand starting at position 2444 of SEQ ID NO: 917065
ggcuauaucuauuaggauc

SEQ ID NO: 1205881 - RNA, 19 nt, Artificial Sequence
  Description of Artificial Sequence: Synthetic oligonucleotide
  Antisense strand to SEQ ID NO: 1205880
gauccuaauagauauagcc

SEQ ID NO: 1205882 - RNA, 19 nt, Artificial Sequence
  Description of Artificial Sequence: Synthetic oligonucleotide
  Sense strand starting at position 2457 of SEQ ID NO: 917065
aggaucauuccacgucaaa

SEQ ID NO: 1205883 - RNA, 19 nt, Artificial Sequence
  Description of Artificial Sequence: Synthetic oligonucleotide
  Antisense strand to SEQ ID NO: 1205882
uuugacguggaaugauccu

SEQ ID NO: 1205884 - RNA, 19 nt, Artificial Sequence
  Description of Artificial Sequence: Synthetic oligonucleotide
  Sense strand starting at position 2486 of SEQ ID NO: 917065
acuaacaucucauggaaga

SEQ ID NO: 1205885 - RNA, 19 nt, Artificial Sequence
  Description of Artificial Sequence: Synthetic oligonucleotide
  Antisense strand to SEQ ID NO: 1205884
ucuuccaugagauguuagu

SEQ ID NO: 1205886 - RNA, 19 nt, Artificial Sequence
  Description of Artificial Sequence: Synthetic oligonucleotide
  Sense strand starting at position 2577 of SEQ ID NO: 917065
gcucucugcugcugucauu

SEQ ID NO: 1205887 - RNA, 19 nt, Artificial Sequence
  Description of Artificial Sequence: Synthetic oligonucleotide
  Antisense strand to SEQ ID NO: 1205886
aaugacagcagcagagagc

SEQ ID NO: 1205888 - RNA, 19 nt, Artificial Sequence
  Description of Artificial Sequence: Synthetic oligonucleotide
  Sense strand starting at position 2596 of SEQ ID NO: 917065
uuaggagaaugugaauaau

SEQ ID NO: 1205889 - RNA, 19 nt, Artificial Sequence
  Description of Artificial Sequence: Synthetic oligonucleotide
  Antisense strand to SEQ ID NO: 1205888
auuauucacauucuccuaa

SEQ ID NO: 1205890 - RNA, 19 nt, Artificial Sequence
  Description of Artificial Sequence: Synthetic oligonucleotide
  Sense strand starting at position 81 of SEQ ID NO: 917066
caaaguggcuggucacaga

SEQ ID NO: 1205891 - RNA, 19 nt, Artificial Sequence
  Description of Artificial Sequence: Synthetic oligonucleotide
  Antisense strand to SEQ ID NO: 1205890
ucugugaccagccacuuug

SEQ ID NO: 1205892 - RNA, 19 nt, Artificial Sequence
  Description of Artificial Sequence: Synthetic oligonucleotide
  Sense strand starting at position 198 of SEQ ID NO: 917066
guggguuuaagauagugaa

SEQ ID NO: 1205893 - RNA, 19 nt, Artificial Sequence
  Description of Artificial Sequence: Synthetic oligonucleotide
  Antisense strand to SEQ ID NO: 1205892
uucacuaucuuaaacccac

SEQ ID NO: 1205894 - RNA, 19 nt, Artificial Sequence
  Description of Artificial Sequence: Synthetic oligonucleotide
  Sense strand starting at position 213 of SEQ ID NO: 917066
ugaaauaggugacugguaa

SEQ ID NO: 1205895 - RNA, 19 nt, Artificial Sequence
  Description of Artificial Sequence: Synthetic oligonucleotide
  Antisense strand to SEQ ID NO: 1205894
uuaccagucaccuauuuca

SEQ ID NO: 1205896 - RNA, 19 nt, Artificial Sequence
  Description of Artificial Sequence: Synthetic oligonucleotide
  Sense strand starting at position 214 of SEQ ID NO: 917066
gaaauaggugacugguaag

SEQ ID NO: 1205897 - RNA, 19 nt, Artificial Sequence
  Description of Artificial Sequence: Synthetic oligonucleotide
  Antisense strand to SEQ ID NO: 1205896
cuuaccagucaccuauuuc

SEQ ID NO: 1205898 - RNA, 19 nt, Artificial Sequence
  Description of Artificial Sequence: Synthetic oligonucleotide
  Sense strand starting at position 266 of SEQ ID NO: 917066
agcgguguccuagaugaga

SEQ ID NO: 1205899 - RNA, 19 nt, Artificial Sequence
  Description of Artificial Sequence: Synthetic oligonucleotide
  Antisense strand to SEQ ID NO: 1205898
ucucaucuaggacaccgcu

SEQ ID NO: 1205900 - RNA, 19 nt, Artificial Sequence
  Description of Artificial Sequence: Synthetic oligonucleotide
  Sense strand starting at position 268 of SEQ ID NO: 917066
cgguguccuagaugagauc

SEQ ID NO: 1205901 - RNA, 19 nt, Artificial Sequence
  Description of Artificial Sequence: Synthetic oligonucleotide
  Antisense strand to SEQ ID NO: 1205900
gaucucaucuaggacaccg

SEQ ID NO: 1205902 - RNA, 19 nt, Artificial Sequence
  Description of Artificial Sequence: Synthetic oligonucleotide
  Sense strand starting at position 277 of SEQ ID NO: 917066
agaugagauccagguugua

SEQ ID NO: 1205903 - RNA, 19 nt, Artificial Sequence
  Description of Artificial Sequence: Synthetic oligonucleotide
  Antisense strand to SEQ ID NO: 1205902
uacaaccuggaucucaucu

SEQ ID NO: 1205904 - RNA, 19 nt, Artificial Sequence
  Description of Artificial Sequence: Synthetic oligonucleotide
  Sense strand starting at position 305 of SEQ ID NO: 917066
augugcaacugguuugaaa

SEQ ID NO: 1205905 - RNA, 19 nt, Artificial Sequence
  Description of Artificial Sequence: Synthetic oligonucleotide
  Antisense strand to SEQ ID NO: 1205904
uuucaaaccaguugcacau

SEQ ID NO: 1205906 - RNA, 19 nt, Artificial Sequence
  Description of Artificial Sequence: Synthetic oligonucleotide
  Sense strand starting at position 369 of SEQ ID NO: 917066
agaauauuccaauggugcu

SEQ ID NO: 1205907 - RNA, 19 nt, Artificial Sequence
  Description of Artificial Sequence: Synthetic oligonucleotide
  Antisense strand to SEQ ID NO: 1205906
agcaccauuggaauauucu

SEQ ID NO: 1205908 - RNA, 19 nt, Artificial Sequence
  Description of Artificial Sequence: Synthetic oligonucleotide
  Sense strand starting at position 463 of SEQ ID NO: 917066
aguaaaugaugacacuaaa

SEQ ID NO: 1205909 - RNA, 19 nt, Artificial Sequence
  Description of Artificial Sequence: Synthetic oligonucleotide
  Antisense strand to SEQ ID NO: 1205908
uuuagugucaucauuuacu

SEQ ID NO: 1205910 - RNA, 19 nt, Artificial Sequence
  Description of Artificial Sequence: Synthetic oligonucleotide
  Sense strand starting at position 497 of SEQ ID NO: 917066
cuauaauugcauggcaaua

SEQ ID NO: 1205911 - RNA, 19 nt, Artificial Sequence
  Description of Artificial Sequence: Synthetic oligonucleotide
  Antisense strand to SEQ ID NO: 1205910
uauugccaugcaauuauag

SEQ ID NO: 1205912 - RNA, 19 nt, Artificial Sequence
  Description of Artificial Sequence: Synthetic oligonucleotide
  Sense strand starting at position 523 of SEQ ID NO: 917066
ugaggauuagagugacagu

SEQ ID NO: 1205913 - RNA, 19 nt, Artificial Sequence
  Description of Artificial Sequence: Synthetic oligonucleotide
  Antisense strand to SEQ ID NO: 1205912
acugucacucuaauccuca

SEQ ID NO: 1205914 - RNA, 19 nt, Artificial Sequence
  Description of Artificial Sequence: Synthetic oligonucleotide
  Sense strand starting at position 530 of SEQ ID NO: 917066
uagagugacagugguagau

SEQ ID NO: 1205915 - RNA, 19 nt, Artificial Sequence
  Description of Artificial Sequence: Synthetic oligonucleotide
  Antisense strand to SEQ ID NO: 1205914
aucuaccacugucacucua

SEQ ID NO: 1205916 - RNA, 19 nt, Artificial Sequence
  Description of Artificial Sequence: Synthetic oligonucleotide
  Sense strand starting at position 534 of SEQ ID NO: 917066
gugacagugguagaucaau

SEQ ID NO: 1205917 - RNA, 19 nt, Artificial Sequence
  Description of Artificial Sequence: Synthetic oligonucleotide
  Antisense strand to SEQ ID NO: 1205916
auugaucuaccacugucac

SEQ ID NO: 1205918 - RNA, 19 nt, Artificial Sequence
  Description of Artificial Sequence: Synthetic oligonucleotide
  Sense strand starting at position 540 of SEQ ID NO: 917066
gugguagaucaaugaucug

SEQ ID NO: 1205919 - RNA, 19 nt, Artificial Sequence
  Description of Artificial Sequence: Synthetic oligonucleotide
  Antisense strand to SEQ ID NO: 1205918
cagaucauugaucuaccac

SEQ ID NO: 1205920 - RNA, 19 nt, Artificial Sequence
  Description of Artificial Sequence: Synthetic oligonucleotide
  Sense strand starting at position 804 of SEQ ID NO: 917066
guaguaccacuuuaaauug

SEQ ID NO: 1205921 - RNA, 19 nt, Artificial Sequence
  Description of Artificial Sequence: Synthetic oligonucleotide
  Antisense strand to SEQ ID NO: 1205920
caauuuaaagugguacuac

SEQ ID NO: 1205922 - RNA, 19 nt, Artificial Sequence
  Description of Artificial Sequence: Synthetic oligonucleotide
  Sense strand starting at position 849 of SEQ ID NO: 917066
cuggguugucaucagauac

SEQ ID NO: 1205923 - RNA, 19 nt, Artificial Sequence
  Description of Artificial Sequence: Synthetic oligonucleotide
  Antisense strand to SEQ ID NO: 1205922
guaucugaugacaacccag

SEQ ID NO: 1205924 - RNA, 19 nt, Artificial Sequence
  Description of Artificial Sequence: Synthetic oligonucleotide
  Sense strand starting at position 1069 of SEQ ID NO: 917066
uuugaucaucauugaguag

SEQ ID NO: 1205925 - RNA, 19 nt, Artificial Sequence
  Description of Artificial Sequence: Synthetic oligonucleotide
  Antisense strand to SEQ ID NO: 1205924
cuacucaaugaugaucaaa

SEQ ID NO: 1205926 - RNA, 19 nt, Artificial Sequence
  Description of Artificial Sequence: Synthetic oligonucleotide
  Sense strand starting at position 1072 of SEQ ID NO: 917066
gaucaucauugaguagcua

SEQ ID NO: 1205927 - RNA, 19 nt, Artificial Sequence
  Description of Artificial Sequence: Synthetic oligonucleotide
  Antisense strand to SEQ ID NO: 1205926
uagcuacucaaugaugauc

SEQ ID NO: 1205928 - RNA, 19 nt, Artificial Sequence
  Description of Artificial Sequence: Synthetic oligonucleotide
  Sense strand starting at position 1073 of SEQ ID NO: 917066
aucaucauugaguagcuau

SEQ ID NO: 1205929 - RNA, 19 nt, Artificial Sequence
  Description of Artificial Sequence: Synthetic oligonucleotide
  Antisense strand to SEQ ID NO: 1205928
auagcuacucaaugaugau

SEQ ID NO: 1205930 - RNA, 19 nt, Artificial Sequence
  Description of Artificial Sequence: Synthetic oligonucleotide
  Sense strand starting at position 1231 of SEQ ID NO: 917066
auucuucucuagccagaag

SEQ ID NO: 1205931 - RNA, 19 nt, Artificial Sequence
  Description of Artificial Sequence: Synthetic oligonucleotide
  Antisense strand to SEQ ID NO: 1205930
cuucuggcuagagaagaau

SEQ ID NO: 1205932 - RNA, 19 nt, Artificial Sequence
  Description of Artificial Sequence: Synthetic oligonucleotide
  Sense strand starting at position 1272 of SEQ ID NO: 917066
gucaaagggcuucggagaa

SEQ ID NO: 1205933 - RNA, 19 nt, Artificial Sequence
  Description of Artificial Sequence: Synthetic oligonucleotide
  Antisense strand to SEQ ID NO: 1205932
uucuccgaagcccuuugac

SEQ ID NO: 1205934 - RNA, 19 nt, Artificial Sequence
  Description of Artificial Sequence: Synthetic oligonucleotide
  Sense strand starting at position 1296 of SEQ ID NO: 917066
acuagauacuuuccuguuu

SEQ ID NO: 1205935 - RNA, 19 nt, Artificial Sequence
  Description of Artificial Sequence: Synthetic oligonucleotide
  Antisense strand to SEQ ID NO: 1205934
aaacaggaaaguaucuagu

SEQ ID NO: 1205936 - RNA, 19 nt, Artificial Sequence
  Description of Artificial Sequence: Synthetic oligonucleotide
  Sense strand starting at position 1498 of SEQ ID NO: 917066
cgaggaggucuucagcaaa

SEQ ID NO: 1205937 - RNA, 19 nt, Artificial Sequence
  Description of Artificial Sequence: Synthetic oligonucleotide
  Antisense strand to SEQ ID NO: 1205936
uuugcugaagaccuccucg

SEQ ID NO: 1205938 - RNA, 19 nt, Artificial Sequence
  Description of Artificial Sequence: Synthetic oligonucleotide
  Sense strand starting at position 1563 of SEQ ID NO: 917066
aaccaaguauagcugagau

SEQ ID NO: 1205939 - RNA, 19 nt, Artificial Sequence
  Description of Artificial Sequence: Synthetic oligonucleotide
  Antisense strand to SEQ ID NO: 1205938
aucucagcuauacuugguu

SEQ ID NO: 1205940 - RNA, 19 nt, Artificial Sequence
  Description of Artificial Sequence: Synthetic oligonucleotide
  Sense strand starting at position 1658 of SEQ ID NO: 917066
aagagauaugaguggucca

SEQ ID NO: 1205941 - RNA, 19 nt, Artificial Sequence
  Description of Artificial Sequence: Synthetic oligonucleotide
  Antisense strand to SEQ ID NO: 1205940
uggaccacucauaucucuu

SEQ ID NO: 1205942 - RNA, 19 nt, Artificial Sequence
  Description of Artificial Sequence: Synthetic oligonucleotide
  Sense strand starting at position 1659 of SEQ ID NO: 917066
agagauaugagugguccaa

SEQ ID NO: 1205943 - RNA, 19 nt, Artificial Sequence
  Description of Artificial Sequence: Synthetic oligonucleotide
  Antisense strand to SEQ ID NO: 1205942
uuggaccacucauaucucu

SEQ ID NO: 1205944 - RNA, 19 nt, Artificial Sequence
  Description of Artificial Sequence: Synthetic oligonucleotide
  Sense strand starting at position 1661 of SEQ ID NO: 917066
agauaugagugguccaacu

SEQ ID NO: 1205945 - RNA, 19 nt, Artificial Sequence
  Description of Artificial Sequence: Synthetic oligonucleotide
  Antisense strand to SEQ ID NO: 1205944
aguuggaccacucauaucu

SEQ ID NO: 1205946 - RNA, 19 nt, Artificial Sequence
  Description of Artificial Sequence: Synthetic oligonucleotide
  Sense strand starting at position 1671 of SEQ ID NO: 917066
gguccaacugcuggagaaa

SEQ ID NO: 1205947 - RNA, 19 nt, Artificial Sequence
  Description of Artificial Sequence: Synthetic oligonucleotide
  Antisense strand to SEQ ID NO: 1205946
uuucuccagcaguuggacc

SEQ ID NO: 1205948 - RNA, 19 nt, Artificial Sequence
  Description of Artificial Sequence: Synthetic oligonucleotide
  Sense strand starting at position 2078 of SEQ ID NO: 917066
uuagucuuaaagggagagu

SEQ ID NO: 1205949 - RNA, 19 nt, Artificial Sequence
  Description of Artificial Sequence: Synthetic oligonucleotide
  Antisense strand to SEQ ID NO: 1205948
acucucccuuuaagacuaa

SEQ ID NO: 1205950 - RNA, 19 nt, Artificial Sequence
  Description of Artificial Sequence: Synthetic oligonucleotide
  Sense strand starting at position 2200 of SEQ ID NO: 917066
gagcgcuugcugccuguaa

SEQ ID NO: 1205951 - RNA, 19 nt, Artificial Sequence
  Description of Artificial Sequence: Synthetic oligonucleotide
  Antisense strand to SEQ ID NO: 1205950
uuacaggcagcaagcgcuc

SEQ ID NO: 1205952 - RNA, 19 nt, Artificial Sequence
  Description of Artificial Sequence: Synthetic oligonucleotide
  Sense strand starting at position 2360 of SEQ ID NO: 917066
gaagaauauccaggcucug

SEQ ID NO: 1205953 - RNA, 19 nt, Artificial Sequence
  Description of Artificial Sequence: Synthetic oligonucleotide
  Antisense strand to SEQ ID NO: 1205952
cagagccuggauauucuuc

SEQ ID NO: 1205954 - RNA, 19 nt, Artificial Sequence
  Description of Artificial Sequence: Synthetic oligonucleotide
  Sense strand starting at position 2446 of SEQ ID NO: 917066
gcacaaguguuucuaggga

SEQ ID NO: 1205955 - RNA, 19 nt, Artificial Sequence
  Description of Artificial Sequence: Synthetic oligonucleotide
  Antisense strand to SEQ ID NO: 1205954
ucccuagaaacacuugugc

SEQ ID NO: 1205956 - RNA, 19 nt, Artificial Sequence
  Description of Artificial Sequence: Synthetic oligonucleotide
  Sense strand starting at position 2502 of SEQ ID NO: 917066
ggucgaauucgugugccga

SEQ ID NO: 1205957 - RNA, 19 nt, Artificial Sequence
  Description of Artificial Sequence: Synthetic oligonucleotide
  Antisense strand to SEQ ID NO: 1205956
ucggcacacgaauucgacc

SEQ ID NO: 1205958 - RNA, 19 nt, Artificial Sequence
  Description of Artificial Sequence: Synthetic oligonucleotide
  Sense strand starting at position 2819 of SEQ ID NO: 917066
ggcggaccuacuuaguauu

SEQ ID NO: 1205959 - RNA, 19 nt, Artificial Sequence
  Description of Artificial Sequence: Synthetic oligonucleotide
  Antisense strand to SEQ ID NO: 1205958
aauacuaaguagguccgcc

SEQ ID NO: 1205960 - RNA, 19 nt, Artificial Sequence
  Description of Artificial Sequence: Synthetic oligonucleotide
  Sense strand starting at position 3151 of SEQ ID NO: 917066
cccacuuuggcuuaguuua

SEQ ID NO: 1205961 - RNA, 19 nt, Artificial Sequence
  Description of Artificial Sequence: Synthetic oligonucleotide
  Antisense strand to SEQ ID NO: 1205960
uaaacuaagccaaaguggg

SEQ ID NO: 1205962 - RNA, 19 nt, Artificial Sequence
  Description of Artificial Sequence: Synthetic oligonucleotide
  Sense strand starting at position 3163 of SEQ ID NO: 917066
uaguuuaauguccagcagu

SEQ ID NO: 1205963 - RNA, 19 nt, Artificial Sequence
  Description of Artificial Sequence: Synthetic oligonucleotide
  Antisense strand to SEQ ID NO: 1205962
acugcuggacauuaaacua

SEQ ID NO: 1205964 - RNA, 19 nt, Artificial Sequence
  Description of Artificial Sequence: Synthetic oligonucleotide
  Sense strand starting at position 3207 of SEQ ID NO: 917066
gagguaaguauuggugacu

SEQ ID NO: 1205965 - RNA, 19 nt, Artificial Sequence
  Description of Artificial Sequence: Synthetic oligonucleotide
  Antisense strand to SEQ ID NO: 1205964
agucaccaauacuuaccuc

SEQ ID NO: 1205966 - RNA, 19 nt, Artificial Sequence
  Description of Artificial Sequence: Synthetic oligonucleotide
  Sense strand starting at position 3208 of SEQ ID NO: 917066
agguaaguauuggugacua

SEQ ID NO: 1205967 - RNA, 19 nt, Artificial Sequence
  Description of Artificial Sequence: Synthetic oligonucleotide
  Antisense strand to SEQ ID NO: 1205966
uagucaccaauacuuaccu

SEQ ID NO: 1205968 - RNA, 19 nt, Artificial Sequence
  Description of Artificial Sequence: Synthetic oligonucleotide
  Sense strand starting at position 3622 of SEQ ID NO: 917066
caaauuaggccucagaagu

SEQ ID NO: 1205969 - RNA, 19 nt, Artificial Sequence
  Description of Artificial Sequence: Synthetic oligonucleotide
  Antisense strand to SEQ ID NO: 1205968
acuucugaggccuaauuug

SEQ ID NO: 1205970 - RNA, 19 nt, Artificial Sequence
  Description of Artificial Sequence: Synthetic oligonucleotide
  Sense strand starting at position 16 of SEQ ID NO: 917067
guaguaccacuuuaaauug

SEQ ID NO: 1205971 - RNA, 19 nt, Artificial Sequence
  Description of Artificial Sequence: Synthetic oligonucleotide
  Antisense strand to SEQ ID NO: 1205970
caauuuaaagugguacuac

SEQ ID NO: 1205972 - RNA, 19 nt, Artificial Sequence
  Description of Artificial Sequence: Synthetic oligonucleotide
  Sense strand starting at position 61 of SEQ ID NO: 917067
cuggguugucaucagauac

SEQ ID NO: 1205973 - RNA, 19 nt, Artificial Sequence
  Description of Artificial Sequence: Synthetic oligonucleotide
  Antisense strand to SEQ ID NO: 1205972
guaucugaugacaacccag

SEQ ID NO: 1205974 - RNA, 19 nt, Artificial Sequence
  Description of Artificial Sequence: Synthetic oligonucleotide
  Sense strand starting at position 281 of SEQ ID NO: 917067
uuugaucaucauugaguag

SEQ ID NO: 1205975 - RNA, 19 nt, Artificial Sequence
  Description of Artificial Sequence: Synthetic oligonucleotide
  Antisense strand to SEQ ID NO: 1205974
cuacucaaugaugaucaaa

SEQ ID NO: 1205976 - RNA, 19 nt, Artificial Sequence
  Description of Artificial Sequence: Synthetic oligonucleotide
  Sense strand starting at position 284 of SEQ ID NO: 917067
gaucaucauugaguagcua

SEQ ID NO: 1205977 - RNA, 19 nt, Artificial Sequence
  Description of Artificial Sequence: Synthetic oligonucleotide
  Antisense strand to SEQ ID NO: 1205976
uagcuacucaaugaugauc

SEQ ID NO: 1205978 - RNA, 19 nt, Artificial Sequence
  Description of Artificial Sequence: Synthetic oligonucleotide
  Sense strand starting at position 285 of SEQ ID NO: 917067
aucaucauugaguagcuau

SEQ ID NO: 1205979 - RNA, 19 nt, Artificial Sequence
  Description of Artificial Sequence: Synthetic oligonucleotide
  Antisense strand to SEQ ID NO: 1205978
auagcuacucaaugaugau

SEQ ID NO: 1205980 - RNA, 19 nt, Artificial Sequence
  Description of Artificial Sequence: Synthetic oligonucleotide
  Sense strand starting at position 443 of SEQ ID NO: 917067
auucuucucuagccagaag

SEQ ID NO: 1205981 - RNA, 19 nt, Artificial Sequence
  Description of Artificial Sequence: Synthetic oligonucleotide
  Antisense strand to SEQ ID NO: 1205980
cuucuggcuagagaagaau

SEQ ID NO: 1205982 - RNA, 19 nt, Artificial Sequence
  Description of Artificial Sequence: Synthetic oligonucleotide
  Sense strand starting at position 484 of SEQ ID NO: 917067
gucaaagggcuucggagaa

SEQ ID NO: 1205983 - RNA, 19 nt, Artificial Sequence
  Description of Artificial Sequence: Synthetic oligonucleotide
  Antisense strand to SEQ ID NO: 1205982
uucuccgaagcccuuugac

SEQ ID NO: 1205984 - RNA, 19 nt, Artificial Sequence
  Description of Artificial Sequence: Synthetic oligonucleotide
  Sense strand starting at position 508 of SEQ ID NO: 917067
acuagauacuuuccuguuu

SEQ ID NO: 1205985 - RNA, 19 nt, Artificial Sequence
  Description of Artificial Sequence: Synthetic oligonucleotide
  Antisense strand to SEQ ID NO: 1205984
aaacaggaaaguaucuagu

SEQ ID NO: 1205986 - RNA, 19 nt, Artificial Sequence
  Description of Artificial Sequence: Synthetic oligonucleotide
  Sense strand starting at position 710 of SEQ ID NO: 917067
cgaggaggucuucagcaaa

SEQ ID NO: 1205987 - RNA, 19 nt, Artificial Sequence
  Description of Artificial Sequence: Synthetic oligonucleotide
  Antisense strand to SEQ ID NO: 1205986
uuugcugaagaccuccucg

SEQ ID NO: 1205988 - RNA, 19 nt, Artificial Sequence
  Description of Artificial Sequence: Synthetic oligonucleotide
  Sense strand starting at position 775 of SEQ ID NO: 917067
aaccaaguauagcugagau

SEQ ID NO: 1205989 - RNA, 19 nt, Artificial Sequence
  Description of Artificial Sequence: Synthetic oligonucleotide
  Antisense strand to SEQ ID NO: 1205988
aucucagcuauacuugguu

SEQ ID NO: 1205990 - RNA, 19 nt, Artificial Sequence
  Description of Artificial Sequence: Synthetic oligonucleotide
  Sense strand starting at position 870 of SEQ ID NO: 917067
aagagauaugaguggucca

SEQ ID NO: 1205991 - RNA, 19 nt, Artificial Sequence
  Description of Artificial Sequence: Synthetic oligonucleotide
  Antisense strand to SEQ ID NO: 1205990
uggaccacucauaucucuu

SEQ ID NO: 1205992 - RNA, 19 nt, Artificial Sequence
  Description of Artificial Sequence: Synthetic oligonucleotide
  Sense strand starting at position 871 of SEQ ID NO: 917067
agagauaugagugguccaa

SEQ ID NO: 1205993 - RNA, 19 nt, Artificial Sequence
  Description of Artificial Sequence: Synthetic oligonucleotide
  Antisense strand to SEQ ID NO: 1205992
uuggaccacucauaucucu

SEQ ID NO: 1205994 - RNA, 19 nt, Artificial Sequence
  Description of Artificial Sequence: Synthetic oligonucleotide
  Sense strand starting at position 873 of SEQ ID NO: 917067
agauaugagugguccaacu

SEQ ID NO: 1205995 - RNA, 19 nt, Artificial Sequence
  Description of Artificial Sequence: Synthetic oligonucleotide
  Antisense strand to SEQ ID NO: 1205994
aguuggaccacucauaucu

SEQ ID NO: 1205996 - RNA, 19 nt, Artificial Sequence
  Description of Artificial Sequence: Synthetic oligonucleotide
  Sense strand starting at position 883 of SEQ ID NO: 917067
gguccaacugcuggagaaa

SEQ ID NO: 1205997 - RNA, 19 nt, Artificial Sequence
  Description of Artificial Sequence: Synthetic oligonucleotide
  Antisense strand to SEQ ID NO: 1205996
uuucuccagcaguuggacc

SEQ ID NO: 1205998 - RNA, 19 nt, Artificial Sequence
  Description of Artificial Sequence: Synthetic oligonucleotide
  Sense strand starting at position 1290 of SEQ ID NO: 917067
uuagucuuaaagggagagu

SEQ ID NO: 1205999 - RNA, 19 nt, Artificial Sequence
  Description of Artificial Sequence: Synthetic oligonucleotide
  Antisense strand to SEQ ID NO: 1205998
acucucccuuuaagacuaa

SEQ ID NO: 1206000 - RNA, 19 nt, Artificial Sequence
  Description of Artificial Sequence: Synthetic oligonucleotide
  Sense strand starting at position 1412 of SEQ ID NO: 917067
gagcgcuugcugccuguaa

SEQ ID NO: 1206001 - RNA, 19 nt, Artificial Sequence
  Description of Artificial Sequence: Synthetic oligonucleotide
  Antisense strand to SEQ ID NO: 1206000
uuacaggcagcaagcgcuc

SEQ ID NO: 1206002 - RNA, 19 nt, Artificial Sequence
  Description of Artificial Sequence: Synthetic oligonucleotide
  Sense strand starting at position 1572 of SEQ ID NO: 917067
gaagaauauccaggcucug

SEQ ID NO: 1206003 - RNA, 19 nt, Artificial Sequence
  Description of Artificial Sequence: Synthetic oligonucleotide
  Antisense strand to SEQ ID NO: 1206002
cagagccuggauauucuuc

SEQ ID NO: 1206004 - RNA, 19 nt, Artificial Sequence
  Description of Artificial Sequence: Synthetic oligonucleotide
  Sense strand starting at position 1658 of SEQ ID NO: 917067
gcacaaguguuucuaggga

SEQ ID NO: 1206005 - RNA, 19 nt, Artificial Sequence
  Description of Artificial Sequence: Synthetic oligonucleotide
  Antisense strand to SEQ ID NO: 1206004
ucccuagaaacacuugugc

SEQ ID NO: 1206006 - RNA, 19 nt, Artificial Sequence
  Description of Artificial Sequence: Synthetic oligonucleotide
  Sense strand starting at position 1714 of SEQ ID NO: 917067
ggucgaauucgugugccga

SEQ ID NO: 1206007 - RNA, 19 nt, Artificial Sequence
  Description of Artificial Sequence: Synthetic oligonucleotide
  Antisense strand to SEQ ID NO: 1206006
ucggcacacgaauucgacc

SEQ ID NO: 1206008 - RNA, 19 nt, Artificial Sequence
  Description of Artificial Sequence: Synthetic oligonucleotide
  Sense strand starting at position 2031 of SEQ ID NO: 917067
ggcggaccuacuuaguauu

SEQ ID NO: 1206009 - RNA, 19 nt, Artificial Sequence
  Description of Artificial Sequence: Synthetic oligonucleotide
  Antisense strand to SEQ ID NO: 1206008
aauacuaaguagguccgcc

SEQ ID NO: 1206010 - RNA, 19 nt, Artificial Sequence
  Description of Artificial Sequence: Synthetic oligonucleotide
  Sense strand starting at position 2363 of SEQ ID NO: 917067
cccacuuuggcuuaguuua

SEQ ID NO: 1206011 - RNA, 19 nt, Artificial Sequence
  Description of Artificial Sequence: Synthetic oligonucleotide
  Antisense strand to SEQ ID NO: 1206010
uaaacuaagccaaaguggg

SEQ ID NO: 1206012 - RNA, 19 nt, Artificial Sequence
  Description of Artificial Sequence: Synthetic oligonucleotide
  Sense strand starting at position 2375 of SEQ ID NO: 917067
uaguuuaauguccagcagu

SEQ ID NO: 1206013 - RNA, 19 nt, Artificial Sequence
  Description of Artificial Sequence: Synthetic oligonucleotide
  Antisense strand to SEQ ID NO: 1206012
acugcuggacauuaaacua

SEQ ID NO: 1206014 - RNA, 19 nt, Artificial Sequence
  Description of Artificial Sequence: Synthetic oligonucleotide
  Sense strand starting at position 2419 of SEQ ID NO: 917067
gagguaaguauuggugacu

SEQ ID NO: 1206015 - RNA, 19 nt, Artificial Sequence
  Description of Artificial Sequence: Synthetic oligonucleotide
  Antisense strand to SEQ ID NO: 1206014
agucaccaauacuuaccuc

SEQ ID NO: 1206016 - RNA, 19 nt, Artificial Sequence
  Description of Artificial Sequence: Synthetic oligonucleotide
  Sense strand starting at position 2420 of SEQ ID NO: 917067
agguaaguauuggugacua

SEQ ID NO: 1206017 - RNA, 19 nt, Artificial Sequence
  Description of Artificial Sequence: Synthetic oligonucleotide
  Antisense strand to SEQ ID NO: 1206016
uagucaccaauacuuaccu

SEQ ID NO: 1206018 - RNA, 19 nt, Artificial Sequence
  Description of Artificial Sequence: Synthetic oligonucleotide
  Sense strand starting at position 2820 of SEQ ID NO: 917067
ggaccuuuauaagacaaau

SEQ ID NO: 1206019 - RNA, 19 nt, Artificial Sequence
  Description of Artificial Sequence: Synthetic oligonucleotide
  Antisense strand to SEQ ID NO: 1206018
auuugucuuauaaaggucc

SEQ ID NO: 1206020 - RNA, 19 nt, Artificial Sequence
  Description of Artificial Sequence: Synthetic oligonucleotide
  Sense strand starting at position 2834 of SEQ ID NO: 917067
caaauuaggccucagaagu

SEQ ID NO: 1206021 - RNA, 19 nt, Artificial Sequence
  Description of Artificial Sequence: Synthetic oligonucleotide
  Antisense strand to SEQ ID NO: 1206020
acuucugaggccuaauuug

SEQ ID NO: 1206022 - RNA, 19 nt, Artificial Sequence
  Description of Artificial Sequence: Synthetic oligonucleotide
  Sense strand starting at position 3204 of SEQ ID NO: 917067
gcuuguauuauagagcaag

SEQ ID NO: 1206023 - RNA, 19 nt, Artificial Sequence
  Description of Artificial Sequence: Synthetic oligonucleotide
  Antisense strand to SEQ ID NO: 1206022
cuugcucuauaauacaagc

SEQ ID NO: 1206024 - RNA, 19 nt, Artificial Sequence
  Description of Artificial Sequence: Synthetic oligonucleotide
  Sense strand starting at position 3207 of SEQ ID NO: 917067
uguauuauagagcaagacu

SEQ ID NO: 1206025 - RNA, 19 nt, Artificial Sequence
  Description of Artificial Sequence: Synthetic oligonucleotide
  Antisense strand to SEQ ID NO: 1206024
agucuugcucuauaauaca

SEQ ID NO: 1206026 - RNA, 19 nt, Artificial Sequence
  Description of Artificial Sequence: Synthetic oligonucleotide
  Sense strand starting at position 3269 of SEQ ID NO: 917067
cuguuauugcaaguguugu

SEQ ID NO: 1206027 - RNA, 19 nt, Artificial Sequence
  Description of Artificial Sequence: Synthetic oligonucleotide
  Antisense strand to SEQ ID NO: 1206026
acaacacuugcaauaacag

SEQ ID NO: 1206028 - RNA, 19 nt, Artificial Sequence
  Description of Artificial Sequence: Synthetic oligonucleotide
  Sense strand starting at position 3286 of SEQ ID NO: 917067
gugacacuguggucuuaaa

SEQ ID NO: 1206029 - RNA, 19 nt, Artificial Sequence
  Description of Artificial Sequence: Synthetic oligonucleotide
  Antisense strand to SEQ ID NO: 1206028
uuuaagaccacagugucac

SEQ ID NO: 1206030 - RNA, 19 nt, Artificial Sequence
  Description of Artificial Sequence: Synthetic oligonucleotide
  Sense strand starting at position 3366 of SEQ ID NO: 917067
ccuuguuaugauuagacgu

SEQ ID NO: 1206031 - RNA, 19 nt, Artificial Sequence
  Description of Artificial Sequence: Synthetic oligonucleotide
  Antisense strand to SEQ ID NO: 1206030
acgucuaaucauaacaagg

SEQ ID NO: 1206032 - RNA, 19 nt, Artificial Sequence
  Description of Artificial Sequence: Synthetic oligonucleotide
  Sense strand starting at position 3372 of SEQ ID NO: 917067
uaugauuagacgugagagu

SEQ ID NO: 1206033 - RNA, 19 nt, Artificial Sequence
  Description of Artificial Sequence: Synthetic oligonucleotide
  Antisense strand to SEQ ID NO: 1206032
acucucacgucuaaucaua

SEQ ID NO: 1206034 - RNA, 19 nt, Artificial Sequence
  Description of Artificial Sequence: Synthetic oligonucleotide
  Sense strand starting at position 3416 of SEQ ID NO: 917067
ugggauacguuggucuuga

SEQ ID NO: 1206035 - RNA, 19 nt, Artificial Sequence
  Description of Artificial Sequence: Synthetic oligonucleotide
  Antisense strand to SEQ ID NO: 1206034
ucaagaccaacguauccca

SEQ ID NO: 1206036 - RNA, 19 nt, Artificial Sequence
  Description of Artificial Sequence: Synthetic oligonucleotide
  Sense strand starting at position 3417 of SEQ ID NO: 917067
gggauacguuggucuugac

SEQ ID NO: 1206037 - RNA, 19 nt, Artificial Sequence
  Description of Artificial Sequence: Synthetic oligonucleotide
  Antisense strand to SEQ ID NO: 1206036
gucaagaccaacguauccc

SEQ ID NO: 1206038 - RNA, 19 nt, Artificial Sequence
  Description of Artificial Sequence: Synthetic oligonucleotide
  Sense strand starting at position 3421 of SEQ ID NO: 917067
uacguuggucuugacugaa

SEQ ID NO: 1206039 - RNA, 19 nt, Artificial Sequence
  Description of Artificial Sequence: Synthetic oligonucleotide
  Antisense strand to SEQ ID NO: 1206038
uucagucaagaccaacgua

SEQ ID NO: 1206040 - RNA, 19 nt, Artificial Sequence
  Description of Artificial Sequence: Synthetic oligonucleotide
  Sense strand starting at position 3424 of SEQ ID NO: 917067
guuggucuugacugaacua

SEQ ID NO: 1206041 - RNA, 19 nt, Artificial Sequence
  Description of Artificial Sequence: Synthetic oligonucleotide
  Antisense strand to SEQ ID NO: 1206040
uaguucagucaagaccaac

SEQ ID NO: 1206042 - RNA, 19 nt, Artificial Sequence
  Description of Artificial Sequence: Synthetic oligonucleotide
  Sense strand starting at position 3484 of SEQ ID NO: 917067
gaccuuugugcaggaggga

SEQ ID NO: 1206043 - RNA, 19 nt, Artificial Sequence
  Description of Artificial Sequence: Synthetic oligonucleotide
  Antisense strand to SEQ ID NO: 1206042
ucccuccugcacaaagguc

SEQ ID NO: 1206044 - RNA, 19 nt, Artificial Sequence
  Description of Artificial Sequence: Synthetic oligonucleotide
  Sense strand starting at position 3751 of SEQ ID NO: 917067
uuaugaugugguugauuaa

SEQ ID NO: 1206045 - RNA, 19 nt, Artificial Sequence
  Description of Artificial Sequence: Synthetic oligonucleotide
  Antisense strand to SEQ ID NO: 1206044
uuaaucaaccacaucauaa

SEQ ID NO: 1206046 - RNA, 19 nt, Artificial Sequence
  Description of Artificial Sequence: Synthetic oligonucleotide
  Sense strand starting at position 3754 of SEQ ID NO: 917067
ugaugugguugauuaaaga

SEQ ID NO: 1206047 - RNA, 19 nt, Artificial Sequence
  Description of Artificial Sequence: Synthetic oligonucleotide
  Antisense strand to SEQ ID NO: 1206046
ucuuuaaucaaccacauca

SEQ ID NO: 1206048 - RNA, 19 nt, Artificial Sequence
  Description of Artificial Sequence: Synthetic oligonucleotide
  Sense strand starting at position 3928 of SEQ ID NO: 917067
ccuuauuccuuauucgaga

SEQ ID NO: 1206049 - RNA, 19 nt, Artificial Sequence
  Description of Artificial Sequence: Synthetic oligonucleotide
  Antisense strand to SEQ ID NO: 1206048
ucucgaauaaggaauaagg

SEQ ID NO: 1206050 - RNA, 19 nt, Artificial Sequence
  Description of Artificial Sequence: Synthetic oligonucleotide
  Sense strand starting at position 77 of SEQ ID NO: 917068
ugaagaaugcauugcuuac

SEQ ID NO: 1206051 - RNA, 19 nt, Artificial Sequence
  Description of Artificial Sequence: Synthetic oligonucleotide
  Antisense strand to SEQ ID NO: 1206050
guaagcaaugcauucuuca

SEQ ID NO: 1206052 - RNA, 19 nt, Artificial Sequence
  Description of Artificial Sequence: Synthetic oligonucleotide
  Sense strand starting at position 100 of SEQ ID NO: 917068
uguccucuagaguaaauuc

SEQ ID NO: 1206053 - RNA, 19 nt, Artificial Sequence
  Description of Artificial Sequence: Synthetic oligonucleotide
  Antisense strand to SEQ ID NO: 1206052
gaauuuacucuagaggaca

SEQ ID NO: 1206054 - RNA, 19 nt, Artificial Sequence
  Description of Artificial Sequence: Synthetic oligonucleotide
  Sense strand starting at position 108 of SEQ ID NO: 917068
agaguaaauucuccaauug

SEQ ID NO: 1206055 - RNA, 19 nt, Artificial Sequence
  Description of Artificial Sequence: Synthetic oligonucleotide
  Antisense strand to SEQ ID NO: 1206054
caauuggagaauuuacucu

SEQ ID NO: 1206056 - RNA, 19 nt, Artificial Sequence
  Description of Artificial Sequence: Synthetic oligonucleotide
  Sense strand starting at position 329 of SEQ ID NO: 917068
uuuauaacguucuuacaug

SEQ ID NO: 1206057 - RNA, 19 nt, Artificial Sequence
  Description of Artificial Sequence: Synthetic oligonucleotide
  Antisense strand to SEQ ID NO: 1206056
cauguaagaacguuauaaa

SEQ ID NO: 1206058 - RNA, 19 nt, Artificial Sequence
  Description of Artificial Sequence: Synthetic oligonucleotide
  Sense strand starting at position 391 of SEQ ID NO: 917068
cguuccagugaauaacauu

SEQ ID NO: 1206059 - RNA, 19 nt, Artificial Sequence
  Description of Artificial Sequence: Synthetic oligonucleotide
  Antisense strand to SEQ ID NO: 1206058
aauguuauucacuggaacg

SEQ ID NO: 1206060 - RNA, 19 nt, Artificial Sequence
  Description of Artificial Sequence: Synthetic oligonucleotide
  Sense strand starting at position 466 of SEQ ID NO: 917068
uuuguuguaaaguaugaag

SEQ ID NO: 1206061 - RNA, 19 nt, Artificial Sequence
  Description of Artificial Sequence: Synthetic oligonucleotide
  Antisense strand to SEQ ID NO: 1206060
cuucauacuuuacaacaaa

SEQ ID NO: 1206062 - RNA, 19 nt, Artificial Sequence
  Description of Artificial Sequence: Synthetic oligonucleotide
  Sense strand starting at position 468 of SEQ ID NO: 917068
uguuguaaaguaugaagaa

SEQ ID NO: 1206063 - RNA, 19 nt, Artificial Sequence
  Description of Artificial Sequence: Synthetic oligonucleotide
  Antisense strand to SEQ ID NO: 1206062
uucuucauacuuuacaaca

SEQ ID NO: 1206064 - RNA, 19 nt, Artificial Sequence
  Description of Artificial Sequence: Synthetic oligonucleotide
  Sense strand starting at position 487 of SEQ ID NO: 917068
ugucacaagugauuagaaa

SEQ ID NO: 1206065 - RNA, 19 nt, Artificial Sequence
  Description of Artificial Sequence: Synthetic oligonucleotide
  Antisense strand to SEQ ID NO: 1206064
uuucuaaucacuugugaca

SEQ ID NO: 1206066 - RNA, 19 nt, Artificial Sequence
  Description of Artificial Sequence: Synthetic oligonucleotide
  Sense strand starting at position 522 of SEQ ID NO: 917068
guccuuuaaguauguuaaa

SEQ ID NO: 1206067 - RNA, 19 nt, Artificial Sequence
  Description of Artificial Sequence: Synthetic oligonucleotide
  Antisense strand to SEQ ID NO: 1206066
uuuaacauacuuaaaggac

SEQ ID NO: 1206068 - RNA, 19 nt, Artificial Sequence
  Description of Artificial Sequence: Synthetic oligonucleotide
  Sense strand starting at position 558 of SEQ ID NO: 917068
acagaaacacagugauguu

SEQ ID NO: 1206069 - RNA, 19 nt, Artificial Sequence
  Description of Artificial Sequence: Synthetic oligonucleotide
  Antisense strand to SEQ ID NO: 1206068
aacaucacuguguuucugu

SEQ ID NO: 1206070 - RNA, 19 nt, Artificial Sequence
  Description of Artificial Sequence: Synthetic oligonucleotide
  Sense strand starting at position 574 of SEQ ID NO: 917068
guugguauuggaggucuuu

SEQ ID NO: 1206071 - RNA, 19 nt, Artificial Sequence
  Description of Artificial Sequence: Synthetic oligonucleotide
  Antisense strand to SEQ ID NO: 1206070
aaagaccuccaauaccaac

SEQ ID NO: 1206072 - RNA, 19 nt, Artificial Sequence
  Description of Artificial Sequence: Synthetic oligonucleotide
  Sense strand starting at position 608 of SEQ ID NO: 917068
ucaggacacugagucuuau

SEQ ID NO: 1206073 - RNA, 19 nt, Artificial Sequence
  Description of Artificial Sequence: Synthetic oligonucleotide
  Antisense strand to SEQ ID NO: 1206072
auaagacucaguguccuga

SEQ ID NO: 1206074 - RNA, 19 nt, Artificial Sequence
  Description of Artificial Sequence: Synthetic oligonucleotide
  Sense strand starting at position 715 of SEQ ID NO: 917068
cuuuauuugcuuuggcaau

SEQ ID NO: 1206075 - RNA, 19 nt, Artificial Sequence
  Description of Artificial Sequence: Synthetic oligonucleotide
  Antisense strand to SEQ ID NO: 1206074
auugccaaagcaaauaaag

SEQ ID NO: 1206076 - RNA, 19 nt, Artificial Sequence
  Description of Artificial Sequence: Synthetic oligonucleotide
  Sense strand starting at position 717 of SEQ ID NO: 917068
uuauuugcuuuggcaauca

SEQ ID NO: 1206077 - RNA, 19 nt, Artificial Sequence
  Description of Artificial Sequence: Synthetic oligonucleotide
  Antisense strand to SEQ ID NO: 1206076
ugauugccaaagcaaauaa

SEQ ID NO: 1206078 - RNA, 19 nt, Artificial Sequence
  Description of Artificial Sequence: Synthetic oligonucleotide
  Sense strand starting at position 722 of SEQ ID NO: 917068
ugcuuuggcaaucagauga

SEQ ID NO: 1206079 - RNA, 19 nt, Artificial Sequence
  Description of Artificial Sequence: Synthetic oligonucleotide
  Antisense strand to SEQ ID NO: 1206078
ucaucugauugccaaagca

SEQ ID NO: 1206080 - RNA, 19 nt, Artificial Sequence
  Description of Artificial Sequence: Synthetic oligonucleotide
  Sense strand starting at position 729 of SEQ ID NO: 917068
gcaaucagaugagaaauuu

SEQ ID NO: 1206081 - RNA, 19 nt, Artificial Sequence
  Description of Artificial Sequence: Synthetic oligonucleotide
  Antisense strand to SEQ ID NO: 1206080
aaauuucucaucugauugc

SEQ ID NO: 1206082 - RNA, 19 nt, Artificial Sequence
  Description of Artificial Sequence: Synthetic oligonucleotide
  Sense strand starting at position 804 of SEQ ID NO: 917068
gccauaaggcaguggaaau

SEQ ID NO: 1206083 - RNA, 19 nt, Artificial Sequence
  Description of Artificial Sequence: Synthetic oligonucleotide
  Antisense strand to SEQ ID NO: 1206082
auuuccacugccuuauggc

SEQ ID NO: 1206084 - RNA, 19 nt, Artificial Sequence
  Description of Artificial Sequence: Synthetic oligonucleotide
  Sense strand starting at position 805 of SEQ ID NO: 917068
ccauaaggcaguggaaaua

SEQ ID NO: 1206085 - RNA, 19 nt, Artificial Sequence
  Description of Artificial Sequence: Synthetic oligonucleotide
  Antisense strand to SEQ ID NO: 1206084
uauuuccacugccuuaugg

SEQ ID NO: 1206086 - RNA, 19 nt, Artificial Sequence
  Description of Artificial Sequence: Synthetic oligonucleotide
  Sense strand starting at position 883 of SEQ ID NO: 917068
aauggauauugacaggaau

SEQ ID NO: 1206087 - RNA, 19 nt, Artificial Sequence
  Description of Artificial Sequence: Synthetic oligonucleotide
  Antisense strand to SEQ ID NO: 1206086
auuccugucaauauccauu

SEQ ID NO: 1206088 - RNA, 19 nt, Artificial Sequence
  Description of Artificial Sequence: Synthetic oligonucleotide
  Sense strand starting at position 1072 of SEQ ID NO: 917068
aaagaauuaguguggguca

SEQ ID NO: 1206089 - RNA, 19 nt, Artificial Sequence
  Description of Artificial Sequence: Synthetic oligonucleotide
  Antisense strand to SEQ ID NO: 1206088
ugacccacacuaauucuuu

SEQ ID NO: 1206090 - RNA, 19 nt, Artificial Sequence
  Description of Artificial Sequence: Synthetic oligonucleotide
  Sense strand starting at position 1074 of SEQ ID NO: 917068
agaauuagugugggucauu

SEQ ID NO: 1206091 - RNA, 19 nt, Artificial Sequence
  Description of Artificial Sequence: Synthetic oligonucleotide
  Antisense strand to SEQ ID NO: 1206090
aaugacccacacuaauucu

SEQ ID NO: 1206092 - RNA, 19 nt, Artificial Sequence
  Description of Artificial Sequence: Synthetic oligonucleotide
  Sense strand starting at position 1469 of SEQ ID NO: 917068
gggccuuaccuaugaguac

SEQ ID NO: 1206093 - RNA, 19 nt, Artificial Sequence
  Description of Artificial Sequence: Synthetic oligonucleotide
  Antisense strand to SEQ ID NO: 1206092
guacucauagguaaggccc

SEQ ID NO: 1206094 - RNA, 19 nt, Artificial Sequence
  Description of Artificial Sequence: Synthetic oligonucleotide
  Sense strand starting at position 1844 of SEQ ID NO: 917068
gcgagucgcgcaagaagau

SEQ ID NO: 1206095 - RNA, 19 nt, Artificial Sequence
  Description of Artificial Sequence: Synthetic oligonucleotide
  Antisense strand to SEQ ID NO: 1206094
aucuucuugcgcgacucgc

SEQ ID NO: 1206096 - RNA, 19 nt, Artificial Sequence
  Description of Artificial Sequence: Synthetic oligonucleotide
  Sense strand starting at position 2610 of SEQ ID NO: 917068
ggacgauagcuguaccuga

SEQ ID NO: 1206097 - RNA, 19 nt, Artificial Sequence
  Description of Artificial Sequence: Synthetic oligonucleotide
  Antisense strand to SEQ ID NO: 1206096
ucagguacagcuaucgucc

SEQ ID NO: 1206098 - RNA, 19 nt, Artificial Sequence
  Description of Artificial Sequence: Synthetic oligonucleotide
  Sense strand starting at position 2647 of SEQ ID NO: 917068
cucuaacaucguggauauc

SEQ ID NO: 1206099 - RNA, 19 nt, Artificial Sequence
  Description of Artificial Sequence: Synthetic oligonucleotide
  Antisense strand to SEQ ID NO: 1206098
gauauccacgauguuagag

SEQ ID NO: 1206100 - RNA, 19 nt, Artificial Sequence
  Description of Artificial Sequence: Synthetic oligonucleotide
  Sense strand starting at position 2648 of SEQ ID NO: 917068
ucuaacaucguggauaucu

SEQ ID NO: 1206101 - RNA, 19 nt, Artificial Sequence
  Description of Artificial Sequence: Synthetic oligonucleotide
  Antisense strand to SEQ ID NO: 1206100
agauauccacgauguuaga

SEQ ID NO: 1206102 - RNA, 19 nt, Artificial Sequence
  Description of Artificial Sequence: Synthetic oligonucleotide
  Sense strand starting at position 3073 of SEQ ID NO: 917068
gucugugagaagcaugcuu

SEQ ID NO: 1206103 - RNA, 19 nt, Artificial Sequence
  Description of Artificial Sequence: Synthetic oligonucleotide
  Antisense strand to SEQ ID NO: 1206102
aagcaugcuucucacagac

SEQ ID NO: 1206104 - RNA, 19 nt, Artificial Sequence
  Description of Artificial Sequence: Synthetic oligonucleotide
  Sense strand starting at position 3325 of SEQ ID NO: 917068
cugggcgugguguuucaau

SEQ ID NO: 1206105 - RNA, 19 nt, Artificial Sequence
  Description of Artificial Sequence: Synthetic oligonucleotide
  Antisense strand to SEQ ID NO: 1206104
auugaaacaccacgcccag

SEQ ID NO: 1206106 - RNA, 19 nt, Artificial Sequence
  Description of Artificial Sequence: Synthetic oligonucleotide
  Sense strand starting at position 3347 of SEQ ID NO: 917068
uccuuuauagaguagcaga

SEQ ID NO: 1206107 - RNA, 19 nt, Artificial Sequence
  Description of Artificial Sequence: Synthetic oligonucleotide
  Antisense strand to SEQ ID NO: 1206106
ucugcuacucuauaaagga

SEQ ID NO: 1206108 - RNA, 19 nt, Artificial Sequence
  Description of Artificial Sequence: Synthetic oligonucleotide
  Sense strand starting at position 3414 of SEQ ID NO: 917068
augugcaggcaucaaguua

SEQ ID NO: 1206109 - RNA, 19 nt, Artificial Sequence
  Description of Artificial Sequence: Synthetic oligonucleotide
  Antisense strand to SEQ ID NO: 1206108
uaacuugaugccugcacau

SEQ ID NO: 1206110 - RNA, 19 nt, Artificial Sequence
  Description of Artificial Sequence: Synthetic oligonucleotide
  Sense strand starting at position 3426 of SEQ ID NO: 917068
caaguuaaaucaguguuag

SEQ ID NO: 1206111 - RNA, 19 nt, Artificial Sequence
  Description of Artificial Sequence: Synthetic oligonucleotide
  Antisense strand to SEQ ID NO: 1206110
cuaacacugauuuaacuug

SEQ ID NO: 1206112 - RNA, 19 nt, Artificial Sequence
  Description of Artificial Sequence: Synthetic oligonucleotide
  Sense strand starting at position 3427 of SEQ ID NO: 917068
aaguuaaaucaguguuagg

SEQ ID NO: 1206113 - RNA, 19 nt, Artificial Sequence
  Description of Artificial Sequence: Synthetic oligonucleotide
  Antisense strand to SEQ ID NO: 1206112
ccuaacacugauuuaacuu

SEQ ID NO: 1206114 - RNA, 19 nt, Artificial Sequence
  Description of Artificial Sequence: Synthetic oligonucleotide
  Sense strand starting at position 3470 of SEQ ID NO: 917068
aggaaauauuugcagcuau

SEQ ID NO: 1206115 - RNA, 19 nt, Artificial Sequence
  Description of Artificial Sequence: Synthetic oligonucleotide
  Antisense strand to SEQ ID NO: 1206114
auagcugcaaauauuuccu

SEQ ID NO: 1206116 - RNA, 19 nt, Artificial Sequence
  Description of Artificial Sequence: Synthetic oligonucleotide
  Sense strand starting at position 3678 of SEQ ID NO: 917068
caguaaguugacuguggau

SEQ ID NO: 1206117 - RNA, 19 nt, Artificial Sequence
  Description of Artificial Sequence: Synthetic oligonucleotide
  Antisense strand to SEQ ID NO: 1206116
auccacagucaacuuacug

SEQ ID NO: 1206118 - RNA, 19 nt, Artificial Sequence
  Description of Artificial Sequence: Synthetic oligonucleotide
  Sense strand starting at position 3680 of SEQ ID NO: 917068
guaaguugacuguggauau

SEQ ID NO: 1206119 - RNA, 19 nt, Artificial Sequence
  Description of Artificial Sequence: Synthetic oligonucleotide
  Antisense strand to SEQ ID NO: 1206118
auauccacagucaacuuac

SEQ ID NO: 1206120 - RNA, 19 nt, Artificial Sequence
  Description of Artificial Sequence: Synthetic oligonucleotide
  Sense strand starting at position 3692 of SEQ ID NO: 917068
uggauauccagcugguaaa

SEQ ID NO: 1206121 - RNA, 19 nt, Artificial Sequence
  Description of Artificial Sequence: Synthetic oligonucleotide
  Antisense strand to SEQ ID NO: 1206120
uuuaccagcuggauaucca

SEQ ID NO: 1206122 - RNA, 19 nt, Artificial Sequence
  Description of Artificial Sequence: Synthetic oligonucleotide
  Sense strand starting at position 3693 of SEQ ID NO: 917068
ggauauccagcugguaaau

SEQ ID NO: 1206123 - RNA, 19 nt, Artificial Sequence
  Description of Artificial Sequence: Synthetic oligonucleotide
  Antisense strand to SEQ ID NO: 1206122
auuuaccagcuggauaucc

SEQ ID NO: 1206124 - RNA, 19 nt, Artificial Sequence
  Description of Artificial Sequence: Synthetic oligonucleotide
  Sense strand starting at position 3911 of SEQ ID NO: 917068
auguaugaacauuaggcua

SEQ ID NO: 1206125 - RNA, 19 nt, Artificial Sequence
  Description of Artificial Sequence: Synthetic oligonucleotide
  Antisense strand to SEQ ID NO: 1206124
uagccuaauguucauacau

SEQ ID NO: 1206126 - RNA, 19 nt, Artificial Sequence
  Description of Artificial Sequence: Synthetic oligonucleotide
  Sense strand starting at position 3956 of SEQ ID NO: 917068
gccagugucacccagguaa

SEQ ID NO: 1206127 - RNA, 19 nt, Artificial Sequence
  Description of Artificial Sequence: Synthetic oligonucleotide
  Antisense strand to SEQ ID NO: 1206126
uuaccugggugacacuggc

SEQ ID NO: 1206128 - RNA, 19 nt, Artificial Sequence
  Description of Artificial Sequence: Synthetic oligonucleotide
  Sense strand starting at position 3960 of SEQ ID NO: 917068
gugucacccagguaaagau

SEQ ID NO: 1206129 - RNA, 19 nt, Artificial Sequence
  Description of Artificial Sequence: Synthetic oligonucleotide
  Antisense strand to SEQ ID NO: 1206128
aucuuuaccugggugacac

SEQ ID NO: 1206130 - RNA, 19 nt, Artificial Sequence
  Description of Artificial Sequence: Synthetic oligonucleotide
  Sense strand starting at position 28 of SEQ ID NO: 917069
uacuguaaggcuuaagcau

SEQ ID NO: 1206131 - RNA, 19 nt, Artificial Sequence
  Description of Artificial Sequence: Synthetic oligonucleotide
  Antisense strand to SEQ ID NO: 1206130
augcuuaagccuuacagua

SEQ ID NO: 1206132 - RNA, 19 nt, Artificial Sequence
  Description of Artificial Sequence: Synthetic oligonucleotide
  Sense strand starting at position 37 of SEQ ID NO: 917069
gcuuaagcaucauuaggua

SEQ ID NO: 1206133 - RNA, 19 nt, Artificial Sequence
  Description of Artificial Sequence: Synthetic oligonucleotide
  Antisense strand to SEQ ID NO: 1206132
uaccuaaugaugcuuaagc

SEQ ID NO: 1206134 - RNA, 19 nt, Artificial Sequence
  Description of Artificial Sequence: Synthetic oligonucleotide
  Sense strand starting at position 113 of SEQ ID NO: 917069
auacuaaaugccugugcaa

SEQ ID NO: 1206135 - RNA, 19 nt, Artificial Sequence
  Description of Artificial Sequence: Synthetic oligonucleotide
  Antisense strand to SEQ ID NO: 1206134
uugcacaggcauuuaguau

SEQ ID NO: 1206136 - RNA, 19 nt, Artificial Sequence
  Description of Artificial Sequence: Synthetic oligonucleotide
  Sense strand starting at position 155 of SEQ ID NO: 917069
gguacaagguuguucucau

SEQ ID NO: 1206137 - RNA, 19 nt, Artificial Sequence
  Description of Artificial Sequence: Synthetic oligonucleotide
  Antisense strand to SEQ ID NO: 1206136
augagaacaaccuuguacc

SEQ ID NO: 1206138 - RNA, 19 nt, Artificial Sequence
  Description of Artificial Sequence: Synthetic oligonucleotide
  Sense strand starting at position 156 of SEQ ID NO: 917069
guacaagguuguucucauu

SEQ ID NO: 1206139 - RNA, 19 nt, Artificial Sequence
  Description of Artificial Sequence: Synthetic oligonucleotide
  Antisense strand to SEQ ID NO: 1206138
aaugagaacaaccuuguac

SEQ ID NO: 1206140 - RNA, 19 nt, Artificial Sequence
  Description of Artificial Sequence: Synthetic oligonucleotide
  Sense strand starting at position 272 of SEQ ID NO: 917069
gaagaagcaucuguacuuu

SEQ ID NO: 1206141 - RNA, 19 nt, Artificial Sequence
  Description of Artificial Sequence: Synthetic oligonucleotide
  Antisense strand to SEQ ID NO: 1206140
aaaguacagaugcuucuuc

SEQ ID NO: 1206142 - RNA, 19 nt, Artificial Sequence
  Description of Artificial Sequence: Synthetic oligonucleotide
  Sense strand starting at position 335 of SEQ ID NO: 917069
ggagacaauucguuuguac

SEQ ID NO: 1206143 - RNA, 19 nt, Artificial Sequence
  Description of Artificial Sequence: Synthetic oligonucleotide
  Antisense strand to SEQ ID NO: 1206142
guacaaacgaauugucucc

SEQ ID NO: 1206144 - RNA, 19 nt, Artificial Sequence
  Description of Artificial Sequence: Synthetic oligonucleotide
  Sense strand starting at position 337 of SEQ ID NO: 917069
agacaauucguuuguacua

SEQ ID NO: 1206145 - RNA, 19 nt, Artificial Sequence
  Description of Artificial Sequence: Synthetic oligonucleotide
  Antisense strand to SEQ ID NO: 1206144
uaguacaaacgaauugucu

SEQ ID NO: 1206146 - RNA, 19 nt, Artificial Sequence
  Description of Artificial Sequence: Synthetic oligonucleotide
  Sense strand starting at position 338 of SEQ ID NO: 917069
gacaauucguuuguacuaa

SEQ ID NO: 1206147 - RNA, 19 nt, Artificial Sequence
  Description of Artificial Sequence: Synthetic oligonucleotide
  Antisense strand to SEQ ID NO: 1206146
uuaguacaaacgaauuguc

SEQ ID NO: 1206148 - RNA, 19 nt, Artificial Sequence
  Description of Artificial Sequence: Synthetic oligonucleotide
  Sense strand starting at position 538 of SEQ ID NO: 917069
uggcuucgccgagccaaau

SEQ ID NO: 1206149 - RNA, 19 nt, Artificial Sequence
  Description of Artificial Sequence: Synthetic oligonucleotide
  Antisense strand to SEQ ID NO: 1206148
auuuggcucggcgaagcca

SEQ ID NO: 1206150 - RNA, 19 nt, Artificial Sequence
  Description of Artificial Sequence: Synthetic oligonucleotide
  Sense strand starting at position 539 of SEQ ID NO: 917069
ggcuucgccgagccaaauu

SEQ ID NO: 1206151 - RNA, 19 nt, Artificial Sequence
  Description of Artificial Sequence: Synthetic oligonucleotide
  Antisense strand to SEQ ID NO: 1206150
aauuuggcucggcgaagcc

SEQ ID NO: 1206152 - RNA, 19 nt, Artificial Sequence
  Description of Artificial Sequence: Synthetic oligonucleotide
  Sense strand starting at position 548 of SEQ ID NO: 917069
gagccaaauuugggaucca

SEQ ID NO: 1206153 - RNA, 19 nt, Artificial Sequence
  Description of Artificial Sequence: Synthetic oligonucleotide
  Antisense strand to SEQ ID NO: 1206152
uggaucccaaauuuggcuc

SEQ ID NO: 1206154 - RNA, 19 nt, Artificial Sequence
  Description of Artificial Sequence: Synthetic oligonucleotide
  Sense strand starting at position 549 of SEQ ID NO: 917069
agccaaauuugggauccaa

SEQ ID NO: 1206155 - RNA, 19 nt, Artificial Sequence
  Description of Artificial Sequence: Synthetic oligonucleotide
  Antisense strand to SEQ ID NO: 1206154
uuggaucccaaauuuggcu

SEQ ID NO: 1206156 - RNA, 19 nt, Artificial Sequence
  Description of Artificial Sequence: Synthetic oligonucleotide
  Sense strand starting at position 2253 of SEQ ID NO: 917069
gccuucugucaccgaagau

SEQ ID NO: 1206157 - RNA, 19 nt, Artificial Sequence
  Description of Artificial Sequence: Synthetic oligonucleotide
  Antisense strand to SEQ ID NO: 1206156
aucuucggugacagaaggc

SEQ ID NO: 1206158 - RNA, 19 nt, Artificial Sequence
  Description of Artificial Sequence: Synthetic oligonucleotide
  Sense strand starting at position 2254 of SEQ ID NO: 917069
ccuucugucaccgaagaug

SEQ ID NO: 1206159 - RNA, 19 nt, Artificial Sequence
  Description of Artificial Sequence: Synthetic oligonucleotide
  Antisense strand to SEQ ID NO: 1206158
caucuucggugacagaagg

SEQ ID NO: 1206160 - RNA, 19 nt, Artificial Sequence
  Description of Artificial Sequence: Synthetic oligonucleotide
  Sense strand starting at position 2547 of SEQ ID NO: 917069
augccucgugggaguugua

SEQ ID NO: 1206161 - RNA, 19 nt, Artificial Sequence
  Description of Artificial Sequence: Synthetic oligonucleotide
  Antisense strand to SEQ ID NO: 1206160
uacaacucccacgaggcau

SEQ ID NO: 1206162 - RNA, 19 nt, Artificial Sequence
  Description of Artificial Sequence: Synthetic oligonucleotide
  Sense strand starting at position 2752 of SEQ ID NO: 917069
uggaaagacucccaucaug

SEQ ID NO: 1206163 - RNA, 19 nt, Artificial Sequence
  Description of Artificial Sequence: Synthetic oligonucleotide
  Antisense strand to SEQ ID NO: 1206162
caugaugggagucuuucca

SEQ ID NO: 1206164 - RNA, 19 nt, Artificial Sequence
  Description of Artificial Sequence: Synthetic oligonucleotide
  Sense strand starting at position 2794 of SEQ ID NO: 917069
aggguugccaugcaaugaa

SEQ ID NO: 1206165 - RNA, 19 nt, Artificial Sequence
  Description of Artificial Sequence: Synthetic oligonucleotide
  Antisense strand to SEQ ID NO: 1206164
uucauugcauggcaacccu

SEQ ID NO: 1206166 - RNA, 19 nt, Artificial Sequence
  Description of Artificial Sequence: Synthetic oligonucleotide
  Sense strand starting at position 2837 of SEQ ID NO: 917069
uggagagagccucaguagu

SEQ ID NO: 1206167 - RNA, 19 nt, Artificial Sequence
  Description of Artificial Sequence: Synthetic oligonucleotide
  Antisense strand to SEQ ID NO: 1206166
acuacugaggcucucucca

SEQ ID NO: 1206168 - RNA, 19 nt, Artificial Sequence
  Description of Artificial Sequence: Synthetic oligonucleotide
  Sense strand starting at position 2839 of SEQ ID NO: 917069
gagagagccucaguagugu

SEQ ID NO: 1206169 - RNA, 19 nt, Artificial Sequence
  Description of Artificial Sequence: Synthetic oligonucleotide
  Antisense strand to SEQ ID NO: 1206168
acacuacugaggcucucuc

SEQ ID NO: 1206170 - RNA, 19 nt, Artificial Sequence
  Description of Artificial Sequence: Synthetic oligonucleotide
  Sense strand starting at position 2913 of SEQ ID NO: 917069
gccugagcucugagucgga

SEQ ID NO: 1206171 - RNA, 19 nt, Artificial Sequence
  Description of Artificial Sequence: Synthetic oligonucleotide
  Antisense strand to SEQ ID NO: 1206170
uccgacucagagcucaggc

SEQ ID NO: 1206172 - RNA, 19 nt, Artificial Sequence
  Description of Artificial Sequence: Synthetic oligonucleotide
  Sense strand starting at position 2947 of SEQ ID NO: 917069
cuuugugaagauugugcau

SEQ ID NO: 1206173 - RNA, 19 nt, Artificial Sequence
  Description of Artificial Sequence: Synthetic oligonucleotide
  Antisense strand to SEQ ID NO: 1206172
augcacaaucuucacaaag

SEQ ID NO: 1206174 - RNA, 19 nt, Artificial Sequence
  Description of Artificial Sequence: Synthetic oligonucleotide
  Sense strand starting at position 2950 of SEQ ID NO: 917069
ugugaagauugugcaugaa

SEQ ID NO: 1206175 - RNA, 19 nt, Artificial Sequence
  Description of Artificial Sequence: Synthetic oligonucleotide
  Antisense strand to SEQ ID NO: 1206174
uucaugcacaaucuucaca

SEQ ID NO: 1206176 - RNA, 19 nt, Artificial Sequence
  Description of Artificial Sequence: Synthetic oligonucleotide
  Sense strand starting at position 2953 of SEQ ID NO: 917069
gaagauugugcaugaaauu

SEQ ID NO: 1206177 - RNA, 19 nt, Artificial Sequence
  Description of Artificial Sequence: Synthetic oligonucleotide
  Antisense strand to SEQ ID NO: 1206176
aauuucaugcacaaucuuc

SEQ ID NO: 1206178 - RNA, 19 nt, Artificial Sequence
  Description of Artificial Sequence: Synthetic oligonucleotide
  Sense strand starting at position 3070 of SEQ ID NO: 917069
cggauauucuggcucucaa

SEQ ID NO: 1206179 - RNA, 19 nt, Artificial Sequence
  Description of Artificial Sequence: Synthetic oligonucleotide
  Antisense strand to SEQ ID NO: 1206178
uugagagccagaauauccg

SEQ ID NO: 1206180 - RNA, 19 nt, Artificial Sequence
  Description of Artificial Sequence: Synthetic oligonucleotide
  Sense strand starting at position 3092 of SEQ ID NO: 917069
agggcugccuuacugaaau

SEQ ID NO: 1206181 - RNA, 19 nt, Artificial Sequence
  Description of Artificial Sequence: Synthetic oligonucleotide
  Antisense strand to SEQ ID NO: 1206180
auuucaguaaggcagcccu

SEQ ID NO: 1206182 - RNA, 19 nt, Artificial Sequence
  Description of Artificial Sequence: Synthetic oligonucleotide
  Sense strand starting at position 3131 of SEQ ID NO: 917069
aucuuugcuuugucugaaa

SEQ ID NO: 1206183 - RNA, 19 nt, Artificial Sequence
  Description of Artificial Sequence: Synthetic oligonucleotide
  Antisense strand to SEQ ID NO: 1206182
uuucagacaaagcaaagau

SEQ ID NO: 1206184 - RNA, 19 nt, Artificial Sequence
  Description of Artificial Sequence: Synthetic oligonucleotide
  Sense strand starting at position 3252 of SEQ ID NO: 917069
cuuuguaguugguugaaac

SEQ ID NO: 1206185 - RNA, 19 nt, Artificial Sequence
  Description of Artificial Sequence: Synthetic oligonucleotide
  Antisense strand to SEQ ID NO: 1206184
guuucaaccaacuacaaag

SEQ ID NO: 1206186 - RNA, 19 nt, Artificial Sequence
  Description of Artificial Sequence: Synthetic oligonucleotide
  Sense strand starting at position 3253 of SEQ ID NO: 917069
uuuguaguugguugaaacu

SEQ ID NO: 1206187 - RNA, 19 nt, Artificial Sequence
  Description of Artificial Sequence: Synthetic oligonucleotide
  Antisense strand to SEQ ID NO: 1206186
aguuucaaccaacuacaaa

SEQ ID NO: 1206188 - RNA, 19 nt, Artificial Sequence
  Description of Artificial Sequence: Synthetic oligonucleotide
  Sense strand starting at position 3363 of SEQ ID NO: 917069
ggcucugggcccgggaaau

SEQ ID NO: 1206189 - RNA, 19 nt, Artificial Sequence
  Description of Artificial Sequence: Synthetic oligonucleotide
  Antisense strand to SEQ ID NO: 1206188
auuucccgggcccagagcc

SEQ ID NO: 1206190 - RNA, 19 nt, Artificial Sequence
  Description of Artificial Sequence: Synthetic oligonucleotide
  Sense strand starting at position 3373 of SEQ ID NO: 917069
ccgggaaauguggauccau

SEQ ID NO: 1206191 - RNA, 19 nt, Artificial Sequence
  Description of Artificial Sequence: Synthetic oligonucleotide
  Antisense strand to SEQ ID NO: 1206190
auggauccacauuucccgg

SEQ ID NO: 1206192 - RNA, 19 nt, Artificial Sequence
  Description of Artificial Sequence: Synthetic oligonucleotide
  Sense strand starting at position 3454 of SEQ ID NO: 917069
cuucgcaacuacucaagau

SEQ ID NO: 1206193 - RNA, 19 nt, Artificial Sequence
  Description of Artificial Sequence: Synthetic oligonucleotide
  Antisense strand to SEQ ID NO: 1206192
aucuugaguaguugcgaag

SEQ ID NO: 1206194 - RNA, 19 nt, Artificial Sequence
  Description of Artificial Sequence: Synthetic oligonucleotide
  Sense strand starting at position 3714 of SEQ ID NO: 917069
ggagguuccuuagcacagu

SEQ ID NO: 1206195 - RNA, 19 nt, Artificial Sequence
  Description of Artificial Sequence: Synthetic oligonucleotide
  Antisense strand to SEQ ID NO: 1206194
acugugcuaaggaaccucc

SEQ ID NO: 1206196 - RNA, 19 nt, Artificial Sequence
  Description of Artificial Sequence: Synthetic oligonucleotide
  Sense strand starting at position 3717 of SEQ ID NO: 917069
gguuccuuagcacaguuau

SEQ ID NO: 1206197 - RNA, 19 nt, Artificial Sequence
  Description of Artificial Sequence: Synthetic oligonucleotide
  Antisense strand to SEQ ID NO: 1206196
auaacugugcuaaggaacc

SEQ ID NO: 1206198 - RNA, 19 nt, Artificial Sequence
  Description of Artificial Sequence: Synthetic oligonucleotide
  Sense strand starting at position 3728 of SEQ ID NO: 917069
acaguuaucggaugagcuc

SEQ ID NO: 1206199 - RNA, 19 nt, Artificial Sequence
  Description of Artificial Sequence: Synthetic oligonucleotide
  Antisense strand to SEQ ID NO: 1206198
gagcucauccgauaacugu

SEQ ID NO: 1206200 - RNA, 19 nt, Artificial Sequence
  Description of Artificial Sequence: Synthetic oligonucleotide
  Sense strand starting at position 3879 of SEQ ID NO: 917069
aaccaaugaucguuagguu

SEQ ID NO: 1206201 - RNA, 19 nt, Artificial Sequence
  Description of Artificial Sequence: Synthetic oligonucleotide
  Antisense strand to SEQ ID NO: 1206200
aaccuaacgaucauugguu

SEQ ID NO: 1206202 - RNA, 19 nt, Artificial Sequence
  Description of Artificial Sequence: Synthetic oligonucleotide
  Sense strand starting at position 3880 of SEQ ID NO: 917069
accaaugaucguuagguuu

SEQ ID NO: 1206203 - RNA, 19 nt, Artificial Sequence
  Description of Artificial Sequence: Synthetic oligonucleotide
  Antisense strand to SEQ ID NO: 1206202
aaaccuaacgaucauuggu

SEQ ID NO: 1206204 - RNA, 19 nt, Artificial Sequence
  Description of Artificial Sequence: Synthetic oligonucleotide
  Sense strand starting at position 3932 of SEQ ID NO: 917069
gccgauucagcagggacaa

SEQ ID NO: 1206205 - RNA, 19 nt, Artificial Sequence
  Description of Artificial Sequence: Synthetic oligonucleotide
  Antisense strand to SEQ ID NO: 1206204
uugucccugcugaaucggc

SEQ ID NO: 1206206 - RNA, 19 nt, Artificial Sequence
  Description of Artificial Sequence: Synthetic oligonucleotide
  Sense strand starting at position 3969 of SEQ ID NO: 917069
aguguuccauugcuuuaga

SEQ ID NO: 1206207 - RNA, 19 nt, Artificial Sequence
  Description of Artificial Sequence: Synthetic oligonucleotide
  Antisense strand to SEQ ID NO: 1206206
ucuaaagcaauggaacacu

SEQ ID NO: 1206208 - RNA, 19 nt, Artificial Sequence
  Description of Artificial Sequence: Synthetic oligonucleotide
  Sense strand starting at position 3970 of SEQ ID NO: 917069
guguuccauugcuuuagaa

SEQ ID NO: 1206209 - RNA, 19 nt, Artificial Sequence
  Description of Artificial Sequence: Synthetic oligonucleotide
  Antisense strand to SEQ ID NO: 1206208
uucuaaagcaauggaacac

SEQ ID NO: 1206210 - RNA, 19 nt, Artificial Sequence
  Description of Artificial Sequence: Synthetic oligonucleotide
  Sense strand starting at position 161 of SEQ ID NO: 917070
cuggaaagcuggucucuag

SEQ ID NO: 1206211 - RNA, 19 nt, Artificial Sequence
  Description of Artificial Sequence: Synthetic oligonucleotide
  Antisense strand to SEQ ID NO: 1206210
cuagagaccagcuuuccag

SEQ ID NO: 1206212 - RNA, 19 nt, Artificial Sequence
  Description of Artificial Sequence: Synthetic oligonucleotide
  Sense strand starting at position 171 of SEQ ID NO: 917070
ggucucuagggcuaguaga

SEQ ID NO: 1206213 - RNA, 19 nt, Artificial Sequence
  Description of Artificial Sequence: Synthetic oligonucleotide
  Antisense strand to SEQ ID NO: 1206212
ucuacuagcccuagagacc

SEQ ID NO: 1206214 - RNA, 19 nt, Artificial Sequence
  Description of Artificial Sequence: Synthetic oligonucleotide
  Sense strand starting at position 233 of SEQ ID NO: 917070
cacaccuuacugggagauu

SEQ ID NO: 1206215 - RNA, 19 nt, Artificial Sequence
  Description of Artificial Sequence: Synthetic oligonucleotide
  Antisense strand to SEQ ID NO: 1206214
aaucucccaguaaggugug

SEQ ID NO: 1206216 - RNA, 19 nt, Artificial Sequence
  Description of Artificial Sequence: Synthetic oligonucleotide
  Sense strand starting at position 489 of SEQ ID NO: 917070
ccgaaacuuucuuuaucug

SEQ ID NO: 1206217 - RNA, 19 nt, Artificial Sequence
  Description of Artificial Sequence: Synthetic oligonucleotide
  Antisense strand to SEQ ID NO: 1206216
cagauaaagaaaguuucgg

SEQ ID NO: 1206218 - RNA, 19 nt, Artificial Sequence
  Description of Artificial Sequence: Synthetic oligonucleotide
  Sense strand starting at position 642 of SEQ ID NO: 917070
gggacaccuucucugaacu

SEQ ID NO: 1206219 - RNA, 19 nt, Artificial Sequence
  Description of Artificial Sequence: Synthetic oligonucleotide
  Antisense strand to SEQ ID NO: 1206218
aguucagagaagguguccc

SEQ ID NO: 1206220 - RNA, 19 nt, Artificial Sequence
  Description of Artificial Sequence: Synthetic oligonucleotide
  Sense strand starting at position 986 of SEQ ID NO: 917070
ccuggugggacguaugaua

SEQ ID NO: 1206221 - RNA, 19 nt, Artificial Sequence
  Description of Artificial Sequence: Synthetic oligonucleotide
  Antisense strand to SEQ ID NO: 1206220
uaucauacgucccaccagg

SEQ ID NO: 1206222 - RNA, 19 nt, Artificial Sequence
  Description of Artificial Sequence: Synthetic oligonucleotide
  Sense strand starting at position 1071 of SEQ ID NO: 917070
ggguauguggcuggagaga

SEQ ID NO: 1206223 - RNA, 19 nt, Artificial Sequence
  Description of Artificial Sequence: Synthetic oligonucleotide
  Antisense strand to SEQ ID NO: 1206222
ucucuccagccacauaccc

SEQ ID NO: 1206224 - RNA, 19 nt, Artificial Sequence
  Description of Artificial Sequence: Synthetic oligonucleotide
  Sense strand starting at position 1072 of SEQ ID NO: 917070
gguauguggcuggagagaa

SEQ ID NO: 1206225 - RNA, 19 nt, Artificial Sequence
  Description of Artificial Sequence: Synthetic oligonucleotide
  Antisense strand to SEQ ID NO: 1206224
uucucuccagccacauacc

SEQ ID NO: 1206226 - RNA, 19 nt, Artificial Sequence
  Description of Artificial Sequence: Synthetic oligonucleotide
  Sense strand starting at position 1073 of SEQ ID NO: 917070
guauguggcuggagagaau

SEQ ID NO: 1206227 - RNA, 19 nt, Artificial Sequence
  Description of Artificial Sequence: Synthetic oligonucleotide
  Antisense strand to SEQ ID NO: 1206226
auucucuccagccacauac

SEQ ID NO: 1206228 - RNA, 19 nt, Artificial Sequence
  Description of Artificial Sequence: Synthetic oligonucleotide
  Sense strand starting at position 1084 of SEQ ID NO: 917070
gagagaauggcgggagauu

SEQ ID NO: 1206229 - RNA, 19 nt, Artificial Sequence
  Description of Artificial Sequence: Synthetic oligonucleotide
  Antisense strand to SEQ ID NO: 1206228
aaucucccgccauucucuc

SEQ ID NO: 1206230 - RNA, 19 nt, Artificial Sequence
  Description of Artificial Sequence: Synthetic oligonucleotide
  Sense strand starting at position 1123 of SEQ ID NO: 917070
gcucacuaauuugaaagaa

SEQ ID NO: 1206231 - RNA, 19 nt, Artificial Sequence
  Description of Artificial Sequence: Synthetic oligonucleotide
  Antisense strand to SEQ ID NO: 1206230
uucuuucaaauuagugagc

SEQ ID NO: 1206232 - RNA, 19 nt, Artificial Sequence
  Description of Artificial Sequence: Synthetic oligonucleotide
  Sense strand starting at position 1233 of SEQ ID NO: 917070
ccgagugucuaccuuggau

SEQ ID NO: 1206233 - RNA, 19 nt, Artificial Sequence
  Description of Artificial Sequence: Synthetic oligonucleotide
  Antisense strand to SEQ ID NO: 1206232
auccaagguagacacucgg

SEQ ID NO: 1206234 - RNA, 19 nt, Artificial Sequence
  Description of Artificial Sequence: Synthetic oligonucleotide
  Sense strand starting at position 1235 of SEQ ID NO: 917070
gagugucuaccuuggaucu

SEQ ID NO: 1206235 - RNA, 19 nt, Artificial Sequence
  Description of Artificial Sequence: Synthetic oligonucleotide
  Antisense strand to SEQ ID NO: 1206234
agauccaagguagacacuc

SEQ ID NO: 1206236 - RNA, 19 nt, Artificial Sequence
  Description of Artificial Sequence: Synthetic oligonucleotide
  Sense strand starting at position 1270 of SEQ ID NO: 917070
cagccugagcgagauaauc

SEQ ID NO: 1206237 - RNA, 19 nt, Artificial Sequence
  Description of Artificial Sequence: Synthetic oligonucleotide
  Antisense strand to SEQ ID NO: 1206236
gauuaucucgcucaggcug

SEQ ID NO: 1206238 - RNA, 19 nt, Artificial Sequence
  Description of Artificial Sequence: Synthetic oligonucleotide
  Sense strand starting at position 1272 of SEQ ID NO: 917070
gccugagcgagauaaucau

SEQ ID NO: 1206239 - RNA, 19 nt, Artificial Sequence
  Description of Artificial Sequence: Synthetic oligonucleotide
  Antisense strand to SEQ ID NO: 1206238
augauuaucucgcucaggc

SEQ ID NO: 1206240 - RNA, 19 nt, Artificial Sequence
  Description of Artificial Sequence: Synthetic oligonucleotide
  Sense strand starting at position 1296 of SEQ ID NO: 917070
gcaguucuugcccacccaa

SEQ ID NO: 1206241 - RNA, 19 nt, Artificial Sequence
  Description of Artificial Sequence: Synthetic oligonucleotide
  Antisense strand to SEQ ID NO: 1206240
uugggugggcaagaacugc

SEQ ID NO: 1206242 - RNA, 19 nt, Artificial Sequence
  Description of Artificial Sequence: Synthetic oligonucleotide
  Sense strand starting at position 1316 of SEQ ID NO: 917070
gcgugaaaugcuuaggagu

SEQ ID NO: 1206243 - RNA, 19 nt, Artificial Sequence
  Description of Artificial Sequence: Synthetic oligonucleotide
  Antisense strand to SEQ ID NO: 1206242
acuccuaagcauuucacgc

SEQ ID NO: 1206244 - RNA, 19 nt, Artificial Sequence
  Description of Artificial Sequence: Synthetic oligonucleotide
  Sense strand starting at position 1991 of SEQ ID NO: 917070
ggcggcaccgccucuuaua

SEQ ID NO: 1206245 - RNA, 19 nt, Artificial Sequence
  Description of Artificial Sequence: Synthetic oligonucleotide
  Antisense strand to SEQ ID NO: 1206244
uauaagaggcggugccgcc

SEQ ID NO: 1206246 - RNA, 19 nt, Artificial Sequence
  Description of Artificial Sequence: Synthetic oligonucleotide
  Sense strand starting at position 2438 of SEQ ID NO: 917070
gaaggaaagcugugguucu

SEQ ID NO: 1206247 - RNA, 19 nt, Artificial Sequence
  Description of Artificial Sequence: Synthetic oligonucleotide
  Antisense strand to SEQ ID NO: 1206246
agaaccacagcuuuccuuc

SEQ ID NO: 1206248 - RNA, 19 nt, Artificial Sequence
  Description of Artificial Sequence: Synthetic oligonucleotide
  Sense strand starting at position 2544 of SEQ ID NO: 917070
gcggcuguggucagggaaa

SEQ ID NO: 1206249 - RNA, 19 nt, Artificial Sequence
  Description of Artificial Sequence: Synthetic oligonucleotide
  Antisense strand to SEQ ID NO: 1206248
uuucccugaccacagccgc

SEQ ID NO: 1206250 - RNA, 19 nt, Artificial Sequence
  Description of Artificial Sequence: Synthetic oligonucleotide
  Sense strand starting at position 2546 of SEQ ID NO: 917070
ggcuguggucagggaaauc

SEQ ID NO: 1206251 - RNA, 19 nt, Artificial Sequence
  Description of Artificial Sequence: Synthetic oligonucleotide
  Antisense strand to SEQ ID NO: 1206250
gauuucccugaccacagcc

SEQ ID NO: 1206252 - RNA, 19 nt, Artificial Sequence
  Description of Artificial Sequence: Synthetic oligonucleotide
  Sense strand starting at position 2707 of SEQ ID NO: 917070
aguggaacaacgugaauau

SEQ ID NO: 1206253 - RNA, 19 nt, Artificial Sequence
  Description of Artificial Sequence: Synthetic oligonucleotide
  Antisense strand to SEQ ID NO: 1206252
auauucacguuguuccacu

SEQ ID NO: 1206254 - RNA, 19 nt, Artificial Sequence
  Description of Artificial Sequence: Synthetic oligonucleotide
  Sense strand starting at position 2717 of SEQ ID NO: 917070
cgugaauaugggugggagu

SEQ ID NO: 1206255 - RNA, 19 nt, Artificial Sequence
  Description of Artificial Sequence: Synthetic oligonucleotide
  Antisense strand to SEQ ID NO: 1206254
acucccacccauauucacg

SEQ ID NO: 1206256 - RNA, 19 nt, Artificial Sequence
  Description of Artificial Sequence: Synthetic oligonucleotide
  Sense strand starting at position 2783 of SEQ ID NO: 917070
ugcagaaacuccuuguucu

SEQ ID NO: 1206257 - RNA, 19 nt, Artificial Sequence
  Description of Artificial Sequence: Synthetic oligonucleotide
  Antisense strand to SEQ ID NO: 1206256
agaacaaggaguuucugca

SEQ ID NO: 1206258 - RNA, 19 nt, Artificial Sequence
  Description of Artificial Sequence: Synthetic oligonucleotide
  Sense strand starting at position 2784 of SEQ ID NO: 917070
gcagaaacuccuuguucug

SEQ ID NO: 1206259 - RNA, 19 nt, Artificial Sequence
  Description of Artificial Sequence: Synthetic oligonucleotide
  Antisense strand to SEQ ID NO: 1206258
cagaacaaggaguuucugc

SEQ ID NO: 1206260 - RNA, 19 nt, Artificial Sequence
  Description of Artificial Sequence: Synthetic oligonucleotide
  Sense strand starting at position 2793 of SEQ ID NO: 917070
ccuuguucugacgaaggau

SEQ ID NO: 1206261 - RNA, 19 nt, Artificial Sequence
  Description of Artificial Sequence: Synthetic oligonucleotide
  Antisense strand to SEQ ID NO: 1206260
auccuucgucagaacaagg

SEQ ID NO: 1206262 - RNA, 19 nt, Artificial Sequence
  Description of Artificial Sequence: Synthetic oligonucleotide
  Sense strand starting at position 2796 of SEQ ID NO: 917070
uguucugacgaaggauguu

SEQ ID NO: 1206263 - RNA, 19 nt, Artificial Sequence
  Description of Artificial Sequence: Synthetic oligonucleotide
  Antisense strand to SEQ ID NO: 1206262
aacauccuucgucagaaca

SEQ ID NO: 1206264 - RNA, 19 nt, Artificial Sequence
  Description of Artificial Sequence: Synthetic oligonucleotide
  Sense strand starting at position 2805 of SEQ ID NO: 917070
gaaggauguuaggaaacuu

SEQ ID NO: 1206265 - RNA, 19 nt, Artificial Sequence
  Description of Artificial Sequence: Synthetic oligonucleotide
  Antisense strand to SEQ ID NO: 1206264
aaguuuccuaacauccuuc

SEQ ID NO: 1206266 - RNA, 19 nt, Artificial Sequence
  Description of Artificial Sequence: Synthetic oligonucleotide
  Sense strand starting at position 2866 of SEQ ID NO: 917070
ggagucaccuugucacagu

SEQ ID NO: 1206267 - RNA, 19 nt, Artificial Sequence
  Description of Artificial Sequence: Synthetic oligonucleotide
  Antisense strand to SEQ ID NO: 1206266
acugugacaaggugacucc

SEQ ID NO: 1206268 - RNA, 19 nt, Artificial Sequence
  Description of Artificial Sequence: Synthetic oligonucleotide
  Sense strand starting at position 2917 of SEQ ID NO: 917070
ggcaacugucgacaggaga

SEQ ID NO: 1206269 - RNA, 19 nt, Artificial Sequence
  Description of Artificial Sequence: Synthetic oligonucleotide
  Antisense strand to SEQ ID NO: 1206268
ucuccugucgacaguugcc

SEQ ID NO: 1206270 - RNA, 19 nt, Artificial Sequence
  Description of Artificial Sequence: Synthetic oligonucleotide
  Sense strand starting at position 2934 of SEQ ID NO: 917070
gacucagaagcaugauuga

SEQ ID NO: 1206271 - RNA, 19 nt, Artificial Sequence
  Description of Artificial Sequence: Synthetic oligonucleotide
  Antisense strand to SEQ ID NO: 1206270
ucaaucaugcuucugaguc

SEQ ID NO: 1206272 - RNA, 19 nt, Artificial Sequence
  Description of Artificial Sequence: Synthetic oligonucleotide
  Sense strand starting at position 2943 of SEQ ID NO: 917070
gcaugauugagggaugcag

SEQ ID NO: 1206273 - RNA, 19 nt, Artificial Sequence
  Description of Artificial Sequence: Synthetic oligonucleotide
  Antisense strand to SEQ ID NO: 1206272
cugcaucccucaaucaugc

SEQ ID NO: 1206274 - RNA, 19 nt, Artificial Sequence
  Description of Artificial Sequence: Synthetic oligonucleotide
  Sense strand starting at position 3010 of SEQ ID NO: 917070
gauuaaauauguguguaug

SEQ ID NO: 1206275 - RNA, 19 nt, Artificial Sequence
  Description of Artificial Sequence: Synthetic oligonucleotide
  Antisense strand to SEQ ID NO: 1206274
cauacacacauauuuaauc

SEQ ID NO: 1206276 - RNA, 19 nt, Artificial Sequence
  Description of Artificial Sequence: Synthetic oligonucleotide
  Sense strand starting at position 3068 of SEQ ID NO: 917070
gcgugucacacugugguau

SEQ ID NO: 1206277 - RNA, 19 nt, Artificial Sequence
  Description of Artificial Sequence: Synthetic oligonucleotide
  Antisense strand to SEQ ID NO: 1206276
auaccacagugugacacgc

SEQ ID NO: 1206278 - RNA, 19 nt, Artificial Sequence
  Description of Artificial Sequence: Synthetic oligonucleotide
  Sense strand starting at position 3083 of SEQ ID NO: 917070
guaugugucaaccagugca

SEQ ID NO: 1206279 - RNA, 19 nt, Artificial Sequence
  Description of Artificial Sequence: Synthetic oligonucleotide
  Antisense strand to SEQ ID NO: 1206278
ugcacugguugacacauac

SEQ ID NO: 1206280 - RNA, 19 nt, Artificial Sequence
  Description of Artificial Sequence: Synthetic oligonucleotide
  Sense strand starting at position 3212 of SEQ ID NO: 917070
ggauguccacuguauguau

SEQ ID NO: 1206281 - RNA, 19 nt, Artificial Sequence
  Description of Artificial Sequence: Synthetic oligonucleotide
  Antisense strand to SEQ ID NO: 1206280
auacauacaguggacaucc

SEQ ID NO: 1206282 - RNA, 19 nt, Artificial Sequence
  Description of Artificial Sequence: Synthetic oligonucleotide
  Sense strand starting at position 3255 of SEQ ID NO: 917070
aaggguugcuggcuacauu

SEQ ID NO: 1206283 - RNA, 19 nt, Artificial Sequence
  Description of Artificial Sequence: Synthetic oligonucleotide
  Antisense strand to SEQ ID NO: 1206282
aauguagccagcaacccuu

SEQ ID NO: 1206284 - RNA, 19 nt, Artificial Sequence
  Description of Artificial Sequence: Synthetic oligonucleotide
  Sense strand starting at position 3335 of SEQ ID NO: 917070
guuucugucuuucccuaaa

SEQ ID NO: 1206285 - RNA, 19 nt, Artificial Sequence
  Description of Artificial Sequence: Synthetic oligonucleotide
  Antisense strand to SEQ ID NO: 1206284
uuuagggaaagacagaaac

SEQ ID NO: 1206286 - RNA, 19 nt, Artificial Sequence
  Description of Artificial Sequence: Synthetic oligonucleotide
  Sense strand starting at position 3866 of SEQ ID NO: 917070
gagggaagaucucuucucu

SEQ ID NO: 1206287 - RNA, 19 nt, Artificial Sequence
  Description of Artificial Sequence: Synthetic oligonucleotide
  Antisense strand to SEQ ID NO: 1206286
agagaagagaucuucccuc

SEQ ID NO: 1206288 - RNA, 19 nt, Artificial Sequence
  Description of Artificial Sequence: Synthetic oligonucleotide
  Sense strand starting at position 3927 of SEQ ID NO: 917070
aagguccacgucuaauaaa

SEQ ID NO: 1206289 - RNA, 19 nt, Artificial Sequence
  Description of Artificial Sequence: Synthetic oligonucleotide
  Antisense strand to SEQ ID NO: 1206288
uuuauuagacguggaccuu

SEQ ID NO: 1206290 - RNA, 19 nt, Artificial Sequence
  Description of Artificial Sequence: Synthetic oligonucleotide
  Sense strand starting at position 471 of SEQ ID NO: 917071
ccagaaucucauugcuuag

SEQ ID NO: 1206291 - RNA, 19 nt, Artificial Sequence
  Description of Artificial Sequence: Synthetic oligonucleotide
  Antisense strand to SEQ ID NO: 1206290
cuaagcaaugagauucugg

SEQ ID NO: 1206292 - RNA, 19 nt, Artificial Sequence
  Description of Artificial Sequence: Synthetic oligonucleotide
  Sense strand starting at position 562 of SEQ ID NO: 917071
guuucuauggccugggaga

SEQ ID NO: 1206293 - RNA, 19 nt, Artificial Sequence
  Description of Artificial Sequence: Synthetic oligonucleotide
  Antisense strand to SEQ ID NO: 1206292
ucucccaggccauagaaac

SEQ ID NO: 1206294 - RNA, 19 nt, Artificial Sequence
  Description of Artificial Sequence: Synthetic oligonucleotide
  Sense strand starting at position 903 of SEQ ID NO: 917071
gagucaaggcguuguccca

SEQ ID NO: 1206295 - RNA, 19 nt, Artificial Sequence
  Description of Artificial Sequence: Synthetic oligonucleotide
  Antisense strand to SEQ ID NO: 1206294
ugggacaacgccuugacuc

SEQ ID NO: 1206296 - RNA, 19 nt, Artificial Sequence
  Description of Artificial Sequence: Synthetic oligonucleotide
  Sense strand starting at position 1153 of SEQ ID NO: 917071
ggugucaucaagggcaagu

SEQ ID NO: 1206297 - RNA, 19 nt, Artificial Sequence
  Description of Artificial Sequence: Synthetic oligonucleotide
  Antisense strand to SEQ ID NO: 1206296
acuugcccuugaugacacc

SEQ ID NO: 1206298 - RNA, 19 nt, Artificial Sequence
  Description of Artificial Sequence: Synthetic oligonucleotide
  Sense strand starting at position 1166 of SEQ ID NO: 917071
gcaaguaggcuccaugaga

SEQ ID NO: 1206299 - RNA, 19 nt, Artificial Sequence
  Description of Artificial Sequence: Synthetic oligonucleotide
  Antisense strand to SEQ ID NO: 1206298
ucucauggagccuacuugc

SEQ ID NO: 1206300 - RNA, 19 nt, Artificial Sequence
  Description of Artificial Sequence: Synthetic oligonucleotide
  Sense strand starting at position 1433 of SEQ ID NO: 917071
ccuuuauucucugugucuu

SEQ ID NO: 1206301 - RNA, 19 nt, Artificial Sequence
  Description of Artificial Sequence: Synthetic oligonucleotide
  Antisense strand to SEQ ID NO: 1206300
aagacacagagaauaaagg

SEQ ID NO: 1206302 - RNA, 19 nt, Artificial Sequence
  Description of Artificial Sequence: Synthetic oligonucleotide
  Sense strand starting at position 1445 of SEQ ID NO: 917071
gugucuuuaucucuagcaa

SEQ ID NO: 1206303 - RNA, 19 nt, Artificial Sequence
  Description of Artificial Sequence: Synthetic oligonucleotide
  Antisense strand to SEQ ID NO: 1206302
uugcuagagauaaagacac

SEQ ID NO: 1206304 - RNA, 19 nt, Artificial Sequence
  Description of Artificial Sequence: Synthetic oligonucleotide
  Sense strand starting at position 1574 of SEQ ID NO: 917071
ccugcuuucccaggucuaa

SEQ ID NO: 1206305 - RNA, 19 nt, Artificial Sequence
  Description of Artificial Sequence: Synthetic oligonucleotide
  Antisense strand to SEQ ID NO: 1206304
uuagaccugggaaagcagg

SEQ ID NO: 1206306 - RNA, 19 nt, Artificial Sequence
  Description of Artificial Sequence: Synthetic oligonucleotide
  Sense strand starting at position 1700 of SEQ ID NO: 917071
uugucagagccgcauucuu

SEQ ID NO: 1206307 - RNA, 19 nt, Artificial Sequence
  Description of Artificial Sequence: Synthetic oligonucleotide
  Antisense strand to SEQ ID NO: 1206306
aagaaugcggcucugacaa

SEQ ID NO: 1206308 - RNA, 19 nt, Artificial Sequence
  Description of Artificial Sequence: Synthetic oligonucleotide
  Sense strand starting at position 1795 of SEQ ID NO: 917071
gggagugaucgagagagcu

SEQ ID NO: 1206309 - RNA, 19 nt, Artificial Sequence
  Description of Artificial Sequence: Synthetic oligonucleotide
  Antisense strand to SEQ ID NO: 1206308
agcucucucgaucacuccc

SEQ ID NO: 1206310 - RNA, 19 nt, Artificial Sequence
  Description of Artificial Sequence: Synthetic oligonucleotide
  Sense strand starting at position 1797 of SEQ ID NO: 917071
gagugaucgagagagcuag

SEQ ID NO: 1206311 - RNA, 19 nt, Artificial Sequence
  Description of Artificial Sequence: Synthetic oligonucleotide
  Antisense strand to SEQ ID NO: 1206310
cuagcucucucgaucacuc

SEQ ID NO: 1206312 - RNA, 19 nt, Artificial Sequence
  Description of Artificial Sequence: Synthetic oligonucleotide
  Sense strand starting at position 1942 of SEQ ID NO: 917071
cagccuugaccaggcgaau

SEQ ID NO: 1206313 - RNA, 19 nt, Artificial Sequence
  Description of Artificial Sequence: Synthetic oligonucleotide
  Antisense strand to SEQ ID NO: 1206312
auucgccuggucaaggcug

SEQ ID NO: 1206314 - RNA, 19 nt, Artificial Sequence
  Description of Artificial Sequence: Synthetic oligonucleotide
  Sense strand starting at position 2162 of SEQ ID NO: 917071
guaguaaccuuccuaggga

SEQ ID NO: 1206315 - RNA, 19 nt, Artificial Sequence
  Description of Artificial Sequence: Synthetic oligonucleotide
  Antisense strand to SEQ ID NO: 1206314
ucccuaggaagguuacuac

SEQ ID NO: 1206316 - RNA, 19 nt, Artificial Sequence
  Description of Artificial Sequence: Synthetic oligonucleotide
  Sense strand starting at position 2193 of SEQ ID NO: 917071
cccagauggccacaucuuu

SEQ ID NO: 1206317 - RNA, 19 nt, Artificial Sequence
  Description of Artificial Sequence: Synthetic oligonucleotide
  Antisense strand to SEQ ID NO: 1206316
aaagauguggccaucuggg

SEQ ID NO: 1206318 - RNA, 19 nt, Artificial Sequence
  Description of Artificial Sequence: Synthetic oligonucleotide
  Sense strand starting at position 2226 of SEQ ID NO: 917071
gcgucaguuucuccaccaa

SEQ ID NO: 1206319 - RNA, 19 nt, Artificial Sequence
  Description of Artificial Sequence: Synthetic oligonucleotide
  Antisense strand to SEQ ID NO: 1206318
uugguggagaaacugacgc

SEQ ID NO: 1206320 - RNA, 19 nt, Artificial Sequence
  Description of Artificial Sequence: Synthetic oligonucleotide
  Sense strand starting at position 2259 of SEQ ID NO: 917071
gaaggugccuuugacaaga

SEQ ID NO: 1206321 - RNA, 19 nt, Artificial Sequence
  Description of Artificial Sequence: Synthetic oligonucleotide
  Antisense strand to SEQ ID NO: 1206320
ucuugucaaaggcaccuuc

SEQ ID NO: 1206322 - RNA, 19 nt, Artificial Sequence
  Description of Artificial Sequence: Synthetic oligonucleotide
  Sense strand starting at position 2445 of SEQ ID NO: 917071
cagcuuuggccucagaguu

SEQ ID NO: 1206323 - RNA, 19 nt, Artificial Sequence
  Description of Artificial Sequence: Synthetic oligonucleotide
  Antisense strand to SEQ ID NO: 1206322
aacucugaggccaaagcug

SEQ ID NO: 1206324 - RNA, 19 nt, Artificial Sequence
  Description of Artificial Sequence: Synthetic oligonucleotide
  Sense strand starting at position 2458 of SEQ ID NO: 917071
agaguuuggcccuagcaga

SEQ ID NO: 1206325 - RNA, 19 nt, Artificial Sequence
  Description of Artificial Sequence: Synthetic oligonucleotide
  Antisense strand to SEQ ID NO: 1206324
ucugcuagggccaaacucu

SEQ ID NO: 1206326 - RNA, 19 nt, Artificial Sequence
  Description of Artificial Sequence: Synthetic oligonucleotide
  Sense strand starting at position 2530 of SEQ ID NO: 917071
agggaugcuugccaacaga

SEQ ID NO: 1206327 - RNA, 19 nt, Artificial Sequence
  Description of Artificial Sequence: Synthetic oligonucleotide
  Antisense strand to SEQ ID NO: 1206326
ucuguuggcaagcaucccu

SEQ ID NO: 1206328 - RNA, 19 nt, Artificial Sequence
  Description of Artificial Sequence: Synthetic oligonucleotide
  Sense strand starting at position 2613 of SEQ ID NO: 917071
gcuguagacuugcuucuua

SEQ ID NO: 1206329 - RNA, 19 nt, Artificial Sequence
  Description of Artificial Sequence: Synthetic oligonucleotide
  Antisense strand to SEQ ID NO: 1206328
uaagaagcaagucuacagc

SEQ ID NO: 1206330 - RNA, 19 nt, Artificial Sequence
  Description of Artificial Sequence: Synthetic oligonucleotide
  Sense strand starting at position 2618 of SEQ ID NO: 917071
agacuugcuucuuauggga

SEQ ID NO: 1206331 - RNA, 19 nt, Artificial Sequence
  Description of Artificial Sequence: Synthetic oligonucleotide
  Antisense strand to SEQ ID NO: 1206330
ucccauaagaagcaagucu

SEQ ID NO: 1206332 - RNA, 19 nt, Artificial Sequence
  Description of Artificial Sequence: Synthetic oligonucleotide
  Sense strand starting at position 2621 of SEQ ID NO: 917071
cuugcuucuuaugggauga

SEQ ID NO: 1206333 - RNA, 19 nt, Artificial Sequence
  Description of Artificial Sequence: Synthetic oligonucleotide
  Antisense strand to SEQ ID NO: 1206332
ucaucccauaagaagcaag

SEQ ID NO: 1206334 - RNA, 19 nt, Artificial Sequence
  Description of Artificial Sequence: Synthetic oligonucleotide
  Sense strand starting at position 3102 of SEQ ID NO: 917071
aaacuuacaucuguuggga

SEQ ID NO: 1206335 - RNA, 19 nt, Artificial Sequence
  Description of Artificial Sequence: Synthetic oligonucleotide
  Antisense strand to SEQ ID NO: 1206334
ucccaacagauguaaguuu

SEQ ID NO: 1206336 - RNA, 19 nt, Artificial Sequence
  Description of Artificial Sequence: Synthetic oligonucleotide
  Sense strand starting at position 3104 of SEQ ID NO: 917071
acuuacaucuguugggaua

SEQ ID NO: 1206337 - RNA, 19 nt, Artificial Sequence
  Description of Artificial Sequence: Synthetic oligonucleotide
  Antisense strand to SEQ ID NO: 1206336
uaucccaacagauguaagu

SEQ ID NO: 1206338 - RNA, 19 nt, Artificial Sequence
  Description of Artificial Sequence: Synthetic oligonucleotide
  Sense strand starting at position 3105 of SEQ ID NO: 917071
cuuacaucuguugggauau

SEQ ID NO: 1206339 - RNA, 19 nt, Artificial Sequence
  Description of Artificial Sequence: Synthetic oligonucleotide
  Antisense strand to SEQ ID NO: 1206338
auaucccaacagauguaag

SEQ ID NO: 1206340 - RNA, 19 nt, Artificial Sequence
  Description of Artificial Sequence: Synthetic oligonucleotide
  Sense strand starting at position 3106 of SEQ ID NO: 917071
uuacaucuguugggauauu

SEQ ID NO: 1206341 - RNA, 19 nt, Artificial Sequence
  Description of Artificial Sequence: Synthetic oligonucleotide
  Antisense strand to SEQ ID NO: 1206340
aauaucccaacagauguaa

SEQ ID NO: 1206342 - RNA, 19 nt, Artificial Sequence
  Description of Artificial Sequence: Synthetic oligonucleotide
  Sense strand starting at position 3107 of SEQ ID NO: 917071
uacaucuguugggauauuu

SEQ ID NO: 1206343 - RNA, 19 nt, Artificial Sequence
  Description of Artificial Sequence: Synthetic oligonucleotide
  Antisense strand to SEQ ID NO: 1206342
aaauaucccaacagaugua

SEQ ID NO: 1206344 - RNA, 19 nt, Artificial Sequence
  Description of Artificial Sequence: Synthetic oligonucleotide
  Sense strand starting at position 3115 of SEQ ID NO: 917071
uugggauauuuacagauca

SEQ ID NO: 1206345 - RNA, 19 nt, Artificial Sequence
  Description of Artificial Sequence: Synthetic oligonucleotide
  Antisense strand to SEQ ID NO: 1206344
ugaucuguaaauaucccaa

SEQ ID NO: 1206346 - RNA, 19 nt, Artificial Sequence
  Description of Artificial Sequence: Synthetic oligonucleotide
  Sense strand starting at position 3295 of SEQ ID NO: 917071
agccaaaccaugugugguu

SEQ ID NO: 1206347 - RNA, 19 nt, Artificial Sequence
  Description of Artificial Sequence: Synthetic oligonucleotide
  Antisense strand to SEQ ID NO: 1206346
aaccacacaugguuuggcu

SEQ ID NO: 1206348 - RNA, 19 nt, Artificial Sequence
  Description of Artificial Sequence: Synthetic oligonucleotide
  Sense strand starting at position 3425 of SEQ ID NO: 917071
cugccagguccuuggaaga

SEQ ID NO: 1206349 - RNA, 19 nt, Artificial Sequence
  Description of Artificial Sequence: Synthetic oligonucleotide
  Antisense strand to SEQ ID NO: 1206348
ucuuccaaggaccuggcag

SEQ ID NO: 1206350 - RNA, 19 nt, Artificial Sequence
  Description of Artificial Sequence: Synthetic oligonucleotide
  Sense strand starting at position 3494 of SEQ ID NO: 917071
uuuguauuucuccaugugu

SEQ ID NO: 1206351 - RNA, 19 nt, Artificial Sequence
  Description of Artificial Sequence: Synthetic oligonucleotide
  Antisense strand to SEQ ID NO: 1206350
acacauggagaaauacaaa

SEQ ID NO: 1206352 - RNA, 19 nt, Artificial Sequence
  Description of Artificial Sequence: Synthetic oligonucleotide
  Sense strand starting at position 3496 of SEQ ID NO: 917071
uguauuucuccaugugucu

SEQ ID NO: 1206353 - RNA, 19 nt, Artificial Sequence
  Description of Artificial Sequence: Synthetic oligonucleotide
  Antisense strand to SEQ ID NO: 1206352
agacacauggagaaauaca

SEQ ID NO: 1206354 - RNA, 19 nt, Artificial Sequence
  Description of Artificial Sequence: Synthetic oligonucleotide
  Sense strand starting at position 3523 of SEQ ID NO: 917071
cccuuagguuugggauuau

SEQ ID NO: 1206355 - RNA, 19 nt, Artificial Sequence
  Description of Artificial Sequence: Synthetic oligonucleotide
  Antisense strand to SEQ ID NO: 1206354
auaaucccaaaccuaaggg

SEQ ID NO: 1206356 - RNA, 19 nt, Artificial Sequence
  Description of Artificial Sequence: Synthetic oligonucleotide
  Sense strand starting at position 3715 of SEQ ID NO: 917071
gcccaacucugggacaaga

SEQ ID NO: 1206357 - RNA, 19 nt, Artificial Sequence
  Description of Artificial Sequence: Synthetic oligonucleotide
  Antisense strand to SEQ ID NO: 1206356
ucuugucccagaguugggc

SEQ ID NO: 1206358 - RNA, 19 nt, Artificial Sequence
  Description of Artificial Sequence: Synthetic oligonucleotide
  Sense strand starting at position 31 of SEQ ID NO: 917072
gccauucccagugauaagg

SEQ ID NO: 1206359 - RNA, 19 nt, Artificial Sequence
  Description of Artificial Sequence: Synthetic oligonucleotide
  Antisense strand to SEQ ID NO: 1206358
ccuuaucacugggaauggc

SEQ ID NO: 1206360 - RNA, 19 nt, Artificial Sequence
  Description of Artificial Sequence: Synthetic oligonucleotide
  Sense strand starting at position 50 of SEQ ID NO: 917072
uacacaauuugggaaguau

SEQ ID NO: 1206361 - RNA, 19 nt, Artificial Sequence
  Description of Artificial Sequence: Synthetic oligonucleotide
  Antisense strand to SEQ ID NO: 1206360
auacuucccaaauugugua

SEQ ID NO: 1206362 - RNA, 19 nt, Artificial Sequence
  Description of Artificial Sequence: Synthetic oligonucleotide
  Sense strand starting at position 217 of SEQ ID NO: 917072
caacucaugcacugugaga

SEQ ID NO: 1206363 - RNA, 19 nt, Artificial Sequence
  Description of Artificial Sequence: Synthetic oligonucleotide
  Antisense strand to SEQ ID NO: 1206362
ucucacagugcaugaguug

SEQ ID NO: 1206364 - RNA, 19 nt, Artificial Sequence
  Description of Artificial Sequence: Synthetic oligonucleotide
  Sense strand starting at position 219 of SEQ ID NO: 917072
acucaugcacugugagaau

SEQ ID NO: 1206365 - RNA, 19 nt, Artificial Sequence
  Description of Artificial Sequence: Synthetic oligonucleotide
  Antisense strand to SEQ ID NO: 1206364
auucucacagugcaugagu

SEQ ID NO: 1206366 - RNA, 19 nt, Artificial Sequence
  Description of Artificial Sequence: Synthetic oligonucleotide
  Sense strand starting at position 315 of SEQ ID NO: 917072
ugacucaucuuacuuggaa

SEQ ID NO: 1206367 - RNA, 19 nt, Artificial Sequence
  Description of Artificial Sequence: Synthetic oligonucleotide
  Antisense strand to SEQ ID NO: 1206366
uuccaaguaagaugaguca

SEQ ID NO: 1206368 - RNA, 19 nt, Artificial Sequence
  Description of Artificial Sequence: Synthetic oligonucleotide
  Sense strand starting at position 379 of SEQ ID NO: 917072
ucuuauucugugcagauga

SEQ ID NO: 1206369 - RNA, 19 nt, Artificial Sequence
  Description of Artificial Sequence: Synthetic oligonucleotide
  Antisense strand to SEQ ID NO: 1206368
ucaucugcacagaauaaga

SEQ ID NO: 1206370 - RNA, 19 nt, Artificial Sequence
  Description of Artificial Sequence: Synthetic oligonucleotide
  Sense strand starting at position 381 of SEQ ID NO: 917072
uuauucugugcagaugaua

SEQ ID NO: 1206371 - RNA, 19 nt, Artificial Sequence
  Description of Artificial Sequence: Synthetic oligonucleotide
  Antisense strand to SEQ ID NO: 1206370
uaucaucugcacagaauaa

SEQ ID NO: 1206372 - RNA, 19 nt, Artificial Sequence
  Description of Artificial Sequence: Synthetic oligonucleotide
  Sense strand starting at position 466 of SEQ ID NO: 917072
ggcagaaguguauagguca

SEQ ID NO: 1206373 - RNA, 19 nt, Artificial Sequence
  Description of Artificial Sequence: Synthetic oligonucleotide
  Antisense strand to SEQ ID NO: 1206372
ugaccuauacacuucugcc

SEQ ID NO: 1206374 - RNA, 19 nt, Artificial Sequence
  Description of Artificial Sequence: Synthetic oligonucleotide
  Sense strand starting at position 571 of SEQ ID NO: 917072
ugcucuuguccugcaagua

SEQ ID NO: 1206375 - RNA, 19 nt, Artificial Sequence
  Description of Artificial Sequence: Synthetic oligonucleotide
  Antisense strand to SEQ ID NO: 1206374
uacuugcaggacaagagca

SEQ ID NO: 1206376 - RNA, 19 nt, Artificial Sequence
  Description of Artificial Sequence: Synthetic oligonucleotide
  Sense strand starting at position 682 of SEQ ID NO: 917072
gucuacuuagagugaauga

SEQ ID NO: 1206377 - RNA, 19 nt, Artificial Sequence
  Description of Artificial Sequence: Synthetic oligonucleotide
  Antisense strand to SEQ ID NO: 1206376
ucauucacucuaaguagac

SEQ ID NO: 1206378 - RNA, 19 nt, Artificial Sequence
  Description of Artificial Sequence: Synthetic oligonucleotide
  Sense strand starting at position 1203 of SEQ ID NO: 917072
agugucuuugacuaacaca

SEQ ID NO: 1206379 - RNA, 19 nt, Artificial Sequence
  Description of Artificial Sequence: Synthetic oligonucleotide
  Antisense strand to SEQ ID NO: 1206378
uguguuagucaaagacacu

SEQ ID NO: 1206380 - RNA, 19 nt, Artificial Sequence
  Description of Artificial Sequence: Synthetic oligonucleotide
  Sense strand starting at position 1224 of SEQ ID NO: 917072
guuuacaaaucuuuggaau

SEQ ID NO: 1206381 - RNA, 19 nt, Artificial Sequence
  Description of Artificial Sequence: Synthetic oligonucleotide
  Antisense strand to SEQ ID NO: 1206380
auuccaaagauuuguaaac

SEQ ID NO: 1206382 - RNA, 19 nt, Artificial Sequence
  Description of Artificial Sequence: Synthetic oligonucleotide
  Sense strand starting at position 1381 of SEQ ID NO: 917072
ucaaauuugccaugcaguu

SEQ ID NO: 1206383 - RNA, 19 nt, Artificial Sequence
  Description of Artificial Sequence: Synthetic oligonucleotide
  Antisense strand to SEQ ID NO: 1206382
aacugcauggcaaauuuga

SEQ ID NO: 1206384 - RNA, 19 nt, Artificial Sequence
  Description of Artificial Sequence: Synthetic oligonucleotide
  Sense strand starting at position 1899 of SEQ ID NO: 917072
aaguuauggccucaccuga

SEQ ID NO: 1206385 - RNA, 19 nt, Artificial Sequence
  Description of Artificial Sequence: Synthetic oligonucleotide
  Antisense strand to SEQ ID NO: 1206384
ucaggugaggccauaacuu

SEQ ID NO: 1206386 - RNA, 19 nt, Artificial Sequence
  Description of Artificial Sequence: Synthetic oligonucleotide
  Sense strand starting at position 2366 of SEQ ID NO: 917072
uuccaaauccuuugagaga

SEQ ID NO: 1206387 - RNA, 19 nt, Artificial Sequence
  Description of Artificial Sequence: Synthetic oligonucleotide
  Antisense strand to SEQ ID NO: 1206386
ucucucaaaggauuuggaa

SEQ ID NO: 1206388 - RNA, 19 nt, Artificial Sequence
  Description of Artificial Sequence: Synthetic oligonucleotide
  Sense strand starting at position 2392 of SEQ ID NO: 917072
ccaagcagcuuucuaaaga

SEQ ID NO: 1206389 - RNA, 19 nt, Artificial Sequence
  Description of Artificial Sequence: Synthetic oligonucleotide
  Antisense strand to SEQ ID NO: 1206388
ucuuuagaaagcugcuugg

SEQ ID NO: 1206390 - RNA, 19 nt, Artificial Sequence
  Description of Artificial Sequence: Synthetic oligonucleotide
  Sense strand starting at position 2460 of SEQ ID NO: 917072
cuuccucaccgaugagaac

SEQ ID NO: 1206391 - RNA, 19 nt, Artificial Sequence
  Description of Artificial Sequence: Synthetic oligonucleotide
  Antisense strand to SEQ ID NO: 1206390
guucucaucggugaggaag

SEQ ID NO: 1206392 - RNA, 19 nt, Artificial Sequence
  Description of Artificial Sequence: Synthetic oligonucleotide
  Sense strand starting at position 2797 of SEQ ID NO: 917072
uggugaaggcugcaaugau

SEQ ID NO: 1206393 - RNA, 19 nt, Artificial Sequence
  Description of Artificial Sequence: Synthetic oligonucleotide
  Antisense strand to SEQ ID NO: 1206392
aucauugcagccuucacca

SEQ ID NO: 1206394 - RNA, 19 nt, Artificial Sequence
  Description of Artificial Sequence: Synthetic oligonucleotide
  Sense strand starting at position 2890 of SEQ ID NO: 917072
cugggaagcaccuagcauu

SEQ ID NO: 1206395 - RNA, 19 nt, Artificial Sequence
  Description of Artificial Sequence: Synthetic oligonucleotide
  Antisense strand to SEQ ID NO: 1206394
aaugcuaggugcuucccag

SEQ ID NO: 1206396 - RNA, 19 nt, Artificial Sequence
  Description of Artificial Sequence: Synthetic oligonucleotide
  Sense strand starting at position 2957 of SEQ ID NO: 917072
acuguagguuuacucaaua

SEQ ID NO: 1206397 - RNA, 19 nt, Artificial Sequence
  Description of Artificial Sequence: Synthetic oligonucleotide
  Antisense strand to SEQ ID NO: 1206396
uauugaguaaaccuacagu

SEQ ID NO: 1206398 - RNA, 19 nt, Artificial Sequence
  Description of Artificial Sequence: Synthetic oligonucleotide
  Sense strand starting at position 3176 of SEQ ID NO: 917072
uuggacagcacggauuaua

SEQ ID NO: 1206399 - RNA, 19 nt, Artificial Sequence
  Description of Artificial Sequence: Synthetic oligonucleotide
  Antisense strand to SEQ ID NO: 1206398
uauaauccgugcuguccaa

SEQ ID NO: 1206400 - RNA, 19 nt, Artificial Sequence
  Description of Artificial Sequence: Synthetic oligonucleotide
  Sense strand starting at position 3191 of SEQ ID NO: 917072
uauagaacguuuccaugau

SEQ ID NO: 1206401 - RNA, 19 nt, Artificial Sequence
  Description of Artificial Sequence: Synthetic oligonucleotide
  Antisense strand to SEQ ID NO: 1206400
aucauggaaacguucuaua

SEQ ID NO: 1206402 - RNA, 19 nt, Artificial Sequence
  Description of Artificial Sequence: Synthetic oligonucleotide
  Sense strand starting at position 3195 of SEQ ID NO: 917072
gaacguuuccaugaucaca

SEQ ID NO: 1206403 - RNA, 19 nt, Artificial Sequence
  Description of Artificial Sequence: Synthetic oligonucleotide
  Antisense strand to SEQ ID NO: 1206402
ugugaucauggaaacguuc

SEQ ID NO: 1206404 - RNA, 19 nt, Artificial Sequence
  Description of Artificial Sequence: Synthetic oligonucleotide
  Sense strand starting at position 3197 of SEQ ID NO: 917072
acguuuccaugaucacaga

SEQ ID NO: 1206405 - RNA, 19 nt, Artificial Sequence
  Description of Artificial Sequence: Synthetic oligonucleotide
  Antisense strand to SEQ ID NO: 1206404
ucugugaucauggaaacgu

SEQ ID NO: 1206406 - RNA, 19 nt, Artificial Sequence
  Description of Artificial Sequence: Synthetic oligonucleotide
  Sense strand starting at position 3315 of SEQ ID NO: 917072
uguuuaaacguggugcagu

SEQ ID NO: 1206407 - RNA, 19 nt, Artificial Sequence
  Description of Artificial Sequence: Synthetic oligonucleotide
  Antisense strand to SEQ ID NO: 1206406
acugcaccacguuuaaaca

SEQ ID NO: 1206408 - RNA, 19 nt, Artificial Sequence
  Description of Artificial Sequence: Synthetic oligonucleotide
  Sense strand starting at position 3335 of SEQ ID NO: 917072
ggagcuuuaacagaguuac

SEQ ID NO: 1206409 - RNA, 19 nt, Artificial Sequence
  Description of Artificial Sequence: Synthetic oligonucleotide
  Antisense strand to SEQ ID NO: 1206408
guaacucuguuaaagcucc

SEQ ID NO: 1206410 - RNA, 19 nt, Artificial Sequence
  Description of Artificial Sequence: Synthetic oligonucleotide
  Sense strand starting at position 3341 of SEQ ID NO: 917072
uuaacagaguuacuugcaa

SEQ ID NO: 1206411 - RNA, 19 nt, Artificial Sequence
  Description of Artificial Sequence: Synthetic oligonucleotide
  Antisense strand to SEQ ID NO: 1206410
uugcaaguaacucuguuaa

SEQ ID NO: 1206412 - RNA, 19 nt, Artificial Sequence
  Description of Artificial Sequence: Synthetic oligonucleotide
  Sense strand starting at position 3383 of SEQ ID NO: 917072
gguagcaaacucuaaccua

SEQ ID NO: 1206413 - RNA, 19 nt, Artificial Sequence
  Description of Artificial Sequence: Synthetic oligonucleotide
  Antisense strand to SEQ ID NO: 1206412
uagguuagaguuugcuacc

SEQ ID NO: 1206414 - RNA, 19 nt, Artificial Sequence
  Description of Artificial Sequence: Synthetic oligonucleotide
  Sense strand starting at position 3631 of SEQ ID NO: 917072
auggaauucuuucugugac

SEQ ID NO: 1206415 - RNA, 19 nt, Artificial Sequence
  Description of Artificial Sequence: Synthetic oligonucleotide
  Antisense strand to SEQ ID NO: 1206414
gucacagaaagaauuccau

SEQ ID NO: 1206416 - RNA, 19 nt, Artificial Sequence
  Description of Artificial Sequence: Synthetic oligonucleotide
  Sense strand starting at position 3633 of SEQ ID NO: 917072
ggaauucuuucugugacuc

SEQ ID NO: 1206417 - RNA, 19 nt, Artificial Sequence
  Description of Artificial Sequence: Synthetic oligonucleotide
  Antisense strand to SEQ ID NO: 1206416
gagucacagaaagaauucc

SEQ ID NO: 1206418 - RNA, 19 nt, Artificial Sequence
  Description of Artificial Sequence: Synthetic oligonucleotide
  Sense strand starting at position 3710 of SEQ ID NO: 917072
acaggaacucuugguugaa

SEQ ID NO: 1206419 - RNA, 19 nt, Artificial Sequence
  Description of Artificial Sequence: Synthetic oligonucleotide
  Antisense strand to SEQ ID NO: 1206418
uucaaccaagaguuccugu

SEQ ID NO: 1206420 - RNA, 19 nt, Artificial Sequence
  Description of Artificial Sequence: Synthetic oligonucleotide
  Sense strand starting at position 3711 of SEQ ID NO: 917072
caggaacucuugguugaau

SEQ ID NO: 1206421 - RNA, 19 nt, Artificial Sequence
  Description of Artificial Sequence: Synthetic oligonucleotide
  Antisense strand to SEQ ID NO: 1206420
auucaaccaagaguuccug

SEQ ID NO: 1206422 - RNA, 19 nt, Artificial Sequence
  Description of Artificial Sequence: Synthetic oligonucleotide
  Sense strand starting at position 3712 of SEQ ID NO: 917072
aggaacucuugguugaaua

SEQ ID NO: 1206423 - RNA, 19 nt, Artificial Sequence
  Description of Artificial Sequence: Synthetic oligonucleotide
  Antisense strand to SEQ ID NO: 1206422
uauucaaccaagaguuccu

SEQ ID NO: 1206424 - RNA, 19 nt, Artificial Sequence
  Description of Artificial Sequence: Synthetic oligonucleotide
  Sense strand starting at position 3713 of SEQ ID NO: 917072
ggaacucuugguugaauaa

SEQ ID NO: 1206425 - RNA, 19 nt, Artificial Sequence
  Description of Artificial Sequence: Synthetic oligonucleotide
  Antisense strand to SEQ ID NO: 1206424
uuauucaaccaagaguucc

SEQ ID NO: 1206426 - RNA, 19 nt, Artificial Sequence
  Description of Artificial Sequence: Synthetic oligonucleotide
  Sense strand starting at position 3733 of SEQ ID NO: 917072
aggaaucucguagagguga

SEQ ID NO: 1206427 - RNA, 19 nt, Artificial Sequence
  Description of Artificial Sequence: Synthetic oligonucleotide
  Antisense strand to SEQ ID NO: 1206426
ucaccucuacgagauuccu

SEQ ID NO: 1206428 - RNA, 19 nt, Artificial Sequence
  Description of Artificial Sequence: Synthetic oligonucleotide
  Sense strand starting at position 3751 of SEQ ID NO: 917072
aggcaaacauaugugauua

SEQ ID NO: 1206429 - RNA, 19 nt, Artificial Sequence
  Description of Artificial Sequence: Synthetic oligonucleotide
  Antisense strand to SEQ ID NO: 1206428
uaaucacauauguuugccu

SEQ ID NO: 1206430 - RNA, 19 nt, Artificial Sequence
  Description of Artificial Sequence: Synthetic oligonucleotide
  Sense strand starting at position 3781 of SEQ ID NO: 917072
agggcaauacguuauaaug

SEQ ID NO: 1206431 - RNA, 19 nt, Artificial Sequence
  Description of Artificial Sequence: Synthetic oligonucleotide
  Antisense strand to SEQ ID NO: 1206430
cauuauaacguauugcccu

SEQ ID NO: 1206432 - RNA, 19 nt, Artificial Sequence
  Description of Artificial Sequence: Synthetic oligonucleotide
  Sense strand starting at position 3787 of SEQ ID NO: 917072
auacguuauaauggaggua

SEQ ID NO: 1206433 - RNA, 19 nt, Artificial Sequence
  Description of Artificial Sequence: Synthetic oligonucleotide
  Antisense strand to SEQ ID NO: 1206432
uaccuccauuauaacguau

SEQ ID NO: 1206434 - RNA, 19 nt, Artificial Sequence
  Description of Artificial Sequence: Synthetic oligonucleotide
  Sense strand starting at position 3788 of SEQ ID NO: 917072
uacguuauaauggagguau

SEQ ID NO: 1206435 - RNA, 19 nt, Artificial Sequence
  Description of Artificial Sequence: Synthetic oligonucleotide
  Antisense strand to SEQ ID NO: 1206434
auaccuccauuauaacgua

SEQ ID NO: 1206436 - RNA, 19 nt, Artificial Sequence
  Description of Artificial Sequence: Synthetic oligonucleotide
  Sense strand starting at position 3909 of SEQ ID NO: 917072
auucucacagcuggagaua

SEQ ID NO: 1206437 - RNA, 19 nt, Artificial Sequence
  Description of Artificial Sequence: Synthetic oligonucleotide
  Antisense strand to SEQ ID NO: 1206436
uaucuccagcugugagaau

SEQ ID NO: 1206438 - RNA, 19 nt, Artificial Sequence
  Description of Artificial Sequence: Synthetic oligonucleotide
  Sense strand starting at position 162 of SEQ ID NO: 917073
ggaccuaauuuccaaagaa

SEQ ID NO: 1206439 - RNA, 19 nt, Artificial Sequence
  Description of Artificial Sequence: Synthetic oligonucleotide
  Antisense strand to SEQ ID NO: 1206438
uucuuuggaaauuaggucc

SEQ ID NO: 1206440 - RNA, 19 nt, Artificial Sequence
  Description of Artificial Sequence: Synthetic oligonucleotide
  Sense strand starting at position 269 of SEQ ID NO: 917073
gccacuucggcuguuguaa

SEQ ID NO: 1206441 - RNA, 19 nt, Artificial Sequence
  Description of Artificial Sequence: Synthetic oligonucleotide
  Antisense strand to SEQ ID NO: 1206440
uuacaacagccgaaguggc

SEQ ID NO: 1206442 - RNA, 19 nt, Artificial Sequence
  Description of Artificial Sequence: Synthetic oligonucleotide
  Sense strand starting at position 400 of SEQ ID NO: 917073
cucuccuuuguaggauuaa

SEQ ID NO: 1206443 - RNA, 19 nt, Artificial Sequence
  Description of Artificial Sequence: Synthetic oligonucleotide
  Antisense strand to SEQ ID NO: 1206442
uuaauccuacaaaggagag

SEQ ID NO: 1206444 - RNA, 19 nt, Artificial Sequence
  Description of Artificial Sequence: Synthetic oligonucleotide
  Sense strand starting at position 520 of SEQ ID NO: 917073
cguacagaucaaggacuuu

SEQ ID NO: 1206445 - RNA, 19 nt, Artificial Sequence
  Description of Artificial Sequence: Synthetic oligonucleotide
  Antisense strand to SEQ ID NO: 1206444
aaaguccuugaucuguacg

SEQ ID NO: 1206446 - RNA, 19 nt, Artificial Sequence
  Description of Artificial Sequence: Synthetic oligonucleotide
  Sense strand starting at position 548 of SEQ ID NO: 917073
caaggcagcuucucugaga

SEQ ID NO: 1206447 - RNA, 19 nt, Artificial Sequence
  Description of Artificial Sequence: Synthetic oligonucleotide
  Antisense strand to SEQ ID NO: 1206446
ucucagagaagcugccuug

SEQ ID NO: 1206448 - RNA, 19 nt, Artificial Sequence
  Description of Artificial Sequence: Synthetic oligonucleotide
  Sense strand starting at position 549 of SEQ ID NO: 917073
aaggcagcuucucugagaa

SEQ ID NO: 1206449 - RNA, 19 nt, Artificial Sequence
  Description of Artificial Sequence: Synthetic oligonucleotide
  Antisense strand to SEQ ID NO: 1206448
uucucagagaagcugccuu

SEQ ID NO: 1206450 - RNA, 19 nt, Artificial Sequence
  Description of Artificial Sequence: Synthetic oligonucleotide
  Sense strand starting at position 754 of SEQ ID NO: 917073
gaggacgcaucuuccagau

SEQ ID NO: 1206451 - RNA, 19 nt, Artificial Sequence
  Description of Artificial Sequence: Synthetic oligonucleotide
  Antisense strand to SEQ ID NO: 1206450
aucuggaagaugcguccuc

SEQ ID NO: 1206452 - RNA, 19 nt, Artificial Sequence
  Description of Artificial Sequence: Synthetic oligonucleotide
  Sense strand starting at position 1115 of SEQ ID NO: 917073
gucaucagcccgggaagua

SEQ ID NO: 1206453 - RNA, 19 nt, Artificial Sequence
  Description of Artificial Sequence: Synthetic oligonucleotide
  Antisense strand to SEQ ID NO: 1206452
uacuucccgggcugaugac

SEQ ID NO: 1206454 - RNA, 19 nt, Artificial Sequence
  Description of Artificial Sequence: Synthetic oligonucleotide
  Sense strand starting at position 1116 of SEQ ID NO: 917073
ucaucagcccgggaaguau

SEQ ID NO: 1206455 - RNA, 19 nt, Artificial Sequence
  Description of Artificial Sequence: Synthetic oligonucleotide
  Antisense strand to SEQ ID NO: 1206454
auacuucccgggcugauga

SEQ ID NO: 1206456 - RNA, 19 nt, Artificial Sequence
  Description of Artificial Sequence: Synthetic oligonucleotide
  Sense strand starting at position 1466 of SEQ ID NO: 917073
ggcagaaggucugugaaug

SEQ ID NO: 1206457 - RNA, 19 nt, Artificial Sequence
  Description of Artificial Sequence: Synthetic oligonucleotide
  Antisense strand to SEQ ID NO: 1206456
cauucacagaccuucugcc

SEQ ID NO: 1206458 - RNA, 19 nt, Artificial Sequence
  Description of Artificial Sequence: Synthetic oligonucleotide
  Sense strand starting at position 1602 of SEQ ID NO: 917073
cguuuccuuguccaaauau

SEQ ID NO: 1206459 - RNA, 19 nt, Artificial Sequence
  Description of Artificial Sequence: Synthetic oligonucleotide
  Antisense strand to SEQ ID NO: 1206458
auauuuggacaaggaaacg

SEQ ID NO: 1206460 - RNA, 19 nt, Artificial Sequence
  Description of Artificial Sequence: Synthetic oligonucleotide
  Sense strand starting at position 1786 of SEQ ID NO: 917073
ggacuuugauccucacaca

SEQ ID NO: 1206461 - RNA, 19 nt, Artificial Sequence
  Description of Artificial Sequence: Synthetic oligonucleotide
  Antisense strand to SEQ ID NO: 1206460
ugugugaggaucaaagucc

SEQ ID NO: 1206462 - RNA, 19 nt, Artificial Sequence
  Description of Artificial Sequence: Synthetic oligonucleotide
  Sense strand starting at position 2165 of SEQ ID NO: 917073
cggcucucagcccauuaaa

SEQ ID NO: 1206463 - RNA, 19 nt, Artificial Sequence
  Description of Artificial Sequence: Synthetic oligonucleotide
  Antisense strand to SEQ ID NO: 1206462
uuuaaugggcugagagccg

SEQ ID NO: 1206464 - RNA, 19 nt, Artificial Sequence
  Description of Artificial Sequence: Synthetic oligonucleotide
  Sense strand starting at position 2245 of SEQ ID NO: 917073
cucugacuuccagaugugu

SEQ ID NO: 1206465 - RNA, 19 nt, Artificial Sequence
  Description of Artificial Sequence: Synthetic oligonucleotide
  Antisense strand to SEQ ID NO: 1206464
acacaucuggaagucagag

SEQ ID NO: 1206466 - RNA, 19 nt, Artificial Sequence
  Description of Artificial Sequence: Synthetic oligonucleotide
  Sense strand starting at position 2249 of SEQ ID NO: 917073
gacuuccagauguguggua

SEQ ID NO: 1206467 - RNA, 19 nt, Artificial Sequence
  Description of Artificial Sequence: Synthetic oligonucleotide
  Antisense strand to SEQ ID NO: 1206466
uaccacacaucuggaaguc

SEQ ID NO: 1206468 - RNA, 19 nt, Artificial Sequence
  Description of Artificial Sequence: Synthetic oligonucleotide
  Sense strand starting at position 2258 of SEQ ID NO: 917073
augugugguaccugaaacu

SEQ ID NO: 1206469 - RNA, 19 nt, Artificial Sequence
  Description of Artificial Sequence: Synthetic oligonucleotide
  Antisense strand to SEQ ID NO: 1206468
aguuucagguaccacacau

SEQ ID NO: 1206470 - RNA, 19 nt, Artificial Sequence
  Description of Artificial Sequence: Synthetic oligonucleotide
  Sense strand starting at position 2381 of SEQ ID NO: 917073
ccaauucuugaguggccau

SEQ ID NO: 1206471 - RNA, 19 nt, Artificial Sequence
  Description of Artificial Sequence: Synthetic oligonucleotide
  Antisense strand to SEQ ID NO: 1206470
auggccacucaagaauugg

SEQ ID NO: 1206472 - RNA, 19 nt, Artificial Sequence
  Description of Artificial Sequence: Synthetic oligonucleotide
  Sense strand starting at position 2384 of SEQ ID NO: 917073
auucuugaguggccauaga

SEQ ID NO: 1206473 - RNA, 19 nt, Artificial Sequence
  Description of Artificial Sequence: Synthetic oligonucleotide
  Antisense strand to SEQ ID NO: 1206472
ucuauggccacucaagaau

SEQ ID NO: 1206474 - RNA, 19 nt, Artificial Sequence
  Description of Artificial Sequence: Synthetic oligonucleotide
  Sense strand starting at position 2589 of SEQ ID NO: 917073
uguuaaugagcaggucaca

SEQ ID NO: 1206475 - RNA, 19 nt, Artificial Sequence
  Description of Artificial Sequence: Synthetic oligonucleotide
  Antisense strand to SEQ ID NO: 1206474
ugugaccugcucauuaaca

SEQ ID NO: 1206476 - RNA, 19 nt, Artificial Sequence
  Description of Artificial Sequence: Synthetic oligonucleotide
  Sense strand starting at position 2619 of SEQ ID NO: 917073
guuugugggucacuaguga

SEQ ID NO: 1206477 - RNA, 19 nt, Artificial Sequence
  Description of Artificial Sequence: Synthetic oligonucleotide
  Antisense strand to SEQ ID NO: 1206476
ucacuagugacccacaaac

SEQ ID NO: 1206478 - RNA, 19 nt, Artificial Sequence
  Description of Artificial Sequence: Synthetic oligonucleotide
  Sense strand starting at position 2626 of SEQ ID NO: 917073
ggucacuagugagauuuau

SEQ ID NO: 1206479 - RNA, 19 nt, Artificial Sequence
  Description of Artificial Sequence: Synthetic oligonucleotide
  Antisense strand to SEQ ID NO: 1206478
auaaaucucacuagugacc

SEQ ID NO: 1206480 - RNA, 19 nt, Artificial Sequence
  Description of Artificial Sequence: Synthetic oligonucleotide
  Sense strand starting at position 2635 of SEQ ID NO: 917073
ugagauuuauagcaggauu

SEQ ID NO: 1206481 - RNA, 19 nt, Artificial Sequence
  Description of Artificial Sequence: Synthetic oligonucleotide
  Antisense strand to SEQ ID NO: 1206480
aauccugcuauaaaucuca

SEQ ID NO: 1206482 - RNA, 19 nt, Artificial Sequence
  Description of Artificial Sequence: Synthetic oligonucleotide
  Sense strand starting at position 2665 of SEQ ID NO: 917073
ggcucuccuuguguaggaa

SEQ ID NO: 1206483 - RNA, 19 nt, Artificial Sequence
  Description of Artificial Sequence: Synthetic oligonucleotide
  Antisense strand to SEQ ID NO: 1206482
uuccuacacaaggagagcc

SEQ ID NO: 1206484 - RNA, 19 nt, Artificial Sequence
  Description of Artificial Sequence: Synthetic oligonucleotide
  Sense strand starting at position 2668 of SEQ ID NO: 917073
ucuccuuguguaggaagaa

SEQ ID NO: 1206485 - RNA, 19 nt, Artificial Sequence
  Description of Artificial Sequence: Synthetic oligonucleotide
  Antisense strand to SEQ ID NO: 1206484
uucuuccuacacaaggaga

SEQ ID NO: 1206486 - RNA, 19 nt, Artificial Sequence
  Description of Artificial Sequence: Synthetic oligonucleotide
  Sense strand starting at position 2890 of SEQ ID NO: 917073
ggugaaagcucaccuguaa

SEQ ID NO: 1206487 - RNA, 19 nt, Artificial Sequence
  Description of Artificial Sequence: Synthetic oligonucleotide
  Antisense strand to SEQ ID NO: 1206486
uuacaggugagcuuucacc

SEQ ID NO: 1206488 - RNA, 19 nt, Artificial Sequence
  Description of Artificial Sequence: Synthetic oligonucleotide
  Sense strand starting at position 3091 of SEQ ID NO: 917073
gagucagggucucuauucu

SEQ ID NO: 1206489 - RNA, 19 nt, Artificial Sequence
  Description of Artificial Sequence: Synthetic oligonucleotide
  Antisense strand to SEQ ID NO: 1206488
agaauagagacccugacuc

SEQ ID NO: 1206490 - RNA, 19 nt, Artificial Sequence
  Description of Artificial Sequence: Synthetic oligonucleotide
  Sense strand starting at position 3097 of SEQ ID NO: 917073
gggucucuauucuuuagua

SEQ ID NO: 1206491 - RNA, 19 nt, Artificial Sequence
  Description of Artificial Sequence: Synthetic oligonucleotide
  Antisense strand to SEQ ID NO: 1206490
uacuaaagaauagagaccc

SEQ ID NO: 1206492 - RNA, 19 nt, Artificial Sequence
  Description of Artificial Sequence: Synthetic oligonucleotide
  Sense strand starting at position 3098 of SEQ ID NO: 917073
ggucucuauucuuuaguag

SEQ ID NO: 1206493 - RNA, 19 nt, Artificial Sequence
  Description of Artificial Sequence: Synthetic oligonucleotide
  Antisense strand to SEQ ID NO: 1206492
cuacuaaagaauagagacc

SEQ ID NO: 1206494 - RNA, 19 nt, Artificial Sequence
  Description of Artificial Sequence: Synthetic oligonucleotide
  Sense strand starting at position 3099 of SEQ ID NO: 917073
gucucuauucuuuaguagu

SEQ ID NO: 1206495 - RNA, 19 nt, Artificial Sequence
  Description of Artificial Sequence: Synthetic oligonucleotide
  Antisense strand to SEQ ID NO: 1206494
acuacuaaagaauagagac

SEQ ID NO: 1206496 - RNA, 19 nt, Artificial Sequence
  Description of Artificial Sequence: Synthetic oligonucleotide
  Sense strand starting at position 3180 of SEQ ID NO: 917073
ccagaaugagcuggucaga

SEQ ID NO: 1206497 - RNA, 19 nt, Artificial Sequence
  Description of Artificial Sequence: Synthetic oligonucleotide
  Antisense strand to SEQ ID NO: 1206496
ucugaccagcucauucugg

SEQ ID NO: 1206498 - RNA, 19 nt, Artificial Sequence
  Description of Artificial Sequence: Synthetic oligonucleotide
  Sense strand starting at position 3300 of SEQ ID NO: 917073
cucuaagugccagagacau

SEQ ID NO: 1206499 - RNA, 19 nt, Artificial Sequence
  Description of Artificial Sequence: Synthetic oligonucleotide
  Antisense strand to SEQ ID NO: 1206498
augucucuggcacuuagag

SEQ ID NO: 1206500 - RNA, 19 nt, Artificial Sequence
  Description of Artificial Sequence: Synthetic oligonucleotide
  Sense strand starting at position 3334 of SEQ ID NO: 917073
aauguaucauaaguuaggu

SEQ ID NO: 1206501 - RNA, 19 nt, Artificial Sequence
  Description of Artificial Sequence: Synthetic oligonucleotide
  Antisense strand to SEQ ID NO: 1206500
accuaacuuaugauacauu

SEQ ID NO: 1206502 - RNA, 19 nt, Artificial Sequence
  Description of Artificial Sequence: Synthetic oligonucleotide
  Sense strand starting at position 3342 of SEQ ID NO: 917073
auaaguuagguccagugaa

SEQ ID NO: 1206503 - RNA, 19 nt, Artificial Sequence
  Description of Artificial Sequence: Synthetic oligonucleotide
  Antisense strand to SEQ ID NO: 1206502
uucacuggaccuaacuuau

SEQ ID NO: 1206504 - RNA, 19 nt, Artificial Sequence
  Description of Artificial Sequence: Synthetic oligonucleotide
  Sense strand starting at position 3355 of SEQ ID NO: 917073
agugaauacuaugaggaaa

SEQ ID NO: 1206505 - RNA, 19 nt, Artificial Sequence
  Description of Artificial Sequence: Synthetic oligonucleotide
  Antisense strand to SEQ ID NO: 1206504
uuuccucauaguauucacu

SEQ ID NO: 1206506 - RNA, 19 nt, Artificial Sequence
  Description of Artificial Sequence: Synthetic oligonucleotide
  Sense strand starting at position 3414 of SEQ ID NO: 917073
gcauacuugauguaggguu

SEQ ID NO: 1206507 - RNA, 19 nt, Artificial Sequence
  Description of Artificial Sequence: Synthetic oligonucleotide
  Antisense strand to SEQ ID NO: 1206506
aacccuacaucaaguaugc

SEQ ID NO: 1206508 - RNA, 19 nt, Artificial Sequence
  Description of Artificial Sequence: Synthetic oligonucleotide
  Sense strand starting at position 3422 of SEQ ID NO: 917073
gauguaggguucuugggaa

SEQ ID NO: 1206509 - RNA, 19 nt, Artificial Sequence
  Description of Artificial Sequence: Synthetic oligonucleotide
  Antisense strand to SEQ ID NO: 1206508
uucccaagaacccuacauc

SEQ ID NO: 1206510 - RNA, 19 nt, Artificial Sequence
  Description of Artificial Sequence: Synthetic oligonucleotide
  Sense strand starting at position 3683 of SEQ ID NO: 917073
guccauccagccuagaguu

SEQ ID NO: 1206511 - RNA, 19 nt, Artificial Sequence
  Description of Artificial Sequence: Synthetic oligonucleotide
  Antisense strand to SEQ ID NO: 1206510
aacucuaggcuggauggac

SEQ ID NO: 1206512 - RNA, 19 nt, Artificial Sequence
  Description of Artificial Sequence: Synthetic oligonucleotide
  Sense strand starting at position 3685 of SEQ ID NO: 917073
ccauccagccuagaguuaa

SEQ ID NO: 1206513 - RNA, 19 nt, Artificial Sequence
  Description of Artificial Sequence: Synthetic oligonucleotide
  Antisense strand to SEQ ID NO: 1206512
uuaacucuaggcuggaugg

SEQ ID NO: 1206514 - RNA, 19 nt, Artificial Sequence
  Description of Artificial Sequence: Synthetic oligonucleotide
  Sense strand starting at position 3755 of SEQ ID NO: 917073
ugugcuuuccaccauacuu

SEQ ID NO: 1206515 - RNA, 19 nt, Artificial Sequence
  Description of Artificial Sequence: Synthetic oligonucleotide
  Antisense strand to SEQ ID NO: 1206514
aaguaugguggaaagcaca

SEQ ID NO: 1206516 - RNA, 19 nt, Artificial Sequence
  Description of Artificial Sequence: Synthetic oligonucleotide
  Sense strand starting at position 3775 of SEQ ID NO: 917073
agagcagugccugaaacaa

SEQ ID NO: 1206517 - RNA, 19 nt, Artificial Sequence
  Description of Artificial Sequence: Synthetic oligonucleotide
  Antisense strand to SEQ ID NO: 1206516
uuguuucaggcacugcucu

SEQ ID NO: 1206518 - RNA, 19 nt, Artificial Sequence
  Description of Artificial Sequence: Synthetic oligonucleotide
  Sense strand starting at position 87 of SEQ ID NO: 917074
uggcuugagguauauccaa

SEQ ID NO: 1206519 - RNA, 19 nt, Artificial Sequence
  Description of Artificial Sequence: Synthetic oligonucleotide
  Antisense strand to SEQ ID NO: 1206518
uuggauauaccucaagcca

SEQ ID NO: 1206520 - RNA, 19 nt, Artificial Sequence
  Description of Artificial Sequence: Synthetic oligonucleotide
  Sense strand starting at position 175 of SEQ ID NO: 917074
ccaucaguguauccuaaau

SEQ ID NO: 1206521 - RNA, 19 nt, Artificial Sequence
  Description of Artificial Sequence: Synthetic oligonucleotide
  Antisense strand to SEQ ID NO: 1206520
auuuaggauacacugaugg

SEQ ID NO: 1206522 - RNA, 19 nt, Artificial Sequence
  Description of Artificial Sequence: Synthetic oligonucleotide
  Sense strand starting at position 254 of SEQ ID NO: 917074
cuuaaucuccagugggaga

SEQ ID NO: 1206523 - RNA, 19 nt, Artificial Sequence
  Description of Artificial Sequence: Synthetic oligonucleotide
  Antisense strand to SEQ ID NO: 1206522
ucucccacuggagauuaag

SEQ ID NO: 1206524 - RNA, 19 nt, Artificial Sequence
  Description of Artificial Sequence: Synthetic oligonucleotide
  Sense strand starting at position 345 of SEQ ID NO: 917074
cgaggaagguacuaggauu

SEQ ID NO: 1206525 - RNA, 19 nt, Artificial Sequence
  Description of Artificial Sequence: Synthetic oligonucleotide
  Antisense strand to SEQ ID NO: 1206524
aauccuaguaccuuccucg

SEQ ID NO: 1206526 - RNA, 19 nt, Artificial Sequence
  Description of Artificial Sequence: Synthetic oligonucleotide
  Sense strand starting at position 353 of SEQ ID NO: 917074
guacuaggauuaucccauu

SEQ ID NO: 1206527 - RNA, 19 nt, Artificial Sequence
  Description of Artificial Sequence: Synthetic oligonucleotide
  Antisense strand to SEQ ID NO: 1206526
aaugggauaauccuaguac

SEQ ID NO: 1206528 - RNA, 19 nt, Artificial Sequence
  Description of Artificial Sequence: Synthetic oligonucleotide
  Sense strand starting at position 1410 of SEQ ID NO: 917074
gguguuggagagugguaga

SEQ ID NO: 1206529 - RNA, 19 nt, Artificial Sequence
  Description of Artificial Sequence: Synthetic oligonucleotide
  Antisense strand to SEQ ID NO: 1206528
ucuaccacucuccaacacc

SEQ ID NO: 1206530 - RNA, 19 nt, Artificial Sequence
  Description of Artificial Sequence: Synthetic oligonucleotide
  Sense strand starting at position 1625 of SEQ ID NO: 917074
agggaauacuggccgagaa

SEQ ID NO: 1206531 - RNA, 19 nt, Artificial Sequence
  Description of Artificial Sequence: Synthetic oligonucleotide
  Antisense strand to SEQ ID NO: 1206530
uucucggccaguauucccu

SEQ ID NO: 1206532 - RNA, 19 nt, Artificial Sequence
  Description of Artificial Sequence: Synthetic oligonucleotide
  Sense strand starting at position 1626 of SEQ ID NO: 917074
gggaauacuggccgagaag

SEQ ID NO: 1206533 - RNA, 19 nt, Artificial Sequence
  Description of Artificial Sequence: Synthetic oligonucleotide
  Antisense strand to SEQ ID NO: 1206532
cuucucggccaguauuccc

SEQ ID NO: 1206534 - RNA, 19 nt, Artificial Sequence
  Description of Artificial Sequence: Synthetic oligonucleotide
  Sense strand starting at position 1686 of SEQ ID NO: 917074
guggaaggaagguguaaua

SEQ ID NO: 1206535 - RNA, 19 nt, Artificial Sequence
  Description of Artificial Sequence: Synthetic oligonucleotide
  Antisense strand to SEQ ID NO: 1206534
uauuacaccuuccuuccac

SEQ ID NO: 1206536 - RNA, 19 nt, Artificial Sequence
  Description of Artificial Sequence: Synthetic oligonucleotide
  Sense strand starting at position 1778 of SEQ ID NO: 917074
acucaauggcuccgguaau

SEQ ID NO: 1206537 - RNA, 19 nt, Artificial Sequence
  Description of Artificial Sequence: Synthetic oligonucleotide
  Antisense strand to SEQ ID NO: 1206536
auuaccggagccauugagu

SEQ ID NO: 1206538 - RNA, 19 nt, Artificial Sequence
  Description of Artificial Sequence: Synthetic oligonucleotide
  Sense strand starting at position 1887 of SEQ ID NO: 917074
gcaggagcgauucggaaga

SEQ ID NO: 1206539 - RNA, 19 nt, Artificial Sequence
  Description of Artificial Sequence: Synthetic oligonucleotide
  Antisense strand to SEQ ID NO: 1206538
ucuuccgaaucgcuccugc

SEQ ID NO: 1206540 - RNA, 19 nt, Artificial Sequence
  Description of Artificial Sequence: Synthetic oligonucleotide
  Sense strand starting at position 1892 of SEQ ID NO: 917074
agcgauucggaagaagacu

SEQ ID NO: 1206541 - RNA, 19 nt, Artificial Sequence
  Description of Artificial Sequence: Synthetic oligonucleotide
  Antisense strand to SEQ ID NO: 1206540
agucuucuuccgaaucgcu

SEQ ID NO: 1206542 - RNA, 19 nt, Artificial Sequence
  Description of Artificial Sequence: Synthetic oligonucleotide
  Sense strand starting at position 1982 of SEQ ID NO: 917074
cccgcauagccucaagaaa

SEQ ID NO: 1206543 - RNA, 19 nt, Artificial Sequence
  Description of Artificial Sequence: Synthetic oligonucleotide
  Antisense strand to SEQ ID NO: 1206542
uuucuugaggcuaugcggg

SEQ ID NO: 1206544 - RNA, 19 nt, Artificial Sequence
  Description of Artificial Sequence: Synthetic oligonucleotide
  Sense strand starting at position 2051 of SEQ ID NO: 917074
ggagucaucauggaggcuu

SEQ ID NO: 1206545 - RNA, 19 nt, Artificial Sequence
  Description of Artificial Sequence: Synthetic oligonucleotide
  Antisense strand to SEQ ID NO: 1206544
aagccuccaugaugacucc

SEQ ID NO: 1206546 - RNA, 19 nt, Artificial Sequence
  Description of Artificial Sequence: Synthetic oligonucleotide
  Sense strand starting at position 2109 of SEQ ID NO: 917074
ccaguaguaucaguggcuu

SEQ ID NO: 1206547 - RNA, 19 nt, Artificial Sequence
  Description of Artificial Sequence: Synthetic oligonucleotide
  Antisense strand to SEQ ID NO: 1206546
aagccacugauacuacugg

SEQ ID NO: 1206548 - RNA, 19 nt, Artificial Sequence
  Description of Artificial Sequence: Synthetic oligonucleotide
  Sense strand starting at position 2129 of SEQ ID NO: 917074
gggauuucuuacugagcuc

SEQ ID NO: 1206549 - RNA, 19 nt, Artificial Sequence
  Description of Artificial Sequence: Synthetic oligonucleotide
  Antisense strand to SEQ ID NO: 1206548
gagcucaguaagaaauccc

SEQ ID NO: 1206550 - RNA, 19 nt, Artificial Sequence
  Description of Artificial Sequence: Synthetic oligonucleotide
  Sense strand starting at position 2643 of SEQ ID NO: 917074
ccauguuaacuuuagcaug

SEQ ID NO: 1206551 - RNA, 19 nt, Artificial Sequence
  Description of Artificial Sequence: Synthetic oligonucleotide
  Antisense strand to SEQ ID NO: 1206550
caugcuaaaguuaacaugg

SEQ ID NO: 1206552 - RNA, 19 nt, Artificial Sequence
  Description of Artificial Sequence: Synthetic oligonucleotide
  Sense strand starting at position 2791 of SEQ ID NO: 917074
gcucccauuuaaucgcuaa

SEQ ID NO: 1206553 - RNA, 19 nt, Artificial Sequence
  Description of Artificial Sequence: Synthetic oligonucleotide
  Antisense strand to SEQ ID NO: 1206552
uuagcgauuaaaugggagc

SEQ ID NO: 1206554 - RNA, 19 nt, Artificial Sequence
  Description of Artificial Sequence: Synthetic oligonucleotide
  Sense strand starting at position 2911 of SEQ ID NO: 917074
cuucgauuccuggagucuu

SEQ ID NO: 1206555 - RNA, 19 nt, Artificial Sequence
  Description of Artificial Sequence: Synthetic oligonucleotide
  Antisense strand to SEQ ID NO: 1206554
aagacuccaggaaucgaag

SEQ ID NO: 1206556 - RNA, 19 nt, Artificial Sequence
  Description of Artificial Sequence: Synthetic oligonucleotide
  Sense strand starting at position 2943 of SEQ ID NO: 917074
uuauguacacgucauggaa

SEQ ID NO: 1206557 - RNA, 19 nt, Artificial Sequence
  Description of Artificial Sequence: Synthetic oligonucleotide
  Antisense strand to SEQ ID NO: 1206556
uuccaugacguguacauaa

SEQ ID NO: 1206558 - RNA, 19 nt, Artificial Sequence
  Description of Artificial Sequence: Synthetic oligonucleotide
  Sense strand starting at position 3458 of SEQ ID NO: 917074
ggcauaugauaaccucaga

SEQ ID NO: 1206559 - RNA, 19 nt, Artificial Sequence
  Description of Artificial Sequence: Synthetic oligonucleotide
  Antisense strand to SEQ ID NO: 1206558
ucugagguuaucauaugcc

SEQ ID NO: 1206560 - RNA, 19 nt, Artificial Sequence
  Description of Artificial Sequence: Synthetic oligonucleotide
  Sense strand starting at position 3524 of SEQ ID NO: 917074
uggagaaggagcugcuuau

SEQ ID NO: 1206561 - RNA, 19 nt, Artificial Sequence
  Description of Artificial Sequence: Synthetic oligonucleotide
  Antisense strand to SEQ ID NO: 1206560
auaagcagcuccuucucca

SEQ ID NO: 1206562 - RNA, 19 nt, Artificial Sequence
  Description of Artificial Sequence: Synthetic oligonucleotide
  Sense strand starting at position 3565 of SEQ ID NO: 917074
ccagucccaacgugagaaa

SEQ ID NO: 1206563 - RNA, 19 nt, Artificial Sequence
  Description of Artificial Sequence: Synthetic oligonucleotide
  Antisense strand to SEQ ID NO: 1206562
uuucucacguugggacugg

SEQ ID NO: 1206564 - RNA, 19 nt, Artificial Sequence
  Description of Artificial Sequence: Synthetic oligonucleotide
  Sense strand starting at position 3566 of SEQ ID NO: 917074
cagucccaacgugagaaau

SEQ ID NO: 1206565 - RNA, 19 nt, Artificial Sequence
  Description of Artificial Sequence: Synthetic oligonucleotide
  Antisense strand to SEQ ID NO: 1206564
auuucucacguugggacug

SEQ ID NO: 1206566 - RNA, 19 nt, Artificial Sequence
  Description of Artificial Sequence: Synthetic oligonucleotide
  Sense strand starting at position 3577 of SEQ ID NO: 917074
ugagaaauaucaguuggca

SEQ ID NO: 1206567 - RNA, 19 nt, Artificial Sequence
  Description of Artificial Sequence: Synthetic oligonucleotide
  Antisense strand to SEQ ID NO: 1206566
ugccaacugauauuucuca

SEQ ID NO: 1206568 - RNA, 19 nt, Artificial Sequence
  Description of Artificial Sequence: Synthetic oligonucleotide
  Sense strand starting at position 3580 of SEQ ID NO: 917074
gaaauaucaguuggcacuu

SEQ ID NO: 1206569 - RNA, 19 nt, Artificial Sequence
  Description of Artificial Sequence: Synthetic oligonucleotide
  Antisense strand to SEQ ID NO: 1206568
aagugccaacugauauuuc

SEQ ID NO: 1206570 - RNA, 19 nt, Artificial Sequence
  Description of Artificial Sequence: Synthetic oligonucleotide
  Sense strand starting at position 3617 of SEQ ID NO: 917074
uugccuaguaaggaugauu

SEQ ID NO: 1206571 - RNA, 19 nt, Artificial Sequence
  Description of Artificial Sequence: Synthetic oligonucleotide
  Antisense strand to SEQ ID NO: 1206570
aaucauccuuacuaggcaa

SEQ ID NO: 1206572 - RNA, 19 nt, Artificial Sequence
  Description of Artificial Sequence: Synthetic oligonucleotide
  Sense strand starting at position 3641 of SEQ ID NO: 917074
agucucagugcauggguua

SEQ ID NO: 1206573 - RNA, 19 nt, Artificial Sequence
  Description of Artificial Sequence: Synthetic oligonucleotide
  Antisense strand to SEQ ID NO: 1206572
uaacccaugcacugagacu

SEQ ID NO: 1206574 - RNA, 19 nt, Artificial Sequence
  Description of Artificial Sequence: Synthetic oligonucleotide
  Sense strand starting at position 3642 of SEQ ID NO: 917074
gucucagugcauggguuau

SEQ ID NO: 1206575 - RNA, 19 nt, Artificial Sequence
  Description of Artificial Sequence: Synthetic oligonucleotide
  Antisense strand to SEQ ID NO: 1206574
auaacccaugcacugagac

SEQ ID NO: 1206576 - RNA, 19 nt, Artificial Sequence
  Description of Artificial Sequence: Synthetic oligonucleotide
  Sense strand starting at position 3648 of SEQ ID NO: 917074
gugcauggguuauugcaau

SEQ ID NO: 1206577 - RNA, 19 nt, Artificial Sequence
  Description of Artificial Sequence: Synthetic oligonucleotide
  Antisense strand to SEQ ID NO: 1206576
auugcaauaacccaugcac

SEQ ID NO: 1206578 - RNA, 19 nt, Artificial Sequence
  Description of Artificial Sequence: Synthetic oligonucleotide
  Sense strand starting at position 3702 of SEQ ID NO: 917074
cuuguaugugcuugugaga

SEQ ID NO: 1206579 - RNA, 19 nt, Artificial Sequence
  Description of Artificial Sequence: Synthetic oligonucleotide
  Antisense strand to SEQ ID NO: 1206578
ucucacaagcacauacaag

SEQ ID NO: 1206580 - RNA, 19 nt, Artificial Sequence
  Description of Artificial Sequence: Synthetic oligonucleotide
  Sense strand starting at position 3771 of SEQ ID NO: 917074
uccaccaggguuugagaaa

SEQ ID NO: 1206581 - RNA, 19 nt, Artificial Sequence
  Description of Artificial Sequence: Synthetic oligonucleotide
  Antisense strand to SEQ ID NO: 1206580
uuucucaaacccuggugga

SEQ ID NO: 1206582 - RNA, 19 nt, Artificial Sequence
  Description of Artificial Sequence: Synthetic oligonucleotide
  Sense strand starting at position 3827 of SEQ ID NO: 917074
guaucuuccugguccugau

SEQ ID NO: 1206583 - RNA, 19 nt, Artificial Sequence
  Description of Artificial Sequence: Synthetic oligonucleotide
  Antisense strand to SEQ ID NO: 1206582
aucaggaccaggaagauac

SEQ ID NO: 1206584 - RNA, 19 nt, Artificial Sequence
  Description of Artificial Sequence: Synthetic oligonucleotide
  Sense strand starting at position 3831 of SEQ ID NO: 917074
cuuccugguccugauaaau

SEQ ID NO: 1206585 - RNA, 19 nt, Artificial Sequence
  Description of Artificial Sequence: Synthetic oligonucleotide
  Antisense strand to SEQ ID NO: 1206584
auuuaucaggaccaggaag

SEQ ID NO: 1206586 - RNA, 19 nt, Artificial Sequence
  Description of Artificial Sequence: Synthetic oligonucleotide
  Sense strand starting at position 3852 of SEQ ID NO: 917074
aucucauggucucuaaguu

SEQ ID NO: 1206587 - RNA, 19 nt, Artificial Sequence
  Description of Artificial Sequence: Synthetic oligonucleotide
  Antisense strand to SEQ ID NO: 1206586
aacuuagagaccaugagau

SEQ ID NO: 1206588 - RNA, 19 nt, Artificial Sequence
  Description of Artificial Sequence: Synthetic oligonucleotide
  Sense strand starting at position 3853 of SEQ ID NO: 917074
ucucauggucucuaaguua

SEQ ID NO: 1206589 - RNA, 19 nt, Artificial Sequence
  Description of Artificial Sequence: Synthetic oligonucleotide
  Antisense strand to SEQ ID NO: 1206588
uaacuuagagaccaugaga

SEQ ID NO: 1206590 - RNA, 19 nt, Artificial Sequence
  Description of Artificial Sequence: Synthetic oligonucleotide
  Sense strand starting at position 3907 of SEQ ID NO: 917074
guguaacaacuuggacuuu

SEQ ID NO: 1206591 - RNA, 19 nt, Artificial Sequence
  Description of Artificial Sequence: Synthetic oligonucleotide
  Antisense strand to SEQ ID NO: 1206590
aaaguccaaguuguuacac

SEQ ID NO: 1206592 - RNA, 19 nt, Artificial Sequence
  Description of Artificial Sequence: Synthetic oligonucleotide
  Sense strand starting at position 3935 of SEQ ID NO: 917074
acuguaauccacugucaac

SEQ ID NO: 1206593 - RNA, 19 nt, Artificial Sequence
  Description of Artificial Sequence: Synthetic oligonucleotide
  Antisense strand to SEQ ID NO: 1206592
guugacaguggauuacagu

SEQ ID NO: 1206594 - RNA, 19 nt, Artificial Sequence
  Description of Artificial Sequence: Synthetic oligonucleotide
  Sense strand starting at position 3947 of SEQ ID NO: 917074
ugucaacaagcuuguggau

SEQ ID NO: 1206595 - RNA, 19 nt, Artificial Sequence
  Description of Artificial Sequence: Synthetic oligonucleotide
  Antisense strand to SEQ ID NO: 1206594
auccacaagcuuguugaca

SEQ ID NO: 1206596 - RNA, 19 nt, Artificial Sequence
  Description of Artificial Sequence: Synthetic oligonucleotide
  Sense strand starting at position 3968 of SEQ ID NO: 917074
gggcauggaucgucuuaaa

SEQ ID NO: 1206597 - RNA, 19 nt, Artificial Sequence
  Description of Artificial Sequence: Synthetic oligonucleotide
  Antisense strand to SEQ ID NO: 1206596
uuuaagacgauccaugccc

SEQ ID NO: 1206598 - RNA, 19 nt, Artificial Sequence
  Description of Artificial Sequence: Synthetic oligonucleotide
  Sense strand starting at position 32 of SEQ ID NO: 917075
uuacauguagcaggaauau

SEQ ID NO: 1206599 - RNA, 19 nt, Artificial Sequence
  Description of Artificial Sequence: Synthetic oligonucleotide
  Antisense strand to SEQ ID NO: 1206598
auauuccugcuacauguaa

SEQ ID NO: 1206600 - RNA, 19 nt, Artificial Sequence
  Description of Artificial Sequence: Synthetic oligonucleotide
  Sense strand starting at position 77 of SEQ ID NO: 917075
uuuaaauugucaccuaguu

SEQ ID NO: 1206601 - RNA, 19 nt, Artificial Sequence
  Description of Artificial Sequence: Synthetic oligonucleotide
  Antisense strand to SEQ ID NO: 1206600
aacuaggugacaauuuaaa

SEQ ID NO: 1206602 - RNA, 19 nt, Artificial Sequence
  Description of Artificial Sequence: Synthetic oligonucleotide
  Sense strand starting at position 111 of SEQ ID NO: 917075
uaauguggcuacuugaaca

SEQ ID NO: 1206603 - RNA, 19 nt, Artificial Sequence
  Description of Artificial Sequence: Synthetic oligonucleotide
  Antisense strand to SEQ ID NO: 1206602
uguucaaguagccacauua

SEQ ID NO: 1206604 - RNA, 19 nt, Artificial Sequence
  Description of Artificial Sequence: Synthetic oligonucleotide
  Sense strand starting at position 139 of SEQ ID NO: 917075
acauacguggcucacauua

SEQ ID NO: 1206605 - RNA, 19 nt, Artificial Sequence
  Description of Artificial Sequence: Synthetic oligonucleotide
  Antisense strand to SEQ ID NO: 1206604
uaaugugagccacguaugu

SEQ ID NO: 1206606 - RNA, 19 nt, Artificial Sequence
  Description of Artificial Sequence: Synthetic oligonucleotide
  Sense strand starting at position 241 of SEQ ID NO: 917075
gucuaaccauugcucugaa

SEQ ID NO: 1206607 - RNA, 19 nt, Artificial Sequence
  Description of Artificial Sequence: Synthetic oligonucleotide
  Antisense strand to SEQ ID NO: 1206606
uucagagcaaugguuagac

SEQ ID NO: 1206608 - RNA, 19 nt, Artificial Sequence
  Description of Artificial Sequence: Synthetic oligonucleotide
  Sense strand starting at position 264 of SEQ ID NO: 917075
ucaacuguugcccauugua

SEQ ID NO: 1206609 - RNA, 19 nt, Artificial Sequence
  Description of Artificial Sequence: Synthetic oligonucleotide
  Antisense strand to SEQ ID NO: 1206608
uacaaugggcaacaguuga

SEQ ID NO: 1206610 - RNA, 19 nt, Artificial Sequence
  Description of Artificial Sequence: Synthetic oligonucleotide
  Sense strand starting at position 267 of SEQ ID NO: 917075
acuguugcccauuguauuu

SEQ ID NO: 1206611 - RNA, 19 nt, Artificial Sequence
  Description of Artificial Sequence: Synthetic oligonucleotide
  Antisense strand to SEQ ID NO: 1206610
aaauacaaugggcaacagu

SEQ ID NO: 1206612 - RNA, 19 nt, Artificial Sequence
  Description of Artificial Sequence: Synthetic oligonucleotide
  Sense strand starting at position 295 of SEQ ID NO: 917075
ugggcuuuauuccauuuga

SEQ ID NO: 1206613 - RNA, 19 nt, Artificial Sequence
  Description of Artificial Sequence: Synthetic oligonucleotide
  Antisense strand to SEQ ID NO: 1206612
ucaaauggaauaaagccca

SEQ ID NO: 1206614 - RNA, 19 nt, Artificial Sequence
  Description of Artificial Sequence: Synthetic oligonucleotide
  Sense strand starting at position 391 of SEQ ID NO: 917075
aguugucaaucuuuaggaa

SEQ ID NO: 1206615 - RNA, 19 nt, Artificial Sequence
  Description of Artificial Sequence: Synthetic oligonucleotide
  Antisense strand to SEQ ID NO: 1206614
uuccuaaagauugacaacu

SEQ ID NO: 1206616 - RNA, 19 nt, Artificial Sequence
  Description of Artificial Sequence: Synthetic oligonucleotide
  Sense strand starting at position 392 of SEQ ID NO: 917075
guugucaaucuuuaggaaa

SEQ ID NO: 1206617 - RNA, 19 nt, Artificial Sequence
  Description of Artificial Sequence: Synthetic oligonucleotide
  Antisense strand to SEQ ID NO: 1206616
uuuccuaaagauugacaac

SEQ ID NO: 1206618 - RNA, 19 nt, Artificial Sequence
  Description of Artificial Sequence: Synthetic oligonucleotide
  Sense strand starting at position 561 of SEQ ID NO: 917075
gaauucuacggguaacacu

SEQ ID NO: 1206619 - RNA, 19 nt, Artificial Sequence
  Description of Artificial Sequence: Synthetic oligonucleotide
  Antisense strand to SEQ ID NO: 1206618
aguguuacccguagaauuc

SEQ ID NO: 1206620 - RNA, 19 nt, Artificial Sequence
  Description of Artificial Sequence: Synthetic oligonucleotide
  Sense strand starting at position 730 of SEQ ID NO: 917075
guaacaagccaucagcaau

SEQ ID NO: 1206621 - RNA, 19 nt, Artificial Sequence
  Description of Artificial Sequence: Synthetic oligonucleotide
  Antisense strand to SEQ ID NO: 1206620
auugcugauggcuuguuac

SEQ ID NO: 1206622 - RNA, 19 nt, Artificial Sequence
  Description of Artificial Sequence: Synthetic oligonucleotide
  Sense strand starting at position 764 of SEQ ID NO: 917075
caggaugaagcuugaacuu

SEQ ID NO: 1206623 - RNA, 19 nt, Artificial Sequence
  Description of Artificial Sequence: Synthetic oligonucleotide
  Antisense strand to SEQ ID NO: 1206622
aaguucaagcuucauccug

SEQ ID NO: 1206624 - RNA, 19 nt, Artificial Sequence
  Description of Artificial Sequence: Synthetic oligonucleotide
  Sense strand starting at position 776 of SEQ ID NO: 917075
ugaacuuggcugcaagauu

SEQ ID NO: 1206625 - RNA, 19 nt, Artificial Sequence
  Description of Artificial Sequence: Synthetic oligonucleotide
  Antisense strand to SEQ ID NO: 1206624
aaucuugcagccaaguuca

SEQ ID NO: 1206626 - RNA, 19 nt, Artificial Sequence
  Description of Artificial Sequence: Synthetic oligonucleotide
  Sense strand starting at position 784 of SEQ ID NO: 917075
gcugcaagauuaccaugaa

SEQ ID NO: 1206627 - RNA, 19 nt, Artificial Sequence
  Description of Artificial Sequence: Synthetic oligonucleotide
  Antisense strand to SEQ ID NO: 1206626
uucaugguaaucuugcagc

SEQ ID NO: 1206628 - RNA, 19 nt, Artificial Sequence
  Description of Artificial Sequence: Synthetic oligonucleotide
  Sense strand starting at position 787 of SEQ ID NO: 917075
gcaagauuaccaugaaguu

SEQ ID NO: 1206629 - RNA, 19 nt, Artificial Sequence
  Description of Artificial Sequence: Synthetic oligonucleotide
  Antisense strand to SEQ ID NO: 1206628
aacuucaugguaaucuugc

SEQ ID NO: 1206630 - RNA, 19 nt, Artificial Sequence
  Description of Artificial Sequence: Synthetic oligonucleotide
  Sense strand starting at position 830 of SEQ ID NO: 917075
ccuugaaccugcucugaaa

SEQ ID NO: 1206631 - RNA, 19 nt, Artificial Sequence
  Description of Artificial Sequence: Synthetic oligonucleotide
  Antisense strand to SEQ ID NO: 1206630
uuucagagcagguucaagg

SEQ ID NO: 1206632 - RNA, 19 nt, Artificial Sequence
  Description of Artificial Sequence: Synthetic oligonucleotide
  Sense strand starting at position 903 of SEQ ID NO: 917075
cggaaucaauucuaaaucu

SEQ ID NO: 1206633 - RNA, 19 nt, Artificial Sequence
  Description of Artificial Sequence: Synthetic oligonucleotide
  Antisense strand to SEQ ID NO: 1206632
agauuuagaauugauuccg

SEQ ID NO: 1206634 - RNA, 19 nt, Artificial Sequence
  Description of Artificial Sequence: Synthetic oligonucleotide
  Sense strand starting at position 1045 of SEQ ID NO: 917075
ugggcuggcuugagguaua

SEQ ID NO: 1206635 - RNA, 19 nt, Artificial Sequence
  Description of Artificial Sequence: Synthetic oligonucleotide
  Antisense strand to SEQ ID NO: 1206634
uauaccucaagccagccca

SEQ ID NO: 1206636 - RNA, 19 nt, Artificial Sequence
  Description of Artificial Sequence: Synthetic oligonucleotide
  Sense strand starting at position 1050 of SEQ ID NO: 917075
uggcuugagguauauccaa

SEQ ID NO: 1206637 - RNA, 19 nt, Artificial Sequence
  Description of Artificial Sequence: Synthetic oligonucleotide
  Antisense strand to SEQ ID NO: 1206636
uuggauauaccucaagcca

SEQ ID NO: 1206638 - RNA, 19 nt, Artificial Sequence
  Description of Artificial Sequence: Synthetic oligonucleotide
  Sense strand starting at position 1102 of SEQ ID NO: 917075
gauggcaguuaacaagaau

SEQ ID NO: 1206639 - RNA, 19 nt, Artificial Sequence
  Description of Artificial Sequence: Synthetic oligonucleotide
  Antisense strand to SEQ ID NO: 1206638
auucuuguuaacugccauc

SEQ ID NO: 1206640 - RNA, 19 nt, Artificial Sequence
  Description of Artificial Sequence: Synthetic oligonucleotide
  Sense strand starting at position 1138 of SEQ ID NO: 917075
ccaucaguguauccuaaau

SEQ ID NO: 1206641 - RNA, 19 nt, Artificial Sequence
  Description of Artificial Sequence: Synthetic oligonucleotide
  Antisense strand to SEQ ID NO: 1206640
auuuaggauacacugaugg

SEQ ID NO: 1206642 - RNA, 19 nt, Artificial Sequence
  Description of Artificial Sequence: Synthetic oligonucleotide
  Sense strand starting at position 1217 of SEQ ID NO: 917075
cuuaaucuccagugggaga

SEQ ID NO: 1206643 - RNA, 19 nt, Artificial Sequence
  Description of Artificial Sequence: Synthetic oligonucleotide
  Antisense strand to SEQ ID NO: 1206642
ucucccacuggagauuaag

SEQ ID NO: 1206644 - RNA, 19 nt, Artificial Sequence
  Description of Artificial Sequence: Synthetic oligonucleotide
  Sense strand starting at position 1308 of SEQ ID NO: 917075
cgaggaagguacuaggauu

SEQ ID NO: 1206645 - RNA, 19 nt, Artificial Sequence
  Description of Artificial Sequence: Synthetic oligonucleotide
  Antisense strand to SEQ ID NO: 1206644
aauccuaguaccuuccucg

SEQ ID NO: 1206646 - RNA, 19 nt, Artificial Sequence
  Description of Artificial Sequence: Synthetic oligonucleotide
  Sense strand starting at position 1316 of SEQ ID NO: 917075
guacuaggauuaucccauu

SEQ ID NO: 1206647 - RNA, 19 nt, Artificial Sequence
  Description of Artificial Sequence: Synthetic oligonucleotide
  Antisense strand to SEQ ID NO: 1206646
aaugggauaauccuaguac

SEQ ID NO: 1206648 - RNA, 19 nt, Artificial Sequence
  Description of Artificial Sequence: Synthetic oligonucleotide
  Sense strand starting at position 2373 of SEQ ID NO: 917075
gguguuggagagugguaga

SEQ ID NO: 1206649 - RNA, 19 nt, Artificial Sequence
  Description of Artificial Sequence: Synthetic oligonucleotide
  Antisense strand to SEQ ID NO: 1206648
ucuaccacucuccaacacc

SEQ ID NO: 1206650 - RNA, 19 nt, Artificial Sequence
  Description of Artificial Sequence: Synthetic oligonucleotide
  Sense strand starting at position 2588 of SEQ ID NO: 917075
agggaauacuggccgagaa

SEQ ID NO: 1206651 - RNA, 19 nt, Artificial Sequence
  Description of Artificial Sequence: Synthetic oligonucleotide
  Antisense strand to SEQ ID NO: 1206650
uucucggccaguauucccu

SEQ ID NO: 1206652 - RNA, 19 nt, Artificial Sequence
  Description of Artificial Sequence: Synthetic oligonucleotide
  Sense strand starting at position 2589 of SEQ ID NO: 917075
gggaauacuggccgagaag

SEQ ID NO: 1206653 - RNA, 19 nt, Artificial Sequence
  Description of Artificial Sequence: Synthetic oligonucleotide
  Antisense strand to SEQ ID NO: 1206652
cuucucggccaguauuccc

SEQ ID NO: 1206654 - RNA, 19 nt, Artificial Sequence
  Description of Artificial Sequence: Synthetic oligonucleotide
  Sense strand starting at position 2649 of SEQ ID NO: 917075
guggaaggaagguguaaua

SEQ ID NO: 1206655 - RNA, 19 nt, Artificial Sequence
  Description of Artificial Sequence: Synthetic oligonucleotide
  Antisense strand to SEQ ID NO: 1206654
uauuacaccuuccuuccac

SEQ ID NO: 1206656 - RNA, 19 nt, Artificial Sequence
  Description of Artificial Sequence: Synthetic oligonucleotide
  Sense strand starting at position 2741 of SEQ ID NO: 917075
acucaauggcuccgguaau

SEQ ID NO: 1206657 - RNA, 19 nt, Artificial Sequence
  Description of Artificial Sequence: Synthetic oligonucleotide
  Antisense strand to SEQ ID NO: 1206656
auuaccggagccauugagu

SEQ ID NO: 1206658 - RNA, 19 nt, Artificial Sequence
  Description of Artificial Sequence: Synthetic oligonucleotide
  Sense strand starting at position 2850 of SEQ ID NO: 917075
gcaggagcgauucggaaga

SEQ ID NO: 1206659 - RNA, 19 nt, Artificial Sequence
  Description of Artificial Sequence: Synthetic oligonucleotide
  Antisense strand to SEQ ID NO: 1206658
ucuuccgaaucgcuccugc

SEQ ID NO: 1206660 - RNA, 19 nt, Artificial Sequence
  Description of Artificial Sequence: Synthetic oligonucleotide
  Sense strand starting at position 2855 of SEQ ID NO: 917075
agcgauucggaagaagacu

SEQ ID NO: 1206661 - RNA, 19 nt, Artificial Sequence
  Description of Artificial Sequence: Synthetic oligonucleotide
  Antisense strand to SEQ ID NO: 1206660
agucuucuuccgaaucgcu

SEQ ID NO: 1206662 - RNA, 19 nt, Artificial Sequence
  Description of Artificial Sequence: Synthetic oligonucleotide
  Sense strand starting at position 2945 of SEQ ID NO: 917075
cccgcauagccucaagaaa

SEQ ID NO: 1206663 - RNA, 19 nt, Artificial Sequence
  Description of Artificial Sequence: Synthetic oligonucleotide
  Antisense strand to SEQ ID NO: 1206662
uuucuugaggcuaugcggg

SEQ ID NO: 1206664 - RNA, 19 nt, Artificial Sequence
  Description of Artificial Sequence: Synthetic oligonucleotide
  Sense strand starting at position 3014 of SEQ ID NO: 917075
ggagucaucauggaggcuu

SEQ ID NO: 1206665 - RNA, 19 nt, Artificial Sequence
  Description of Artificial Sequence: Synthetic oligonucleotide
  Antisense strand to SEQ ID NO: 1206664
aagccuccaugaugacucc

SEQ ID NO: 1206666 - RNA, 19 nt, Artificial Sequence
  Description of Artificial Sequence: Synthetic oligonucleotide
  Sense strand starting at position 3072 of SEQ ID NO: 917075
ccaguaguaucaguggcuu

SEQ ID NO: 1206667 - RNA, 19 nt, Artificial Sequence
  Description of Artificial Sequence: Synthetic oligonucleotide
  Antisense strand to SEQ ID NO: 1206666
aagccacugauacuacugg

SEQ ID NO: 1206668 - RNA, 19 nt, Artificial Sequence
  Description of Artificial Sequence: Synthetic oligonucleotide
  Sense strand starting at position 3092 of SEQ ID NO: 917075
gggauuucuuacugagcuc

SEQ ID NO: 1206669 - RNA, 19 nt, Artificial Sequence
  Description of Artificial Sequence: Synthetic oligonucleotide
  Antisense strand to SEQ ID NO: 1206668
gagcucaguaagaaauccc

SEQ ID NO: 1206670 - RNA, 19 nt, Artificial Sequence
  Description of Artificial Sequence: Synthetic oligonucleotide
  Sense strand starting at position 3606 of SEQ ID NO: 917075
ccauguuaacuuuagcaug

SEQ ID NO: 1206671 - RNA, 19 nt, Artificial Sequence
  Description of Artificial Sequence: Synthetic oligonucleotide
  Antisense strand to SEQ ID NO: 1206670
caugcuaaaguuaacaugg

SEQ ID NO: 1206672 - RNA, 19 nt, Artificial Sequence
  Description of Artificial Sequence: Synthetic oligonucleotide
  Sense strand starting at position 3754 of SEQ ID NO: 917075
gcucccauuuaaucgcuaa

SEQ ID NO: 1206673 - RNA, 19 nt, Artificial Sequence
  Description of Artificial Sequence: Synthetic oligonucleotide
  Antisense strand to SEQ ID NO: 1206672
uuagcgauuaaaugggagc

SEQ ID NO: 1206674 - RNA, 19 nt, Artificial Sequence
  Description of Artificial Sequence: Synthetic oligonucleotide
  Sense strand starting at position 3874 of SEQ ID NO: 917075
cuucgauuccuggagucuu

SEQ ID NO: 1206675 - RNA, 19 nt, Artificial Sequence
  Description of Artificial Sequence: Synthetic oligonucleotide
  Antisense strand to SEQ ID NO: 1206674
aagacuccaggaaucgaag

SEQ ID NO: 1206676 - RNA, 19 nt, Artificial Sequence
  Description of Artificial Sequence: Synthetic oligonucleotide
  Sense strand starting at position 3906 of SEQ ID NO: 917075
uuauguacacgucauggaa

SEQ ID NO: 1206677 - RNA, 19 nt, Artificial Sequence
  Description of Artificial Sequence: Synthetic oligonucleotide
  Antisense strand to SEQ ID NO: 1206676
uuccaugacguguacauaa

SEQ ID NO: 1206678 - RNA, 19 nt, Artificial Sequence
  Description of Artificial Sequence: Synthetic oligonucleotide
  Sense strand starting at position 37 of SEQ ID NO: 917076
cugccauguagucaaggau

SEQ ID NO: 1206679 - RNA, 19 nt, Artificial Sequence
  Description of Artificial Sequence: Synthetic oligonucleotide
  Antisense strand to SEQ ID NO: 1206678
auccuugacuacauggcag

SEQ ID NO: 1206680 - RNA, 19 nt, Artificial Sequence
  Description of Artificial Sequence: Synthetic oligonucleotide
  Sense strand starting at position 216 of SEQ ID NO: 917076
cucucagcccuguaaagua

SEQ ID NO: 1206681 - RNA, 19 nt, Artificial Sequence
  Description of Artificial Sequence: Synthetic oligonucleotide
  Antisense strand to SEQ ID NO: 1206680
uacuuuacagggcugagag

SEQ ID NO: 1206682 - RNA, 19 nt, Artificial Sequence
  Description of Artificial Sequence: Synthetic oligonucleotide
  Sense strand starting at position 281 of SEQ ID NO: 917076
gagggaagucacuggucaa

SEQ ID NO: 1206683 - RNA, 19 nt, Artificial Sequence
  Description of Artificial Sequence: Synthetic oligonucleotide
  Antisense strand to SEQ ID NO: 1206682
uugaccagugacuucccuc

SEQ ID NO: 1206684 - RNA, 19 nt, Artificial Sequence
  Description of Artificial Sequence: Synthetic oligonucleotide
  Sense strand starting at position 282 of SEQ ID NO: 917076
agggaagucacuggucaaa

SEQ ID NO: 1206685 - RNA, 19 nt, Artificial Sequence
  Description of Artificial Sequence: Synthetic oligonucleotide
  Antisense strand to SEQ ID NO: 1206684
uuugaccagugacuucccu

SEQ ID NO: 1206686 - RNA, 19 nt, Artificial Sequence
  Description of Artificial Sequence: Synthetic oligonucleotide
  Sense strand starting at position 284 of SEQ ID NO: 917076
ggaagucacuggucaaacu

SEQ ID NO: 1206687 - RNA, 19 nt, Artificial Sequence
  Description of Artificial Sequence: Synthetic oligonucleotide
  Antisense strand to SEQ ID NO: 1206686
aguuugaccagugacuucc

SEQ ID NO: 1206688 - RNA, 19 nt, Artificial Sequence
  Description of Artificial Sequence: Synthetic oligonucleotide
  Sense strand starting at position 285 of SEQ ID NO: 917076
gaagucacuggucaaacuu

SEQ ID NO: 1206689 - RNA, 19 nt, Artificial Sequence
  Description of Artificial Sequence: Synthetic oligonucleotide
  Antisense strand to SEQ ID NO: 1206688
aaguuugaccagugacuuc

SEQ ID NO: 1206690 - RNA, 19 nt, Artificial Sequence
  Description of Artificial Sequence: Synthetic oligonucleotide
  Sense strand starting at position 316 of SEQ ID NO: 917076
agaccuaggucucuuaaau

SEQ ID NO: 1206691 - RNA, 19 nt, Artificial Sequence
  Description of Artificial Sequence: Synthetic oligonucleotide
  Antisense strand to SEQ ID NO: 1206690
auuuaagagaccuaggucu

SEQ ID NO: 1206692 - RNA, 19 nt, Artificial Sequence
  Description of Artificial Sequence: Synthetic oligonucleotide
  Sense strand starting at position 393 of SEQ ID NO: 917076
gccauagagugucucaacu

SEQ ID NO: 1206693 - RNA, 19 nt, Artificial Sequence
  Description of Artificial Sequence: Synthetic oligonucleotide
  Antisense strand to SEQ ID NO: 1206692
aguugagacacucuauggc

SEQ ID NO: 1206694 - RNA, 19 nt, Artificial Sequence
  Description of Artificial Sequence: Synthetic oligonucleotide
  Sense strand starting at position 471 of SEQ ID NO: 917076
cccagagaggucuagugau

SEQ ID NO: 1206695 - RNA, 19 nt, Artificial Sequence
  Description of Artificial Sequence: Synthetic oligonucleotide
  Antisense strand to SEQ ID NO: 1206694
aucacuagaccucucuggg

SEQ ID NO: 1206696 - RNA, 19 nt, Artificial Sequence
  Description of Artificial Sequence: Synthetic oligonucleotide
  Sense strand starting at position 479 of SEQ ID NO: 917076
ggucuagugauuugcccaa

SEQ ID NO: 1206697 - RNA, 19 nt, Artificial Sequence
  Description of Artificial Sequence: Synthetic oligonucleotide
  Antisense strand to SEQ ID NO: 1206696
uugggcaaaucacuagacc

SEQ ID NO: 1206698 - RNA, 19 nt, Artificial Sequence
  Description of Artificial Sequence: Synthetic oligonucleotide
  Sense strand starting at position 629 of SEQ ID NO: 917076
gcucuaacuuggccugaga

SEQ ID NO: 1206699 - RNA, 19 nt, Artificial Sequence
  Description of Artificial Sequence: Synthetic oligonucleotide
  Antisense strand to SEQ ID NO: 1206698
ucucaggccaaguuagagc

SEQ ID NO: 1206700 - RNA, 19 nt, Artificial Sequence
  Description of Artificial Sequence: Synthetic oligonucleotide
  Sense strand starting at position 631 of SEQ ID NO: 917076
ucuaacuuggccugagauc

SEQ ID NO: 1206701 - RNA, 19 nt, Artificial Sequence
  Description of Artificial Sequence: Synthetic oligonucleotide
  Antisense strand to SEQ ID NO: 1206700
gaucucaggccaaguuaga

SEQ ID NO: 1206702 - RNA, 19 nt, Artificial Sequence
  Description of Artificial Sequence: Synthetic oligonucleotide
  Sense strand starting at position 798 of SEQ ID NO: 917076
aggugaucuccuuggagca

SEQ ID NO: 1206703 - RNA, 19 nt, Artificial Sequence
  Description of Artificial Sequence: Synthetic oligonucleotide
  Antisense strand to SEQ ID NO: 1206702
ugcuccaaggagaucaccu

SEQ ID NO: 1206704 - RNA, 19 nt, Artificial Sequence
  Description of Artificial Sequence: Synthetic oligonucleotide
  Sense strand starting at position 799 of SEQ ID NO: 917076
ggugaucuccuuggagcau

SEQ ID NO: 1206705 - RNA, 19 nt, Artificial Sequence
  Description of Artificial Sequence: Synthetic oligonucleotide
  Antisense strand to SEQ ID NO: 1206704
augcuccaaggagaucacc

SEQ ID NO: 1206706 - RNA, 19 nt, Artificial Sequence
  Description of Artificial Sequence: Synthetic oligonucleotide
  Sense strand starting at position 1108 of SEQ ID NO: 917076
ggaggugaguuggcucuuu

SEQ ID NO: 1206707 - RNA, 19 nt, Artificial Sequence
  Description of Artificial Sequence: Synthetic oligonucleotide
  Antisense strand to SEQ ID NO: 1206706
aaagagccaacucaccucc

SEQ ID NO: 1206708 - RNA, 19 nt, Artificial Sequence
  Description of Artificial Sequence: Synthetic oligonucleotide
  Sense strand starting at position 1113 of SEQ ID NO: 917076
ugaguuggcucuuuccaag

SEQ ID NO: 1206709 - RNA, 19 nt, Artificial Sequence
  Description of Artificial Sequence: Synthetic oligonucleotide
  Antisense strand to SEQ ID NO: 1206708
cuuggaaagagccaacuca

SEQ ID NO: 1206710 - RNA, 19 nt, Artificial Sequence
  Description of Artificial Sequence: Synthetic oligonucleotide
  Sense strand starting at position 1119 of SEQ ID NO: 917076
ggcucuuuccaagauaccu

SEQ ID NO: 1206711 - RNA, 19 nt, Artificial Sequence
  Description of Artificial Sequence: Synthetic oligonucleotide
  Antisense strand to SEQ ID NO: 1206710
agguaucuuggaaagagcc

SEQ ID NO: 1206712 - RNA, 19 nt, Artificial Sequence
  Description of Artificial Sequence: Synthetic oligonucleotide
  Sense strand starting at position 1163 of SEQ ID NO: 917076
aggcgauuuggcugaguug

SEQ ID NO: 1206713 - RNA, 19 nt, Artificial Sequence
  Description of Artificial Sequence: Synthetic oligonucleotide
  Antisense strand to SEQ ID NO: 1206712
caacucagccaaaucgccu

SEQ ID NO: 1206714 - RNA, 19 nt, Artificial Sequence
  Description of Artificial Sequence: Synthetic oligonucleotide
  Sense strand starting at position 1324 of SEQ ID NO: 917076
ggcuguuggcaucagauga

SEQ ID NO: 1206715 - RNA, 19 nt, Artificial Sequence
  Description of Artificial Sequence: Synthetic oligonucleotide
  Antisense strand to SEQ ID NO: 1206714
ucaucugaugccaacagcc

SEQ ID NO: 1206716 - RNA, 19 nt, Artificial Sequence
  Description of Artificial Sequence: Synthetic oligonucleotide
  Sense strand starting at position 1603 of SEQ ID NO: 917076
gagagaaaguuugucaucu

SEQ ID NO: 1206717 - RNA, 19 nt, Artificial Sequence
  Description of Artificial Sequence: Synthetic oligonucleotide
  Antisense strand to SEQ ID NO: 1206716
agaugacaaacuuucucuc

SEQ ID NO: 1206718 - RNA, 19 nt, Artificial Sequence
  Description of Artificial Sequence: Synthetic oligonucleotide
  Sense strand starting at position 1604 of SEQ ID NO: 917076
agagaaaguuugucaucua

SEQ ID NO: 1206719 - RNA, 19 nt, Artificial Sequence
  Description of Artificial Sequence: Synthetic oligonucleotide
  Antisense strand to SEQ ID NO: 1206718
uagaugacaaacuuucucu

SEQ ID NO: 1206720 - RNA, 19 nt, Artificial Sequence
  Description of Artificial Sequence: Synthetic oligonucleotide
  Sense strand starting at position 2642 of SEQ ID NO: 917076
accauagggucgcuggaaa

SEQ ID NO: 1206721 - RNA, 19 nt, Artificial Sequence
  Description of Artificial Sequence: Synthetic oligonucleotide
  Antisense strand to SEQ ID NO: 1206720
uuuccagcgacccuauggu

SEQ ID NO: 1206722 - RNA, 19 nt, Artificial Sequence
  Description of Artificial Sequence: Synthetic oligonucleotide
  Sense strand starting at position 2748 of SEQ ID NO: 917076
acuguugucgaccaagaag

SEQ ID NO: 1206723 - RNA, 19 nt, Artificial Sequence
  Description of Artificial Sequence: Synthetic oligonucleotide
  Antisense strand to SEQ ID NO: 1206722
cuucuuggucgacaacagu

SEQ ID NO: 1206724 - RNA, 19 nt, Artificial Sequence
  Description of Artificial Sequence: Synthetic oligonucleotide
  Sense strand starting at position 2822 of SEQ ID NO: 917076
ugguauuuaguuuguaguu

SEQ ID NO: 1206725 - RNA, 19 nt, Artificial Sequence
  Description of Artificial Sequence: Synthetic oligonucleotide
  Antisense strand to SEQ ID NO: 1206724
aacuacaaacuaaauacca

SEQ ID NO: 1206726 - RNA, 19 nt, Artificial Sequence
  Description of Artificial Sequence: Synthetic oligonucleotide
  Sense strand starting at position 2823 of SEQ ID NO: 917076
gguauuuaguuuguaguuu

SEQ ID NO: 1206727 - RNA, 19 nt, Artificial Sequence
  Description of Artificial Sequence: Synthetic oligonucleotide
  Antisense strand to SEQ ID NO: 1206726
aaacuacaaacuaaauacc

SEQ ID NO: 1206728 - RNA, 19 nt, Artificial Sequence
  Description of Artificial Sequence: Synthetic oligonucleotide
  Sense strand starting at position 2862 of SEQ ID NO: 917076
cuguguaaccucuggguga

SEQ ID NO: 1206729 - RNA, 19 nt, Artificial Sequence
  Description of Artificial Sequence: Synthetic oligonucleotide
  Antisense strand to SEQ ID NO: 1206728
ucacccagagguuacacag

SEQ ID NO: 1206730 - RNA, 19 nt, Artificial Sequence
  Description of Artificial Sequence: Synthetic oligonucleotide
  Sense strand starting at position 2864 of SEQ ID NO: 917076
guguaaccucugggugauc

SEQ ID NO: 1206731 - RNA, 19 nt, Artificial Sequence
  Description of Artificial Sequence: Synthetic oligonucleotide
  Antisense strand to SEQ ID NO: 1206730
gaucacccagagguuacac

SEQ ID NO: 1206732 - RNA, 19 nt, Artificial Sequence
  Description of Artificial Sequence: Synthetic oligonucleotide
  Sense strand starting at position 2981 of SEQ ID NO: 917076
caguaaugcccguagucaa

SEQ ID NO: 1206733 - RNA, 19 nt, Artificial Sequence
  Description of Artificial Sequence: Synthetic oligonucleotide
  Antisense strand to SEQ ID NO: 1206732
uugacuacgggcauuacug

SEQ ID NO: 1206734 - RNA, 19 nt, Artificial Sequence
  Description of Artificial Sequence: Synthetic oligonucleotide
  Sense strand starting at position 3106 of SEQ ID NO: 917076
gguguuugugacaagucgu

SEQ ID NO: 1206735 - RNA, 19 nt, Artificial Sequence
  Description of Artificial Sequence: Synthetic oligonucleotide
  Antisense strand to SEQ ID NO: 1206734
acgacuugucacaaacacc

SEQ ID NO: 1206736 - RNA, 19 nt, Artificial Sequence
  Description of Artificial Sequence: Synthetic oligonucleotide
  Sense strand starting at position 3109 of SEQ ID NO: 917076
guuugugacaagucguugu

SEQ ID NO: 1206737 - RNA, 19 nt, Artificial Sequence
  Description of Artificial Sequence: Synthetic oligonucleotide
  Antisense strand to SEQ ID NO: 1206736
acaacgacuugucacaaac

SEQ ID NO: 1206738 - RNA, 19 nt, Artificial Sequence
  Description of Artificial Sequence: Synthetic oligonucleotide
  Sense strand starting at position 3120 of SEQ ID NO: 917076
gucguuguacuguacauuu

SEQ ID NO: 1206739 - RNA, 19 nt, Artificial Sequence
  Description of Artificial Sequence: Synthetic oligonucleotide
  Antisense strand to SEQ ID NO: 1206738
aaauguacaguacaacgac

SEQ ID NO: 1206740 - RNA, 19 nt, Artificial Sequence
  Description of Artificial Sequence: Synthetic oligonucleotide
  Sense strand starting at position 3154 of SEQ ID NO: 917076
uucuguacauggguuaaau

SEQ ID NO: 1206741 - RNA, 19 nt, Artificial Sequence
  Description of Artificial Sequence: Synthetic oligonucleotide
  Antisense strand to SEQ ID NO: 1206740
auuuaacccauguacagaa

SEQ ID NO: 1206742 - RNA, 19 nt, Artificial Sequence
  Description of Artificial Sequence: Synthetic oligonucleotide
  Sense strand starting at position 3156 of SEQ ID NO: 917076
cuguacauggguuaaaucu

SEQ ID NO: 1206743 - RNA, 19 nt, Artificial Sequence
  Description of Artificial Sequence: Synthetic oligonucleotide
  Antisense strand to SEQ ID NO: 1206742
agauuuaacccauguacag

SEQ ID NO: 1206744 - RNA, 19 nt, Artificial Sequence
  Description of Artificial Sequence: Synthetic oligonucleotide
  Sense strand starting at position 3220 of SEQ ID NO: 917076
gagagaccauucuugagca

SEQ ID NO: 1206745 - RNA, 19 nt, Artificial Sequence
  Description of Artificial Sequence: Synthetic oligonucleotide
  Antisense strand to SEQ ID NO: 1206744
ugcucaagaauggucucuc

SEQ ID NO: 1206746 - RNA, 19 nt, Artificial Sequence
  Description of Artificial Sequence: Synthetic oligonucleotide
  Sense strand starting at position 3356 of SEQ ID NO: 917076
accuacuggauaggugaua

SEQ ID NO: 1206747 - RNA, 19 nt, Artificial Sequence
  Description of Artificial Sequence: Synthetic oligonucleotide
  Antisense strand to SEQ ID NO: 1206746
uaucaccuauccaguaggu

SEQ ID NO: 1206748 - RNA, 19 nt, Artificial Sequence
  Description of Artificial Sequence: Synthetic oligonucleotide
  Sense strand starting at position 3442 of SEQ ID NO: 917076
gcugguacugaucacauau

SEQ ID NO: 1206749 - RNA, 19 nt, Artificial Sequence
  Description of Artificial Sequence: Synthetic oligonucleotide
  Antisense strand to SEQ ID NO: 1206748
auaugugaucaguaccagc

SEQ ID NO: 1206750 - RNA, 19 nt, Artificial Sequence
  Description of Artificial Sequence: Synthetic oligonucleotide
  Sense strand starting at position 3466 of SEQ ID NO: 917076
aguauuauauaugucccau

SEQ ID NO: 1206751 - RNA, 19 nt, Artificial Sequence
  Description of Artificial Sequence: Synthetic oligonucleotide
  Antisense strand to SEQ ID NO: 1206750
augggacauauauaauacu

SEQ ID NO: 1206752 - RNA, 19 nt, Artificial Sequence
  Description of Artificial Sequence: Synthetic oligonucleotide
  Sense strand starting at position 3472 of SEQ ID NO: 917076
auauaugucccauaguaag

SEQ ID NO: 1206753 - RNA, 19 nt, Artificial Sequence
  Description of Artificial Sequence: Synthetic oligonucleotide
  Antisense strand to SEQ ID NO: 1206752
cuuacuaugggacauauau

SEQ ID NO: 1206754 - RNA, 19 nt, Artificial Sequence
  Description of Artificial Sequence: Synthetic oligonucleotide
  Sense strand starting at position 3649 of SEQ ID NO: 917076
auaauuggauguccuuuau

SEQ ID NO: 1206755 - RNA, 19 nt, Artificial Sequence
  Description of Artificial Sequence: Synthetic oligonucleotide
  Antisense strand to SEQ ID NO: 1206754
auaaaggacauccaauuau

SEQ ID NO: 1206756 - RNA, 19 nt, Artificial Sequence
  Description of Artificial Sequence: Synthetic oligonucleotide
  Sense strand starting at position 3826 of SEQ ID NO: 917076
ggguguucccagcagcaca

SEQ ID NO: 1206757 - RNA, 19 nt, Artificial Sequence
  Description of Artificial Sequence: Synthetic oligonucleotide
  Antisense strand to SEQ ID NO: 1206756
ugugcugcugggaacaccc

SEQ ID NO: 1206758 - RNA, 19 nt, Artificial Sequence
  Description of Artificial Sequence: Synthetic oligonucleotide
  Sense strand starting at position 294 of SEQ ID NO: 917077
agugcuuaagcuuggucaa

SEQ ID NO: 1206759 - RNA, 19 nt, Artificial Sequence
  Description of Artificial Sequence: Synthetic oligonucleotide
  Antisense strand to SEQ ID NO: 1206758
uugaccaagcuuaagcacu

SEQ ID NO: 1206760 - RNA, 19 nt, Artificial Sequence
  Description of Artificial Sequence: Synthetic oligonucleotide
  Sense strand starting at position 318 of SEQ ID NO: 917077
ucugaagcuaucgggagaa

SEQ ID NO: 1206761 - RNA, 19 nt, Artificial Sequence
  Description of Artificial Sequence: Synthetic oligonucleotide
  Antisense strand to SEQ ID NO: 1206760
uucucccgauagcuucaga

SEQ ID NO: 1206762 - RNA, 19 nt, Artificial Sequence
  Description of Artificial Sequence: Synthetic oligonucleotide
  Sense strand starting at position 958 of SEQ ID NO: 917077
gcugacaagucgguuuaau

SEQ ID NO: 1206763 - RNA, 19 nt, Artificial Sequence
  Description of Artificial Sequence: Synthetic oligonucleotide
  Antisense strand to SEQ ID NO: 1206762
auuaaaccgacuugucagc

SEQ ID NO: 1206764 - RNA, 19 nt, Artificial Sequence
  Description of Artificial Sequence: Synthetic oligonucleotide
  Sense strand starting at position 1089 of SEQ ID NO: 917077
ugaggaagguuugagaaga

SEQ ID NO: 1206765 - RNA, 19 nt, Artificial Sequence
  Description of Artificial Sequence: Synthetic oligonucleotide
  Antisense strand to SEQ ID NO: 1206764
ucuucucaaaccuuccuca

SEQ ID NO: 1206766 - RNA, 19 nt, Artificial Sequence
  Description of Artificial Sequence: Synthetic oligonucleotide
  Sense strand starting at position 1125 of SEQ ID NO: 917077
ggccaauuacugcacagaa

SEQ ID NO: 1206767 - RNA, 19 nt, Artificial Sequence
  Description of Artificial Sequence: Synthetic oligonucleotide
  Antisense strand to SEQ ID NO: 1206766
uucugugcaguaauuggcc

SEQ ID NO: 1206768 - RNA, 19 nt, Artificial Sequence
  Description of Artificial Sequence: Synthetic oligonucleotide
  Sense strand starting at position 1186 of SEQ ID NO: 917077
guuugaggucuccacaguu

SEQ ID NO: 1206769 - RNA, 19 nt, Artificial Sequence
  Description of Artificial Sequence: Synthetic oligonucleotide
  Antisense strand to SEQ ID NO: 1206768
aacuguggagaccucaaac

SEQ ID NO: 1206770 - RNA, 19 nt, Artificial Sequence
  Description of Artificial Sequence: Synthetic oligonucleotide
  Sense strand starting at position 1203 of SEQ ID NO: 917077
uugauaacgcuacaacgau

SEQ ID NO: 1206771 - RNA, 19 nt, Artificial Sequence
  Description of Artificial Sequence: Synthetic oligonucleotide
  Antisense strand to SEQ ID NO: 1206770
aucguuguagcguuaucaa

SEQ ID NO: 1206772 - RNA, 19 nt, Artificial Sequence
  Description of Artificial Sequence: Synthetic oligonucleotide
  Sense strand starting at position 1209 of SEQ ID NO: 917077
acgcuacaacgaugacuaa

SEQ ID NO: 1206773 - RNA, 19 nt, Artificial Sequence
  Description of Artificial Sequence: Synthetic oligonucleotide
  Antisense strand to SEQ ID NO: 1206772
uuagucaucguuguagcgu

SEQ ID NO: 1206774 - RNA, 19 nt, Artificial Sequence
  Description of Artificial Sequence: Synthetic oligonucleotide
  Sense strand starting at position 1316 of SEQ ID NO: 917077
uggcaauucgggugaugaa

SEQ ID NO: 1206775 - RNA, 19 nt, Artificial Sequence
  Description of Artificial Sequence: Synthetic oligonucleotide
  Antisense strand to SEQ ID NO: 1206774
uucaucacccgaauugcca

SEQ ID NO: 1206776 - RNA, 19 nt, Artificial Sequence
  Description of Artificial Sequence: Synthetic oligonucleotide
  Sense strand starting at position 1317 of SEQ ID NO: 917077
ggcaauucgggugaugaaa

SEQ ID NO: 1206777 - RNA, 19 nt, Artificial Sequence
  Description of Artificial Sequence: Synthetic oligonucleotide
  Antisense strand to SEQ ID NO: 1206776
uuucaucacccgaauugcc

SEQ ID NO: 1206778 - RNA, 19 nt, Artificial Sequence
  Description of Artificial Sequence: Synthetic oligonucleotide
  Sense strand starting at position 2235 of SEQ ID NO: 917077
gcuucuaguaguugagagu

SEQ ID NO: 1206779 - RNA, 19 nt, Artificial Sequence
  Description of Artificial Sequence: Synthetic oligonucleotide
  Antisense strand to SEQ ID NO: 1206778
acucucaacuacuagaagc

SEQ ID NO: 1206780 - RNA, 19 nt, Artificial Sequence
  Description of Artificial Sequence: Synthetic oligonucleotide
  Sense strand starting at position 2236 of SEQ ID NO: 917077
cuucuaguaguugagagua

SEQ ID NO: 1206781 - RNA, 19 nt, Artificial Sequence
  Description of Artificial Sequence: Synthetic oligonucleotide
  Antisense strand to SEQ ID NO: 1206780
uacucucaacuacuagaag

SEQ ID NO: 1206782 - RNA, 19 nt, Artificial Sequence
  Description of Artificial Sequence: Synthetic oligonucleotide
  Sense strand starting at position 2241 of SEQ ID NO: 917077
aguaguugagaguacggau

SEQ ID NO: 1206783 - RNA, 19 nt, Artificial Sequence
  Description of Artificial Sequence: Synthetic oligonucleotide
  Antisense strand to SEQ ID NO: 1206782
auccguacucucaacuacu

SEQ ID NO: 1206784 - RNA, 19 nt, Artificial Sequence
  Description of Artificial Sequence: Synthetic oligonucleotide
  Sense strand starting at position 2267 of SEQ ID NO: 917077
ucaggaugacgugguucua

SEQ ID NO: 1206785 - RNA, 19 nt, Artificial Sequence
  Description of Artificial Sequence: Synthetic oligonucleotide
  Antisense strand to SEQ ID NO: 1206784
uagaaccacgucauccuga

SEQ ID NO: 1206786 - RNA, 19 nt, Artificial Sequence
  Description of Artificial Sequence: Synthetic oligonucleotide
  Sense strand starting at position 2278 of SEQ ID NO: 917077
ugguucuaaccacguguga

SEQ ID NO: 1206787 - RNA, 19 nt, Artificial Sequence
  Description of Artificial Sequence: Synthetic oligonucleotide
  Antisense strand to SEQ ID NO: 1206786
ucacacgugguuagaacca

SEQ ID NO: 1206788 - RNA, 19 nt, Artificial Sequence
  Description of Artificial Sequence: Synthetic oligonucleotide
  Sense strand starting at position 2333 of SEQ ID NO: 917077
cgaguacagcaguguaaag

SEQ ID NO: 1206789 - RNA, 19 nt, Artificial Sequence
  Description of Artificial Sequence: Synthetic oligonucleotide
  Antisense strand to SEQ ID NO: 1206788
cuuuacacugcuguacucg

SEQ ID NO: 1206790 - RNA, 19 nt, Artificial Sequence
  Description of Artificial Sequence: Synthetic oligonucleotide
  Sense strand starting at position 2343 of SEQ ID NO: 917077
aguguaaagcucugaugag

SEQ ID NO: 1206791 - RNA, 19 nt, Artificial Sequence
  Description of Artificial Sequence: Synthetic oligonucleotide
  Antisense strand to SEQ ID NO: 1206790
cucaucagagcuuuacacu

SEQ ID NO: 1206792 - RNA, 19 nt, Artificial Sequence
  Description of Artificial Sequence: Synthetic oligonucleotide
  Sense strand starting at position 2754 of SEQ ID NO: 917077
guccuacucacgggaucuu

SEQ ID NO: 1206793 - RNA, 19 nt, Artificial Sequence
  Description of Artificial Sequence: Synthetic oligonucleotide
  Antisense strand to SEQ ID NO: 1206792
aagaucccgugaguaggac

SEQ ID NO: 1206794 - RNA, 19 nt, Artificial Sequence
  Description of Artificial Sequence: Synthetic oligonucleotide
  Sense strand starting at position 2765 of SEQ ID NO: 917077
gggaucuuucgaugcuacu

SEQ ID NO: 1206795 - RNA, 19 nt, Artificial Sequence
  Description of Artificial Sequence: Synthetic oligonucleotide
  Antisense strand to SEQ ID NO: 1206794
aguagcaucgaaagauccc

SEQ ID NO: 1206796 - RNA, 19 nt, Artificial Sequence
  Description of Artificial Sequence: Synthetic oligonucleotide
  Sense strand starting at position 2903 of SEQ ID NO: 917077
ggcacuuuacuuuagucua

SEQ ID NO: 1206797 - RNA, 19 nt, Artificial Sequence
  Description of Artificial Sequence: Synthetic oligonucleotide
  Antisense strand to SEQ ID NO: 1206796
uagacuaaaguaaagugcc

SEQ ID NO: 1206798 - RNA, 19 nt, Artificial Sequence
  Description of Artificial Sequence: Synthetic oligonucleotide
  Sense strand starting at position 2984 of SEQ ID NO: 917077
uucugugagguuugaguua

SEQ ID NO: 1206799 - RNA, 19 nt, Artificial Sequence
  Description of Artificial Sequence: Synthetic oligonucleotide
  Antisense strand to SEQ ID NO: 1206798
uaacucaaaccucacagaa

SEQ ID NO: 1206800 - RNA, 19 nt, Artificial Sequence
  Description of Artificial Sequence: Synthetic oligonucleotide
  Sense strand starting at position 2996 of SEQ ID NO: 917077
ugaguuaauacauguguuu

SEQ ID NO: 1206801 - RNA, 19 nt, Artificial Sequence
  Description of Artificial Sequence: Synthetic oligonucleotide
  Antisense strand to SEQ ID NO: 1206800
aaacacauguauuaacuca

SEQ ID NO: 1206802 - RNA, 19 nt, Artificial Sequence
  Description of Artificial Sequence: Synthetic oligonucleotide
  Sense strand starting at position 2998 of SEQ ID NO: 917077
aguuaauacauguguuuga

SEQ ID NO: 1206803 - RNA, 19 nt, Artificial Sequence
  Description of Artificial Sequence: Synthetic oligonucleotide
  Antisense strand to SEQ ID NO: 1206802
ucaaacacauguauuaacu

SEQ ID NO: 1206804 - RNA, 19 nt, Artificial Sequence
  Description of Artificial Sequence: Synthetic oligonucleotide
  Sense strand starting at position 3118 of SEQ ID NO: 917077
gaggaaugguaagagcaua

SEQ ID NO: 1206805 - RNA, 19 nt, Artificial Sequence
  Description of Artificial Sequence: Synthetic oligonucleotide
  Antisense strand to SEQ ID NO: 1206804
uaugcucuuaccauuccuc

SEQ ID NO: 1206806 - RNA, 19 nt, Artificial Sequence
  Description of Artificial Sequence: Synthetic oligonucleotide
  Sense strand starting at position 3170 of SEQ ID NO: 917077
uuagcuguccaagacacua

SEQ ID NO: 1206807 - RNA, 19 nt, Artificial Sequence
  Description of Artificial Sequence: Synthetic oligonucleotide
  Antisense strand to SEQ ID NO: 1206806
uagugucuuggacagcuaa

SEQ ID NO: 1206808 - RNA, 19 nt, Artificial Sequence
  Description of Artificial Sequence: Synthetic oligonucleotide
  Sense strand starting at position 3275 of SEQ ID NO: 917077
acaagaugucgcuaaagga

SEQ ID NO: 1206809 - RNA, 19 nt, Artificial Sequence
  Description of Artificial Sequence: Synthetic oligonucleotide
  Antisense strand to SEQ ID NO: 1206808
uccuuuagcgacaucuugu

SEQ ID NO: 1206810 - RNA, 19 nt, Artificial Sequence
  Description of Artificial Sequence: Synthetic oligonucleotide
  Sense strand starting at position 3562 of SEQ ID NO: 917077
aaguguuggaauuacgagu

SEQ ID NO: 1206811 - RNA, 19 nt, Artificial Sequence
  Description of Artificial Sequence: Synthetic oligonucleotide
  Antisense strand to SEQ ID NO: 1206810
acucguaauuccaacacuu

SEQ ID NO: 1206812 - RNA, 19 nt, Artificial Sequence
  Description of Artificial Sequence: Synthetic oligonucleotide
  Sense strand starting at position 3568 of SEQ ID NO: 917077
uggaauuacgagugugagu

SEQ ID NO: 1206813 - RNA, 19 nt, Artificial Sequence
  Description of Artificial Sequence: Synthetic oligonucleotide
  Antisense strand to SEQ ID NO: 1206812
acucacacucguaauucca

SEQ ID NO: 1206814 - RNA, 19 nt, Artificial Sequence
  Description of Artificial Sequence: Synthetic oligonucleotide
  Sense strand starting at position 3626 of SEQ ID NO: 917077
uuggcuucccaacgaaaua

SEQ ID NO: 1206815 - RNA, 19 nt, Artificial Sequence
  Description of Artificial Sequence: Synthetic oligonucleotide
  Antisense strand to SEQ ID NO: 1206814
uauuucguugggaagccaa

SEQ ID NO: 1206816 - RNA, 19 nt, Artificial Sequence
  Description of Artificial Sequence: Synthetic oligonucleotide
  Sense strand starting at position 3638 of SEQ ID NO: 917077
cgaaauagguucuuuguug

SEQ ID NO: 1206817 - RNA, 19 nt, Artificial Sequence
  Description of Artificial Sequence: Synthetic oligonucleotide
  Antisense strand to SEQ ID NO: 1206816
caacaaagaaccuauuucg

SEQ ID NO: 1206818 - RNA, 19 nt, Artificial Sequence
  Description of Artificial Sequence: Synthetic oligonucleotide
  Sense strand starting at position 3639 of SEQ ID NO: 917077
gaaauagguucuuuguugu

SEQ ID NO: 1206819 - RNA, 19 nt, Artificial Sequence
  Description of Artificial Sequence: Synthetic oligonucleotide
  Antisense strand to SEQ ID NO: 1206818
acaacaaagaaccuauuuc

SEQ ID NO: 1206820 - RNA, 19 nt, Artificial Sequence
  Description of Artificial Sequence: Synthetic oligonucleotide
  Sense strand starting at position 3653 of SEQ ID NO: 917077
guuguucuggcauacaaau

SEQ ID NO: 1206821 - RNA, 19 nt, Artificial Sequence
  Description of Artificial Sequence: Synthetic oligonucleotide
  Antisense strand to SEQ ID NO: 1206820
auuuguaugccagaacaac

SEQ ID NO: 1206822 - RNA, 19 nt, Artificial Sequence
  Description of Artificial Sequence: Synthetic oligonucleotide
  Sense strand starting at position 3684 of SEQ ID NO: 917077
guaauccuugcaugcauua

SEQ ID NO: 1206823 - RNA, 19 nt, Artificial Sequence
  Description of Artificial Sequence: Synthetic oligonucleotide
  Antisense strand to SEQ ID NO: 1206822
uaaugcaugcaaggauuac

SEQ ID NO: 1206824 - RNA, 19 nt, Artificial Sequence
  Description of Artificial Sequence: Synthetic oligonucleotide
  Sense strand starting at position 3696 of SEQ ID NO: 917077
ugcauuauguuucuacuau

SEQ ID NO: 1206825 - RNA, 19 nt, Artificial Sequence
  Description of Artificial Sequence: Synthetic oligonucleotide
  Antisense strand to SEQ ID NO: 1206824
auaguagaaacauaaugca

SEQ ID NO: 1206826 - RNA, 19 nt, Artificial Sequence
  Description of Artificial Sequence: Synthetic oligonucleotide
  Sense strand starting at position 3783 of SEQ ID NO: 917077
aagucaugguauucucaag

SEQ ID NO: 1206827 - RNA, 19 nt, Artificial Sequence
  Description of Artificial Sequence: Synthetic oligonucleotide
  Antisense strand to SEQ ID NO: 1206826
cuugagaauaccaugacuu

SEQ ID NO: 1206828 - RNA, 19 nt, Artificial Sequence
  Description of Artificial Sequence: Synthetic oligonucleotide
  Sense strand starting at position 3962 of SEQ ID NO: 917077
acuguaagagcuggauuga

SEQ ID NO: 1206829 - RNA, 19 nt, Artificial Sequence
  Description of Artificial Sequence: Synthetic oligonucleotide
  Antisense strand to SEQ ID NO: 1206828
ucaauccagcucuuacagu

SEQ ID NO: 1206830 - RNA, 19 nt, Artificial Sequence
  Description of Artificial Sequence: Synthetic oligonucleotide
  Sense strand starting at position 3963 of SEQ ID NO: 917077
cuguaagagcuggauugau

SEQ ID NO: 1206831 - RNA, 19 nt, Artificial Sequence
  Description of Artificial Sequence: Synthetic oligonucleotide
  Antisense strand to SEQ ID NO: 1206830
aucaauccagcucuuacag

SEQ ID NO: 1206832 - RNA, 19 nt, Artificial Sequence
  Description of Artificial Sequence: Synthetic oligonucleotide
  Sense strand starting at position 3971 of SEQ ID NO: 917077
gcuggauugauggguggaa

SEQ ID NO: 1206833 - RNA, 19 nt, Artificial Sequence
  Description of Artificial Sequence: Synthetic oligonucleotide
  Antisense strand to SEQ ID NO: 1206832
uuccacccaucaauccagc

SEQ ID NO: 1206834 - RNA, 19 nt, Artificial Sequence
  Description of Artificial Sequence: Synthetic oligonucleotide
  Sense strand starting at position 3972 of SEQ ID NO: 917077
cuggauugauggguggaau

SEQ ID NO: 1206835 - RNA, 19 nt, Artificial Sequence
  Description of Artificial Sequence: Synthetic oligonucleotide
  Antisense strand to SEQ ID NO: 1206834
auuccacccaucaauccag

SEQ ID NO: 1206836 - RNA, 19 nt, Artificial Sequence
  Description of Artificial Sequence: Synthetic oligonucleotide
  Sense strand starting at position 3973 of SEQ ID NO: 917077
uggauugauggguggaauc

SEQ ID NO: 1206837 - RNA, 19 nt, Artificial Sequence
  Description of Artificial Sequence: Synthetic oligonucleotide
  Antisense strand to SEQ ID NO: 1206836
gauuccacccaucaaucca

SEQ ID NO: 1206838 - RNA, 19 nt, Artificial Sequence
  Description of Artificial Sequence: Synthetic oligonucleotide
  Sense strand starting at position 648 of SEQ ID NO: 917078
uuugaacugugacugacua

SEQ ID NO: 1206839 - RNA, 19 nt, Artificial Sequence
  Description of Artificial Sequence: Synthetic oligonucleotide
  Antisense strand to SEQ ID NO: 1206838
uagucagucacaguucaaa

SEQ ID NO: 1206840 - RNA, 19 nt, Artificial Sequence
  Description of Artificial Sequence: Synthetic oligonucleotide
  Sense strand starting at position 656 of SEQ ID NO: 917078
gugacugacuagcuaugaa

SEQ ID NO: 1206841 - RNA, 19 nt, Artificial Sequence
  Description of Artificial Sequence: Synthetic oligonucleotide
  Antisense strand to SEQ ID NO: 1206840
uucauagcuagucagucac

SEQ ID NO: 1206842 - RNA, 19 nt, Artificial Sequence
  Description of Artificial Sequence: Synthetic oligonucleotide
  Sense strand starting at position 659 of SEQ ID NO: 917078
acugacuagcuaugaaaua

SEQ ID NO: 1206843 - RNA, 19 nt, Artificial Sequence
  Description of Artificial Sequence: Synthetic oligonucleotide
  Antisense strand to SEQ ID NO: 1206842
uauuucauagcuagucagu

SEQ ID NO: 1206844 - RNA, 19 nt, Artificial Sequence
  Description of Artificial Sequence: Synthetic oligonucleotide
  Sense strand starting at position 678 of SEQ ID NO: 917078
guaaccuugcuuugggaca

SEQ ID NO: 1206845 - RNA, 19 nt, Artificial Sequence
  Description of Artificial Sequence: Synthetic oligonucleotide
  Antisense strand to SEQ ID NO: 1206844
ugucccaaagcaagguuac

SEQ ID NO: 1206846 - RNA, 19 nt, Artificial Sequence
  Description of Artificial Sequence: Synthetic oligonucleotide
  Sense strand starting at position 689 of SEQ ID NO: 917078
uugggacaaguauguuuaa

SEQ ID NO: 1206847 - RNA, 19 nt, Artificial Sequence
  Description of Artificial Sequence: Synthetic oligonucleotide
  Antisense strand to SEQ ID NO: 1206846
uuaaacauacuugucccaa

SEQ ID NO: 1206848 - RNA, 19 nt, Artificial Sequence
  Description of Artificial Sequence: Synthetic oligonucleotide
  Sense strand starting at position 692 of SEQ ID NO: 917078
ggacaaguauguuuaagac

SEQ ID NO: 1206849 - RNA, 19 nt, Artificial Sequence
  Description of Artificial Sequence: Synthetic oligonucleotide
  Antisense strand to SEQ ID NO: 1206848
gucuuaaacauacuugucc

SEQ ID NO: 1206850 - RNA, 19 nt, Artificial Sequence
  Description of Artificial Sequence: Synthetic oligonucleotide
  Sense strand starting at position 716 of SEQ ID NO: 917078
uucugaauguaucugaaag

SEQ ID NO: 1206851 - RNA, 19 nt, Artificial Sequence
  Description of Artificial Sequence: Synthetic oligonucleotide
  Antisense strand to SEQ ID NO: 1206850
cuuucagauacauucagaa

SEQ ID NO: 1206852 - RNA, 19 nt, Artificial Sequence
  Description of Artificial Sequence: Synthetic oligonucleotide
  Sense strand starting at position 738 of SEQ ID NO: 917078
acuuaagaagucuauguca

SEQ ID NO: 1206853 - RNA, 19 nt, Artificial Sequence
  Description of Artificial Sequence: Synthetic oligonucleotide
  Antisense strand to SEQ ID NO: 1206852
ugacauagacuucuuaagu

SEQ ID NO: 1206854 - RNA, 19 nt, Artificial Sequence
  Description of Artificial Sequence: Synthetic oligonucleotide
  Sense strand starting at position 740 of SEQ ID NO: 917078
uuaagaagucuaugucaau

SEQ ID NO: 1206855 - RNA, 19 nt, Artificial Sequence
  Description of Artificial Sequence: Synthetic oligonucleotide
  Antisense strand to SEQ ID NO: 1206854
auugacauagacuucuuaa

SEQ ID NO: 1206856 - RNA, 19 nt, Artificial Sequence
  Description of Artificial Sequence: Synthetic oligonucleotide
  Sense strand starting at position 741 of SEQ ID NO: 917078
uaagaagucuaugucaaug

SEQ ID NO: 1206857 - RNA, 19 nt, Artificial Sequence
  Description of Artificial Sequence: Synthetic oligonucleotide
  Antisense strand to SEQ ID NO: 1206856
cauugacauagacuucuua

SEQ ID NO: 1206858 - RNA, 19 nt, Artificial Sequence
  Description of Artificial Sequence: Synthetic oligonucleotide
  Sense strand starting at position 746 of SEQ ID NO: 917078
agucuaugucaauguaaag

SEQ ID NO: 1206859 - RNA, 19 nt, Artificial Sequence
  Description of Artificial Sequence: Synthetic oligonucleotide
  Antisense strand to SEQ ID NO: 1206858
cuuuacauugacauagacu

SEQ ID NO: 1206860 - RNA, 19 nt, Artificial Sequence
  Description of Artificial Sequence: Synthetic oligonucleotide
  Sense strand starting at position 771 of SEQ ID NO: 917078
agaaaucuucucuagugca

SEQ ID NO: 1206861 - RNA, 19 nt, Artificial Sequence
  Description of Artificial Sequence: Synthetic oligonucleotide
  Antisense strand to SEQ ID NO: 1206860
ugcacuagagaagauuucu

SEQ ID NO: 1206862 - RNA, 19 nt, Artificial Sequence
  Description of Artificial Sequence: Synthetic oligonucleotide
  Sense strand starting at position 823 of SEQ ID NO: 917078
ggcaguugugucccuguuu

SEQ ID NO: 1206863 - RNA, 19 nt, Artificial Sequence
  Description of Artificial Sequence: Synthetic oligonucleotide
  Antisense strand to SEQ ID NO: 1206862
aaacagggacacaacugcc

SEQ ID NO: 1206864 - RNA, 19 nt, Artificial Sequence
  Description of Artificial Sequence: Synthetic oligonucleotide
  Sense strand starting at position 882 of SEQ ID NO: 917078
cuuugagaauaugaugaag

SEQ ID NO: 1206865 - RNA, 19 nt, Artificial Sequence
  Description of Artificial Sequence: Synthetic oligonucleotide
  Antisense strand to SEQ ID NO: 1206864
cuucaucauauucucaaag

SEQ ID NO: 1206866 - RNA, 19 nt, Artificial Sequence
  Description of Artificial Sequence: Synthetic oligonucleotide
  Sense strand starting at position 1377 of SEQ ID NO: 917078
cuugguaugccuuaauuac

SEQ ID NO: 1206867 - RNA, 19 nt, Artificial Sequence
  Description of Artificial Sequence: Synthetic oligonucleotide
  Antisense strand to SEQ ID NO: 1206866
guaauuaaggcauaccaag

SEQ ID NO: 1206868 - RNA, 19 nt, Artificial Sequence
  Description of Artificial Sequence: Synthetic oligonucleotide
  Sense strand starting at position 1412 of SEQ ID NO: 917078
agccuuugugugccuuaau

SEQ ID NO: 1206869 - RNA, 19 nt, Artificial Sequence
  Description of Artificial Sequence: Synthetic oligonucleotide
  Antisense strand to SEQ ID NO: 1206868
auuaaggcacacaaaggcu

SEQ ID NO: 1206870 - RNA, 19 nt, Artificial Sequence
  Description of Artificial Sequence: Synthetic oligonucleotide
  Sense strand starting at position 1415 of SEQ ID NO: 917078
cuuugugugccuuaauuaa

SEQ ID NO: 1206871 - RNA, 19 nt, Artificial Sequence
  Description of Artificial Sequence: Synthetic oligonucleotide
  Antisense strand to SEQ ID NO: 1206870
uuaauuaaggcacacaaag

SEQ ID NO: 1206872 - RNA, 19 nt, Artificial Sequence
  Description of Artificial Sequence: Synthetic oligonucleotide
  Sense strand starting at position 1489 of SEQ ID NO: 917078
ugcauaacuuauguaagaa

SEQ ID NO: 1206873 - RNA, 19 nt, Artificial Sequence
  Description of Artificial Sequence: Synthetic oligonucleotide
  Antisense strand to SEQ ID NO: 1206872
uucuuacauaaguuaugca

SEQ ID NO: 1206874 - RNA, 19 nt, Artificial Sequence
  Description of Artificial Sequence: Synthetic oligonucleotide
  Sense strand starting at position 1508 of SEQ ID NO: 917078
aucggaggaucugucacaa

SEQ ID NO: 1206875 - RNA, 19 nt, Artificial Sequence
  Description of Artificial Sequence: Synthetic oligonucleotide
  Antisense strand to SEQ ID NO: 1206874
uugugacagauccuccgau

SEQ ID NO: 1206876 - RNA, 19 nt, Artificial Sequence
  Description of Artificial Sequence: Synthetic oligonucleotide
  Sense strand starting at position 2328 of SEQ ID NO: 917078
ggugacaugucuuuauaag

SEQ ID NO: 1206877 - RNA, 19 nt, Artificial Sequence
  Description of Artificial Sequence: Synthetic oligonucleotide
  Antisense strand to SEQ ID NO: 1206876
cuuauaaagacaugucacc

SEQ ID NO: 1206878 - RNA, 19 nt, Artificial Sequence
  Description of Artificial Sequence: Synthetic oligonucleotide
  Sense strand starting at position 2329 of SEQ ID NO: 917078
gugacaugucuuuauaagc

SEQ ID NO: 1206879 - RNA, 19 nt, Artificial Sequence
  Description of Artificial Sequence: Synthetic oligonucleotide
  Antisense strand to SEQ ID NO: 1206878
gcuuauaaagacaugucac

SEQ ID NO: 1206880 - RNA, 19 nt, Artificial Sequence
  Description of Artificial Sequence: Synthetic oligonucleotide
  Sense strand starting at position 2425 of SEQ ID NO: 917078
gggcgaauauuggccacua

SEQ ID NO: 1206881 - RNA, 19 nt, Artificial Sequence
  Description of Artificial Sequence: Synthetic oligonucleotide
  Antisense strand to SEQ ID NO: 1206880
uaguggccaauauucgccc

SEQ ID NO: 1206882 - RNA, 19 nt, Artificial Sequence
  Description of Artificial Sequence: Synthetic oligonucleotide
  Sense strand starting at position 2426 of SEQ ID NO: 917078
ggcgaauauuggccacuaa

SEQ ID NO: 1206883 - RNA, 19 nt, Artificial Sequence
  Description of Artificial Sequence: Synthetic oligonucleotide
  Antisense strand to SEQ ID NO: 1206882
uuaguggccaauauucgcc

SEQ ID NO: 1206884 - RNA, 19 nt, Artificial Sequence
  Description of Artificial Sequence: Synthetic oligonucleotide
  Sense strand starting at position 2427 of SEQ ID NO: 917078
gcgaauauuggccacuaac

SEQ ID NO: 1206885 - RNA, 19 nt, Artificial Sequence
  Description of Artificial Sequence: Synthetic oligonucleotide
  Antisense strand to SEQ ID NO: 1206884
guuaguggccaauauucgc

SEQ ID NO: 1206886 - RNA, 19 nt, Artificial Sequence
  Description of Artificial Sequence: Synthetic oligonucleotide
  Sense strand starting at position 2575 of SEQ ID NO: 917078
ugccucuggccauauugaa

SEQ ID NO: 1206887 - RNA, 19 nt, Artificial Sequence
  Description of Artificial Sequence: Synthetic oligonucleotide
  Antisense strand to SEQ ID NO: 1206886
uucaauauggccagaggca

SEQ ID NO: 1206888 - RNA, 19 nt, Artificial Sequence
  Description of Artificial Sequence: Synthetic oligonucleotide
  Sense strand starting at position 2867 of SEQ ID NO: 917078
agggcauucccagauaccu

SEQ ID NO: 1206889 - RNA, 19 nt, Artificial Sequence
  Description of Artificial Sequence: Synthetic oligonucleotide
  Antisense strand to SEQ ID NO: 1206888
agguaucugggaaugcccu

SEQ ID NO: 1206890 - RNA, 19 nt, Artificial Sequence
  Description of Artificial Sequence: Synthetic oligonucleotide
  Sense strand starting at position 2971 of SEQ ID NO: 917078
auccaauuuguguguuucu

SEQ ID NO: 1206891 - RNA, 19 nt, Artificial Sequence
  Description of Artificial Sequence: Synthetic oligonucleotide
  Antisense strand to SEQ ID NO: 1206890
agaaacacacaaauuggau

SEQ ID NO: 1206892 - RNA, 19 nt, Artificial Sequence
  Description of Artificial Sequence: Synthetic oligonucleotide
  Sense strand starting at position 3111 of SEQ ID NO: 917078
cagcaugugguuuauguaa

SEQ ID NO: 1206893 - RNA, 19 nt, Artificial Sequence
  Description of Artificial Sequence: Synthetic oligonucleotide
  Antisense strand to SEQ ID NO: 1206892
uuacauaaaccacaugcug

SEQ ID NO: 1206894 - RNA, 19 nt, Artificial Sequence
  Description of Artificial Sequence: Synthetic oligonucleotide
  Sense strand starting at position 3160 of SEQ ID NO: 917078
ggccuuuaggguuaugaac

SEQ ID NO: 1206895 - RNA, 19 nt, Artificial Sequence
  Description of Artificial Sequence: Synthetic oligonucleotide
  Antisense strand to SEQ ID NO: 1206894
guucauaacccuaaaggcc

SEQ ID NO: 1206896 - RNA, 19 nt, Artificial Sequence
  Description of Artificial Sequence: Synthetic oligonucleotide
  Sense strand starting at position 3169 of SEQ ID NO: 917078
gguuaugaacagugcuuua

SEQ ID NO: 1206897 - RNA, 19 nt, Artificial Sequence
  Description of Artificial Sequence: Synthetic oligonucleotide
  Antisense strand to SEQ ID NO: 1206896
uaaagcacuguucauaacc

SEQ ID NO: 1206898 - RNA, 19 nt, Artificial Sequence
  Description of Artificial Sequence: Synthetic oligonucleotide
  Sense strand starting at position 3174 of SEQ ID NO: 917078
ugaacagugcuuuaugugu

SEQ ID NO: 1206899 - RNA, 19 nt, Artificial Sequence
  Description of Artificial Sequence: Synthetic oligonucleotide
  Antisense strand to SEQ ID NO: 1206898
acacauaaagcacuguuca

SEQ ID NO: 1206900 - RNA, 19 nt, Artificial Sequence
  Description of Artificial Sequence: Synthetic oligonucleotide
  Sense strand starting at position 3190 of SEQ ID NO: 917078
ugucauagaugcucaauau

SEQ ID NO: 1206901 - RNA, 19 nt, Artificial Sequence
  Description of Artificial Sequence: Synthetic oligonucleotide
  Antisense strand to SEQ ID NO: 1206900
auauugagcaucuaugaca

SEQ ID NO: 1206902 - RNA, 19 nt, Artificial Sequence
  Description of Artificial Sequence: Synthetic oligonucleotide
  Sense strand starting at position 3191 of SEQ ID NO: 917078
gucauagaugcucaauauc

SEQ ID NO: 1206903 - RNA, 19 nt, Artificial Sequence
  Description of Artificial Sequence: Synthetic oligonucleotide
  Antisense strand to SEQ ID NO: 1206902
gauauugagcaucuaugac

SEQ ID NO: 1206904 - RNA, 19 nt, Artificial Sequence
  Description of Artificial Sequence: Synthetic oligonucleotide
  Sense strand starting at position 3206 of SEQ ID NO: 917078
uaucuaaauugagugggau

SEQ ID NO: 1206905 - RNA, 19 nt, Artificial Sequence
  Description of Artificial Sequence: Synthetic oligonucleotide
  Antisense strand to SEQ ID NO: 1206904
aucccacucaauuuagaua

SEQ ID NO: 1206906 - RNA, 19 nt, Artificial Sequence
  Description of Artificial Sequence: Synthetic oligonucleotide
  Sense strand starting at position 3285 of SEQ ID NO: 917078
cuauuaaagccagaaguca

SEQ ID NO: 1206907 - RNA, 19 nt, Artificial Sequence
  Description of Artificial Sequence: Synthetic oligonucleotide
  Antisense strand to SEQ ID NO: 1206906
ugacuucuggcuuuaauag

SEQ ID NO: 1206908 - RNA, 19 nt, Artificial Sequence
  Description of Artificial Sequence: Synthetic oligonucleotide
  Sense strand starting at position 3370 of SEQ ID NO: 917078
ccugcaaaguaaguauuau

SEQ ID NO: 1206909 - RNA, 19 nt, Artificial Sequence
  Description of Artificial Sequence: Synthetic oligonucleotide
  Antisense strand to SEQ ID NO: 1206908
auaauacuuacuuugcagg

SEQ ID NO: 1206910 - RNA, 19 nt, Artificial Sequence
  Description of Artificial Sequence: Synthetic oligonucleotide
  Sense strand starting at position 3510 of SEQ ID NO: 917078
cagugugauuaguuuggaa

SEQ ID NO: 1206911 - RNA, 19 nt, Artificial Sequence
  Description of Artificial Sequence: Synthetic oligonucleotide
  Antisense strand to SEQ ID NO: 1206910
uuccaaacuaaucacacug

SEQ ID NO: 1206912 - RNA, 19 nt, Artificial Sequence
  Description of Artificial Sequence: Synthetic oligonucleotide
  Sense strand starting at position 3512 of SEQ ID NO: 917078
gugugauuaguuuggaaua

SEQ ID NO: 1206913 - RNA, 19 nt, Artificial Sequence
  Description of Artificial Sequence: Synthetic oligonucleotide
  Antisense strand to SEQ ID NO: 1206912
uauuccaaacuaaucacac

SEQ ID NO: 1206914 - RNA, 19 nt, Artificial Sequence
  Description of Artificial Sequence: Synthetic oligonucleotide
  Sense strand starting at position 3541 of SEQ ID NO: 917078
gcuagauaugccuagaaau

SEQ ID NO: 1206915 - RNA, 19 nt, Artificial Sequence
  Description of Artificial Sequence: Synthetic oligonucleotide
  Antisense strand to SEQ ID NO: 1206914
auuucuaggcauaucuagc

SEQ ID NO: 1206916 - RNA, 19 nt, Artificial Sequence
  Description of Artificial Sequence: Synthetic oligonucleotide
  Sense strand starting at position 3977 of SEQ ID NO: 917078
guguaugcauaaccacauu

SEQ ID NO: 1206917 - RNA, 19 nt, Artificial Sequence
  Description of Artificial Sequence: Synthetic oligonucleotide
  Antisense strand to SEQ ID NO: 1206916
aaugugguuaugcauacac

SEQ ID NO: 1206918 - RNA, 19 nt, Artificial Sequence
  Description of Artificial Sequence: Synthetic oligonucleotide
  Sense strand starting at position 133 of SEQ ID NO: 917079
uuaucaauugugggaauau

SEQ ID NO: 1206919 - RNA, 19 nt, Artificial Sequence
  Description of Artificial Sequence: Synthetic oligonucleotide
  Antisense strand to SEQ ID NO: 1206918
auauucccacaauugauaa

SEQ ID NO: 1206920 - RNA, 19 nt, Artificial Sequence
  Description of Artificial Sequence: Synthetic oligonucleotide
  Sense strand starting at position 220 of SEQ ID NO: 917079
ucagauaaguuacugucaa

SEQ ID NO: 1206921 - RNA, 19 nt, Artificial Sequence
  Description of Artificial Sequence: Synthetic oligonucleotide
  Antisense strand to SEQ ID NO: 1206920
uugacaguaacuuaucuga

SEQ ID NO: 1206922 - RNA, 19 nt, Artificial Sequence
  Description of Artificial Sequence: Synthetic oligonucleotide
  Sense strand starting at position 494 of SEQ ID NO: 917079
aaggguaccuucguauaag

SEQ ID NO: 1206923 - RNA, 19 nt, Artificial Sequence
  Description of Artificial Sequence: Synthetic oligonucleotide
  Antisense strand to SEQ ID NO: 1206922
cuuauacgaagguacccuu

SEQ ID NO: 1206924 - RNA, 19 nt, Artificial Sequence
  Description of Artificial Sequence: Synthetic oligonucleotide
  Sense strand starting at position 497 of SEQ ID NO: 917079
gguaccuucguauaagaau

SEQ ID NO: 1206925 - RNA, 19 nt, Artificial Sequence
  Description of Artificial Sequence: Synthetic oligonucleotide
  Antisense strand to SEQ ID NO: 1206924
auucuuauacgaagguacc

SEQ ID NO: 1206926 - RNA, 19 nt, Artificial Sequence
  Description of Artificial Sequence: Synthetic oligonucleotide
  Sense strand starting at position 528 of SEQ ID NO: 917079
uaacuaagugcugacagau

SEQ ID NO: 1206927 - RNA, 19 nt, Artificial Sequence
  Description of Artificial Sequence: Synthetic oligonucleotide
  Antisense strand to SEQ ID NO: 1206926
aucugucagcacuuaguua

SEQ ID NO: 1206928 - RNA, 19 nt, Artificial Sequence
  Description of Artificial Sequence: Synthetic oligonucleotide
  Sense strand starting at position 560 of SEQ ID NO: 917079
gacugaauuuccuggauga

SEQ ID NO: 1206929 - RNA, 19 nt, Artificial Sequence
  Description of Artificial Sequence: Synthetic oligonucleotide
  Antisense strand to SEQ ID NO: 1206928
ucauccaggaaauucaguc

SEQ ID NO: 1206930 - RNA, 19 nt, Artificial Sequence
  Description of Artificial Sequence: Synthetic oligonucleotide
  Sense strand starting at position 623 of SEQ ID NO: 917079
guuauuauacugcaagcuu

SEQ ID NO: 1206931 - RNA, 19 nt, Artificial Sequence
  Description of Artificial Sequence: Synthetic oligonucleotide
  Antisense strand to SEQ ID NO: 1206930
aagcuugcaguauaauaac

SEQ ID NO: 1206932 - RNA, 19 nt, Artificial Sequence
  Description of Artificial Sequence: Synthetic oligonucleotide
  Sense strand starting at position 683 of SEQ ID NO: 917079
ucauuugucuaagagacug

SEQ ID NO: 1206933 - RNA, 19 nt, Artificial Sequence
  Description of Artificial Sequence: Synthetic oligonucleotide
  Antisense strand to SEQ ID NO: 1206932
cagucucuuagacaaauga

SEQ ID NO: 1206934 - RNA, 19 nt, Artificial Sequence
  Description of Artificial Sequence: Synthetic oligonucleotide
  Sense strand starting at position 688 of SEQ ID NO: 917079
ugucuaagagacugccauu

SEQ ID NO: 1206935 - RNA, 19 nt, Artificial Sequence
  Description of Artificial Sequence: Synthetic oligonucleotide
  Antisense strand to SEQ ID NO: 1206934
aauggcagucucuuagaca

SEQ ID NO: 1206936 - RNA, 19 nt, Artificial Sequence
  Description of Artificial Sequence: Synthetic oligonucleotide
  Sense strand starting at position 691 of SEQ ID NO: 917079
cuaagagacugccauuuaa

SEQ ID NO: 1206937 - RNA, 19 nt, Artificial Sequence
  Description of Artificial Sequence: Synthetic oligonucleotide
  Antisense strand to SEQ ID NO: 1206936
uuaaauggcagucucuuag

SEQ ID NO: 1206938 - RNA, 19 nt, Artificial Sequence
  Description of Artificial Sequence: Synthetic oligonucleotide
  Sense strand starting at position 875 of SEQ ID NO: 917079
uuguguauucugcaaucag

SEQ ID NO: 1206939 - RNA, 19 nt, Artificial Sequence
  Description of Artificial Sequence: Synthetic oligonucleotide
  Antisense strand to SEQ ID NO: 1206938
cugauugcagaauacacaa

SEQ ID NO: 1206940 - RNA, 19 nt, Artificial Sequence
  Description of Artificial Sequence: Synthetic oligonucleotide
  Sense strand starting at position 903 of SEQ ID NO: 917079
uuucuuuaggaacgaaauu

SEQ ID NO: 1206941 - RNA, 19 nt, Artificial Sequence
  Description of Artificial Sequence: Synthetic oligonucleotide
  Antisense strand to SEQ ID NO: 1206940
aauuucguuccuaaagaaa

SEQ ID NO: 1206942 - RNA, 19 nt, Artificial Sequence
  Description of Artificial Sequence: Synthetic oligonucleotide
  Sense strand starting at position 1025 of SEQ ID NO: 917079
gggcauuacacccagcgau

SEQ ID NO: 1206943 - RNA, 19 nt, Artificial Sequence
  Description of Artificial Sequence: Synthetic oligonucleotide
  Antisense strand to SEQ ID NO: 1206942
aucgcuggguguaaugccc

SEQ ID NO: 1206944 - RNA, 19 nt, Artificial Sequence
  Description of Artificial Sequence: Synthetic oligonucleotide
  Sense strand starting at position 1048 of SEQ ID NO: 917079
auuaaaucgcaguagcuaa

SEQ ID NO: 1206945 - RNA, 19 nt, Artificial Sequence
  Description of Artificial Sequence: Synthetic oligonucleotide
  Antisense strand to SEQ ID NO: 1206944
uuagcuacugcgauuuaau

SEQ ID NO: 1206946 - RNA, 19 nt, Artificial Sequence
  Description of Artificial Sequence: Synthetic oligonucleotide
  Sense strand starting at position 1937 of SEQ ID NO: 917079
ucuguuugucaauaaggag

SEQ ID NO: 1206947 - RNA, 19 nt, Artificial Sequence
  Description of Artificial Sequence: Synthetic oligonucleotide
  Antisense strand to SEQ ID NO: 1206946
cuccuuauugacaaacaga

SEQ ID NO: 1206948 - RNA, 19 nt, Artificial Sequence
  Description of Artificial Sequence: Synthetic oligonucleotide
  Sense strand starting at position 2344 of SEQ ID NO: 917079
cuccgucaucccgugcgaa

SEQ ID NO: 1206949 - RNA, 19 nt, Artificial Sequence
  Description of Artificial Sequence: Synthetic oligonucleotide
  Antisense strand to SEQ ID NO: 1206948
uucgcacgggaugacggag

SEQ ID NO: 1206950 - RNA, 19 nt, Artificial Sequence
  Description of Artificial Sequence: Synthetic oligonucleotide
  Sense strand starting at position 2428 of SEQ ID NO: 917079
ccgggaucuccagguagaa

SEQ ID NO: 1206951 - RNA, 19 nt, Artificial Sequence
  Description of Artificial Sequence: Synthetic oligonucleotide
  Antisense strand to SEQ ID NO: 1206950
uucuaccuggagaucccgg

SEQ ID NO: 1206952 - RNA, 19 nt, Artificial Sequence
  Description of Artificial Sequence: Synthetic oligonucleotide
  Sense strand starting at position 2558 of SEQ ID NO: 917079
cugguuuaugcacacagau

SEQ ID NO: 1206953 - RNA, 19 nt, Artificial Sequence
  Description of Artificial Sequence: Synthetic oligonucleotide
  Antisense strand to SEQ ID NO: 1206952
aucugugugcauaaaccag

SEQ ID NO: 1206954 - RNA, 19 nt, Artificial Sequence
  Description of Artificial Sequence: Synthetic oligonucleotide
  Sense strand starting at position 2567 of SEQ ID NO: 917079
gcacacagaugcucuaaca

SEQ ID NO: 1206955 - RNA, 19 nt, Artificial Sequence
  Description of Artificial Sequence: Synthetic oligonucleotide
  Antisense strand to SEQ ID NO: 1206954
uguuagagcaucugugugc

SEQ ID NO: 1206956 - RNA, 19 nt, Artificial Sequence
  Description of Artificial Sequence: Synthetic oligonucleotide
  Sense strand starting at position 2576 of SEQ ID NO: 917079
ugcucuaacaaguagggau

SEQ ID NO: 1206957 - RNA, 19 nt, Artificial Sequence
  Description of Artificial Sequence: Synthetic oligonucleotide
  Antisense strand to SEQ ID NO: 1206956
aucccuacuuguuagagca

SEQ ID NO: 1206958 - RNA, 19 nt, Artificial Sequence
  Description of Artificial Sequence: Synthetic oligonucleotide
  Sense strand starting at position 2583 of SEQ ID NO: 917079
acaaguagggauugucaac

SEQ ID NO: 1206959 - RNA, 19 nt, Artificial Sequence
  Description of Artificial Sequence: Synthetic oligonucleotide
  Antisense strand to SEQ ID NO: 1206958
guugacaaucccuacuugu

SEQ ID NO: 1206960 - RNA, 19 nt, Artificial Sequence
  Description of Artificial Sequence: Synthetic oligonucleotide
  Sense strand starting at position 2643 of SEQ ID NO: 917079
ggugacuuccucuaggcua

SEQ ID NO: 1206961 - RNA, 19 nt, Artificial Sequence
  Description of Artificial Sequence: Synthetic oligonucleotide
  Antisense strand to SEQ ID NO: 1206960
uagccuagaggaagucacc

SEQ ID NO: 1206962 - RNA, 19 nt, Artificial Sequence
  Description of Artificial Sequence: Synthetic oligonucleotide
  Sense strand starting at position 2645 of SEQ ID NO: 917079
ugacuuccucuaggcuaua

SEQ ID NO: 1206963 - RNA, 19 nt, Artificial Sequence
  Description of Artificial Sequence: Synthetic oligonucleotide
  Antisense strand to SEQ ID NO: 1206962
uauagccuagaggaaguca

SEQ ID NO: 1206964 - RNA, 19 nt, Artificial Sequence
  Description of Artificial Sequence: Synthetic oligonucleotide
  Sense strand starting at position 2683 of SEQ ID NO: 917079
ccaagagucuaacucuguu

SEQ ID NO: 1206965 - RNA, 19 nt, Artificial Sequence
  Description of Artificial Sequence: Synthetic oligonucleotide
  Antisense strand to SEQ ID NO: 1206964
aacagaguuagacucuugg

SEQ ID NO: 1206966 - RNA, 19 nt, Artificial Sequence
  Description of Artificial Sequence: Synthetic oligonucleotide
  Sense strand starting at position 2848 of SEQ ID NO: 917079
aggucucuacgucaacaua

SEQ ID NO: 1206967 - RNA, 19 nt, Artificial Sequence
  Description of Artificial Sequence: Synthetic oligonucleotide
  Antisense strand to SEQ ID NO: 1206966
uauguugacguagagaccu

SEQ ID NO: 1206968 - RNA, 19 nt, Artificial Sequence
  Description of Artificial Sequence: Synthetic oligonucleotide
  Sense strand starting at position 2901 of SEQ ID NO: 917079
ccaucuaacuggucuccga

SEQ ID NO: 1206969 - RNA, 19 nt, Artificial Sequence
  Description of Artificial Sequence: Synthetic oligonucleotide
  Antisense strand to SEQ ID NO: 1206968
ucggagaccaguuagaugg

SEQ ID NO: 1206970 - RNA, 19 nt, Artificial Sequence
  Description of Artificial Sequence: Synthetic oligonucleotide
  Sense strand starting at position 3166 of SEQ ID NO: 917079
uggguuacuucugcauaaa

SEQ ID NO: 1206971 - RNA, 19 nt, Artificial Sequence
  Description of Artificial Sequence: Synthetic oligonucleotide
  Antisense strand to SEQ ID NO: 1206970
uuuaugcagaaguaaccca

SEQ ID NO: 1206972 - RNA, 19 nt, Artificial Sequence
  Description of Artificial Sequence: Synthetic oligonucleotide
  Sense strand starting at position 3167 of SEQ ID NO: 917079
ggguuacuucugcauaaag

SEQ ID NO: 1206973 - RNA, 19 nt, Artificial Sequence
  Description of Artificial Sequence: Synthetic oligonucleotide
  Antisense strand to SEQ ID NO: 1206972
cuuuaugcagaaguaaccc

SEQ ID NO: 1206974 - RNA, 19 nt, Artificial Sequence
  Description of Artificial Sequence: Synthetic oligonucleotide
  Sense strand starting at position 3169 of SEQ ID NO: 917079
guuacuucugcauaaagua

SEQ ID NO: 1206975 - RNA, 19 nt, Artificial Sequence
  Description of Artificial Sequence: Synthetic oligonucleotide
  Antisense strand to SEQ ID NO: 1206974
uacuuuaugcagaaguaac

SEQ ID NO: 1206976 - RNA, 19 nt, Artificial Sequence
  Description of Artificial Sequence: Synthetic oligonucleotide
  Sense strand starting at position 3216 of SEQ ID NO: 917079
ccaucuuucuagguuuaca

SEQ ID NO: 1206977 - RNA, 19 nt, Artificial Sequence
  Description of Artificial Sequence: Synthetic oligonucleotide
  Antisense strand to SEQ ID NO: 1206976
uguaaaccuagaaagaugg

SEQ ID NO: 1206978 - RNA, 19 nt, Artificial Sequence
  Description of Artificial Sequence: Synthetic oligonucleotide
  Sense strand starting at position 3290 of SEQ ID NO: 917079
cagucagaagcccaggauu

SEQ ID NO: 1206979 - RNA, 19 nt, Artificial Sequence
  Description of Artificial Sequence: Synthetic oligonucleotide
  Antisense strand to SEQ ID NO: 1206978
aauccugggcuucugacug

SEQ ID NO: 1206980 - RNA, 19 nt, Artificial Sequence
  Description of Artificial Sequence: Synthetic oligonucleotide
  Sense strand starting at position 3292 of SEQ ID NO: 917079
gucagaagcccaggauucu

SEQ ID NO: 1206981 - RNA, 19 nt, Artificial Sequence
  Description of Artificial Sequence: Synthetic oligonucleotide
  Antisense strand to SEQ ID NO: 1206980
agaauccugggcuucugac

SEQ ID NO: 1206982 - RNA, 19 nt, Artificial Sequence
  Description of Artificial Sequence: Synthetic oligonucleotide
  Sense strand starting at position 3334 of SEQ ID NO: 917079
gcugauagaccuuggaagu

SEQ ID NO: 1206983 - RNA, 19 nt, Artificial Sequence
  Description of Artificial Sequence: Synthetic oligonucleotide
  Antisense strand to SEQ ID NO: 1206982
acuuccaaggucuaucagc

SEQ ID NO: 1206984 - RNA, 19 nt, Artificial Sequence
  Description of Artificial Sequence: Synthetic oligonucleotide
  Sense strand starting at position 3335 of SEQ ID NO: 917079
cugauagaccuuggaagua

SEQ ID NO: 1206985 - RNA, 19 nt, Artificial Sequence
  Description of Artificial Sequence: Synthetic oligonucleotide
  Antisense strand to SEQ ID NO: 1206984
uacuuccaaggucuaucag

SEQ ID NO: 1206986 - RNA, 19 nt, Artificial Sequence
  Description of Artificial Sequence: Synthetic oligonucleotide
  Sense strand starting at position 3345 of SEQ ID NO: 917079
uuggaaguauugcuuaauu

SEQ ID NO: 1206987 - RNA, 19 nt, Artificial Sequence
  Description of Artificial Sequence: Synthetic oligonucleotide
  Antisense strand to SEQ ID NO: 1206986
aauuaagcaauacuuccaa

SEQ ID NO: 1206988 - RNA, 19 nt, Artificial Sequence
  Description of Artificial Sequence: Synthetic oligonucleotide
  Sense strand starting at position 3640 of SEQ ID NO: 917079
gcuggaauccgagagugag

SEQ ID NO: 1206989 - RNA, 19 nt, Artificial Sequence
  Description of Artificial Sequence: Synthetic oligonucleotide
  Antisense strand to SEQ ID NO: 1206988
cucacucucggauuccagc

SEQ ID NO: 1206990 - RNA, 19 nt, Artificial Sequence
  Description of Artificial Sequence: Synthetic oligonucleotide
  Sense strand starting at position 3785 of SEQ ID NO: 917079
ugcgcauagaugcauauuu

SEQ ID NO: 1206991 - RNA, 19 nt, Artificial Sequence
  Description of Artificial Sequence: Synthetic oligonucleotide
  Antisense strand to SEQ ID NO: 1206990
aaauaugcaucuaugcgca

SEQ ID NO: 1206992 - RNA, 19 nt, Artificial Sequence
  Description of Artificial Sequence: Synthetic oligonucleotide
  Sense strand starting at position 3933 of SEQ ID NO: 917079
cgauaaauccaucguaaag

SEQ ID NO: 1206993 - RNA, 19 nt, Artificial Sequence
  Description of Artificial Sequence: Synthetic oligonucleotide
  Antisense strand to SEQ ID NO: 1206992
cuuuacgauggauuuaucg

SEQ ID NO: 1206994 - RNA, 19 nt, Artificial Sequence
  Description of Artificial Sequence: Synthetic oligonucleotide
  Sense strand starting at position 3960 of SEQ ID NO: 917079
ucguaagucgagccauugu

SEQ ID NO: 1206995 - RNA, 19 nt, Artificial Sequence
  Description of Artificial Sequence: Synthetic oligonucleotide
  Antisense strand to SEQ ID NO: 1206994
acaauggcucgacuuacga

SEQ ID NO: 1206996 - RNA, 19 nt, Artificial Sequence
  Description of Artificial Sequence: Synthetic oligonucleotide
  Sense strand starting at position 3974 of SEQ ID NO: 917079
auuguaaauccguagucua

SEQ ID NO: 1206997 - RNA, 19 nt, Artificial Sequence
  Description of Artificial Sequence: Synthetic oligonucleotide
  Antisense strand to SEQ ID NO: 1206996
uagacuacggauuuacaau

SEQ ID NO: 1206998 - RNA, 19 nt, Artificial Sequence
  Description of Artificial Sequence: Synthetic oligonucleotide
  Sense strand starting at position 71 of SEQ ID NO: 917080
uuaucaauugugggaauau

SEQ ID NO: 1206999 - RNA, 19 nt, Artificial Sequence
  Description of Artificial Sequence: Synthetic oligonucleotide
  Antisense strand to SEQ ID NO: 1206998
auauucccacaauugauaa

SEQ ID NO: 1207000 - RNA, 19 nt, Artificial Sequence
  Description of Artificial Sequence: Synthetic oligonucleotide
  Sense strand starting at position 158 of SEQ ID NO: 917080
ucagauaaguuacugucaa

SEQ ID NO: 1207001 - RNA, 19 nt, Artificial Sequence
  Description of Artificial Sequence: Synthetic oligonucleotide
  Antisense strand to SEQ ID NO: 1207000
uugacaguaacuuaucuga

SEQ ID NO: 1207002 - RNA, 19 nt, Artificial Sequence
  Description of Artificial Sequence: Synthetic oligonucleotide
  Sense strand starting at position 432 of SEQ ID NO: 917080
aaggguaccuucguauaag

SEQ ID NO: 1207003 - RNA, 19 nt, Artificial Sequence
  Description of Artificial Sequence: Synthetic oligonucleotide
  Antisense strand to SEQ ID NO: 1207002
cuuauacgaagguacccuu

SEQ ID NO: 1207004 - RNA, 19 nt, Artificial Sequence
  Description of Artificial Sequence: Synthetic oligonucleotide
  Sense strand starting at position 435 of SEQ ID NO: 917080
gguaccuucguauaagaau

SEQ ID NO: 1207005 - RNA, 19 nt, Artificial Sequence
  Description of Artificial Sequence: Synthetic oligonucleotide
  Antisense strand to SEQ ID NO: 1207004
auucuuauacgaagguacc

SEQ ID NO: 1207006 - RNA, 19 nt, Artificial Sequence
  Description of Artificial Sequence: Synthetic oligonucleotide
  Sense strand starting at position 466 of SEQ ID NO: 917080
uaacuaagugcugacagau

SEQ ID NO: 1207007 - RNA, 19 nt, Artificial Sequence
  Description of Artificial Sequence: Synthetic oligonucleotide
  Antisense strand to SEQ ID NO: 1207006
aucugucagcacuuaguua

SEQ ID NO: 1207008 - RNA, 19 nt, Artificial Sequence
  Description of Artificial Sequence: Synthetic oligonucleotide
  Sense strand starting at position 498 of SEQ ID NO: 917080
gacugaauuuccuggauga

SEQ ID NO: 1207009 - RNA, 19 nt, Artificial Sequence
  Description of Artificial Sequence: Synthetic oligonucleotide
  Antisense strand to SEQ ID NO: 1207008
ucauccaggaaauucaguc

SEQ ID NO: 1207010 - RNA, 19 nt, Artificial Sequence
  Description of Artificial Sequence: Synthetic oligonucleotide
  Sense strand starting at position 621 of SEQ ID NO: 917080
ucauuugucuaagagacug

SEQ ID NO: 1207011 - RNA, 19 nt, Artificial Sequence
  Description of Artificial Sequence: Synthetic oligonucleotide
  Antisense strand to SEQ ID NO: 1207010
cagucucuuagacaaauga

SEQ ID NO: 1207012 - RNA, 19 nt, Artificial Sequence
  Description of Artificial Sequence: Synthetic oligonucleotide
  Sense strand starting at position 626 of SEQ ID NO: 917080
ugucuaagagacugccauu

SEQ ID NO: 1207013 - RNA, 19 nt, Artificial Sequence
  Description of Artificial Sequence: Synthetic oligonucleotide
  Antisense strand to SEQ ID NO: 1207012
aauggcagucucuuagaca

SEQ ID NO: 1207014 - RNA, 19 nt, Artificial Sequence
  Description of Artificial Sequence: Synthetic oligonucleotide
  Sense strand starting at position 629 of SEQ ID NO: 917080
cuaagagacugccauuuaa

SEQ ID NO: 1207015 - RNA, 19 nt, Artificial Sequence
  Description of Artificial Sequence: Synthetic oligonucleotide
  Antisense strand to SEQ ID NO: 1207014
uuaaauggcagucucuuag

SEQ ID NO: 1207016 - RNA, 19 nt, Artificial Sequence
  Description of Artificial Sequence: Synthetic oligonucleotide
  Sense strand starting at position 813 of SEQ ID NO: 917080
uuguguauucugcaaucag

SEQ ID NO: 1207017 - RNA, 19 nt, Artificial Sequence
  Description of Artificial Sequence: Synthetic oligonucleotide
  Antisense strand to SEQ ID NO: 1207016
cugauugcagaauacacaa

SEQ ID NO: 1207018 - RNA, 19 nt, Artificial Sequence
  Description of Artificial Sequence: Synthetic oligonucleotide
  Sense strand starting at position 841 of SEQ ID NO: 917080
uuucuuuaggaacgaaauu

SEQ ID NO: 1207019 - RNA, 19 nt, Artificial Sequence
  Description of Artificial Sequence: Synthetic oligonucleotide
  Antisense strand to SEQ ID NO: 1207018
aauuucguuccuaaagaaa

SEQ ID NO: 1207020 - RNA, 19 nt, Artificial Sequence
  Description of Artificial Sequence: Synthetic oligonucleotide
  Sense strand starting at position 963 of SEQ ID NO: 917080
gggcauuacacccagcgau

SEQ ID NO: 1207021 - RNA, 19 nt, Artificial Sequence
  Description of Artificial Sequence: Synthetic oligonucleotide
  Antisense strand to SEQ ID NO: 1207020
aucgcuggguguaaugccc

SEQ ID NO: 1207022 - RNA, 19 nt, Artificial Sequence
  Description of Artificial Sequence: Synthetic oligonucleotide
  Sense strand starting at position 986 of SEQ ID NO: 917080
auuaaaucgcaguagcuaa

SEQ ID NO: 1207023 - RNA, 19 nt, Artificial Sequence
  Description of Artificial Sequence: Synthetic oligonucleotide
  Antisense strand to SEQ ID NO: 1207022
uuagcuacugcgauuuaau

SEQ ID NO: 1207024 - RNA, 19 nt, Artificial Sequence
  Description of Artificial Sequence: Synthetic oligonucleotide
  Sense strand starting at position 1875 of SEQ ID NO: 917080
ucuguuugucaauaaggag

SEQ ID NO: 1207025 - RNA, 19 nt, Artificial Sequence
  Description of Artificial Sequence: Synthetic oligonucleotide
  Antisense strand to SEQ ID NO: 1207024
cuccuuauugacaaacaga

SEQ ID NO: 1207026 - RNA, 19 nt, Artificial Sequence
  Description of Artificial Sequence: Synthetic oligonucleotide
  Sense strand starting at position 2282 of SEQ ID NO: 917080
cuccgucaucccgugcgaa

SEQ ID NO: 1207027 - RNA, 19 nt, Artificial Sequence
  Description of Artificial Sequence: Synthetic oligonucleotide
  Antisense strand to SEQ ID NO: 1207026
uucgcacgggaugacggag

SEQ ID NO: 1207028 - RNA, 19 nt, Artificial Sequence
  Description of Artificial Sequence: Synthetic oligonucleotide
  Sense strand starting at position 2366 of SEQ ID NO: 917080
ccgggaucuccagguagaa

SEQ ID NO: 1207029 - RNA, 19 nt, Artificial Sequence
  Description of Artificial Sequence: Synthetic oligonucleotide
  Antisense strand to SEQ ID NO: 1207028
uucuaccuggagaucccgg

SEQ ID NO: 1207030 - RNA, 19 nt, Artificial Sequence
  Description of Artificial Sequence: Synthetic oligonucleotide
  Sense strand starting at position 2496 of SEQ ID NO: 917080
cugguuuaugcacacagau

SEQ ID NO: 1207031 - RNA, 19 nt, Artificial Sequence
  Description of Artificial Sequence: Synthetic oligonucleotide
  Antisense strand to SEQ ID NO: 1207030
aucugugugcauaaaccag

SEQ ID NO: 1207032 - RNA, 19 nt, Artificial Sequence
  Description of Artificial Sequence: Synthetic oligonucleotide
  Sense strand starting at position 2505 of SEQ ID NO: 917080
gcacacagaugcucuaaca

SEQ ID NO: 1207033 - RNA, 19 nt, Artificial Sequence
  Description of Artificial Sequence: Synthetic oligonucleotide
  Antisense strand to SEQ ID NO: 1207032
uguuagagcaucugugugc

SEQ ID NO: 1207034 - RNA, 19 nt, Artificial Sequence
  Description of Artificial Sequence: Synthetic oligonucleotide
  Sense strand starting at position 2514 of SEQ ID NO: 917080
ugcucuaacaaguagggau

SEQ ID NO: 1207035 - RNA, 19 nt, Artificial Sequence
  Description of Artificial Sequence: Synthetic oligonucleotide
  Antisense strand to SEQ ID NO: 1207034
aucccuacuuguuagagca

SEQ ID NO: 1207036 - RNA, 19 nt, Artificial Sequence
  Description of Artificial Sequence: Synthetic oligonucleotide
  Sense strand starting at position 2521 of SEQ ID NO: 917080
acaaguagggauugucaac

SEQ ID NO: 1207037 - RNA, 19 nt, Artificial Sequence
  Description of Artificial Sequence: Synthetic oligonucleotide
  Antisense strand to SEQ ID NO: 1207036
guugacaaucccuacuugu

SEQ ID NO: 1207038 - RNA, 19 nt, Artificial Sequence
  Description of Artificial Sequence: Synthetic oligonucleotide
  Sense strand starting at position 2581 of SEQ ID NO: 917080
ggugacuuccucuaggcua

SEQ ID NO: 1207039 - RNA, 19 nt, Artificial Sequence
  Description of Artificial Sequence: Synthetic oligonucleotide
  Antisense strand to SEQ ID NO: 1207038
uagccuagaggaagucacc

SEQ ID NO: 1207040 - RNA, 19 nt, Artificial Sequence
  Description of Artificial Sequence: Synthetic oligonucleotide
  Sense strand starting at position 2583 of SEQ ID NO: 917080
ugacuuccucuaggcuaua

SEQ ID NO: 1207041 - RNA, 19 nt, Artificial Sequence
  Description of Artificial Sequence: Synthetic oligonucleotide
  Antisense strand to SEQ ID NO: 1207040
uauagccuagaggaaguca

SEQ ID NO: 1207042 - RNA, 19 nt, Artificial Sequence
  Description of Artificial Sequence: Synthetic oligonucleotide
  Sense strand starting at position 2621 of SEQ ID NO: 917080
ccaagagucuaacucuguu

SEQ ID NO: 1207043 - RNA, 19 nt, Artificial Sequence
  Description of Artificial Sequence: Synthetic oligonucleotide
  Antisense strand to SEQ ID NO: 1207042
aacagaguuagacucuugg

SEQ ID NO: 1207044 - RNA, 19 nt, Artificial Sequence
  Description of Artificial Sequence: Synthetic oligonucleotide
  Sense strand starting at position 2786 of SEQ ID NO: 917080
aggucucuacgucaacaua

SEQ ID NO: 1207045 - RNA, 19 nt, Artificial Sequence
  Description of Artificial Sequence: Synthetic oligonucleotide
  Antisense strand to SEQ ID NO: 1207044
uauguugacguagagaccu

SEQ ID NO: 1207046 - RNA, 19 nt, Artificial Sequence
  Description of Artificial Sequence: Synthetic oligonucleotide
  Sense strand starting at position 2839 of SEQ ID NO: 917080
ccaucuaacuggucuccga

SEQ ID NO: 1207047 - RNA, 19 nt, Artificial Sequence
  Description of Artificial Sequence: Synthetic oligonucleotide
  Antisense strand to SEQ ID NO: 1207046
ucggagaccaguuagaugg

SEQ ID NO: 1207048 - RNA, 19 nt, Artificial Sequence
  Description of Artificial Sequence: Synthetic oligonucleotide
  Sense strand starting at position 3104 of SEQ ID NO: 917080
uggguuacuucugcauaaa

SEQ ID NO: 1207049 - RNA, 19 nt, Artificial Sequence
  Description of Artificial Sequence: Synthetic oligonucleotide
  Antisense strand to SEQ ID NO: 1207048
uuuaugcagaaguaaccca

SEQ ID NO: 1207050 - RNA, 19 nt, Artificial Sequence
  Description of Artificial Sequence: Synthetic oligonucleotide
  Sense strand starting at position 3105 of SEQ ID NO: 917080
ggguuacuucugcauaaag

SEQ ID NO: 1207051 - RNA, 19 nt, Artificial Sequence
  Description of Artificial Sequence: Synthetic oligonucleotide
  Antisense strand to SEQ ID NO: 1207050
cuuuaugcagaaguaaccc

SEQ ID NO: 1207052 - RNA, 19 nt, Artificial Sequence
  Description of Artificial Sequence: Synthetic oligonucleotide
  Sense strand starting at position 3107 of SEQ ID NO: 917080
guuacuucugcauaaagua

SEQ ID NO: 1207053 - RNA, 19 nt, Artificial Sequence
  Description of Artificial Sequence: Synthetic oligonucleotide
  Antisense strand to SEQ ID NO: 1207052
uacuuuaugcagaaguaac

SEQ ID NO: 1207054 - RNA, 19 nt, Artificial Sequence
  Description of Artificial Sequence: Synthetic oligonucleotide
  Sense strand starting at position 3154 of SEQ ID NO: 917080
ccaucuuucuagguuuaca

SEQ ID NO: 1207055 - RNA, 19 nt, Artificial Sequence
  Description of Artificial Sequence: Synthetic oligonucleotide
  Antisense strand to SEQ ID NO: 1207054
uguaaaccuagaaagaugg

SEQ ID NO: 1207056 - RNA, 19 nt, Artificial Sequence
  Description of Artificial Sequence: Synthetic oligonucleotide
  Sense strand starting at position 3228 of SEQ ID NO: 917080
cagucagaagcccaggauu

SEQ ID NO: 1207057 - RNA, 19 nt, Artificial Sequence
  Description of Artificial Sequence: Synthetic oligonucleotide
  Antisense strand to SEQ ID NO: 1207056
aauccugggcuucugacug

SEQ ID NO: 1207058 - RNA, 19 nt, Artificial Sequence
  Description of Artificial Sequence: Synthetic oligonucleotide
  Sense strand starting at position 3230 of SEQ ID NO: 917080
gucagaagcccaggauucu

SEQ ID NO: 1207059 - RNA, 19 nt, Artificial Sequence
  Description of Artificial Sequence: Synthetic oligonucleotide
  Antisense strand to SEQ ID NO: 1207058
agaauccugggcuucugac

SEQ ID NO: 1207060 - RNA, 19 nt, Artificial Sequence
  Description of Artificial Sequence: Synthetic oligonucleotide
  Sense strand starting at position 3272 of SEQ ID NO: 917080
gcugauagaccuuggaagu

SEQ ID NO: 1207061 - RNA, 19 nt, Artificial Sequence
  Description of Artificial Sequence: Synthetic oligonucleotide
  Antisense strand to SEQ ID NO: 1207060
acuuccaaggucuaucagc

SEQ ID NO: 1207062 - RNA, 19 nt, Artificial Sequence
  Description of Artificial Sequence: Synthetic oligonucleotide
  Sense strand starting at position 3273 of SEQ ID NO: 917080
cugauagaccuuggaagua

SEQ ID NO: 1207063 - RNA, 19 nt, Artificial Sequence
  Description of Artificial Sequence: Synthetic oligonucleotide
  Antisense strand to SEQ ID NO: 1207062
uacuuccaaggucuaucag

SEQ ID NO: 1207064 - RNA, 19 nt, Artificial Sequence
  Description of Artificial Sequence: Synthetic oligonucleotide
  Sense strand starting at position 3283 of SEQ ID NO: 917080
uuggaaguauugcuuaauu

SEQ ID NO: 1207065 - RNA, 19 nt, Artificial Sequence
  Description of Artificial Sequence: Synthetic oligonucleotide
  Antisense strand to SEQ ID NO: 1207064
aauuaagcaauacuuccaa

SEQ ID NO: 1207066 - RNA, 19 nt, Artificial Sequence
  Description of Artificial Sequence: Synthetic oligonucleotide
  Sense strand starting at position 3578 of SEQ ID NO: 917080
gcuggaauccgagagugag

SEQ ID NO: 1207067 - RNA, 19 nt, Artificial Sequence
  Description of Artificial Sequence: Synthetic oligonucleotide
  Antisense strand to SEQ ID NO: 1207066
cucacucucggauuccagc

SEQ ID NO: 1207068 - RNA, 19 nt, Artificial Sequence
  Description of Artificial Sequence: Synthetic oligonucleotide
  Sense strand starting at position 3723 of SEQ ID NO: 917080
ugcgcauagaugcauauuu

SEQ ID NO: 1207069 - RNA, 19 nt, Artificial Sequence
  Description of Artificial Sequence: Synthetic oligonucleotide
  Antisense strand to SEQ ID NO: 1207068
aaauaugcaucuaugcgca

SEQ ID NO: 1207070 - RNA, 19 nt, Artificial Sequence
  Description of Artificial Sequence: Synthetic oligonucleotide
  Sense strand starting at position 3871 of SEQ ID NO: 917080
cgauaaauccaucguaaag

SEQ ID NO: 1207071 - RNA, 19 nt, Artificial Sequence
  Description of Artificial Sequence: Synthetic oligonucleotide
  Antisense strand to SEQ ID NO: 1207070
cuuuacgauggauuuaucg

SEQ ID NO: 1207072 - RNA, 19 nt, Artificial Sequence
  Description of Artificial Sequence: Synthetic oligonucleotide
  Sense strand starting at position 3898 of SEQ ID NO: 917080
ucguaagucgagccauugu

SEQ ID NO: 1207073 - RNA, 19 nt, Artificial Sequence
  Description of Artificial Sequence: Synthetic oligonucleotide
  Antisense strand to SEQ ID NO: 1207072
acaauggcucgacuuacga

SEQ ID NO: 1207074 - RNA, 19 nt, Artificial Sequence
  Description of Artificial Sequence: Synthetic oligonucleotide
  Sense strand starting at position 3912 of SEQ ID NO: 917080
auuguaaauccguagucua

SEQ ID NO: 1207075 - RNA, 19 nt, Artificial Sequence
  Description of Artificial Sequence: Synthetic oligonucleotide
  Antisense strand to SEQ ID NO: 1207074
uagacuacggauuuacaau

SEQ ID NO: 1207076 - RNA, 19 nt, Artificial Sequence
  Description of Artificial Sequence: Synthetic oligonucleotide
  Sense strand starting at position 3952 of SEQ ID NO: 917080
gcaauuagggcccagguua

SEQ ID NO: 1207077 - RNA, 19 nt, Artificial Sequence
  Description of Artificial Sequence: Synthetic oligonucleotide
  Antisense strand to SEQ ID NO: 1207076
uaaccugggcccuaauugc

SEQ ID NO: 1207078 - RNA, 19 nt, Artificial Sequence
  Description of Artificial Sequence: Synthetic oligonucleotide
  Sense strand starting at position 68 of SEQ ID NO: 917081
uuaucaauugugggaauau

SEQ ID NO: 1207079 - RNA, 19 nt, Artificial Sequence
  Description of Artificial Sequence: Synthetic oligonucleotide
  Antisense strand to SEQ ID NO: 1207078
auauucccacaauugauaa

SEQ ID NO: 1207080 - RNA, 19 nt, Artificial Sequence
  Description of Artificial Sequence: Synthetic oligonucleotide
  Sense strand starting at position 155 of SEQ ID NO: 917081
ucagauaaguuacugucaa

SEQ ID NO: 1207081 - RNA, 19 nt, Artificial Sequence
  Description of Artificial Sequence: Synthetic oligonucleotide
  Antisense strand to SEQ ID NO: 1207080
uugacaguaacuuaucuga

SEQ ID NO: 1207082 - RNA, 19 nt, Artificial Sequence
  Description of Artificial Sequence: Synthetic oligonucleotide
  Sense strand starting at position 429 of SEQ ID NO: 917081
aaggguaccuucguauaag

SEQ ID NO: 1207083 - RNA, 19 nt, Artificial Sequence
  Description of Artificial Sequence: Synthetic oligonucleotide
  Antisense strand to SEQ ID NO: 1207082
cuuauacgaagguacccuu

SEQ ID NO: 1207084 - RNA, 19 nt, Artificial Sequence
  Description of Artificial Sequence: Synthetic oligonucleotide
  Sense strand starting at position 432 of SEQ ID NO: 917081
gguaccuucguauaagaau

SEQ ID NO: 1207085 - RNA, 19 nt, Artificial Sequence
  Description of Artificial Sequence: Synthetic oligonucleotide
  Antisense strand to SEQ ID NO: 1207084
auucuuauacgaagguacc

SEQ ID NO: 1207086 - RNA, 19 nt, Artificial Sequence
  Description of Artificial Sequence: Synthetic oligonucleotide
  Sense strand starting at position 463 of SEQ ID NO: 917081
uaacuaagugcugacagau

SEQ ID NO: 1207087 - RNA, 19 nt, Artificial Sequence
  Description of Artificial Sequence: Synthetic oligonucleotide
  Antisense strand to SEQ ID NO: 1207086
aucugucagcacuuaguua

SEQ ID NO: 1207088 - RNA, 19 nt, Artificial Sequence
  Description of Artificial Sequence: Synthetic oligonucleotide
  Sense strand starting at position 495 of SEQ ID NO: 917081
gacugaauuuccuggauga

SEQ ID NO: 1207089 - RNA, 19 nt, Artificial Sequence
  Description of Artificial Sequence: Synthetic oligonucleotide
  Antisense strand to SEQ ID NO: 1207088
ucauccaggaaauucaguc

SEQ ID NO: 1207090 - RNA, 19 nt, Artificial Sequence
  Description of Artificial Sequence: Synthetic oligonucleotide
  Sense strand starting at position 618 of SEQ ID NO: 917081
ucauuugucuaagagacug

SEQ ID NO: 1207091 - RNA, 19 nt, Artificial Sequence
  Description of Artificial Sequence: Synthetic oligonucleotide
  Antisense strand to SEQ ID NO: 1207090
cagucucuuagacaaauga

SEQ ID NO: 1207092 - RNA, 19 nt, Artificial Sequence
  Description of Artificial Sequence: Synthetic oligonucleotide
  Sense strand starting at position 623 of SEQ ID NO: 917081
ugucuaagagacugccauu

SEQ ID NO: 1207093 - RNA, 19 nt, Artificial Sequence
  Description of Artificial Sequence: Synthetic oligonucleotide
  Antisense strand to SEQ ID NO: 1207092
aauggcagucucuuagaca

SEQ ID NO: 1207094 - RNA, 19 nt, Artificial Sequence
  Description of Artificial Sequence: Synthetic oligonucleotide
  Sense strand starting at position 626 of SEQ ID NO: 917081
cuaagagacugccauuuaa

SEQ ID NO: 1207095 - RNA, 19 nt, Artificial Sequence
  Description of Artificial Sequence: Synthetic oligonucleotide
  Antisense strand to SEQ ID NO: 1207094
uuaaauggcagucucuuag

SEQ ID NO: 1207096 - RNA, 19 nt, Artificial Sequence
  Description of Artificial Sequence: Synthetic oligonucleotide
  Sense strand starting at position 810 of SEQ ID NO: 917081
uuguguauucugcaaucag

SEQ ID NO: 1207097 - RNA, 19 nt, Artificial Sequence
  Description of Artificial Sequence: Synthetic oligonucleotide
  Antisense strand to SEQ ID NO: 1207096
cugauugcagaauacacaa

SEQ ID NO: 1207098 - RNA, 19 nt, Artificial Sequence
  Description of Artificial Sequence: Synthetic oligonucleotide
  Sense strand starting at position 838 of SEQ ID NO: 917081
uuucuuuaggaacgaaauu

SEQ ID NO: 1207099 - RNA, 19 nt, Artificial Sequence
  Description of Artificial Sequence: Synthetic oligonucleotide
  Antisense strand to SEQ ID NO: 1207098
aauuucguuccuaaagaaa

SEQ ID NO: 1207100 - RNA, 19 nt, Artificial Sequence
  Description of Artificial Sequence: Synthetic oligonucleotide
  Sense strand starting at position 960 of SEQ ID NO: 917081
gggcauuacacccagcgau

SEQ ID NO: 1207101 - RNA, 19 nt, Artificial Sequence
  Description of Artificial Sequence: Synthetic oligonucleotide
  Antisense strand to SEQ ID NO: 1207100
aucgcuggguguaaugccc

SEQ ID NO: 1207102 - RNA, 19 nt, Artificial Sequence
  Description of Artificial Sequence: Synthetic oligonucleotide
  Sense strand starting at position 983 of SEQ ID NO: 917081
auuaaaucgcaguagcuaa

SEQ ID NO: 1207103 - RNA, 19 nt, Artificial Sequence
  Description of Artificial Sequence: Synthetic oligonucleotide
  Antisense strand to SEQ ID NO: 1207102
uuagcuacugcgauuuaau

SEQ ID NO: 1207104 - RNA, 19 nt, Artificial Sequence
  Description of Artificial Sequence: Synthetic oligonucleotide
  Sense strand starting at position 1872 of SEQ ID NO: 917081
ucuguuugucaauaaggag

SEQ ID NO: 1207105 - RNA, 19 nt, Artificial Sequence
  Description of Artificial Sequence: Synthetic oligonucleotide
  Antisense strand to SEQ ID NO: 1207104
cuccuuauugacaaacaga

SEQ ID NO: 1207106 - RNA, 19 nt, Artificial Sequence
  Description of Artificial Sequence: Synthetic oligonucleotide
  Sense strand starting at position 2279 of SEQ ID NO: 917081
cuccgucaucccgugcgaa

SEQ ID NO: 1207107 - RNA, 19 nt, Artificial Sequence
  Description of Artificial Sequence: Synthetic oligonucleotide
  Antisense strand to SEQ ID NO: 1207106
uucgcacgggaugacggag

SEQ ID NO: 1207108 - RNA, 19 nt, Artificial Sequence
  Description of Artificial Sequence: Synthetic oligonucleotide
  Sense strand starting at position 2363 of SEQ ID NO: 917081
ccgggaucuccagguagaa

SEQ ID NO: 1207109 - RNA, 19 nt, Artificial Sequence
  Description of Artificial Sequence: Synthetic oligonucleotide
  Antisense strand to SEQ ID NO: 1207108
uucuaccuggagaucccgg

SEQ ID NO: 1207110 - RNA, 19 nt, Artificial Sequence
  Description of Artificial Sequence: Synthetic oligonucleotide
  Sense strand starting at position 2493 of SEQ ID NO: 917081
cugguuuaugcacacagau

SEQ ID NO: 1207111 - RNA, 19 nt, Artificial Sequence
  Description of Artificial Sequence: Synthetic oligonucleotide
  Antisense strand to SEQ ID NO: 1207110
aucugugugcauaaaccag

SEQ ID NO: 1207112 - RNA, 19 nt, Artificial Sequence
  Description of Artificial Sequence: Synthetic oligonucleotide
  Sense strand starting at position 2502 of SEQ ID NO: 917081
gcacacagaugcucuaaca

SEQ ID NO: 1207113 - RNA, 19 nt, Artificial Sequence
  Description of Artificial Sequence: Synthetic oligonucleotide
  Antisense strand to SEQ ID NO: 1207112
uguuagagcaucugugugc

SEQ ID NO: 1207114 - RNA, 19 nt, Artificial Sequence
  Description of Artificial Sequence: Synthetic oligonucleotide
  Sense strand starting at position 2511 of SEQ ID NO: 917081
ugcucuaacaaguagggau

SEQ ID NO: 1207115 - RNA, 19 nt, Artificial Sequence
  Description of Artificial Sequence: Synthetic oligonucleotide
  Antisense strand to SEQ ID NO: 1207114
aucccuacuuguuagagca

SEQ ID NO: 1207116 - RNA, 19 nt, Artificial Sequence
  Description of Artificial Sequence: Synthetic oligonucleotide
  Sense strand starting at position 2518 of SEQ ID NO: 917081
acaaguagggauugucaac

SEQ ID NO: 1207117 - RNA, 19 nt, Artificial Sequence
  Description of Artificial Sequence: Synthetic oligonucleotide
  Antisense strand to SEQ ID NO: 1207116
guugacaaucccuacuugu

SEQ ID NO: 1207118 - RNA, 19 nt, Artificial Sequence
  Description of Artificial Sequence: Synthetic oligonucleotide
  Sense strand starting at position 2578 of SEQ ID NO: 917081
ggugacuuccucuaggcua

SEQ ID NO: 1207119 - RNA, 19 nt, Artificial Sequence
  Description of Artificial Sequence: Synthetic oligonucleotide
  Antisense strand to SEQ ID NO: 1207118
uagccuagaggaagucacc

SEQ ID NO: 1207120 - RNA, 19 nt, Artificial Sequence
  Description of Artificial Sequence: Synthetic oligonucleotide
  Sense strand starting at position 2580 of SEQ ID NO: 917081
ugacuuccucuaggcuaua

SEQ ID NO: 1207121 - RNA, 19 nt, Artificial Sequence
  Description of Artificial Sequence: Synthetic oligonucleotide
  Antisense strand to SEQ ID NO: 1207120
uauagccuagaggaaguca

SEQ ID NO: 1207122 - RNA, 19 nt, Artificial Sequence
  Description of Artificial Sequence: Synthetic oligonucleotide
  Sense strand starting at position 2618 of SEQ ID NO: 917081
ccaagagucuaacucuguu

SEQ ID NO: 1207123 - RNA, 19 nt, Artificial Sequence
  Description of Artificial Sequence: Synthetic oligonucleotide
  Antisense strand to SEQ ID NO: 1207122
aacagaguuagacucuugg

SEQ ID NO: 1207124 - RNA, 19 nt, Artificial Sequence
  Description of Artificial Sequence: Synthetic oligonucleotide
  Sense strand starting at position 2783 of SEQ ID NO: 917081
aggucucuacgucaacaua

SEQ ID NO: 1207125 - RNA, 19 nt, Artificial Sequence
  Description of Artificial Sequence: Synthetic oligonucleotide
  Antisense strand to SEQ ID NO: 1207124
uauguugacguagagaccu

SEQ ID NO: 1207126 - RNA, 19 nt, Artificial Sequence
  Description of Artificial Sequence: Synthetic oligonucleotide
  Sense strand starting at position 2836 of SEQ ID NO: 917081
ccaucuaacuggucuccga

SEQ ID NO: 1207127 - RNA, 19 nt, Artificial Sequence
  Description of Artificial Sequence: Synthetic oligonucleotide
  Antisense strand to SEQ ID NO: 1207126
ucggagaccaguuagaugg

SEQ ID NO: 1207128 - RNA, 19 nt, Artificial Sequence
  Description of Artificial Sequence: Synthetic oligonucleotide
  Sense strand starting at position 3101 of SEQ ID NO: 917081
uggguuacuucugcauaaa

SEQ ID NO: 1207129 - RNA, 19 nt, Artificial Sequence
  Description of Artificial Sequence: Synthetic oligonucleotide
  Antisense strand to SEQ ID NO: 1207128
uuuaugcagaaguaaccca

SEQ ID NO: 1207130 - RNA, 19 nt, Artificial Sequence
  Description of Artificial Sequence: Synthetic oligonucleotide
  Sense strand starting at position 3102 of SEQ ID NO: 917081
ggguuacuucugcauaaag

SEQ ID NO: 1207131 - RNA, 19 nt, Artificial Sequence
  Description of Artificial Sequence: Synthetic oligonucleotide
  Antisense strand to SEQ ID NO: 1207130
cuuuaugcagaaguaaccc

SEQ ID NO: 1207132 - RNA, 19 nt, Artificial Sequence
  Description of Artificial Sequence: Synthetic oligonucleotide
  Sense strand starting at position 3104 of SEQ ID NO: 917081
guuacuucugcauaaagua

SEQ ID NO: 1207133 - RNA, 19 nt, Artificial Sequence
  Description of Artificial Sequence: Synthetic oligonucleotide
  Antisense strand to SEQ ID NO: 1207132
uacuuuaugcagaaguaac

SEQ ID NO: 1207134 - RNA, 19 nt, Artificial Sequence
  Description of Artificial Sequence: Synthetic oligonucleotide
  Sense strand starting at position 3151 of SEQ ID NO: 917081
ccaucuuucuagguuuaca

SEQ ID NO: 1207135 - RNA, 19 nt, Artificial Sequence
  Description of Artificial Sequence: Synthetic oligonucleotide
  Antisense strand to SEQ ID NO: 1207134
uguaaaccuagaaagaugg

SEQ ID NO: 1207136 - RNA, 19 nt, Artificial Sequence
  Description of Artificial Sequence: Synthetic oligonucleotide
  Sense strand starting at position 3225 of SEQ ID NO: 917081
cagucagaagcccaggauu

SEQ ID NO: 1207137 - RNA, 19 nt, Artificial Sequence
  Description of Artificial Sequence: Synthetic oligonucleotide
  Antisense strand to SEQ ID NO: 1207136
aauccugggcuucugacug

SEQ ID NO: 1207138 - RNA, 19 nt, Artificial Sequence
  Description of Artificial Sequence: Synthetic oligonucleotide
  Sense strand starting at position 3227 of SEQ ID NO: 917081
gucagaagcccaggauucu

SEQ ID NO: 1207139 - RNA, 19 nt, Artificial Sequence
  Description of Artificial Sequence: Synthetic oligonucleotide
  Antisense strand to SEQ ID NO: 1207138
agaauccugggcuucugac

SEQ ID NO: 1207140 - RNA, 19 nt, Artificial Sequence
  Description of Artificial Sequence: Synthetic oligonucleotide
  Sense strand starting at position 3269 of SEQ ID NO: 917081
gcugauagaccuuggaagu

SEQ ID NO: 1207141 - RNA, 19 nt, Artificial Sequence
  Description of Artificial Sequence: Synthetic oligonucleotide
  Antisense strand to SEQ ID NO: 1207140
acuuccaaggucuaucagc

SEQ ID NO: 1207142 - RNA, 19 nt, Artificial Sequence
  Description of Artificial Sequence: Synthetic oligonucleotide
  Sense strand starting at position 3270 of SEQ ID NO: 917081
cugauagaccuuggaagua

SEQ ID NO: 1207143 - RNA, 19 nt, Artificial Sequence
  Description of Artificial Sequence: Synthetic oligonucleotide
  Antisense strand to SEQ ID NO: 1207142
uacuuccaaggucuaucag

SEQ ID NO: 1207144 - RNA, 19 nt, Artificial Sequence
  Description of Artificial Sequence: Synthetic oligonucleotide
  Sense strand starting at position 3280 of SEQ ID NO: 917081
uuggaaguauugcuuaauu

SEQ ID NO: 1207145 - RNA, 19 nt, Artificial Sequence
  Description of Artificial Sequence: Synthetic oligonucleotide
  Antisense strand to SEQ ID NO: 1207144
aauuaagcaauacuuccaa

SEQ ID NO: 1207146 - RNA, 19 nt, Artificial Sequence
  Description of Artificial Sequence: Synthetic oligonucleotide
  Sense strand starting at position 3575 of SEQ ID NO: 917081
gcuggaauccgagagugag

SEQ ID NO: 1207147 - RNA, 19 nt, Artificial Sequence
  Description of Artificial Sequence: Synthetic oligonucleotide
  Antisense strand to SEQ ID NO: 1207146
cucacucucggauuccagc

SEQ ID NO: 1207148 - RNA, 19 nt, Artificial Sequence
  Description of Artificial Sequence: Synthetic oligonucleotide
  Sense strand starting at position 3720 of SEQ ID NO: 917081
ugcgcauagaugcauauuu

SEQ ID NO: 1207149 - RNA, 19 nt, Artificial Sequence
  Description of Artificial Sequence: Synthetic oligonucleotide
  Antisense strand to SEQ ID NO: 1207148
aaauaugcaucuaugcgca

SEQ ID NO: 1207150 - RNA, 19 nt, Artificial Sequence
  Description of Artificial Sequence: Synthetic oligonucleotide
  Sense strand starting at position 3868 of SEQ ID NO: 917081
cgauaaauccaucguaaag

SEQ ID NO: 1207151 - RNA, 19 nt, Artificial Sequence
  Description of Artificial Sequence: Synthetic oligonucleotide
  Antisense strand to SEQ ID NO: 1207150
cuuuacgauggauuuaucg

SEQ ID NO: 1207152 - RNA, 19 nt, Artificial Sequence
  Description of Artificial Sequence: Synthetic oligonucleotide
  Sense strand starting at position 3895 of SEQ ID NO: 917081
ucguaagucgagccauugu

SEQ ID NO: 1207153 - RNA, 19 nt, Artificial Sequence
  Description of Artificial Sequence: Synthetic oligonucleotide
  Antisense strand to SEQ ID NO: 1207152
acaauggcucgacuuacga

SEQ ID NO: 1207154 - RNA, 19 nt, Artificial Sequence
  Description of Artificial Sequence: Synthetic oligonucleotide
  Sense strand starting at position 3909 of SEQ ID NO: 917081
auuguaaauccguagucua

SEQ ID NO: 1207155 - RNA, 19 nt, Artificial Sequence
  Description of Artificial Sequence: Synthetic oligonucleotide
  Antisense strand to SEQ ID NO: 1207154
uagacuacggauuuacaau

SEQ ID NO: 1207156 - RNA, 19 nt, Artificial Sequence
  Description of Artificial Sequence: Synthetic oligonucleotide
  Sense strand starting at position 3949 of SEQ ID NO: 917081
gcaauuagggcccagguua

SEQ ID NO: 1207157 - RNA, 19 nt, Artificial Sequence
  Description of Artificial Sequence: Synthetic oligonucleotide
  Antisense strand to SEQ ID NO: 1207156
uaaccugggcccuaauugc

SEQ ID NO: 1207158 - RNA, 19 nt, Artificial Sequence
  Description of Artificial Sequence: Synthetic oligonucleotide
  Sense strand starting at position 16 of SEQ ID NO: 917082
ggagaugucuuaucucugu

SEQ ID NO: 1207159 - RNA, 19 nt, Artificial Sequence
  Description of Artificial Sequence: Synthetic oligonucleotide
  Antisense strand to SEQ ID NO: 1207158
acagagauaagacaucucc

SEQ ID NO: 1207160 - RNA, 19 nt, Artificial Sequence
  Description of Artificial Sequence: Synthetic oligonucleotide
  Sense strand starting at position 95 of SEQ ID NO: 917082
gaggaacggugauuccaaa

SEQ ID NO: 1207161 - RNA, 19 nt, Artificial Sequence
  Description of Artificial Sequence: Synthetic oligonucleotide
  Antisense strand to SEQ ID NO: 1207160
uuuggaaucaccguuccuc

SEQ ID NO: 1207162 - RNA, 19 nt, Artificial Sequence
  Description of Artificial Sequence: Synthetic oligonucleotide
  Sense strand starting at position 215 of SEQ ID NO: 917082
gguuacuugcuccaggaaa

SEQ ID NO: 1207163 - RNA, 19 nt, Artificial Sequence
  Description of Artificial Sequence: Synthetic oligonucleotide
  Antisense strand to SEQ ID NO: 1207162
uuuccuggagcaaguaacc

SEQ ID NO: 1207164 - RNA, 19 nt, Artificial Sequence
  Description of Artificial Sequence: Synthetic oligonucleotide
  Sense strand starting at position 355 of SEQ ID NO: 917082
gcuacauaacaauggacua

SEQ ID NO: 1207165 - RNA, 19 nt, Artificial Sequence
  Description of Artificial Sequence: Synthetic oligonucleotide
  Antisense strand to SEQ ID NO: 1207164
uaguccauuguuauguagc

SEQ ID NO: 1207166 - RNA, 19 nt, Artificial Sequence
  Description of Artificial Sequence: Synthetic oligonucleotide
  Sense strand starting at position 469 of SEQ ID NO: 917082
ugcuuugcucuguugcaca

SEQ ID NO: 1207167 - RNA, 19 nt, Artificial Sequence
  Description of Artificial Sequence: Synthetic oligonucleotide
  Antisense strand to SEQ ID NO: 1207166
ugugcaacagagcaaagca

SEQ ID NO: 1207168 - RNA, 19 nt, Artificial Sequence
  Description of Artificial Sequence: Synthetic oligonucleotide
  Sense strand starting at position 525 of SEQ ID NO: 917082
cuauuagacccgcauuacu

SEQ ID NO: 1207169 - RNA, 19 nt, Artificial Sequence
  Description of Artificial Sequence: Synthetic oligonucleotide
  Antisense strand to SEQ ID NO: 1207168
aguaaugcgggucuaauag

SEQ ID NO: 1207170 - RNA, 19 nt, Artificial Sequence
  Description of Artificial Sequence: Synthetic oligonucleotide
  Sense strand starting at position 992 of SEQ ID NO: 917082
uguuauuaacgccauuaua

SEQ ID NO: 1207171 - RNA, 19 nt, Artificial Sequence
  Description of Artificial Sequence: Synthetic oligonucleotide
  Antisense strand to SEQ ID NO: 1207170
uauaauggcguuaauaaca

SEQ ID NO: 1207172 - RNA, 19 nt, Artificial Sequence
  Description of Artificial Sequence: Synthetic oligonucleotide
  Sense strand starting at position 1083 of SEQ ID NO: 917082
aggcuacuaguguguaaau

SEQ ID NO: 1207173 - RNA, 19 nt, Artificial Sequence
  Description of Artificial Sequence: Synthetic oligonucleotide
  Antisense strand to SEQ ID NO: 1207172
auuuacacacuaguagccu

SEQ ID NO: 1207174 - RNA, 19 nt, Artificial Sequence
  Description of Artificial Sequence: Synthetic oligonucleotide
  Sense strand starting at position 1085 of SEQ ID NO: 917082
gcuacuaguguguaaauua

SEQ ID NO: 1207175 - RNA, 19 nt, Artificial Sequence
  Description of Artificial Sequence: Synthetic oligonucleotide
  Antisense strand to SEQ ID NO: 1207174
uaauuuacacacuaguagc

SEQ ID NO: 1207176 - RNA, 19 nt, Artificial Sequence
  Description of Artificial Sequence: Synthetic oligonucleotide
  Sense strand starting at position 1100 of SEQ ID NO: 917082
auuauuuggucccaggauu

SEQ ID NO: 1207177 - RNA, 19 nt, Artificial Sequence
  Description of Artificial Sequence: Synthetic oligonucleotide
  Antisense strand to SEQ ID NO: 1207176
aauccugggaccaaauaau

SEQ ID NO: 1207178 - RNA, 19 nt, Artificial Sequence
  Description of Artificial Sequence: Synthetic oligonucleotide
  Sense strand starting at position 1134 of SEQ ID NO: 917082
ggcacuuacuuguugauga

SEQ ID NO: 1207179 - RNA, 19 nt, Artificial Sequence
  Description of Artificial Sequence: Synthetic oligonucleotide
  Antisense strand to SEQ ID NO: 1207178
ucaucaacaaguaagugcc

SEQ ID NO: 1207180 - RNA, 19 nt, Artificial Sequence
  Description of Artificial Sequence: Synthetic oligonucleotide
  Sense strand starting at position 1166 of SEQ ID NO: 917082
caugauguugccuaguuga

SEQ ID NO: 1207181 - RNA, 19 nt, Artificial Sequence
  Description of Artificial Sequence: Synthetic oligonucleotide
  Antisense strand to SEQ ID NO: 1207180
ucaacuaggcaacaucaug

SEQ ID NO: 1207182 - RNA, 19 nt, Artificial Sequence
  Description of Artificial Sequence: Synthetic oligonucleotide
  Sense strand starting at position 1169 of SEQ ID NO: 917082
gauguugccuaguugauca

SEQ ID NO: 1207183 - RNA, 19 nt, Artificial Sequence
  Description of Artificial Sequence: Synthetic oligonucleotide
  Antisense strand to SEQ ID NO: 1207182
ugaucaacuaggcaacauc

SEQ ID NO: 1207184 - RNA, 19 nt, Artificial Sequence
  Description of Artificial Sequence: Synthetic oligonucleotide
  Sense strand starting at position 1209 of SEQ ID NO: 917082
cauccauaacgcuggaaga

SEQ ID NO: 1207185 - RNA, 19 nt, Artificial Sequence
  Description of Artificial Sequence: Synthetic oligonucleotide
  Antisense strand to SEQ ID NO: 1207184
ucuuccagcguuauggaug

SEQ ID NO: 1207186 - RNA, 19 nt, Artificial Sequence
  Description of Artificial Sequence: Synthetic oligonucleotide
  Sense strand starting at position 2146 of SEQ ID NO: 917082
uguggaucugcuuaugaua

SEQ ID NO: 1207187 - RNA, 19 nt, Artificial Sequence
  Description of Artificial Sequence: Synthetic oligonucleotide
  Antisense strand to SEQ ID NO: 1207186
uaucauaagcagauccaca

SEQ ID NO: 1207188 - RNA, 19 nt, Artificial Sequence
  Description of Artificial Sequence: Synthetic oligonucleotide
  Sense strand starting at position 2282 of SEQ ID NO: 917082
cuuugaagucuugguucca

SEQ ID NO: 1207189 - RNA, 19 nt, Artificial Sequence
  Description of Artificial Sequence: Synthetic oligonucleotide
  Antisense strand to SEQ ID NO: 1207188
uggaaccaagacuucaaag

SEQ ID NO: 1207190 - RNA, 19 nt, Artificial Sequence
  Description of Artificial Sequence: Synthetic oligonucleotide
  Sense strand starting at position 2283 of SEQ ID NO: 917082
uuugaagucuugguuccau

SEQ ID NO: 1207191 - RNA, 19 nt, Artificial Sequence
  Description of Artificial Sequence: Synthetic oligonucleotide
  Antisense strand to SEQ ID NO: 1207190
auggaaccaagacuucaaa

SEQ ID NO: 1207192 - RNA, 19 nt, Artificial Sequence
  Description of Artificial Sequence: Synthetic oligonucleotide
  Sense strand starting at position 2312 of SEQ ID NO: 917082
guucacagagguugagaaa

SEQ ID NO: 1207193 - RNA, 19 nt, Artificial Sequence
  Description of Artificial Sequence: Synthetic oligonucleotide
  Antisense strand to SEQ ID NO: 1207192
uuucucaaccucugugaac

SEQ ID NO: 1207194 - RNA, 19 nt, Artificial Sequence
  Description of Artificial Sequence: Synthetic oligonucleotide
  Sense strand starting at position 2330 of SEQ ID NO: 917082
agguuaggaauugguuuaa

SEQ ID NO: 1207195 - RNA, 19 nt, Artificial Sequence
  Description of Artificial Sequence: Synthetic oligonucleotide
  Antisense strand to SEQ ID NO: 1207194
uuaaaccaauuccuaaccu

SEQ ID NO: 1207196 - RNA, 19 nt, Artificial Sequence
  Description of Artificial Sequence: Synthetic oligonucleotide
  Sense strand starting at position 2334 of SEQ ID NO: 917082
uaggaauugguuuaaguuc

SEQ ID NO: 1207197 - RNA, 19 nt, Artificial Sequence
  Description of Artificial Sequence: Synthetic oligonucleotide
  Antisense strand to SEQ ID NO: 1207196
gaacuuaaaccaauuccua

SEQ ID NO: 1207198 - RNA, 19 nt, Artificial Sequence
  Description of Artificial Sequence: Synthetic oligonucleotide
  Sense strand starting at position 2453 of SEQ ID NO: 917082
ggcagucuuguccaaggua

SEQ ID NO: 1207199 - RNA, 19 nt, Artificial Sequence
  Description of Artificial Sequence: Synthetic oligonucleotide
  Antisense strand to SEQ ID NO: 1207198
uaccuuggacaagacugcc

SEQ ID NO: 1207200 - RNA, 19 nt, Artificial Sequence
  Description of Artificial Sequence: Synthetic oligonucleotide
  Sense strand starting at position 2456 of SEQ ID NO: 917082
agucuuguccaagguauag

SEQ ID NO: 1207201 - RNA, 19 nt, Artificial Sequence
  Description of Artificial Sequence: Synthetic oligonucleotide
  Antisense strand to SEQ ID NO: 1207200
cuauaccuuggacaagacu

SEQ ID NO: 1207202 - RNA, 19 nt, Artificial Sequence
  Description of Artificial Sequence: Synthetic oligonucleotide
  Sense strand starting at position 2505 of SEQ ID NO: 917082
caucaaguccugugguuua

SEQ ID NO: 1207203 - RNA, 19 nt, Artificial Sequence
  Description of Artificial Sequence: Synthetic oligonucleotide
  Antisense strand to SEQ ID NO: 1207202
uaaaccacaggacuugaug

SEQ ID NO: 1207204 - RNA, 19 nt, Artificial Sequence
  Description of Artificial Sequence: Synthetic oligonucleotide
  Sense strand starting at position 2508 of SEQ ID NO: 917082
caaguccugugguuuauuu

SEQ ID NO: 1207205 - RNA, 19 nt, Artificial Sequence
  Description of Artificial Sequence: Synthetic oligonucleotide
  Antisense strand to SEQ ID NO: 1207204
aaauaaaccacaggacuug

SEQ ID NO: 1207206 - RNA, 19 nt, Artificial Sequence
  Description of Artificial Sequence: Synthetic oligonucleotide
  Sense strand starting at position 2558 of SEQ ID NO: 917082
agcuuagcaugaguggauu

SEQ ID NO: 1207207 - RNA, 19 nt, Artificial Sequence
  Description of Artificial Sequence: Synthetic oligonucleotide
  Antisense strand to SEQ ID NO: 1207206
aauccacucaugcuaagcu

SEQ ID NO: 1207208 - RNA, 19 nt, Artificial Sequence
  Description of Artificial Sequence: Synthetic oligonucleotide
  Sense strand starting at position 2725 of SEQ ID NO: 917082
gguagaauucccuggacuc

SEQ ID NO: 1207209 - RNA, 19 nt, Artificial Sequence
  Description of Artificial Sequence: Synthetic oligonucleotide
  Antisense strand to SEQ ID NO: 1207208
gaguccagggaauucuacc

SEQ ID NO: 1207210 - RNA, 19 nt, Artificial Sequence
  Description of Artificial Sequence: Synthetic oligonucleotide
  Sense strand starting at position 2726 of SEQ ID NO: 917082
guagaauucccuggacucu

SEQ ID NO: 1207211 - RNA, 19 nt, Artificial Sequence
  Description of Artificial Sequence: Synthetic oligonucleotide
  Antisense strand to SEQ ID NO: 1207210
agaguccagggaauucuac

SEQ ID NO: 1207212 - RNA, 19 nt, Artificial Sequence
  Description of Artificial Sequence: Synthetic oligonucleotide
  Sense strand starting at position 2778 of SEQ ID NO: 917082
auuggagugugcucuuaag

SEQ ID NO: 1207213 - RNA, 19 nt, Artificial Sequence
  Description of Artificial Sequence: Synthetic oligonucleotide
  Antisense strand to SEQ ID NO: 1207212
cuuaagagcacacuccaau

SEQ ID NO: 1207214 - RNA, 19 nt, Artificial Sequence
  Description of Artificial Sequence: Synthetic oligonucleotide
  Sense strand starting at position 2847 of SEQ ID NO: 917082
gaaguugaacugugaacaa

SEQ ID NO: 1207215 - RNA, 19 nt, Artificial Sequence
  Description of Artificial Sequence: Synthetic oligonucleotide
  Antisense strand to SEQ ID NO: 1207214
uuguucacaguucaacuuc

SEQ ID NO: 1207216 - RNA, 19 nt, Artificial Sequence
  Description of Artificial Sequence: Synthetic oligonucleotide
  Sense strand starting at position 2858 of SEQ ID NO: 917082
gugaacaauuuguaauaga

SEQ ID NO: 1207217 - RNA, 19 nt, Artificial Sequence
  Description of Artificial Sequence: Synthetic oligonucleotide
  Antisense strand to SEQ ID NO: 1207216
ucuauuacaaauuguucac

SEQ ID NO: 1207218 - RNA, 19 nt, Artificial Sequence
  Description of Artificial Sequence: Synthetic oligonucleotide
  Sense strand starting at position 2970 of SEQ ID NO: 917082
acugacugcucauuaaaug

SEQ ID NO: 1207219 - RNA, 19 nt, Artificial Sequence
  Description of Artificial Sequence: Synthetic oligonucleotide
  Antisense strand to SEQ ID NO: 1207218
cauuuaaugagcagucagu

SEQ ID NO: 1207220 - RNA, 19 nt, Artificial Sequence
  Description of Artificial Sequence: Synthetic oligonucleotide
  Sense strand starting at position 2971 of SEQ ID NO: 917082
cugacugcucauuaaaugu

SEQ ID NO: 1207221 - RNA, 19 nt, Artificial Sequence
  Description of Artificial Sequence: Synthetic oligonucleotide
  Antisense strand to SEQ ID NO: 1207220
acauuuaaugagcagucag

SEQ ID NO: 1207222 - RNA, 19 nt, Artificial Sequence
  Description of Artificial Sequence: Synthetic oligonucleotide
  Sense strand starting at position 2975 of SEQ ID NO: 917082
cugcucauuaaauguggga

SEQ ID NO: 1207223 - RNA, 19 nt, Artificial Sequence
  Description of Artificial Sequence: Synthetic oligonucleotide
  Antisense strand to SEQ ID NO: 1207222
ucccacauuuaaugagcag

SEQ ID NO: 1207224 - RNA, 19 nt, Artificial Sequence
  Description of Artificial Sequence: Synthetic oligonucleotide
  Sense strand starting at position 2977 of SEQ ID NO: 917082
gcucauuaaaugugggaug

SEQ ID NO: 1207225 - RNA, 19 nt, Artificial Sequence
  Description of Artificial Sequence: Synthetic oligonucleotide
  Antisense strand to SEQ ID NO: 1207224
caucccacauuuaaugagc

SEQ ID NO: 1207226 - RNA, 19 nt, Artificial Sequence
  Description of Artificial Sequence: Synthetic oligonucleotide
  Sense strand starting at position 2979 of SEQ ID NO: 917082
ucauuaaaugugggauguu

SEQ ID NO: 1207227 - RNA, 19 nt, Artificial Sequence
  Description of Artificial Sequence: Synthetic oligonucleotide
  Antisense strand to SEQ ID NO: 1207226
aacaucccacauuuaauga

SEQ ID NO: 1207228 - RNA, 19 nt, Artificial Sequence
  Description of Artificial Sequence: Synthetic oligonucleotide
  Sense strand starting at position 3055 of SEQ ID NO: 917082
gggacucagcugugagcaa

SEQ ID NO: 1207229 - RNA, 19 nt, Artificial Sequence
  Description of Artificial Sequence: Synthetic oligonucleotide
  Antisense strand to SEQ ID NO: 1207228
uugcucacagcugaguccc

SEQ ID NO: 1207230 - RNA, 19 nt, Artificial Sequence
  Description of Artificial Sequence: Synthetic oligonucleotide
  Sense strand starting at position 3250 of SEQ ID NO: 917082
gugaauuaguuucucauug

SEQ ID NO: 1207231 - RNA, 19 nt, Artificial Sequence
  Description of Artificial Sequence: Synthetic oligonucleotide
  Antisense strand to SEQ ID NO: 1207230
caaugagaaacuaauucac

SEQ ID NO: 1207232 - RNA, 19 nt, Artificial Sequence
  Description of Artificial Sequence: Synthetic oligonucleotide
  Sense strand starting at position 3741 of SEQ ID NO: 917082
guagguauggcaggaaauu

SEQ ID NO: 1207233 - RNA, 19 nt, Artificial Sequence
  Description of Artificial Sequence: Synthetic oligonucleotide
  Antisense strand to SEQ ID NO: 1207232
aauuuccugccauaccuac

SEQ ID NO: 1207234 - RNA, 19 nt, Artificial Sequence
  Description of Artificial Sequence: Synthetic oligonucleotide
  Sense strand starting at position 3827 of SEQ ID NO: 917082
aagagcuguagugaaagua

SEQ ID NO: 1207235 - RNA, 19 nt, Artificial Sequence
  Description of Artificial Sequence: Synthetic oligonucleotide
  Antisense strand to SEQ ID NO: 1207234
uacuuucacuacagcucuu

SEQ ID NO: 1207236 - RNA, 19 nt, Artificial Sequence
  Description of Artificial Sequence: Synthetic oligonucleotide
  Sense strand starting at position 3973 of SEQ ID NO: 917082
gucucaggucggcaguaaa

SEQ ID NO: 1207237 - RNA, 19 nt, Artificial Sequence
  Description of Artificial Sequence: Synthetic oligonucleotide
  Antisense strand to SEQ ID NO: 1207236
uuuacugccgaccugagac

SEQ ID NO: 1207238 - RNA, 19 nt, Artificial Sequence
  Description of Artificial Sequence: Synthetic oligonucleotide
  Sense strand starting at position 134 of SEQ ID NO: 917083
agaaauauuugcuagaaac

SEQ ID NO: 1207239 - RNA, 19 nt, Artificial Sequence
  Description of Artificial Sequence: Synthetic oligonucleotide
  Antisense strand to SEQ ID NO: 1207238
guuucuagcaaauauuucu

SEQ ID NO: 1207240 - RNA, 19 nt, Artificial Sequence
  Description of Artificial Sequence: Synthetic oligonucleotide
  Sense strand starting at position 162 of SEQ ID NO: 917083
auguacuacugacuagauu

SEQ ID NO: 1207241 - RNA, 19 nt, Artificial Sequence
  Description of Artificial Sequence: Synthetic oligonucleotide
  Antisense strand to SEQ ID NO: 1207240
aaucuagucaguaguacau

SEQ ID NO: 1207242 - RNA, 19 nt, Artificial Sequence
  Description of Artificial Sequence: Synthetic oligonucleotide
  Sense strand starting at position 418 of SEQ ID NO: 917083
ugaagaggucuccgaagca

SEQ ID NO: 1207243 - RNA, 19 nt, Artificial Sequence
  Description of Artificial Sequence: Synthetic oligonucleotide
  Antisense strand to SEQ ID NO: 1207242
ugcuucggagaccucuuca

SEQ ID NO: 1207244 - RNA, 19 nt, Artificial Sequence
  Description of Artificial Sequence: Synthetic oligonucleotide
  Sense strand starting at position 452 of SEQ ID NO: 917083
uaacguuccuguuuauaag

SEQ ID NO: 1207245 - RNA, 19 nt, Artificial Sequence
  Description of Artificial Sequence: Synthetic oligonucleotide
  Antisense strand to SEQ ID NO: 1207244
cuuauaaacaggaacguua

SEQ ID NO: 1207246 - RNA, 19 nt, Artificial Sequence
  Description of Artificial Sequence: Synthetic oligonucleotide
  Sense strand starting at position 453 of SEQ ID NO: 917083
aacguuccuguuuauaaga

SEQ ID NO: 1207247 - RNA, 19 nt, Artificial Sequence
  Description of Artificial Sequence: Synthetic oligonucleotide
  Antisense strand to SEQ ID NO: 1207246
ucuuauaaacaggaacguu

SEQ ID NO: 1207248 - RNA, 19 nt, Artificial Sequence
  Description of Artificial Sequence: Synthetic oligonucleotide
  Sense strand starting at position 461 of SEQ ID NO: 917083
uguuuauaagagcgaacga

SEQ ID NO: 1207249 - RNA, 19 nt, Artificial Sequence
  Description of Artificial Sequence: Synthetic oligonucleotide
  Antisense strand to SEQ ID NO: 1207248
ucguucgcucuuauaaaca

SEQ ID NO: 1207250 - RNA, 19 nt, Artificial Sequence
  Description of Artificial Sequence: Synthetic oligonucleotide
  Sense strand starting at position 462 of SEQ ID NO: 917083
guuuauaagagcgaacgau

SEQ ID NO: 1207251 - RNA, 19 nt, Artificial Sequence
  Description of Artificial Sequence: Synthetic oligonucleotide
  Antisense strand to SEQ ID NO: 1207250
aucguucgcucuuauaaac

SEQ ID NO: 1207252 - RNA, 19 nt, Artificial Sequence
  Description of Artificial Sequence: Synthetic oligonucleotide
  Sense strand starting at position 491 of SEQ ID NO: 917083
acccuuuagggagguuauu

SEQ ID NO: 1207253 - RNA, 19 nt, Artificial Sequence
  Description of Artificial Sequence: Synthetic oligonucleotide
  Antisense strand to SEQ ID NO: 1207252
aauaaccucccuaaagggu

SEQ ID NO: 1207254 - RNA, 19 nt, Artificial Sequence
  Description of Artificial Sequence: Synthetic oligonucleotide
  Sense strand starting at position 524 of SEQ ID NO: 917083
uuugcaagcguuuaagaac

SEQ ID NO: 1207255 - RNA, 19 nt, Artificial Sequence
  Description of Artificial Sequence: Synthetic oligonucleotide
  Antisense strand to SEQ ID NO: 1207254
guucuuaaacgcuugcaaa

SEQ ID NO: 1207256 - RNA, 19 nt, Artificial Sequence
  Description of Artificial Sequence: Synthetic oligonucleotide
  Sense strand starting at position 575 of SEQ ID NO: 917083
uuguuaugugacuaaacca

SEQ ID NO: 1207257 - RNA, 19 nt, Artificial Sequence
  Description of Artificial Sequence: Synthetic oligonucleotide
  Antisense strand to SEQ ID NO: 1207256
ugguuuagucacauaacaa

SEQ ID NO: 1207258 - RNA, 19 nt, Artificial Sequence
  Description of Artificial Sequence: Synthetic oligonucleotide
  Sense strand starting at position 860 of SEQ ID NO: 917083
ccaaguuucccggagacga

SEQ ID NO: 1207259 - RNA, 19 nt, Artificial Sequence
  Description of Artificial Sequence: Synthetic oligonucleotide
  Antisense strand to SEQ ID NO: 1207258
ucgucuccgggaaacuugg

SEQ ID NO: 1207260 - RNA, 19 nt, Artificial Sequence
  Description of Artificial Sequence: Synthetic oligonucleotide
  Sense strand starting at position 862 of SEQ ID NO: 917083
aaguuucccggagacgauu

SEQ ID NO: 1207261 - RNA, 19 nt, Artificial Sequence
  Description of Artificial Sequence: Synthetic oligonucleotide
  Antisense strand to SEQ ID NO: 1207260
aaucgucuccgggaaacuu

SEQ ID NO: 1207262 - RNA, 19 nt, Artificial Sequence
  Description of Artificial Sequence: Synthetic oligonucleotide
  Sense strand starting at position 1230 of SEQ ID NO: 917083
uaaacuuucuggcccggaa

SEQ ID NO: 1207263 - RNA, 19 nt, Artificial Sequence
  Description of Artificial Sequence: Synthetic oligonucleotide
  Antisense strand to SEQ ID NO: 1207262
uuccgggccagaaaguuua

SEQ ID NO: 1207264 - RNA, 19 nt, Artificial Sequence
  Description of Artificial Sequence: Synthetic oligonucleotide
  Sense strand starting at position 1483 of SEQ ID NO: 917083
uggccugacucaccgagaa

SEQ ID NO: 1207265 - RNA, 19 nt, Artificial Sequence
  Description of Artificial Sequence: Synthetic oligonucleotide
  Antisense strand to SEQ ID NO: 1207264
uucucggugagucaggcca

SEQ ID NO: 1207266 - RNA, 19 nt, Artificial Sequence
  Description of Artificial Sequence: Synthetic oligonucleotide
  Sense strand starting at position 1485 of SEQ ID NO: 917083
gccugacucaccgagaacu

SEQ ID NO: 1207267 - RNA, 19 nt, Artificial Sequence
  Description of Artificial Sequence: Synthetic oligonucleotide
  Antisense strand to SEQ ID NO: 1207266
aguucucggugagucaggc

SEQ ID NO: 1207268 - RNA, 19 nt, Artificial Sequence
  Description of Artificial Sequence: Synthetic oligonucleotide
  Sense strand starting at position 1487 of SEQ ID NO: 917083
cugacucaccgagaacuuu

SEQ ID NO: 1207269 - RNA, 19 nt, Artificial Sequence
  Description of Artificial Sequence: Synthetic oligonucleotide
  Antisense strand to SEQ ID NO: 1207268
aaaguucucggugagucag

SEQ ID NO: 1207270 - RNA, 19 nt, Artificial Sequence
  Description of Artificial Sequence: Synthetic oligonucleotide
  Sense strand starting at position 2050 of SEQ ID NO: 917083
ggaaacuuggcucgggagu

SEQ ID NO: 1207271 - RNA, 19 nt, Artificial Sequence
  Description of Artificial Sequence: Synthetic oligonucleotide
  Antisense strand to SEQ ID NO: 1207270
acucccgagccaaguuucc

SEQ ID NO: 1207272 - RNA, 19 nt, Artificial Sequence
  Description of Artificial Sequence: Synthetic oligonucleotide
  Sense strand starting at position 2074 of SEQ ID NO: 917083
ccuggacucucauuagcau

SEQ ID NO: 1207273 - RNA, 19 nt, Artificial Sequence
  Description of Artificial Sequence: Synthetic oligonucleotide
  Antisense strand to SEQ ID NO: 1207272
augcuaaugagaguccagg

SEQ ID NO: 1207274 - RNA, 19 nt, Artificial Sequence
  Description of Artificial Sequence: Synthetic oligonucleotide
  Sense strand starting at position 2075 of SEQ ID NO: 917083
cuggacucucauuagcauu

SEQ ID NO: 1207275 - RNA, 19 nt, Artificial Sequence
  Description of Artificial Sequence: Synthetic oligonucleotide
  Antisense strand to SEQ ID NO: 1207274
aaugcuaaugagaguccag

SEQ ID NO: 1207276 - RNA, 19 nt, Artificial Sequence
  Description of Artificial Sequence: Synthetic oligonucleotide
  Sense strand starting at position 2108 of SEQ ID NO: 917083
gcgcuuucuauggcuccaa

SEQ ID NO: 1207277 - RNA, 19 nt, Artificial Sequence
  Description of Artificial Sequence: Synthetic oligonucleotide
  Antisense strand to SEQ ID NO: 1207276
uuggagccauagaaagcgc

SEQ ID NO: 1207278 - RNA, 19 nt, Artificial Sequence
  Description of Artificial Sequence: Synthetic oligonucleotide
  Sense strand starting at position 2502 of SEQ ID NO: 917083
aucuguaacacgcagauga

SEQ ID NO: 1207279 - RNA, 19 nt, Artificial Sequence
  Description of Artificial Sequence: Synthetic oligonucleotide
  Antisense strand to SEQ ID NO: 1207278
ucaucugcguguuacagau

SEQ ID NO: 1207280 - RNA, 19 nt, Artificial Sequence
  Description of Artificial Sequence: Synthetic oligonucleotide
  Sense strand starting at position 2772 of SEQ ID NO: 917083
ccacaugcccuuugagaau

SEQ ID NO: 1207281 - RNA, 19 nt, Artificial Sequence
  Description of Artificial Sequence: Synthetic oligonucleotide
  Antisense strand to SEQ ID NO: 1207280
auucucaaagggcaugugg

SEQ ID NO: 1207282 - RNA, 19 nt, Artificial Sequence
  Description of Artificial Sequence: Synthetic oligonucleotide
  Sense strand starting at position 2826 of SEQ ID NO: 917083
ugggaucuguacccaaaga

SEQ ID NO: 1207283 - RNA, 19 nt, Artificial Sequence
  Description of Artificial Sequence: Synthetic oligonucleotide
  Antisense strand to SEQ ID NO: 1207282
ucuuuggguacagauccca

SEQ ID NO: 1207284 - RNA, 19 nt, Artificial Sequence
  Description of Artificial Sequence: Synthetic oligonucleotide
  Sense strand starting at position 2837 of SEQ ID NO: 917083
cccaaagacugucuggaau

SEQ ID NO: 1207285 - RNA, 19 nt, Artificial Sequence
  Description of Artificial Sequence: Synthetic oligonucleotide
  Antisense strand to SEQ ID NO: 1207284
auuccagacagucuuuggg

SEQ ID NO: 1207286 - RNA, 19 nt, Artificial Sequence
  Description of Artificial Sequence: Synthetic oligonucleotide
  Sense strand starting at position 2958 of SEQ ID NO: 917083
gucgguuuccugcuuuaug

SEQ ID NO: 1207287 - RNA, 19 nt, Artificial Sequence
  Description of Artificial Sequence: Synthetic oligonucleotide
  Antisense strand to SEQ ID NO: 1207286
cauaaagcaggaaaccgac

SEQ ID NO: 1207288 - RNA, 19 nt, Artificial Sequence
  Description of Artificial Sequence: Synthetic oligonucleotide
  Sense strand starting at position 2961 of SEQ ID NO: 917083
gguuuccugcuuuaugaga

SEQ ID NO: 1207289 - RNA, 19 nt, Artificial Sequence
  Description of Artificial Sequence: Synthetic oligonucleotide
  Antisense strand to SEQ ID NO: 1207288
ucucauaaagcaggaaacc

SEQ ID NO: 1207290 - RNA, 19 nt, Artificial Sequence
  Description of Artificial Sequence: Synthetic oligonucleotide
  Sense strand starting at position 2978 of SEQ ID NO: 917083
gagguucucaaaggugaca

SEQ ID NO: 1207291 - RNA, 19 nt, Artificial Sequence
  Description of Artificial Sequence: Synthetic oligonucleotide
  Antisense strand to SEQ ID NO: 1207290
ugucaccuuugagaaccuc

SEQ ID NO: 1207292 - RNA, 19 nt, Artificial Sequence
  Description of Artificial Sequence: Synthetic oligonucleotide
  Sense strand starting at position 3115 of SEQ ID NO: 917083
ccaggaauaugucuguaau

SEQ ID NO: 1207293 - RNA, 19 nt, Artificial Sequence
  Description of Artificial Sequence: Synthetic oligonucleotide
  Antisense strand to SEQ ID NO: 1207292
auuacagacauauuccugg

SEQ ID NO: 1207294 - RNA, 19 nt, Artificial Sequence
  Description of Artificial Sequence: Synthetic oligonucleotide
  Sense strand starting at position 3116 of SEQ ID NO: 917083
caggaauaugucuguaaug

SEQ ID NO: 1207295 - RNA, 19 nt, Artificial Sequence
  Description of Artificial Sequence: Synthetic oligonucleotide
  Antisense strand to SEQ ID NO: 1207294
cauuacagacauauuccug

SEQ ID NO: 1207296 - RNA, 19 nt, Artificial Sequence
  Description of Artificial Sequence: Synthetic oligonucleotide
  Sense strand starting at position 3117 of SEQ ID NO: 917083
aggaauaugucuguaaugu

SEQ ID NO: 1207297 - RNA, 19 nt, Artificial Sequence
  Description of Artificial Sequence: Synthetic oligonucleotide
  Antisense strand to SEQ ID NO: 1207296
acauuacagacauauuccu

SEQ ID NO: 1207298 - RNA, 19 nt, Artificial Sequence
  Description of Artificial Sequence: Synthetic oligonucleotide
  Sense strand starting at position 3118 of SEQ ID NO: 917083
ggaauaugucuguaauguc

SEQ ID NO: 1207299 - RNA, 19 nt, Artificial Sequence
  Description of Artificial Sequence: Synthetic oligonucleotide
  Antisense strand to SEQ ID NO: 1207298
gacauuacagacauauucc

SEQ ID NO: 1207300 - RNA, 19 nt, Artificial Sequence
  Description of Artificial Sequence: Synthetic oligonucleotide
  Sense strand starting at position 3134 of SEQ ID NO: 917083
gucgaugucuaccuuaaca

SEQ ID NO: 1207301 - RNA, 19 nt, Artificial Sequence
  Description of Artificial Sequence: Synthetic oligonucleotide
  Antisense strand to SEQ ID NO: 1207300
uguuaagguagacaucgac

SEQ ID NO: 1207302 - RNA, 19 nt, Artificial Sequence
  Description of Artificial Sequence: Synthetic oligonucleotide
  Sense strand starting at position 3136 of SEQ ID NO: 917083
cgaugucuaccuuaacauc

SEQ ID NO: 1207303 - RNA, 19 nt, Artificial Sequence
  Description of Artificial Sequence: Synthetic oligonucleotide
  Antisense strand to SEQ ID NO: 1207302
gauguuaagguagacaucg

SEQ ID NO: 1207304 - RNA, 19 nt, Artificial Sequence
  Description of Artificial Sequence: Synthetic oligonucleotide
  Sense strand starting at position 3145 of SEQ ID NO: 917083
ccuuaacaucaguagggua

SEQ ID NO: 1207305 - RNA, 19 nt, Artificial Sequence
  Description of Artificial Sequence: Synthetic oligonucleotide
  Antisense strand to SEQ ID NO: 1207304
uacccuacugauguuaagg

SEQ ID NO: 1207306 - RNA, 19 nt, Artificial Sequence
  Description of Artificial Sequence: Synthetic oligonucleotide
  Sense strand starting at position 3226 of SEQ ID NO: 917083
ggacauagugaauguuuac

SEQ ID NO: 1207307 - RNA, 19 nt, Artificial Sequence
  Description of Artificial Sequence: Synthetic oligonucleotide
  Antisense strand to SEQ ID NO: 1207306
guaaacauucacuaugucc

SEQ ID NO: 1207308 - RNA, 19 nt, Artificial Sequence
  Description of Artificial Sequence: Synthetic oligonucleotide
  Sense strand starting at position 3471 of SEQ ID NO: 917083
guuugacuucaguauggag

SEQ ID NO: 1207309 - RNA, 19 nt, Artificial Sequence
  Description of Artificial Sequence: Synthetic oligonucleotide
  Antisense strand to SEQ ID NO: 1207308
cuccauacugaagucaaac

SEQ ID NO: 1207310 - RNA, 19 nt, Artificial Sequence
  Description of Artificial Sequence: Synthetic oligonucleotide
  Sense strand starting at position 3570 of SEQ ID NO: 917083
gaaagauuauggucuuaau

SEQ ID NO: 1207311 - RNA, 19 nt, Artificial Sequence
  Description of Artificial Sequence: Synthetic oligonucleotide
  Antisense strand to SEQ ID NO: 1207310
auuaagaccauaaucuuuc

SEQ ID NO: 1207312 - RNA, 19 nt, Artificial Sequence
  Description of Artificial Sequence: Synthetic oligonucleotide
  Sense strand starting at position 3609 of SEQ ID NO: 917083
gauuuauucuggugaggac

SEQ ID NO: 1207313 - RNA, 19 nt, Artificial Sequence
  Description of Artificial Sequence: Synthetic oligonucleotide
  Antisense strand to SEQ ID NO: 1207312
guccucaccagaauaaauc

SEQ ID NO: 1207314 - RNA, 19 nt, Artificial Sequence
  Description of Artificial Sequence: Synthetic oligonucleotide
  Sense strand starting at position 3623 of SEQ ID NO: 917083
aggacugaccauugacuuu

SEQ ID NO: 1207315 - RNA, 19 nt, Artificial Sequence
  Description of Artificial Sequence: Synthetic oligonucleotide
  Antisense strand to SEQ ID NO: 1207314
aaagucaauggucaguccu

SEQ ID NO: 1207316 - RNA, 19 nt, Artificial Sequence
  Description of Artificial Sequence: Synthetic oligonucleotide
  Sense strand starting at position 3826 of SEQ ID NO: 917083
acagaugcacccugggauu

SEQ ID NO: 1207317 - RNA, 19 nt, Artificial Sequence
  Description of Artificial Sequence: Synthetic oligonucleotide
  Antisense strand to SEQ ID NO: 1207316
aaucccagggugcaucugu

SEQ ID NO: 1207318 - RNA, 19 nt, Artificial Sequence
  Description of Artificial Sequence: Synthetic oligonucleotide
  Sense strand starting at position 19 of SEQ ID NO: 917084
ggcucaguuacagaaaugu

SEQ ID NO: 1207319 - RNA, 19 nt, Artificial Sequence
  Description of Artificial Sequence: Synthetic oligonucleotide
  Antisense strand to SEQ ID NO: 1207318
acauuucuguaacugagcc

SEQ ID NO: 1207320 - RNA, 19 nt, Artificial Sequence
  Description of Artificial Sequence: Synthetic oligonucleotide
  Sense strand starting at position 1056 of SEQ ID NO: 917084
gggcugugugagggaaaua

SEQ ID NO: 1207321 - RNA, 19 nt, Artificial Sequence
  Description of Artificial Sequence: Synthetic oligonucleotide
  Antisense strand to SEQ ID NO: 1207320
uauuucccucacacagccc

SEQ ID NO: 1207322 - RNA, 19 nt, Artificial Sequence
  Description of Artificial Sequence: Synthetic oligonucleotide
  Sense strand starting at position 1057 of SEQ ID NO: 917084
ggcugugugagggaaauaa

SEQ ID NO: 1207323 - RNA, 19 nt, Artificial Sequence
  Description of Artificial Sequence: Synthetic oligonucleotide
  Antisense strand to SEQ ID NO: 1207322
uuauuucccucacacagcc

SEQ ID NO: 1207324 - RNA, 19 nt, Artificial Sequence
  Description of Artificial Sequence: Synthetic oligonucleotide
  Sense strand starting at position 1171 of SEQ ID NO: 917084
caguguuaugcucuugcuu

SEQ ID NO: 1207325 - RNA, 19 nt, Artificial Sequence
  Description of Artificial Sequence: Synthetic oligonucleotide
  Antisense strand to SEQ ID NO: 1207324
aagcaagagcauaacacug

SEQ ID NO: 1207326 - RNA, 19 nt, Artificial Sequence
  Description of Artificial Sequence: Synthetic oligonucleotide
  Sense strand starting at position 1172 of SEQ ID NO: 917084
aguguuaugcucuugcuuu

SEQ ID NO: 1207327 - RNA, 19 nt, Artificial Sequence
  Description of Artificial Sequence: Synthetic oligonucleotide
  Antisense strand to SEQ ID NO: 1207326
aaagcaagagcauaacacu

SEQ ID NO: 1207328 - RNA, 19 nt, Artificial Sequence
  Description of Artificial Sequence: Synthetic oligonucleotide
  Sense strand starting at position 1187 of SEQ ID NO: 917084
cuuugaggcuuugugaaca

SEQ ID NO: 1207329 - RNA, 19 nt, Artificial Sequence
  Description of Artificial Sequence: Synthetic oligonucleotide
  Antisense strand to SEQ ID NO: 1207328
uguucacaaagccucaaag

SEQ ID NO: 1207330 - RNA, 19 nt, Artificial Sequence
  Description of Artificial Sequence: Synthetic oligonucleotide
  Sense strand starting at position 1265 of SEQ ID NO: 917084
uuggaaauacugcggguaa

SEQ ID NO: 1207331 - RNA, 19 nt, Artificial Sequence
  Description of Artificial Sequence: Synthetic oligonucleotide
  Antisense strand to SEQ ID NO: 1207330
uuacccgcaguauuuccaa

SEQ ID NO: 1207332 - RNA, 19 nt, Artificial Sequence
  Description of Artificial Sequence: Synthetic oligonucleotide
  Sense strand starting at position 1293 of SEQ ID NO: 917084
gacuguuugcuacaguuau

SEQ ID NO: 1207333 - RNA, 19 nt, Artificial Sequence
  Description of Artificial Sequence: Synthetic oligonucleotide
  Antisense strand to SEQ ID NO: 1207332
auaacuguagcaaacaguc

SEQ ID NO: 1207334 - RNA, 19 nt, Artificial Sequence
  Description of Artificial Sequence: Synthetic oligonucleotide
  Sense strand starting at position 1306 of SEQ ID NO: 917084
aguuauuguuauccucaca

SEQ ID NO: 1207335 - RNA, 19 nt, Artificial Sequence
  Description of Artificial Sequence: Synthetic oligonucleotide
  Antisense strand to SEQ ID NO: 1207334
ugugaggauaacaauaacu

SEQ ID NO: 1207336 - RNA, 19 nt, Artificial Sequence
  Description of Artificial Sequence: Synthetic oligonucleotide
  Sense strand starting at position 2139 of SEQ ID NO: 917084
auguuaaggagaugaguuu

SEQ ID NO: 1207337 - RNA, 19 nt, Artificial Sequence
  Description of Artificial Sequence: Synthetic oligonucleotide
  Antisense strand to SEQ ID NO: 1207336
aaacucaucuccuuaacau

SEQ ID NO: 1207338 - RNA, 19 nt, Artificial Sequence
  Description of Artificial Sequence: Synthetic oligonucleotide
  Sense strand starting at position 2146 of SEQ ID NO: 917084
ggagaugaguuuccacacu

SEQ ID NO: 1207339 - RNA, 19 nt, Artificial Sequence
  Description of Artificial Sequence: Synthetic oligonucleotide
  Antisense strand to SEQ ID NO: 1207338
aguguggaaacucaucucc

SEQ ID NO: 1207340 - RNA, 19 nt, Artificial Sequence
  Description of Artificial Sequence: Synthetic oligonucleotide
  Sense strand starting at position 2152 of SEQ ID NO: 917084
gaguuuccacacugaaaga

SEQ ID NO: 1207341 - RNA, 19 nt, Artificial Sequence
  Description of Artificial Sequence: Synthetic oligonucleotide
  Antisense strand to SEQ ID NO: 1207340
ucuuucaguguggaaacuc

SEQ ID NO: 1207342 - RNA, 19 nt, Artificial Sequence
  Description of Artificial Sequence: Synthetic oligonucleotide
  Sense strand starting at position 2206 of SEQ ID NO: 917084
cacgucaaggcauaucauu

SEQ ID NO: 1207343 - RNA, 19 nt, Artificial Sequence
  Description of Artificial Sequence: Synthetic oligonucleotide
  Antisense strand to SEQ ID NO: 1207342
aaugauaugccuugacgug

SEQ ID NO: 1207344 - RNA, 19 nt, Artificial Sequence
  Description of Artificial Sequence: Synthetic oligonucleotide
  Sense strand starting at position 2212 of SEQ ID NO: 917084
aaggcauaucauugugaau

SEQ ID NO: 1207345 - RNA, 19 nt, Artificial Sequence
  Description of Artificial Sequence: Synthetic oligonucleotide
  Antisense strand to SEQ ID NO: 1207344
auucacaaugauaugccuu

SEQ ID NO: 1207346 - RNA, 19 nt, Artificial Sequence
  Description of Artificial Sequence: Synthetic oligonucleotide
  Sense strand starting at position 2301 of SEQ ID NO: 917084
ucagauugcucaguuagaa

SEQ ID NO: 1207347 - RNA, 19 nt, Artificial Sequence
  Description of Artificial Sequence: Synthetic oligonucleotide
  Antisense strand to SEQ ID NO: 1207346
uucuaacugagcaaucuga

SEQ ID NO: 1207348 - RNA, 19 nt, Artificial Sequence
  Description of Artificial Sequence: Synthetic oligonucleotide
  Sense strand starting at position 2399 of SEQ ID NO: 917084
accaaucuagugugugaau

SEQ ID NO: 1207349 - RNA, 19 nt, Artificial Sequence
  Description of Artificial Sequence: Synthetic oligonucleotide
  Antisense strand to SEQ ID NO: 1207348
auucacacacuagauuggu

SEQ ID NO: 1207350 - RNA, 19 nt, Artificial Sequence
  Description of Artificial Sequence: Synthetic oligonucleotide
  Sense strand starting at position 2400 of SEQ ID NO: 917084
ccaaucuagugugugaaua

SEQ ID NO: 1207351 - RNA, 19 nt, Artificial Sequence
  Description of Artificial Sequence: Synthetic oligonucleotide
  Antisense strand to SEQ ID NO: 1207350
uauucacacacuagauugg

SEQ ID NO: 1207352 - RNA, 19 nt, Artificial Sequence
  Description of Artificial Sequence: Synthetic oligonucleotide
  Sense strand starting at position 2401 of SEQ ID NO: 917084
caaucuagugugugaauag

SEQ ID NO: 1207353 - RNA, 19 nt, Artificial Sequence
  Description of Artificial Sequence: Synthetic oligonucleotide
  Antisense strand to SEQ ID NO: 1207352
cuauucacacacuagauug

SEQ ID NO: 1207354 - RNA, 19 nt, Artificial Sequence
  Description of Artificial Sequence: Synthetic oligonucleotide
  Sense strand starting at position 2410 of SEQ ID NO: 917084
gugugaauagaauagaguu

SEQ ID NO: 1207355 - RNA, 19 nt, Artificial Sequence
  Description of Artificial Sequence: Synthetic oligonucleotide
  Antisense strand to SEQ ID NO: 1207354
aacucuauucuauucacac

SEQ ID NO: 1207356 - RNA, 19 nt, Artificial Sequence
  Description of Artificial Sequence: Synthetic oligonucleotide
  Sense strand starting at position 2480 of SEQ ID NO: 917084
ucaguaccuccaggaagau

SEQ ID NO: 1207357 - RNA, 19 nt, Artificial Sequence
  Description of Artificial Sequence: Synthetic oligonucleotide
  Antisense strand to SEQ ID NO: 1207356
aucuuccuggagguacuga

SEQ ID NO: 1207358 - RNA, 19 nt, Artificial Sequence
  Description of Artificial Sequence: Synthetic oligonucleotide
  Sense strand starting at position 2614 of SEQ ID NO: 917084
gaaagagcuccgggaacaa

SEQ ID NO: 1207359 - RNA, 19 nt, Artificial Sequence
  Description of Artificial Sequence: Synthetic oligonucleotide
  Antisense strand to SEQ ID NO: 1207358
uuguucccggagcucuuuc

SEQ ID NO: 1207360 - RNA, 19 nt, Artificial Sequence
  Description of Artificial Sequence: Synthetic oligonucleotide
  Sense strand starting at position 2625 of SEQ ID NO: 917084
gggaacaauagcuguguau

SEQ ID NO: 1207361 - RNA, 19 nt, Artificial Sequence
  Description of Artificial Sequence: Synthetic oligonucleotide
  Antisense strand to SEQ ID NO: 1207360
auacacagcuauuguuccc

SEQ ID NO: 1207362 - RNA, 19 nt, Artificial Sequence
  Description of Artificial Sequence: Synthetic oligonucleotide
  Sense strand starting at position 2627 of SEQ ID NO: 917084
gaacaauagcuguguauag

SEQ ID NO: 1207363 - RNA, 19 nt, Artificial Sequence
  Description of Artificial Sequence: Synthetic oligonucleotide
  Antisense strand to SEQ ID NO: 1207362
cuauacacagcuauuguuc

SEQ ID NO: 1207364 - RNA, 19 nt, Artificial Sequence
  Description of Artificial Sequence: Synthetic oligonucleotide
  Sense strand starting at position 2666 of SEQ ID NO: 917084
agauuagauucggucagaa

SEQ ID NO: 1207365 - RNA, 19 nt, Artificial Sequence
  Description of Artificial Sequence: Synthetic oligonucleotide
  Antisense strand to SEQ ID NO: 1207364
uucugaccgaaucuaaucu

SEQ ID NO: 1207366 - RNA, 19 nt, Artificial Sequence
  Description of Artificial Sequence: Synthetic oligonucleotide
  Sense strand starting at position 2701 of SEQ ID NO: 917084
gcuucagaaggaugggauu

SEQ ID NO: 1207367 - RNA, 19 nt, Artificial Sequence
  Description of Artificial Sequence: Synthetic oligonucleotide
  Antisense strand to SEQ ID NO: 1207366
aaucccauccuucugaagc

SEQ ID NO: 1207368 - RNA, 19 nt, Artificial Sequence
  Description of Artificial Sequence: Synthetic oligonucleotide
  Sense strand starting at position 2764 of SEQ ID NO: 917084
gaguuuggaguuuaacuca

SEQ ID NO: 1207369 - RNA, 19 nt, Artificial Sequence
  Description of Artificial Sequence: Synthetic oligonucleotide
  Antisense strand to SEQ ID NO: 1207368
ugaguuaaacuccaaacuc

SEQ ID NO: 1207370 - RNA, 19 nt, Artificial Sequence
  Description of Artificial Sequence: Synthetic oligonucleotide
  Sense strand starting at position 2767 of SEQ ID NO: 917084
uuuggaguuuaacucauga

SEQ ID NO: 1207371 - RNA, 19 nt, Artificial Sequence
  Description of Artificial Sequence: Synthetic oligonucleotide
  Antisense strand to SEQ ID NO: 1207370
ucaugaguuaaacuccaaa

SEQ ID NO: 1207372 - RNA, 19 nt, Artificial Sequence
  Description of Artificial Sequence: Synthetic oligonucleotide
  Sense strand starting at position 2772 of SEQ ID NO: 917084
aguuuaacucaugacaggu

SEQ ID NO: 1207373 - RNA, 19 nt, Artificial Sequence
  Description of Artificial Sequence: Synthetic oligonucleotide
  Antisense strand to SEQ ID NO: 1207372
accugucaugaguuaaacu

SEQ ID NO: 1207374 - RNA, 19 nt, Artificial Sequence
  Description of Artificial Sequence: Synthetic oligonucleotide
  Sense strand starting at position 3344 of SEQ ID NO: 917084
guaggaagucaguaucuua

SEQ ID NO: 1207375 - RNA, 19 nt, Artificial Sequence
  Description of Artificial Sequence: Synthetic oligonucleotide
  Antisense strand to SEQ ID NO: 1207374
uaagauacugacuuccuac

SEQ ID NO: 1207376 - RNA, 19 nt, Artificial Sequence
  Description of Artificial Sequence: Synthetic oligonucleotide
  Sense strand starting at position 3380 of SEQ ID NO: 917084
agaagcaauauagguguaa

SEQ ID NO: 1207377 - RNA, 19 nt, Artificial Sequence
  Description of Artificial Sequence: Synthetic oligonucleotide
  Antisense strand to SEQ ID NO: 1207376
uuacaccuauauugcuucu

SEQ ID NO: 1207378 - RNA, 19 nt, Artificial Sequence
  Description of Artificial Sequence: Synthetic oligonucleotide
  Sense strand starting at position 3381 of SEQ ID NO: 917084
gaagcaauauagguguaau

SEQ ID NO: 1207379 - RNA, 19 nt, Artificial Sequence
  Description of Artificial Sequence: Synthetic oligonucleotide
  Antisense strand to SEQ ID NO: 1207378
auuacaccuauauugcuuc

SEQ ID NO: 1207380 - RNA, 19 nt, Artificial Sequence
  Description of Artificial Sequence: Synthetic oligonucleotide
  Sense strand starting at position 3384 of SEQ ID NO: 917084
gcaauauagguguaauauu

SEQ ID NO: 1207381 - RNA, 19 nt, Artificial Sequence
  Description of Artificial Sequence: Synthetic oligonucleotide
  Antisense strand to SEQ ID NO: 1207380
aauauuacaccuauauugc

SEQ ID NO: 1207382 - RNA, 19 nt, Artificial Sequence
  Description of Artificial Sequence: Synthetic oligonucleotide
  Sense strand starting at position 3560 of SEQ ID NO: 917084
auauuagugccacaugaag

SEQ ID NO: 1207383 - RNA, 19 nt, Artificial Sequence
  Description of Artificial Sequence: Synthetic oligonucleotide
  Antisense strand to SEQ ID NO: 1207382
cuucauguggcacuaauau

SEQ ID NO: 1207384 - RNA, 19 nt, Artificial Sequence
  Description of Artificial Sequence: Synthetic oligonucleotide
  Sense strand starting at position 3571 of SEQ ID NO: 917084
acaugaagagcucaauugu

SEQ ID NO: 1207385 - RNA, 19 nt, Artificial Sequence
  Description of Artificial Sequence: Synthetic oligonucleotide
  Antisense strand to SEQ ID NO: 1207384
acaauugagcucuucaugu

SEQ ID NO: 1207386 - RNA, 19 nt, Artificial Sequence
  Description of Artificial Sequence: Synthetic oligonucleotide
  Sense strand starting at position 3577 of SEQ ID NO: 917084
agagcucaauugucauaug

SEQ ID NO: 1207387 - RNA, 19 nt, Artificial Sequence
  Description of Artificial Sequence: Synthetic oligonucleotide
  Antisense strand to SEQ ID NO: 1207386
cauaugacaauugagcucu

SEQ ID NO: 1207388 - RNA, 19 nt, Artificial Sequence
  Description of Artificial Sequence: Synthetic oligonucleotide
  Sense strand starting at position 3586 of SEQ ID NO: 917084
uugucauauggaugucacu

SEQ ID NO: 1207389 - RNA, 19 nt, Artificial Sequence
  Description of Artificial Sequence: Synthetic oligonucleotide
  Antisense strand to SEQ ID NO: 1207388
agugacauccauaugacaa

SEQ ID NO: 1207390 - RNA, 19 nt, Artificial Sequence
  Description of Artificial Sequence: Synthetic oligonucleotide
  Sense strand starting at position 3622 of SEQ ID NO: 917084
ggaacugaguuucuuugaa

SEQ ID NO: 1207391 - RNA, 19 nt, Artificial Sequence
  Description of Artificial Sequence: Synthetic oligonucleotide
  Antisense strand to SEQ ID NO: 1207390
uucaaagaaacucaguucc

SEQ ID NO: 1207392 - RNA, 19 nt, Artificial Sequence
  Description of Artificial Sequence: Synthetic oligonucleotide
  Sense strand starting at position 3946 of SEQ ID NO: 917084
aggguaucucgauaugcau

SEQ ID NO: 1207393 - RNA, 19 nt, Artificial Sequence
  Description of Artificial Sequence: Synthetic oligonucleotide
  Antisense strand to SEQ ID NO: 1207392
augcauaucgagauacccu

SEQ ID NO: 1207394 - RNA, 19 nt, Artificial Sequence
  Description of Artificial Sequence: Synthetic oligonucleotide
  Sense strand starting at position 3952 of SEQ ID NO: 917084
ucucgauaugcauaaacuc

SEQ ID NO: 1207395 - RNA, 19 nt, Artificial Sequence
  Description of Artificial Sequence: Synthetic oligonucleotide
  Antisense strand to SEQ ID NO: 1207394
gaguuuaugcauaucgaga

SEQ ID NO: 1207396 - RNA, 19 nt, Artificial Sequence
  Description of Artificial Sequence: Synthetic oligonucleotide
  Sense strand starting at position 3982 of SEQ ID NO: 917084
guuuaaucacgucagaaug

SEQ ID NO: 1207397 - RNA, 19 nt, Artificial Sequence
  Description of Artificial Sequence: Synthetic oligonucleotide
  Antisense strand to SEQ ID NO: 1207396
cauucugacgugauuaaac

SEQ ID NO: 1207398 - RNA, 19 nt, Artificial Sequence
  Description of Artificial Sequence: Synthetic oligonucleotide
  Sense strand starting at position 18 of SEQ ID NO: 917085
ggcagugcucuccagauca

SEQ ID NO: 1207399 - RNA, 19 nt, Artificial Sequence
  Description of Artificial Sequence: Synthetic oligonucleotide
  Antisense strand to SEQ ID NO: 1207398
ugaucuggagagcacugcc

SEQ ID NO: 1207400 - RNA, 19 nt, Artificial Sequence
  Description of Artificial Sequence: Synthetic oligonucleotide
  Sense strand starting at position 111 of SEQ ID NO: 917085
auugaucaggucugugaag

SEQ ID NO: 1207401 - RNA, 19 nt, Artificial Sequence
  Description of Artificial Sequence: Synthetic oligonucleotide
  Antisense strand to SEQ ID NO: 1207400
cuucacagaccugaucaau

SEQ ID NO: 1207402 - RNA, 19 nt, Artificial Sequence
  Description of Artificial Sequence: Synthetic oligonucleotide
  Sense strand starting at position 112 of SEQ ID NO: 917085
uugaucaggucugugaaga

SEQ ID NO: 1207403 - RNA, 19 nt, Artificial Sequence
  Description of Artificial Sequence: Synthetic oligonucleotide
  Antisense strand to SEQ ID NO: 1207402
ucuucacagaccugaucaa

SEQ ID NO: 1207404 - RNA, 19 nt, Artificial Sequence
  Description of Artificial Sequence: Synthetic oligonucleotide
  Sense strand starting at position 113 of SEQ ID NO: 917085
ugaucaggucugugaagag

SEQ ID NO: 1207405 - RNA, 19 nt, Artificial Sequence
  Description of Artificial Sequence: Synthetic oligonucleotide
  Antisense strand to SEQ ID NO: 1207404
cucuucacagaccugauca

SEQ ID NO: 1207406 - RNA, 19 nt, Artificial Sequence
  Description of Artificial Sequence: Synthetic oligonucleotide
  Sense strand starting at position 128 of SEQ ID NO: 917085
agaguucugaaguguagac

SEQ ID NO: 1207407 - RNA, 19 nt, Artificial Sequence
  Description of Artificial Sequence: Synthetic oligonucleotide
  Antisense strand to SEQ ID NO: 1207406
gucuacacuucagaacucu

SEQ ID NO: 1207408 - RNA, 19 nt, Artificial Sequence
  Description of Artificial Sequence: Synthetic oligonucleotide
  Sense strand starting at position 130 of SEQ ID NO: 917085
aguucugaaguguagacaa

SEQ ID NO: 1207409 - RNA, 19 nt, Artificial Sequence
  Description of Artificial Sequence: Synthetic oligonucleotide
  Antisense strand to SEQ ID NO: 1207408
uugucuacacuucagaacu

SEQ ID NO: 1207410 - RNA, 19 nt, Artificial Sequence
  Description of Artificial Sequence: Synthetic oligonucleotide
  Sense strand starting at position 439 of SEQ ID NO: 917085
cacaguuaaucuguggaua

SEQ ID NO: 1207411 - RNA, 19 nt, Artificial Sequence
  Description of Artificial Sequence: Synthetic oligonucleotide
  Antisense strand to SEQ ID NO: 1207410
uauccacagauuaacugug

SEQ ID NO: 1207412 - RNA, 19 nt, Artificial Sequence
  Description of Artificial Sequence: Synthetic oligonucleotide
  Sense strand starting at position 440 of SEQ ID NO: 917085
acaguuaaucuguggauag

SEQ ID NO: 1207413 - RNA, 19 nt, Artificial Sequence
  Description of Artificial Sequence: Synthetic oligonucleotide
  Antisense strand to SEQ ID NO: 1207412
cuauccacagauuaacugu

SEQ ID NO: 1207414 - RNA, 19 nt, Artificial Sequence
  Description of Artificial Sequence: Synthetic oligonucleotide
  Sense strand starting at position 442 of SEQ ID NO: 917085
aguuaaucuguggauagca

SEQ ID NO: 1207415 - RNA, 19 nt, Artificial Sequence
  Description of Artificial Sequence: Synthetic oligonucleotide
  Antisense strand to SEQ ID NO: 1207414
ugcuauccacagauuaacu

SEQ ID NO: 1207416 - RNA, 19 nt, Artificial Sequence
  Description of Artificial Sequence: Synthetic oligonucleotide
  Sense strand starting at position 573 of SEQ ID NO: 917085
cauggagaguuccuccauu

SEQ ID NO: 1207417 - RNA, 19 nt, Artificial Sequence
  Description of Artificial Sequence: Synthetic oligonucleotide
  Antisense strand to SEQ ID NO: 1207416
aauggaggaacucuccaug

SEQ ID NO: 1207418 - RNA, 19 nt, Artificial Sequence
  Description of Artificial Sequence: Synthetic oligonucleotide
  Sense strand starting at position 706 of SEQ ID NO: 917085
gaggcauucccuuggacac

SEQ ID NO: 1207419 - RNA, 19 nt, Artificial Sequence
  Description of Artificial Sequence: Synthetic oligonucleotide
  Antisense strand to SEQ ID NO: 1207418
guguccaagggaaugccuc

SEQ ID NO: 1207420 - RNA, 19 nt, Artificial Sequence
  Description of Artificial Sequence: Synthetic oligonucleotide
  Sense strand starting at position 707 of SEQ ID NO: 917085
aggcauucccuuggacaca

SEQ ID NO: 1207421 - RNA, 19 nt, Artificial Sequence
  Description of Artificial Sequence: Synthetic oligonucleotide
  Antisense strand to SEQ ID NO: 1207420
uguguccaagggaaugccu

SEQ ID NO: 1207422 - RNA, 19 nt, Artificial Sequence
  Description of Artificial Sequence: Synthetic oligonucleotide
  Sense strand starting at position 1111 of SEQ ID NO: 917085
guagaacacaacuguggua

SEQ ID NO: 1207423 - RNA, 19 nt, Artificial Sequence
  Description of Artificial Sequence: Synthetic oligonucleotide
  Antisense strand to SEQ ID NO: 1207422
uaccacaguuguguucuac

SEQ ID NO: 1207424 - RNA, 19 nt, Artificial Sequence
  Description of Artificial Sequence: Synthetic oligonucleotide
  Sense strand starting at position 1251 of SEQ ID NO: 917085
guaagacuccuagaggcuu

SEQ ID NO: 1207425 - RNA, 19 nt, Artificial Sequence
  Description of Artificial Sequence: Synthetic oligonucleotide
  Antisense strand to SEQ ID NO: 1207424
aagccucuaggagucuuac

SEQ ID NO: 1207426 - RNA, 19 nt, Artificial Sequence
  Description of Artificial Sequence: Synthetic oligonucleotide
  Sense strand starting at position 1294 of SEQ ID NO: 917085
cugacuccugcacgacuaa

SEQ ID NO: 1207427 - RNA, 19 nt, Artificial Sequence
  Description of Artificial Sequence: Synthetic oligonucleotide
  Antisense strand to SEQ ID NO: 1207426
uuagucgugcaggagucag

SEQ ID NO: 1207428 - RNA, 19 nt, Artificial Sequence
  Description of Artificial Sequence: Synthetic oligonucleotide
  Sense strand starting at position 1417 of SEQ ID NO: 917085
ccaggaagcgucuaaguau

SEQ ID NO: 1207429 - RNA, 19 nt, Artificial Sequence
  Description of Artificial Sequence: Synthetic oligonucleotide
  Antisense strand to SEQ ID NO: 1207428
auacuuagacgcuuccugg

SEQ ID NO: 1207430 - RNA, 19 nt, Artificial Sequence
  Description of Artificial Sequence: Synthetic oligonucleotide
  Sense strand starting at position 1817 of SEQ ID NO: 917085
cagcaagagcgagauaaau

SEQ ID NO: 1207431 - RNA, 19 nt, Artificial Sequence
  Description of Artificial Sequence: Synthetic oligonucleotide
  Antisense strand to SEQ ID NO: 1207430
auuuaucucgcucuugcug

SEQ ID NO: 1207432 - RNA, 19 nt, Artificial Sequence
  Description of Artificial Sequence: Synthetic oligonucleotide
  Sense strand starting at position 2238 of SEQ ID NO: 917085
gggacuuggugccugaaga

SEQ ID NO: 1207433 - RNA, 19 nt, Artificial Sequence
  Description of Artificial Sequence: Synthetic oligonucleotide
  Antisense strand to SEQ ID NO: 1207432
ucuucaggcaccaaguccc

SEQ ID NO: 1207434 - RNA, 19 nt, Artificial Sequence
  Description of Artificial Sequence: Synthetic oligonucleotide
  Sense strand starting at position 2239 of SEQ ID NO: 917085
ggacuuggugccugaagag

SEQ ID NO: 1207435 - RNA, 19 nt, Artificial Sequence
  Description of Artificial Sequence: Synthetic oligonucleotide
  Antisense strand to SEQ ID NO: 1207434
cucuucaggcaccaagucc

SEQ ID NO: 1207436 - RNA, 19 nt, Artificial Sequence
  Description of Artificial Sequence: Synthetic oligonucleotide
  Sense strand starting at position 2491 of SEQ ID NO: 917085
auacauuaagccugcuuga

SEQ ID NO: 1207437 - RNA, 19 nt, Artificial Sequence
  Description of Artificial Sequence: Synthetic oligonucleotide
  Antisense strand to SEQ ID NO: 1207436
ucaagcaggcuuaauguau

SEQ ID NO: 1207438 - RNA, 19 nt, Artificial Sequence
  Description of Artificial Sequence: Synthetic oligonucleotide
  Sense strand starting at position 2496 of SEQ ID NO: 917085
uuaagccugcuugaaugaa

SEQ ID NO: 1207439 - RNA, 19 nt, Artificial Sequence
  Description of Artificial Sequence: Synthetic oligonucleotide
  Antisense strand to SEQ ID NO: 1207438
uucauucaagcaggcuuaa

SEQ ID NO: 1207440 - RNA, 19 nt, Artificial Sequence
  Description of Artificial Sequence: Synthetic oligonucleotide
  Sense strand starting at position 2530 of SEQ ID NO: 917085
gggcuagaccgcuacuacu

SEQ ID NO: 1207441 - RNA, 19 nt, Artificial Sequence
  Description of Artificial Sequence: Synthetic oligonucleotide
  Antisense strand to SEQ ID NO: 1207440
aguaguagcggucuagccc

SEQ ID NO: 1207442 - RNA, 19 nt, Artificial Sequence
  Description of Artificial Sequence: Synthetic oligonucleotide
  Sense strand starting at position 2601 of SEQ ID NO: 917085
gaagaaagucaccggaucu

SEQ ID NO: 1207443 - RNA, 19 nt, Artificial Sequence
  Description of Artificial Sequence: Synthetic oligonucleotide
  Antisense strand to SEQ ID NO: 1207442
agauccggugacuuucuuc

SEQ ID NO: 1207444 - RNA, 19 nt, Artificial Sequence
  Description of Artificial Sequence: Synthetic oligonucleotide
  Sense strand starting at position 2665 of SEQ ID NO: 917085
cccaacucuguguagaacu

SEQ ID NO: 1207445 - RNA, 19 nt, Artificial Sequence
  Description of Artificial Sequence: Synthetic oligonucleotide
  Antisense strand to SEQ ID NO: 1207444
aguucuacacagaguuggg

SEQ ID NO: 1207446 - RNA, 19 nt, Artificial Sequence
  Description of Artificial Sequence: Synthetic oligonucleotide
  Sense strand starting at position 2673 of SEQ ID NO: 917085
uguguagaacucgaucacu

SEQ ID NO: 1207447 - RNA, 19 nt, Artificial Sequence
  Description of Artificial Sequence: Synthetic oligonucleotide
  Antisense strand to SEQ ID NO: 1207446
agugaucgaguucuacaca

SEQ ID NO: 1207448 - RNA, 19 nt, Artificial Sequence
  Description of Artificial Sequence: Synthetic oligonucleotide
  Sense strand starting at position 2676 of SEQ ID NO: 917085
guagaacucgaucacucuu

SEQ ID NO: 1207449 - RNA, 19 nt, Artificial Sequence
  Description of Artificial Sequence: Synthetic oligonucleotide
  Antisense strand to SEQ ID NO: 1207448
aagagugaucgaguucuac

SEQ ID NO: 1207450 - RNA, 19 nt, Artificial Sequence
  Description of Artificial Sequence: Synthetic oligonucleotide
  Sense strand starting at position 2736 of SEQ ID NO: 917085
gcccaagaauugucaucaa

SEQ ID NO: 1207451 - RNA, 19 nt, Artificial Sequence
  Description of Artificial Sequence: Synthetic oligonucleotide
  Antisense strand to SEQ ID NO: 1207450
uugaugacaauucuugggc

SEQ ID NO: 1207452 - RNA, 19 nt, Artificial Sequence
  Description of Artificial Sequence: Synthetic oligonucleotide
  Sense strand starting at position 2962 of SEQ ID NO: 917085
ucaguaauuccuugaugga

SEQ ID NO: 1207453 - RNA, 19 nt, Artificial Sequence
  Description of Artificial Sequence: Synthetic oligonucleotide
  Antisense strand to SEQ ID NO: 1207452
uccaucaaggaauuacuga

SEQ ID NO: 1207454 - RNA, 19 nt, Artificial Sequence
  Description of Artificial Sequence: Synthetic oligonucleotide
  Sense strand starting at position 3005 of SEQ ID NO: 917085
gaauguugccaacagaucu

SEQ ID NO: 1207455 - RNA, 19 nt, Artificial Sequence
  Description of Artificial Sequence: Synthetic oligonucleotide
  Antisense strand to SEQ ID NO: 1207454
agaucuguuggcaacauuc

SEQ ID NO: 1207456 - RNA, 19 nt, Artificial Sequence
  Description of Artificial Sequence: Synthetic oligonucleotide
  Sense strand starting at position 3049 of SEQ ID NO: 917085
guccauucucuugaugaau

SEQ ID NO: 1207457 - RNA, 19 nt, Artificial Sequence
  Description of Artificial Sequence: Synthetic oligonucleotide
  Antisense strand to SEQ ID NO: 1207456
auucaucaagagaauggac

SEQ ID NO: 1207458 - RNA, 19 nt, Artificial Sequence
  Description of Artificial Sequence: Synthetic oligonucleotide
  Sense strand starting at position 3058 of SEQ ID NO: 917085
cuugaugaauuugggagau

SEQ ID NO: 1207459 - RNA, 19 nt, Artificial Sequence
  Description of Artificial Sequence: Synthetic oligonucleotide
  Antisense strand to SEQ ID NO: 1207458
aucucccaaauucaucaag

SEQ ID NO: 1207460 - RNA, 19 nt, Artificial Sequence
  Description of Artificial Sequence: Synthetic oligonucleotide
  Sense strand starting at position 3060 of SEQ ID NO: 917085
ugaugaauuugggagauug

SEQ ID NO: 1207461 - RNA, 19 nt, Artificial Sequence
  Description of Artificial Sequence: Synthetic oligonucleotide
  Antisense strand to SEQ ID NO: 1207460
caaucucccaaauucauca

SEQ ID NO: 1207462 - RNA, 19 nt, Artificial Sequence
  Description of Artificial Sequence: Synthetic oligonucleotide
  Sense strand starting at position 3244 of SEQ ID NO: 917085
gugaaagggucacuuagag

SEQ ID NO: 1207463 - RNA, 19 nt, Artificial Sequence
  Description of Artificial Sequence: Synthetic oligonucleotide
  Antisense strand to SEQ ID NO: 1207462
cucuaagugacccuuucac

SEQ ID NO: 1207464 - RNA, 19 nt, Artificial Sequence
  Description of Artificial Sequence: Synthetic oligonucleotide
  Sense strand starting at position 3253 of SEQ ID NO: 917085
ucacuuagagguugacaca

SEQ ID NO: 1207465 - RNA, 19 nt, Artificial Sequence
  Description of Artificial Sequence: Synthetic oligonucleotide
  Antisense strand to SEQ ID NO: 1207464
ugugucaaccucuaaguga

SEQ ID NO: 1207466 - RNA, 19 nt, Artificial Sequence
  Description of Artificial Sequence: Synthetic oligonucleotide
  Sense strand starting at position 3311 of SEQ ID NO: 917085
gugacugagucucccuaaa

SEQ ID NO: 1207467 - RNA, 19 nt, Artificial Sequence
  Description of Artificial Sequence: Synthetic oligonucleotide
  Antisense strand to SEQ ID NO: 1207466
uuuagggagacucagucac

SEQ ID NO: 1207468 - RNA, 19 nt, Artificial Sequence
  Description of Artificial Sequence: Synthetic oligonucleotide
  Sense strand starting at position 3313 of SEQ ID NO: 917085
gacugagucucccuaaagu

SEQ ID NO: 1207469 - RNA, 19 nt, Artificial Sequence
  Description of Artificial Sequence: Synthetic oligonucleotide
  Antisense strand to SEQ ID NO: 1207468
acuuuagggagacucaguc

SEQ ID NO: 1207470 - RNA, 19 nt, Artificial Sequence
  Description of Artificial Sequence: Synthetic oligonucleotide
  Sense strand starting at position 3440 of SEQ ID NO: 917085
cagccaucucuggaggguu

SEQ ID NO: 1207471 - RNA, 19 nt, Artificial Sequence
  Description of Artificial Sequence: Synthetic oligonucleotide
  Antisense strand to SEQ ID NO: 1207470
aacccuccagagauggcug

SEQ ID NO: 1207472 - RNA, 19 nt, Artificial Sequence
  Description of Artificial Sequence: Synthetic oligonucleotide
  Sense strand starting at position 3615 of SEQ ID NO: 917085
caaggucuuguggaccaga

SEQ ID NO: 1207473 - RNA, 19 nt, Artificial Sequence
  Description of Artificial Sequence: Synthetic oligonucleotide
  Antisense strand to SEQ ID NO: 1207472
ucugguccacaagaccuug

SEQ ID NO: 1207474 - RNA, 19 nt, Artificial Sequence
  Description of Artificial Sequence: Synthetic oligonucleotide
  Sense strand starting at position 3628 of SEQ ID NO: 917085
accagaucucuuuaggcau

SEQ ID NO: 1207475 - RNA, 19 nt, Artificial Sequence
  Description of Artificial Sequence: Synthetic oligonucleotide
  Antisense strand to SEQ ID NO: 1207474
augccuaaagagaucuggu

SEQ ID NO: 1207476 - RNA, 19 nt, Artificial Sequence
  Description of Artificial Sequence: Synthetic oligonucleotide
  Sense strand starting at position 3631 of SEQ ID NO: 917085
agaucucuuuaggcaucaa

SEQ ID NO: 1207477 - RNA, 19 nt, Artificial Sequence
  Description of Artificial Sequence: Synthetic oligonucleotide
  Antisense strand to SEQ ID NO: 1207476
uugaugccuaaagagaucu

SEQ ID NO: 1207478 - RNA, 19 nt, Artificial Sequence
  Description of Artificial Sequence: Synthetic oligonucleotide
  Sense strand starting at position 11 of SEQ ID NO: 917086
uugagcugaccuuauuaaa

SEQ ID NO: 1207479 - RNA, 19 nt, Artificial Sequence
  Description of Artificial Sequence: Synthetic oligonucleotide
  Antisense strand to SEQ ID NO: 1207478
uuuaauaaggucagcucaa

SEQ ID NO: 1207480 - RNA, 19 nt, Artificial Sequence
  Description of Artificial Sequence: Synthetic oligonucleotide
  Sense strand starting at position 24 of SEQ ID NO: 917086
auuaaaguuguggaaguga

SEQ ID NO: 1207481 - RNA, 19 nt, Artificial Sequence
  Description of Artificial Sequence: Synthetic oligonucleotide
  Antisense strand to SEQ ID NO: 1207480
ucacuuccacaacuuuaau

SEQ ID NO: 1207482 - RNA, 19 nt, Artificial Sequence
  Description of Artificial Sequence: Synthetic oligonucleotide
  Sense strand starting at position 29 of SEQ ID NO: 917086
aguuguggaagugaaauua

SEQ ID NO: 1207483 - RNA, 19 nt, Artificial Sequence
  Description of Artificial Sequence: Synthetic oligonucleotide
  Antisense strand to SEQ ID NO: 1207482
uaauuucacuuccacaacu

SEQ ID NO: 1207484 - RNA, 19 nt, Artificial Sequence
  Description of Artificial Sequence: Synthetic oligonucleotide
  Sense strand starting at position 52 of SEQ ID NO: 917086
ugcagucaguaucugaaua

SEQ ID NO: 1207485 - RNA, 19 nt, Artificial Sequence
  Description of Artificial Sequence: Synthetic oligonucleotide
  Antisense strand to SEQ ID NO: 1207484
uauucagauacugacugca

SEQ ID NO: 1207486 - RNA, 19 nt, Artificial Sequence
  Description of Artificial Sequence: Synthetic oligonucleotide
  Sense strand starting at position 53 of SEQ ID NO: 917086
gcagucaguaucugaauag

SEQ ID NO: 1207487 - RNA, 19 nt, Artificial Sequence
  Description of Artificial Sequence: Synthetic oligonucleotide
  Antisense strand to SEQ ID NO: 1207486
cuauucagauacugacugc

SEQ ID NO: 1207488 - RNA, 19 nt, Artificial Sequence
  Description of Artificial Sequence: Synthetic oligonucleotide
  Sense strand starting at position 60 of SEQ ID NO: 917086
guaucugaauagucuggaa

SEQ ID NO: 1207489 - RNA, 19 nt, Artificial Sequence
  Description of Artificial Sequence: Synthetic oligonucleotide
  Antisense strand to SEQ ID NO: 1207488
uuccagacuauucagauac

SEQ ID NO: 1207490 - RNA, 19 nt, Artificial Sequence
  Description of Artificial Sequence: Synthetic oligonucleotide
  Sense strand starting at position 85 of SEQ ID NO: 917086
ugggaauagugcccaagau

SEQ ID NO: 1207491 - RNA, 19 nt, Artificial Sequence
  Description of Artificial Sequence: Synthetic oligonucleotide
  Antisense strand to SEQ ID NO: 1207490
aucuugggcacuauuccca

SEQ ID NO: 1207492 - RNA, 19 nt, Artificial Sequence
  Description of Artificial Sequence: Synthetic oligonucleotide
  Sense strand starting at position 348 of SEQ ID NO: 917086
ggaguucuaaguuagaguc

SEQ ID NO: 1207493 - RNA, 19 nt, Artificial Sequence
  Description of Artificial Sequence: Synthetic oligonucleotide
  Antisense strand to SEQ ID NO: 1207492
gacucuaacuuagaacucc

SEQ ID NO: 1207494 - RNA, 19 nt, Artificial Sequence
  Description of Artificial Sequence: Synthetic oligonucleotide
  Sense strand starting at position 391 of SEQ ID NO: 917086
aaccauuugugauaagguc

SEQ ID NO: 1207495 - RNA, 19 nt, Artificial Sequence
  Description of Artificial Sequence: Synthetic oligonucleotide
  Antisense strand to SEQ ID NO: 1207494
gaccuuaucacaaaugguu

SEQ ID NO: 1207496 - RNA, 19 nt, Artificial Sequence
  Description of Artificial Sequence: Synthetic oligonucleotide
  Sense strand starting at position 483 of SEQ ID NO: 917086
ugaagaucccacugacauc

SEQ ID NO: 1207497 - RNA, 19 nt, Artificial Sequence
  Description of Artificial Sequence: Synthetic oligonucleotide
  Antisense strand to SEQ ID NO: 1207496
gaugucagugggaucuuca

SEQ ID NO: 1207498 - RNA, 19 nt, Artificial Sequence
  Description of Artificial Sequence: Synthetic oligonucleotide
  Sense strand starting at position 579 of SEQ ID NO: 917086
ccaagagagcuuuggaaug

SEQ ID NO: 1207499 - RNA, 19 nt, Artificial Sequence
  Description of Artificial Sequence: Synthetic oligonucleotide
  Antisense strand to SEQ ID NO: 1207498
cauuccaaagcucucuugg

SEQ ID NO: 1207500 - RNA, 19 nt, Artificial Sequence
  Description of Artificial Sequence: Synthetic oligonucleotide
  Sense strand starting at position 584 of SEQ ID NO: 917086
agagcuuuggaaugucagu

SEQ ID NO: 1207501 - RNA, 19 nt, Artificial Sequence
  Description of Artificial Sequence: Synthetic oligonucleotide
  Antisense strand to SEQ ID NO: 1207500
acugacauuccaaagcucu

SEQ ID NO: 1207502 - RNA, 19 nt, Artificial Sequence
  Description of Artificial Sequence: Synthetic oligonucleotide
  Sense strand starting at position 759 of SEQ ID NO: 917086
agggaaucuuuccuaauuc

SEQ ID NO: 1207503 - RNA, 19 nt, Artificial Sequence
  Description of Artificial Sequence: Synthetic oligonucleotide
  Antisense strand to SEQ ID NO: 1207502
gaauuaggaaagauucccu

SEQ ID NO: 1207504 - RNA, 19 nt, Artificial Sequence
  Description of Artificial Sequence: Synthetic oligonucleotide
  Sense strand starting at position 1042 of SEQ ID NO: 917086
agcagauaauuaguuauga

SEQ ID NO: 1207505 - RNA, 19 nt, Artificial Sequence
  Description of Artificial Sequence: Synthetic oligonucleotide
  Antisense strand to SEQ ID NO: 1207504
ucauaacuaauuaucugcu

SEQ ID NO: 1207506 - RNA, 19 nt, Artificial Sequence
  Description of Artificial Sequence: Synthetic oligonucleotide
  Sense strand starting at position 1043 of SEQ ID NO: 917086
gcagauaauuaguuaugau

SEQ ID NO: 1207507 - RNA, 19 nt, Artificial Sequence
  Description of Artificial Sequence: Synthetic oligonucleotide
  Antisense strand to SEQ ID NO: 1207506
aucauaacuaauuaucugc

SEQ ID NO: 1207508 - RNA, 19 nt, Artificial Sequence
  Description of Artificial Sequence: Synthetic oligonucleotide
  Sense strand starting at position 1153 of SEQ ID NO: 917086
cuggguucugagcaggaaa

SEQ ID NO: 1207509 - RNA, 19 nt, Artificial Sequence
  Description of Artificial Sequence: Synthetic oligonucleotide
  Antisense strand to SEQ ID NO: 1207508
uuuccugcucagaacccag

SEQ ID NO: 1207510 - RNA, 19 nt, Artificial Sequence
  Description of Artificial Sequence: Synthetic oligonucleotide
  Sense strand starting at position 1255 of SEQ ID NO: 917086
cuucgagaacgugaggauu

SEQ ID NO: 1207511 - RNA, 19 nt, Artificial Sequence
  Description of Artificial Sequence: Synthetic oligonucleotide
  Antisense strand to SEQ ID NO: 1207510
aauccucacguucucgaag

SEQ ID NO: 1207512 - RNA, 19 nt, Artificial Sequence
  Description of Artificial Sequence: Synthetic oligonucleotide
  Sense strand starting at position 1296 of SEQ ID NO: 917086
ucaccuguccaagggagaa

SEQ ID NO: 1207513 - RNA, 19 nt, Artificial Sequence
  Description of Artificial Sequence: Synthetic oligonucleotide
  Antisense strand to SEQ ID NO: 1207512
uucucccuuggacagguga

SEQ ID NO: 1207514 - RNA, 19 nt, Artificial Sequence
  Description of Artificial Sequence: Synthetic oligonucleotide
  Sense strand starting at position 1447 of SEQ ID NO: 917086
aagggcuggaguuaguaau

SEQ ID NO: 1207515 - RNA, 19 nt, Artificial Sequence
  Description of Artificial Sequence: Synthetic oligonucleotide
  Antisense strand to SEQ ID NO: 1207514
auuacuaacuccagcccuu

SEQ ID NO: 1207516 - RNA, 19 nt, Artificial Sequence
  Description of Artificial Sequence: Synthetic oligonucleotide
  Sense strand starting at position 1516 of SEQ ID NO: 917086
ccgauuagacuugaaggca

SEQ ID NO: 1207517 - RNA, 19 nt, Artificial Sequence
  Description of Artificial Sequence: Synthetic oligonucleotide
  Antisense strand to SEQ ID NO: 1207516
ugccuucaagucuaaucgg

SEQ ID NO: 1207518 - RNA, 19 nt, Artificial Sequence
  Description of Artificial Sequence: Synthetic oligonucleotide
  Sense strand starting at position 1524 of SEQ ID NO: 917086
acuugaaggcagugauugu

SEQ ID NO: 1207519 - RNA, 19 nt, Artificial Sequence
  Description of Artificial Sequence: Synthetic oligonucleotide
  Antisense strand to SEQ ID NO: 1207518
acaaucacugccuucaagu

SEQ ID NO: 1207520 - RNA, 19 nt, Artificial Sequence
  Description of Artificial Sequence: Synthetic oligonucleotide
  Sense strand starting at position 1571 of SEQ ID NO: 917086
aaagaaguccuaggaguuu

SEQ ID NO: 1207521 - RNA, 19 nt, Artificial Sequence
  Description of Artificial Sequence: Synthetic oligonucleotide
  Antisense strand to SEQ ID NO: 1207520
aaacuccuaggacuucuuu

SEQ ID NO: 1207522 - RNA, 19 nt, Artificial Sequence
  Description of Artificial Sequence: Synthetic oligonucleotide
  Sense strand starting at position 2058 of SEQ ID NO: 917086
cucuaugguguaugaagua

SEQ ID NO: 1207523 - RNA, 19 nt, Artificial Sequence
  Description of Artificial Sequence: Synthetic oligonucleotide
  Antisense strand to SEQ ID NO: 1207522
uacuucauacaccauagag

SEQ ID NO: 1207524 - RNA, 19 nt, Artificial Sequence
  Description of Artificial Sequence: Synthetic oligonucleotide
  Sense strand starting at position 2107 of SEQ ID NO: 917086
cacgcuuugcgugucacua

SEQ ID NO: 1207525 - RNA, 19 nt, Artificial Sequence
  Description of Artificial Sequence: Synthetic oligonucleotide
  Antisense strand to SEQ ID NO: 1207524
uagugacacgcaaagcgug

SEQ ID NO: 1207526 - RNA, 19 nt, Artificial Sequence
  Description of Artificial Sequence: Synthetic oligonucleotide
  Sense strand starting at position 2108 of SEQ ID NO: 917086
acgcuuugcgugucacuau

SEQ ID NO: 1207527 - RNA, 19 nt, Artificial Sequence
  Description of Artificial Sequence: Synthetic oligonucleotide
  Antisense strand to SEQ ID NO: 1207526
auagugacacgcaaagcgu

SEQ ID NO: 1207528 - RNA, 19 nt, Artificial Sequence
  Description of Artificial Sequence: Synthetic oligonucleotide
  Sense strand starting at position 2147 of SEQ ID NO: 917086
cgacauggucuaagcggua

SEQ ID NO: 1207529 - RNA, 19 nt, Artificial Sequence
  Description of Artificial Sequence: Synthetic oligonucleotide
  Antisense strand to SEQ ID NO: 1207528
uaccgcuuagaccaugucg

SEQ ID NO: 1207530 - RNA, 19 nt, Artificial Sequence
  Description of Artificial Sequence: Synthetic oligonucleotide
  Sense strand starting at position 2878 of SEQ ID NO: 917086
gguucuaucguucucuguu

SEQ ID NO: 1207531 - RNA, 19 nt, Artificial Sequence
  Description of Artificial Sequence: Synthetic oligonucleotide
  Antisense strand to SEQ ID NO: 1207530
aacagagaacgauagaacc

SEQ ID NO: 1207532 - RNA, 19 nt, Artificial Sequence
  Description of Artificial Sequence: Synthetic oligonucleotide
  Sense strand starting at position 2885 of SEQ ID NO: 917086
ucguucucuguucuguuaa

SEQ ID NO: 1207533 - RNA, 19 nt, Artificial Sequence
  Description of Artificial Sequence: Synthetic oligonucleotide
  Antisense strand to SEQ ID NO: 1207532
uuaacagaacagagaacga

SEQ ID NO: 1207534 - RNA, 19 nt, Artificial Sequence
  Description of Artificial Sequence: Synthetic oligonucleotide
  Sense strand starting at position 2968 of SEQ ID NO: 917086
ccaaauguuucuccuaagu

SEQ ID NO: 1207535 - RNA, 19 nt, Artificial Sequence
  Description of Artificial Sequence: Synthetic oligonucleotide
  Antisense strand to SEQ ID NO: 1207534
acuuaggagaaacauuugg

SEQ ID NO: 1207536 - RNA, 19 nt, Artificial Sequence
  Description of Artificial Sequence: Synthetic oligonucleotide
  Sense strand starting at position 3070 of SEQ ID NO: 917086
ucacaagcagcagauaauu

SEQ ID NO: 1207537 - RNA, 19 nt, Artificial Sequence
  Description of Artificial Sequence: Synthetic oligonucleotide
  Antisense strand to SEQ ID NO: 1207536
aauuaucugcugcuuguga

SEQ ID NO: 1207538 - RNA, 19 nt, Artificial Sequence
  Description of Artificial Sequence: Synthetic oligonucleotide
  Sense strand starting at position 3110 of SEQ ID NO: 917086
ggaugaagcuuauuaguag

SEQ ID NO: 1207539 - RNA, 19 nt, Artificial Sequence
  Description of Artificial Sequence: Synthetic oligonucleotide
  Antisense strand to SEQ ID NO: 1207538
cuacuaauaagcuucaucc

SEQ ID NO: 1207540 - RNA, 19 nt, Artificial Sequence
  Description of Artificial Sequence: Synthetic oligonucleotide
  Sense strand starting at position 3186 of SEQ ID NO: 917086
uaugaaagauuggucguaa

SEQ ID NO: 1207541 - RNA, 19 nt, Artificial Sequence
  Description of Artificial Sequence: Synthetic oligonucleotide
  Antisense strand to SEQ ID NO: 1207540
uuacgaccaaucuuucaua

SEQ ID NO: 1207542 - RNA, 19 nt, Artificial Sequence
  Description of Artificial Sequence: Synthetic oligonucleotide
  Sense strand starting at position 3187 of SEQ ID NO: 917086
augaaagauuggucguaac

SEQ ID NO: 1207543 - RNA, 19 nt, Artificial Sequence
  Description of Artificial Sequence: Synthetic oligonucleotide
  Antisense strand to SEQ ID NO: 1207542
guuacgaccaaucuuucau

SEQ ID NO: 1207544 - RNA, 19 nt, Artificial Sequence
  Description of Artificial Sequence: Synthetic oligonucleotide
  Sense strand starting at position 3354 of SEQ ID NO: 917086
ccaguaguucaggagguau

SEQ ID NO: 1207545 - RNA, 19 nt, Artificial Sequence
  Description of Artificial Sequence: Synthetic oligonucleotide
  Antisense strand to SEQ ID NO: 1207544
auaccuccugaacuacugg

SEQ ID NO: 1207546 - RNA, 19 nt, Artificial Sequence
  Description of Artificial Sequence: Synthetic oligonucleotide
  Sense strand starting at position 3706 of SEQ ID NO: 917086
acccaaugggcguaacagu

SEQ ID NO: 1207547 - RNA, 19 nt, Artificial Sequence
  Description of Artificial Sequence: Synthetic oligonucleotide
  Antisense strand to SEQ ID NO: 1207546
acuguuacgcccauugggu

SEQ ID NO: 1207548 - RNA, 19 nt, Artificial Sequence
  Description of Artificial Sequence: Synthetic oligonucleotide
  Sense strand starting at position 3823 of SEQ ID NO: 917086
ugaggacgcuguguuauuu

SEQ ID NO: 1207549 - RNA, 19 nt, Artificial Sequence
  Description of Artificial Sequence: Synthetic oligonucleotide
  Antisense strand to SEQ ID NO: 1207548
aaauaacacagcguccuca

SEQ ID NO: 1207550 - RNA, 19 nt, Artificial Sequence
  Description of Artificial Sequence: Synthetic oligonucleotide
  Sense strand starting at position 3827 of SEQ ID NO: 917086
gacgcuguguuauuuaaac

SEQ ID NO: 1207551 - RNA, 19 nt, Artificial Sequence
  Description of Artificial Sequence: Synthetic oligonucleotide
  Antisense strand to SEQ ID NO: 1207550
guuuaaauaacacagcguc

SEQ ID NO: 1207552 - RNA, 19 nt, Artificial Sequence
  Description of Artificial Sequence: Synthetic oligonucleotide
  Sense strand starting at position 3829 of SEQ ID NO: 917086
cgcuguguuauuuaaacgu

SEQ ID NO: 1207553 - RNA, 19 nt, Artificial Sequence
  Description of Artificial Sequence: Synthetic oligonucleotide
  Antisense strand to SEQ ID NO: 1207552
acguuuaaauaacacagcg

SEQ ID NO: 1207554 - RNA, 19 nt, Artificial Sequence
  Description of Artificial Sequence: Synthetic oligonucleotide
  Sense strand starting at position 3833 of SEQ ID NO: 917086
guguuauuuaaacgucagc

SEQ ID NO: 1207555 - RNA, 19 nt, Artificial Sequence
  Description of Artificial Sequence: Synthetic oligonucleotide
  Antisense strand to SEQ ID NO: 1207554
gcugacguuuaaauaacac

SEQ ID NO: 1207556 - RNA, 19 nt, Artificial Sequence
  Description of Artificial Sequence: Synthetic oligonucleotide
  Sense strand starting at position 3935 of SEQ ID NO: 917086
ugcaguucccuggagaagu

SEQ ID NO: 1207557 - RNA, 19 nt, Artificial Sequence
  Description of Artificial Sequence: Synthetic oligonucleotide
  Antisense strand to SEQ ID NO: 1207556
acuucuccagggaacugca

SEQ ID NO: 1207558 - RNA, 19 nt, Artificial Sequence
  Description of Artificial Sequence: Synthetic oligonucleotide
  Sense strand starting at position 125 of SEQ ID NO: 917087
aguauaacgagcuguuaac

SEQ ID NO: 1207559 - RNA, 19 nt, Artificial Sequence
  Description of Artificial Sequence: Synthetic oligonucleotide
  Antisense strand to SEQ ID NO: 1207558
guuaacagcucguuauacu

SEQ ID NO: 1207560 - RNA, 19 nt, Artificial Sequence
  Description of Artificial Sequence: Synthetic oligonucleotide
  Sense strand starting at position 168 of SEQ ID NO: 917087
auggauguccacuguagaa

SEQ ID NO: 1207561 - RNA, 19 nt, Artificial Sequence
  Description of Artificial Sequence: Synthetic oligonucleotide
  Antisense strand to SEQ ID NO: 1207560
uucuacaguggacauccau

SEQ ID NO: 1207562 - RNA, 19 nt, Artificial Sequence
  Description of Artificial Sequence: Synthetic oligonucleotide
  Sense strand starting at position 170 of SEQ ID NO: 917087
ggauguccacuguagaauc

SEQ ID NO: 1207563 - RNA, 19 nt, Artificial Sequence
  Description of Artificial Sequence: Synthetic oligonucleotide
  Antisense strand to SEQ ID NO: 1207562
gauucuacaguggacaucc

SEQ ID NO: 1207564 - RNA, 19 nt, Artificial Sequence
  Description of Artificial Sequence: Synthetic oligonucleotide
  Sense strand starting at position 920 of SEQ ID NO: 917087
gcaaucuuguaacucaagu

SEQ ID NO: 1207565 - RNA, 19 nt, Artificial Sequence
  Description of Artificial Sequence: Synthetic oligonucleotide
  Antisense strand to SEQ ID NO: 1207564
acuugaguuacaagauugc

SEQ ID NO: 1207566 - RNA, 19 nt, Artificial Sequence
  Description of Artificial Sequence: Synthetic oligonucleotide
  Sense strand starting at position 1182 of SEQ ID NO: 917087
guaacaugacggcacaauu

SEQ ID NO: 1207567 - RNA, 19 nt, Artificial Sequence
  Description of Artificial Sequence: Synthetic oligonucleotide
  Antisense strand to SEQ ID NO: 1207566
aauugugccgucauguuac

SEQ ID NO: 1207568 - RNA, 19 nt, Artificial Sequence
  Description of Artificial Sequence: Synthetic oligonucleotide
  Sense strand starting at position 1206 of SEQ ID NO: 917087
guggcugcgaaauaugaaa

SEQ ID NO: 1207569 - RNA, 19 nt, Artificial Sequence
  Description of Artificial Sequence: Synthetic oligonucleotide
  Antisense strand to SEQ ID NO: 1207568
uuucauauuucgcagccac

SEQ ID NO: 1207570 - RNA, 19 nt, Artificial Sequence
  Description of Artificial Sequence: Synthetic oligonucleotide
  Sense strand starting at position 1253 of SEQ ID NO: 917087
caauuaagggcuuguguac

SEQ ID NO: 1207571 - RNA, 19 nt, Artificial Sequence
  Description of Artificial Sequence: Synthetic oligonucleotide
  Antisense strand to SEQ ID NO: 1207570
guacacaagcccuuaauug

SEQ ID NO: 1207572 - RNA, 19 nt, Artificial Sequence
  Description of Artificial Sequence: Synthetic oligonucleotide
  Sense strand starting at position 1731 of SEQ ID NO: 917087
agagcucuagaucgccaaa

SEQ ID NO: 1207573 - RNA, 19 nt, Artificial Sequence
  Description of Artificial Sequence: Synthetic oligonucleotide
  Antisense strand to SEQ ID NO: 1207572
uuuggcgaucuagagcucu

SEQ ID NO: 1207574 - RNA, 19 nt, Artificial Sequence
  Description of Artificial Sequence: Synthetic oligonucleotide
  Sense strand starting at position 1965 of SEQ ID NO: 917087
ggccuaucgggcuugcgau

SEQ ID NO: 1207575 - RNA, 19 nt, Artificial Sequence
  Description of Artificial Sequence: Synthetic oligonucleotide
  Antisense strand to SEQ ID NO: 1207574
aucgcaagcccgauaggcc

SEQ ID NO: 1207576 - RNA, 19 nt, Artificial Sequence
  Description of Artificial Sequence: Synthetic oligonucleotide
  Sense strand starting at position 2074 of SEQ ID NO: 917087
ugugaagaaagcuggagua

SEQ ID NO: 1207577 - RNA, 19 nt, Artificial Sequence
  Description of Artificial Sequence: Synthetic oligonucleotide
  Antisense strand to SEQ ID NO: 1207576
uacuccagcuuucuucaca

SEQ ID NO: 1207578 - RNA, 19 nt, Artificial Sequence
  Description of Artificial Sequence: Synthetic oligonucleotide
  Sense strand starting at position 2094 of SEQ ID NO: 917087
gucagaaugcgcuaaagca

SEQ ID NO: 1207579 - RNA, 19 nt, Artificial Sequence
  Description of Artificial Sequence: Synthetic oligonucleotide
  Antisense strand to SEQ ID NO: 1207578
ugcuuuagcgcauucugac

SEQ ID NO: 1207580 - RNA, 19 nt, Artificial Sequence
  Description of Artificial Sequence: Synthetic oligonucleotide
  Sense strand starting at position 2462 of SEQ ID NO: 917087
acgcauagcuucucacaga

SEQ ID NO: 1207581 - RNA, 19 nt, Artificial Sequence
  Description of Artificial Sequence: Synthetic oligonucleotide
  Antisense strand to SEQ ID NO: 1207580
ucugugagaagcuaugcgu

SEQ ID NO: 1207582 - RNA, 19 nt, Artificial Sequence
  Description of Artificial Sequence: Synthetic oligonucleotide
  Sense strand starting at position 2511 of SEQ ID NO: 917087
ggaacuccauagccugaaa

SEQ ID NO: 1207583 - RNA, 19 nt, Artificial Sequence
  Description of Artificial Sequence: Synthetic oligonucleotide
  Antisense strand to SEQ ID NO: 1207582
uuucaggcuauggaguucc

SEQ ID NO: 1207584 - RNA, 19 nt, Artificial Sequence
  Description of Artificial Sequence: Synthetic oligonucleotide
  Sense strand starting at position 2571 of SEQ ID NO: 917087
ccagcuuugcuacagagau

SEQ ID NO: 1207585 - RNA, 19 nt, Artificial Sequence
  Description of Artificial Sequence: Synthetic oligonucleotide
  Antisense strand to SEQ ID NO: 1207584
aucucuguagcaaagcugg

SEQ ID NO: 1207586 - RNA, 19 nt, Artificial Sequence
  Description of Artificial Sequence: Synthetic oligonucleotide
  Sense strand starting at position 2573 of SEQ ID NO: 917087
agcuuugcuacagagauga

SEQ ID NO: 1207587 - RNA, 19 nt, Artificial Sequence
  Description of Artificial Sequence: Synthetic oligonucleotide
  Antisense strand to SEQ ID NO: 1207586
ucaucucuguagcaaagcu

SEQ ID NO: 1207588 - RNA, 19 nt, Artificial Sequence
  Description of Artificial Sequence: Synthetic oligonucleotide
  Sense strand starting at position 2581 of SEQ ID NO: 917087
uacagagaugacuguugua

SEQ ID NO: 1207589 - RNA, 19 nt, Artificial Sequence
  Description of Artificial Sequence: Synthetic oligonucleotide
  Antisense strand to SEQ ID NO: 1207588
uacaacagucaucucugua

SEQ ID NO: 1207590 - RNA, 19 nt, Artificial Sequence
  Description of Artificial Sequence: Synthetic oligonucleotide
  Sense strand starting at position 2588 of SEQ ID NO: 917087
augacuguuguagauuagu

SEQ ID NO: 1207591 - RNA, 19 nt, Artificial Sequence
  Description of Artificial Sequence: Synthetic oligonucleotide
  Antisense strand to SEQ ID NO: 1207590
acuaaucuacaacagucau

SEQ ID NO: 1207592 - RNA, 19 nt, Artificial Sequence
  Description of Artificial Sequence: Synthetic oligonucleotide
  Sense strand starting at position 2591 of SEQ ID NO: 917087
acuguuguagauuaguuua

SEQ ID NO: 1207593 - RNA, 19 nt, Artificial Sequence
  Description of Artificial Sequence: Synthetic oligonucleotide
  Antisense strand to SEQ ID NO: 1207592
uaaacuaaucuacaacagu

SEQ ID NO: 1207594 - RNA, 19 nt, Artificial Sequence
  Description of Artificial Sequence: Synthetic oligonucleotide
  Sense strand starting at position 2594 of SEQ ID NO: 917087
guuguagauuaguuuauug

SEQ ID NO: 1207595 - RNA, 19 nt, Artificial Sequence
  Description of Artificial Sequence: Synthetic oligonucleotide
  Antisense strand to SEQ ID NO: 1207594
caauaaacuaaucuacaac

SEQ ID NO: 1207596 - RNA, 19 nt, Artificial Sequence
  Description of Artificial Sequence: Synthetic oligonucleotide
  Sense strand starting at position 2596 of SEQ ID NO: 917087
uguagauuaguuuauugag

SEQ ID NO: 1207597 - RNA, 19 nt, Artificial Sequence
  Description of Artificial Sequence: Synthetic oligonucleotide
  Antisense strand to SEQ ID NO: 1207596
cucaauaaacuaaucuaca

SEQ ID NO: 1207598 - RNA, 19 nt, Artificial Sequence
  Description of Artificial Sequence: Synthetic oligonucleotide
  Sense strand starting at position 2630 of SEQ ID NO: 917087
auguaagauuagcuagacu

SEQ ID NO: 1207599 - RNA, 19 nt, Artificial Sequence
  Description of Artificial Sequence: Synthetic oligonucleotide
  Antisense strand to SEQ ID NO: 1207598
agucuagcuaaucuuacau

SEQ ID NO: 1207600 - RNA, 19 nt, Artificial Sequence
  Description of Artificial Sequence: Synthetic oligonucleotide
  Sense strand starting at position 2721 of SEQ ID NO: 917087
uugucuaggaccugaguau

SEQ ID NO: 1207601 - RNA, 19 nt, Artificial Sequence
  Description of Artificial Sequence: Synthetic oligonucleotide
  Antisense strand to SEQ ID NO: 1207600
auacucagguccuagacaa

SEQ ID NO: 1207602 - RNA, 19 nt, Artificial Sequence
  Description of Artificial Sequence: Synthetic oligonucleotide
  Sense strand starting at position 2730 of SEQ ID NO: 917087
accugaguaugguuacaag

SEQ ID NO: 1207603 - RNA, 19 nt, Artificial Sequence
  Description of Artificial Sequence: Synthetic oligonucleotide
  Antisense strand to SEQ ID NO: 1207602
cuuguaaccauacucaggu

SEQ ID NO: 1207604 - RNA, 19 nt, Artificial Sequence
  Description of Artificial Sequence: Synthetic oligonucleotide
  Sense strand starting at position 2820 of SEQ ID NO: 917087
uuauaaauguuccuguucu

SEQ ID NO: 1207605 - RNA, 19 nt, Artificial Sequence
  Description of Artificial Sequence: Synthetic oligonucleotide
  Antisense strand to SEQ ID NO: 1207604
agaacaggaacauuuauaa

SEQ ID NO: 1207606 - RNA, 19 nt, Artificial Sequence
  Description of Artificial Sequence: Synthetic oligonucleotide
  Sense strand starting at position 2830 of SEQ ID NO: 917087
uccuguucuugggucgaga

SEQ ID NO: 1207607 - RNA, 19 nt, Artificial Sequence
  Description of Artificial Sequence: Synthetic oligonucleotide
  Antisense strand to SEQ ID NO: 1207606
ucucgacccaagaacagga

SEQ ID NO: 1207608 - RNA, 19 nt, Artificial Sequence
  Description of Artificial Sequence: Synthetic oligonucleotide
  Sense strand starting at position 2832 of SEQ ID NO: 917087
cuguucuugggucgagaug

SEQ ID NO: 1207609 - RNA, 19 nt, Artificial Sequence
  Description of Artificial Sequence: Synthetic oligonucleotide
  Antisense strand to SEQ ID NO: 1207608
caucucgacccaagaacag

SEQ ID NO: 1207610 - RNA, 19 nt, Artificial Sequence
  Description of Artificial Sequence: Synthetic oligonucleotide
  Sense strand starting at position 2840 of SEQ ID NO: 917087
gggucgagaugguuguuga

SEQ ID NO: 1207611 - RNA, 19 nt, Artificial Sequence
  Description of Artificial Sequence: Synthetic oligonucleotide
  Antisense strand to SEQ ID NO: 1207610
ucaacaaccaucucgaccc

SEQ ID NO: 1207612 - RNA, 19 nt, Artificial Sequence
  Description of Artificial Sequence: Synthetic oligonucleotide
  Sense strand starting at position 2841 of SEQ ID NO: 917087
ggucgagaugguuguugau

SEQ ID NO: 1207613 - RNA, 19 nt, Artificial Sequence
  Description of Artificial Sequence: Synthetic oligonucleotide
  Antisense strand to SEQ ID NO: 1207612
aucaacaaccaucucgacc

SEQ ID NO: 1207614 - RNA, 19 nt, Artificial Sequence
  Description of Artificial Sequence: Synthetic oligonucleotide
  Sense strand starting at position 2848 of SEQ ID NO: 917087
augguuguugauggauauu

SEQ ID NO: 1207615 - RNA, 19 nt, Artificial Sequence
  Description of Artificial Sequence: Synthetic oligonucleotide
  Antisense strand to SEQ ID NO: 1207614
aauauccaucaacaaccau

SEQ ID NO: 1207616 - RNA, 19 nt, Artificial Sequence
  Description of Artificial Sequence: Synthetic oligonucleotide
  Sense strand starting at position 2851 of SEQ ID NO: 917087
guuguugauggauauugau

SEQ ID NO: 1207617 - RNA, 19 nt, Artificial Sequence
  Description of Artificial Sequence: Synthetic oligonucleotide
  Antisense strand to SEQ ID NO: 1207616
aucaauauccaucaacaac

SEQ ID NO: 1207618 - RNA, 19 nt, Artificial Sequence
  Description of Artificial Sequence: Synthetic oligonucleotide
  Sense strand starting at position 2860 of SEQ ID NO: 917087
ggauauugaucacacaaag

SEQ ID NO: 1207619 - RNA, 19 nt, Artificial Sequence
  Description of Artificial Sequence: Synthetic oligonucleotide
  Antisense strand to SEQ ID NO: 1207618
cuuugugugaucaauaucc

SEQ ID NO: 1207620 - RNA, 19 nt, Artificial Sequence
  Description of Artificial Sequence: Synthetic oligonucleotide
  Sense strand starting at position 3232 of SEQ ID NO: 917087
gucugugggagucaguaaa

SEQ ID NO: 1207621 - RNA, 19 nt, Artificial Sequence
  Description of Artificial Sequence: Synthetic oligonucleotide
  Antisense strand to SEQ ID NO: 1207620
uuuacugacucccacagac

SEQ ID NO: 1207622 - RNA, 19 nt, Artificial Sequence
  Description of Artificial Sequence: Synthetic oligonucleotide
  Sense strand starting at position 3240 of SEQ ID NO: 917087
gagucaguaaagugaggaa

SEQ ID NO: 1207623 - RNA, 19 nt, Artificial Sequence
  Description of Artificial Sequence: Synthetic oligonucleotide
  Antisense strand to SEQ ID NO: 1207622
uuccucacuuuacugacuc

SEQ ID NO: 1207624 - RNA, 19 nt, Artificial Sequence
  Description of Artificial Sequence: Synthetic oligonucleotide
  Sense strand starting at position 3263 of SEQ ID NO: 917087
gacuuuaaggaucggcaaa

SEQ ID NO: 1207625 - RNA, 19 nt, Artificial Sequence
  Description of Artificial Sequence: Synthetic oligonucleotide
  Antisense strand to SEQ ID NO: 1207624
uuugccgauccuuaaaguc

SEQ ID NO: 1207626 - RNA, 19 nt, Artificial Sequence
  Description of Artificial Sequence: Synthetic oligonucleotide
  Sense strand starting at position 3265 of SEQ ID NO: 917087
cuuuaaggaucggcaaagu

SEQ ID NO: 1207627 - RNA, 19 nt, Artificial Sequence
  Description of Artificial Sequence: Synthetic oligonucleotide
  Antisense strand to SEQ ID NO: 1207626
acuuugccgauccuuaaag

SEQ ID NO: 1207628 - RNA, 19 nt, Artificial Sequence
  Description of Artificial Sequence: Synthetic oligonucleotide
  Sense strand starting at position 3305 of SEQ ID NO: 917087
gugucuuagguguaaggac

SEQ ID NO: 1207629 - RNA, 19 nt, Artificial Sequence
  Description of Artificial Sequence: Synthetic oligonucleotide
  Antisense strand to SEQ ID NO: 1207628
guccuuacaccuaagacac

SEQ ID NO: 1207630 - RNA, 19 nt, Artificial Sequence
  Description of Artificial Sequence: Synthetic oligonucleotide
  Sense strand starting at position 3353 of SEQ ID NO: 917087
gcaagaugagguuggaaca

SEQ ID NO: 1207631 - RNA, 19 nt, Artificial Sequence
  Description of Artificial Sequence: Synthetic oligonucleotide
  Antisense strand to SEQ ID NO: 1207630
uguuccaaccucaucuugc

SEQ ID NO: 1207632 - RNA, 19 nt, Artificial Sequence
  Description of Artificial Sequence: Synthetic oligonucleotide
  Sense strand starting at position 3428 of SEQ ID NO: 917087
ggaagucacuuacacauuu

SEQ ID NO: 1207633 - RNA, 19 nt, Artificial Sequence
  Description of Artificial Sequence: Synthetic oligonucleotide
  Antisense strand to SEQ ID NO: 1207632
aaauguguaagugacuucc

SEQ ID NO: 1207634 - RNA, 19 nt, Artificial Sequence
  Description of Artificial Sequence: Synthetic oligonucleotide
  Sense strand starting at position 3483 of SEQ ID NO: 917087
ucccuauauugcccaggua

SEQ ID NO: 1207635 - RNA, 19 nt, Artificial Sequence
  Description of Artificial Sequence: Synthetic oligonucleotide
  Antisense strand to SEQ ID NO: 1207634
uaccugggcaauauaggga

SEQ ID NO: 1207636 - RNA, 19 nt, Artificial Sequence
  Description of Artificial Sequence: Synthetic oligonucleotide
  Sense strand starting at position 3825 of SEQ ID NO: 917087
gguguaacccgggaguuca

SEQ ID NO: 1207637 - RNA, 19 nt, Artificial Sequence
  Description of Artificial Sequence: Synthetic oligonucleotide
  Antisense strand to SEQ ID NO: 1207636
ugaacucccggguuacacc

SEQ ID NO: 1207638 - RNA, 19 nt, Artificial Sequence
  Description of Artificial Sequence: Synthetic oligonucleotide
  Sense strand starting at position 357 of SEQ ID NO: 917088
cagaccagucuggguauua

SEQ ID NO: 1207639 - RNA, 19 nt, Artificial Sequence
  Description of Artificial Sequence: Synthetic oligonucleotide
  Antisense strand to SEQ ID NO: 1207638
uaauacccagacuggucug

SEQ ID NO: 1207640 - RNA, 19 nt, Artificial Sequence
  Description of Artificial Sequence: Synthetic oligonucleotide
  Sense strand starting at position 358 of SEQ ID NO: 917088
agaccagucuggguauuau

SEQ ID NO: 1207641 - RNA, 19 nt, Artificial Sequence
  Description of Artificial Sequence: Synthetic oligonucleotide
  Antisense strand to SEQ ID NO: 1207640
auaauacccagacuggucu

SEQ ID NO: 1207642 - RNA, 19 nt, Artificial Sequence
  Description of Artificial Sequence: Synthetic oligonucleotide
  Sense strand starting at position 427 of SEQ ID NO: 917088
uuaauuaugccagaugugu

SEQ ID NO: 1207643 - RNA, 19 nt, Artificial Sequence
  Description of Artificial Sequence: Synthetic oligonucleotide
  Antisense strand to SEQ ID NO: 1207642
acacaucuggcauaauuaa

SEQ ID NO: 1207644 - RNA, 19 nt, Artificial Sequence
  Description of Artificial Sequence: Synthetic oligonucleotide
  Sense strand starting at position 693 of SEQ ID NO: 917088
gaauauguacuguauaugu

SEQ ID NO: 1207645 - RNA, 19 nt, Artificial Sequence
  Description of Artificial Sequence: Synthetic oligonucleotide
  Antisense strand to SEQ ID NO: 1207644
acauauacaguacauauuc

SEQ ID NO: 1207646 - RNA, 19 nt, Artificial Sequence
  Description of Artificial Sequence: Synthetic oligonucleotide
  Sense strand starting at position 798 of SEQ ID NO: 917088
ucaugcuaugcuuaaugaa

SEQ ID NO: 1207647 - RNA, 19 nt, Artificial Sequence
  Description of Artificial Sequence: Synthetic oligonucleotide
  Antisense strand to SEQ ID NO: 1207646
uucauuaagcauagcauga

SEQ ID NO: 1207648 - RNA, 19 nt, Artificial Sequence
  Description of Artificial Sequence: Synthetic oligonucleotide
  Sense strand starting at position 805 of SEQ ID NO: 917088
augcuuaaugaaggaggua

SEQ ID NO: 1207649 - RNA, 19 nt, Artificial Sequence
  Description of Artificial Sequence: Synthetic oligonucleotide
  Antisense strand to SEQ ID NO: 1207648
uaccuccuucauuaagcau

SEQ ID NO: 1207650 - RNA, 19 nt, Artificial Sequence
  Description of Artificial Sequence: Synthetic oligonucleotide
  Sense strand starting at position 828 of SEQ ID NO: 917088
cugaguguuacgugauuuc

SEQ ID NO: 1207651 - RNA, 19 nt, Artificial Sequence
  Description of Artificial Sequence: Synthetic oligonucleotide
  Antisense strand to SEQ ID NO: 1207650
gaaaucacguaacacucag

SEQ ID NO: 1207652 - RNA, 19 nt, Artificial Sequence
  Description of Artificial Sequence: Synthetic oligonucleotide
  Sense strand starting at position 831 of SEQ ID NO: 917088
aguguuacgugauuucaca

SEQ ID NO: 1207653 - RNA, 19 nt, Artificial Sequence
  Description of Artificial Sequence: Synthetic oligonucleotide
  Antisense strand to SEQ ID NO: 1207652
ugugaaaucacguaacacu

SEQ ID NO: 1207654 - RNA, 19 nt, Artificial Sequence
  Description of Artificial Sequence: Synthetic oligonucleotide
  Sense strand starting at position 852 of SEQ ID NO: 917088
gcagacaucacagggugua

SEQ ID NO: 1207655 - RNA, 19 nt, Artificial Sequence
  Description of Artificial Sequence: Synthetic oligonucleotide
  Antisense strand to SEQ ID NO: 1207654
uacacccugugaugucugc

SEQ ID NO: 1207656 - RNA, 19 nt, Artificial Sequence
  Description of Artificial Sequence: Synthetic oligonucleotide
  Sense strand starting at position 937 of SEQ ID NO: 917088
gugaauaauguagacaguu

SEQ ID NO: 1207657 - RNA, 19 nt, Artificial Sequence
  Description of Artificial Sequence: Synthetic oligonucleotide
  Antisense strand to SEQ ID NO: 1207656
aacugucuacauuauucac

SEQ ID NO: 1207658 - RNA, 19 nt, Artificial Sequence
  Description of Artificial Sequence: Synthetic oligonucleotide
  Sense strand starting at position 1032 of SEQ ID NO: 917088
uuaggagaccacuguggua

SEQ ID NO: 1207659 - RNA, 19 nt, Artificial Sequence
  Description of Artificial Sequence: Synthetic oligonucleotide
  Antisense strand to SEQ ID NO: 1207658
uaccacaguggucuccuaa

SEQ ID NO: 1207660 - RNA, 19 nt, Artificial Sequence
  Description of Artificial Sequence: Synthetic oligonucleotide
  Sense strand starting at position 1034 of SEQ ID NO: 917088
aggagaccacugugguaua

SEQ ID NO: 1207661 - RNA, 19 nt, Artificial Sequence
  Description of Artificial Sequence: Synthetic oligonucleotide
  Antisense strand to SEQ ID NO: 1207660
uauaccacaguggucuccu

SEQ ID NO: 1207662 - RNA, 19 nt, Artificial Sequence
  Description of Artificial Sequence: Synthetic oligonucleotide
  Sense strand starting at position 1085 of SEQ ID NO: 917088
cugugcaugccuguacuau

SEQ ID NO: 1207663 - RNA, 19 nt, Artificial Sequence
  Description of Artificial Sequence: Synthetic oligonucleotide
  Antisense strand to SEQ ID NO: 1207662
auaguacaggcaugcacag

SEQ ID NO: 1207664 - RNA, 19 nt, Artificial Sequence
  Description of Artificial Sequence: Synthetic oligonucleotide
  Sense strand starting at position 1457 of SEQ ID NO: 917088
ugcgguguguauuugagau

SEQ ID NO: 1207665 - RNA, 19 nt, Artificial Sequence
  Description of Artificial Sequence: Synthetic oligonucleotide
  Antisense strand to SEQ ID NO: 1207664
aucucaaauacacaccgca

SEQ ID NO: 1207666 - RNA, 19 nt, Artificial Sequence
  Description of Artificial Sequence: Synthetic oligonucleotide
  Sense strand starting at position 1520 of SEQ ID NO: 917088
augccaauucgugaaggaa

SEQ ID NO: 1207667 - RNA, 19 nt, Artificial Sequence
  Description of Artificial Sequence: Synthetic oligonucleotide
  Antisense strand to SEQ ID NO: 1207666
uuccuucacgaauuggcau

SEQ ID NO: 1207668 - RNA, 19 nt, Artificial Sequence
  Description of Artificial Sequence: Synthetic oligonucleotide
  Sense strand starting at position 1523 of SEQ ID NO: 917088
ccaauucgugaaggaauga

SEQ ID NO: 1207669 - RNA, 19 nt, Artificial Sequence
  Description of Artificial Sequence: Synthetic oligonucleotide
  Antisense strand to SEQ ID NO: 1207668
ucauuccuucacgaauugg

SEQ ID NO: 1207670 - RNA, 19 nt, Artificial Sequence
  Description of Artificial Sequence: Synthetic oligonucleotide
  Sense strand starting at position 1680 of SEQ ID NO: 917088
gguuaagguccuggaauaa

SEQ ID NO: 1207671 - RNA, 19 nt, Artificial Sequence
  Description of Artificial Sequence: Synthetic oligonucleotide
  Antisense strand to SEQ ID NO: 1207670
uuauuccaggaccuuaacc

SEQ ID NO: 1207672 - RNA, 19 nt, Artificial Sequence
  Description of Artificial Sequence: Synthetic oligonucleotide
  Sense strand starting at position 2194 of SEQ ID NO: 917088
ggauucuccugccuuugaa

SEQ ID NO: 1207673 - RNA, 19 nt, Artificial Sequence
  Description of Artificial Sequence: Synthetic oligonucleotide
  Antisense strand to SEQ ID NO: 1207672
uucaaaggcaggagaaucc

SEQ ID NO: 1207674 - RNA, 19 nt, Artificial Sequence
  Description of Artificial Sequence: Synthetic oligonucleotide
  Sense strand starting at position 2206 of SEQ ID NO: 917088
cuuugaauugugugacaau

SEQ ID NO: 1207675 - RNA, 19 nt, Artificial Sequence
  Description of Artificial Sequence: Synthetic oligonucleotide
  Antisense strand to SEQ ID NO: 1207674
auugucacacaauucaaag

SEQ ID NO: 1207676 - RNA, 19 nt, Artificial Sequence
  Description of Artificial Sequence: Synthetic oligonucleotide
  Sense strand starting at position 2332 of SEQ ID NO: 917088
agacgacugagcuagguaa

SEQ ID NO: 1207677 - RNA, 19 nt, Artificial Sequence
  Description of Artificial Sequence: Synthetic oligonucleotide
  Antisense strand to SEQ ID NO: 1207676
uuaccuagcucagucgucu

SEQ ID NO: 1207678 - RNA, 19 nt, Artificial Sequence
  Description of Artificial Sequence: Synthetic oligonucleotide
  Sense strand starting at position 2368 of SEQ ID NO: 917088
gagucaggaagucgguaau

SEQ ID NO: 1207679 - RNA, 19 nt, Artificial Sequence
  Description of Artificial Sequence: Synthetic oligonucleotide
  Antisense strand to SEQ ID NO: 1207678
auuaccgacuuccugacuc

SEQ ID NO: 1207680 - RNA, 19 nt, Artificial Sequence
  Description of Artificial Sequence: Synthetic oligonucleotide
  Sense strand starting at position 2545 of SEQ ID NO: 917088
ucaucuuuaguauggguau

SEQ ID NO: 1207681 - RNA, 19 nt, Artificial Sequence
  Description of Artificial Sequence: Synthetic oligonucleotide
  Antisense strand to SEQ ID NO: 1207680
auacccauacuaaagauga

SEQ ID NO: 1207682 - RNA, 19 nt, Artificial Sequence
  Description of Artificial Sequence: Synthetic oligonucleotide
  Sense strand starting at position 2551 of SEQ ID NO: 917088
uuaguauggguauggacaa

SEQ ID NO: 1207683 - RNA, 19 nt, Artificial Sequence
  Description of Artificial Sequence: Synthetic oligonucleotide
  Antisense strand to SEQ ID NO: 1207682
uuguccauacccauacuaa

SEQ ID NO: 1207684 - RNA, 19 nt, Artificial Sequence
  Description of Artificial Sequence: Synthetic oligonucleotide
  Sense strand starting at position 2678 of SEQ ID NO: 917088
aacguaaugcaagguaauu

SEQ ID NO: 1207685 - RNA, 19 nt, Artificial Sequence
  Description of Artificial Sequence: Synthetic oligonucleotide
  Antisense strand to SEQ ID NO: 1207684
aauuaccuugcauuacguu

SEQ ID NO: 1207686 - RNA, 19 nt, Artificial Sequence
  Description of Artificial Sequence: Synthetic oligonucleotide
  Sense strand starting at position 2818 of SEQ ID NO: 917088
cgaugucuucuauagagac

SEQ ID NO: 1207687 - RNA, 19 nt, Artificial Sequence
  Description of Artificial Sequence: Synthetic oligonucleotide
  Antisense strand to SEQ ID NO: 1207686
gucucuauagaagacaucg

SEQ ID NO: 1207688 - RNA, 19 nt, Artificial Sequence
  Description of Artificial Sequence: Synthetic oligonucleotide
  Sense strand starting at position 2824 of SEQ ID NO: 917088
cuucuauagagacggaagu

SEQ ID NO: 1207689 - RNA, 19 nt, Artificial Sequence
  Description of Artificial Sequence: Synthetic oligonucleotide
  Antisense strand to SEQ ID NO: 1207688
acuuccgucucuauagaag

SEQ ID NO: 1207690 - RNA, 19 nt, Artificial Sequence
  Description of Artificial Sequence: Synthetic oligonucleotide
  Sense strand starting at position 2911 of SEQ ID NO: 917088
ggcacuaauucucuaggca

SEQ ID NO: 1207691 - RNA, 19 nt, Artificial Sequence
  Description of Artificial Sequence: Synthetic oligonucleotide
  Antisense strand to SEQ ID NO: 1207690
ugccuagagaauuagugcc

SEQ ID NO: 1207692 - RNA, 19 nt, Artificial Sequence
  Description of Artificial Sequence: Synthetic oligonucleotide
  Sense strand starting at position 2912 of SEQ ID NO: 917088
gcacuaauucucuaggcau

SEQ ID NO: 1207693 - RNA, 19 nt, Artificial Sequence
  Description of Artificial Sequence: Synthetic oligonucleotide
  Antisense strand to SEQ ID NO: 1207692
augccuagagaauuagugc

SEQ ID NO: 1207694 - RNA, 19 nt, Artificial Sequence
  Description of Artificial Sequence: Synthetic oligonucleotide
  Sense strand starting at position 3016 of SEQ ID NO: 917088
gcuauagucucauuuccau

SEQ ID NO: 1207695 - RNA, 19 nt, Artificial Sequence
  Description of Artificial Sequence: Synthetic oligonucleotide
  Antisense strand to SEQ ID NO: 1207694
auggaaaugagacuauagc

SEQ ID NO: 1207696 - RNA, 19 nt, Artificial Sequence
  Description of Artificial Sequence: Synthetic oligonucleotide
  Sense strand starting at position 3587 of SEQ ID NO: 917088
uguguuugucucguuuauc

SEQ ID NO: 1207697 - RNA, 19 nt, Artificial Sequence
  Description of Artificial Sequence: Synthetic oligonucleotide
  Antisense strand to SEQ ID NO: 1207696
gauaaacgagacaaacaca

SEQ ID NO: 1207698 - RNA, 19 nt, Artificial Sequence
  Description of Artificial Sequence: Synthetic oligonucleotide
  Sense strand starting at position 3607 of SEQ ID NO: 917088
uuguaacuccaguagcuaa

SEQ ID NO: 1207699 - RNA, 19 nt, Artificial Sequence
  Description of Artificial Sequence: Synthetic oligonucleotide
  Antisense strand to SEQ ID NO: 1207698
uuagcuacuggaguuacaa

SEQ ID NO: 1207700 - RNA, 19 nt, Artificial Sequence
  Description of Artificial Sequence: Synthetic oligonucleotide
  Sense strand starting at position 3682 of SEQ ID NO: 917088
agguaugcugcagagauca

SEQ ID NO: 1207701 - RNA, 19 nt, Artificial Sequence
  Description of Artificial Sequence: Synthetic oligonucleotide
  Antisense strand to SEQ ID NO: 1207700
ugaucucugcagcauaccu

SEQ ID NO: 1207702 - RNA, 19 nt, Artificial Sequence
  Description of Artificial Sequence: Synthetic oligonucleotide
  Sense strand starting at position 3701 of SEQ ID NO: 917088
ggcaguuaacguuaaugaa

SEQ ID NO: 1207703 - RNA, 19 nt, Artificial Sequence
  Description of Artificial Sequence: Synthetic oligonucleotide
  Antisense strand to SEQ ID NO: 1207702
uucauuaacguuaacugcc

SEQ ID NO: 1207704 - RNA, 19 nt, Artificial Sequence
  Description of Artificial Sequence: Synthetic oligonucleotide
  Sense strand starting at position 3763 of SEQ ID NO: 917088
gauuguggcuaugugagaa

SEQ ID NO: 1207705 - RNA, 19 nt, Artificial Sequence
  Description of Artificial Sequence: Synthetic oligonucleotide
  Antisense strand to SEQ ID NO: 1207704
uucucacauagccacaauc

SEQ ID NO: 1207706 - RNA, 19 nt, Artificial Sequence
  Description of Artificial Sequence: Synthetic oligonucleotide
  Sense strand starting at position 3775 of SEQ ID NO: 917088
gugagaauaugaucccagu

SEQ ID NO: 1207707 - RNA, 19 nt, Artificial Sequence
  Description of Artificial Sequence: Synthetic oligonucleotide
  Antisense strand to SEQ ID NO: 1207706
acugggaucauauucucac

SEQ ID NO: 1207708 - RNA, 19 nt, Artificial Sequence
  Description of Artificial Sequence: Synthetic oligonucleotide
  Sense strand starting at position 3868 of SEQ ID NO: 917088
aaauguugucaguggaaua

SEQ ID NO: 1207709 - RNA, 19 nt, Artificial Sequence
  Description of Artificial Sequence: Synthetic oligonucleotide
  Antisense strand to SEQ ID NO: 1207708
uauuccacugacaacauuu

SEQ ID NO: 1207710 - RNA, 19 nt, Artificial Sequence
  Description of Artificial Sequence: Synthetic oligonucleotide
  Sense strand starting at position 3925 of SEQ ID NO: 917088
ucucauauggccuaucagu

SEQ ID NO: 1207711 - RNA, 19 nt, Artificial Sequence
  Description of Artificial Sequence: Synthetic oligonucleotide
  Antisense strand to SEQ ID NO: 1207710
acugauaggccauaugaga

SEQ ID NO: 1207712 - RNA, 19 nt, Artificial Sequence
  Description of Artificial Sequence: Synthetic oligonucleotide
  Sense strand starting at position 3938 of SEQ ID NO: 917088
aucagucacuaguuuggaa

SEQ ID NO: 1207713 - RNA, 19 nt, Artificial Sequence
  Description of Artificial Sequence: Synthetic oligonucleotide
  Antisense strand to SEQ ID NO: 1207712
uuccaaacuagugacugau

SEQ ID NO: 1207714 - RNA, 19 nt, Artificial Sequence
  Description of Artificial Sequence: Synthetic oligonucleotide
  Sense strand starting at position 3968 of SEQ ID NO: 917088
ucuuguaggguuuauauaa

SEQ ID NO: 1207715 - RNA, 19 nt, Artificial Sequence
  Description of Artificial Sequence: Synthetic oligonucleotide
  Antisense strand to SEQ ID NO: 1207714
uuauauaaacccuacaaga

SEQ ID NO: 1207716 - RNA, 19 nt, Artificial Sequence
  Description of Artificial Sequence: Synthetic oligonucleotide
  Sense strand starting at position 3976 of SEQ ID NO: 917088
gguuuauauaaugggcuuu

SEQ ID NO: 1207717 - RNA, 19 nt, Artificial Sequence
  Description of Artificial Sequence: Synthetic oligonucleotide
  Antisense strand to SEQ ID NO: 1207716
aaagcccauuauauaaacc

SEQ ID NO: 1207718 - RNA, 19 nt, Artificial Sequence
  Description of Artificial Sequence: Synthetic oligonucleotide
  Sense strand starting at position 43 of SEQ ID NO: 917089
ugaagaacaguaugcuaaa

SEQ ID NO: 1207719 - RNA, 19 nt, Artificial Sequence
  Description of Artificial Sequence: Synthetic oligonucleotide
  Antisense strand to SEQ ID NO: 1207718
uuuagcauacuguucuuca

SEQ ID NO: 1207720 - RNA, 19 nt, Artificial Sequence
  Description of Artificial Sequence: Synthetic oligonucleotide
  Sense strand starting at position 176 of SEQ ID NO: 917089
ggagaccucuucuucuaca

SEQ ID NO: 1207721 - RNA, 19 nt, Artificial Sequence
  Description of Artificial Sequence: Synthetic oligonucleotide
  Antisense strand to SEQ ID NO: 1207720
uguagaagaagaggucucc

SEQ ID NO: 1207722 - RNA, 19 nt, Artificial Sequence
  Description of Artificial Sequence: Synthetic oligonucleotide
  Sense strand starting at position 376 of SEQ ID NO: 917089
acacuuaaguguuugaaau

SEQ ID NO: 1207723 - RNA, 19 nt, Artificial Sequence
  Description of Artificial Sequence: Synthetic oligonucleotide
  Antisense strand to SEQ ID NO: 1207722
auuucaaacacuuaagugu

SEQ ID NO: 1207724 - RNA, 19 nt, Artificial Sequence
  Description of Artificial Sequence: Synthetic oligonucleotide
  Sense strand starting at position 491 of SEQ ID NO: 917089
uauguuagggccuaaguga

SEQ ID NO: 1207725 - RNA, 19 nt, Artificial Sequence
  Description of Artificial Sequence: Synthetic oligonucleotide
  Antisense strand to SEQ ID NO: 1207724
ucacuuaggcccuaacaua

SEQ ID NO: 1207726 - RNA, 19 nt, Artificial Sequence
  Description of Artificial Sequence: Synthetic oligonucleotide
  Sense strand starting at position 547 of SEQ ID NO: 917089
uuaccacuuuggucagaca

SEQ ID NO: 1207727 - RNA, 19 nt, Artificial Sequence
  Description of Artificial Sequence: Synthetic oligonucleotide
  Antisense strand to SEQ ID NO: 1207726
ugucugaccaaagugguaa

SEQ ID NO: 1207728 - RNA, 19 nt, Artificial Sequence
  Description of Artificial Sequence: Synthetic oligonucleotide
  Sense strand starting at position 556 of SEQ ID NO: 917089
uggucagacaaguguuuag

SEQ ID NO: 1207729 - RNA, 19 nt, Artificial Sequence
  Description of Artificial Sequence: Synthetic oligonucleotide
  Antisense strand to SEQ ID NO: 1207728
cuaaacacuugucugacca

SEQ ID NO: 1207730 - RNA, 19 nt, Artificial Sequence
  Description of Artificial Sequence: Synthetic oligonucleotide
  Sense strand starting at position 560 of SEQ ID NO: 917089
cagacaaguguuuagucuu

SEQ ID NO: 1207731 - RNA, 19 nt, Artificial Sequence
  Description of Artificial Sequence: Synthetic oligonucleotide
  Antisense strand to SEQ ID NO: 1207730
aagacuaaacacuugucug

SEQ ID NO: 1207732 - RNA, 19 nt, Artificial Sequence
  Description of Artificial Sequence: Synthetic oligonucleotide
  Sense strand starting at position 571 of SEQ ID NO: 917089
uuagucuuacuguauaguu

SEQ ID NO: 1207733 - RNA, 19 nt, Artificial Sequence
  Description of Artificial Sequence: Synthetic oligonucleotide
  Antisense strand to SEQ ID NO: 1207732
aacuauacaguaagacuaa

SEQ ID NO: 1207734 - RNA, 19 nt, Artificial Sequence
  Description of Artificial Sequence: Synthetic oligonucleotide
  Sense strand starting at position 725 of SEQ ID NO: 917089
aaaggaugguugucauuau

SEQ ID NO: 1207735 - RNA, 19 nt, Artificial Sequence
  Description of Artificial Sequence: Synthetic oligonucleotide
  Antisense strand to SEQ ID NO: 1207734
auaaugacaaccauccuuu

SEQ ID NO: 1207736 - RNA, 19 nt, Artificial Sequence
  Description of Artificial Sequence: Synthetic oligonucleotide
  Sense strand starting at position 758 of SEQ ID NO: 917089
aaacuaguggcaugguaca

SEQ ID NO: 1207737 - RNA, 19 nt, Artificial Sequence
  Description of Artificial Sequence: Synthetic oligonucleotide
  Antisense strand to SEQ ID NO: 1207736
uguaccaugccacuaguuu

SEQ ID NO: 1207738 - RNA, 19 nt, Artificial Sequence
  Description of Artificial Sequence: Synthetic oligonucleotide
  Sense strand starting at position 826 of SEQ ID NO: 917089
uagagacuuccauguuugu

SEQ ID NO: 1207739 - RNA, 19 nt, Artificial Sequence
  Description of Artificial Sequence: Synthetic oligonucleotide
  Antisense strand to SEQ ID NO: 1207738
acaaacauggaagucucua

SEQ ID NO: 1207740 - RNA, 19 nt, Artificial Sequence
  Description of Artificial Sequence: Synthetic oligonucleotide
  Sense strand starting at position 923 of SEQ ID NO: 917089
uacagacaucacuguggau

SEQ ID NO: 1207741 - RNA, 19 nt, Artificial Sequence
  Description of Artificial Sequence: Synthetic oligonucleotide
  Antisense strand to SEQ ID NO: 1207740
auccacagugaugucugua

SEQ ID NO: 1207742 - RNA, 19 nt, Artificial Sequence
  Description of Artificial Sequence: Synthetic oligonucleotide
  Sense strand starting at position 925 of SEQ ID NO: 917089
cagacaucacuguggauca

SEQ ID NO: 1207743 - RNA, 19 nt, Artificial Sequence
  Description of Artificial Sequence: Synthetic oligonucleotide
  Antisense strand to SEQ ID NO: 1207742
ugauccacagugaugucug

SEQ ID NO: 1207744 - RNA, 19 nt, Artificial Sequence
  Description of Artificial Sequence: Synthetic oligonucleotide
  Sense strand starting at position 1053 of SEQ ID NO: 917089
uguuuacuuacaugggaag

SEQ ID NO: 1207745 - RNA, 19 nt, Artificial Sequence
  Description of Artificial Sequence: Synthetic oligonucleotide
  Antisense strand to SEQ ID NO: 1207744
cuucccauguaaguaaaca

SEQ ID NO: 1207746 - RNA, 19 nt, Artificial Sequence
  Description of Artificial Sequence: Synthetic oligonucleotide
  Sense strand starting at position 1054 of SEQ ID NO: 917089
guuuacuuacaugggaaga

SEQ ID NO: 1207747 - RNA, 19 nt, Artificial Sequence
  Description of Artificial Sequence: Synthetic oligonucleotide
  Antisense strand to SEQ ID NO: 1207746
ucuucccauguaaguaaac

SEQ ID NO: 1207748 - RNA, 19 nt, Artificial Sequence
  Description of Artificial Sequence: Synthetic oligonucleotide
  Sense strand starting at position 1076 of SEQ ID NO: 917089
ucauguugugaugggaaac

SEQ ID NO: 1207749 - RNA, 19 nt, Artificial Sequence
  Description of Artificial Sequence: Synthetic oligonucleotide
  Antisense strand to SEQ ID NO: 1207748
guuucccaucacaacauga

SEQ ID NO: 1207750 - RNA, 19 nt, Artificial Sequence
  Description of Artificial Sequence: Synthetic oligonucleotide
  Sense strand starting at position 1186 of SEQ ID NO: 917089
uucuuaaucgcuuaaggac

SEQ ID NO: 1207751 - RNA, 19 nt, Artificial Sequence
  Description of Artificial Sequence: Synthetic oligonucleotide
  Antisense strand to SEQ ID NO: 1207750
guccuuaagcgauuaagaa

SEQ ID NO: 1207752 - RNA, 19 nt, Artificial Sequence
  Description of Artificial Sequence: Synthetic oligonucleotide
  Sense strand starting at position 1253 of SEQ ID NO: 917089
auggcauuaccuggaagga

SEQ ID NO: 1207753 - RNA, 19 nt, Artificial Sequence
  Description of Artificial Sequence: Synthetic oligonucleotide
  Antisense strand to SEQ ID NO: 1207752
uccuuccagguaaugccau

SEQ ID NO: 1207754 - RNA, 19 nt, Artificial Sequence
  Description of Artificial Sequence: Synthetic oligonucleotide
  Sense strand starting at position 2168 of SEQ ID NO: 917089
gagacagucgcuugggaaa

SEQ ID NO: 1207755 - RNA, 19 nt, Artificial Sequence
  Description of Artificial Sequence: Synthetic oligonucleotide
  Antisense strand to SEQ ID NO: 1207754
uuucccaagcgacugucuc

SEQ ID NO: 1207756 - RNA, 19 nt, Artificial Sequence
  Description of Artificial Sequence: Synthetic oligonucleotide
  Sense strand starting at position 2375 of SEQ ID NO: 917089
agucgagaccugcaucauu

SEQ ID NO: 1207757 - RNA, 19 nt, Artificial Sequence
  Description of Artificial Sequence: Synthetic oligonucleotide
  Antisense strand to SEQ ID NO: 1207756
aaugaugcaggucucgacu

SEQ ID NO: 1207758 - RNA, 19 nt, Artificial Sequence
  Description of Artificial Sequence: Synthetic oligonucleotide
  Sense strand starting at position 2383 of SEQ ID NO: 917089
ccugcaucauuccugaaga

SEQ ID NO: 1207759 - RNA, 19 nt, Artificial Sequence
  Description of Artificial Sequence: Synthetic oligonucleotide
  Antisense strand to SEQ ID NO: 1207758
ucuucaggaaugaugcagg

SEQ ID NO: 1207760 - RNA, 19 nt, Artificial Sequence
  Description of Artificial Sequence: Synthetic oligonucleotide
  Sense strand starting at position 2385 of SEQ ID NO: 917089
ugcaucauuccugaagaca

SEQ ID NO: 1207761 - RNA, 19 nt, Artificial Sequence
  Description of Artificial Sequence: Synthetic oligonucleotide
  Antisense strand to SEQ ID NO: 1207760
ugucuucaggaaugaugca

SEQ ID NO: 1207762 - RNA, 19 nt, Artificial Sequence
  Description of Artificial Sequence: Synthetic oligonucleotide
  Sense strand starting at position 2938 of SEQ ID NO: 917089
cgauauaauccaggaauuc

SEQ ID NO: 1207763 - RNA, 19 nt, Artificial Sequence
  Description of Artificial Sequence: Synthetic oligonucleotide
  Antisense strand to SEQ ID NO: 1207762
gaauuccuggauuauaucg

SEQ ID NO: 1207764 - RNA, 19 nt, Artificial Sequence
  Description of Artificial Sequence: Synthetic oligonucleotide
  Sense strand starting at position 2975 of SEQ ID NO: 917089
acugaauucgcuuaaaugc

SEQ ID NO: 1207765 - RNA, 19 nt, Artificial Sequence
  Description of Artificial Sequence: Synthetic oligonucleotide
  Antisense strand to SEQ ID NO: 1207764
gcauuuaagcgaauucagu

SEQ ID NO: 1207766 - RNA, 19 nt, Artificial Sequence
  Description of Artificial Sequence: Synthetic oligonucleotide
  Sense strand starting at position 3127 of SEQ ID NO: 917089
gucuaaacagcugagaauu

SEQ ID NO: 1207767 - RNA, 19 nt, Artificial Sequence
  Description of Artificial Sequence: Synthetic oligonucleotide
  Antisense strand to SEQ ID NO: 1207766
aauucucagcuguuuagac

SEQ ID NO: 1207768 - RNA, 19 nt, Artificial Sequence
  Description of Artificial Sequence: Synthetic oligonucleotide
  Sense strand starting at position 3129 of SEQ ID NO: 917089
cuaaacagcugagaauuua

SEQ ID NO: 1207769 - RNA, 19 nt, Artificial Sequence
  Description of Artificial Sequence: Synthetic oligonucleotide
  Antisense strand to SEQ ID NO: 1207768
uaaauucucagcuguuuag

SEQ ID NO: 1207770 - RNA, 19 nt, Artificial Sequence
  Description of Artificial Sequence: Synthetic oligonucleotide
  Sense strand starting at position 3137 of SEQ ID NO: 917089
cugagaauuuagcagagau

SEQ ID NO: 1207771 - RNA, 19 nt, Artificial Sequence
  Description of Artificial Sequence: Synthetic oligonucleotide
  Antisense strand to SEQ ID NO: 1207770
aucucugcuaaauucucag

SEQ ID NO: 1207772 - RNA, 19 nt, Artificial Sequence
  Description of Artificial Sequence: Synthetic oligonucleotide
  Sense strand starting at position 3171 of SEQ ID NO: 917089
auuagagauccugguacuu

SEQ ID NO: 1207773 - RNA, 19 nt, Artificial Sequence
  Description of Artificial Sequence: Synthetic oligonucleotide
  Antisense strand to SEQ ID NO: 1207772
aaguaccaggaucucuaau

SEQ ID NO: 1207774 - RNA, 19 nt, Artificial Sequence
  Description of Artificial Sequence: Synthetic oligonucleotide
  Sense strand starting at position 3257 of SEQ ID NO: 917089
auuuguaaaucaggaggga

SEQ ID NO: 1207775 - RNA, 19 nt, Artificial Sequence
  Description of Artificial Sequence: Synthetic oligonucleotide
  Antisense strand to SEQ ID NO: 1207774
ucccuccugauuuacaaau

SEQ ID NO: 1207776 - RNA, 19 nt, Artificial Sequence
  Description of Artificial Sequence: Synthetic oligonucleotide
  Sense strand starting at position 3318 of SEQ ID NO: 917089
gaggaagccuccuuuguaa

SEQ ID NO: 1207777 - RNA, 19 nt, Artificial Sequence
  Description of Artificial Sequence: Synthetic oligonucleotide
  Antisense strand to SEQ ID NO: 1207776
uuacaaaggaggcuuccuc

SEQ ID NO: 1207778 - RNA, 19 nt, Artificial Sequence
  Description of Artificial Sequence: Synthetic oligonucleotide
  Sense strand starting at position 3320 of SEQ ID NO: 917089
ggaagccuccuuuguaaga

SEQ ID NO: 1207779 - RNA, 19 nt, Artificial Sequence
  Description of Artificial Sequence: Synthetic oligonucleotide
  Antisense strand to SEQ ID NO: 1207778
ucuuacaaaggaggcuucc

SEQ ID NO: 1207780 - RNA, 19 nt, Artificial Sequence
  Description of Artificial Sequence: Synthetic oligonucleotide
  Sense strand starting at position 3321 of SEQ ID NO: 917089
gaagccuccuuuguaagau

SEQ ID NO: 1207781 - RNA, 19 nt, Artificial Sequence
  Description of Artificial Sequence: Synthetic oligonucleotide
  Antisense strand to SEQ ID NO: 1207780
aucuuacaaaggaggcuuc

SEQ ID NO: 1207782 - RNA, 19 nt, Artificial Sequence
  Description of Artificial Sequence: Synthetic oligonucleotide
  Sense strand starting at position 3339 of SEQ ID NO: 917089
uuaguuucccgccaaagga

SEQ ID NO: 1207783 - RNA, 19 nt, Artificial Sequence
  Description of Artificial Sequence: Synthetic oligonucleotide
  Antisense strand to SEQ ID NO: 1207782
uccuuuggcgggaaacuaa

SEQ ID NO: 1207784 - RNA, 19 nt, Artificial Sequence
  Description of Artificial Sequence: Synthetic oligonucleotide
  Sense strand starting at position 3384 of SEQ ID NO: 917089
gaaucaguucugcauggga

SEQ ID NO: 1207785 - RNA, 19 nt, Artificial Sequence
  Description of Artificial Sequence: Synthetic oligonucleotide
  Antisense strand to SEQ ID NO: 1207784
ucccaugcagaacugauuc

SEQ ID NO: 1207786 - RNA, 19 nt, Artificial Sequence
  Description of Artificial Sequence: Synthetic oligonucleotide
  Sense strand starting at position 3451 of SEQ ID NO: 917089
ggaugcugucuugaggaua

SEQ ID NO: 1207787 - RNA, 19 nt, Artificial Sequence
  Description of Artificial Sequence: Synthetic oligonucleotide
  Antisense strand to SEQ ID NO: 1207786
uauccucaagacagcaucc

SEQ ID NO: 1207788 - RNA, 19 nt, Artificial Sequence
  Description of Artificial Sequence: Synthetic oligonucleotide
  Sense strand starting at position 3469 of SEQ ID NO: 917089
acagcaauuuaguaauuag

SEQ ID NO: 1207789 - RNA, 19 nt, Artificial Sequence
  Description of Artificial Sequence: Synthetic oligonucleotide
  Antisense strand to SEQ ID NO: 1207788
cuaauuacuaaauugcugu

SEQ ID NO: 1207790 - RNA, 19 nt, Artificial Sequence
  Description of Artificial Sequence: Synthetic oligonucleotide
  Sense strand starting at position 3522 of SEQ ID NO: 917089
agcagcaguuacucaaaga

SEQ ID NO: 1207791 - RNA, 19 nt, Artificial Sequence
  Description of Artificial Sequence: Synthetic oligonucleotide
  Antisense strand to SEQ ID NO: 1207790
ucuuugaguaacugcugcu

SEQ ID NO: 1207792 - RNA, 19 nt, Artificial Sequence
  Description of Artificial Sequence: Synthetic oligonucleotide
  Sense strand starting at position 3523 of SEQ ID NO: 917089
gcagcaguuacucaaagag

SEQ ID NO: 1207793 - RNA, 19 nt, Artificial Sequence
  Description of Artificial Sequence: Synthetic oligonucleotide
  Antisense strand to SEQ ID NO: 1207792
cucuuugaguaacugcugc

SEQ ID NO: 1207794 - RNA, 19 nt, Artificial Sequence
  Description of Artificial Sequence: Synthetic oligonucleotide
  Sense strand starting at position 3583 of SEQ ID NO: 917089
gaaagaaguuucucaguua

SEQ ID NO: 1207795 - RNA, 19 nt, Artificial Sequence
  Description of Artificial Sequence: Synthetic oligonucleotide
  Antisense strand to SEQ ID NO: 1207794
uaacugagaaacuucuuuc

SEQ ID NO: 1207796 - RNA, 19 nt, Artificial Sequence
  Description of Artificial Sequence: Synthetic oligonucleotide
  Sense strand starting at position 3586 of SEQ ID NO: 917089
agaaguuucucaguuaacu

SEQ ID NO: 1207797 - RNA, 19 nt, Artificial Sequence
  Description of Artificial Sequence: Synthetic oligonucleotide
  Antisense strand to SEQ ID NO: 1207796
aguuaacugagaaacuucu

SEQ ID NO: 1207798 - RNA, 19 nt, Artificial Sequence
  Description of Artificial Sequence: Synthetic oligonucleotide
  Sense strand starting at position 170 of SEQ ID NO: 917090
gaaaccuucggaugauuga

SEQ ID NO: 1207799 - RNA, 19 nt, Artificial Sequence
  Description of Artificial Sequence: Synthetic oligonucleotide
  Antisense strand to SEQ ID NO: 1207798
ucaaucauccgaagguuuc

SEQ ID NO: 1207800 - RNA, 19 nt, Artificial Sequence
  Description of Artificial Sequence: Synthetic oligonucleotide
  Sense strand starting at position 180 of SEQ ID NO: 917090
gaugauugauuccucugua

SEQ ID NO: 1207801 - RNA, 19 nt, Artificial Sequence
  Description of Artificial Sequence: Synthetic oligonucleotide
  Antisense strand to SEQ ID NO: 1207800
uacagaggaaucaaucauc

SEQ ID NO: 1207802 - RNA, 19 nt, Artificial Sequence
  Description of Artificial Sequence: Synthetic oligonucleotide
  Sense strand starting at position 181 of SEQ ID NO: 917090
augauugauuccucuguau

SEQ ID NO: 1207803 - RNA, 19 nt, Artificial Sequence
  Description of Artificial Sequence: Synthetic oligonucleotide
  Antisense strand to SEQ ID NO: 1207802
auacagaggaaucaaucau

SEQ ID NO: 1207804 - RNA, 19 nt, Artificial Sequence
  Description of Artificial Sequence: Synthetic oligonucleotide
  Sense strand starting at position 195 of SEQ ID NO: 917090
uguauaaaugcugaguaaa

SEQ ID NO: 1207805 - RNA, 19 nt, Artificial Sequence
  Description of Artificial Sequence: Synthetic oligonucleotide
  Antisense strand to SEQ ID NO: 1207804
uuuacucagcauuuauaca

SEQ ID NO: 1207806 - RNA, 19 nt, Artificial Sequence
  Description of Artificial Sequence: Synthetic oligonucleotide
  Sense strand starting at position 206 of SEQ ID NO: 917090
ugaguaaacucaguaaugu

SEQ ID NO: 1207807 - RNA, 19 nt, Artificial Sequence
  Description of Artificial Sequence: Synthetic oligonucleotide
  Antisense strand to SEQ ID NO: 1207806
acauuacugaguuuacuca

SEQ ID NO: 1207808 - RNA, 19 nt, Artificial Sequence
  Description of Artificial Sequence: Synthetic oligonucleotide
  Sense strand starting at position 207 of SEQ ID NO: 917090
gaguaaacucaguaauguu

SEQ ID NO: 1207809 - RNA, 19 nt, Artificial Sequence
  Description of Artificial Sequence: Synthetic oligonucleotide
  Antisense strand to SEQ ID NO: 1207808
aacauuacugaguuuacuc

SEQ ID NO: 1207810 - RNA, 19 nt, Artificial Sequence
  Description of Artificial Sequence: Synthetic oligonucleotide
  Sense strand starting at position 348 of SEQ ID NO: 917090
ugcugauaaguuuaucuuu

SEQ ID NO: 1207811 - RNA, 19 nt, Artificial Sequence
  Description of Artificial Sequence: Synthetic oligonucleotide
  Antisense strand to SEQ ID NO: 1207810
aaagauaaacuuaucagca

SEQ ID NO: 1207812 - RNA, 19 nt, Artificial Sequence
  Description of Artificial Sequence: Synthetic oligonucleotide
  Sense strand starting at position 395 of SEQ ID NO: 917090
gaaguuacacaaugugcaa

SEQ ID NO: 1207813 - RNA, 19 nt, Artificial Sequence
  Description of Artificial Sequence: Synthetic oligonucleotide
  Antisense strand to SEQ ID NO: 1207812
uugcacauuguguaacuuc

SEQ ID NO: 1207814 - RNA, 19 nt, Artificial Sequence
  Description of Artificial Sequence: Synthetic oligonucleotide
  Sense strand starting at position 632 of SEQ ID NO: 917090
gucaaacugcaauaugaua

SEQ ID NO: 1207815 - RNA, 19 nt, Artificial Sequence
  Description of Artificial Sequence: Synthetic oligonucleotide
  Antisense strand to SEQ ID NO: 1207814
uaucauauugcaguuugac

SEQ ID NO: 1207816 - RNA, 19 nt, Artificial Sequence
  Description of Artificial Sequence: Synthetic oligonucleotide
  Sense strand starting at position 766 of SEQ ID NO: 917090
gggcuucuaagguauuauu

SEQ ID NO: 1207817 - RNA, 19 nt, Artificial Sequence
  Description of Artificial Sequence: Synthetic oligonucleotide
  Antisense strand to SEQ ID NO: 1207816
aauaauaccuuagaagccc

SEQ ID NO: 1207818 - RNA, 19 nt, Artificial Sequence
  Description of Artificial Sequence: Synthetic oligonucleotide
  Sense strand starting at position 792 of SEQ ID NO: 917090
agacuuaacugucuuagau

SEQ ID NO: 1207819 - RNA, 19 nt, Artificial Sequence
  Description of Artificial Sequence: Synthetic oligonucleotide
  Antisense strand to SEQ ID NO: 1207818
aucuaagacaguuaagucu

SEQ ID NO: 1207820 - RNA, 19 nt, Artificial Sequence
  Description of Artificial Sequence: Synthetic oligonucleotide
  Sense strand starting at position 829 of SEQ ID NO: 917090
uccacagcacguuaauaua

SEQ ID NO: 1207821 - RNA, 19 nt, Artificial Sequence
  Description of Artificial Sequence: Synthetic oligonucleotide
  Antisense strand to SEQ ID NO: 1207820
uauauuaacgugcugugga

SEQ ID NO: 1207822 - RNA, 19 nt, Artificial Sequence
  Description of Artificial Sequence: Synthetic oligonucleotide
  Sense strand starting at position 837 of SEQ ID NO: 917090
acguuaauauacccaauga

SEQ ID NO: 1207823 - RNA, 19 nt, Artificial Sequence
  Description of Artificial Sequence: Synthetic oligonucleotide
  Antisense strand to SEQ ID NO: 1207822
ucauuggguauauuaacgu

SEQ ID NO: 1207824 - RNA, 19 nt, Artificial Sequence
  Description of Artificial Sequence: Synthetic oligonucleotide
  Sense strand starting at position 864 of SEQ ID NO: 917090
uaagaauaacgcuauagug

SEQ ID NO: 1207825 - RNA, 19 nt, Artificial Sequence
  Description of Artificial Sequence: Synthetic oligonucleotide
  Antisense strand to SEQ ID NO: 1207824
cacuauagcguuauucuua

SEQ ID NO: 1207826 - RNA, 19 nt, Artificial Sequence
  Description of Artificial Sequence: Synthetic oligonucleotide
  Sense strand starting at position 940 of SEQ ID NO: 917090
agcgguucugaugauucaa

SEQ ID NO: 1207827 - RNA, 19 nt, Artificial Sequence
  Description of Artificial Sequence: Synthetic oligonucleotide
  Antisense strand to SEQ ID NO: 1207826
uugaaucaucagaaccgcu

SEQ ID NO: 1207828 - RNA, 19 nt, Artificial Sequence
  Description of Artificial Sequence: Synthetic oligonucleotide
  Sense strand starting at position 942 of SEQ ID NO: 917090
cgguucugaugauucaaag

SEQ ID NO: 1207829 - RNA, 19 nt, Artificial Sequence
  Description of Artificial Sequence: Synthetic oligonucleotide
  Antisense strand to SEQ ID NO: 1207828
cuuugaaucaucagaaccg

SEQ ID NO: 1207830 - RNA, 19 nt, Artificial Sequence
  Description of Artificial Sequence: Synthetic oligonucleotide
  Sense strand starting at position 1540 of SEQ ID NO: 917090
gcuguuauuaucgucguca

SEQ ID NO: 1207831 - RNA, 19 nt, Artificial Sequence
  Description of Artificial Sequence: Synthetic oligonucleotide
  Antisense strand to SEQ ID NO: 1207830
ugacgacgauaauaacagc

SEQ ID NO: 1207832 - RNA, 19 nt, Artificial Sequence
  Description of Artificial Sequence: Synthetic oligonucleotide
  Sense strand starting at position 2664 of SEQ ID NO: 917090
aucgcuuguguggaaggaa

SEQ ID NO: 1207833 - RNA, 19 nt, Artificial Sequence
  Description of Artificial Sequence: Synthetic oligonucleotide
  Antisense strand to SEQ ID NO: 1207832
uuccuuccacacaagcgau

SEQ ID NO: 1207834 - RNA, 19 nt, Artificial Sequence
  Description of Artificial Sequence: Synthetic oligonucleotide
  Sense strand starting at position 2688 of SEQ ID NO: 917090
ggauucugcuaauucuaau

SEQ ID NO: 1207835 - RNA, 19 nt, Artificial Sequence
  Description of Artificial Sequence: Synthetic oligonucleotide
  Antisense strand to SEQ ID NO: 1207834
auuagaauuagcagaaucc

SEQ ID NO: 1207836 - RNA, 19 nt, Artificial Sequence
  Description of Artificial Sequence: Synthetic oligonucleotide
  Sense strand starting at position 2734 of SEQ ID NO: 917090
aucguauguccuuuguguu

SEQ ID NO: 1207837 - RNA, 19 nt, Artificial Sequence
  Description of Artificial Sequence: Synthetic oligonucleotide
  Antisense strand to SEQ ID NO: 1207836
aacacaaaggacauacgau

SEQ ID NO: 1207838 - RNA, 19 nt, Artificial Sequence
  Description of Artificial Sequence: Synthetic oligonucleotide
  Sense strand starting at position 2902 of SEQ ID NO: 917090
cgggccuugacaugaauga

SEQ ID NO: 1207839 - RNA, 19 nt, Artificial Sequence
  Description of Artificial Sequence: Synthetic oligonucleotide
  Antisense strand to SEQ ID NO: 1207838
ucauucaugucaaggcccg

SEQ ID NO: 1207840 - RNA, 19 nt, Artificial Sequence
  Description of Artificial Sequence: Synthetic oligonucleotide
  Sense strand starting at position 3048 of SEQ ID NO: 917090
auaguaauucugcggagga

SEQ ID NO: 1207841 - RNA, 19 nt, Artificial Sequence
  Description of Artificial Sequence: Synthetic oligonucleotide
  Antisense strand to SEQ ID NO: 1207840
uccuccgcagaauuacuau

SEQ ID NO: 1207842 - RNA, 19 nt, Artificial Sequence
  Description of Artificial Sequence: Synthetic oligonucleotide
  Sense strand starting at position 3050 of SEQ ID NO: 917090
aguaauucugcggaggaau

SEQ ID NO: 1207843 - RNA, 19 nt, Artificial Sequence
  Description of Artificial Sequence: Synthetic oligonucleotide
  Antisense strand to SEQ ID NO: 1207842
auuccuccgcagaauuacu

SEQ ID NO: 1207844 - RNA, 19 nt, Artificial Sequence
  Description of Artificial Sequence: Synthetic oligonucleotide
  Sense strand starting at position 3064 of SEQ ID NO: 917090
ggaauugagucaucuuuga

SEQ ID NO: 1207845 - RNA, 19 nt, Artificial Sequence
  Description of Artificial Sequence: Synthetic oligonucleotide
  Antisense strand to SEQ ID NO: 1207844
ucaaagaugacucaauucc

SEQ ID NO: 1207846 - RNA, 19 nt, Artificial Sequence
  Description of Artificial Sequence: Synthetic oligonucleotide
  Sense strand starting at position 3074 of SEQ ID NO: 917090
caucuuugauagccaugga

SEQ ID NO: 1207847 - RNA, 19 nt, Artificial Sequence
  Description of Artificial Sequence: Synthetic oligonucleotide
  Antisense strand to SEQ ID NO: 1207846
uccauggcuaucaaagaug

SEQ ID NO: 1207848 - RNA, 19 nt, Artificial Sequence
  Description of Artificial Sequence: Synthetic oligonucleotide
  Sense strand starting at position 3077 of SEQ ID NO: 917090
cuuugauagccauggaauu

SEQ ID NO: 1207849 - RNA, 19 nt, Artificial Sequence
  Description of Artificial Sequence: Synthetic oligonucleotide
  Antisense strand to SEQ ID NO: 1207848
aauuccauggcuaucaaag

SEQ ID NO: 1207850 - RNA, 19 nt, Artificial Sequence
  Description of Artificial Sequence: Synthetic oligonucleotide
  Sense strand starting at position 3078 of SEQ ID NO: 917090
uuugauagccauggaauua

SEQ ID NO: 1207851 - RNA, 19 nt, Artificial Sequence
  Description of Artificial Sequence: Synthetic oligonucleotide
  Antisense strand to SEQ ID NO: 1207850
uaauuccauggcuaucaaa

SEQ ID NO: 1207852 - RNA, 19 nt, Artificial Sequence
  Description of Artificial Sequence: Synthetic oligonucleotide
  Sense strand starting at position 3088 of SEQ ID NO: 917090
auggaauuaagcgauguua

SEQ ID NO: 1207853 - RNA, 19 nt, Artificial Sequence
  Description of Artificial Sequence: Synthetic oligonucleotide
  Antisense strand to SEQ ID NO: 1207852
uaacaucgcuuaauuccau

SEQ ID NO: 1207854 - RNA, 19 nt, Artificial Sequence
  Description of Artificial Sequence: Synthetic oligonucleotide
  Sense strand starting at position 3090 of SEQ ID NO: 917090
ggaauuaagcgauguuaau

SEQ ID NO: 1207855 - RNA, 19 nt, Artificial Sequence
  Description of Artificial Sequence: Synthetic oligonucleotide
  Antisense strand to SEQ ID NO: 1207854
auuaacaucgcuuaauucc

SEQ ID NO: 1207856 - RNA, 19 nt, Artificial Sequence
  Description of Artificial Sequence: Synthetic oligonucleotide
  Sense strand starting at position 3228 of SEQ ID NO: 917090
uugaaagcacuuugaacaa

SEQ ID NO: 1207857 - RNA, 19 nt, Artificial Sequence
  Description of Artificial Sequence: Synthetic oligonucleotide
  Antisense strand to SEQ ID NO: 1207856
uuguucaaagugcuuucaa

SEQ ID NO: 1207858 - RNA, 19 nt, Artificial Sequence
  Description of Artificial Sequence: Synthetic oligonucleotide
  Sense strand starting at position 3260 of SEQ ID NO: 917090
acagguacucuguaaaugu

SEQ ID NO: 1207859 - RNA, 19 nt, Artificial Sequence
  Description of Artificial Sequence: Synthetic oligonucleotide
  Antisense strand to SEQ ID NO: 1207858
acauuuacagaguaccugu

SEQ ID NO: 1207860 - RNA, 19 nt, Artificial Sequence
  Description of Artificial Sequence: Synthetic oligonucleotide
  Sense strand starting at position 3371 of SEQ ID NO: 917090
ccuaacaacguauauguua

SEQ ID NO: 1207861 - RNA, 19 nt, Artificial Sequence
  Description of Artificial Sequence: Synthetic oligonucleotide
  Antisense strand to SEQ ID NO: 1207860
uaacauauacguuguuagg

SEQ ID NO: 1207862 - RNA, 19 nt, Artificial Sequence
  Description of Artificial Sequence: Synthetic oligonucleotide
  Sense strand starting at position 3532 of SEQ ID NO: 917090
aucaaauauguacggaguu

SEQ ID NO: 1207863 - RNA, 19 nt, Artificial Sequence
  Description of Artificial Sequence: Synthetic oligonucleotide
  Antisense strand to SEQ ID NO: 1207862
aacuccguacauauuugau

SEQ ID NO: 1207864 - RNA, 19 nt, Artificial Sequence
  Description of Artificial Sequence: Synthetic oligonucleotide
  Sense strand starting at position 3607 of SEQ ID NO: 917090
agaauuuaaugguggagaa

SEQ ID NO: 1207865 - RNA, 19 nt, Artificial Sequence
  Description of Artificial Sequence: Synthetic oligonucleotide
  Antisense strand to SEQ ID NO: 1207864
uucuccaccauuaaauucu

SEQ ID NO: 1207866 - RNA, 19 nt, Artificial Sequence
  Description of Artificial Sequence: Synthetic oligonucleotide
  Sense strand starting at position 3665 of SEQ ID NO: 917090
gaccuaacuuagucuugga

SEQ ID NO: 1207867 - RNA, 19 nt, Artificial Sequence
  Description of Artificial Sequence: Synthetic oligonucleotide
  Antisense strand to SEQ ID NO: 1207866
uccaagacuaaguuagguc

SEQ ID NO: 1207868 - RNA, 19 nt, Artificial Sequence
  Description of Artificial Sequence: Synthetic oligonucleotide
  Sense strand starting at position 3669 of SEQ ID NO: 917090
uaacuuagucuuggaaagu

SEQ ID NO: 1207869 - RNA, 19 nt, Artificial Sequence
  Description of Artificial Sequence: Synthetic oligonucleotide
  Antisense strand to SEQ ID NO: 1207868
acuuuccaagacuaaguua

SEQ ID NO: 1207870 - RNA, 19 nt, Artificial Sequence
  Description of Artificial Sequence: Synthetic oligonucleotide
  Sense strand starting at position 3781 of SEQ ID NO: 917090
uccuaagaguacuugagaa

SEQ ID NO: 1207871 - RNA, 19 nt, Artificial Sequence
  Description of Artificial Sequence: Synthetic oligonucleotide
  Antisense strand to SEQ ID NO: 1207870
uucucaaguacucuuagga

SEQ ID NO: 1207872 - RNA, 19 nt, Artificial Sequence
  Description of Artificial Sequence: Synthetic oligonucleotide
  Sense strand starting at position 3885 of SEQ ID NO: 917090
acugaaagugcuggucaag

SEQ ID NO: 1207873 - RNA, 19 nt, Artificial Sequence
  Description of Artificial Sequence: Synthetic oligonucleotide
  Antisense strand to SEQ ID NO: 1207872
cuugaccagcacuuucagu

SEQ ID NO: 1207874 - RNA, 19 nt, Artificial Sequence
  Description of Artificial Sequence: Synthetic oligonucleotide
  Sense strand starting at position 3897 of SEQ ID NO: 917090
ggucaagcaucaucgggaa

SEQ ID NO: 1207875 - RNA, 19 nt, Artificial Sequence
  Description of Artificial Sequence: Synthetic oligonucleotide
  Antisense strand to SEQ ID NO: 1207874
uucccgaugaugcuugacc

SEQ ID NO: 1207876 - RNA, 19 nt, Artificial Sequence
  Description of Artificial Sequence: Synthetic oligonucleotide
  Sense strand starting at position 3976 of SEQ ID NO: 917090
agggaaaucuugcuacaau

SEQ ID NO: 1207877 - RNA, 19 nt, Artificial Sequence
  Description of Artificial Sequence: Synthetic oligonucleotide
  Antisense strand to SEQ ID NO: 1207876
auuguagcaagauuucccu

SEQ ID NO: 1207878 - RNA, 19 nt, Artificial Sequence
  Description of Artificial Sequence: Synthetic oligonucleotide
  Sense strand starting at position 19 of SEQ ID NO: 917091
aguacugcugaugaaagua

SEQ ID NO: 1207879 - RNA, 19 nt, Artificial Sequence
  Description of Artificial Sequence: Synthetic oligonucleotide
  Antisense strand to SEQ ID NO: 1207878
uacuuucaucagcaguacu

SEQ ID NO: 1207880 - RNA, 19 nt, Artificial Sequence
  Description of Artificial Sequence: Synthetic oligonucleotide
  Sense strand starting at position 124 of SEQ ID NO: 917091
gcucuuguugcucuuguua

SEQ ID NO: 1207881 - RNA, 19 nt, Artificial Sequence
  Description of Artificial Sequence: Synthetic oligonucleotide
  Antisense strand to SEQ ID NO: 1207880
uaacaagagcaacaagagc

SEQ ID NO: 1207882 - RNA, 19 nt, Artificial Sequence
  Description of Artificial Sequence: Synthetic oligonucleotide
  Sense strand starting at position 173 of SEQ ID NO: 917091
uugugacuggcauauguua

SEQ ID NO: 1207883 - RNA, 19 nt, Artificial Sequence
  Description of Artificial Sequence: Synthetic oligonucleotide
  Antisense strand to SEQ ID NO: 1207882
uaacauaugccagucacaa

SEQ ID NO: 1207884 - RNA, 19 nt, Artificial Sequence
  Description of Artificial Sequence: Synthetic oligonucleotide
  Sense strand starting at position 435 of SEQ ID NO: 917091
uaguaagaauugccuagua

SEQ ID NO: 1207885 - RNA, 19 nt, Artificial Sequence
  Description of Artificial Sequence: Synthetic oligonucleotide
  Antisense strand to SEQ ID NO: 1207884
uacuaggcaauucuuacua

SEQ ID NO: 1207886 - RNA, 19 nt, Artificial Sequence
  Description of Artificial Sequence: Synthetic oligonucleotide
  Sense strand starting at position 437 of SEQ ID NO: 917091
guaagaauugccuaguaag

SEQ ID NO: 1207887 - RNA, 19 nt, Artificial Sequence
  Description of Artificial Sequence: Synthetic oligonucleotide
  Antisense strand to SEQ ID NO: 1207886
cuuacuaggcaauucuuac

SEQ ID NO: 1207888 - RNA, 19 nt, Artificial Sequence
  Description of Artificial Sequence: Synthetic oligonucleotide
  Sense strand starting at position 649 of SEQ ID NO: 917091
gggacuuaauuaguuaauu

SEQ ID NO: 1207889 - RNA, 19 nt, Artificial Sequence
  Description of Artificial Sequence: Synthetic oligonucleotide
  Antisense strand to SEQ ID NO: 1207888
aauuaacuaauuaaguccc

SEQ ID NO: 1207890 - RNA, 19 nt, Artificial Sequence
  Description of Artificial Sequence: Synthetic oligonucleotide
  Sense strand starting at position 702 of SEQ ID NO: 917091
gaagguaagccucauaucu

SEQ ID NO: 1207891 - RNA, 19 nt, Artificial Sequence
  Description of Artificial Sequence: Synthetic oligonucleotide
  Antisense strand to SEQ ID NO: 1207890
agauaugaggcuuaccuuc

SEQ ID NO: 1207892 - RNA, 19 nt, Artificial Sequence
  Description of Artificial Sequence: Synthetic oligonucleotide
  Sense strand starting at position 722 of SEQ ID NO: 917091
cuuaaauauuguccuaagu

SEQ ID NO: 1207893 - RNA, 19 nt, Artificial Sequence
  Description of Artificial Sequence: Synthetic oligonucleotide
  Antisense strand to SEQ ID NO: 1207892
acuuaggacaauauuuaag

SEQ ID NO: 1207894 - RNA, 19 nt, Artificial Sequence
  Description of Artificial Sequence: Synthetic oligonucleotide
  Sense strand starting at position 747 of SEQ ID NO: 917091
uccagacagugcuuauaua

SEQ ID NO: 1207895 - RNA, 19 nt, Artificial Sequence
  Description of Artificial Sequence: Synthetic oligonucleotide
  Antisense strand to SEQ ID NO: 1207894
uauauaagcacugucugga

SEQ ID NO: 1207896 - RNA, 19 nt, Artificial Sequence
  Description of Artificial Sequence: Synthetic oligonucleotide
  Sense strand starting at position 748 of SEQ ID NO: 917091
ccagacagugcuuauauaa

SEQ ID NO: 1207897 - RNA, 19 nt, Artificial Sequence
  Description of Artificial Sequence: Synthetic oligonucleotide
  Antisense strand to SEQ ID NO: 1207896
uuauauaagcacugucugg

SEQ ID NO: 1207898 - RNA, 19 nt, Artificial Sequence
  Description of Artificial Sequence: Synthetic oligonucleotide
  Sense strand starting at position 825 of SEQ ID NO: 917091
uugugacuagcauauacua

SEQ ID NO: 1207899 - RNA, 19 nt, Artificial Sequence
  Description of Artificial Sequence: Synthetic oligonucleotide
  Antisense strand to SEQ ID NO: 1207898
uaguauaugcuagucacaa

SEQ ID NO: 1207900 - RNA, 19 nt, Artificial Sequence
  Description of Artificial Sequence: Synthetic oligonucleotide
  Sense strand starting at position 970 of SEQ ID NO: 917091
agaagagauuaguuauguc

SEQ ID NO: 1207901 - RNA, 19 nt, Artificial Sequence
  Description of Artificial Sequence: Synthetic oligonucleotide
  Antisense strand to SEQ ID NO: 1207900
gacauaacuaaucucuucu

SEQ ID NO: 1207902 - RNA, 19 nt, Artificial Sequence
  Description of Artificial Sequence: Synthetic oligonucleotide
  Sense strand starting at position 974 of SEQ ID NO: 917091
gagauuaguuaugucacaa

SEQ ID NO: 1207903 - RNA, 19 nt, Artificial Sequence
  Description of Artificial Sequence: Synthetic oligonucleotide
  Antisense strand to SEQ ID NO: 1207902
uugugacauaacuaaucuc

SEQ ID NO: 1207904 - RNA, 19 nt, Artificial Sequence
  Description of Artificial Sequence: Synthetic oligonucleotide
  Sense strand starting at position 997 of SEQ ID NO: 917091
aaaguuaguguggagguaa

SEQ ID NO: 1207905 - RNA, 19 nt, Artificial Sequence
  Description of Artificial Sequence: Synthetic oligonucleotide
  Antisense strand to SEQ ID NO: 1207904
uuaccuccacacuaacuuu

SEQ ID NO: 1207906 - RNA, 19 nt, Artificial Sequence
  Description of Artificial Sequence: Synthetic oligonucleotide
  Sense strand starting at position 1047 of SEQ ID NO: 917091
ccaguucucggagaccuaa

SEQ ID NO: 1207907 - RNA, 19 nt, Artificial Sequence
  Description of Artificial Sequence: Synthetic oligonucleotide
  Antisense strand to SEQ ID NO: 1207906
uuaggucuccgagaacugg

SEQ ID NO: 1207908 - RNA, 19 nt, Artificial Sequence
  Description of Artificial Sequence: Synthetic oligonucleotide
  Sense strand starting at position 1169 of SEQ ID NO: 917091
auuaauguauagcuggaau

SEQ ID NO: 1207909 - RNA, 19 nt, Artificial Sequence
  Description of Artificial Sequence: Synthetic oligonucleotide
  Antisense strand to SEQ ID NO: 1207908
auuccagcuauacauuaau

SEQ ID NO: 1207910 - RNA, 19 nt, Artificial Sequence
  Description of Artificial Sequence: Synthetic oligonucleotide
  Sense strand starting at position 1210 of SEQ ID NO: 917091
acacuuugggugggaucua

SEQ ID NO: 1207911 - RNA, 19 nt, Artificial Sequence
  Description of Artificial Sequence: Synthetic oligonucleotide
  Antisense strand to SEQ ID NO: 1207910
uagaucccacccaaagugu

SEQ ID NO: 1207912 - RNA, 19 nt, Artificial Sequence
  Description of Artificial Sequence: Synthetic oligonucleotide
  Sense strand starting at position 1219 of SEQ ID NO: 917091
gugggaucuacguacgaaa

SEQ ID NO: 1207913 - RNA, 19 nt, Artificial Sequence
  Description of Artificial Sequence: Synthetic oligonucleotide
  Antisense strand to SEQ ID NO: 1207912
uuucguacguagaucccac

SEQ ID NO: 1207914 - RNA, 19 nt, Artificial Sequence
  Description of Artificial Sequence: Synthetic oligonucleotide
  Sense strand starting at position 1221 of SEQ ID NO: 917091
gggaucuacguacgaaauc

SEQ ID NO: 1207915 - RNA, 19 nt, Artificial Sequence
  Description of Artificial Sequence: Synthetic oligonucleotide
  Antisense strand to SEQ ID NO: 1207914
gauuucguacguagauccc

SEQ ID NO: 1207916 - RNA, 19 nt, Artificial Sequence
  Description of Artificial Sequence: Synthetic oligonucleotide
  Sense strand starting at position 1230 of SEQ ID NO: 917091
guacgaaaucuugauguua

SEQ ID NO: 1207917 - RNA, 19 nt, Artificial Sequence
  Description of Artificial Sequence: Synthetic oligonucleotide
  Antisense strand to SEQ ID NO: 1207916
uaacaucaagauuucguac

SEQ ID NO: 1207918 - RNA, 19 nt, Artificial Sequence
  Description of Artificial Sequence: Synthetic oligonucleotide
  Sense strand starting at position 1264 of SEQ ID NO: 917091
cucauauuauguguuagau

SEQ ID NO: 1207919 - RNA, 19 nt, Artificial Sequence
  Description of Artificial Sequence: Synthetic oligonucleotide
  Antisense strand to SEQ ID NO: 1207918
aucuaacacauaauaugag

SEQ ID NO: 1207920 - RNA, 19 nt, Artificial Sequence
  Description of Artificial Sequence: Synthetic oligonucleotide
  Sense strand starting at position 1434 of SEQ ID NO: 917091
gagcuagagaugcaggauu

SEQ ID NO: 1207921 - RNA, 19 nt, Artificial Sequence
  Description of Artificial Sequence: Synthetic oligonucleotide
  Antisense strand to SEQ ID NO: 1207920
aauccugcaucucuagcuc

SEQ ID NO: 1207922 - RNA, 19 nt, Artificial Sequence
  Description of Artificial Sequence: Synthetic oligonucleotide
  Sense strand starting at position 1501 of SEQ ID NO: 917091
cuagaaaggccauaugcaa

SEQ ID NO: 1207923 - RNA, 19 nt, Artificial Sequence
  Description of Artificial Sequence: Synthetic oligonucleotide
  Antisense strand to SEQ ID NO: 1207922
uugcauauggccuuucuag

SEQ ID NO: 1207924 - RNA, 19 nt, Artificial Sequence
  Description of Artificial Sequence: Synthetic oligonucleotide
  Sense strand starting at position 1653 of SEQ ID NO: 917091
gccguuauucuccacagaa

SEQ ID NO: 1207925 - RNA, 19 nt, Artificial Sequence
  Description of Artificial Sequence: Synthetic oligonucleotide
  Antisense strand to SEQ ID NO: 1207924
uucuguggagaauaacggc

SEQ ID NO: 1207926 - RNA, 19 nt, Artificial Sequence
  Description of Artificial Sequence: Synthetic oligonucleotide
  Sense strand starting at position 1655 of SEQ ID NO: 917091
cguuauucuccacagaaca

SEQ ID NO: 1207927 - RNA, 19 nt, Artificial Sequence
  Description of Artificial Sequence: Synthetic oligonucleotide
  Antisense strand to SEQ ID NO: 1207926
uguucuguggagaauaacg

SEQ ID NO: 1207928 - RNA, 19 nt, Artificial Sequence
  Description of Artificial Sequence: Synthetic oligonucleotide
  Sense strand starting at position 1767 of SEQ ID NO: 917091
auuaccgucuaccuagaaa

SEQ ID NO: 1207929 - RNA, 19 nt, Artificial Sequence
  Description of Artificial Sequence: Synthetic oligonucleotide
  Antisense strand to SEQ ID NO: 1207928
uuucuagguagacgguaau

SEQ ID NO: 1207930 - RNA, 19 nt, Artificial Sequence
  Description of Artificial Sequence: Synthetic oligonucleotide
  Sense strand starting at position 1770 of SEQ ID NO: 917091
accgucuaccuagaaauac

SEQ ID NO: 1207931 - RNA, 19 nt, Artificial Sequence
  Description of Artificial Sequence: Synthetic oligonucleotide
  Antisense strand to SEQ ID NO: 1207930
guauuucuagguagacggu

SEQ ID NO: 1207932 - RNA, 19 nt, Artificial Sequence
  Description of Artificial Sequence: Synthetic oligonucleotide
  Sense strand starting at position 1866 of SEQ ID NO: 917091
cguauauaccugcaauaag

SEQ ID NO: 1207933 - RNA, 19 nt, Artificial Sequence
  Description of Artificial Sequence: Synthetic oligonucleotide
  Antisense strand to SEQ ID NO: 1207932
cuuauugcagguauauacg

SEQ ID NO: 1207934 - RNA, 19 nt, Artificial Sequence
  Description of Artificial Sequence: Synthetic oligonucleotide
  Sense strand starting at position 2435 of SEQ ID NO: 917091
ggacaagucccucguggga

SEQ ID NO: 1207935 - RNA, 19 nt, Artificial Sequence
  Description of Artificial Sequence: Synthetic oligonucleotide
  Antisense strand to SEQ ID NO: 1207934
ucccacgagggacuugucc

SEQ ID NO: 1207936 - RNA, 19 nt, Artificial Sequence
  Description of Artificial Sequence: Synthetic oligonucleotide
  Sense strand starting at position 2467 of SEQ ID NO: 917091
cugaguucuccugcgugca

SEQ ID NO: 1207937 - RNA, 19 nt, Artificial Sequence
  Description of Artificial Sequence: Synthetic oligonucleotide
  Antisense strand to SEQ ID NO: 1207936
ugcacgcaggagaacucag

SEQ ID NO: 1207938 - RNA, 19 nt, Artificial Sequence
  Description of Artificial Sequence: Synthetic oligonucleotide
  Sense strand starting at position 2811 of SEQ ID NO: 917091
cuuauacugugguugaaug

SEQ ID NO: 1207939 - RNA, 19 nt, Artificial Sequence
  Description of Artificial Sequence: Synthetic oligonucleotide
  Antisense strand to SEQ ID NO: 1207938
cauucaaccacaguauaag

SEQ ID NO: 1207940 - RNA, 19 nt, Artificial Sequence
  Description of Artificial Sequence: Synthetic oligonucleotide
  Sense strand starting at position 3056 of SEQ ID NO: 917091
uggugcuauuuggucuuaa

SEQ ID NO: 1207941 - RNA, 19 nt, Artificial Sequence
  Description of Artificial Sequence: Synthetic oligonucleotide
  Antisense strand to SEQ ID NO: 1207940
uuaagaccaaauagcacca

SEQ ID NO: 1207942 - RNA, 19 nt, Artificial Sequence
  Description of Artificial Sequence: Synthetic oligonucleotide
  Sense strand starting at position 3057 of SEQ ID NO: 917091
ggugcuauuuggucuuaaa

SEQ ID NO: 1207943 - RNA, 19 nt, Artificial Sequence
  Description of Artificial Sequence: Synthetic oligonucleotide
  Antisense strand to SEQ ID NO: 1207942
uuuaagaccaaauagcacc

SEQ ID NO: 1207944 - RNA, 19 nt, Artificial Sequence
  Description of Artificial Sequence: Synthetic oligonucleotide
  Sense strand starting at position 3234 of SEQ ID NO: 917091
gugaguugccgggauuaca

SEQ ID NO: 1207945 - RNA, 19 nt, Artificial Sequence
  Description of Artificial Sequence: Synthetic oligonucleotide
  Antisense strand to SEQ ID NO: 1207944
uguaaucccggcaacucac

SEQ ID NO: 1207946 - RNA, 19 nt, Artificial Sequence
  Description of Artificial Sequence: Synthetic oligonucleotide
  Sense strand starting at position 3428 of SEQ ID NO: 917091
aagucucauugauuagguu

SEQ ID NO: 1207947 - RNA, 19 nt, Artificial Sequence
  Description of Artificial Sequence: Synthetic oligonucleotide
  Antisense strand to SEQ ID NO: 1207946
aaccuaaucaaugagacuu

SEQ ID NO: 1207948 - RNA, 19 nt, Artificial Sequence
  Description of Artificial Sequence: Synthetic oligonucleotide
  Sense strand starting at position 3429 of SEQ ID NO: 917091
agucucauugauuagguuu

SEQ ID NO: 1207949 - RNA, 19 nt, Artificial Sequence
  Description of Artificial Sequence: Synthetic oligonucleotide
  Antisense strand to SEQ ID NO: 1207948
aaaccuaaucaaugagacu

SEQ ID NO: 1207950 - RNA, 19 nt, Artificial Sequence
  Description of Artificial Sequence: Synthetic oligonucleotide
  Sense strand starting at position 3667 of SEQ ID NO: 917091
uaagguauauguguacaua

SEQ ID NO: 1207951 - RNA, 19 nt, Artificial Sequence
  Description of Artificial Sequence: Synthetic oligonucleotide
  Antisense strand to SEQ ID NO: 1207950
uauguacacauauaccuua

SEQ ID NO: 1207952 - RNA, 19 nt, Artificial Sequence
  Description of Artificial Sequence: Synthetic oligonucleotide
  Sense strand starting at position 3668 of SEQ ID NO: 917091
aagguauauguguacauag

SEQ ID NO: 1207953 - RNA, 19 nt, Artificial Sequence
  Description of Artificial Sequence: Synthetic oligonucleotide
  Antisense strand to SEQ ID NO: 1207952
cuauguacacauauaccuu

SEQ ID NO: 1207954 - RNA, 19 nt, Artificial Sequence
  Description of Artificial Sequence: Synthetic oligonucleotide
  Sense strand starting at position 3670 of SEQ ID NO: 917091
gguauauguguacauaguc

SEQ ID NO: 1207955 - RNA, 19 nt, Artificial Sequence
  Description of Artificial Sequence: Synthetic oligonucleotide
  Antisense strand to SEQ ID NO: 1207954
gacuauguacacauauacc

SEQ ID NO: 1207956 - RNA, 19 nt, Artificial Sequence
  Description of Artificial Sequence: Synthetic oligonucleotide
  Sense strand starting at position 3756 of SEQ ID NO: 917091
guccuauuacaguaaguuu

SEQ ID NO: 1207957 - RNA, 19 nt, Artificial Sequence
  Description of Artificial Sequence: Synthetic oligonucleotide
  Antisense strand to SEQ ID NO: 1207956
aaacuuacuguaauaggac

SEQ ID NO: 1207958 - RNA, 19 nt, Artificial Sequence
  Description of Artificial Sequence: Synthetic oligonucleotide
  Sense strand starting at position 123 of SEQ ID NO: 917092
auguguuccuuaugucaug

SEQ ID NO: 1207959 - RNA, 19 nt, Artificial Sequence
  Description of Artificial Sequence: Synthetic oligonucleotide
  Antisense strand to SEQ ID NO: 1207958
caugacauaaggaacacau

SEQ ID NO: 1207960 - RNA, 19 nt, Artificial Sequence
  Description of Artificial Sequence: Synthetic oligonucleotide
  Sense strand starting at position 128 of SEQ ID NO: 917092
uuccuuaugucaugucuga

SEQ ID NO: 1207961 - RNA, 19 nt, Artificial Sequence
  Description of Artificial Sequence: Synthetic oligonucleotide
  Antisense strand to SEQ ID NO: 1207960
ucagacaugacauaaggaa

SEQ ID NO: 1207962 - RNA, 19 nt, Artificial Sequence
  Description of Artificial Sequence: Synthetic oligonucleotide
  Sense strand starting at position 155 of SEQ ID NO: 917092
cucugaggauucggagauu

SEQ ID NO: 1207963 - RNA, 19 nt, Artificial Sequence
  Description of Artificial Sequence: Synthetic oligonucleotide
  Antisense strand to SEQ ID NO: 1207962
aaucuccgaauccucagag

SEQ ID NO: 1207964 - RNA, 19 nt, Artificial Sequence
  Description of Artificial Sequence: Synthetic oligonucleotide
  Sense strand starting at position 205 of SEQ ID NO: 917092
uagaaugaguugcacauua

SEQ ID NO: 1207965 - RNA, 19 nt, Artificial Sequence
  Description of Artificial Sequence: Synthetic oligonucleotide
  Antisense strand to SEQ ID NO: 1207964
uaaugugcaacucauucua

SEQ ID NO: 1207966 - RNA, 19 nt, Artificial Sequence
  Description of Artificial Sequence: Synthetic oligonucleotide
  Sense strand starting at position 210 of SEQ ID NO: 917092
ugaguugcacauuagaauc

SEQ ID NO: 1207967 - RNA, 19 nt, Artificial Sequence
  Description of Artificial Sequence: Synthetic oligonucleotide
  Antisense strand to SEQ ID NO: 1207966
gauucuaaugugcaacuca

SEQ ID NO: 1207968 - RNA, 19 nt, Artificial Sequence
  Description of Artificial Sequence: Synthetic oligonucleotide
  Sense strand starting at position 242 of SEQ ID NO: 917092
guuagacugcugggccaaa

SEQ ID NO: 1207969 - RNA, 19 nt, Artificial Sequence
  Description of Artificial Sequence: Synthetic oligonucleotide
  Antisense strand to SEQ ID NO: 1207968
uuuggcccagcagucuaac

SEQ ID NO: 1207970 - RNA, 19 nt, Artificial Sequence
  Description of Artificial Sequence: Synthetic oligonucleotide
  Sense strand starting at position 255 of SEQ ID NO: 917092
gccaaauucucaguuucug

SEQ ID NO: 1207971 - RNA, 19 nt, Artificial Sequence
  Description of Artificial Sequence: Synthetic oligonucleotide
  Antisense strand to SEQ ID NO: 1207970
cagaaacugagaauuuggc

SEQ ID NO: 1207972 - RNA, 19 nt, Artificial Sequence
  Description of Artificial Sequence: Synthetic oligonucleotide
  Sense strand starting at position 312 of SEQ ID NO: 917092
ucuaauacguucucagaug

SEQ ID NO: 1207973 - RNA, 19 nt, Artificial Sequence
  Description of Artificial Sequence: Synthetic oligonucleotide
  Antisense strand to SEQ ID NO: 1207972
caucugagaacguauuaga

SEQ ID NO: 1207974 - RNA, 19 nt, Artificial Sequence
  Description of Artificial Sequence: Synthetic oligonucleotide
  Sense strand starting at position 313 of SEQ ID NO: 917092
cuaauacguucucagauga

SEQ ID NO: 1207975 - RNA, 19 nt, Artificial Sequence
  Description of Artificial Sequence: Synthetic oligonucleotide
  Antisense strand to SEQ ID NO: 1207974
ucaucugagaacguauuag

SEQ ID NO: 1207976 - RNA, 19 nt, Artificial Sequence
  Description of Artificial Sequence: Synthetic oligonucleotide
  Sense strand starting at position 447 of SEQ ID NO: 917092
auucuaacacugugggaaa

SEQ ID NO: 1207977 - RNA, 19 nt, Artificial Sequence
  Description of Artificial Sequence: Synthetic oligonucleotide
  Antisense strand to SEQ ID NO: 1207976
uuucccacaguguuagaau

SEQ ID NO: 1207978 - RNA, 19 nt, Artificial Sequence
  Description of Artificial Sequence: Synthetic oligonucleotide
  Sense strand starting at position 544 of SEQ ID NO: 917092
uggauagcuuccugucacu

SEQ ID NO: 1207979 - RNA, 19 nt, Artificial Sequence
  Description of Artificial Sequence: Synthetic oligonucleotide
  Antisense strand to SEQ ID NO: 1207978
agugacaggaagcuaucca

SEQ ID NO: 1207980 - RNA, 19 nt, Artificial Sequence
  Description of Artificial Sequence: Synthetic oligonucleotide
  Sense strand starting at position 634 of SEQ ID NO: 917092
gcaggugguuguaggagaa

SEQ ID NO: 1207981 - RNA, 19 nt, Artificial Sequence
  Description of Artificial Sequence: Synthetic oligonucleotide
  Antisense strand to SEQ ID NO: 1207980
uucuccuacaaccaccugc

SEQ ID NO: 1207982 - RNA, 19 nt, Artificial Sequence
  Description of Artificial Sequence: Synthetic oligonucleotide
  Sense strand starting at position 761 of SEQ ID NO: 917092
augcuaugaucgcuccacu

SEQ ID NO: 1207983 - RNA, 19 nt, Artificial Sequence
  Description of Artificial Sequence: Synthetic oligonucleotide
  Antisense strand to SEQ ID NO: 1207982
aguggagcgaucauagcau

SEQ ID NO: 1207984 - RNA, 19 nt, Artificial Sequence
  Description of Artificial Sequence: Synthetic oligonucleotide
  Sense strand starting at position 862 of SEQ ID NO: 917092
aucauuagcuuaccugaga

SEQ ID NO: 1207985 - RNA, 19 nt, Artificial Sequence
  Description of Artificial Sequence: Synthetic oligonucleotide
  Antisense strand to SEQ ID NO: 1207984
ucucagguaagcuaaugau

SEQ ID NO: 1207986 - RNA, 19 nt, Artificial Sequence
  Description of Artificial Sequence: Synthetic oligonucleotide
  Sense strand starting at position 865 of SEQ ID NO: 917092
auuagcuuaccugagacau

SEQ ID NO: 1207987 - RNA, 19 nt, Artificial Sequence
  Description of Artificial Sequence: Synthetic oligonucleotide
  Antisense strand to SEQ ID NO: 1207986
augucucagguaagcuaau

SEQ ID NO: 1207988 - RNA, 19 nt, Artificial Sequence
  Description of Artificial Sequence: Synthetic oligonucleotide
  Sense strand starting at position 867 of SEQ ID NO: 917092
uagcuuaccugagacauag

SEQ ID NO: 1207989 - RNA, 19 nt, Artificial Sequence
  Description of Artificial Sequence: Synthetic oligonucleotide
  Antisense strand to SEQ ID NO: 1207988
cuaugucucagguaagcua

SEQ ID NO: 1207990 - RNA, 19 nt, Artificial Sequence
  Description of Artificial Sequence: Synthetic oligonucleotide
  Sense strand starting at position 978 of SEQ ID NO: 917092
gcgcccaagucacuagauu

SEQ ID NO: 1207991 - RNA, 19 nt, Artificial Sequence
  Description of Artificial Sequence: Synthetic oligonucleotide
  Antisense strand to SEQ ID NO: 1207990
aaucuagugacuugggcgc

SEQ ID NO: 1207992 - RNA, 19 nt, Artificial Sequence
  Description of Artificial Sequence: Synthetic oligonucleotide
  Sense strand starting at position 2302 of SEQ ID NO: 917092
gcgaauccauaaggugaaa

SEQ ID NO: 1207993 - RNA, 19 nt, Artificial Sequence
  Description of Artificial Sequence: Synthetic oligonucleotide
  Antisense strand to SEQ ID NO: 1207992
uuucaccuuauggauucgc

SEQ ID NO: 1207994 - RNA, 19 nt, Artificial Sequence
  Description of Artificial Sequence: Synthetic oligonucleotide
  Sense strand starting at position 2621 of SEQ ID NO: 917092
ugucucauccugugacuac

SEQ ID NO: 1207995 - RNA, 19 nt, Artificial Sequence
  Description of Artificial Sequence: Synthetic oligonucleotide
  Antisense strand to SEQ ID NO: 1207994
guagucacaggaugagaca

SEQ ID NO: 1207996 - RNA, 19 nt, Artificial Sequence
  Description of Artificial Sequence: Synthetic oligonucleotide
  Sense strand starting at position 2643 of SEQ ID NO: 917092
ugccuuaaccuccagggaa

SEQ ID NO: 1207997 - RNA, 19 nt, Artificial Sequence
  Description of Artificial Sequence: Synthetic oligonucleotide
  Antisense strand to SEQ ID NO: 1207996
uucccuggagguuaaggca

SEQ ID NO: 1207998 - RNA, 19 nt, Artificial Sequence
  Description of Artificial Sequence: Synthetic oligonucleotide
  Sense strand starting at position 2810 of SEQ ID NO: 917092
ccggcuucuuuacuguaaa

SEQ ID NO: 1207999 - RNA, 19 nt, Artificial Sequence
  Description of Artificial Sequence: Synthetic oligonucleotide
  Antisense strand to SEQ ID NO: 1207998
uuuacaguaaagaagccgg

SEQ ID NO: 1208000 - RNA, 19 nt, Artificial Sequence
  Description of Artificial Sequence: Synthetic oligonucleotide
  Sense strand starting at position 2811 of SEQ ID NO: 917092
cggcuucuuuacuguaaac

SEQ ID NO: 1208001 - RNA, 19 nt, Artificial Sequence
  Description of Artificial Sequence: Synthetic oligonucleotide
  Antisense strand to SEQ ID NO: 1208000
guuuacaguaaagaagccg

SEQ ID NO: 1208002 - RNA, 19 nt, Artificial Sequence
  Description of Artificial Sequence: Synthetic oligonucleotide
  Sense strand starting at position 2845 of SEQ ID NO: 917092
cuuuaugaccugugucuca

SEQ ID NO: 1208003 - RNA, 19 nt, Artificial Sequence
  Description of Artificial Sequence: Synthetic oligonucleotide
  Antisense strand to SEQ ID NO: 1208002
ugagacacaggucauaaag

SEQ ID NO: 1208004 - RNA, 19 nt, Artificial Sequence
  Description of Artificial Sequence: Synthetic oligonucleotide
  Sense strand starting at position 2875 of SEQ ID NO: 917092
ugucucauacugugaguua

SEQ ID NO: 1208005 - RNA, 19 nt, Artificial Sequence
  Description of Artificial Sequence: Synthetic oligonucleotide
  Antisense strand to SEQ ID NO: 1208004
uaacucacaguaugagaca

SEQ ID NO: 1208006 - RNA, 19 nt, Artificial Sequence
  Description of Artificial Sequence: Synthetic oligonucleotide
  Sense strand starting at position 2876 of SEQ ID NO: 917092
gucucauacugugaguuag

SEQ ID NO: 1208007 - RNA, 19 nt, Artificial Sequence
  Description of Artificial Sequence: Synthetic oligonucleotide
  Antisense strand to SEQ ID NO: 1208006
cuaacucacaguaugagac

SEQ ID NO: 1208008 - RNA, 19 nt, Artificial Sequence
  Description of Artificial Sequence: Synthetic oligonucleotide
  Sense strand starting at position 2878 of SEQ ID NO: 917092
cucauacugugaguuagaa

SEQ ID NO: 1208009 - RNA, 19 nt, Artificial Sequence
  Description of Artificial Sequence: Synthetic oligonucleotide
  Antisense strand to SEQ ID NO: 1208008
uucuaacucacaguaugag

SEQ ID NO: 1208010 - RNA, 19 nt, Artificial Sequence
  Description of Artificial Sequence: Synthetic oligonucleotide
  Sense strand starting at position 2949 of SEQ ID NO: 917092
guucuuauuuaagauggag

SEQ ID NO: 1208011 - RNA, 19 nt, Artificial Sequence
  Description of Artificial Sequence: Synthetic oligonucleotide
  Antisense strand to SEQ ID NO: 1208010
cuccaucuuaaauaagaac

SEQ ID NO: 1208012 - RNA, 19 nt, Artificial Sequence
  Description of Artificial Sequence: Synthetic oligonucleotide
  Sense strand starting at position 3638 of SEQ ID NO: 917092
ugaugcuuuggcuucguau

SEQ ID NO: 1208013 - RNA, 19 nt, Artificial Sequence
  Description of Artificial Sequence: Synthetic oligonucleotide
  Antisense strand to SEQ ID NO: 1208012
auacgaagccaaagcauca

SEQ ID NO: 1208014 - RNA, 19 nt, Artificial Sequence
  Description of Artificial Sequence: Synthetic oligonucleotide
  Sense strand starting at position 3640 of SEQ ID NO: 917092
augcuuuggcuucguauaa

SEQ ID NO: 1208015 - RNA, 19 nt, Artificial Sequence
  Description of Artificial Sequence: Synthetic oligonucleotide
  Antisense strand to SEQ ID NO: 1208014
uuauacgaagccaaagcau

SEQ ID NO: 1208016 - RNA, 19 nt, Artificial Sequence
  Description of Artificial Sequence: Synthetic oligonucleotide
  Sense strand starting at position 3647 of SEQ ID NO: 917092
ggcuucguauaacuguaau

SEQ ID NO: 1208017 - RNA, 19 nt, Artificial Sequence
  Description of Artificial Sequence: Synthetic oligonucleotide
  Antisense strand to SEQ ID NO: 1208016
auuacaguuauacgaagcc

SEQ ID NO: 1208018 - RNA, 19 nt, Artificial Sequence
  Description of Artificial Sequence: Synthetic oligonucleotide
  Sense strand starting at position 3650 of SEQ ID NO: 917092
uucguauaacuguaauaac

SEQ ID NO: 1208019 - RNA, 19 nt, Artificial Sequence
  Description of Artificial Sequence: Synthetic oligonucleotide
  Antisense strand to SEQ ID NO: 1208018
guuauuacaguuauacgaa

SEQ ID NO: 1208020 - RNA, 19 nt, Artificial Sequence
  Description of Artificial Sequence: Synthetic oligonucleotide
  Sense strand starting at position 3668 of SEQ ID NO: 917092
ccagaauccuugcaacgcu

SEQ ID NO: 1208021 - RNA, 19 nt, Artificial Sequence
  Description of Artificial Sequence: Synthetic oligonucleotide
  Antisense strand to SEQ ID NO: 1208020
agcguugcaaggauucugg

SEQ ID NO: 1208022 - RNA, 19 nt, Artificial Sequence
  Description of Artificial Sequence: Synthetic oligonucleotide
  Sense strand starting at position 3698 of SEQ ID NO: 917092
uugaaacaguggucucaga

SEQ ID NO: 1208023 - RNA, 19 nt, Artificial Sequence
  Description of Artificial Sequence: Synthetic oligonucleotide
  Antisense strand to SEQ ID NO: 1208022
ucugagaccacuguuucaa

SEQ ID NO: 1208024 - RNA, 19 nt, Artificial Sequence
  Description of Artificial Sequence: Synthetic oligonucleotide
  Sense strand starting at position 3786 of SEQ ID NO: 917092
ggcuucucccucugggauu

SEQ ID NO: 1208025 - RNA, 19 nt, Artificial Sequence
  Description of Artificial Sequence: Synthetic oligonucleotide
  Antisense strand to SEQ ID NO: 1208024
aaucccagagggagaagcc

SEQ ID NO: 1208026 - RNA, 19 nt, Artificial Sequence
  Description of Artificial Sequence: Synthetic oligonucleotide
  Sense strand starting at position 3815 of SEQ ID NO: 917092
cgagcagucucugagcagu

SEQ ID NO: 1208027 - RNA, 19 nt, Artificial Sequence
  Description of Artificial Sequence: Synthetic oligonucleotide
  Antisense strand to SEQ ID NO: 1208026
acugcucagagacugcucg

SEQ ID NO: 1208028 - RNA, 19 nt, Artificial Sequence
  Description of Artificial Sequence: Synthetic oligonucleotide
  Sense strand starting at position 3829 of SEQ ID NO: 917092
gcagucucauguuaccuga

SEQ ID NO: 1208029 - RNA, 19 nt, Artificial Sequence
  Description of Artificial Sequence: Synthetic oligonucleotide
  Antisense strand to SEQ ID NO: 1208028
ucagguaacaugagacugc

SEQ ID NO: 1208030 - RNA, 19 nt, Artificial Sequence
  Description of Artificial Sequence: Synthetic oligonucleotide
  Sense strand starting at position 3831 of SEQ ID NO: 917092
agucucauguuaccugaga

SEQ ID NO: 1208031 - RNA, 19 nt, Artificial Sequence
  Description of Artificial Sequence: Synthetic oligonucleotide
  Antisense strand to SEQ ID NO: 1208030
ucucagguaacaugagacu

SEQ ID NO: 1208032 - RNA, 19 nt, Artificial Sequence
  Description of Artificial Sequence: Synthetic oligonucleotide
  Sense strand starting at position 3832 of SEQ ID NO: 917092
gucucauguuaccugagaa

SEQ ID NO: 1208033 - RNA, 19 nt, Artificial Sequence
  Description of Artificial Sequence: Synthetic oligonucleotide
  Antisense strand to SEQ ID NO: 1208032
uucucagguaacaugagac

SEQ ID NO: 1208034 - RNA, 19 nt, Artificial Sequence
  Description of Artificial Sequence: Synthetic oligonucleotide
  Sense strand starting at position 3836 of SEQ ID NO: 917092
cauguuaccugagaaggaa

SEQ ID NO: 1208035 - RNA, 19 nt, Artificial Sequence
  Description of Artificial Sequence: Synthetic oligonucleotide
  Antisense strand to SEQ ID NO: 1208034
uuccuucucagguaacaug

SEQ ID NO: 1208036 - RNA, 19 nt, Artificial Sequence
  Description of Artificial Sequence: Synthetic oligonucleotide
  Sense strand starting at position 3902 of SEQ ID NO: 917092
ccagaagccuucuggaaag

SEQ ID NO: 1208037 - RNA, 19 nt, Artificial Sequence
  Description of Artificial Sequence: Synthetic oligonucleotide
  Antisense strand to SEQ ID NO: 1208036
cuuuccagaaggcuucugg

SEQ ID NO: 1208038 - RNA, 19 nt, Artificial Sequence
  Description of Artificial Sequence: Synthetic oligonucleotide
  Sense strand starting at position 37 of SEQ ID NO: 917093
gugaguugugacuguucca

SEQ ID NO: 1208039 - RNA, 19 nt, Artificial Sequence
  Description of Artificial Sequence: Synthetic oligonucleotide
  Antisense strand to SEQ ID NO: 1208038
uggaacagucacaacucac

SEQ ID NO: 1208040 - RNA, 19 nt, Artificial Sequence
  Description of Artificial Sequence: Synthetic oligonucleotide
  Sense strand starting at position 378 of SEQ ID NO: 917093
ugugguauuagugaaacaa

SEQ ID NO: 1208041 - RNA, 19 nt, Artificial Sequence
  Description of Artificial Sequence: Synthetic oligonucleotide
  Antisense strand to SEQ ID NO: 1208040
uuguuucacuaauaccaca

SEQ ID NO: 1208042 - RNA, 19 nt, Artificial Sequence
  Description of Artificial Sequence: Synthetic oligonucleotide
  Sense strand starting at position 615 of SEQ ID NO: 917093
cugagcuuccacgaauaca

SEQ ID NO: 1208043 - RNA, 19 nt, Artificial Sequence
  Description of Artificial Sequence: Synthetic oligonucleotide
  Antisense strand to SEQ ID NO: 1208042
uguauucguggaagcucag

SEQ ID NO: 1208044 - RNA, 19 nt, Artificial Sequence
  Description of Artificial Sequence: Synthetic oligonucleotide
  Sense strand starting at position 618 of SEQ ID NO: 917093
agcuuccacgaauacaaua

SEQ ID NO: 1208045 - RNA, 19 nt, Artificial Sequence
  Description of Artificial Sequence: Synthetic oligonucleotide
  Antisense strand to SEQ ID NO: 1208044
uauuguauucguggaagcu

SEQ ID NO: 1208046 - RNA, 19 nt, Artificial Sequence
  Description of Artificial Sequence: Synthetic oligonucleotide
  Sense strand starting at position 631 of SEQ ID NO: 917093
acaauaaggugucuuuaug

SEQ ID NO: 1208047 - RNA, 19 nt, Artificial Sequence
  Description of Artificial Sequence: Synthetic oligonucleotide
  Antisense strand to SEQ ID NO: 1208046
cauaaagacaccuuauugu

SEQ ID NO: 1208048 - RNA, 19 nt, Artificial Sequence
  Description of Artificial Sequence: Synthetic oligonucleotide
  Sense strand starting at position 641 of SEQ ID NO: 917093
gucuuuauguauuuccagu

SEQ ID NO: 1208049 - RNA, 19 nt, Artificial Sequence
  Description of Artificial Sequence: Synthetic oligonucleotide
  Antisense strand to SEQ ID NO: 1208048
acuggaaauacauaaagac

SEQ ID NO: 1208050 - RNA, 19 nt, Artificial Sequence
  Description of Artificial Sequence: Synthetic oligonucleotide
  Sense strand starting at position 643 of SEQ ID NO: 917093
cuuuauguauuuccaguuu

SEQ ID NO: 1208051 - RNA, 19 nt, Artificial Sequence
  Description of Artificial Sequence: Synthetic oligonucleotide
  Antisense strand to SEQ ID NO: 1208050
aaacuggaaauacauaaag

SEQ ID NO: 1208052 - RNA, 19 nt, Artificial Sequence
  Description of Artificial Sequence: Synthetic oligonucleotide
  Sense strand starting at position 660 of SEQ ID NO: 917093
uuagaccucccaugugagu

SEQ ID NO: 1208053 - RNA, 19 nt, Artificial Sequence
  Description of Artificial Sequence: Synthetic oligonucleotide
  Antisense strand to SEQ ID NO: 1208052
acucacaugggaggucuaa

SEQ ID NO: 1208054 - RNA, 19 nt, Artificial Sequence
  Description of Artificial Sequence: Synthetic oligonucleotide
  Sense strand starting at position 674 of SEQ ID NO: 917093
ugaguuacaggcugaaaua

SEQ ID NO: 1208055 - RNA, 19 nt, Artificial Sequence
  Description of Artificial Sequence: Synthetic oligonucleotide
  Antisense strand to SEQ ID NO: 1208054
uauuucagccuguaacuca

SEQ ID NO: 1208056 - RNA, 19 nt, Artificial Sequence
  Description of Artificial Sequence: Synthetic oligonucleotide
  Sense strand starting at position 764 of SEQ ID NO: 917093
ggcuguauagcucaauggu

SEQ ID NO: 1208057 - RNA, 19 nt, Artificial Sequence
  Description of Artificial Sequence: Synthetic oligonucleotide
  Antisense strand to SEQ ID NO: 1208056
accauugagcuauacagcc

SEQ ID NO: 1208058 - RNA, 19 nt, Artificial Sequence
  Description of Artificial Sequence: Synthetic oligonucleotide
  Sense strand starting at position 767 of SEQ ID NO: 917093
uguauagcucaaugguaga

SEQ ID NO: 1208059 - RNA, 19 nt, Artificial Sequence
  Description of Artificial Sequence: Synthetic oligonucleotide
  Antisense strand to SEQ ID NO: 1208058
ucuaccauugagcuauaca

SEQ ID NO: 1208060 - RNA, 19 nt, Artificial Sequence
  Description of Artificial Sequence: Synthetic oligonucleotide
  Sense strand starting at position 888 of SEQ ID NO: 917093
ucauaaagucccgaugauc

SEQ ID NO: 1208061 - RNA, 19 nt, Artificial Sequence
  Description of Artificial Sequence: Synthetic oligonucleotide
  Antisense strand to SEQ ID NO: 1208060
gaucaucgggacuuuauga

SEQ ID NO: 1208062 - RNA, 19 nt, Artificial Sequence
  Description of Artificial Sequence: Synthetic oligonucleotide
  Sense strand starting at position 975 of SEQ ID NO: 917093
cuguaauugcguccauagu

SEQ ID NO: 1208063 - RNA, 19 nt, Artificial Sequence
  Description of Artificial Sequence: Synthetic oligonucleotide
  Antisense strand to SEQ ID NO: 1208062
acuauggacgcaauuacag

SEQ ID NO: 1208064 - RNA, 19 nt, Artificial Sequence
  Description of Artificial Sequence: Synthetic oligonucleotide
  Sense strand starting at position 976 of SEQ ID NO: 917093
uguaauugcguccauaguu

SEQ ID NO: 1208065 - RNA, 19 nt, Artificial Sequence
  Description of Artificial Sequence: Synthetic oligonucleotide
  Antisense strand to SEQ ID NO: 1208064
aacuauggacgcaauuaca

SEQ ID NO: 1208066 - RNA, 19 nt, Artificial Sequence
  Description of Artificial Sequence: Synthetic oligonucleotide
  Sense strand starting at position 1078 of SEQ ID NO: 917093
cuuagaguccagcagacaa

SEQ ID NO: 1208067 - RNA, 19 nt, Artificial Sequence
  Description of Artificial Sequence: Synthetic oligonucleotide
  Antisense strand to SEQ ID NO: 1208066
uugucugcuggacucuaag

SEQ ID NO: 1208068 - RNA, 19 nt, Artificial Sequence
  Description of Artificial Sequence: Synthetic oligonucleotide
  Sense strand starting at position 1164 of SEQ ID NO: 917093
uucuaagggucuccauaag

SEQ ID NO: 1208069 - RNA, 19 nt, Artificial Sequence
  Description of Artificial Sequence: Synthetic oligonucleotide
  Antisense strand to SEQ ID NO: 1208068
cuuauggagacccuuagaa

SEQ ID NO: 1208070 - RNA, 19 nt, Artificial Sequence
  Description of Artificial Sequence: Synthetic oligonucleotide
  Sense strand starting at position 1179 of SEQ ID NO: 917093
uaagacaacuuuguguaga

SEQ ID NO: 1208071 - RNA, 19 nt, Artificial Sequence
  Description of Artificial Sequence: Synthetic oligonucleotide
  Antisense strand to SEQ ID NO: 1208070
ucuacacaaaguugucuua

SEQ ID NO: 1208072 - RNA, 19 nt, Artificial Sequence
  Description of Artificial Sequence: Synthetic oligonucleotide
  Sense strand starting at position 1181 of SEQ ID NO: 917093
agacaacuuuguguagaaa

SEQ ID NO: 1208073 - RNA, 19 nt, Artificial Sequence
  Description of Artificial Sequence: Synthetic oligonucleotide
  Antisense strand to SEQ ID NO: 1208072
uuucuacacaaaguugucu

SEQ ID NO: 1208074 - RNA, 19 nt, Artificial Sequence
  Description of Artificial Sequence: Synthetic oligonucleotide
  Sense strand starting at position 1243 of SEQ ID NO: 917093
ggccaugaagugcaguaua

SEQ ID NO: 1208075 - RNA, 19 nt, Artificial Sequence
  Description of Artificial Sequence: Synthetic oligonucleotide
  Antisense strand to SEQ ID NO: 1208074
uauacugcacuucauggcc

SEQ ID NO: 1208076 - RNA, 19 nt, Artificial Sequence
  Description of Artificial Sequence: Synthetic oligonucleotide
  Sense strand starting at position 1246 of SEQ ID NO: 917093
caugaagugcaguauaacu

SEQ ID NO: 1208077 - RNA, 19 nt, Artificial Sequence
  Description of Artificial Sequence: Synthetic oligonucleotide
  Antisense strand to SEQ ID NO: 1208076
aguuauacugcacuucaug

SEQ ID NO: 1208078 - RNA, 19 nt, Artificial Sequence
  Description of Artificial Sequence: Synthetic oligonucleotide
  Sense strand starting at position 1256 of SEQ ID NO: 917093
aguauaacugcccgucaca

SEQ ID NO: 1208079 - RNA, 19 nt, Artificial Sequence
  Description of Artificial Sequence: Synthetic oligonucleotide
  Antisense strand to SEQ ID NO: 1208078
ugugacgggcaguuauacu

SEQ ID NO: 1208080 - RNA, 19 nt, Artificial Sequence
  Description of Artificial Sequence: Synthetic oligonucleotide
  Sense strand starting at position 1259 of SEQ ID NO: 917093
auaacugcccgucacagaa

SEQ ID NO: 1208081 - RNA, 19 nt, Artificial Sequence
  Description of Artificial Sequence: Synthetic oligonucleotide
  Antisense strand to SEQ ID NO: 1208080
uucugugacgggcaguuau

SEQ ID NO: 1208082 - RNA, 19 nt, Artificial Sequence
  Description of Artificial Sequence: Synthetic oligonucleotide
  Sense strand starting at position 1356 of SEQ ID NO: 917093
guaaacuacgcacacaauu

SEQ ID NO: 1208083 - RNA, 19 nt, Artificial Sequence
  Description of Artificial Sequence: Synthetic oligonucleotide
  Antisense strand to SEQ ID NO: 1208082
aauugugugcguaguuuac

SEQ ID NO: 1208084 - RNA, 19 nt, Artificial Sequence
  Description of Artificial Sequence: Synthetic oligonucleotide
  Sense strand starting at position 1377 of SEQ ID NO: 917093
agcugaaugugaguucagu

SEQ ID NO: 1208085 - RNA, 19 nt, Artificial Sequence
  Description of Artificial Sequence: Synthetic oligonucleotide
  Antisense strand to SEQ ID NO: 1208084
acugaacucacauucagcu

SEQ ID NO: 1208086 - RNA, 19 nt, Artificial Sequence
  Description of Artificial Sequence: Synthetic oligonucleotide
  Sense strand starting at position 1388 of SEQ ID NO: 917093
aguucaguucccggaguaa

SEQ ID NO: 1208087 - RNA, 19 nt, Artificial Sequence
  Description of Artificial Sequence: Synthetic oligonucleotide
  Antisense strand to SEQ ID NO: 1208086
uuacuccgggaacugaacu

SEQ ID NO: 1208088 - RNA, 19 nt, Artificial Sequence
  Description of Artificial Sequence: Synthetic oligonucleotide
  Sense strand starting at position 1456 of SEQ ID NO: 917093
cacggaaagucucuacuua

SEQ ID NO: 1208089 - RNA, 19 nt, Artificial Sequence
  Description of Artificial Sequence: Synthetic oligonucleotide
  Antisense strand to SEQ ID NO: 1208088
uaaguagagacuuuccgug

SEQ ID NO: 1208090 - RNA, 19 nt, Artificial Sequence
  Description of Artificial Sequence: Synthetic oligonucleotide
  Sense strand starting at position 2050 of SEQ ID NO: 917093
ucccacaauccucggagaa

SEQ ID NO: 1208091 - RNA, 19 nt, Artificial Sequence
  Description of Artificial Sequence: Synthetic oligonucleotide
  Antisense strand to SEQ ID NO: 1208090
uucuccgaggauuguggga

SEQ ID NO: 1208092 - RNA, 19 nt, Artificial Sequence
  Description of Artificial Sequence: Synthetic oligonucleotide
  Sense strand starting at position 2051 of SEQ ID NO: 917093
cccacaauccucggagaag

SEQ ID NO: 1208093 - RNA, 19 nt, Artificial Sequence
  Description of Artificial Sequence: Synthetic oligonucleotide
  Antisense strand to SEQ ID NO: 1208092
cuucuccgaggauuguggg

SEQ ID NO: 1208094 - RNA, 19 nt, Artificial Sequence
  Description of Artificial Sequence: Synthetic oligonucleotide
  Sense strand starting at position 2063 of SEQ ID NO: 917093
ggagaaggcucccucguua

SEQ ID NO: 1208095 - RNA, 19 nt, Artificial Sequence
  Description of Artificial Sequence: Synthetic oligonucleotide
  Antisense strand to SEQ ID NO: 1208094
uaacgagggagccuucucc

SEQ ID NO: 1208096 - RNA, 19 nt, Artificial Sequence
  Description of Artificial Sequence: Synthetic oligonucleotide
  Sense strand starting at position 2391 of SEQ ID NO: 917093
uuugaauaucagugcacca

SEQ ID NO: 1208097 - RNA, 19 nt, Artificial Sequence
  Description of Artificial Sequence: Synthetic oligonucleotide
  Antisense strand to SEQ ID NO: 1208096
uggugcacugauauucaaa

SEQ ID NO: 1208098 - RNA, 19 nt, Artificial Sequence
  Description of Artificial Sequence: Synthetic oligonucleotide
  Sense strand starting at position 2393 of SEQ ID NO: 917093
ugaauaucagugcaccaaa

SEQ ID NO: 1208099 - RNA, 19 nt, Artificial Sequence
  Description of Artificial Sequence: Synthetic oligonucleotide
  Antisense strand to SEQ ID NO: 1208098
uuuggugcacugauauuca

SEQ ID NO: 1208100 - RNA, 19 nt, Artificial Sequence
  Description of Artificial Sequence: Synthetic oligonucleotide
  Sense strand starting at position 2437 of SEQ ID NO: 917093
gagaaacuauaguagaugu

SEQ ID NO: 1208101 - RNA, 19 nt, Artificial Sequence
  Description of Artificial Sequence: Synthetic oligonucleotide
  Antisense strand to SEQ ID NO: 1208100
acaucuacuauaguuucuc

SEQ ID NO: 1208102 - RNA, 19 nt, Artificial Sequence
  Description of Artificial Sequence: Synthetic oligonucleotide
  Sense strand starting at position 2570 of SEQ ID NO: 917093
gcgccuuuggcugucaaga

SEQ ID NO: 1208103 - RNA, 19 nt, Artificial Sequence
  Description of Artificial Sequence: Synthetic oligonucleotide
  Antisense strand to SEQ ID NO: 1208102
ucuugacagccaaaggcgc

SEQ ID NO: 1208104 - RNA, 19 nt, Artificial Sequence
  Description of Artificial Sequence: Synthetic oligonucleotide
  Sense strand starting at position 2594 of SEQ ID NO: 917093
ucauuauuccugggcuuag

SEQ ID NO: 1208105 - RNA, 19 nt, Artificial Sequence
  Description of Artificial Sequence: Synthetic oligonucleotide
  Antisense strand to SEQ ID NO: 1208104
cuaagcccaggaauaauga

SEQ ID NO: 1208106 - RNA, 19 nt, Artificial Sequence
  Description of Artificial Sequence: Synthetic oligonucleotide
  Sense strand starting at position 2742 of SEQ ID NO: 917093
agauguggauuggucacaa

SEQ ID NO: 1208107 - RNA, 19 nt, Artificial Sequence
  Description of Artificial Sequence: Synthetic oligonucleotide
  Antisense strand to SEQ ID NO: 1208106
uugugaccaauccacaucu

SEQ ID NO: 1208108 - RNA, 19 nt, Artificial Sequence
  Description of Artificial Sequence: Synthetic oligonucleotide
  Sense strand starting at position 3021 of SEQ ID NO: 917093
gggcuaaggcagcagaauu

SEQ ID NO: 1208109 - RNA, 19 nt, Artificial Sequence
  Description of Artificial Sequence: Synthetic oligonucleotide
  Antisense strand to SEQ ID NO: 1208108
aauucugcugccuuagccc

SEQ ID NO: 1208110 - RNA, 19 nt, Artificial Sequence
  Description of Artificial Sequence: Synthetic oligonucleotide
  Sense strand starting at position 3352 of SEQ ID NO: 917093
gguacauucuuggugggaa

SEQ ID NO: 1208111 - RNA, 19 nt, Artificial Sequence
  Description of Artificial Sequence: Synthetic oligonucleotide
  Antisense strand to SEQ ID NO: 1208110
uucccaccaagaauguacc

SEQ ID NO: 1208112 - RNA, 19 nt, Artificial Sequence
  Description of Artificial Sequence: Synthetic oligonucleotide
  Sense strand starting at position 3489 of SEQ ID NO: 917093
caguauauccaagagcugu

SEQ ID NO: 1208113 - RNA, 19 nt, Artificial Sequence
  Description of Artificial Sequence: Synthetic oligonucleotide
  Antisense strand to SEQ ID NO: 1208112
acagcucuuggauauacug

SEQ ID NO: 1208114 - RNA, 19 nt, Artificial Sequence
  Description of Artificial Sequence: Synthetic oligonucleotide
  Sense strand starting at position 3567 of SEQ ID NO: 917093
agugucaaucaacagguua

SEQ ID NO: 1208115 - RNA, 19 nt, Artificial Sequence
  Description of Artificial Sequence: Synthetic oligonucleotide
  Antisense strand to SEQ ID NO: 1208114
uaaccuguugauugacacu

SEQ ID NO: 1208116 - RNA, 19 nt, Artificial Sequence
  Description of Artificial Sequence: Synthetic oligonucleotide
  Sense strand starting at position 3741 of SEQ ID NO: 917093
acuuauuugugagagccaa

SEQ ID NO: 1208117 - RNA, 19 nt, Artificial Sequence
  Description of Artificial Sequence: Synthetic oligonucleotide
  Antisense strand to SEQ ID NO: 1208116
uuggcucucacaaauaagu

SEQ ID NO: 1208118 - RNA, 19 nt, Artificial Sequence
  Description of Artificial Sequence: Synthetic oligonucleotide
  Sense strand starting at position 182 of SEQ ID NO: 917094
ugcagacuagacuguucua

SEQ ID NO: 1208119 - RNA, 19 nt, Artificial Sequence
  Description of Artificial Sequence: Synthetic oligonucleotide
  Antisense strand to SEQ ID NO: 1208118
uagaacagucuagucugca

SEQ ID NO: 1208120 - RNA, 19 nt, Artificial Sequence
  Description of Artificial Sequence: Synthetic oligonucleotide
  Sense strand starting at position 202 of SEQ ID NO: 917094
ccucaaauccguugugaaa

SEQ ID NO: 1208121 - RNA, 19 nt, Artificial Sequence
  Description of Artificial Sequence: Synthetic oligonucleotide
  Antisense strand to SEQ ID NO: 1208120
uuucacaacggauuugagg

SEQ ID NO: 1208122 - RNA, 19 nt, Artificial Sequence
  Description of Artificial Sequence: Synthetic oligonucleotide
  Sense strand starting at position 317 of SEQ ID NO: 917094
gcggcgauggcuucuggau

SEQ ID NO: 1208123 - RNA, 19 nt, Artificial Sequence
  Description of Artificial Sequence: Synthetic oligonucleotide
  Antisense strand to SEQ ID NO: 1208122
auccagaagccaucgccgc

SEQ ID NO: 1208124 - RNA, 19 nt, Artificial Sequence
  Description of Artificial Sequence: Synthetic oligonucleotide
  Sense strand starting at position 323 of SEQ ID NO: 917094
auggcuucuggaugaaacu

SEQ ID NO: 1208125 - RNA, 19 nt, Artificial Sequence
  Description of Artificial Sequence: Synthetic oligonucleotide
  Antisense strand to SEQ ID NO: 1208124
aguuucauccagaagccau

SEQ ID NO: 1208126 - RNA, 19 nt, Artificial Sequence
  Description of Artificial Sequence: Synthetic oligonucleotide
  Sense strand starting at position 375 of SEQ ID NO: 917094
auaagaagugcgcaaccua

SEQ ID NO: 1208127 - RNA, 19 nt, Artificial Sequence
  Description of Artificial Sequence: Synthetic oligonucleotide
  Antisense strand to SEQ ID NO: 1208126
uagguugcgcacuucuuau

SEQ ID NO: 1208128 - RNA, 19 nt, Artificial Sequence
  Description of Artificial Sequence: Synthetic oligonucleotide
  Sense strand starting at position 472 of SEQ ID NO: 917094
ggcagucaugcucacuaaa

SEQ ID NO: 1208129 - RNA, 19 nt, Artificial Sequence
  Description of Artificial Sequence: Synthetic oligonucleotide
  Antisense strand to SEQ ID NO: 1208128
uuuagugagcaugacugcc

SEQ ID NO: 1208130 - RNA, 19 nt, Artificial Sequence
  Description of Artificial Sequence: Synthetic oligonucleotide
  Sense strand starting at position 571 of SEQ ID NO: 917094
ccaccugcccuaugugaua

SEQ ID NO: 1208131 - RNA, 19 nt, Artificial Sequence
  Description of Artificial Sequence: Synthetic oligonucleotide
  Antisense strand to SEQ ID NO: 1208130
uaucacauagggcaggugg

SEQ ID NO: 1208132 - RNA, 19 nt, Artificial Sequence
  Description of Artificial Sequence: Synthetic oligonucleotide
  Sense strand starting at position 747 of SEQ ID NO: 917094
cucaaauuugcacguuacu

SEQ ID NO: 1208133 - RNA, 19 nt, Artificial Sequence
  Description of Artificial Sequence: Synthetic oligonucleotide
  Antisense strand to SEQ ID NO: 1208132
aguaacgugcaaauuugag

SEQ ID NO: 1208134 - RNA, 19 nt, Artificial Sequence
  Description of Artificial Sequence: Synthetic oligonucleotide
  Sense strand starting at position 799 of SEQ ID NO: 917094
acuuuagguuugucaucuu

SEQ ID NO: 1208135 - RNA, 19 nt, Artificial Sequence
  Description of Artificial Sequence: Synthetic oligonucleotide
  Antisense strand to SEQ ID NO: 1208134
aagaugacaaaccuaaagu

SEQ ID NO: 1208136 - RNA, 19 nt, Artificial Sequence
  Description of Artificial Sequence: Synthetic oligonucleotide
  Sense strand starting at position 828 of SEQ ID NO: 917094
gguuaagaaucucuuaauc

SEQ ID NO: 1208137 - RNA, 19 nt, Artificial Sequence
  Description of Artificial Sequence: Synthetic oligonucleotide
  Antisense strand to SEQ ID NO: 1208136
gauuaagagauucuuaacc

SEQ ID NO: 1208138 - RNA, 19 nt, Artificial Sequence
  Description of Artificial Sequence: Synthetic oligonucleotide
  Sense strand starting at position 876 of SEQ ID NO: 917094
ggguguccuuacuuccaaa

SEQ ID NO: 1208139 - RNA, 19 nt, Artificial Sequence
  Description of Artificial Sequence: Synthetic oligonucleotide
  Antisense strand to SEQ ID NO: 1208138
uuuggaaguaaggacaccc

SEQ ID NO: 1208140 - RNA, 19 nt, Artificial Sequence
  Description of Artificial Sequence: Synthetic oligonucleotide
  Sense strand starting at position 951 of SEQ ID NO: 917094
auuaacuugucauugucuu

SEQ ID NO: 1208141 - RNA, 19 nt, Artificial Sequence
  Description of Artificial Sequence: Synthetic oligonucleotide
  Antisense strand to SEQ ID NO: 1208140
aagacaaugacaaguuaau

SEQ ID NO: 1208142 - RNA, 19 nt, Artificial Sequence
  Description of Artificial Sequence: Synthetic oligonucleotide
  Sense strand starting at position 1176 of SEQ ID NO: 917094
aacugaaagaugugugagu

SEQ ID NO: 1208143 - RNA, 19 nt, Artificial Sequence
  Description of Artificial Sequence: Synthetic oligonucleotide
  Antisense strand to SEQ ID NO: 1208142
acucacacaucuuucaguu

SEQ ID NO: 1208144 - RNA, 19 nt, Artificial Sequence
  Description of Artificial Sequence: Synthetic oligonucleotide
  Sense strand starting at position 1177 of SEQ ID NO: 917094
acugaaagaugugugagua

SEQ ID NO: 1208145 - RNA, 19 nt, Artificial Sequence
  Description of Artificial Sequence: Synthetic oligonucleotide
  Antisense strand to SEQ ID NO: 1208144
uacucacacaucuuucagu

SEQ ID NO: 1208146 - RNA, 19 nt, Artificial Sequence
  Description of Artificial Sequence: Synthetic oligonucleotide
  Sense strand starting at position 1178 of SEQ ID NO: 917094
cugaaagaugugugaguau

SEQ ID NO: 1208147 - RNA, 19 nt, Artificial Sequence
  Description of Artificial Sequence: Synthetic oligonucleotide
  Antisense strand to SEQ ID NO: 1208146
auacucacacaucuuucag

SEQ ID NO: 1208148 - RNA, 19 nt, Artificial Sequence
  Description of Artificial Sequence: Synthetic oligonucleotide
  Sense strand starting at position 1199 of SEQ ID NO: 917094
cuuguuuaacuccaaaguu

SEQ ID NO: 1208149 - RNA, 19 nt, Artificial Sequence
  Description of Artificial Sequence: Synthetic oligonucleotide
  Antisense strand to SEQ ID NO: 1208148
aacuuuggaguuaaacaag

SEQ ID NO: 1208150 - RNA, 19 nt, Artificial Sequence
  Description of Artificial Sequence: Synthetic oligonucleotide
  Sense strand starting at position 1221 of SEQ ID NO: 917094
cguacaaaguuguuagaaa

SEQ ID NO: 1208151 - RNA, 19 nt, Artificial Sequence
  Description of Artificial Sequence: Synthetic oligonucleotide
  Antisense strand to SEQ ID NO: 1208150
uuucuaacaacuuuguacg

SEQ ID NO: 1208152 - RNA, 19 nt, Artificial Sequence
  Description of Artificial Sequence: Synthetic oligonucleotide
  Sense strand starting at position 1269 of SEQ ID NO: 917094
gucggaugacaagaagcau

SEQ ID NO: 1208153 - RNA, 19 nt, Artificial Sequence
  Description of Artificial Sequence: Synthetic oligonucleotide
  Antisense strand to SEQ ID NO: 1208152
augcuucuugucauccgac

SEQ ID NO: 1208154 - RNA, 19 nt, Artificial Sequence
  Description of Artificial Sequence: Synthetic oligonucleotide
  Sense strand starting at position 1347 of SEQ ID NO: 917094
gagaaagcuccuggcaaau

SEQ ID NO: 1208155 - RNA, 19 nt, Artificial Sequence
  Description of Artificial Sequence: Synthetic oligonucleotide
  Antisense strand to SEQ ID NO: 1208154
auuugccaggagcuuucuc

SEQ ID NO: 1208156 - RNA, 19 nt, Artificial Sequence
  Description of Artificial Sequence: Synthetic oligonucleotide
  Sense strand starting at position 1398 of SEQ ID NO: 917094
ggcauucagggagagcuuu

SEQ ID NO: 1208157 - RNA, 19 nt, Artificial Sequence
  Description of Artificial Sequence: Synthetic oligonucleotide
  Antisense strand to SEQ ID NO: 1208156
aaagcucucccugaaugcc

SEQ ID NO: 1208158 - RNA, 19 nt, Artificial Sequence
  Description of Artificial Sequence: Synthetic oligonucleotide
  Sense strand starting at position 1728 of SEQ ID NO: 917094
agagcuaaggcagauuagu

SEQ ID NO: 1208159 - RNA, 19 nt, Artificial Sequence
  Description of Artificial Sequence: Synthetic oligonucleotide
  Antisense strand to SEQ ID NO: 1208158
acuaaucugccuuagcucu

SEQ ID NO: 1208160 - RNA, 19 nt, Artificial Sequence
  Description of Artificial Sequence: Synthetic oligonucleotide
  Sense strand starting at position 2209 of SEQ ID NO: 917094
cgguuggagggauguaaau

SEQ ID NO: 1208161 - RNA, 19 nt, Artificial Sequence
  Description of Artificial Sequence: Synthetic oligonucleotide
  Antisense strand to SEQ ID NO: 1208160
auuuacaucccuccaaccg

SEQ ID NO: 1208162 - RNA, 19 nt, Artificial Sequence
  Description of Artificial Sequence: Synthetic oligonucleotide
  Sense strand starting at position 2219 of SEQ ID NO: 917094
gauguaaauuagguuacaa

SEQ ID NO: 1208163 - RNA, 19 nt, Artificial Sequence
  Description of Artificial Sequence: Synthetic oligonucleotide
  Antisense strand to SEQ ID NO: 1208162
uuguaaccuaauuuacauc

SEQ ID NO: 1208164 - RNA, 19 nt, Artificial Sequence
  Description of Artificial Sequence: Synthetic oligonucleotide
  Sense strand starting at position 2221 of SEQ ID NO: 917094
uguaaauuagguuacaagu

SEQ ID NO: 1208165 - RNA, 19 nt, Artificial Sequence
  Description of Artificial Sequence: Synthetic oligonucleotide
  Antisense strand to SEQ ID NO: 1208164
acuuguaaccuaauuuaca

SEQ ID NO: 1208166 - RNA, 19 nt, Artificial Sequence
  Description of Artificial Sequence: Synthetic oligonucleotide
  Sense strand starting at position 2227 of SEQ ID NO: 917094
uuagguuacaaguguucua

SEQ ID NO: 1208167 - RNA, 19 nt, Artificial Sequence
  Description of Artificial Sequence: Synthetic oligonucleotide
  Antisense strand to SEQ ID NO: 1208166
uagaacacuuguaaccuaa

SEQ ID NO: 1208168 - RNA, 19 nt, Artificial Sequence
  Description of Artificial Sequence: Synthetic oligonucleotide
  Sense strand starting at position 2246 of SEQ ID NO: 917094
gucccugcuuuacugaaau

SEQ ID NO: 1208169 - RNA, 19 nt, Artificial Sequence
  Description of Artificial Sequence: Synthetic oligonucleotide
  Antisense strand to SEQ ID NO: 1208168
auuucaguaaagcagggac

SEQ ID NO: 1208170 - RNA, 19 nt, Artificial Sequence
  Description of Artificial Sequence: Synthetic oligonucleotide
  Sense strand starting at position 2451 of SEQ ID NO: 917094
auguuuaaucuguugcgua

SEQ ID NO: 1208171 - RNA, 19 nt, Artificial Sequence
  Description of Artificial Sequence: Synthetic oligonucleotide
  Antisense strand to SEQ ID NO: 1208170
uacgcaacagauuaaacau

SEQ ID NO: 1208172 - RNA, 19 nt, Artificial Sequence
  Description of Artificial Sequence: Synthetic oligonucleotide
  Sense strand starting at position 2453 of SEQ ID NO: 917094
guuuaaucuguugcguaug

SEQ ID NO: 1208173 - RNA, 19 nt, Artificial Sequence
  Description of Artificial Sequence: Synthetic oligonucleotide
  Antisense strand to SEQ ID NO: 1208172
cauacgcaacagauuaaac

SEQ ID NO: 1208174 - RNA, 19 nt, Artificial Sequence
  Description of Artificial Sequence: Synthetic oligonucleotide
  Sense strand starting at position 2618 of SEQ ID NO: 917094
acgcaugauuucguaacau

SEQ ID NO: 1208175 - RNA, 19 nt, Artificial Sequence
  Description of Artificial Sequence: Synthetic oligonucleotide
  Antisense strand to SEQ ID NO: 1208174
auguuacgaaaucaugcgu

SEQ ID NO: 1208176 - RNA, 19 nt, Artificial Sequence
  Description of Artificial Sequence: Synthetic oligonucleotide
  Sense strand starting at position 2622 of SEQ ID NO: 917094
augauuucguaacaucaug

SEQ ID NO: 1208177 - RNA, 19 nt, Artificial Sequence
  Description of Artificial Sequence: Synthetic oligonucleotide
  Antisense strand to SEQ ID NO: 1208176
caugauguuacgaaaucau

SEQ ID NO: 1208178 - RNA, 19 nt, Artificial Sequence
  Description of Artificial Sequence: Synthetic oligonucleotide
  Sense strand starting at position 2894 of SEQ ID NO: 917094
guauccacgcccuauagua

SEQ ID NO: 1208179 - RNA, 19 nt, Artificial Sequence
  Description of Artificial Sequence: Synthetic oligonucleotide
  Antisense strand to SEQ ID NO: 1208178
uacuauagggcguggauac

SEQ ID NO: 1208180 - RNA, 19 nt, Artificial Sequence
  Description of Artificial Sequence: Synthetic oligonucleotide
  Sense strand starting at position 3004 of SEQ ID NO: 917094
cuacauccauguguacaua

SEQ ID NO: 1208181 - RNA, 19 nt, Artificial Sequence
  Description of Artificial Sequence: Synthetic oligonucleotide
  Antisense strand to SEQ ID NO: 1208180
uauguacacauggauguag

SEQ ID NO: 1208182 - RNA, 19 nt, Artificial Sequence
  Description of Artificial Sequence: Synthetic oligonucleotide
  Sense strand starting at position 3016 of SEQ ID NO: 917094
guacauauccuuuagcuca

SEQ ID NO: 1208183 - RNA, 19 nt, Artificial Sequence
  Description of Artificial Sequence: Synthetic oligonucleotide
  Antisense strand to SEQ ID NO: 1208182
ugagcuaaaggauauguac

SEQ ID NO: 1208184 - RNA, 19 nt, Artificial Sequence
  Description of Artificial Sequence: Synthetic oligonucleotide
  Sense strand starting at position 3201 of SEQ ID NO: 917094
cauggacauuuagguuaau

SEQ ID NO: 1208185 - RNA, 19 nt, Artificial Sequence
  Description of Artificial Sequence: Synthetic oligonucleotide
  Antisense strand to SEQ ID NO: 1208184
auuaaccuaaauguccaug

SEQ ID NO: 1208186 - RNA, 19 nt, Artificial Sequence
  Description of Artificial Sequence: Synthetic oligonucleotide
  Sense strand starting at position 3212 of SEQ ID NO: 917094
agguuaauuccauaccugu

SEQ ID NO: 1208187 - RNA, 19 nt, Artificial Sequence
  Description of Artificial Sequence: Synthetic oligonucleotide
  Antisense strand to SEQ ID NO: 1208186
acagguauggaauuaaccu

SEQ ID NO: 1208188 - RNA, 19 nt, Artificial Sequence
  Description of Artificial Sequence: Synthetic oligonucleotide
  Sense strand starting at position 3218 of SEQ ID NO: 917094
auuccauaccugugauauu

SEQ ID NO: 1208189 - RNA, 19 nt, Artificial Sequence
  Description of Artificial Sequence: Synthetic oligonucleotide
  Antisense strand to SEQ ID NO: 1208188
aauaucacagguauggaau

SEQ ID NO: 1208190 - RNA, 19 nt, Artificial Sequence
  Description of Artificial Sequence: Synthetic oligonucleotide
  Sense strand starting at position 3303 of SEQ ID NO: 917094
gguagauacucaguaacag

SEQ ID NO: 1208191 - RNA, 19 nt, Artificial Sequence
  Description of Artificial Sequence: Synthetic oligonucleotide
  Antisense strand to SEQ ID NO: 1208190
cuguuacugaguaucuacc

SEQ ID NO: 1208192 - RNA, 19 nt, Artificial Sequence
  Description of Artificial Sequence: Synthetic oligonucleotide
  Sense strand starting at position 3313 of SEQ ID NO: 917094
caguaacaggauugcuuua

SEQ ID NO: 1208193 - RNA, 19 nt, Artificial Sequence
  Description of Artificial Sequence: Synthetic oligonucleotide
  Antisense strand to SEQ ID NO: 1208192
uaaagcaauccuguuacug

SEQ ID NO: 1208194 - RNA, 19 nt, Artificial Sequence
  Description of Artificial Sequence: Synthetic oligonucleotide
  Sense strand starting at position 3320 of SEQ ID NO: 917094
aggauugcuuuaucaaaug

SEQ ID NO: 1208195 - RNA, 19 nt, Artificial Sequence
  Description of Artificial Sequence: Synthetic oligonucleotide
  Antisense strand to SEQ ID NO: 1208194
cauuugauaaagcaauccu

SEQ ID NO: 1208196 - RNA, 19 nt, Artificial Sequence
  Description of Artificial Sequence: Synthetic oligonucleotide
  Sense strand starting at position 3720 of SEQ ID NO: 917094
gucaccucaguuuaccaaa

SEQ ID NO: 1208197 - RNA, 19 nt, Artificial Sequence
  Description of Artificial Sequence: Synthetic oligonucleotide
  Antisense strand to SEQ ID NO: 1208196
uuugguaaacugaggugac

SEQ ID NO: 1208198 - RNA, 19 nt, Artificial Sequence
  Description of Artificial Sequence: Synthetic oligonucleotide
  Sense strand starting at position 117 of SEQ ID NO: 917095
ugcagacuagacuguucua

SEQ ID NO: 1208199 - RNA, 19 nt, Artificial Sequence
  Description of Artificial Sequence: Synthetic oligonucleotide
  Antisense strand to SEQ ID NO: 1208198
uagaacagucuagucugca

SEQ ID NO: 1208200 - RNA, 19 nt, Artificial Sequence
  Description of Artificial Sequence: Synthetic oligonucleotide
  Sense strand starting at position 137 of SEQ ID NO: 917095
ccucaaauccguugugaaa

SEQ ID NO: 1208201 - RNA, 19 nt, Artificial Sequence
  Description of Artificial Sequence: Synthetic oligonucleotide
  Antisense strand to SEQ ID NO: 1208200
uuucacaacggauuugagg

SEQ ID NO: 1208202 - RNA, 19 nt, Artificial Sequence
  Description of Artificial Sequence: Synthetic oligonucleotide
  Sense strand starting at position 252 of SEQ ID NO: 917095
gcggcgauggcuucuggau

SEQ ID NO: 1208203 - RNA, 19 nt, Artificial Sequence
  Description of Artificial Sequence: Synthetic oligonucleotide
  Antisense strand to SEQ ID NO: 1208202
auccagaagccaucgccgc

SEQ ID NO: 1208204 - RNA, 19 nt, Artificial Sequence
  Description of Artificial Sequence: Synthetic oligonucleotide
  Sense strand starting at position 258 of SEQ ID NO: 917095
auggcuucuggaugaaacu

SEQ ID NO: 1208205 - RNA, 19 nt, Artificial Sequence
  Description of Artificial Sequence: Synthetic oligonucleotide
  Antisense strand to SEQ ID NO: 1208204
aguuucauccagaagccau

SEQ ID NO: 1208206 - RNA, 19 nt, Artificial Sequence
  Description of Artificial Sequence: Synthetic oligonucleotide
  Sense strand starting at position 310 of SEQ ID NO: 917095
auaagaagugcgcaaccua

SEQ ID NO: 1208207 - RNA, 19 nt, Artificial Sequence
  Description of Artificial Sequence: Synthetic oligonucleotide
  Antisense strand to SEQ ID NO: 1208206
uagguugcgcacuucuuau

SEQ ID NO: 1208208 - RNA, 19 nt, Artificial Sequence
  Description of Artificial Sequence: Synthetic oligonucleotide
  Sense strand starting at position 407 of SEQ ID NO: 917095
ggcagucaugcucacuaaa

SEQ ID NO: 1208209 - RNA, 19 nt, Artificial Sequence
  Description of Artificial Sequence: Synthetic oligonucleotide
  Antisense strand to SEQ ID NO: 1208208
uuuagugagcaugacugcc

SEQ ID NO: 1208210 - RNA, 19 nt, Artificial Sequence
  Description of Artificial Sequence: Synthetic oligonucleotide
  Sense strand starting at position 506 of SEQ ID NO: 917095
ccaccugcccuaugugaua

SEQ ID NO: 1208211 - RNA, 19 nt, Artificial Sequence
  Description of Artificial Sequence: Synthetic oligonucleotide
  Antisense strand to SEQ ID NO: 1208210
uaucacauagggcaggugg

SEQ ID NO: 1208212 - RNA, 19 nt, Artificial Sequence
  Description of Artificial Sequence: Synthetic oligonucleotide
  Sense strand starting at position 682 of SEQ ID NO: 917095
cucaaauuugcacguuacu

SEQ ID NO: 1208213 - RNA, 19 nt, Artificial Sequence
  Description of Artificial Sequence: Synthetic oligonucleotide
  Antisense strand to SEQ ID NO: 1208212
aguaacgugcaaauuugag

SEQ ID NO: 1208214 - RNA, 19 nt, Artificial Sequence
  Description of Artificial Sequence: Synthetic oligonucleotide
  Sense strand starting at position 734 of SEQ ID NO: 917095
acuuuagguuugucaucuu

SEQ ID NO: 1208215 - RNA, 19 nt, Artificial Sequence
  Description of Artificial Sequence: Synthetic oligonucleotide
  Antisense strand to SEQ ID NO: 1208214
aagaugacaaaccuaaagu

SEQ ID NO: 1208216 - RNA, 19 nt, Artificial Sequence
  Description of Artificial Sequence: Synthetic oligonucleotide
  Sense strand starting at position 763 of SEQ ID NO: 917095
gguuaagaaucucuuaauc

SEQ ID NO: 1208217 - RNA, 19 nt, Artificial Sequence
  Description of Artificial Sequence: Synthetic oligonucleotide
  Antisense strand to SEQ ID NO: 1208216
gauuaagagauucuuaacc

SEQ ID NO: 1208218 - RNA, 19 nt, Artificial Sequence
  Description of Artificial Sequence: Synthetic oligonucleotide
  Sense strand starting at position 811 of SEQ ID NO: 917095
ggguguccuuacuuccaaa

SEQ ID NO: 1208219 - RNA, 19 nt, Artificial Sequence
  Description of Artificial Sequence: Synthetic oligonucleotide
  Antisense strand to SEQ ID NO: 1208218
uuuggaaguaaggacaccc

SEQ ID NO: 1208220 - RNA, 19 nt, Artificial Sequence
  Description of Artificial Sequence: Synthetic oligonucleotide
  Sense strand starting at position 886 of SEQ ID NO: 917095
auuaacuugucauugucuu

SEQ ID NO: 1208221 - RNA, 19 nt, Artificial Sequence
  Description of Artificial Sequence: Synthetic oligonucleotide
  Antisense strand to SEQ ID NO: 1208220
aagacaaugacaaguuaau

SEQ ID NO: 1208222 - RNA, 19 nt, Artificial Sequence
  Description of Artificial Sequence: Synthetic oligonucleotide
  Sense strand starting at position 1111 of SEQ ID NO: 917095
aacugaaagaugugugagu

SEQ ID NO: 1208223 - RNA, 19 nt, Artificial Sequence
  Description of Artificial Sequence: Synthetic oligonucleotide
  Antisense strand to SEQ ID NO: 1208222
acucacacaucuuucaguu

SEQ ID NO: 1208224 - RNA, 19 nt, Artificial Sequence
  Description of Artificial Sequence: Synthetic oligonucleotide
  Sense strand starting at position 1112 of SEQ ID NO: 917095
acugaaagaugugugagua

SEQ ID NO: 1208225 - RNA, 19 nt, Artificial Sequence
  Description of Artificial Sequence: Synthetic oligonucleotide
  Antisense strand to SEQ ID NO: 1208224
uacucacacaucuuucagu

SEQ ID NO: 1208226 - RNA, 19 nt, Artificial Sequence
  Description of Artificial Sequence: Synthetic oligonucleotide
  Sense strand starting at position 1113 of SEQ ID NO: 917095
cugaaagaugugugaguau

SEQ ID NO: 1208227 - RNA, 19 nt, Artificial Sequence
  Description of Artificial Sequence: Synthetic oligonucleotide
  Antisense strand to SEQ ID NO: 1208226
auacucacacaucuuucag

SEQ ID NO: 1208228 - RNA, 19 nt, Artificial Sequence
  Description of Artificial Sequence: Synthetic oligonucleotide
  Sense strand starting at position 1134 of SEQ ID NO: 917095
cuuguuuaacuccaaaguu

SEQ ID NO: 1208229 - RNA, 19 nt, Artificial Sequence
  Description of Artificial Sequence: Synthetic oligonucleotide
  Antisense strand to SEQ ID NO: 1208228
aacuuuggaguuaaacaag

SEQ ID NO: 1208230 - RNA, 19 nt, Artificial Sequence
  Description of Artificial Sequence: Synthetic oligonucleotide
  Sense strand starting at position 1156 of SEQ ID NO: 917095
cguacaaaguuguuagaaa

SEQ ID NO: 1208231 - RNA, 19 nt, Artificial Sequence
  Description of Artificial Sequence: Synthetic oligonucleotide
  Antisense strand to SEQ ID NO: 1208230
uuucuaacaacuuuguacg

SEQ ID NO: 1208232 - RNA, 19 nt, Artificial Sequence
  Description of Artificial Sequence: Synthetic oligonucleotide
  Sense strand starting at position 1204 of SEQ ID NO: 917095
gucggaugacaagaagcau

SEQ ID NO: 1208233 - RNA, 19 nt, Artificial Sequence
  Description of Artificial Sequence: Synthetic oligonucleotide
  Antisense strand to SEQ ID NO: 1208232
augcuucuugucauccgac

SEQ ID NO: 1208234 - RNA, 19 nt, Artificial Sequence
  Description of Artificial Sequence: Synthetic oligonucleotide
  Sense strand starting at position 1282 of SEQ ID NO: 917095
gagaaagcuccuggcaaau

SEQ ID NO: 1208235 - RNA, 19 nt, Artificial Sequence
  Description of Artificial Sequence: Synthetic oligonucleotide
  Antisense strand to SEQ ID NO: 1208234
auuugccaggagcuuucuc

SEQ ID NO: 1208236 - RNA, 19 nt, Artificial Sequence
  Description of Artificial Sequence: Synthetic oligonucleotide
  Sense strand starting at position 1333 of SEQ ID NO: 917095
ggcauucagggagagcuuu

SEQ ID NO: 1208237 - RNA, 19 nt, Artificial Sequence
  Description of Artificial Sequence: Synthetic oligonucleotide
  Antisense strand to SEQ ID NO: 1208236
aaagcucucccugaaugcc

SEQ ID NO: 1208238 - RNA, 19 nt, Artificial Sequence
  Description of Artificial Sequence: Synthetic oligonucleotide
  Sense strand starting at position 1663 of SEQ ID NO: 917095
agagcuaaggcagauuagu

SEQ ID NO: 1208239 - RNA, 19 nt, Artificial Sequence
  Description of Artificial Sequence: Synthetic oligonucleotide
  Antisense strand to SEQ ID NO: 1208238
acuaaucugccuuagcucu

SEQ ID NO: 1208240 - RNA, 19 nt, Artificial Sequence
  Description of Artificial Sequence: Synthetic oligonucleotide
  Sense strand starting at position 2144 of SEQ ID NO: 917095
cgguuggagggauguaaau

SEQ ID NO: 1208241 - RNA, 19 nt, Artificial Sequence
  Description of Artificial Sequence: Synthetic oligonucleotide
  Antisense strand to SEQ ID NO: 1208240
auuuacaucccuccaaccg

SEQ ID NO: 1208242 - RNA, 19 nt, Artificial Sequence
  Description of Artificial Sequence: Synthetic oligonucleotide
  Sense strand starting at position 2154 of SEQ ID NO: 917095
gauguaaauuagguuacaa

SEQ ID NO: 1208243 - RNA, 19 nt, Artificial Sequence
  Description of Artificial Sequence: Synthetic oligonucleotide
  Antisense strand to SEQ ID NO: 1208242
uuguaaccuaauuuacauc

SEQ ID NO: 1208244 - RNA, 19 nt, Artificial Sequence
  Description of Artificial Sequence: Synthetic oligonucleotide
  Sense strand starting at position 2156 of SEQ ID NO: 917095
uguaaauuagguuacaagu

SEQ ID NO: 1208245 - RNA, 19 nt, Artificial Sequence
  Description of Artificial Sequence: Synthetic oligonucleotide
  Antisense strand to SEQ ID NO: 1208244
acuuguaaccuaauuuaca

SEQ ID NO: 1208246 - RNA, 19 nt, Artificial Sequence
  Description of Artificial Sequence: Synthetic oligonucleotide
  Sense strand starting at position 2162 of SEQ ID NO: 917095
uuagguuacaaguguucua

SEQ ID NO: 1208247 - RNA, 19 nt, Artificial Sequence
  Description of Artificial Sequence: Synthetic oligonucleotide
  Antisense strand to SEQ ID NO: 1208246
uagaacacuuguaaccuaa

SEQ ID NO: 1208248 - RNA, 19 nt, Artificial Sequence
  Description of Artificial Sequence: Synthetic oligonucleotide
  Sense strand starting at position 2181 of SEQ ID NO: 917095
gucccugcuuuacugaaau

SEQ ID NO: 1208249 - RNA, 19 nt, Artificial Sequence
  Description of Artificial Sequence: Synthetic oligonucleotide
  Antisense strand to SEQ ID NO: 1208248
auuucaguaaagcagggac

SEQ ID NO: 1208250 - RNA, 19 nt, Artificial Sequence
  Description of Artificial Sequence: Synthetic oligonucleotide
  Sense strand starting at position 2386 of SEQ ID NO: 917095
auguuuaaucuguugcgua

SEQ ID NO: 1208251 - RNA, 19 nt, Artificial Sequence
  Description of Artificial Sequence: Synthetic oligonucleotide
  Antisense strand to SEQ ID NO: 1208250
uacgcaacagauuaaacau

SEQ ID NO: 1208252 - RNA, 19 nt, Artificial Sequence
  Description of Artificial Sequence: Synthetic oligonucleotide
  Sense strand starting at position 2388 of SEQ ID NO: 917095
guuuaaucuguugcguaug

SEQ ID NO: 1208253 - RNA, 19 nt, Artificial Sequence
  Description of Artificial Sequence: Synthetic oligonucleotide
  Antisense strand to SEQ ID NO: 1208252
cauacgcaacagauuaaac

SEQ ID NO: 1208254 - RNA, 19 nt, Artificial Sequence
  Description of Artificial Sequence: Synthetic oligonucleotide
  Sense strand starting at position 2553 of SEQ ID NO: 917095
acgcaugauuucguaacau

SEQ ID NO: 1208255 - RNA, 19 nt, Artificial Sequence
  Description of Artificial Sequence: Synthetic oligonucleotide
  Antisense strand to SEQ ID NO: 1208254
auguuacgaaaucaugcgu

SEQ ID NO: 1208256 - RNA, 19 nt, Artificial Sequence
  Description of Artificial Sequence: Synthetic oligonucleotide
  Sense strand starting at position 2557 of SEQ ID NO: 917095
augauuucguaacaucaug

SEQ ID NO: 1208257 - RNA, 19 nt, Artificial Sequence
  Description of Artificial Sequence: Synthetic oligonucleotide
  Antisense strand to SEQ ID NO: 1208256
caugauguuacgaaaucau

SEQ ID NO: 1208258 - RNA, 19 nt, Artificial Sequence
  Description of Artificial Sequence: Synthetic oligonucleotide
  Sense strand starting at position 2829 of SEQ ID NO: 917095
guauccacgcccuauagua

SEQ ID NO: 1208259 - RNA, 19 nt, Artificial Sequence
  Description of Artificial Sequence: Synthetic oligonucleotide
  Antisense strand to SEQ ID NO: 1208258
uacuauagggcguggauac

SEQ ID NO: 1208260 - RNA, 19 nt, Artificial Sequence
  Description of Artificial Sequence: Synthetic oligonucleotide
  Sense strand starting at position 2939 of SEQ ID NO: 917095
cuacauccauguguacaua

SEQ ID NO: 1208261 - RNA, 19 nt, Artificial Sequence
  Description of Artificial Sequence: Synthetic oligonucleotide
  Antisense strand to SEQ ID NO: 1208260
uauguacacauggauguag

SEQ ID NO: 1208262 - RNA, 19 nt, Artificial Sequence
  Description of Artificial Sequence: Synthetic oligonucleotide
  Sense strand starting at position 2951 of SEQ ID NO: 917095
guacauauccuuuagcuca

SEQ ID NO: 1208263 - RNA, 19 nt, Artificial Sequence
  Description of Artificial Sequence: Synthetic oligonucleotide
  Antisense strand to SEQ ID NO: 1208262
ugagcuaaaggauauguac

SEQ ID NO: 1208264 - RNA, 19 nt, Artificial Sequence
  Description of Artificial Sequence: Synthetic oligonucleotide
  Sense strand starting at position 3136 of SEQ ID NO: 917095
cauggacauuuagguuaau

SEQ ID NO: 1208265 - RNA, 19 nt, Artificial Sequence
  Description of Artificial Sequence: Synthetic oligonucleotide
  Antisense strand to SEQ ID NO: 1208264
auuaaccuaaauguccaug

SEQ ID NO: 1208266 - RNA, 19 nt, Artificial Sequence
  Description of Artificial Sequence: Synthetic oligonucleotide
  Sense strand starting at position 3147 of SEQ ID NO: 917095
agguuaauuccauaccugu

SEQ ID NO: 1208267 - RNA, 19 nt, Artificial Sequence
  Description of Artificial Sequence: Synthetic oligonucleotide
  Antisense strand to SEQ ID NO: 1208266
acagguauggaauuaaccu

SEQ ID NO: 1208268 - RNA, 19 nt, Artificial Sequence
  Description of Artificial Sequence: Synthetic oligonucleotide
  Sense strand starting at position 3153 of SEQ ID NO: 917095
auuccauaccugugauauu

SEQ ID NO: 1208269 - RNA, 19 nt, Artificial Sequence
  Description of Artificial Sequence: Synthetic oligonucleotide
  Antisense strand to SEQ ID NO: 1208268
aauaucacagguauggaau

SEQ ID NO: 1208270 - RNA, 19 nt, Artificial Sequence
  Description of Artificial Sequence: Synthetic oligonucleotide
  Sense strand starting at position 3238 of SEQ ID NO: 917095
gguagauacucaguaacag

SEQ ID NO: 1208271 - RNA, 19 nt, Artificial Sequence
  Description of Artificial Sequence: Synthetic oligonucleotide
  Antisense strand to SEQ ID NO: 1208270
cuguuacugaguaucuacc

SEQ ID NO: 1208272 - RNA, 19 nt, Artificial Sequence
  Description of Artificial Sequence: Synthetic oligonucleotide
  Sense strand starting at position 3248 of SEQ ID NO: 917095
caguaacaggauugcuuua

SEQ ID NO: 1208273 - RNA, 19 nt, Artificial Sequence
  Description of Artificial Sequence: Synthetic oligonucleotide
  Antisense strand to SEQ ID NO: 1208272
uaaagcaauccuguuacug

SEQ ID NO: 1208274 - RNA, 19 nt, Artificial Sequence
  Description of Artificial Sequence: Synthetic oligonucleotide
  Sense strand starting at position 3255 of SEQ ID NO: 917095
aggauugcuuuaucaaaug

SEQ ID NO: 1208275 - RNA, 19 nt, Artificial Sequence
  Description of Artificial Sequence: Synthetic oligonucleotide
  Antisense strand to SEQ ID NO: 1208274
cauuugauaaagcaauccu

SEQ ID NO: 1208276 - RNA, 19 nt, Artificial Sequence
  Description of Artificial Sequence: Synthetic oligonucleotide
  Sense strand starting at position 3655 of SEQ ID NO: 917095
gucaccucaguuuaccaaa

SEQ ID NO: 1208277 - RNA, 19 nt, Artificial Sequence
  Description of Artificial Sequence: Synthetic oligonucleotide
  Antisense strand to SEQ ID NO: 1208276
uuugguaaacugaggugac

SEQ ID NO: 1208278 - RNA, 19 nt, Artificial Sequence
  Description of Artificial Sequence: Synthetic oligonucleotide
  Sense strand starting at position 5 of SEQ ID NO: 917096
gaccuacuucuggagucua

SEQ ID NO: 1208279 - RNA, 19 nt, Artificial Sequence
  Description of Artificial Sequence: Synthetic oligonucleotide
  Antisense strand to SEQ ID NO: 1208278
uagacuccagaaguagguc

SEQ ID NO: 1208280 - RNA, 19 nt, Artificial Sequence
  Description of Artificial Sequence: Synthetic oligonucleotide
  Sense strand starting at position 17 of SEQ ID NO: 917096
gagucuacuccguacaguu

SEQ ID NO: 1208281 - RNA, 19 nt, Artificial Sequence
  Description of Artificial Sequence: Synthetic oligonucleotide
  Antisense strand to SEQ ID NO: 1208280
aacuguacggaguagacuc

SEQ ID NO: 1208282 - RNA, 19 nt, Artificial Sequence
  Description of Artificial Sequence: Synthetic oligonucleotide
  Sense strand starting at position 170 of SEQ ID NO: 917096
uggacuauuugggauagga

SEQ ID NO: 1208283 - RNA, 19 nt, Artificial Sequence
  Description of Artificial Sequence: Synthetic oligonucleotide
  Antisense strand to SEQ ID NO: 1208282
uccuaucccaaauagucca

SEQ ID NO: 1208284 - RNA, 19 nt, Artificial Sequence
  Description of Artificial Sequence: Synthetic oligonucleotide
  Sense strand starting at position 211 of SEQ ID NO: 917096
gcuuguuccagacacagga

SEQ ID NO: 1208285 - RNA, 19 nt, Artificial Sequence
  Description of Artificial Sequence: Synthetic oligonucleotide
  Antisense strand to SEQ ID NO: 1208284
uccugugucuggaacaagc

SEQ ID NO: 1208286 - RNA, 19 nt, Artificial Sequence
  Description of Artificial Sequence: Synthetic oligonucleotide
  Sense strand starting at position 244 of SEQ ID NO: 917096
ggacuauauuggcauuuag

SEQ ID NO: 1208287 - RNA, 19 nt, Artificial Sequence
  Description of Artificial Sequence: Synthetic oligonucleotide
  Antisense strand to SEQ ID NO: 1208286
cuaaaugccaauauagucc

SEQ ID NO: 1208288 - RNA, 19 nt, Artificial Sequence
  Description of Artificial Sequence: Synthetic oligonucleotide
  Sense strand starting at position 262 of SEQ ID NO: 917096
gggucuuugugucccaaag

SEQ ID NO: 1208289 - RNA, 19 nt, Artificial Sequence
  Description of Artificial Sequence: Synthetic oligonucleotide
  Antisense strand to SEQ ID NO: 1208288
cuuugggacacaaagaccc

SEQ ID NO: 1208290 - RNA, 19 nt, Artificial Sequence
  Description of Artificial Sequence: Synthetic oligonucleotide
  Sense strand starting at position 357 of SEQ ID NO: 917096
ugaugagcauuaguaggaa

SEQ ID NO: 1208291 - RNA, 19 nt, Artificial Sequence
  Description of Artificial Sequence: Synthetic oligonucleotide
  Antisense strand to SEQ ID NO: 1208290
uuccuacuaaugcucauca

SEQ ID NO: 1208292 - RNA, 19 nt, Artificial Sequence
  Description of Artificial Sequence: Synthetic oligonucleotide
  Sense strand starting at position 661 of SEQ ID NO: 917096
acaaauugucuagguuaca

SEQ ID NO: 1208293 - RNA, 19 nt, Artificial Sequence
  Description of Artificial Sequence: Synthetic oligonucleotide
  Antisense strand to SEQ ID NO: 1208292
uguaaccuagacaauuugu

SEQ ID NO: 1208294 - RNA, 19 nt, Artificial Sequence
  Description of Artificial Sequence: Synthetic oligonucleotide
  Sense strand starting at position 662 of SEQ ID NO: 917096
caaauugucuagguuacag

SEQ ID NO: 1208295 - RNA, 19 nt, Artificial Sequence
  Description of Artificial Sequence: Synthetic oligonucleotide
  Antisense strand to SEQ ID NO: 1208294
cuguaaccuagacaauuug

SEQ ID NO: 1208296 - RNA, 19 nt, Artificial Sequence
  Description of Artificial Sequence: Synthetic oligonucleotide
  Sense strand starting at position 779 of SEQ ID NO: 917096
uccaaagacggguggauau

SEQ ID NO: 1208297 - RNA, 19 nt, Artificial Sequence
  Description of Artificial Sequence: Synthetic oligonucleotide
  Antisense strand to SEQ ID NO: 1208296
auauccacccgucuuugga

SEQ ID NO: 1208298 - RNA, 19 nt, Artificial Sequence
  Description of Artificial Sequence: Synthetic oligonucleotide
  Sense strand starting at position 869 of SEQ ID NO: 917096
gaauucuaucaccagcguu

SEQ ID NO: 1208299 - RNA, 19 nt, Artificial Sequence
  Description of Artificial Sequence: Synthetic oligonucleotide
  Antisense strand to SEQ ID NO: 1208298
aacgcuggugauagaauuc

SEQ ID NO: 1208300 - RNA, 19 nt, Artificial Sequence
  Description of Artificial Sequence: Synthetic oligonucleotide
  Sense strand starting at position 1234 of SEQ ID NO: 917096
cugggagccuucuccugau

SEQ ID NO: 1208301 - RNA, 19 nt, Artificial Sequence
  Description of Artificial Sequence: Synthetic oligonucleotide
  Antisense strand to SEQ ID NO: 1208300
aucaggagaaggcucccag

SEQ ID NO: 1208302 - RNA, 19 nt, Artificial Sequence
  Description of Artificial Sequence: Synthetic oligonucleotide
  Sense strand starting at position 1673 of SEQ ID NO: 917096
gcacuucuggagcgagaca

SEQ ID NO: 1208303 - RNA, 19 nt, Artificial Sequence
  Description of Artificial Sequence: Synthetic oligonucleotide
  Antisense strand to SEQ ID NO: 1208302
ugucucgcuccagaagugc

SEQ ID NO: 1208304 - RNA, 19 nt, Artificial Sequence
  Description of Artificial Sequence: Synthetic oligonucleotide
  Sense strand starting at position 1876 of SEQ ID NO: 917096
aagagcucugcggagagaa

SEQ ID NO: 1208305 - RNA, 19 nt, Artificial Sequence
  Description of Artificial Sequence: Synthetic oligonucleotide
  Antisense strand to SEQ ID NO: 1208304
uucucuccgcagagcucuu

SEQ ID NO: 1208306 - RNA, 19 nt, Artificial Sequence
  Description of Artificial Sequence: Synthetic oligonucleotide
  Sense strand starting at position 1949 of SEQ ID NO: 917096
gggcgcuaauggagaaaga

SEQ ID NO: 1208307 - RNA, 19 nt, Artificial Sequence
  Description of Artificial Sequence: Synthetic oligonucleotide
  Antisense strand to SEQ ID NO: 1208306
ucuuucuccauuagcgccc

SEQ ID NO: 1208308 - RNA, 19 nt, Artificial Sequence
  Description of Artificial Sequence: Synthetic oligonucleotide
  Sense strand starting at position 2032 of SEQ ID NO: 917096
cgagauauucagggcagaa

SEQ ID NO: 1208309 - RNA, 19 nt, Artificial Sequence
  Description of Artificial Sequence: Synthetic oligonucleotide
  Antisense strand to SEQ ID NO: 1208308
uucugcccugaauaucucg

SEQ ID NO: 1208310 - RNA, 19 nt, Artificial Sequence
  Description of Artificial Sequence: Synthetic oligonucleotide
  Sense strand starting at position 2218 of SEQ ID NO: 917096
acgcgacagguucaugaau

SEQ ID NO: 1208311 - RNA, 19 nt, Artificial Sequence
  Description of Artificial Sequence: Synthetic oligonucleotide
  Antisense strand to SEQ ID NO: 1208310
auucaugaaccugucgcgu

SEQ ID NO: 1208312 - RNA, 19 nt, Artificial Sequence
  Description of Artificial Sequence: Synthetic oligonucleotide
  Sense strand starting at position 2258 of SEQ ID NO: 917096
agguguggguucuucagau

SEQ ID NO: 1208313 - RNA, 19 nt, Artificial Sequence
  Description of Artificial Sequence: Synthetic oligonucleotide
  Antisense strand to SEQ ID NO: 1208312
aucugaagaacccacaccu

SEQ ID NO: 1208314 - RNA, 19 nt, Artificial Sequence
  Description of Artificial Sequence: Synthetic oligonucleotide
  Sense strand starting at position 2306 of SEQ ID NO: 917096
uguugaauaagcugaugua

SEQ ID NO: 1208315 - RNA, 19 nt, Artificial Sequence
  Description of Artificial Sequence: Synthetic oligonucleotide
  Antisense strand to SEQ ID NO: 1208314
uacaucagcuuauucaaca

SEQ ID NO: 1208316 - RNA, 19 nt, Artificial Sequence
  Description of Artificial Sequence: Synthetic oligonucleotide
  Sense strand starting at position 2313 of SEQ ID NO: 917096
uaagcugauguaggaaauu

SEQ ID NO: 1208317 - RNA, 19 nt, Artificial Sequence
  Description of Artificial Sequence: Synthetic oligonucleotide
  Antisense strand to SEQ ID NO: 1208316
aauuuccuacaucagcuua

SEQ ID NO: 1208318 - RNA, 19 nt, Artificial Sequence
  Description of Artificial Sequence: Synthetic oligonucleotide
  Sense strand starting at position 2360 of SEQ ID NO: 917096
augucucaaugcuuugaau

SEQ ID NO: 1208319 - RNA, 19 nt, Artificial Sequence
  Description of Artificial Sequence: Synthetic oligonucleotide
  Antisense strand to SEQ ID NO: 1208318
auucaaagcauugagacau

SEQ ID NO: 1208320 - RNA, 19 nt, Artificial Sequence
  Description of Artificial Sequence: Synthetic oligonucleotide
  Sense strand starting at position 2362 of SEQ ID NO: 917096
gucucaaugcuuugaauau

SEQ ID NO: 1208321 - RNA, 19 nt, Artificial Sequence
  Description of Artificial Sequence: Synthetic oligonucleotide
  Antisense strand to SEQ ID NO: 1208320
auauucaaagcauugagac

SEQ ID NO: 1208322 - RNA, 19 nt, Artificial Sequence
  Description of Artificial Sequence: Synthetic oligonucleotide
  Sense strand starting at position 2665 of SEQ ID NO: 917096
aguuaaguggucuguaaac

SEQ ID NO: 1208323 - RNA, 19 nt, Artificial Sequence
  Description of Artificial Sequence: Synthetic oligonucleotide
  Antisense strand to SEQ ID NO: 1208322
guuuacagaccacuuaacu

SEQ ID NO: 1208324 - RNA, 19 nt, Artificial Sequence
  Description of Artificial Sequence: Synthetic oligonucleotide
  Sense strand starting at position 2667 of SEQ ID NO: 917096
uuaaguggucuguaaacuc

SEQ ID NO: 1208325 - RNA, 19 nt, Artificial Sequence
  Description of Artificial Sequence: Synthetic oligonucleotide
  Antisense strand to SEQ ID NO: 1208324
gaguuuacagaccacuuaa

SEQ ID NO: 1208326 - RNA, 19 nt, Artificial Sequence
  Description of Artificial Sequence: Synthetic oligonucleotide
  Sense strand starting at position 2682 of SEQ ID NO: 917096
acucuuguuguauaaauga

SEQ ID NO: 1208327 - RNA, 19 nt, Artificial Sequence
  Description of Artificial Sequence: Synthetic oligonucleotide
  Antisense strand to SEQ ID NO: 1208326
ucauuuauacaacaagagu

SEQ ID NO: 1208328 - RNA, 19 nt, Artificial Sequence
  Description of Artificial Sequence: Synthetic oligonucleotide
  Sense strand starting at position 2739 of SEQ ID NO: 917096
uaggaagccuugccugauu

SEQ ID NO: 1208329 - RNA, 19 nt, Artificial Sequence
  Description of Artificial Sequence: Synthetic oligonucleotide
  Antisense strand to SEQ ID NO: 1208328
aaucaggcaaggcuuccua

SEQ ID NO: 1208330 - RNA, 19 nt, Artificial Sequence
  Description of Artificial Sequence: Synthetic oligonucleotide
  Sense strand starting at position 2750 of SEQ ID NO: 917096
gccugauugcuccaaccug

SEQ ID NO: 1208331 - RNA, 19 nt, Artificial Sequence
  Description of Artificial Sequence: Synthetic oligonucleotide
  Antisense strand to SEQ ID NO: 1208330
cagguuggagcaaucaggc

SEQ ID NO: 1208332 - RNA, 19 nt, Artificial Sequence
  Description of Artificial Sequence: Synthetic oligonucleotide
  Sense strand starting at position 2766 of SEQ ID NO: 917096
cuguaauggucccucugaa

SEQ ID NO: 1208333 - RNA, 19 nt, Artificial Sequence
  Description of Artificial Sequence: Synthetic oligonucleotide
  Antisense strand to SEQ ID NO: 1208332
uucagagggaccauuacag

SEQ ID NO: 1208334 - RNA, 19 nt, Artificial Sequence
  Description of Artificial Sequence: Synthetic oligonucleotide
  Sense strand starting at position 2855 of SEQ ID NO: 917096
auugucaguuccucaugga

SEQ ID NO: 1208335 - RNA, 19 nt, Artificial Sequence
  Description of Artificial Sequence: Synthetic oligonucleotide
  Antisense strand to SEQ ID NO: 1208334
uccaugaggaacugacaau

SEQ ID NO: 1208336 - RNA, 19 nt, Artificial Sequence
  Description of Artificial Sequence: Synthetic oligonucleotide
  Sense strand starting at position 2856 of SEQ ID NO: 917096
uugucaguuccucauggaa

SEQ ID NO: 1208337 - RNA, 19 nt, Artificial Sequence
  Description of Artificial Sequence: Synthetic oligonucleotide
  Antisense strand to SEQ ID NO: 1208336
uuccaugaggaacugacaa

SEQ ID NO: 1208338 - RNA, 19 nt, Artificial Sequence
  Description of Artificial Sequence: Synthetic oligonucleotide
  Sense strand starting at position 2887 of SEQ ID NO: 917096
cuuugcugagcauauagua

SEQ ID NO: 1208339 - RNA, 19 nt, Artificial Sequence
  Description of Artificial Sequence: Synthetic oligonucleotide
  Antisense strand to SEQ ID NO: 1208338
uacuauaugcucagcaaag

SEQ ID NO: 1208340 - RNA, 19 nt, Artificial Sequence
  Description of Artificial Sequence: Synthetic oligonucleotide
  Sense strand starting at position 2910 of SEQ ID NO: 917096
cugaauauguuguuugaac

SEQ ID NO: 1208341 - RNA, 19 nt, Artificial Sequence
  Description of Artificial Sequence: Synthetic oligonucleotide
  Antisense strand to SEQ ID NO: 1208340
guucaaacaacauauucag

SEQ ID NO: 1208342 - RNA, 19 nt, Artificial Sequence
  Description of Artificial Sequence: Synthetic oligonucleotide
  Sense strand starting at position 2911 of SEQ ID NO: 917096
ugaauauguuguuugaaca

SEQ ID NO: 1208343 - RNA, 19 nt, Artificial Sequence
  Description of Artificial Sequence: Synthetic oligonucleotide
  Antisense strand to SEQ ID NO: 1208342
uguucaaacaacauauuca

SEQ ID NO: 1208344 - RNA, 19 nt, Artificial Sequence
  Description of Artificial Sequence: Synthetic oligonucleotide
  Sense strand starting at position 2912 of SEQ ID NO: 917096
gaauauguuguuugaacaa

SEQ ID NO: 1208345 - RNA, 19 nt, Artificial Sequence
  Description of Artificial Sequence: Synthetic oligonucleotide
  Antisense strand to SEQ ID NO: 1208344
uuguucaaacaacauauuc

SEQ ID NO: 1208346 - RNA, 19 nt, Artificial Sequence
  Description of Artificial Sequence: Synthetic oligonucleotide
  Sense strand starting at position 3565 of SEQ ID NO: 917096
agucucuguugacugagua

SEQ ID NO: 1208347 - RNA, 19 nt, Artificial Sequence
  Description of Artificial Sequence: Synthetic oligonucleotide
  Antisense strand to SEQ ID NO: 1208346
uacucagucaacagagacu

SEQ ID NO: 1208348 - RNA, 19 nt, Artificial Sequence
  Description of Artificial Sequence: Synthetic oligonucleotide
  Sense strand starting at position 3569 of SEQ ID NO: 917096
ucuguugacugaguagcaa

SEQ ID NO: 1208349 - RNA, 19 nt, Artificial Sequence
  Description of Artificial Sequence: Synthetic oligonucleotide
  Antisense strand to SEQ ID NO: 1208348
uugcuacucagucaacaga

SEQ ID NO: 1208350 - RNA, 19 nt, Artificial Sequence
  Description of Artificial Sequence: Synthetic oligonucleotide
  Sense strand starting at position 3636 of SEQ ID NO: 917096
ugcuguguggguuagagau

SEQ ID NO: 1208351 - RNA, 19 nt, Artificial Sequence
  Description of Artificial Sequence: Synthetic oligonucleotide
  Antisense strand to SEQ ID NO: 1208350
aucucuaacccacacagca

SEQ ID NO: 1208352 - RNA, 19 nt, Artificial Sequence
  Description of Artificial Sequence: Synthetic oligonucleotide
  Sense strand starting at position 3643 of SEQ ID NO: 917096
uggguuagagauugcugau

SEQ ID NO: 1208353 - RNA, 19 nt, Artificial Sequence
  Description of Artificial Sequence: Synthetic oligonucleotide
  Antisense strand to SEQ ID NO: 1208352
aucagcaaucucuaaccca

SEQ ID NO: 1208354 - RNA, 19 nt, Artificial Sequence
  Description of Artificial Sequence: Synthetic oligonucleotide
  Sense strand starting at position 3685 of SEQ ID NO: 917096
cugguauugaaagguggga

SEQ ID NO: 1208355 - RNA, 19 nt, Artificial Sequence
  Description of Artificial Sequence: Synthetic oligonucleotide
  Antisense strand to SEQ ID NO: 1208354
ucccaccuuucaauaccag

SEQ ID NO: 1208356 - RNA, 19 nt, Artificial Sequence
  Description of Artificial Sequence: Synthetic oligonucleotide
  Sense strand starting at position 3826 of SEQ ID NO: 917096
gaaggaaguuucccagcua

SEQ ID NO: 1208357 - RNA, 19 nt, Artificial Sequence
  Description of Artificial Sequence: Synthetic oligonucleotide
  Antisense strand to SEQ ID NO: 1208356
uagcugggaaacuuccuuc

SEQ ID NO: 1208358 - RNA, 19 nt, Artificial Sequence
  Description of Artificial Sequence: Synthetic oligonucleotide
  Sense strand starting at position 127 of SEQ ID NO: 917097
cugggaucauaaguucuga

SEQ ID NO: 1208359 - RNA, 19 nt, Artificial Sequence
  Description of Artificial Sequence: Synthetic oligonucleotide
  Antisense strand to SEQ ID NO: 1208358
ucagaacuuaugaucccag

SEQ ID NO: 1208360 - RNA, 19 nt, Artificial Sequence
  Description of Artificial Sequence: Synthetic oligonucleotide
  Sense strand starting at position 202 of SEQ ID NO: 917097
gaccuacuucuggagucua

SEQ ID NO: 1208361 - RNA, 19 nt, Artificial Sequence
  Description of Artificial Sequence: Synthetic oligonucleotide
  Antisense strand to SEQ ID NO: 1208360
uagacuccagaaguagguc

SEQ ID NO: 1208362 - RNA, 19 nt, Artificial Sequence
  Description of Artificial Sequence: Synthetic oligonucleotide
  Sense strand starting at position 214 of SEQ ID NO: 917097
gagucuacuccguacaguu

SEQ ID NO: 1208363 - RNA, 19 nt, Artificial Sequence
  Description of Artificial Sequence: Synthetic oligonucleotide
  Antisense strand to SEQ ID NO: 1208362
aacuguacggaguagacuc

SEQ ID NO: 1208364 - RNA, 19 nt, Artificial Sequence
  Description of Artificial Sequence: Synthetic oligonucleotide
  Sense strand starting at position 367 of SEQ ID NO: 917097
uggacuauuugggauagga

SEQ ID NO: 1208365 - RNA, 19 nt, Artificial Sequence
  Description of Artificial Sequence: Synthetic oligonucleotide
  Antisense strand to SEQ ID NO: 1208364
uccuaucccaaauagucca

SEQ ID NO: 1208366 - RNA, 19 nt, Artificial Sequence
  Description of Artificial Sequence: Synthetic oligonucleotide
  Sense strand starting at position 408 of SEQ ID NO: 917097
gcuuguuccagacacagga

SEQ ID NO: 1208367 - RNA, 19 nt, Artificial Sequence
  Description of Artificial Sequence: Synthetic oligonucleotide
  Antisense strand to SEQ ID NO: 1208366
uccugugucuggaacaagc

SEQ ID NO: 1208368 - RNA, 19 nt, Artificial Sequence
  Description of Artificial Sequence: Synthetic oligonucleotide
  Sense strand starting at position 441 of SEQ ID NO: 917097
ggacuauauuggcauuuag

SEQ ID NO: 1208369 - RNA, 19 nt, Artificial Sequence
  Description of Artificial Sequence: Synthetic oligonucleotide
  Antisense strand to SEQ ID NO: 1208368
cuaaaugccaauauagucc

SEQ ID NO: 1208370 - RNA, 19 nt, Artificial Sequence
  Description of Artificial Sequence: Synthetic oligonucleotide
  Sense strand starting at position 459 of SEQ ID NO: 917097
gggucuuugugucccaaag

SEQ ID NO: 1208371 - RNA, 19 nt, Artificial Sequence
  Description of Artificial Sequence: Synthetic oligonucleotide
  Antisense strand to SEQ ID NO: 1208370
cuuugggacacaaagaccc

SEQ ID NO: 1208372 - RNA, 19 nt, Artificial Sequence
  Description of Artificial Sequence: Synthetic oligonucleotide
  Sense strand starting at position 554 of SEQ ID NO: 917097
ugaugagcauuaguaggaa

SEQ ID NO: 1208373 - RNA, 19 nt, Artificial Sequence
  Description of Artificial Sequence: Synthetic oligonucleotide
  Antisense strand to SEQ ID NO: 1208372
uuccuacuaaugcucauca

SEQ ID NO: 1208374 - RNA, 19 nt, Artificial Sequence
  Description of Artificial Sequence: Synthetic oligonucleotide
  Sense strand starting at position 858 of SEQ ID NO: 917097
acaaauugucuagguuaca

SEQ ID NO: 1208375 - RNA, 19 nt, Artificial Sequence
  Description of Artificial Sequence: Synthetic oligonucleotide
  Antisense strand to SEQ ID NO: 1208374
uguaaccuagacaauuugu

SEQ ID NO: 1208376 - RNA, 19 nt, Artificial Sequence
  Description of Artificial Sequence: Synthetic oligonucleotide
  Sense strand starting at position 859 of SEQ ID NO: 917097
caaauugucuagguuacag

SEQ ID NO: 1208377 - RNA, 19 nt, Artificial Sequence
  Description of Artificial Sequence: Synthetic oligonucleotide
  Antisense strand to SEQ ID NO: 1208376
cuguaaccuagacaauuug

SEQ ID NO: 1208378 - RNA, 19 nt, Artificial Sequence
  Description of Artificial Sequence: Synthetic oligonucleotide
  Sense strand starting at position 976 of SEQ ID NO: 917097
uccaaagacggguggauau

SEQ ID NO: 1208379 - RNA, 19 nt, Artificial Sequence
  Description of Artificial Sequence: Synthetic oligonucleotide
  Antisense strand to SEQ ID NO: 1208378
auauccacccgucuuugga

SEQ ID NO: 1208380 - RNA, 19 nt, Artificial Sequence
  Description of Artificial Sequence: Synthetic oligonucleotide
  Sense strand starting at position 1066 of SEQ ID NO: 917097
gaauucuaucaccagcguu

SEQ ID NO: 1208381 - RNA, 19 nt, Artificial Sequence
  Description of Artificial Sequence: Synthetic oligonucleotide
  Antisense strand to SEQ ID NO: 1208380
aacgcuggugauagaauuc

SEQ ID NO: 1208382 - RNA, 19 nt, Artificial Sequence
  Description of Artificial Sequence: Synthetic oligonucleotide
  Sense strand starting at position 1431 of SEQ ID NO: 917097
cugggagccuucuccugau

SEQ ID NO: 1208383 - RNA, 19 nt, Artificial Sequence
  Description of Artificial Sequence: Synthetic oligonucleotide
  Antisense strand to SEQ ID NO: 1208382
aucaggagaaggcucccag

SEQ ID NO: 1208384 - RNA, 19 nt, Artificial Sequence
  Description of Artificial Sequence: Synthetic oligonucleotide
  Sense strand starting at position 1870 of SEQ ID NO: 917097
gcacuucuggagcgagaca

SEQ ID NO: 1208385 - RNA, 19 nt, Artificial Sequence
  Description of Artificial Sequence: Synthetic oligonucleotide
  Antisense strand to SEQ ID NO: 1208384
ugucucgcuccagaagugc

SEQ ID NO: 1208386 - RNA, 19 nt, Artificial Sequence
  Description of Artificial Sequence: Synthetic oligonucleotide
  Sense strand starting at position 2073 of SEQ ID NO: 917097
aagagcucugcggagagaa

SEQ ID NO: 1208387 - RNA, 19 nt, Artificial Sequence
  Description of Artificial Sequence: Synthetic oligonucleotide
  Antisense strand to SEQ ID NO: 1208386
uucucuccgcagagcucuu

SEQ ID NO: 1208388 - RNA, 19 nt, Artificial Sequence
  Description of Artificial Sequence: Synthetic oligonucleotide
  Sense strand starting at position 2146 of SEQ ID NO: 917097
gggcgcuaauggagaaaga

SEQ ID NO: 1208389 - RNA, 19 nt, Artificial Sequence
  Description of Artificial Sequence: Synthetic oligonucleotide
  Antisense strand to SEQ ID NO: 1208388
ucuuucuccauuagcgccc

SEQ ID NO: 1208390 - RNA, 19 nt, Artificial Sequence
  Description of Artificial Sequence: Synthetic oligonucleotide
  Sense strand starting at position 2229 of SEQ ID NO: 917097
cgagauauucagggcagaa

SEQ ID NO: 1208391 - RNA, 19 nt, Artificial Sequence
  Description of Artificial Sequence: Synthetic oligonucleotide
  Antisense strand to SEQ ID NO: 1208390
uucugcccugaauaucucg

SEQ ID NO: 1208392 - RNA, 19 nt, Artificial Sequence
  Description of Artificial Sequence: Synthetic oligonucleotide
  Sense strand starting at position 2415 of SEQ ID NO: 917097
acgcgacagguucaugaau

SEQ ID NO: 1208393 - RNA, 19 nt, Artificial Sequence
  Description of Artificial Sequence: Synthetic oligonucleotide
  Antisense strand to SEQ ID NO: 1208392
auucaugaaccugucgcgu

SEQ ID NO: 1208394 - RNA, 19 nt, Artificial Sequence
  Description of Artificial Sequence: Synthetic oligonucleotide
  Sense strand starting at position 2455 of SEQ ID NO: 917097
agguguggguucuucagau

SEQ ID NO: 1208395 - RNA, 19 nt, Artificial Sequence
  Description of Artificial Sequence: Synthetic oligonucleotide
  Antisense strand to SEQ ID NO: 1208394
aucugaagaacccacaccu

SEQ ID NO: 1208396 - RNA, 19 nt, Artificial Sequence
  Description of Artificial Sequence: Synthetic oligonucleotide
  Sense strand starting at position 2503 of SEQ ID NO: 917097
uguugaauaagcugaugua

SEQ ID NO: 1208397 - RNA, 19 nt, Artificial Sequence
  Description of Artificial Sequence: Synthetic oligonucleotide
  Antisense strand to SEQ ID NO: 1208396
uacaucagcuuauucaaca

SEQ ID NO: 1208398 - RNA, 19 nt, Artificial Sequence
  Description of Artificial Sequence: Synthetic oligonucleotide
  Sense strand starting at position 2510 of SEQ ID NO: 917097
uaagcugauguaggaaauu

SEQ ID NO: 1208399 - RNA, 19 nt, Artificial Sequence
  Description of Artificial Sequence: Synthetic oligonucleotide
  Antisense strand to SEQ ID NO: 1208398
aauuuccuacaucagcuua

SEQ ID NO: 1208400 - RNA, 19 nt, Artificial Sequence
  Description of Artificial Sequence: Synthetic oligonucleotide
  Sense strand starting at position 2557 of SEQ ID NO: 917097
augucucaaugcuuugaau

SEQ ID NO: 1208401 - RNA, 19 nt, Artificial Sequence
  Description of Artificial Sequence: Synthetic oligonucleotide
  Antisense strand to SEQ ID NO: 1208400
auucaaagcauugagacau

SEQ ID NO: 1208402 - RNA, 19 nt, Artificial Sequence
  Description of Artificial Sequence: Synthetic oligonucleotide
  Sense strand starting at position 2559 of SEQ ID NO: 917097
gucucaaugcuuugaauau

SEQ ID NO: 1208403 - RNA, 19 nt, Artificial Sequence
  Description of Artificial Sequence: Synthetic oligonucleotide
  Antisense strand to SEQ ID NO: 1208402
auauucaaagcauugagac

SEQ ID NO: 1208404 - RNA, 19 nt, Artificial Sequence
  Description of Artificial Sequence: Synthetic oligonucleotide
  Sense strand starting at position 2862 of SEQ ID NO: 917097
aguuaaguggucuguaaac

SEQ ID NO: 1208405 - RNA, 19 nt, Artificial Sequence
  Description of Artificial Sequence: Synthetic oligonucleotide
  Antisense strand to SEQ ID NO: 1208404
guuuacagaccacuuaacu

SEQ ID NO: 1208406 - RNA, 19 nt, Artificial Sequence
  Description of Artificial Sequence: Synthetic oligonucleotide
  Sense strand starting at position 2864 of SEQ ID NO: 917097
uuaaguggucuguaaacuc

SEQ ID NO: 1208407 - RNA, 19 nt, Artificial Sequence
  Description of Artificial Sequence: Synthetic oligonucleotide
  Antisense strand to SEQ ID NO: 1208406
gaguuuacagaccacuuaa

SEQ ID NO: 1208408 - RNA, 19 nt, Artificial Sequence
  Description of Artificial Sequence: Synthetic oligonucleotide
  Sense strand starting at position 2879 of SEQ ID NO: 917097
acucuuguuguauaaauga

SEQ ID NO: 1208409 - RNA, 19 nt, Artificial Sequence
  Description of Artificial Sequence: Synthetic oligonucleotide
  Antisense strand to SEQ ID NO: 1208408
ucauuuauacaacaagagu

SEQ ID NO: 1208410 - RNA, 19 nt, Artificial Sequence
  Description of Artificial Sequence: Synthetic oligonucleotide
  Sense strand starting at position 2936 of SEQ ID NO: 917097
uaggaagccuugccugauu

SEQ ID NO: 1208411 - RNA, 19 nt, Artificial Sequence
  Description of Artificial Sequence: Synthetic oligonucleotide
  Antisense strand to SEQ ID NO: 1208410
aaucaggcaaggcuuccua

SEQ ID NO: 1208412 - RNA, 19 nt, Artificial Sequence
  Description of Artificial Sequence: Synthetic oligonucleotide
  Sense strand starting at position 2947 of SEQ ID NO: 917097
gccugauugcuccaaccug

SEQ ID NO: 1208413 - RNA, 19 nt, Artificial Sequence
  Description of Artificial Sequence: Synthetic oligonucleotide
  Antisense strand to SEQ ID NO: 1208412
cagguuggagcaaucaggc

SEQ ID NO: 1208414 - RNA, 19 nt, Artificial Sequence
  Description of Artificial Sequence: Synthetic oligonucleotide
  Sense strand starting at position 2963 of SEQ ID NO: 917097
cuguaauggucccucugaa

SEQ ID NO: 1208415 - RNA, 19 nt, Artificial Sequence
  Description of Artificial Sequence: Synthetic oligonucleotide
  Antisense strand to SEQ ID NO: 1208414
uucagagggaccauuacag

SEQ ID NO: 1208416 - RNA, 19 nt, Artificial Sequence
  Description of Artificial Sequence: Synthetic oligonucleotide
  Sense strand starting at position 3052 of SEQ ID NO: 917097
auugucaguuccucaugga

SEQ ID NO: 1208417 - RNA, 19 nt, Artificial Sequence
  Description of Artificial Sequence: Synthetic oligonucleotide
  Antisense strand to SEQ ID NO: 1208416
uccaugaggaacugacaau

SEQ ID NO: 1208418 - RNA, 19 nt, Artificial Sequence
  Description of Artificial Sequence: Synthetic oligonucleotide
  Sense strand starting at position 3053 of SEQ ID NO: 917097
uugucaguuccucauggaa

SEQ ID NO: 1208419 - RNA, 19 nt, Artificial Sequence
  Description of Artificial Sequence: Synthetic oligonucleotide
  Antisense strand to SEQ ID NO: 1208418
uuccaugaggaacugacaa

SEQ ID NO: 1208420 - RNA, 19 nt, Artificial Sequence
  Description of Artificial Sequence: Synthetic oligonucleotide
  Sense strand starting at position 3084 of SEQ ID NO: 917097
cuuugcugagcauauagua

SEQ ID NO: 1208421 - RNA, 19 nt, Artificial Sequence
  Description of Artificial Sequence: Synthetic oligonucleotide
  Antisense strand to SEQ ID NO: 1208420
uacuauaugcucagcaaag

SEQ ID NO: 1208422 - RNA, 19 nt, Artificial Sequence
  Description of Artificial Sequence: Synthetic oligonucleotide
  Sense strand starting at position 3107 of SEQ ID NO: 917097
cugaauauguuguuugaac

SEQ ID NO: 1208423 - RNA, 19 nt, Artificial Sequence
  Description of Artificial Sequence: Synthetic oligonucleotide
  Antisense strand to SEQ ID NO: 1208422
guucaaacaacauauucag

SEQ ID NO: 1208424 - RNA, 19 nt, Artificial Sequence
  Description of Artificial Sequence: Synthetic oligonucleotide
  Sense strand starting at position 3108 of SEQ ID NO: 917097
ugaauauguuguuugaaca

SEQ ID NO: 1208425 - RNA, 19 nt, Artificial Sequence
  Description of Artificial Sequence: Synthetic oligonucleotide
  Antisense strand to SEQ ID NO: 1208424
uguucaaacaacauauuca

SEQ ID NO: 1208426 - RNA, 19 nt, Artificial Sequence
  Description of Artificial Sequence: Synthetic oligonucleotide
  Sense strand starting at position 3109 of SEQ ID NO: 917097
gaauauguuguuugaacaa

SEQ ID NO: 1208427 - RNA, 19 nt, Artificial Sequence
  Description of Artificial Sequence: Synthetic oligonucleotide
  Antisense strand to SEQ ID NO: 1208426
uuguucaaacaacauauuc

SEQ ID NO: 1208428 - RNA, 19 nt, Artificial Sequence
  Description of Artificial Sequence: Synthetic oligonucleotide
  Sense strand starting at position 3762 of SEQ ID NO: 917097
agucucuguugacugagua

SEQ ID NO: 1208429 - RNA, 19 nt, Artificial Sequence
  Description of Artificial Sequence: Synthetic oligonucleotide
  Antisense strand to SEQ ID NO: 1208428
uacucagucaacagagacu

SEQ ID NO: 1208430 - RNA, 19 nt, Artificial Sequence
  Description of Artificial Sequence: Synthetic oligonucleotide
  Sense strand starting at position 3766 of SEQ ID NO: 917097
ucuguugacugaguagcaa

SEQ ID NO: 1208431 - RNA, 19 nt, Artificial Sequence
  Description of Artificial Sequence: Synthetic oligonucleotide
  Antisense strand to SEQ ID NO: 1208430
uugcuacucagucaacaga

SEQ ID NO: 1208432 - RNA, 19 nt, Artificial Sequence
  Description of Artificial Sequence: Synthetic oligonucleotide
  Sense strand starting at position 3833 of SEQ ID NO: 917097
ugcuguguggguuagagau

SEQ ID NO: 1208433 - RNA, 19 nt, Artificial Sequence
  Description of Artificial Sequence: Synthetic oligonucleotide
  Antisense strand to SEQ ID NO: 1208432
aucucuaacccacacagca

SEQ ID NO: 1208434 - RNA, 19 nt, Artificial Sequence
  Description of Artificial Sequence: Synthetic oligonucleotide
  Sense strand starting at position 3840 of SEQ ID NO: 917097
uggguuagagauugcugau

SEQ ID NO: 1208435 - RNA, 19 nt, Artificial Sequence
  Description of Artificial Sequence: Synthetic oligonucleotide
  Antisense strand to SEQ ID NO: 1208434
aucagcaaucucuaaccca

SEQ ID NO: 1208436 - RNA, 19 nt, Artificial Sequence
  Description of Artificial Sequence: Synthetic oligonucleotide
  Sense strand starting at position 3882 of SEQ ID NO: 917097
cugguauugaaagguggga

SEQ ID NO: 1208437 - RNA, 19 nt, Artificial Sequence
  Description of Artificial Sequence: Synthetic oligonucleotide
  Antisense strand to SEQ ID NO: 1208436
ucccaccuuucaauaccag

SEQ ID NO: 1208438 - RNA, 19 nt, Artificial Sequence
  Description of Artificial Sequence: Synthetic oligonucleotide
  Sense strand starting at position 240 of SEQ ID NO: 917098
gaauuauuccuguggcugg

SEQ ID NO: 1208439 - RNA, 19 nt, Artificial Sequence
  Description of Artificial Sequence: Synthetic oligonucleotide
  Antisense strand to SEQ ID NO: 1208438
ccagccacaggaauaauuc

SEQ ID NO: 1208440 - RNA, 19 nt, Artificial Sequence
  Description of Artificial Sequence: Synthetic oligonucleotide
  Sense strand starting at position 327 of SEQ ID NO: 917098
cggcuuaugccagccuauu

SEQ ID NO: 1208441 - RNA, 19 nt, Artificial Sequence
  Description of Artificial Sequence: Synthetic oligonucleotide
  Antisense strand to SEQ ID NO: 1208440
aauaggcuggcauaagccg

SEQ ID NO: 1208442 - RNA, 19 nt, Artificial Sequence
  Description of Artificial Sequence: Synthetic oligonucleotide
  Sense strand starting at position 338 of SEQ ID NO: 917098
agccuauucugggcaagca

SEQ ID NO: 1208443 - RNA, 19 nt, Artificial Sequence
  Description of Artificial Sequence: Synthetic oligonucleotide
  Antisense strand to SEQ ID NO: 1208442
ugcuugcccagaauaggcu

SEQ ID NO: 1208444 - RNA, 19 nt, Artificial Sequence
  Description of Artificial Sequence: Synthetic oligonucleotide
  Sense strand starting at position 339 of SEQ ID NO: 917098
gccuauucugggcaagcau

SEQ ID NO: 1208445 - RNA, 19 nt, Artificial Sequence
  Description of Artificial Sequence: Synthetic oligonucleotide
  Antisense strand to SEQ ID NO: 1208444
augcuugcccagaauaggc

SEQ ID NO: 1208446 - RNA, 19 nt, Artificial Sequence
  Description of Artificial Sequence: Synthetic oligonucleotide
  Sense strand starting at position 416 of SEQ ID NO: 917098
ggaggaauguggguccugu

SEQ ID NO: 1208447 - RNA, 19 nt, Artificial Sequence
  Description of Artificial Sequence: Synthetic oligonucleotide
  Antisense strand to SEQ ID NO: 1208446
acaggacccacauuccucc

SEQ ID NO: 1208448 - RNA, 19 nt, Artificial Sequence
  Description of Artificial Sequence: Synthetic oligonucleotide
  Sense strand starting at position 477 of SEQ ID NO: 917098
cuagcaucagggugguauu

SEQ ID NO: 1208449 - RNA, 19 nt, Artificial Sequence
  Description of Artificial Sequence: Synthetic oligonucleotide
  Antisense strand to SEQ ID NO: 1208448
aauaccacccugaugcuag

SEQ ID NO: 1208450 - RNA, 19 nt, Artificial Sequence
  Description of Artificial Sequence: Synthetic oligonucleotide
  Sense strand starting at position 496 of SEQ ID NO: 917098
cauagaaggguggguaaua

SEQ ID NO: 1208451 - RNA, 19 nt, Artificial Sequence
  Description of Artificial Sequence: Synthetic oligonucleotide
  Antisense strand to SEQ ID NO: 1208450
uauuacccacccuucuaug

SEQ ID NO: 1208452 - RNA, 19 nt, Artificial Sequence
  Description of Artificial Sequence: Synthetic oligonucleotide
  Sense strand starting at position 526 of SEQ ID NO: 917098
uggagaggcucuugagaag

SEQ ID NO: 1208453 - RNA, 19 nt, Artificial Sequence
  Description of Artificial Sequence: Synthetic oligonucleotide
  Antisense strand to SEQ ID NO: 1208452
cuucucaagagccucucca

SEQ ID NO: 1208454 - RNA, 19 nt, Artificial Sequence
  Description of Artificial Sequence: Synthetic oligonucleotide
  Sense strand starting at position 711 of SEQ ID NO: 917098
agggauaggcggugaaaug

SEQ ID NO: 1208455 - RNA, 19 nt, Artificial Sequence
  Description of Artificial Sequence: Synthetic oligonucleotide
  Antisense strand to SEQ ID NO: 1208454
cauuucaccgccuaucccu

SEQ ID NO: 1208456 - RNA, 19 nt, Artificial Sequence
  Description of Artificial Sequence: Synthetic oligonucleotide
  Sense strand starting at position 1615 of SEQ ID NO: 917098
ccucucguagacugguaua

SEQ ID NO: 1208457 - RNA, 19 nt, Artificial Sequence
  Description of Artificial Sequence: Synthetic oligonucleotide
  Antisense strand to SEQ ID NO: 1208456
uauaccagucuacgagagg

SEQ ID NO: 1208458 - RNA, 19 nt, Artificial Sequence
  Description of Artificial Sequence: Synthetic oligonucleotide
  Sense strand starting at position 1620 of SEQ ID NO: 917098
cguagacugguauauaaua

SEQ ID NO: 1208459 - RNA, 19 nt, Artificial Sequence
  Description of Artificial Sequence: Synthetic oligonucleotide
  Antisense strand to SEQ ID NO: 1208458
uauuauauaccagucuacg

SEQ ID NO: 1208460 - RNA, 19 nt, Artificial Sequence
  Description of Artificial Sequence: Synthetic oligonucleotide
  Sense strand starting at position 1651 of SEQ ID NO: 917098
augaauacgcaauguucua

SEQ ID NO: 1208461 - RNA, 19 nt, Artificial Sequence
  Description of Artificial Sequence: Synthetic oligonucleotide
  Antisense strand to SEQ ID NO: 1208460
uagaacauugcguauucau

SEQ ID NO: 1208462 - RNA, 19 nt, Artificial Sequence
  Description of Artificial Sequence: Synthetic oligonucleotide
  Sense strand starting at position 2364 of SEQ ID NO: 917098
gugccuaaguacucuggga

SEQ ID NO: 1208463 - RNA, 19 nt, Artificial Sequence
  Description of Artificial Sequence: Synthetic oligonucleotide
  Antisense strand to SEQ ID NO: 1208462
ucccagaguacuuaggcac

SEQ ID NO: 1208464 - RNA, 19 nt, Artificial Sequence
  Description of Artificial Sequence: Synthetic oligonucleotide
  Sense strand starting at position 2412 of SEQ ID NO: 917098
cuagguucccuccagagua

SEQ ID NO: 1208465 - RNA, 19 nt, Artificial Sequence
  Description of Artificial Sequence: Synthetic oligonucleotide
  Antisense strand to SEQ ID NO: 1208464
uacucuggagggaaccuag

SEQ ID NO: 1208466 - RNA, 19 nt, Artificial Sequence
  Description of Artificial Sequence: Synthetic oligonucleotide
  Sense strand starting at position 2414 of SEQ ID NO: 917098
agguucccuccagaguaau

SEQ ID NO: 1208467 - RNA, 19 nt, Artificial Sequence
  Description of Artificial Sequence: Synthetic oligonucleotide
  Antisense strand to SEQ ID NO: 1208466
auuacucuggagggaaccu

SEQ ID NO: 1208468 - RNA, 19 nt, Artificial Sequence
  Description of Artificial Sequence: Synthetic oligonucleotide
  Sense strand starting at position 2463 of SEQ ID NO: 917098
agaaauuguauggguccua

SEQ ID NO: 1208469 - RNA, 19 nt, Artificial Sequence
  Description of Artificial Sequence: Synthetic oligonucleotide
  Antisense strand to SEQ ID NO: 1208468
uaggacccauacaauuucu

SEQ ID NO: 1208470 - RNA, 19 nt, Artificial Sequence
  Description of Artificial Sequence: Synthetic oligonucleotide
  Sense strand starting at position 2521 of SEQ ID NO: 917098
gggccucugaggugaaaug

SEQ ID NO: 1208471 - RNA, 19 nt, Artificial Sequence
  Description of Artificial Sequence: Synthetic oligonucleotide
  Antisense strand to SEQ ID NO: 1208470
cauuucaccucagaggccc

SEQ ID NO: 1208472 - RNA, 19 nt, Artificial Sequence
  Description of Artificial Sequence: Synthetic oligonucleotide
  Sense strand starting at position 2531 of SEQ ID NO: 917098
ggugaaaugggauguugaa

SEQ ID NO: 1208473 - RNA, 19 nt, Artificial Sequence
  Description of Artificial Sequence: Synthetic oligonucleotide
  Antisense strand to SEQ ID NO: 1208472
uucaacaucccauuucacc

SEQ ID NO: 1208474 - RNA, 19 nt, Artificial Sequence
  Description of Artificial Sequence: Synthetic oligonucleotide
  Sense strand starting at position 2537 of SEQ ID NO: 917098
augggauguugaagaugga

SEQ ID NO: 1208475 - RNA, 19 nt, Artificial Sequence
  Description of Artificial Sequence: Synthetic oligonucleotide
  Antisense strand to SEQ ID NO: 1208474
uccaucuucaacaucccau

SEQ ID NO: 1208476 - RNA, 19 nt, Artificial Sequence
  Description of Artificial Sequence: Synthetic oligonucleotide
  Sense strand starting at position 2602 of SEQ ID NO: 917098
gaaggucucagcgaggaga

SEQ ID NO: 1208477 - RNA, 19 nt, Artificial Sequence
  Description of Artificial Sequence: Synthetic oligonucleotide
  Antisense strand to SEQ ID NO: 1208476
ucuccucgcugagaccuuc

SEQ ID NO: 1208478 - RNA, 19 nt, Artificial Sequence
  Description of Artificial Sequence: Synthetic oligonucleotide
  Sense strand starting at position 2604 of SEQ ID NO: 917098
aggucucagcgaggagauu

SEQ ID NO: 1208479 - RNA, 19 nt, Artificial Sequence
  Description of Artificial Sequence: Synthetic oligonucleotide
  Antisense strand to SEQ ID NO: 1208478
aaucuccucgcugagaccu

SEQ ID NO: 1208480 - RNA, 19 nt, Artificial Sequence
  Description of Artificial Sequence: Synthetic oligonucleotide
  Sense strand starting at position 2649 of SEQ ID NO: 917098
aauagaagcuuguaaccga

SEQ ID NO: 1208481 - RNA, 19 nt, Artificial Sequence
  Description of Artificial Sequence: Synthetic oligonucleotide
  Antisense strand to SEQ ID NO: 1208480
ucgguuacaagcuucuauu

SEQ ID NO: 1208482 - RNA, 19 nt, Artificial Sequence
  Description of Artificial Sequence: Synthetic oligonucleotide
  Sense strand starting at position 2652 of SEQ ID NO: 917098
agaagcuuguaaccgagau

SEQ ID NO: 1208483 - RNA, 19 nt, Artificial Sequence
  Description of Artificial Sequence: Synthetic oligonucleotide
  Antisense strand to SEQ ID NO: 1208482
aucucgguuacaagcuucu

SEQ ID NO: 1208484 - RNA, 19 nt, Artificial Sequence
  Description of Artificial Sequence: Synthetic oligonucleotide
  Sense strand starting at position 2656 of SEQ ID NO: 917098
gcuuguaaccgagaucauu

SEQ ID NO: 1208485 - RNA, 19 nt, Artificial Sequence
  Description of Artificial Sequence: Synthetic oligonucleotide
  Antisense strand to SEQ ID NO: 1208484
aaugaucucgguuacaagc

SEQ ID NO: 1208486 - RNA, 19 nt, Artificial Sequence
  Description of Artificial Sequence: Synthetic oligonucleotide
  Sense strand starting at position 2708 of SEQ ID NO: 917098
ugaggcaccuuguagagau

SEQ ID NO: 1208487 - RNA, 19 nt, Artificial Sequence
  Description of Artificial Sequence: Synthetic oligonucleotide
  Antisense strand to SEQ ID NO: 1208486
aucucuacaaggugccuca

SEQ ID NO: 1208488 - RNA, 19 nt, Artificial Sequence
  Description of Artificial Sequence: Synthetic oligonucleotide
  Sense strand starting at position 2757 of SEQ ID NO: 917098
agcaucuauccagggcuaa

SEQ ID NO: 1208489 - RNA, 19 nt, Artificial Sequence
  Description of Artificial Sequence: Synthetic oligonucleotide
  Antisense strand to SEQ ID NO: 1208488
uuagcccuggauagaugcu

SEQ ID NO: 1208490 - RNA, 19 nt, Artificial Sequence
  Description of Artificial Sequence: Synthetic oligonucleotide
  Sense strand starting at position 2758 of SEQ ID NO: 917098
gcaucuauccagggcuaaa

SEQ ID NO: 1208491 - RNA, 19 nt, Artificial Sequence
  Description of Artificial Sequence: Synthetic oligonucleotide
  Antisense strand to SEQ ID NO: 1208490
uuuagcccuggauagaugc

SEQ ID NO: 1208492 - RNA, 19 nt, Artificial Sequence
  Description of Artificial Sequence: Synthetic oligonucleotide
  Sense strand starting at position 2769 of SEQ ID NO: 917098
gggcuaaaucagcggcauu

SEQ ID NO: 1208493 - RNA, 19 nt, Artificial Sequence
  Description of Artificial Sequence: Synthetic oligonucleotide
  Antisense strand to SEQ ID NO: 1208492
aaugccgcugauuuagccc

SEQ ID NO: 1208494 - RNA, 19 nt, Artificial Sequence
  Description of Artificial Sequence: Synthetic oligonucleotide
  Sense strand starting at position 2883 of SEQ ID NO: 917098
gggagaaugucaggaggga

SEQ ID NO: 1208495 - RNA, 19 nt, Artificial Sequence
  Description of Artificial Sequence: Synthetic oligonucleotide
  Antisense strand to SEQ ID NO: 1208494
ucccuccugacauucuccc

SEQ ID NO: 1208496 - RNA, 19 nt, Artificial Sequence
  Description of Artificial Sequence: Synthetic oligonucleotide
  Sense strand starting at position 2914 of SEQ ID NO: 917098
gccacuuggagguauucuu

SEQ ID NO: 1208497 - RNA, 19 nt, Artificial Sequence
  Description of Artificial Sequence: Synthetic oligonucleotide
  Antisense strand to SEQ ID NO: 1208496
aagaauaccuccaaguggc

SEQ ID NO: 1208498 - RNA, 19 nt, Artificial Sequence
  Description of Artificial Sequence: Synthetic oligonucleotide
  Sense strand starting at position 3278 of SEQ ID NO: 917098
guaggagucuuggagaaug

SEQ ID NO: 1208499 - RNA, 19 nt, Artificial Sequence
  Description of Artificial Sequence: Synthetic oligonucleotide
  Antisense strand to SEQ ID NO: 1208498
cauucuccaagacuccuac

SEQ ID NO: 1208500 - RNA, 19 nt, Artificial Sequence
  Description of Artificial Sequence: Synthetic oligonucleotide
  Sense strand starting at position 3283 of SEQ ID NO: 917098
agucuuggagaaugcagau

SEQ ID NO: 1208501 - RNA, 19 nt, Artificial Sequence
  Description of Artificial Sequence: Synthetic oligonucleotide
  Antisense strand to SEQ ID NO: 1208500
aucugcauucuccaagacu

SEQ ID NO: 1208502 - RNA, 19 nt, Artificial Sequence
  Description of Artificial Sequence: Synthetic oligonucleotide
  Sense strand starting at position 3319 of SEQ ID NO: 917098
gcuggaucugucuguacuu

SEQ ID NO: 1208503 - RNA, 19 nt, Artificial Sequence
  Description of Artificial Sequence: Synthetic oligonucleotide
  Antisense strand to SEQ ID NO: 1208502
aaguacagacagauccagc

SEQ ID NO: 1208504 - RNA, 19 nt, Artificial Sequence
  Description of Artificial Sequence: Synthetic oligonucleotide
  Sense strand starting at position 3328 of SEQ ID NO: 917098
gucuguacuugucucaaga

SEQ ID NO: 1208505 - RNA, 19 nt, Artificial Sequence
  Description of Artificial Sequence: Synthetic oligonucleotide
  Antisense strand to SEQ ID NO: 1208504
ucuugagacaaguacagac

SEQ ID NO: 1208506 - RNA, 19 nt, Artificial Sequence
  Description of Artificial Sequence: Synthetic oligonucleotide
  Sense strand starting at position 3495 of SEQ ID NO: 917098
gaaguuucggaaugguuua

SEQ ID NO: 1208507 - RNA, 19 nt, Artificial Sequence
  Description of Artificial Sequence: Synthetic oligonucleotide
  Antisense strand to SEQ ID NO: 1208506
uaaaccauuccgaaacuuc

SEQ ID NO: 1208508 - RNA, 19 nt, Artificial Sequence
  Description of Artificial Sequence: Synthetic oligonucleotide
  Sense strand starting at position 3633 of SEQ ID NO: 917098
ccaguaaucugguuugaag

SEQ ID NO: 1208509 - RNA, 19 nt, Artificial Sequence
  Description of Artificial Sequence: Synthetic oligonucleotide
  Antisense strand to SEQ ID NO: 1208508
cuucaaaccagauuacugg

SEQ ID NO: 1208510 - RNA, 19 nt, Artificial Sequence
  Description of Artificial Sequence: Synthetic oligonucleotide
  Sense strand starting at position 3635 of SEQ ID NO: 917098
aguaaucugguuugaagaa

SEQ ID NO: 1208511 - RNA, 19 nt, Artificial Sequence
  Description of Artificial Sequence: Synthetic oligonucleotide
  Antisense strand to SEQ ID NO: 1208510
uucuucaaaccagauuacu

SEQ ID NO: 1208512 - RNA, 19 nt, Artificial Sequence
  Description of Artificial Sequence: Synthetic oligonucleotide
  Sense strand starting at position 3636 of SEQ ID NO: 917098
guaaucugguuugaagaaa

SEQ ID NO: 1208513 - RNA, 19 nt, Artificial Sequence
  Description of Artificial Sequence: Synthetic oligonucleotide
  Antisense strand to SEQ ID NO: 1208512
uuucuucaaaccagauuac

SEQ ID NO: 1208514 - RNA, 19 nt, Artificial Sequence
  Description of Artificial Sequence: Synthetic oligonucleotide
  Sense strand starting at position 3718 of SEQ ID NO: 917098
gccuuagucucauucugau

SEQ ID NO: 1208515 - RNA, 19 nt, Artificial Sequence
  Description of Artificial Sequence: Synthetic oligonucleotide
  Antisense strand to SEQ ID NO: 1208514
aucagaaugagacuaaggc

SEQ ID NO: 1208516 - RNA, 19 nt, Artificial Sequence
  Description of Artificial Sequence: Synthetic oligonucleotide
  Sense strand starting at position 3784 of SEQ ID NO: 917098
gguuucuggguccaucaga

SEQ ID NO: 1208517 - RNA, 19 nt, Artificial Sequence
  Description of Artificial Sequence: Synthetic oligonucleotide
  Antisense strand to SEQ ID NO: 1208516
ucugauggacccagaaacc

SEQ ID NO: 1208518 - RNA, 19 nt, Artificial Sequence
  Description of Artificial Sequence: Synthetic oligonucleotide
  Sense strand starting at position 65 of SEQ ID NO: 917099
ggcucaauguccuacuggu

SEQ ID NO: 1208519 - RNA, 19 nt, Artificial Sequence
  Description of Artificial Sequence: Synthetic oligonucleotide
  Antisense strand to SEQ ID NO: 1208518
accaguaggacauugagcc

SEQ ID NO: 1208520 - RNA, 19 nt, Artificial Sequence
  Description of Artificial Sequence: Synthetic oligonucleotide
  Sense strand starting at position 73 of SEQ ID NO: 917099
guccuacugguaugccaaa

SEQ ID NO: 1208521 - RNA, 19 nt, Artificial Sequence
  Description of Artificial Sequence: Synthetic oligonucleotide
  Antisense strand to SEQ ID NO: 1208520
uuuggcauaccaguaggac

SEQ ID NO: 1208522 - RNA, 19 nt, Artificial Sequence
  Description of Artificial Sequence: Synthetic oligonucleotide
  Sense strand starting at position 537 of SEQ ID NO: 917099
gccucugucaguggugacu

SEQ ID NO: 1208523 - RNA, 19 nt, Artificial Sequence
  Description of Artificial Sequence: Synthetic oligonucleotide
  Antisense strand to SEQ ID NO: 1208522
agucaccacugacagaggc

SEQ ID NO: 1208524 - RNA, 19 nt, Artificial Sequence
  Description of Artificial Sequence: Synthetic oligonucleotide
  Sense strand starting at position 546 of SEQ ID NO: 917099
aguggugacuuccauccaa

SEQ ID NO: 1208525 - RNA, 19 nt, Artificial Sequence
  Description of Artificial Sequence: Synthetic oligonucleotide
  Antisense strand to SEQ ID NO: 1208524
uuggauggaagucaccacu

SEQ ID NO: 1208526 - RNA, 19 nt, Artificial Sequence
  Description of Artificial Sequence: Synthetic oligonucleotide
  Sense strand starting at position 573 of SEQ ID NO: 917099
gccugaaugcuggagucau

SEQ ID NO: 1208527 - RNA, 19 nt, Artificial Sequence
  Description of Artificial Sequence: Synthetic oligonucleotide
  Antisense strand to SEQ ID NO: 1208526
augacuccagcauucaggc

SEQ ID NO: 1208528 - RNA, 19 nt, Artificial Sequence
  Description of Artificial Sequence: Synthetic oligonucleotide
  Sense strand starting at position 638 of SEQ ID NO: 917099
gucaccauggccugucaau

SEQ ID NO: 1208529 - RNA, 19 nt, Artificial Sequence
  Description of Artificial Sequence: Synthetic oligonucleotide
  Antisense strand to SEQ ID NO: 1208528
auugacaggccauggugac

SEQ ID NO: 1208530 - RNA, 19 nt, Artificial Sequence
  Description of Artificial Sequence: Synthetic oligonucleotide
  Sense strand starting at position 857 of SEQ ID NO: 917099
ucuccugcucaagaauaga

SEQ ID NO: 1208531 - RNA, 19 nt, Artificial Sequence
  Description of Artificial Sequence: Synthetic oligonucleotide
  Antisense strand to SEQ ID NO: 1208530
ucuauucuugagcaggaga

SEQ ID NO: 1208532 - RNA, 19 nt, Artificial Sequence
  Description of Artificial Sequence: Synthetic oligonucleotide
  Sense strand starting at position 1069 of SEQ ID NO: 917099
gcaggagaaucggugaacu

SEQ ID NO: 1208533 - RNA, 19 nt, Artificial Sequence
  Description of Artificial Sequence: Synthetic oligonucleotide
  Antisense strand to SEQ ID NO: 1208532
aguucaccgauucuccugc

SEQ ID NO: 1208534 - RNA, 19 nt, Artificial Sequence
  Description of Artificial Sequence: Synthetic oligonucleotide
  Sense strand starting at position 1406 of SEQ ID NO: 917099
auuacuucucuagauggua

SEQ ID NO: 1208535 - RNA, 19 nt, Artificial Sequence
  Description of Artificial Sequence: Synthetic oligonucleotide
  Antisense strand to SEQ ID NO: 1208534
uaccaucuagagaaguaau

SEQ ID NO: 1208536 - RNA, 19 nt, Artificial Sequence
  Description of Artificial Sequence: Synthetic oligonucleotide
  Sense strand starting at position 1426 of SEQ ID NO: 917099
ggcgauucacuguaggacu

SEQ ID NO: 1208537 - RNA, 19 nt, Artificial Sequence
  Description of Artificial Sequence: Synthetic oligonucleotide
  Antisense strand to SEQ ID NO: 1208536
aguccuacagugaaucgcc

SEQ ID NO: 1208538 - RNA, 19 nt, Artificial Sequence
  Description of Artificial Sequence: Synthetic oligonucleotide
  Sense strand starting at position 1489 of SEQ ID NO: 917099
guagcaagaccucagcaaa

SEQ ID NO: 1208539 - RNA, 19 nt, Artificial Sequence
  Description of Artificial Sequence: Synthetic oligonucleotide
  Antisense strand to SEQ ID NO: 1208538
uuugcugaggucuugcuac

SEQ ID NO: 1208540 - RNA, 19 nt, Artificial Sequence
  Description of Artificial Sequence: Synthetic oligonucleotide
  Sense strand starting at position 1492 of SEQ ID NO: 917099
gcaagaccucagcaaauau

SEQ ID NO: 1208541 - RNA, 19 nt, Artificial Sequence
  Description of Artificial Sequence: Synthetic oligonucleotide
  Antisense strand to SEQ ID NO: 1208540
auauuugcugaggucuugc

SEQ ID NO: 1208542 - RNA, 19 nt, Artificial Sequence
  Description of Artificial Sequence: Synthetic oligonucleotide
  Sense strand starting at position 1524 of SEQ ID NO: 917099
uguuguuaacacuguacca

SEQ ID NO: 1208543 - RNA, 19 nt, Artificial Sequence
  Description of Artificial Sequence: Synthetic oligonucleotide
  Antisense strand to SEQ ID NO: 1208542
ugguacaguguuaacaaca

SEQ ID NO: 1208544 - RNA, 19 nt, Artificial Sequence
  Description of Artificial Sequence: Synthetic oligonucleotide
  Sense strand starting at position 1645 of SEQ ID NO: 917099
agagaaaggucgggucaca

SEQ ID NO: 1208545 - RNA, 19 nt, Artificial Sequence
  Description of Artificial Sequence: Synthetic oligonucleotide
  Antisense strand to SEQ ID NO: 1208544
ugugacccgaccuuucucu

SEQ ID NO: 1208546 - RNA, 19 nt, Artificial Sequence
  Description of Artificial Sequence: Synthetic oligonucleotide
  Sense strand starting at position 1751 of SEQ ID NO: 917099
gcaggaucugcuugagguc

SEQ ID NO: 1208547 - RNA, 19 nt, Artificial Sequence
  Description of Artificial Sequence: Synthetic oligonucleotide
  Antisense strand to SEQ ID NO: 1208546
gaccucaagcagauccugc

SEQ ID NO: 1208548 - RNA, 19 nt, Artificial Sequence
  Description of Artificial Sequence: Synthetic oligonucleotide
  Sense strand starting at position 2112 of SEQ ID NO: 917099
ccaguaagagcucauaccu

SEQ ID NO: 1208549 - RNA, 19 nt, Artificial Sequence
  Description of Artificial Sequence: Synthetic oligonucleotide
  Antisense strand to SEQ ID NO: 1208548
agguaugagcucuuacugg

SEQ ID NO: 1208550 - RNA, 19 nt, Artificial Sequence
  Description of Artificial Sequence: Synthetic oligonucleotide
  Sense strand starting at position 2252 of SEQ ID NO: 917099
gagucaagugggugauuca

SEQ ID NO: 1208551 - RNA, 19 nt, Artificial Sequence
  Description of Artificial Sequence: Synthetic oligonucleotide
  Antisense strand to SEQ ID NO: 1208550
ugaaucacccacuugacuc

SEQ ID NO: 1208552 - RNA, 19 nt, Artificial Sequence
  Description of Artificial Sequence: Synthetic oligonucleotide
  Sense strand starting at position 2253 of SEQ ID NO: 917099
agucaagugggugauucau

SEQ ID NO: 1208553 - RNA, 19 nt, Artificial Sequence
  Description of Artificial Sequence: Synthetic oligonucleotide
  Antisense strand to SEQ ID NO: 1208552
augaaucacccacuugacu

SEQ ID NO: 1208554 - RNA, 19 nt, Artificial Sequence
  Description of Artificial Sequence: Synthetic oligonucleotide
  Sense strand starting at position 2316 of SEQ ID NO: 917099
gcugcugaaucucucagau

SEQ ID NO: 1208555 - RNA, 19 nt, Artificial Sequence
  Description of Artificial Sequence: Synthetic oligonucleotide
  Antisense strand to SEQ ID NO: 1208554
aucugagagauucagcagc

SEQ ID NO: 1208556 - RNA, 19 nt, Artificial Sequence
  Description of Artificial Sequence: Synthetic oligonucleotide
  Sense strand starting at position 2525 of SEQ ID NO: 917099
uccaguucugcaggaggaa

SEQ ID NO: 1208557 - RNA, 19 nt, Artificial Sequence
  Description of Artificial Sequence: Synthetic oligonucleotide
  Antisense strand to SEQ ID NO: 1208556
uuccuccugcagaacugga

SEQ ID NO: 1208558 - RNA, 19 nt, Artificial Sequence
  Description of Artificial Sequence: Synthetic oligonucleotide
  Sense strand starting at position 2871 of SEQ ID NO: 917099
ccuugacuuuacuagagca

SEQ ID NO: 1208559 - RNA, 19 nt, Artificial Sequence
  Description of Artificial Sequence: Synthetic oligonucleotide
  Antisense strand to SEQ ID NO: 1208558
ugcucuaguaaagucaagg

SEQ ID NO: 1208560 - RNA, 19 nt, Artificial Sequence
  Description of Artificial Sequence: Synthetic oligonucleotide
  Sense strand starting at position 2886 of SEQ ID NO: 917099
agcagaaggucuccaggau

SEQ ID NO: 1208561 - RNA, 19 nt, Artificial Sequence
  Description of Artificial Sequence: Synthetic oligonucleotide
  Antisense strand to SEQ ID NO: 1208560
auccuggagaccuucugcu

SEQ ID NO: 1208562 - RNA, 19 nt, Artificial Sequence
  Description of Artificial Sequence: Synthetic oligonucleotide
  Sense strand starting at position 2887 of SEQ ID NO: 917099
gcagaaggucuccaggauc

SEQ ID NO: 1208563 - RNA, 19 nt, Artificial Sequence
  Description of Artificial Sequence: Synthetic oligonucleotide
  Antisense strand to SEQ ID NO: 1208562
gauccuggagaccuucugc

SEQ ID NO: 1208564 - RNA, 19 nt, Artificial Sequence
  Description of Artificial Sequence: Synthetic oligonucleotide
  Sense strand starting at position 3204 of SEQ ID NO: 917099
ggagcugguccagaaaggu

SEQ ID NO: 1208565 - RNA, 19 nt, Artificial Sequence
  Description of Artificial Sequence: Synthetic oligonucleotide
  Antisense strand to SEQ ID NO: 1208564
accuuucuggaccagcucc

SEQ ID NO: 1208566 - RNA, 19 nt, Artificial Sequence
  Description of Artificial Sequence: Synthetic oligonucleotide
  Sense strand starting at position 3316 of SEQ ID NO: 917099
ucagaauucucagggcuaa

SEQ ID NO: 1208567 - RNA, 19 nt, Artificial Sequence
  Description of Artificial Sequence: Synthetic oligonucleotide
  Antisense strand to SEQ ID NO: 1208566
uuagcccugagaauucuga

SEQ ID NO: 1208568 - RNA, 19 nt, Artificial Sequence
  Description of Artificial Sequence: Synthetic oligonucleotide
  Sense strand starting at position 3340 of SEQ ID NO: 917099
aggguaagauccuuggcuu

SEQ ID NO: 1208569 - RNA, 19 nt, Artificial Sequence
  Description of Artificial Sequence: Synthetic oligonucleotide
  Antisense strand to SEQ ID NO: 1208568
aagccaaggaucuuacccu

SEQ ID NO: 1208570 - RNA, 19 nt, Artificial Sequence
  Description of Artificial Sequence: Synthetic oligonucleotide
  Sense strand starting at position 3341 of SEQ ID NO: 917099
ggguaagauccuuggcuuu

SEQ ID NO: 1208571 - RNA, 19 nt, Artificial Sequence
  Description of Artificial Sequence: Synthetic oligonucleotide
  Antisense strand to SEQ ID NO: 1208570
aaagccaaggaucuuaccc

SEQ ID NO: 1208572 - RNA, 19 nt, Artificial Sequence
  Description of Artificial Sequence: Synthetic oligonucleotide
  Sense strand starting at position 3343 of SEQ ID NO: 917099
guaagauccuuggcuuuga

SEQ ID NO: 1208573 - RNA, 19 nt, Artificial Sequence
  Description of Artificial Sequence: Synthetic oligonucleotide
  Antisense strand to SEQ ID NO: 1208572
ucaaagccaaggaucuuac

SEQ ID NO: 1208574 - RNA, 19 nt, Artificial Sequence
  Description of Artificial Sequence: Synthetic oligonucleotide
  Sense strand starting at position 3354 of SEQ ID NO: 917099
ggcuuugacccuuaaguag

SEQ ID NO: 1208575 - RNA, 19 nt, Artificial Sequence
  Description of Artificial Sequence: Synthetic oligonucleotide
  Antisense strand to SEQ ID NO: 1208574
cuacuuaagggucaaagcc

SEQ ID NO: 1208576 - RNA, 19 nt, Artificial Sequence
  Description of Artificial Sequence: Synthetic oligonucleotide
  Sense strand starting at position 3379 of SEQ ID NO: 917099
gucuguaugcuuugugucu

SEQ ID NO: 1208577 - RNA, 19 nt, Artificial Sequence
  Description of Artificial Sequence: Synthetic oligonucleotide
  Antisense strand to SEQ ID NO: 1208576
agacacaaagcauacagac

SEQ ID NO: 1208578 - RNA, 19 nt, Artificial Sequence
  Description of Artificial Sequence: Synthetic oligonucleotide
  Sense strand starting at position 3380 of SEQ ID NO: 917099
ucuguaugcuuugugucua

SEQ ID NO: 1208579 - RNA, 19 nt, Artificial Sequence
  Description of Artificial Sequence: Synthetic oligonucleotide
  Antisense strand to SEQ ID NO: 1208578
uagacacaaagcauacaga

SEQ ID NO: 1208580 - RNA, 19 nt, Artificial Sequence
  Description of Artificial Sequence: Synthetic oligonucleotide
  Sense strand starting at position 3381 of SEQ ID NO: 917099
cuguaugcuuugugucuau

SEQ ID NO: 1208581 - RNA, 19 nt, Artificial Sequence
  Description of Artificial Sequence: Synthetic oligonucleotide
  Antisense strand to SEQ ID NO: 1208580
auagacacaaagcauacag

SEQ ID NO: 1208582 - RNA, 19 nt, Artificial Sequence
  Description of Artificial Sequence: Synthetic oligonucleotide
  Sense strand starting at position 3884 of SEQ ID NO: 917099
aaaccugagugcucccaga

SEQ ID NO: 1208583 - RNA, 19 nt, Artificial Sequence
  Description of Artificial Sequence: Synthetic oligonucleotide
  Antisense strand to SEQ ID NO: 1208582
ucugggagcacucagguuu

SEQ ID NO: 1208584 - RNA, 19 nt, Artificial Sequence
  Description of Artificial Sequence: Synthetic oligonucleotide
  Sense strand starting at position 10 of SEQ ID NO: 917100
gcaggagaaucggugaacu

SEQ ID NO: 1208585 - RNA, 19 nt, Artificial Sequence
  Description of Artificial Sequence: Synthetic oligonucleotide
  Antisense strand to SEQ ID NO: 1208584
aguucaccgauucuccugc

SEQ ID NO: 1208586 - RNA, 19 nt, Artificial Sequence
  Description of Artificial Sequence: Synthetic oligonucleotide
  Sense strand starting at position 347 of SEQ ID NO: 917100
auuacuucucuagauggua

SEQ ID NO: 1208587 - RNA, 19 nt, Artificial Sequence
  Description of Artificial Sequence: Synthetic oligonucleotide
  Antisense strand to SEQ ID NO: 1208586
uaccaucuagagaaguaau

SEQ ID NO: 1208588 - RNA, 19 nt, Artificial Sequence
  Description of Artificial Sequence: Synthetic oligonucleotide
  Sense strand starting at position 367 of SEQ ID NO: 917100
ggcgauucacuguaggacu

SEQ ID NO: 1208589 - RNA, 19 nt, Artificial Sequence
  Description of Artificial Sequence: Synthetic oligonucleotide
  Antisense strand to SEQ ID NO: 1208588
aguccuacagugaaucgcc

SEQ ID NO: 1208590 - RNA, 19 nt, Artificial Sequence
  Description of Artificial Sequence: Synthetic oligonucleotide
  Sense strand starting at position 430 of SEQ ID NO: 917100
guagcaagaccucagcaaa

SEQ ID NO: 1208591 - RNA, 19 nt, Artificial Sequence
  Description of Artificial Sequence: Synthetic oligonucleotide
  Antisense strand to SEQ ID NO: 1208590
uuugcugaggucuugcuac

SEQ ID NO: 1208592 - RNA, 19 nt, Artificial Sequence
  Description of Artificial Sequence: Synthetic oligonucleotide
  Sense strand starting at position 433 of SEQ ID NO: 917100
gcaagaccucagcaaauau

SEQ ID NO: 1208593 - RNA, 19 nt, Artificial Sequence
  Description of Artificial Sequence: Synthetic oligonucleotide
  Antisense strand to SEQ ID NO: 1208592
auauuugcugaggucuugc

SEQ ID NO: 1208594 - RNA, 19 nt, Artificial Sequence
  Description of Artificial Sequence: Synthetic oligonucleotide
  Sense strand starting at position 465 of SEQ ID NO: 917100
uguuguuaacacuguacca

SEQ ID NO: 1208595 - RNA, 19 nt, Artificial Sequence
  Description of Artificial Sequence: Synthetic oligonucleotide
  Antisense strand to SEQ ID NO: 1208594
ugguacaguguuaacaaca

SEQ ID NO: 1208596 - RNA, 19 nt, Artificial Sequence
  Description of Artificial Sequence: Synthetic oligonucleotide
  Sense strand starting at position 692 of SEQ ID NO: 917100
gcaggaucugcuugagguc

SEQ ID NO: 1208597 - RNA, 19 nt, Artificial Sequence
  Description of Artificial Sequence: Synthetic oligonucleotide
  Antisense strand to SEQ ID NO: 1208596
gaccucaagcagauccugc

SEQ ID NO: 1208598 - RNA, 19 nt, Artificial Sequence
  Description of Artificial Sequence: Synthetic oligonucleotide
  Sense strand starting at position 1053 of SEQ ID NO: 917100
ccaguaagagcucauaccu

SEQ ID NO: 1208599 - RNA, 19 nt, Artificial Sequence
  Description of Artificial Sequence: Synthetic oligonucleotide
  Antisense strand to SEQ ID NO: 1208598
agguaugagcucuuacugg

SEQ ID NO: 1208600 - RNA, 19 nt, Artificial Sequence
  Description of Artificial Sequence: Synthetic oligonucleotide
  Sense strand starting at position 1193 of SEQ ID NO: 917100
gagucaagugggugauuca

SEQ ID NO: 1208601 - RNA, 19 nt, Artificial Sequence
  Description of Artificial Sequence: Synthetic oligonucleotide
  Antisense strand to SEQ ID NO: 1208600
ugaaucacccacuugacuc

SEQ ID NO: 1208602 - RNA, 19 nt, Artificial Sequence
  Description of Artificial Sequence: Synthetic oligonucleotide
  Sense strand starting at position 1194 of SEQ ID NO: 917100
agucaagugggugauucau

SEQ ID NO: 1208603 - RNA, 19 nt, Artificial Sequence
  Description of Artificial Sequence: Synthetic oligonucleotide
  Antisense strand to SEQ ID NO: 1208602
augaaucacccacuugacu

SEQ ID NO: 1208604 - RNA, 19 nt, Artificial Sequence
  Description of Artificial Sequence: Synthetic oligonucleotide
  Sense strand starting at position 1257 of SEQ ID NO: 917100
gcugcugaaucucucagau

SEQ ID NO: 1208605 - RNA, 19 nt, Artificial Sequence
  Description of Artificial Sequence: Synthetic oligonucleotide
  Antisense strand to SEQ ID NO: 1208604
aucugagagauucagcagc

SEQ ID NO: 1208606 - RNA, 19 nt, Artificial Sequence
  Description of Artificial Sequence: Synthetic oligonucleotide
  Sense strand starting at position 1466 of SEQ ID NO: 917100
uccaguucugcaggaggaa

SEQ ID NO: 1208607 - RNA, 19 nt, Artificial Sequence
  Description of Artificial Sequence: Synthetic oligonucleotide
  Antisense strand to SEQ ID NO: 1208606
uuccuccugcagaacugga

SEQ ID NO: 1208608 - RNA, 19 nt, Artificial Sequence
  Description of Artificial Sequence: Synthetic oligonucleotide
  Sense strand starting at position 1827 of SEQ ID NO: 917100
agcagaaggucuccaggau

SEQ ID NO: 1208609 - RNA, 19 nt, Artificial Sequence
  Description of Artificial Sequence: Synthetic oligonucleotide
  Antisense strand to SEQ ID NO: 1208608
auccuggagaccuucugcu

SEQ ID NO: 1208610 - RNA, 19 nt, Artificial Sequence
  Description of Artificial Sequence: Synthetic oligonucleotide
  Sense strand starting at position 1828 of SEQ ID NO: 917100
gcagaaggucuccaggauc

SEQ ID NO: 1208611 - RNA, 19 nt, Artificial Sequence
  Description of Artificial Sequence: Synthetic oligonucleotide
  Antisense strand to SEQ ID NO: 1208610
gauccuggagaccuucugc

SEQ ID NO: 1208612 - RNA, 19 nt, Artificial Sequence
  Description of Artificial Sequence: Synthetic oligonucleotide
  Sense strand starting at position 2145 of SEQ ID NO: 917100
ggagcugguccagaaaggu

SEQ ID NO: 1208613 - RNA, 19 nt, Artificial Sequence
  Description of Artificial Sequence: Synthetic oligonucleotide
  Antisense strand to SEQ ID NO: 1208612
accuuucuggaccagcucc

SEQ ID NO: 1208614 - RNA, 19 nt, Artificial Sequence
  Description of Artificial Sequence: Synthetic oligonucleotide
  Sense strand starting at position 2281 of SEQ ID NO: 917100
aggguaagauccuuggcuu

SEQ ID NO: 1208615 - RNA, 19 nt, Artificial Sequence
  Description of Artificial Sequence: Synthetic oligonucleotide
  Antisense strand to SEQ ID NO: 1208614
aagccaaggaucuuacccu

SEQ ID NO: 1208616 - RNA, 19 nt, Artificial Sequence
  Description of Artificial Sequence: Synthetic oligonucleotide
  Sense strand starting at position 2282 of SEQ ID NO: 917100
ggguaagauccuuggcuuu

SEQ ID NO: 1208617 - RNA, 19 nt, Artificial Sequence
  Description of Artificial Sequence: Synthetic oligonucleotide
  Antisense strand to SEQ ID NO: 1208616
aaagccaaggaucuuaccc

SEQ ID NO: 1208618 - RNA, 19 nt, Artificial Sequence
  Description of Artificial Sequence: Synthetic oligonucleotide
  Sense strand starting at position 2284 of SEQ ID NO: 917100
guaagauccuuggcuuuga

SEQ ID NO: 1208619 - RNA, 19 nt, Artificial Sequence
  Description of Artificial Sequence: Synthetic oligonucleotide
  Antisense strand to SEQ ID NO: 1208618
ucaaagccaaggaucuuac

SEQ ID NO: 1208620 - RNA, 19 nt, Artificial Sequence
  Description of Artificial Sequence: Synthetic oligonucleotide
  Sense strand starting at position 2295 of SEQ ID NO: 917100
ggcuuugacccuuaaguag

SEQ ID NO: 1208621 - RNA, 19 nt, Artificial Sequence
  Description of Artificial Sequence: Synthetic oligonucleotide
  Antisense strand to SEQ ID NO: 1208620
cuacuuaagggucaaagcc

SEQ ID NO: 1208622 - RNA, 19 nt, Artificial Sequence
  Description of Artificial Sequence: Synthetic oligonucleotide
  Sense strand starting at position 2825 of SEQ ID NO: 917100
aaaccugagugcucccaga

SEQ ID NO: 1208623 - RNA, 19 nt, Artificial Sequence
  Description of Artificial Sequence: Synthetic oligonucleotide
  Antisense strand to SEQ ID NO: 1208622
ucugggagcacucagguuu

SEQ ID NO: 1208624 - RNA, 19 nt, Artificial Sequence
  Description of Artificial Sequence: Synthetic oligonucleotide
  Sense strand starting at position 2934 of SEQ ID NO: 917100
cccuuucccugguucuaga

SEQ ID NO: 1208625 - RNA, 19 nt, Artificial Sequence
  Description of Artificial Sequence: Synthetic oligonucleotide
  Antisense strand to SEQ ID NO: 1208624
ucuagaaccagggaaaggg

SEQ ID NO: 1208626 - RNA, 19 nt, Artificial Sequence
  Description of Artificial Sequence: Synthetic oligonucleotide
  Sense strand starting at position 2937 of SEQ ID NO: 917100
uuucccugguucuagauuu

SEQ ID NO: 1208627 - RNA, 19 nt, Artificial Sequence
  Description of Artificial Sequence: Synthetic oligonucleotide
  Antisense strand to SEQ ID NO: 1208626
aaaucuagaaccagggaaa

SEQ ID NO: 1208628 - RNA, 19 nt, Artificial Sequence
  Description of Artificial Sequence: Synthetic oligonucleotide
  Sense strand starting at position 2976 of SEQ ID NO: 917100
aagccaucuuaagaggaga

SEQ ID NO: 1208629 - RNA, 19 nt, Artificial Sequence
  Description of Artificial Sequence: Synthetic oligonucleotide
  Antisense strand to SEQ ID NO: 1208628
ucuccucuuaagauggcuu

SEQ ID NO: 1208630 - RNA, 19 nt, Artificial Sequence
  Description of Artificial Sequence: Synthetic oligonucleotide
  Sense strand starting at position 3038 of SEQ ID NO: 917100
cuaugugccagguaaugaa

SEQ ID NO: 1208631 - RNA, 19 nt, Artificial Sequence
  Description of Artificial Sequence: Synthetic oligonucleotide
  Antisense strand to SEQ ID NO: 1208630
uucauuaccuggcacauag

SEQ ID NO: 1208632 - RNA, 19 nt, Artificial Sequence
  Description of Artificial Sequence: Synthetic oligonucleotide
  Sense strand starting at position 3081 of SEQ ID NO: 917100
ucugaaguagcucaaugaa

SEQ ID NO: 1208633 - RNA, 19 nt, Artificial Sequence
  Description of Artificial Sequence: Synthetic oligonucleotide
  Antisense strand to SEQ ID NO: 1208632
uucauugagcuacuucaga

SEQ ID NO: 1208634 - RNA, 19 nt, Artificial Sequence
  Description of Artificial Sequence: Synthetic oligonucleotide
  Sense strand starting at position 3084 of SEQ ID NO: 917100
gaaguagcucaaugaagua

SEQ ID NO: 1208635 - RNA, 19 nt, Artificial Sequence
  Description of Artificial Sequence: Synthetic oligonucleotide
  Antisense strand to SEQ ID NO: 1208634
uacuucauugagcuacuuc

SEQ ID NO: 1208636 - RNA, 19 nt, Artificial Sequence
  Description of Artificial Sequence: Synthetic oligonucleotide
  Sense strand starting at position 3137 of SEQ ID NO: 917100
cuacuugacuuaugaggaa

SEQ ID NO: 1208637 - RNA, 19 nt, Artificial Sequence
  Description of Artificial Sequence: Synthetic oligonucleotide
  Antisense strand to SEQ ID NO: 1208636
uuccucauaagucaaguag

SEQ ID NO: 1208638 - RNA, 19 nt, Artificial Sequence
  Description of Artificial Sequence: Synthetic oligonucleotide
  Sense strand starting at position 3140 of SEQ ID NO: 917100
cuugacuuaugaggaaaug

SEQ ID NO: 1208639 - RNA, 19 nt, Artificial Sequence
  Description of Artificial Sequence: Synthetic oligonucleotide
  Antisense strand to SEQ ID NO: 1208638
cauuuccucauaagucaag

SEQ ID NO: 1208640 - RNA, 19 nt, Artificial Sequence
  Description of Artificial Sequence: Synthetic oligonucleotide
  Sense strand starting at position 3155 of SEQ ID NO: 917100
aauggagacucagaguagu

SEQ ID NO: 1208641 - RNA, 19 nt, Artificial Sequence
  Description of Artificial Sequence: Synthetic oligonucleotide
  Antisense strand to SEQ ID NO: 1208640
acuacucugagucuccauu

SEQ ID NO: 1208642 - RNA, 19 nt, Artificial Sequence
  Description of Artificial Sequence: Synthetic oligonucleotide
  Sense strand starting at position 3161 of SEQ ID NO: 917100
gacucagaguaguuaacaa

SEQ ID NO: 1208643 - RNA, 19 nt, Artificial Sequence
  Description of Artificial Sequence: Synthetic oligonucleotide
  Antisense strand to SEQ ID NO: 1208642
uuguuaacuacucugaguc

SEQ ID NO: 1208644 - RNA, 19 nt, Artificial Sequence
  Description of Artificial Sequence: Synthetic oligonucleotide
  Sense strand starting at position 3190 of SEQ ID NO: 917100
ugucacacagccuguaaau

SEQ ID NO: 1208645 - RNA, 19 nt, Artificial Sequence
  Description of Artificial Sequence: Synthetic oligonucleotide
  Antisense strand to SEQ ID NO: 1208644
auuuacaggcugugugaca

SEQ ID NO: 1208646 - RNA, 19 nt, Artificial Sequence
  Description of Artificial Sequence: Synthetic oligonucleotide
  Sense strand starting at position 3228 of SEQ ID NO: 917100
ucaagaucugcuggacucu

SEQ ID NO: 1208647 - RNA, 19 nt, Artificial Sequence
  Description of Artificial Sequence: Synthetic oligonucleotide
  Antisense strand to SEQ ID NO: 1208646
agaguccagcagaucuuga

SEQ ID NO: 1208648 - RNA, 19 nt, Artificial Sequence
  Description of Artificial Sequence: Synthetic oligonucleotide
  Sense strand starting at position 3431 of SEQ ID NO: 917100
cucaguuaucuauggcuaa

SEQ ID NO: 1208649 - RNA, 19 nt, Artificial Sequence
  Description of Artificial Sequence: Synthetic oligonucleotide
  Antisense strand to SEQ ID NO: 1208648
uuagccauagauaacugag

SEQ ID NO: 1208650 - RNA, 19 nt, Artificial Sequence
  Description of Artificial Sequence: Synthetic oligonucleotide
  Sense strand starting at position 3434 of SEQ ID NO: 917100
aguuaucuauggcuaacaa

SEQ ID NO: 1208651 - RNA, 19 nt, Artificial Sequence
  Description of Artificial Sequence: Synthetic oligonucleotide
  Antisense strand to SEQ ID NO: 1208650
uuguuagccauagauaacu

SEQ ID NO: 1208652 - RNA, 19 nt, Artificial Sequence
  Description of Artificial Sequence: Synthetic oligonucleotide
  Sense strand starting at position 3435 of SEQ ID NO: 917100
guuaucuauggcuaacaac

SEQ ID NO: 1208653 - RNA, 19 nt, Artificial Sequence
  Description of Artificial Sequence: Synthetic oligonucleotide
  Antisense strand to SEQ ID NO: 1208652
guuguuagccauagauaac

SEQ ID NO: 1208654 - RNA, 19 nt, Artificial Sequence
  Description of Artificial Sequence: Synthetic oligonucleotide
  Sense strand starting at position 3467 of SEQ ID NO: 917100
agacaugagcccuggguga

SEQ ID NO: 1208655 - RNA, 19 nt, Artificial Sequence
  Description of Artificial Sequence: Synthetic oligonucleotide
  Antisense strand to SEQ ID NO: 1208654
ucacccagggcucaugucu

SEQ ID NO: 1208656 - RNA, 19 nt, Artificial Sequence
  Description of Artificial Sequence: Synthetic oligonucleotide
  Sense strand starting at position 3585 of SEQ ID NO: 917100
ccagauuccuggguccacu

SEQ ID NO: 1208657 - RNA, 19 nt, Artificial Sequence
  Description of Artificial Sequence: Synthetic oligonucleotide
  Antisense strand to SEQ ID NO: 1208656
aguggacccaggaaucugg

SEQ ID NO: 1208658 - RNA, 19 nt, Artificial Sequence
  Description of Artificial Sequence: Synthetic oligonucleotide
  Sense strand starting at position 3816 of SEQ ID NO: 917100
gcagcuagguucucugacu

SEQ ID NO: 1208659 - RNA, 19 nt, Artificial Sequence
  Description of Artificial Sequence: Synthetic oligonucleotide
  Antisense strand to SEQ ID NO: 1208658
agucagagaaccuagcugc

SEQ ID NO: 1208660 - RNA, 19 nt, Artificial Sequence
  Description of Artificial Sequence: Synthetic oligonucleotide
  Sense strand starting at position 3926 of SEQ ID NO: 917100
gcaugucacagugagaacu

SEQ ID NO: 1208661 - RNA, 19 nt, Artificial Sequence
  Description of Artificial Sequence: Synthetic oligonucleotide
  Antisense strand to SEQ ID NO: 1208660
aguucucacugugacaugc

SEQ ID NO: 1208662 - RNA, 19 nt, Artificial Sequence
  Description of Artificial Sequence: Synthetic oligonucleotide
  Sense strand starting at position 3976 of SEQ ID NO: 917100
ucuuauagaugaugacaau

SEQ ID NO: 1208663 - RNA, 19 nt, Artificial Sequence
  Description of Artificial Sequence: Synthetic oligonucleotide
  Antisense strand to SEQ ID NO: 1208662
auugucaucaucuauaaga

SEQ ID NO: 1208664 - RNA, 19 nt, Artificial Sequence
  Description of Artificial Sequence: Synthetic oligonucleotide
  Sense strand starting at position 173 of SEQ ID NO: 917101
gcuucuguccugggacgaa

SEQ ID NO: 1208665 - RNA, 19 nt, Artificial Sequence
  Description of Artificial Sequence: Synthetic oligonucleotide
  Antisense strand to SEQ ID NO: 1208664
uucgucccaggacagaagc

SEQ ID NO: 1208666 - RNA, 19 nt, Artificial Sequence
  Description of Artificial Sequence: Synthetic oligonucleotide
  Sense strand starting at position 491 of SEQ ID NO: 917101
cuccaaugacgccaaguau

SEQ ID NO: 1208667 - RNA, 19 nt, Artificial Sequence
  Description of Artificial Sequence: Synthetic oligonucleotide
  Antisense strand to SEQ ID NO: 1208666
auacuuggcgucauuggag

SEQ ID NO: 1208668 - RNA, 19 nt, Artificial Sequence
  Description of Artificial Sequence: Synthetic oligonucleotide
  Sense strand starting at position 564 of SEQ ID NO: 917101
uccagacucccuugucaca

SEQ ID NO: 1208669 - RNA, 19 nt, Artificial Sequence
  Description of Artificial Sequence: Synthetic oligonucleotide
  Antisense strand to SEQ ID NO: 1208668
ugugacaagggagucugga

SEQ ID NO: 1208670 - RNA, 19 nt, Artificial Sequence
  Description of Artificial Sequence: Synthetic oligonucleotide
  Sense strand starting at position 769 of SEQ ID NO: 917101
gacgguuccaaaggguuau

SEQ ID NO: 1208671 - RNA, 19 nt, Artificial Sequence
  Description of Artificial Sequence: Synthetic oligonucleotide
  Antisense strand to SEQ ID NO: 1208670
auaacccuuuggaaccguc

SEQ ID NO: 1208672 - RNA, 19 nt, Artificial Sequence
  Description of Artificial Sequence: Synthetic oligonucleotide
  Sense strand starting at position 773 of SEQ ID NO: 917101
guuccaaaggguuauugga

SEQ ID NO: 1208673 - RNA, 19 nt, Artificial Sequence
  Description of Artificial Sequence: Synthetic oligonucleotide
  Antisense strand to SEQ ID NO: 1208672
uccaauaacccuuuggaac

SEQ ID NO: 1208674 - RNA, 19 nt, Artificial Sequence
  Description of Artificial Sequence: Synthetic oligonucleotide
  Sense strand starting at position 1094 of SEQ ID NO: 917101
uuagcuaaaguuugcuuaa

SEQ ID NO: 1208675 - RNA, 19 nt, Artificial Sequence
  Description of Artificial Sequence: Synthetic oligonucleotide
  Antisense strand to SEQ ID NO: 1208674
uuaagcaaacuuuagcuaa

SEQ ID NO: 1208676 - RNA, 19 nt, Artificial Sequence
  Description of Artificial Sequence: Synthetic oligonucleotide
  Sense strand starting at position 1097 of SEQ ID NO: 917101
gcuaaaguuugcuuaagga

SEQ ID NO: 1208677 - RNA, 19 nt, Artificial Sequence
  Description of Artificial Sequence: Synthetic oligonucleotide
  Antisense strand to SEQ ID NO: 1208676
uccuuaagcaaacuuuagc

SEQ ID NO: 1208678 - RNA, 19 nt, Artificial Sequence
  Description of Artificial Sequence: Synthetic oligonucleotide
  Sense strand starting at position 1177 of SEQ ID NO: 917101
cguggcaggucugugugaa

SEQ ID NO: 1208679 - RNA, 19 nt, Artificial Sequence
  Description of Artificial Sequence: Synthetic oligonucleotide
  Antisense strand to SEQ ID NO: 1208678
uucacacagaccugccacg

SEQ ID NO: 1208680 - RNA, 19 nt, Artificial Sequence
  Description of Artificial Sequence: Synthetic oligonucleotide
  Sense strand starting at position 1178 of SEQ ID NO: 917101
guggcaggucugugugaac

SEQ ID NO: 1208681 - RNA, 19 nt, Artificial Sequence
  Description of Artificial Sequence: Synthetic oligonucleotide
  Antisense strand to SEQ ID NO: 1208680
guucacacagaccugccac

SEQ ID NO: 1208682 - RNA, 19 nt, Artificial Sequence
  Description of Artificial Sequence: Synthetic oligonucleotide
  Sense strand starting at position 1237 of SEQ ID NO: 917101
gggagaucuuugcagugag

SEQ ID NO: 1208683 - RNA, 19 nt, Artificial Sequence
  Description of Artificial Sequence: Synthetic oligonucleotide
  Antisense strand to SEQ ID NO: 1208682
cucacugcaaagaucuccc

SEQ ID NO: 1208684 - RNA, 19 nt, Artificial Sequence
  Description of Artificial Sequence: Synthetic oligonucleotide
  Sense strand starting at position 1240 of SEQ ID NO: 917101
agaucuuugcagugagcca

SEQ ID NO: 1208685 - RNA, 19 nt, Artificial Sequence
  Description of Artificial Sequence: Synthetic oligonucleotide
  Antisense strand to SEQ ID NO: 1208684
uggcucacugcaaagaucu

SEQ ID NO: 1208686 - RNA, 19 nt, Artificial Sequence
  Description of Artificial Sequence: Synthetic oligonucleotide
  Sense strand starting at position 1278 of SEQ ID NO: 917101
gugggaaauuccucaaccu

SEQ ID NO: 1208687 - RNA, 19 nt, Artificial Sequence
  Description of Artificial Sequence: Synthetic oligonucleotide
  Antisense strand to SEQ ID NO: 1208686
agguugaggaauuucccac

SEQ ID NO: 1208688 - RNA, 19 nt, Artificial Sequence
  Description of Artificial Sequence: Synthetic oligonucleotide
  Sense strand starting at position 1353 of SEQ ID NO: 917101
aggcuuuccagugaaugga

SEQ ID NO: 1208689 - RNA, 19 nt, Artificial Sequence
  Description of Artificial Sequence: Synthetic oligonucleotide
  Antisense strand to SEQ ID NO: 1208688
uccauucacuggaaagccu

SEQ ID NO: 1208690 - RNA, 19 nt, Artificial Sequence
  Description of Artificial Sequence: Synthetic oligonucleotide
  Sense strand starting at position 1484 of SEQ ID NO: 917101
gaguccuaaucgcugcaga

SEQ ID NO: 1208691 - RNA, 19 nt, Artificial Sequence
  Description of Artificial Sequence: Synthetic oligonucleotide
  Antisense strand to SEQ ID NO: 1208690
ucugcagcgauuaggacuc

SEQ ID NO: 1208692 - RNA, 19 nt, Artificial Sequence
  Description of Artificial Sequence: Synthetic oligonucleotide
  Sense strand starting at position 1487 of SEQ ID NO: 917101
uccuaaucgcugcagacaa

SEQ ID NO: 1208693 - RNA, 19 nt, Artificial Sequence
  Description of Artificial Sequence: Synthetic oligonucleotide
  Antisense strand to SEQ ID NO: 1208692
uugucugcagcgauuagga

SEQ ID NO: 1208694 - RNA, 19 nt, Artificial Sequence
  Description of Artificial Sequence: Synthetic oligonucleotide
  Sense strand starting at position 1489 of SEQ ID NO: 917101
cuaaucgcugcagacaaau

SEQ ID NO: 1208695 - RNA, 19 nt, Artificial Sequence
  Description of Artificial Sequence: Synthetic oligonucleotide
  Antisense strand to SEQ ID NO: 1208694
auuugucugcagcgauuag

SEQ ID NO: 1208696 - RNA, 19 nt, Artificial Sequence
  Description of Artificial Sequence: Synthetic oligonucleotide
  Sense strand starting at position 1618 of SEQ ID NO: 917101
cagugaaucgcccagcuga

SEQ ID NO: 1208697 - RNA, 19 nt, Artificial Sequence
  Description of Artificial Sequence: Synthetic oligonucleotide
  Antisense strand to SEQ ID NO: 1208696
ucagcugggcgauucacug

SEQ ID NO: 1208698 - RNA, 19 nt, Artificial Sequence
  Description of Artificial Sequence: Synthetic oligonucleotide
  Sense strand starting at position 1981 of SEQ ID NO: 917101
acgugaacgcgcagaacua

SEQ ID NO: 1208699 - RNA, 19 nt, Artificial Sequence
  Description of Artificial Sequence: Synthetic oligonucleotide
  Antisense strand to SEQ ID NO: 1208698
uaguucugcgcguucacgu

SEQ ID NO: 1208700 - RNA, 19 nt, Artificial Sequence
  Description of Artificial Sequence: Synthetic oligonucleotide
  Sense strand starting at position 2126 of SEQ ID NO: 917101
gaagaaaucuaggauggag

SEQ ID NO: 1208701 - RNA, 19 nt, Artificial Sequence
  Description of Artificial Sequence: Synthetic oligonucleotide
  Antisense strand to SEQ ID NO: 1208700
cuccauccuagauuucuuc

SEQ ID NO: 1208702 - RNA, 19 nt, Artificial Sequence
  Description of Artificial Sequence: Synthetic oligonucleotide
  Sense strand starting at position 2157 of SEQ ID NO: 917101
gcccaacaugucugugaga

SEQ ID NO: 1208703 - RNA, 19 nt, Artificial Sequence
  Description of Artificial Sequence: Synthetic oligonucleotide
  Antisense strand to SEQ ID NO: 1208702
ucucacagacauguugggc

SEQ ID NO: 1208704 - RNA, 19 nt, Artificial Sequence
  Description of Artificial Sequence: Synthetic oligonucleotide
  Sense strand starting at position 2159 of SEQ ID NO: 917101
ccaacaugucugugagaga

SEQ ID NO: 1208705 - RNA, 19 nt, Artificial Sequence
  Description of Artificial Sequence: Synthetic oligonucleotide
  Antisense strand to SEQ ID NO: 1208704
ucucucacagacauguugg

SEQ ID NO: 1208706 - RNA, 19 nt, Artificial Sequence
  Description of Artificial Sequence: Synthetic oligonucleotide
  Sense strand starting at position 2160 of SEQ ID NO: 917101
caacaugucugugagagaa

SEQ ID NO: 1208707 - RNA, 19 nt, Artificial Sequence
  Description of Artificial Sequence: Synthetic oligonucleotide
  Antisense strand to SEQ ID NO: 1208706
uucucucacagacauguug

SEQ ID NO: 1208708 - RNA, 19 nt, Artificial Sequence
  Description of Artificial Sequence: Synthetic oligonucleotide
  Sense strand starting at position 2195 of SEQ ID NO: 917101
ggaggaagcgucugcaucu

SEQ ID NO: 1208709 - RNA, 19 nt, Artificial Sequence
  Description of Artificial Sequence: Synthetic oligonucleotide
  Antisense strand to SEQ ID NO: 1208708
agaugcagacgcuuccucc

SEQ ID NO: 1208710 - RNA, 19 nt, Artificial Sequence
  Description of Artificial Sequence: Synthetic oligonucleotide
  Sense strand starting at position 2196 of SEQ ID NO: 917101
gaggaagcgucugcaucuu

SEQ ID NO: 1208711 - RNA, 19 nt, Artificial Sequence
  Description of Artificial Sequence: Synthetic oligonucleotide
  Antisense strand to SEQ ID NO: 1208710
aagaugcagacgcuuccuc

SEQ ID NO: 1208712 - RNA, 19 nt, Artificial Sequence
  Description of Artificial Sequence: Synthetic oligonucleotide
  Sense strand starting at position 2425 of SEQ ID NO: 917101
guaaguaauaucgguaaau

SEQ ID NO: 1208713 - RNA, 19 nt, Artificial Sequence
  Description of Artificial Sequence: Synthetic oligonucleotide
  Antisense strand to SEQ ID NO: 1208712
auuuaccgauauuacuuac

SEQ ID NO: 1208714 - RNA, 19 nt, Artificial Sequence
  Description of Artificial Sequence: Synthetic oligonucleotide
  Sense strand starting at position 2426 of SEQ ID NO: 917101
uaaguaauaucgguaaaug

SEQ ID NO: 1208715 - RNA, 19 nt, Artificial Sequence
  Description of Artificial Sequence: Synthetic oligonucleotide
  Antisense strand to SEQ ID NO: 1208714
cauuuaccgauauuacuua

SEQ ID NO: 1208716 - RNA, 19 nt, Artificial Sequence
  Description of Artificial Sequence: Synthetic oligonucleotide
  Sense strand starting at position 2427 of SEQ ID NO: 917101
aaguaauaucgguaaaugu

SEQ ID NO: 1208717 - RNA, 19 nt, Artificial Sequence
  Description of Artificial Sequence: Synthetic oligonucleotide
  Antisense strand to SEQ ID NO: 1208716
acauuuaccgauauuacuu

SEQ ID NO: 1208718 - RNA, 19 nt, Artificial Sequence
  Description of Artificial Sequence: Synthetic oligonucleotide
  Sense strand starting at position 2436 of SEQ ID NO: 917101
cgguaaauguuaguguuac

SEQ ID NO: 1208719 - RNA, 19 nt, Artificial Sequence
  Description of Artificial Sequence: Synthetic oligonucleotide
  Antisense strand to SEQ ID NO: 1208718
guaacacuaacauuuaccg

SEQ ID NO: 1208720 - RNA, 19 nt, Artificial Sequence
  Description of Artificial Sequence: Synthetic oligonucleotide
  Sense strand starting at position 2448 of SEQ ID NO: 917101
guguuacgugcguccguau

SEQ ID NO: 1208721 - RNA, 19 nt, Artificial Sequence
  Description of Artificial Sequence: Synthetic oligonucleotide
  Antisense strand to SEQ ID NO: 1208720
auacggacgcacguaacac

SEQ ID NO: 1208722 - RNA, 19 nt, Artificial Sequence
  Description of Artificial Sequence: Synthetic oligonucleotide
  Sense strand starting at position 2449 of SEQ ID NO: 917101
uguuacgugcguccguaua

SEQ ID NO: 1208723 - RNA, 19 nt, Artificial Sequence
  Description of Artificial Sequence: Synthetic oligonucleotide
  Antisense strand to SEQ ID NO: 1208722
uauacggacgcacguaaca

SEQ ID NO: 1208724 - RNA, 19 nt, Artificial Sequence
  Description of Artificial Sequence: Synthetic oligonucleotide
  Sense strand starting at position 2494 of SEQ ID NO: 917101
gagcaacacgccuguuuau

SEQ ID NO: 1208725 - RNA, 19 nt, Artificial Sequence
  Description of Artificial Sequence: Synthetic oligonucleotide
  Antisense strand to SEQ ID NO: 1208724
auaaacaggcguguugcuc

SEQ ID NO: 1208726 - RNA, 19 nt, Artificial Sequence
  Description of Artificial Sequence: Synthetic oligonucleotide
  Sense strand starting at position 2558 of SEQ ID NO: 917101
ggguggugggcuugucauu

SEQ ID NO: 1208727 - RNA, 19 nt, Artificial Sequence
  Description of Artificial Sequence: Synthetic oligonucleotide
  Antisense strand to SEQ ID NO: 1208726
aaugacaagcccaccaccc

SEQ ID NO: 1208728 - RNA, 19 nt, Artificial Sequence
  Description of Artificial Sequence: Synthetic oligonucleotide
  Sense strand starting at position 2565 of SEQ ID NO: 917101
gggcuugucauugguucuu

SEQ ID NO: 1208729 - RNA, 19 nt, Artificial Sequence
  Description of Artificial Sequence: Synthetic oligonucleotide
  Antisense strand to SEQ ID NO: 1208728
aagaaccaaugacaagccc

SEQ ID NO: 1208730 - RNA, 19 nt, Artificial Sequence
  Description of Artificial Sequence: Synthetic oligonucleotide
  Sense strand starting at position 2567 of SEQ ID NO: 917101
gcuugucauugguucuuau

SEQ ID NO: 1208731 - RNA, 19 nt, Artificial Sequence
  Description of Artificial Sequence: Synthetic oligonucleotide
  Antisense strand to SEQ ID NO: 1208730
auaagaaccaaugacaagc

SEQ ID NO: 1208732 - RNA, 19 nt, Artificial Sequence
  Description of Artificial Sequence: Synthetic oligonucleotide
  Sense strand starting at position 2579 of SEQ ID NO: 917101
uucuuauagcuuugggaua

SEQ ID NO: 1208733 - RNA, 19 nt, Artificial Sequence
  Description of Artificial Sequence: Synthetic oligonucleotide
  Antisense strand to SEQ ID NO: 1208732
uaucccaaagcuauaagaa

SEQ ID NO: 1208734 - RNA, 19 nt, Artificial Sequence
  Description of Artificial Sequence: Synthetic oligonucleotide
  Sense strand starting at position 2580 of SEQ ID NO: 917101
ucuuauagcuuugggauag

SEQ ID NO: 1208735 - RNA, 19 nt, Artificial Sequence
  Description of Artificial Sequence: Synthetic oligonucleotide
  Antisense strand to SEQ ID NO: 1208734
cuaucccaaagcuauaaga

SEQ ID NO: 1208736 - RNA, 19 nt, Artificial Sequence
  Description of Artificial Sequence: Synthetic oligonucleotide
  Sense strand starting at position 3006 of SEQ ID NO: 917101
ggcggagaggaauguuaca

SEQ ID NO: 1208737 - RNA, 19 nt, Artificial Sequence
  Description of Artificial Sequence: Synthetic oligonucleotide
  Antisense strand to SEQ ID NO: 1208736
uguaacauuccucuccgcc

SEQ ID NO: 1208738 - RNA, 19 nt, Artificial Sequence
  Description of Artificial Sequence: Synthetic oligonucleotide
  Sense strand starting at position 3011 of SEQ ID NO: 917101
agaggaauguuacaaagua

SEQ ID NO: 1208739 - RNA, 19 nt, Artificial Sequence
  Description of Artificial Sequence: Synthetic oligonucleotide
  Antisense strand to SEQ ID NO: 1208738
uacuuuguaacauuccucu

SEQ ID NO: 1208740 - RNA, 19 nt, Artificial Sequence
  Description of Artificial Sequence: Synthetic oligonucleotide
  Sense strand starting at position 3042 of SEQ ID NO: 917101
ccgggaauauuacaaagua

SEQ ID NO: 1208741 - RNA, 19 nt, Artificial Sequence
  Description of Artificial Sequence: Synthetic oligonucleotide
  Antisense strand to SEQ ID NO: 1208740
uacuuuguaauauucccgg

SEQ ID NO: 1208742 - RNA, 19 nt, Artificial Sequence
  Description of Artificial Sequence: Synthetic oligonucleotide
  Sense strand starting at position 3846 of SEQ ID NO: 917101
ccuguaauggcucauaccu

SEQ ID NO: 1208743 - RNA, 19 nt, Artificial Sequence
  Description of Artificial Sequence: Synthetic oligonucleotide
  Antisense strand to SEQ ID NO: 1208742
agguaugagccauuacagg

SEQ ID NO: 1208744 - RNA, 19 nt, Artificial Sequence
  Description of Artificial Sequence: Synthetic oligonucleotide
  Sense strand starting at position 3 of SEQ ID NO: 917102
aacucugagucccaaagga

SEQ ID NO: 1208745 - RNA, 19 nt, Artificial Sequence
  Description of Artificial Sequence: Synthetic oligonucleotide
  Antisense strand to SEQ ID NO: 1208744
uccuuugggacucagaguu

SEQ ID NO: 1208746 - RNA, 19 nt, Artificial Sequence
  Description of Artificial Sequence: Synthetic oligonucleotide
  Sense strand starting at position 197 of SEQ ID NO: 917102
gcuucuguccugggacgaa

SEQ ID NO: 1208747 - RNA, 19 nt, Artificial Sequence
  Description of Artificial Sequence: Synthetic oligonucleotide
  Antisense strand to SEQ ID NO: 1208746
uucgucccaggacagaagc

SEQ ID NO: 1208748 - RNA, 19 nt, Artificial Sequence
  Description of Artificial Sequence: Synthetic oligonucleotide
  Sense strand starting at position 515 of SEQ ID NO: 917102
cuccaaugacgccaaguau

SEQ ID NO: 1208749 - RNA, 19 nt, Artificial Sequence
  Description of Artificial Sequence: Synthetic oligonucleotide
  Antisense strand to SEQ ID NO: 1208748
auacuuggcgucauuggag

SEQ ID NO: 1208750 - RNA, 19 nt, Artificial Sequence
  Description of Artificial Sequence: Synthetic oligonucleotide
  Sense strand starting at position 588 of SEQ ID NO: 917102
uccagacucccuugucaca

SEQ ID NO: 1208751 - RNA, 19 nt, Artificial Sequence
  Description of Artificial Sequence: Synthetic oligonucleotide
  Antisense strand to SEQ ID NO: 1208750
ugugacaagggagucugga

SEQ ID NO: 1208752 - RNA, 19 nt, Artificial Sequence
  Description of Artificial Sequence: Synthetic oligonucleotide
  Sense strand starting at position 793 of SEQ ID NO: 917102
gacgguuccaaaggguuau

SEQ ID NO: 1208753 - RNA, 19 nt, Artificial Sequence
  Description of Artificial Sequence: Synthetic oligonucleotide
  Antisense strand to SEQ ID NO: 1208752
auaacccuuuggaaccguc

SEQ ID NO: 1208754 - RNA, 19 nt, Artificial Sequence
  Description of Artificial Sequence: Synthetic oligonucleotide
  Sense strand starting at position 797 of SEQ ID NO: 917102
guuccaaaggguuauugga

SEQ ID NO: 1208755 - RNA, 19 nt, Artificial Sequence
  Description of Artificial Sequence: Synthetic oligonucleotide
  Antisense strand to SEQ ID NO: 1208754
uccaauaacccuuuggaac

SEQ ID NO: 1208756 - RNA, 19 nt, Artificial Sequence
  Description of Artificial Sequence: Synthetic oligonucleotide
  Sense strand starting at position 1118 of SEQ ID NO: 917102
uuagcuaaaguuugcuuaa

SEQ ID NO: 1208757 - RNA, 19 nt, Artificial Sequence
  Description of Artificial Sequence: Synthetic oligonucleotide
  Antisense strand to SEQ ID NO: 1208756
uuaagcaaacuuuagcuaa

SEQ ID NO: 1208758 - RNA, 19 nt, Artificial Sequence
  Description of Artificial Sequence: Synthetic oligonucleotide
  Sense strand starting at position 1121 of SEQ ID NO: 917102
gcuaaaguuugcuuaagga

SEQ ID NO: 1208759 - RNA, 19 nt, Artificial Sequence
  Description of Artificial Sequence: Synthetic oligonucleotide
  Antisense strand to SEQ ID NO: 1208758
uccuuaagcaaacuuuagc

SEQ ID NO: 1208760 - RNA, 19 nt, Artificial Sequence
  Description of Artificial Sequence: Synthetic oligonucleotide
  Sense strand starting at position 1201 of SEQ ID NO: 917102
cguggcaggucugugugaa

SEQ ID NO: 1208761 - RNA, 19 nt, Artificial Sequence
  Description of Artificial Sequence: Synthetic oligonucleotide
  Antisense strand to SEQ ID NO: 1208760
uucacacagaccugccacg

SEQ ID NO: 1208762 - RNA, 19 nt, Artificial Sequence
  Description of Artificial Sequence: Synthetic oligonucleotide
  Sense strand starting at position 1202 of SEQ ID NO: 917102
guggcaggucugugugaac

SEQ ID NO: 1208763 - RNA, 19 nt, Artificial Sequence
  Description of Artificial Sequence: Synthetic oligonucleotide
  Antisense strand to SEQ ID NO: 1208762
guucacacagaccugccac

SEQ ID NO: 1208764 - RNA, 19 nt, Artificial Sequence
  Description of Artificial Sequence: Synthetic oligonucleotide
  Sense strand starting at position 1261 of SEQ ID NO: 917102
gggagaucuuugcagugag

SEQ ID NO: 1208765 - RNA, 19 nt, Artificial Sequence
  Description of Artificial Sequence: Synthetic oligonucleotide
  Antisense strand to SEQ ID NO: 1208764
cucacugcaaagaucuccc

SEQ ID NO: 1208766 - RNA, 19 nt, Artificial Sequence
  Description of Artificial Sequence: Synthetic oligonucleotide
  Sense strand starting at position 1264 of SEQ ID NO: 917102
agaucuuugcagugagcca

SEQ ID NO: 1208767 - RNA, 19 nt, Artificial Sequence
  Description of Artificial Sequence: Synthetic oligonucleotide
  Antisense strand to SEQ ID NO: 1208766
uggcucacugcaaagaucu

SEQ ID NO: 1208768 - RNA, 19 nt, Artificial Sequence
  Description of Artificial Sequence: Synthetic oligonucleotide
  Sense strand starting at position 1302 of SEQ ID NO: 917102
gugggaaauuccucaaccu

SEQ ID NO: 1208769 - RNA, 19 nt, Artificial Sequence
  Description of Artificial Sequence: Synthetic oligonucleotide
  Antisense strand to SEQ ID NO: 1208768
agguugaggaauuucccac

SEQ ID NO: 1208770 - RNA, 19 nt, Artificial Sequence
  Description of Artificial Sequence: Synthetic oligonucleotide
  Sense strand starting at position 1377 of SEQ ID NO: 917102
aggcuuuccagugaaugga

SEQ ID NO: 1208771 - RNA, 19 nt, Artificial Sequence
  Description of Artificial Sequence: Synthetic oligonucleotide
  Antisense strand to SEQ ID NO: 1208770
uccauucacuggaaagccu

SEQ ID NO: 1208772 - RNA, 19 nt, Artificial Sequence
  Description of Artificial Sequence: Synthetic oligonucleotide
  Sense strand starting at position 1508 of SEQ ID NO: 917102
gaguccuaaucgcugcaga

SEQ ID NO: 1208773 - RNA, 19 nt, Artificial Sequence
  Description of Artificial Sequence: Synthetic oligonucleotide
  Antisense strand to SEQ ID NO: 1208772
ucugcagcgauuaggacuc

SEQ ID NO: 1208774 - RNA, 19 nt, Artificial Sequence
  Description of Artificial Sequence: Synthetic oligonucleotide
  Sense strand starting at position 1511 of SEQ ID NO: 917102
uccuaaucgcugcagacaa

SEQ ID NO: 1208775 - RNA, 19 nt, Artificial Sequence
  Description of Artificial Sequence: Synthetic oligonucleotide
  Antisense strand to SEQ ID NO: 1208774
uugucugcagcgauuagga

SEQ ID NO: 1208776 - RNA, 19 nt, Artificial Sequence
  Description of Artificial Sequence: Synthetic oligonucleotide
  Sense strand starting at position 1513 of SEQ ID NO: 917102
cuaaucgcugcagacaaau

SEQ ID NO: 1208777 - RNA, 19 nt, Artificial Sequence
  Description of Artificial Sequence: Synthetic oligonucleotide
  Antisense strand to SEQ ID NO: 1208776
auuugucugcagcgauuag

SEQ ID NO: 1208778 - RNA, 19 nt, Artificial Sequence
  Description of Artificial Sequence: Synthetic oligonucleotide
  Sense strand starting at position 1642 of SEQ ID NO: 917102
cagugaaucgcccagcuga

SEQ ID NO: 1208779 - RNA, 19 nt, Artificial Sequence
  Description of Artificial Sequence: Synthetic oligonucleotide
  Antisense strand to SEQ ID NO: 1208778
ucagcugggcgauucacug

SEQ ID NO: 1208780 - RNA, 19 nt, Artificial Sequence
  Description of Artificial Sequence: Synthetic oligonucleotide
  Sense strand starting at position 2005 of SEQ ID NO: 917102
acgugaacgcgcagaacua

SEQ ID NO: 1208781 - RNA, 19 nt, Artificial Sequence
  Description of Artificial Sequence: Synthetic oligonucleotide
  Antisense strand to SEQ ID NO: 1208780
uaguucugcgcguucacgu

SEQ ID NO: 1208782 - RNA, 19 nt, Artificial Sequence
  Description of Artificial Sequence: Synthetic oligonucleotide
  Sense strand starting at position 2150 of SEQ ID NO: 917102
gaagaaaucuaggauggag

SEQ ID NO: 1208783 - RNA, 19 nt, Artificial Sequence
  Description of Artificial Sequence: Synthetic oligonucleotide
  Antisense strand to SEQ ID NO: 1208782
cuccauccuagauuucuuc

SEQ ID NO: 1208784 - RNA, 19 nt, Artificial Sequence
  Description of Artificial Sequence: Synthetic oligonucleotide
  Sense strand starting at position 2181 of SEQ ID NO: 917102
gcccaacaugucugugaga

SEQ ID NO: 1208785 - RNA, 19 nt, Artificial Sequence
  Description of Artificial Sequence: Synthetic oligonucleotide
  Antisense strand to SEQ ID NO: 1208784
ucucacagacauguugggc

SEQ ID NO: 1208786 - RNA, 19 nt, Artificial Sequence
  Description of Artificial Sequence: Synthetic oligonucleotide
  Sense strand starting at position 2183 of SEQ ID NO: 917102
ccaacaugucugugagaga

SEQ ID NO: 1208787 - RNA, 19 nt, Artificial Sequence
  Description of Artificial Sequence: Synthetic oligonucleotide
  Antisense strand to SEQ ID NO: 1208786
ucucucacagacauguugg

SEQ ID NO: 1208788 - RNA, 19 nt, Artificial Sequence
  Description of Artificial Sequence: Synthetic oligonucleotide
  Sense strand starting at position 2184 of SEQ ID NO: 917102
caacaugucugugagagaa

SEQ ID NO: 1208789 - RNA, 19 nt, Artificial Sequence
  Description of Artificial Sequence: Synthetic oligonucleotide
  Antisense strand to SEQ ID NO: 1208788
uucucucacagacauguug

SEQ ID NO: 1208790 - RNA, 19 nt, Artificial Sequence
  Description of Artificial Sequence: Synthetic oligonucleotide
  Sense strand starting at position 2219 of SEQ ID NO: 917102
ggaggaagcgucugcaucu

SEQ ID NO: 1208791 - RNA, 19 nt, Artificial Sequence
  Description of Artificial Sequence: Synthetic oligonucleotide
  Antisense strand to SEQ ID NO: 1208790
agaugcagacgcuuccucc

SEQ ID NO: 1208792 - RNA, 19 nt, Artificial Sequence
  Description of Artificial Sequence: Synthetic oligonucleotide
  Sense strand starting at position 2220 of SEQ ID NO: 917102
gaggaagcgucugcaucuu

SEQ ID NO: 1208793 - RNA, 19 nt, Artificial Sequence
  Description of Artificial Sequence: Synthetic oligonucleotide
  Antisense strand to SEQ ID NO: 1208792
aagaugcagacgcuuccuc

SEQ ID NO: 1208794 - RNA, 19 nt, Artificial Sequence
  Description of Artificial Sequence: Synthetic oligonucleotide
  Sense strand starting at position 2449 of SEQ ID NO: 917102
guaaguaauaucgguaaau

SEQ ID NO: 1208795 - RNA, 19 nt, Artificial Sequence
  Description of Artificial Sequence: Synthetic oligonucleotide
  Antisense strand to SEQ ID NO: 1208794
auuuaccgauauuacuuac

SEQ ID NO: 1208796 - RNA, 19 nt, Artificial Sequence
  Description of Artificial Sequence: Synthetic oligonucleotide
  Sense strand starting at position 2450 of SEQ ID NO: 917102
uaaguaauaucgguaaaug

SEQ ID NO: 1208797 - RNA, 19 nt, Artificial Sequence
  Description of Artificial Sequence: Synthetic oligonucleotide
  Antisense strand to SEQ ID NO: 1208796
cauuuaccgauauuacuua

SEQ ID NO: 1208798 - RNA, 19 nt, Artificial Sequence
  Description of Artificial Sequence: Synthetic oligonucleotide
  Sense strand starting at position 2451 of SEQ ID NO: 917102
aaguaauaucgguaaaugu

SEQ ID NO: 1208799 - RNA, 19 nt, Artificial Sequence
  Description of Artificial Sequence: Synthetic oligonucleotide
  Antisense strand to SEQ ID NO: 1208798
acauuuaccgauauuacuu

SEQ ID NO: 1208800 - RNA, 19 nt, Artificial Sequence
  Description of Artificial Sequence: Synthetic oligonucleotide
  Sense strand starting at position 2460 of SEQ ID NO: 917102
cgguaaauguuaguguuac

SEQ ID NO: 1208801 - RNA, 19 nt, Artificial Sequence
  Description of Artificial Sequence: Synthetic oligonucleotide
  Antisense strand to SEQ ID NO: 1208800
guaacacuaacauuuaccg

SEQ ID NO: 1208802 - RNA, 19 nt, Artificial Sequence
  Description of Artificial Sequence: Synthetic oligonucleotide
  Sense strand starting at position 2472 of SEQ ID NO: 917102
guguuacgugcguccguau

SEQ ID NO: 1208803 - RNA, 19 nt, Artificial Sequence
  Description of Artificial Sequence: Synthetic oligonucleotide
  Antisense strand to SEQ ID NO: 1208802
auacggacgcacguaacac

SEQ ID NO: 1208804 - RNA, 19 nt, Artificial Sequence
  Description of Artificial Sequence: Synthetic oligonucleotide
  Sense strand starting at position 2473 of SEQ ID NO: 917102
uguuacgugcguccguaua

SEQ ID NO: 1208805 - RNA, 19 nt, Artificial Sequence
  Description of Artificial Sequence: Synthetic oligonucleotide
  Antisense strand to SEQ ID NO: 1208804
uauacggacgcacguaaca

SEQ ID NO: 1208806 - RNA, 19 nt, Artificial Sequence
  Description of Artificial Sequence: Synthetic oligonucleotide
  Sense strand starting at position 2518 of SEQ ID NO: 917102
gagcaacacgccuguuuau

SEQ ID NO: 1208807 - RNA, 19 nt, Artificial Sequence
  Description of Artificial Sequence: Synthetic oligonucleotide
  Antisense strand to SEQ ID NO: 1208806
auaaacaggcguguugcuc

SEQ ID NO: 1208808 - RNA, 19 nt, Artificial Sequence
  Description of Artificial Sequence: Synthetic oligonucleotide
  Sense strand starting at position 2582 of SEQ ID NO: 917102
ggguggugggcuugucauu

SEQ ID NO: 1208809 - RNA, 19 nt, Artificial Sequence
  Description of Artificial Sequence: Synthetic oligonucleotide
  Antisense strand to SEQ ID NO: 1208808
aaugacaagcccaccaccc

SEQ ID NO: 1208810 - RNA, 19 nt, Artificial Sequence
  Description of Artificial Sequence: Synthetic oligonucleotide
  Sense strand starting at position 2589 of SEQ ID NO: 917102
gggcuugucauugguucuu

SEQ ID NO: 1208811 - RNA, 19 nt, Artificial Sequence
  Description of Artificial Sequence: Synthetic oligonucleotide
  Antisense strand to SEQ ID NO: 1208810
aagaaccaaugacaagccc

SEQ ID NO: 1208812 - RNA, 19 nt, Artificial Sequence
  Description of Artificial Sequence: Synthetic oligonucleotide
  Sense strand starting at position 2591 of SEQ ID NO: 917102
gcuugucauugguucuuau

SEQ ID NO: 1208813 - RNA, 19 nt, Artificial Sequence
  Description of Artificial Sequence: Synthetic oligonucleotide
  Antisense strand to SEQ ID NO: 1208812
auaagaaccaaugacaagc

SEQ ID NO: 1208814 - RNA, 19 nt, Artificial Sequence
  Description of Artificial Sequence: Synthetic oligonucleotide
  Sense strand starting at position 2603 of SEQ ID NO: 917102
uucuuauagcuuugggaua

SEQ ID NO: 1208815 - RNA, 19 nt, Artificial Sequence
  Description of Artificial Sequence: Synthetic oligonucleotide
  Antisense strand to SEQ ID NO: 1208814
uaucccaaagcuauaagaa

SEQ ID NO: 1208816 - RNA, 19 nt, Artificial Sequence
  Description of Artificial Sequence: Synthetic oligonucleotide
  Sense strand starting at position 3030 of SEQ ID NO: 917102
ggcggagaggaauguuaca

SEQ ID NO: 1208817 - RNA, 19 nt, Artificial Sequence
  Description of Artificial Sequence: Synthetic oligonucleotide
  Antisense strand to SEQ ID NO: 1208816
uguaacauuccucuccgcc

SEQ ID NO: 1208818 - RNA, 19 nt, Artificial Sequence
  Description of Artificial Sequence: Synthetic oligonucleotide
  Sense strand starting at position 3035 of SEQ ID NO: 917102
agaggaauguuacaaagua

SEQ ID NO: 1208819 - RNA, 19 nt, Artificial Sequence
  Description of Artificial Sequence: Synthetic oligonucleotide
  Antisense strand to SEQ ID NO: 1208818
uacuuuguaacauuccucu

SEQ ID NO: 1208820 - RNA, 19 nt, Artificial Sequence
  Description of Artificial Sequence: Synthetic oligonucleotide
  Sense strand starting at position 3066 of SEQ ID NO: 917102
ccgggaauauuacaaagua

SEQ ID NO: 1208821 - RNA, 19 nt, Artificial Sequence
  Description of Artificial Sequence: Synthetic oligonucleotide
  Antisense strand to SEQ ID NO: 1208820
uacuuuguaauauucccgg

SEQ ID NO: 1208822 - RNA, 19 nt, Artificial Sequence
  Description of Artificial Sequence: Synthetic oligonucleotide
  Sense strand starting at position 3870 of SEQ ID NO: 917102
ccuguaauggcucauaccu

SEQ ID NO: 1208823 - RNA, 19 nt, Artificial Sequence
  Description of Artificial Sequence: Synthetic oligonucleotide
  Antisense strand to SEQ ID NO: 1208822
agguaugagccauuacagg

SEQ ID NO: 1208824 - RNA, 19 nt, Artificial Sequence
  Description of Artificial Sequence: Synthetic oligonucleotide
  Sense strand starting at position 18 of SEQ ID NO: 917103
ccuguuuauuugucaggca

SEQ ID NO: 1208825 - RNA, 19 nt, Artificial Sequence
  Description of Artificial Sequence: Synthetic oligonucleotide
  Antisense strand to SEQ ID NO: 1208824
ugccugacaaauaaacagg

SEQ ID NO: 1208826 - RNA, 19 nt, Artificial Sequence
  Description of Artificial Sequence: Synthetic oligonucleotide
  Sense strand starting at position 72 of SEQ ID NO: 917103
gaaagaagcguauggugaa

SEQ ID NO: 1208827 - RNA, 19 nt, Artificial Sequence
  Description of Artificial Sequence: Synthetic oligonucleotide
  Antisense strand to SEQ ID NO: 1208826
uucaccauacgcuucuuuc

SEQ ID NO: 1208828 - RNA, 19 nt, Artificial Sequence
  Description of Artificial Sequence: Synthetic oligonucleotide
  Sense strand starting at position 239 of SEQ ID NO: 917103
cuucuaucucuauauaggu

SEQ ID NO: 1208829 - RNA, 19 nt, Artificial Sequence
  Description of Artificial Sequence: Synthetic oligonucleotide
  Antisense strand to SEQ ID NO: 1208828
accuauauagagauagaag

SEQ ID NO: 1208830 - RNA, 19 nt, Artificial Sequence
  Description of Artificial Sequence: Synthetic oligonucleotide
  Sense strand starting at position 271 of SEQ ID NO: 917103
augggucuugauugcaaga

SEQ ID NO: 1208831 - RNA, 19 nt, Artificial Sequence
  Description of Artificial Sequence: Synthetic oligonucleotide
  Antisense strand to SEQ ID NO: 1208830
ucuugcaaucaagacccau

SEQ ID NO: 1208832 - RNA, 19 nt, Artificial Sequence
  Description of Artificial Sequence: Synthetic oligonucleotide
  Sense strand starting at position 320 of SEQ ID NO: 917103
uuaauaauccugcagugua

SEQ ID NO: 1208833 - RNA, 19 nt, Artificial Sequence
  Description of Artificial Sequence: Synthetic oligonucleotide
  Antisense strand to SEQ ID NO: 1208832
uacacugcaggauuauuaa

SEQ ID NO: 1208834 - RNA, 19 nt, Artificial Sequence
  Description of Artificial Sequence: Synthetic oligonucleotide
  Sense strand starting at position 407 of SEQ ID NO: 917103
gugauagggcuuuauggca

SEQ ID NO: 1208835 - RNA, 19 nt, Artificial Sequence
  Description of Artificial Sequence: Synthetic oligonucleotide
  Antisense strand to SEQ ID NO: 1208834
ugccauaaagcccuaucac

SEQ ID NO: 1208836 - RNA, 19 nt, Artificial Sequence
  Description of Artificial Sequence: Synthetic oligonucleotide
  Sense strand starting at position 414 of SEQ ID NO: 917103
ggcuuuauggcagagaaau

SEQ ID NO: 1208837 - RNA, 19 nt, Artificial Sequence
  Description of Artificial Sequence: Synthetic oligonucleotide
  Antisense strand to SEQ ID NO: 1208836
auuucucugccauaaagcc

SEQ ID NO: 1208838 - RNA, 19 nt, Artificial Sequence
  Description of Artificial Sequence: Synthetic oligonucleotide
  Sense strand starting at position 531 of SEQ ID NO: 917103
gucagaaacuugguaacua

SEQ ID NO: 1208839 - RNA, 19 nt, Artificial Sequence
  Description of Artificial Sequence: Synthetic oligonucleotide
  Antisense strand to SEQ ID NO: 1208838
uaguuaccaaguuucugac

SEQ ID NO: 1208840 - RNA, 19 nt, Artificial Sequence
  Description of Artificial Sequence: Synthetic oligonucleotide
  Sense strand starting at position 600 of SEQ ID NO: 917103
caggguagguaaucacaga

SEQ ID NO: 1208841 - RNA, 19 nt, Artificial Sequence
  Description of Artificial Sequence: Synthetic oligonucleotide
  Antisense strand to SEQ ID NO: 1208840
ucugugauuaccuacccug

SEQ ID NO: 1208842 - RNA, 19 nt, Artificial Sequence
  Description of Artificial Sequence: Synthetic oligonucleotide
  Sense strand starting at position 607 of SEQ ID NO: 917103
gguaaucacagaugucaag

SEQ ID NO: 1208843 - RNA, 19 nt, Artificial Sequence
  Description of Artificial Sequence: Synthetic oligonucleotide
  Antisense strand to SEQ ID NO: 1208842
cuugacaucugugauuacc

SEQ ID NO: 1208844 - RNA, 19 nt, Artificial Sequence
  Description of Artificial Sequence: Synthetic oligonucleotide
  Sense strand starting at position 617 of SEQ ID NO: 917103
gaugucaagucgucuauuu

SEQ ID NO: 1208845 - RNA, 19 nt, Artificial Sequence
  Description of Artificial Sequence: Synthetic oligonucleotide
  Antisense strand to SEQ ID NO: 1208844
aaauagacgacuugacauc

SEQ ID NO: 1208846 - RNA, 19 nt, Artificial Sequence
  Description of Artificial Sequence: Synthetic oligonucleotide
  Sense strand starting at position 637 of SEQ ID NO: 917103
cuugccuauuugucuuuga

SEQ ID NO: 1208847 - RNA, 19 nt, Artificial Sequence
  Description of Artificial Sequence: Synthetic oligonucleotide
  Antisense strand to SEQ ID NO: 1208846
ucaaagacaaauaggcaag

SEQ ID NO: 1208848 - RNA, 19 nt, Artificial Sequence
  Description of Artificial Sequence: Synthetic oligonucleotide
  Sense strand starting at position 640 of SEQ ID NO: 917103
gccuauuugucuuugacaa

SEQ ID NO: 1208849 - RNA, 19 nt, Artificial Sequence
  Description of Artificial Sequence: Synthetic oligonucleotide
  Antisense strand to SEQ ID NO: 1208848
uugucaaagacaaauaggc

SEQ ID NO: 1208850 - RNA, 19 nt, Artificial Sequence
  Description of Artificial Sequence: Synthetic oligonucleotide
  Sense strand starting at position 978 of SEQ ID NO: 917103
gcuacauaucuggacacuu

SEQ ID NO: 1208851 - RNA, 19 nt, Artificial Sequence
  Description of Artificial Sequence: Synthetic oligonucleotide
  Antisense strand to SEQ ID NO: 1208850
aaguguccagauauguagc

SEQ ID NO: 1208852 - RNA, 19 nt, Artificial Sequence
  Description of Artificial Sequence: Synthetic oligonucleotide
  Sense strand starting at position 986 of SEQ ID NO: 917103
ucuggacacuugucucaaa

SEQ ID NO: 1208853 - RNA, 19 nt, Artificial Sequence
  Description of Artificial Sequence: Synthetic oligonucleotide
  Antisense strand to SEQ ID NO: 1208852
uuugagacaaguguccaga

SEQ ID NO: 1208854 - RNA, 19 nt, Artificial Sequence
  Description of Artificial Sequence: Synthetic oligonucleotide
  Sense strand starting at position 1098 of SEQ ID NO: 917103
cugacagaaauccguggaa

SEQ ID NO: 1208855 - RNA, 19 nt, Artificial Sequence
  Description of Artificial Sequence: Synthetic oligonucleotide
  Antisense strand to SEQ ID NO: 1208854
uuccacggauuucugucag

SEQ ID NO: 1208856 - RNA, 19 nt, Artificial Sequence
  Description of Artificial Sequence: Synthetic oligonucleotide
  Sense strand starting at position 1100 of SEQ ID NO: 917103
gacagaaauccguggaagu

SEQ ID NO: 1208857 - RNA, 19 nt, Artificial Sequence
  Description of Artificial Sequence: Synthetic oligonucleotide
  Antisense strand to SEQ ID NO: 1208856
acuuccacggauuucuguc

SEQ ID NO: 1208858 - RNA, 19 nt, Artificial Sequence
  Description of Artificial Sequence: Synthetic oligonucleotide
  Sense strand starting at position 1101 of SEQ ID NO: 917103
acagaaauccguggaagug

SEQ ID NO: 1208859 - RNA, 19 nt, Artificial Sequence
  Description of Artificial Sequence: Synthetic oligonucleotide
  Antisense strand to SEQ ID NO: 1208858
cacuuccacggauuucugu

SEQ ID NO: 1208860 - RNA, 19 nt, Artificial Sequence
  Description of Artificial Sequence: Synthetic oligonucleotide
  Sense strand starting at position 1349 of SEQ ID NO: 917103
gccagugcugaugaacaga

SEQ ID NO: 1208861 - RNA, 19 nt, Artificial Sequence
  Description of Artificial Sequence: Synthetic oligonucleotide
  Antisense strand to SEQ ID NO: 1208860
ucuguucaucagcacuggc

SEQ ID NO: 1208862 - RNA, 19 nt, Artificial Sequence
  Description of Artificial Sequence: Synthetic oligonucleotide
  Sense strand starting at position 1418 of SEQ ID NO: 917103
ggcuccguccaucagagaa

SEQ ID NO: 1208863 - RNA, 19 nt, Artificial Sequence
  Description of Artificial Sequence: Synthetic oligonucleotide
  Antisense strand to SEQ ID NO: 1208862
uucucugauggacggagcc

SEQ ID NO: 1208864 - RNA, 19 nt, Artificial Sequence
  Description of Artificial Sequence: Synthetic oligonucleotide
  Sense strand starting at position 1528 of SEQ ID NO: 917103
uggaaagggucagauuuca

SEQ ID NO: 1208865 - RNA, 19 nt, Artificial Sequence
  Description of Artificial Sequence: Synthetic oligonucleotide
  Antisense strand to SEQ ID NO: 1208864
ugaaaucugacccuuucca

SEQ ID NO: 1208866 - RNA, 19 nt, Artificial Sequence
  Description of Artificial Sequence: Synthetic oligonucleotide
  Sense strand starting at position 1533 of SEQ ID NO: 917103
agggucagauuucagagaa

SEQ ID NO: 1208867 - RNA, 19 nt, Artificial Sequence
  Description of Artificial Sequence: Synthetic oligonucleotide
  Antisense strand to SEQ ID NO: 1208866
uucucugaaaucugacccu

SEQ ID NO: 1208868 - RNA, 19 nt, Artificial Sequence
  Description of Artificial Sequence: Synthetic oligonucleotide
  Sense strand starting at position 2368 of SEQ ID NO: 917103
cgucaauuaccuggaauug

SEQ ID NO: 1208869 - RNA, 19 nt, Artificial Sequence
  Description of Artificial Sequence: Synthetic oligonucleotide
  Antisense strand to SEQ ID NO: 1208868
caauuccagguaauugacg

SEQ ID NO: 1208870 - RNA, 19 nt, Artificial Sequence
  Description of Artificial Sequence: Synthetic oligonucleotide
  Sense strand starting at position 2433 of SEQ ID NO: 917103
cagacaacagucuggaauu

SEQ ID NO: 1208871 - RNA, 19 nt, Artificial Sequence
  Description of Artificial Sequence: Synthetic oligonucleotide
  Antisense strand to SEQ ID NO: 1208870
aauuccagacuguugucug

SEQ ID NO: 1208872 - RNA, 19 nt, Artificial Sequence
  Description of Artificial Sequence: Synthetic oligonucleotide
  Sense strand starting at position 2635 of SEQ ID NO: 917103
ucugaauagagauguguuc

SEQ ID NO: 1208873 - RNA, 19 nt, Artificial Sequence
  Description of Artificial Sequence: Synthetic oligonucleotide
  Antisense strand to SEQ ID NO: 1208872
gaacacaucucuauucaga

SEQ ID NO: 1208874 - RNA, 19 nt, Artificial Sequence
  Description of Artificial Sequence: Synthetic oligonucleotide
  Sense strand starting at position 2637 of SEQ ID NO: 917103
ugaauagagauguguucca

SEQ ID NO: 1208875 - RNA, 19 nt, Artificial Sequence
  Description of Artificial Sequence: Synthetic oligonucleotide
  Antisense strand to SEQ ID NO: 1208874
uggaacacaucucuauuca

SEQ ID NO: 1208876 - RNA, 19 nt, Artificial Sequence
  Description of Artificial Sequence: Synthetic oligonucleotide
  Sense strand starting at position 2837 of SEQ ID NO: 917103
gccuacaaacagugaguaa

SEQ ID NO: 1208877 - RNA, 19 nt, Artificial Sequence
  Description of Artificial Sequence: Synthetic oligonucleotide
  Antisense strand to SEQ ID NO: 1208876
uuacucacuguuuguaggc

SEQ ID NO: 1208878 - RNA, 19 nt, Artificial Sequence
  Description of Artificial Sequence: Synthetic oligonucleotide
  Sense strand starting at position 2866 of SEQ ID NO: 917103
guuagaaucuguuuauaac

SEQ ID NO: 1208879 - RNA, 19 nt, Artificial Sequence
  Description of Artificial Sequence: Synthetic oligonucleotide
  Antisense strand to SEQ ID NO: 1208878
guuauaaacagauucuaac

SEQ ID NO: 1208880 - RNA, 19 nt, Artificial Sequence
  Description of Artificial Sequence: Synthetic oligonucleotide
  Sense strand starting at position 2876 of SEQ ID NO: 917103
guuuauaaccuacaaguca

SEQ ID NO: 1208881 - RNA, 19 nt, Artificial Sequence
  Description of Artificial Sequence: Synthetic oligonucleotide
  Antisense strand to SEQ ID NO: 1208880
ugacuuguagguuauaaac

SEQ ID NO: 1208882 - RNA, 19 nt, Artificial Sequence
  Description of Artificial Sequence: Synthetic oligonucleotide
  Sense strand starting at position 2986 of SEQ ID NO: 917103
gacaaucauucguuuaaug

SEQ ID NO: 1208883 - RNA, 19 nt, Artificial Sequence
  Description of Artificial Sequence: Synthetic oligonucleotide
  Antisense strand to SEQ ID NO: 1208882
cauuaaacgaaugauuguc

SEQ ID NO: 1208884 - RNA, 19 nt, Artificial Sequence
  Description of Artificial Sequence: Synthetic oligonucleotide
  Sense strand starting at position 3036 of SEQ ID NO: 917103
uaacuaaaugcugggaguu

SEQ ID NO: 1208885 - RNA, 19 nt, Artificial Sequence
  Description of Artificial Sequence: Synthetic oligonucleotide
  Antisense strand to SEQ ID NO: 1208884
aacucccagcauuuaguua

SEQ ID NO: 1208886 - RNA, 19 nt, Artificial Sequence
  Description of Artificial Sequence: Synthetic oligonucleotide
  Sense strand starting at position 3037 of SEQ ID NO: 917103
aacuaaaugcugggaguua

SEQ ID NO: 1208887 - RNA, 19 nt, Artificial Sequence
  Description of Artificial Sequence: Synthetic oligonucleotide
  Antisense strand to SEQ ID NO: 1208886
uaacucccagcauuuaguu

SEQ ID NO: 1208888 - RNA, 19 nt, Artificial Sequence
  Description of Artificial Sequence: Synthetic oligonucleotide
  Sense strand starting at position 3266 of SEQ ID NO: 917103
cgcaguugggaagaguaua

SEQ ID NO: 1208889 - RNA, 19 nt, Artificial Sequence
  Description of Artificial Sequence: Synthetic oligonucleotide
  Antisense strand to SEQ ID NO: 1208888
uauacucuucccaacugcg

SEQ ID NO: 1208890 - RNA, 19 nt, Artificial Sequence
  Description of Artificial Sequence: Synthetic oligonucleotide
  Sense strand starting at position 3278 of SEQ ID NO: 917103
gaguauagagcauauucua

SEQ ID NO: 1208891 - RNA, 19 nt, Artificial Sequence
  Description of Artificial Sequence: Synthetic oligonucleotide
  Antisense strand to SEQ ID NO: 1208890
uagaauaugcucuauacuc

SEQ ID NO: 1208892 - RNA, 19 nt, Artificial Sequence
  Description of Artificial Sequence: Synthetic oligonucleotide
  Sense strand starting at position 3297 of SEQ ID NO: 917103
ggagcagaucaugggauau

SEQ ID NO: 1208893 - RNA, 19 nt, Artificial Sequence
  Description of Artificial Sequence: Synthetic oligonucleotide
  Antisense strand to SEQ ID NO: 1208892
auaucccaugaucugcucc

SEQ ID NO: 1208894 - RNA, 19 nt, Artificial Sequence
  Description of Artificial Sequence: Synthetic oligonucleotide
  Sense strand starting at position 3420 of SEQ ID NO: 917103
auuggaguaggcuagcaaa

SEQ ID NO: 1208895 - RNA, 19 nt, Artificial Sequence
  Description of Artificial Sequence: Synthetic oligonucleotide
  Antisense strand to SEQ ID NO: 1208894
uuugcuagccuacuccaau

SEQ ID NO: 1208896 - RNA, 19 nt, Artificial Sequence
  Description of Artificial Sequence: Synthetic oligonucleotide
  Sense strand starting at position 3610 of SEQ ID NO: 917103
aucuguggcccucagauaa

SEQ ID NO: 1208897 - RNA, 19 nt, Artificial Sequence
  Description of Artificial Sequence: Synthetic oligonucleotide
  Antisense strand to SEQ ID NO: 1208896
uuaucugagggccacagau

SEQ ID NO: 1208898 - RNA, 19 nt, Artificial Sequence
  Description of Artificial Sequence: Synthetic oligonucleotide
  Sense strand starting at position 3771 of SEQ ID NO: 917103
gaaugugugccucauggaa

SEQ ID NO: 1208899 - RNA, 19 nt, Artificial Sequence
  Description of Artificial Sequence: Synthetic oligonucleotide
  Antisense strand to SEQ ID NO: 1208898
uuccaugaggcacacauuc

SEQ ID NO: 1208900 - RNA, 19 nt, Artificial Sequence
  Description of Artificial Sequence: Synthetic oligonucleotide
  Sense strand starting at position 3855 of SEQ ID NO: 917103
guacguaaaccugacuuua

SEQ ID NO: 1208901 - RNA, 19 nt, Artificial Sequence
  Description of Artificial Sequence: Synthetic oligonucleotide
  Antisense strand to SEQ ID NO: 1208900
uaaagucagguuuacguac

SEQ ID NO: 1208902 - RNA, 19 nt, Artificial Sequence
  Description of Artificial Sequence: Synthetic oligonucleotide
  Sense strand starting at position 3944 of SEQ ID NO: 917103
aacaaaucagugugagauu

SEQ ID NO: 1208903 - RNA, 19 nt, Artificial Sequence
  Description of Artificial Sequence: Synthetic oligonucleotide
  Antisense strand to SEQ ID NO: 1208902
aaucucacacugauuuguu

SEQ ID NO: 1208904 - RNA, 19 nt, Artificial Sequence
  Description of Artificial Sequence: Synthetic oligonucleotide
  Sense strand starting at position 52 of SEQ ID NO: 917104
gugauagggcuuuauggca

SEQ ID NO: 1208905 - RNA, 19 nt, Artificial Sequence
  Description of Artificial Sequence: Synthetic oligonucleotide
  Antisense strand to SEQ ID NO: 1208904
ugccauaaagcccuaucac

SEQ ID NO: 1208906 - RNA, 19 nt, Artificial Sequence
  Description of Artificial Sequence: Synthetic oligonucleotide
  Sense strand starting at position 59 of SEQ ID NO: 917104
ggcuuuauggcagagaaau

SEQ ID NO: 1208907 - RNA, 19 nt, Artificial Sequence
  Description of Artificial Sequence: Synthetic oligonucleotide
  Antisense strand to SEQ ID NO: 1208906
auuucucugccauaaagcc

SEQ ID NO: 1208908 - RNA, 19 nt, Artificial Sequence
  Description of Artificial Sequence: Synthetic oligonucleotide
  Sense strand starting at position 176 of SEQ ID NO: 917104
gucagaaacuugguaacua

SEQ ID NO: 1208909 - RNA, 19 nt, Artificial Sequence
  Description of Artificial Sequence: Synthetic oligonucleotide
  Antisense strand to SEQ ID NO: 1208908
uaguuaccaaguuucugac

SEQ ID NO: 1208910 - RNA, 19 nt, Artificial Sequence
  Description of Artificial Sequence: Synthetic oligonucleotide
  Sense strand starting at position 245 of SEQ ID NO: 917104
caggguagguaaucacaga

SEQ ID NO: 1208911 - RNA, 19 nt, Artificial Sequence
  Description of Artificial Sequence: Synthetic oligonucleotide
  Antisense strand to SEQ ID NO: 1208910
ucugugauuaccuacccug

SEQ ID NO: 1208912 - RNA, 19 nt, Artificial Sequence
  Description of Artificial Sequence: Synthetic oligonucleotide
  Sense strand starting at position 252 of SEQ ID NO: 917104
gguaaucacagaugucaag

SEQ ID NO: 1208913 - RNA, 19 nt, Artificial Sequence
  Description of Artificial Sequence: Synthetic oligonucleotide
  Antisense strand to SEQ ID NO: 1208912
cuugacaucugugauuacc

SEQ ID NO: 1208914 - RNA, 19 nt, Artificial Sequence
  Description of Artificial Sequence: Synthetic oligonucleotide
  Sense strand starting at position 262 of SEQ ID NO: 917104
gaugucaagucgucuauuu

SEQ ID NO: 1208915 - RNA, 19 nt, Artificial Sequence
  Description of Artificial Sequence: Synthetic oligonucleotide
  Antisense strand to SEQ ID NO: 1208914
aaauagacgacuugacauc

SEQ ID NO: 1208916 - RNA, 19 nt, Artificial Sequence
  Description of Artificial Sequence: Synthetic oligonucleotide
  Sense strand starting at position 282 of SEQ ID NO: 917104
cuugccuauuugucuuuga

SEQ ID NO: 1208917 - RNA, 19 nt, Artificial Sequence
  Description of Artificial Sequence: Synthetic oligonucleotide
  Antisense strand to SEQ ID NO: 1208916
ucaaagacaaauaggcaag

SEQ ID NO: 1208918 - RNA, 19 nt, Artificial Sequence
  Description of Artificial Sequence: Synthetic oligonucleotide
  Sense strand starting at position 285 of SEQ ID NO: 917104
gccuauuugucuuugacaa

SEQ ID NO: 1208919 - RNA, 19 nt, Artificial Sequence
  Description of Artificial Sequence: Synthetic oligonucleotide
  Antisense strand to SEQ ID NO: 1208918
uugucaaagacaaauaggc

SEQ ID NO: 1208920 - RNA, 19 nt, Artificial Sequence
  Description of Artificial Sequence: Synthetic oligonucleotide
  Sense strand starting at position 623 of SEQ ID NO: 917104
gcuacauaucuggacacuu

SEQ ID NO: 1208921 - RNA, 19 nt, Artificial Sequence
  Description of Artificial Sequence: Synthetic oligonucleotide
  Antisense strand to SEQ ID NO: 1208920
aaguguccagauauguagc

SEQ ID NO: 1208922 - RNA, 19 nt, Artificial Sequence
  Description of Artificial Sequence: Synthetic oligonucleotide
  Sense strand starting at position 631 of SEQ ID NO: 917104
ucuggacacuugucucaaa

SEQ ID NO: 1208923 - RNA, 19 nt, Artificial Sequence
  Description of Artificial Sequence: Synthetic oligonucleotide
  Antisense strand to SEQ ID NO: 1208922
uuugagacaaguguccaga

SEQ ID NO: 1208924 - RNA, 19 nt, Artificial Sequence
  Description of Artificial Sequence: Synthetic oligonucleotide
  Sense strand starting at position 743 of SEQ ID NO: 917104
cugacagaaauccguggaa

SEQ ID NO: 1208925 - RNA, 19 nt, Artificial Sequence
  Description of Artificial Sequence: Synthetic oligonucleotide
  Antisense strand to SEQ ID NO: 1208924
uuccacggauuucugucag

SEQ ID NO: 1208926 - RNA, 19 nt, Artificial Sequence
  Description of Artificial Sequence: Synthetic oligonucleotide
  Sense strand starting at position 745 of SEQ ID NO: 917104
gacagaaauccguggaagu

SEQ ID NO: 1208927 - RNA, 19 nt, Artificial Sequence
  Description of Artificial Sequence: Synthetic oligonucleotide
  Antisense strand to SEQ ID NO: 1208926
acuuccacggauuucuguc

SEQ ID NO: 1208928 - RNA, 19 nt, Artificial Sequence
  Description of Artificial Sequence: Synthetic oligonucleotide
  Sense strand starting at position 746 of SEQ ID NO: 917104
acagaaauccguggaagug

SEQ ID NO: 1208929 - RNA, 19 nt, Artificial Sequence
  Description of Artificial Sequence: Synthetic oligonucleotide
  Antisense strand to SEQ ID NO: 1208928
cacuuccacggauuucugu

SEQ ID NO: 1208930 - RNA, 19 nt, Artificial Sequence
  Description of Artificial Sequence: Synthetic oligonucleotide
  Sense strand starting at position 994 of SEQ ID NO: 917104
gccagugcugaugaacaga

SEQ ID NO: 1208931 - RNA, 19 nt, Artificial Sequence
  Description of Artificial Sequence: Synthetic oligonucleotide
  Antisense strand to SEQ ID NO: 1208930
ucuguucaucagcacuggc

SEQ ID NO: 1208932 - RNA, 19 nt, Artificial Sequence
  Description of Artificial Sequence: Synthetic oligonucleotide
  Sense strand starting at position 1063 of SEQ ID NO: 917104
ggcuccguccaucagagaa

SEQ ID NO: 1208933 - RNA, 19 nt, Artificial Sequence
  Description of Artificial Sequence: Synthetic oligonucleotide
  Antisense strand to SEQ ID NO: 1208932
uucucugauggacggagcc

SEQ ID NO: 1208934 - RNA, 19 nt, Artificial Sequence
  Description of Artificial Sequence: Synthetic oligonucleotide
  Sense strand starting at position 1173 of SEQ ID NO: 917104
uggaaagggucagauuuca

SEQ ID NO: 1208935 - RNA, 19 nt, Artificial Sequence
  Description of Artificial Sequence: Synthetic oligonucleotide
  Antisense strand to SEQ ID NO: 1208934
ugaaaucugacccuuucca

SEQ ID NO: 1208936 - RNA, 19 nt, Artificial Sequence
  Description of Artificial Sequence: Synthetic oligonucleotide
  Sense strand starting at position 1178 of SEQ ID NO: 917104
agggucagauuucagagaa

SEQ ID NO: 1208937 - RNA, 19 nt, Artificial Sequence
  Description of Artificial Sequence: Synthetic oligonucleotide
  Antisense strand to SEQ ID NO: 1208936
uucucugaaaucugacccu

SEQ ID NO: 1208938 - RNA, 19 nt, Artificial Sequence
  Description of Artificial Sequence: Synthetic oligonucleotide
  Sense strand starting at position 2013 of SEQ ID NO: 917104
cgucaauuaccuggaauug

SEQ ID NO: 1208939 - RNA, 19 nt, Artificial Sequence
  Description of Artificial Sequence: Synthetic oligonucleotide
  Antisense strand to SEQ ID NO: 1208938
caauuccagguaauugacg

SEQ ID NO: 1208940 - RNA, 19 nt, Artificial Sequence
  Description of Artificial Sequence: Synthetic oligonucleotide
  Sense strand starting at position 2078 of SEQ ID NO: 917104
cagacaacagucuggaauu

SEQ ID NO: 1208941 - RNA, 19 nt, Artificial Sequence
  Description of Artificial Sequence: Synthetic oligonucleotide
  Antisense strand to SEQ ID NO: 1208940
aauuccagacuguugucug

SEQ ID NO: 1208942 - RNA, 19 nt, Artificial Sequence
  Description of Artificial Sequence: Synthetic oligonucleotide
  Sense strand starting at position 2255 of SEQ ID NO: 917104
accugagcucucgaaaugu

SEQ ID NO: 1208943 - RNA, 19 nt, Artificial Sequence
  Description of Artificial Sequence: Synthetic oligonucleotide
  Antisense strand to SEQ ID NO: 1208942
acauuucgagagcucaggu

SEQ ID NO: 1208944 - RNA, 19 nt, Artificial Sequence
  Description of Artificial Sequence: Synthetic oligonucleotide
  Sense strand starting at position 2280 of SEQ ID NO: 917104
ucugaauagagauguguuc

SEQ ID NO: 1208945 - RNA, 19 nt, Artificial Sequence
  Description of Artificial Sequence: Synthetic oligonucleotide
  Antisense strand to SEQ ID NO: 1208944
gaacacaucucuauucaga

SEQ ID NO: 1208946 - RNA, 19 nt, Artificial Sequence
  Description of Artificial Sequence: Synthetic oligonucleotide
  Sense strand starting at position 2282 of SEQ ID NO: 917104
ugaauagagauguguucca

SEQ ID NO: 1208947 - RNA, 19 nt, Artificial Sequence
  Description of Artificial Sequence: Synthetic oligonucleotide
  Antisense strand to SEQ ID NO: 1208946
uggaacacaucucuauuca

SEQ ID NO: 1208948 - RNA, 19 nt, Artificial Sequence
  Description of Artificial Sequence: Synthetic oligonucleotide
  Sense strand starting at position 2482 of SEQ ID NO: 917104
gccuacaaacagugaguaa

SEQ ID NO: 1208949 - RNA, 19 nt, Artificial Sequence
  Description of Artificial Sequence: Synthetic oligonucleotide
  Antisense strand to SEQ ID NO: 1208948
uuacucacuguuuguaggc

SEQ ID NO: 1208950 - RNA, 19 nt, Artificial Sequence
  Description of Artificial Sequence: Synthetic oligonucleotide
  Sense strand starting at position 2511 of SEQ ID NO: 917104
guuagaaucuguuuauaac

SEQ ID NO: 1208951 - RNA, 19 nt, Artificial Sequence
  Description of Artificial Sequence: Synthetic oligonucleotide
  Antisense strand to SEQ ID NO: 1208950
guuauaaacagauucuaac

SEQ ID NO: 1208952 - RNA, 19 nt, Artificial Sequence
  Description of Artificial Sequence: Synthetic oligonucleotide
  Sense strand starting at position 2521 of SEQ ID NO: 917104
guuuauaaccuacaaguca

SEQ ID NO: 1208953 - RNA, 19 nt, Artificial Sequence
  Description of Artificial Sequence: Synthetic oligonucleotide
  Antisense strand to SEQ ID NO: 1208952
ugacuuguagguuauaaac

SEQ ID NO: 1208954 - RNA, 19 nt, Artificial Sequence
  Description of Artificial Sequence: Synthetic oligonucleotide
  Sense strand starting at position 2630 of SEQ ID NO: 917104
ugacaaucauucguuuaau

SEQ ID NO: 1208955 - RNA, 19 nt, Artificial Sequence
  Description of Artificial Sequence: Synthetic oligonucleotide
  Antisense strand to SEQ ID NO: 1208954
auuaaacgaaugauuguca

SEQ ID NO: 1208956 - RNA, 19 nt, Artificial Sequence
  Description of Artificial Sequence: Synthetic oligonucleotide
  Sense strand starting at position 2631 of SEQ ID NO: 917104
gacaaucauucguuuaaug

SEQ ID NO: 1208957 - RNA, 19 nt, Artificial Sequence
  Description of Artificial Sequence: Synthetic oligonucleotide
  Antisense strand to SEQ ID NO: 1208956
cauuaaacgaaugauuguc

SEQ ID NO: 1208958 - RNA, 19 nt, Artificial Sequence
  Description of Artificial Sequence: Synthetic oligonucleotide
  Sense strand starting at position 2681 of SEQ ID NO: 917104
uaacuaaaugcugggaguu

SEQ ID NO: 1208959 - RNA, 19 nt, Artificial Sequence
  Description of Artificial Sequence: Synthetic oligonucleotide
  Antisense strand to SEQ ID NO: 1208958
aacucccagcauuuaguua

SEQ ID NO: 1208960 - RNA, 19 nt, Artificial Sequence
  Description of Artificial Sequence: Synthetic oligonucleotide
  Sense strand starting at position 2682 of SEQ ID NO: 917104
aacuaaaugcugggaguua

SEQ ID NO: 1208961 - RNA, 19 nt, Artificial Sequence
  Description of Artificial Sequence: Synthetic oligonucleotide
  Antisense strand to SEQ ID NO: 1208960
uaacucccagcauuuaguu

SEQ ID NO: 1208962 - RNA, 19 nt, Artificial Sequence
  Description of Artificial Sequence: Synthetic oligonucleotide
  Sense strand starting at position 2911 of SEQ ID NO: 917104
cgcaguugggaagaguaua

SEQ ID NO: 1208963 - RNA, 19 nt, Artificial Sequence
  Description of Artificial Sequence: Synthetic oligonucleotide
  Antisense strand to SEQ ID NO: 1208962
uauacucuucccaacugcg

SEQ ID NO: 1208964 - RNA, 19 nt, Artificial Sequence
  Description of Artificial Sequence: Synthetic oligonucleotide
  Sense strand starting at position 2923 of SEQ ID NO: 917104
gaguauagagcauauucua

SEQ ID NO: 1208965 - RNA, 19 nt, Artificial Sequence
  Description of Artificial Sequence: Synthetic oligonucleotide
  Antisense strand to SEQ ID NO: 1208964
uagaauaugcucuauacuc

SEQ ID NO: 1208966 - RNA, 19 nt, Artificial Sequence
  Description of Artificial Sequence: Synthetic oligonucleotide
  Sense strand starting at position 2942 of SEQ ID NO: 917104
ggagcagaucaugggauau

SEQ ID NO: 1208967 - RNA, 19 nt, Artificial Sequence
  Description of Artificial Sequence: Synthetic oligonucleotide
  Antisense strand to SEQ ID NO: 1208966
auaucccaugaucugcucc

SEQ ID NO: 1208968 - RNA, 19 nt, Artificial Sequence
  Description of Artificial Sequence: Synthetic oligonucleotide
  Sense strand starting at position 3065 of SEQ ID NO: 917104
auuggaguaggcuagcaaa

SEQ ID NO: 1208969 - RNA, 19 nt, Artificial Sequence
  Description of Artificial Sequence: Synthetic oligonucleotide
  Antisense strand to SEQ ID NO: 1208968
uuugcuagccuacuccaau

SEQ ID NO: 1208970 - RNA, 19 nt, Artificial Sequence
  Description of Artificial Sequence: Synthetic oligonucleotide
  Sense strand starting at position 3255 of SEQ ID NO: 917104
aucuguggcccucagauaa

SEQ ID NO: 1208971 - RNA, 19 nt, Artificial Sequence
  Description of Artificial Sequence: Synthetic oligonucleotide
  Antisense strand to SEQ ID NO: 1208970
uuaucugagggccacagau

SEQ ID NO: 1208972 - RNA, 19 nt, Artificial Sequence
  Description of Artificial Sequence: Synthetic oligonucleotide
  Sense strand starting at position 3286 of SEQ ID NO: 917104
gugguuaacuugucagaga

SEQ ID NO: 1208973 - RNA, 19 nt, Artificial Sequence
  Description of Artificial Sequence: Synthetic oligonucleotide
  Antisense strand to SEQ ID NO: 1208972
ucucugacaaguuaaccac

SEQ ID NO: 1208974 - RNA, 19 nt, Artificial Sequence
  Description of Artificial Sequence: Synthetic oligonucleotide
  Sense strand starting at position 3322 of SEQ ID NO: 917104
ggaagugguguguaucauu

SEQ ID NO: 1208975 - RNA, 19 nt, Artificial Sequence
  Description of Artificial Sequence: Synthetic oligonucleotide
  Antisense strand to SEQ ID NO: 1208974
aaugauacacaccacuucc

SEQ ID NO: 1208976 - RNA, 19 nt, Artificial Sequence
  Description of Artificial Sequence: Synthetic oligonucleotide
  Sense strand starting at position 3416 of SEQ ID NO: 917104
gaaugugugccucauggaa

SEQ ID NO: 1208977 - RNA, 19 nt, Artificial Sequence
  Description of Artificial Sequence: Synthetic oligonucleotide
  Antisense strand to SEQ ID NO: 1208976
uuccaugaggcacacauuc

SEQ ID NO: 1208978 - RNA, 19 nt, Artificial Sequence
  Description of Artificial Sequence: Synthetic oligonucleotide
  Sense strand starting at position 3500 of SEQ ID NO: 917104
guacguaaaccugacuuua

SEQ ID NO: 1208979 - RNA, 19 nt, Artificial Sequence
  Description of Artificial Sequence: Synthetic oligonucleotide
  Antisense strand to SEQ ID NO: 1208978
uaaagucagguuuacguac

SEQ ID NO: 1208980 - RNA, 19 nt, Artificial Sequence
  Description of Artificial Sequence: Synthetic oligonucleotide
  Sense strand starting at position 3589 of SEQ ID NO: 917104
aacaaaucagugugagauu

SEQ ID NO: 1208981 - RNA, 19 nt, Artificial Sequence
  Description of Artificial Sequence: Synthetic oligonucleotide
  Antisense strand to SEQ ID NO: 1208980
aaucucacacugauuuguu

SEQ ID NO: 1208982 - RNA, 19 nt, Artificial Sequence
  Description of Artificial Sequence: Synthetic oligonucleotide
  Sense strand starting at position 3919 of SEQ ID NO: 917104
gguaucaucuucuuuauac

SEQ ID NO: 1208983 - RNA, 19 nt, Artificial Sequence
  Description of Artificial Sequence: Synthetic oligonucleotide
  Antisense strand to SEQ ID NO: 1208982
guauaaagaagaugauacc

SEQ ID NO: 1208984 - RNA, 19 nt, Artificial Sequence
  Description of Artificial Sequence: Synthetic oligonucleotide
  Sense strand starting at position 117 of SEQ ID NO: 917105
aaccgagguuuggugugau

SEQ ID NO: 1208985 - RNA, 19 nt, Artificial Sequence
  Description of Artificial Sequence: Synthetic oligonucleotide
  Antisense strand to SEQ ID NO: 1208984
aucacaccaaaccucgguu

SEQ ID NO: 1208986 - RNA, 19 nt, Artificial Sequence
  Description of Artificial Sequence: Synthetic oligonucleotide
  Sense strand starting at position 253 of SEQ ID NO: 917105
gccgaaucucgauaauuag

SEQ ID NO: 1208987 - RNA, 19 nt, Artificial Sequence
  Description of Artificial Sequence: Synthetic oligonucleotide
  Antisense strand to SEQ ID NO: 1208986
cuaauuaucgagauucggc

SEQ ID NO: 1208988 - RNA, 19 nt, Artificial Sequence
  Description of Artificial Sequence: Synthetic oligonucleotide
  Sense strand starting at position 262 of SEQ ID NO: 917105
cgauaauuagcguagaucu

SEQ ID NO: 1208989 - RNA, 19 nt, Artificial Sequence
  Description of Artificial Sequence: Synthetic oligonucleotide
  Antisense strand to SEQ ID NO: 1208988
agaucuacgcuaauuaucg

SEQ ID NO: 1208990 - RNA, 19 nt, Artificial Sequence
  Description of Artificial Sequence: Synthetic oligonucleotide
  Sense strand starting at position 282 of SEQ ID NO: 917105
ugcuccuaucaccgaaauu

SEQ ID NO: 1208991 - RNA, 19 nt, Artificial Sequence
  Description of Artificial Sequence: Synthetic oligonucleotide
  Antisense strand to SEQ ID NO: 1208990
aauuucggugauaggagca

SEQ ID NO: 1208992 - RNA, 19 nt, Artificial Sequence
  Description of Artificial Sequence: Synthetic oligonucleotide
  Sense strand starting at position 360 of SEQ ID NO: 917105
gcuaucaauuugggaaaug

SEQ ID NO: 1208993 - RNA, 19 nt, Artificial Sequence
  Description of Artificial Sequence: Synthetic oligonucleotide
  Antisense strand to SEQ ID NO: 1208992
cauuucccaaauugauagc

SEQ ID NO: 1208994 - RNA, 19 nt, Artificial Sequence
  Description of Artificial Sequence: Synthetic oligonucleotide
  Sense strand starting at position 447 of SEQ ID NO: 917105
acaugcuaacauugaaagu

SEQ ID NO: 1208995 - RNA, 19 nt, Artificial Sequence
  Description of Artificial Sequence: Synthetic oligonucleotide
  Antisense strand to SEQ ID NO: 1208994
acuuucaauguuagcaugu

SEQ ID NO: 1208996 - RNA, 19 nt, Artificial Sequence
  Description of Artificial Sequence: Synthetic oligonucleotide
  Sense strand starting at position 471 of SEQ ID NO: 917105
ugcaacaguccuuguuaaa

SEQ ID NO: 1208997 - RNA, 19 nt, Artificial Sequence
  Description of Artificial Sequence: Synthetic oligonucleotide
  Antisense strand to SEQ ID NO: 1208996
uuuaacaaggacuguugca

SEQ ID NO: 1208998 - RNA, 19 nt, Artificial Sequence
  Description of Artificial Sequence: Synthetic oligonucleotide
  Sense strand starting at position 498 of SEQ ID NO: 917105
aaaugauguuaagugcaca

SEQ ID NO: 1208999 - RNA, 19 nt, Artificial Sequence
  Description of Artificial Sequence: Synthetic oligonucleotide
  Antisense strand to SEQ ID NO: 1208998
ugugcacuuaacaucauuu

SEQ ID NO: 1209000 - RNA, 19 nt, Artificial Sequence
  Description of Artificial Sequence: Synthetic oligonucleotide
  Sense strand starting at position 569 of SEQ ID NO: 917105
gucggcaucccugaagaca

SEQ ID NO: 1209001 - RNA, 19 nt, Artificial Sequence
  Description of Artificial Sequence: Synthetic oligonucleotide
  Antisense strand to SEQ ID NO: 1209000
ugucuucagggaugccgac

SEQ ID NO: 1209002 - RNA, 19 nt, Artificial Sequence
  Description of Artificial Sequence: Synthetic oligonucleotide
  Sense strand starting at position 581 of SEQ ID NO: 917105
gaagacagagguugauagu

SEQ ID NO: 1209003 - RNA, 19 nt, Artificial Sequence
  Description of Artificial Sequence: Synthetic oligonucleotide
  Antisense strand to SEQ ID NO: 1209002
acuaucaaccucugucuuc

SEQ ID NO: 1209004 - RNA, 19 nt, Artificial Sequence
  Description of Artificial Sequence: Synthetic oligonucleotide
  Sense strand starting at position 610 of SEQ ID NO: 917105
augccaucucugugauaug

SEQ ID NO: 1209005 - RNA, 19 nt, Artificial Sequence
  Description of Artificial Sequence: Synthetic oligonucleotide
  Antisense strand to SEQ ID NO: 1209004
cauaucacagagauggcau

SEQ ID NO: 1209006 - RNA, 19 nt, Artificial Sequence
  Description of Artificial Sequence: Synthetic oligonucleotide
  Sense strand starting at position 697 of SEQ ID NO: 917105
cggguugaacaaggucaau

SEQ ID NO: 1209007 - RNA, 19 nt, Artificial Sequence
  Description of Artificial Sequence: Synthetic oligonucleotide
  Antisense strand to SEQ ID NO: 1209006
auugaccuuguucaacccg

SEQ ID NO: 1209008 - RNA, 19 nt, Artificial Sequence
  Description of Artificial Sequence: Synthetic oligonucleotide
  Sense strand starting at position 729 of SEQ ID NO: 917105
aaacuaugcgucuaugaag

SEQ ID NO: 1209009 - RNA, 19 nt, Artificial Sequence
  Description of Artificial Sequence: Synthetic oligonucleotide
  Antisense strand to SEQ ID NO: 1209008
cuucauagacgcauaguuu

SEQ ID NO: 1209010 - RNA, 19 nt, Artificial Sequence
  Description of Artificial Sequence: Synthetic oligonucleotide
  Sense strand starting at position 735 of SEQ ID NO: 917105
ugcgucuaugaaggaaaua

SEQ ID NO: 1209011 - RNA, 19 nt, Artificial Sequence
  Description of Artificial Sequence: Synthetic oligonucleotide
  Antisense strand to SEQ ID NO: 1209010
uauuuccuucauagacgca

SEQ ID NO: 1209012 - RNA, 19 nt, Artificial Sequence
  Description of Artificial Sequence: Synthetic oligonucleotide
  Sense strand starting at position 969 of SEQ ID NO: 917105
guuagaguucggcaagaaa

SEQ ID NO: 1209013 - RNA, 19 nt, Artificial Sequence
  Description of Artificial Sequence: Synthetic oligonucleotide
  Antisense strand to SEQ ID NO: 1209012
uuucuugccgaacucuaac

SEQ ID NO: 1209014 - RNA, 19 nt, Artificial Sequence
  Description of Artificial Sequence: Synthetic oligonucleotide
  Sense strand starting at position 1024 of SEQ ID NO: 917105
aggugauguggcggagaga

SEQ ID NO: 1209015 - RNA, 19 nt, Artificial Sequence
  Description of Artificial Sequence: Synthetic oligonucleotide
  Antisense strand to SEQ ID NO: 1209014
ucucuccgccacaucaccu

SEQ ID NO: 1209016 - RNA, 19 nt, Artificial Sequence
  Description of Artificial Sequence: Synthetic oligonucleotide
  Sense strand starting at position 1025 of SEQ ID NO: 917105
ggugauguggcggagagau

SEQ ID NO: 1209017 - RNA, 19 nt, Artificial Sequence
  Description of Artificial Sequence: Synthetic oligonucleotide
  Antisense strand to SEQ ID NO: 1209016
aucucuccgccacaucacc

SEQ ID NO: 1209018 - RNA, 19 nt, Artificial Sequence
  Description of Artificial Sequence: Synthetic oligonucleotide
  Sense strand starting at position 1041 of SEQ ID NO: 917105
gauggauccggacgggaaa

SEQ ID NO: 1209019 - RNA, 19 nt, Artificial Sequence
  Description of Artificial Sequence: Synthetic oligonucleotide
  Antisense strand to SEQ ID NO: 1209018
uuucccguccggauccauc

SEQ ID NO: 1209020 - RNA, 19 nt, Artificial Sequence
  Description of Artificial Sequence: Synthetic oligonucleotide
  Sense strand starting at position 1074 of SEQ ID NO: 917105
guauacggaguucaugaga

SEQ ID NO: 1209021 - RNA, 19 nt, Artificial Sequence
  Description of Artificial Sequence: Synthetic oligonucleotide
  Antisense strand to SEQ ID NO: 1209020
ucucaugaacuccguauac

SEQ ID NO: 1209022 - RNA, 19 nt, Artificial Sequence
  Description of Artificial Sequence: Synthetic oligonucleotide
  Sense strand starting at position 1187 of SEQ ID NO: 917105
ccgguuuaccugggugaga

SEQ ID NO: 1209023 - RNA, 19 nt, Artificial Sequence
  Description of Artificial Sequence: Synthetic oligonucleotide
  Antisense strand to SEQ ID NO: 1209022
ucucacccagguaaaccgg

SEQ ID NO: 1209024 - RNA, 19 nt, Artificial Sequence
  Description of Artificial Sequence: Synthetic oligonucleotide
  Sense strand starting at position 1188 of SEQ ID NO: 917105
cgguuuaccugggugagaa

SEQ ID NO: 1209025 - RNA, 19 nt, Artificial Sequence
  Description of Artificial Sequence: Synthetic oligonucleotide
  Antisense strand to SEQ ID NO: 1209024
uucucacccagguaaaccg

SEQ ID NO: 1209026 - RNA, 19 nt, Artificial Sequence
  Description of Artificial Sequence: Synthetic oligonucleotide
  Sense strand starting at position 1189 of SEQ ID NO: 917105
gguuuaccugggugagaau

SEQ ID NO: 1209027 - RNA, 19 nt, Artificial Sequence
  Description of Artificial Sequence: Synthetic oligonucleotide
  Antisense strand to SEQ ID NO: 1209026
auucucacccagguaaacc

SEQ ID NO: 1209028 - RNA, 19 nt, Artificial Sequence
  Description of Artificial Sequence: Synthetic oligonucleotide
  Sense strand starting at position 2338 of SEQ ID NO: 917105
ccgccucgccaagugaaua

SEQ ID NO: 1209029 - RNA, 19 nt, Artificial Sequence
  Description of Artificial Sequence: Synthetic oligonucleotide
  Antisense strand to SEQ ID NO: 1209028
uauucacuuggcgaggcgg

SEQ ID NO: 1209030 - RNA, 19 nt, Artificial Sequence
  Description of Artificial Sequence: Synthetic oligonucleotide
  Sense strand starting at position 2789 of SEQ ID NO: 917105
ggaguucguggcgaagacu

SEQ ID NO: 1209031 - RNA, 19 nt, Artificial Sequence
  Description of Artificial Sequence: Synthetic oligonucleotide
  Antisense strand to SEQ ID NO: 1209030
agucuucgccacgaacucc

SEQ ID NO: 1209032 - RNA, 19 nt, Artificial Sequence
  Description of Artificial Sequence: Synthetic oligonucleotide
  Sense strand starting at position 3356 of SEQ ID NO: 917105
cuuugaugcggcuuuaguu

SEQ ID NO: 1209033 - RNA, 19 nt, Artificial Sequence
  Description of Artificial Sequence: Synthetic oligonucleotide
  Antisense strand to SEQ ID NO: 1209032
aacuaaagccgcaucaaag

SEQ ID NO: 1209034 - RNA, 19 nt, Artificial Sequence
  Description of Artificial Sequence: Synthetic oligonucleotide
  Sense strand starting at position 3368 of SEQ ID NO: 917105
uuuaguuuacucugaguaa

SEQ ID NO: 1209035 - RNA, 19 nt, Artificial Sequence
  Description of Artificial Sequence: Synthetic oligonucleotide
  Antisense strand to SEQ ID NO: 1209034
uuacucagaguaaacuaaa

SEQ ID NO: 1209036 - RNA, 19 nt, Artificial Sequence
  Description of Artificial Sequence: Synthetic oligonucleotide
  Sense strand starting at position 3371 of SEQ ID NO: 917105
aguuuacucugaguaacga

SEQ ID NO: 1209037 - RNA, 19 nt, Artificial Sequence
  Description of Artificial Sequence: Synthetic oligonucleotide
  Antisense strand to SEQ ID NO: 1209036
ucguuacucagaguaaacu

SEQ ID NO: 1209038 - RNA, 19 nt, Artificial Sequence
  Description of Artificial Sequence: Synthetic oligonucleotide
  Sense strand starting at position 3372 of SEQ ID NO: 917105
guuuacucugaguaacgau

SEQ ID NO: 1209039 - RNA, 19 nt, Artificial Sequence
  Description of Artificial Sequence: Synthetic oligonucleotide
  Antisense strand to SEQ ID NO: 1209038
aucguuacucagaguaaac

SEQ ID NO: 1209040 - RNA, 19 nt, Artificial Sequence
  Description of Artificial Sequence: Synthetic oligonucleotide
  Sense strand starting at position 3380 of SEQ ID NO: 917105
ugaguaacgauuugccugu

SEQ ID NO: 1209041 - RNA, 19 nt, Artificial Sequence
  Description of Artificial Sequence: Synthetic oligonucleotide
  Antisense strand to SEQ ID NO: 1209040
acaggcaaaucguuacuca

SEQ ID NO: 1209042 - RNA, 19 nt, Artificial Sequence
  Description of Artificial Sequence: Synthetic oligonucleotide
  Sense strand starting at position 3384 of SEQ ID NO: 917105
uaacgauuugccugugauu

SEQ ID NO: 1209043 - RNA, 19 nt, Artificial Sequence
  Description of Artificial Sequence: Synthetic oligonucleotide
  Antisense strand to SEQ ID NO: 1209042
aaucacaggcaaaucguua

SEQ ID NO: 1209044 - RNA, 19 nt, Artificial Sequence
  Description of Artificial Sequence: Synthetic oligonucleotide
  Sense strand starting at position 3396 of SEQ ID NO: 917105
ugugauucgugaaacggag

SEQ ID NO: 1209045 - RNA, 19 nt, Artificial Sequence
  Description of Artificial Sequence: Synthetic oligonucleotide
  Antisense strand to SEQ ID NO: 1209044
cuccguuucacgaaucaca

SEQ ID NO: 1209046 - RNA, 19 nt, Artificial Sequence
  Description of Artificial Sequence: Synthetic oligonucleotide
  Sense strand starting at position 3475 of SEQ ID NO: 917105
gagugaguuucucuaacuu

SEQ ID NO: 1209047 - RNA, 19 nt, Artificial Sequence
  Description of Artificial Sequence: Synthetic oligonucleotide
  Antisense strand to SEQ ID NO: 1209046
aaguuagagaaacucacuc

SEQ ID NO: 1209048 - RNA, 19 nt, Artificial Sequence
  Description of Artificial Sequence: Synthetic oligonucleotide
  Sense strand starting at position 3479 of SEQ ID NO: 917105
gaguuucucuaacuuaggu

SEQ ID NO: 1209049 - RNA, 19 nt, Artificial Sequence
  Description of Artificial Sequence: Synthetic oligonucleotide
  Antisense strand to SEQ ID NO: 1209048
accuaaguuagagaaacuc

SEQ ID NO: 1209050 - RNA, 19 nt, Artificial Sequence
  Description of Artificial Sequence: Synthetic oligonucleotide
  Sense strand starting at position 3501 of SEQ ID NO: 917105
caugcugaccuguauuguu

SEQ ID NO: 1209051 - RNA, 19 nt, Artificial Sequence
  Description of Artificial Sequence: Synthetic oligonucleotide
  Antisense strand to SEQ ID NO: 1209050
aacaauacaggucagcaug

SEQ ID NO: 1209052 - RNA, 19 nt, Artificial Sequence
  Description of Artificial Sequence: Synthetic oligonucleotide
  Sense strand starting at position 3536 of SEQ ID NO: 917105
uauuuagcaguacgaucua

SEQ ID NO: 1209053 - RNA, 19 nt, Artificial Sequence
  Description of Artificial Sequence: Synthetic oligonucleotide
  Antisense strand to SEQ ID NO: 1209052
uagaucguacugcuaaaua

SEQ ID NO: 1209054 - RNA, 19 nt, Artificial Sequence
  Description of Artificial Sequence: Synthetic oligonucleotide
  Sense strand starting at position 3746 of SEQ ID NO: 917105
uuuaaagagcauugguauu

SEQ ID NO: 1209055 - RNA, 19 nt, Artificial Sequence
  Description of Artificial Sequence: Synthetic oligonucleotide
  Antisense strand to SEQ ID NO: 1209054
aauaccaaugcucuuuaaa

SEQ ID NO: 1209056 - RNA, 19 nt, Artificial Sequence
  Description of Artificial Sequence: Synthetic oligonucleotide
  Sense strand starting at position 3748 of SEQ ID NO: 917105
uaaagagcauugguauuga

SEQ ID NO: 1209057 - RNA, 19 nt, Artificial Sequence
  Description of Artificial Sequence: Synthetic oligonucleotide
  Antisense strand to SEQ ID NO: 1209056
ucaauaccaaugcucuuua

SEQ ID NO: 1209058 - RNA, 19 nt, Artificial Sequence
  Description of Artificial Sequence: Synthetic oligonucleotide
  Sense strand starting at position 3927 of SEQ ID NO: 917105
ugugaaauaugcuuggaag

SEQ ID NO: 1209059 - RNA, 19 nt, Artificial Sequence
  Description of Artificial Sequence: Synthetic oligonucleotide
  Antisense strand to SEQ ID NO: 1209058
cuuccaagcauauuucaca

SEQ ID NO: 1209060 - RNA, 19 nt, Artificial Sequence
  Description of Artificial Sequence: Synthetic oligonucleotide
  Sense strand starting at position 3928 of SEQ ID NO: 917105
gugaaauaugcuuggaaga

SEQ ID NO: 1209061 - RNA, 19 nt, Artificial Sequence
  Description of Artificial Sequence: Synthetic oligonucleotide
  Antisense strand to SEQ ID NO: 1209060
ucuuccaagcauauuucac

SEQ ID NO: 1209062 - RNA, 19 nt, Artificial Sequence
  Description of Artificial Sequence: Synthetic oligonucleotide
  Sense strand starting at position 3979 of SEQ ID NO: 917105
augcguacauauccauaca

SEQ ID NO: 1209063 - RNA, 19 nt, Artificial Sequence
  Description of Artificial Sequence: Synthetic oligonucleotide
  Antisense strand to SEQ ID NO: 1209062
uguauggauauguacgcau

SEQ ID NO: 1209064 - RNA, 19 nt, Artificial Sequence
  Description of Artificial Sequence: Synthetic oligonucleotide
  Sense strand starting at position 117 of SEQ ID NO: 917106
aaccgagguuuggugugau

SEQ ID NO: 1209065 - RNA, 19 nt, Artificial Sequence
  Description of Artificial Sequence: Synthetic oligonucleotide
  Antisense strand to SEQ ID NO: 1209064
aucacaccaaaccucgguu

SEQ ID NO: 1209066 - RNA, 19 nt, Artificial Sequence
  Description of Artificial Sequence: Synthetic oligonucleotide
  Sense strand starting at position 253 of SEQ ID NO: 917106
gccgaaucucgauaauuag

SEQ ID NO: 1209067 - RNA, 19 nt, Artificial Sequence
  Description of Artificial Sequence: Synthetic oligonucleotide
  Antisense strand to SEQ ID NO: 1209066
cuaauuaucgagauucggc

SEQ ID NO: 1209068 - RNA, 19 nt, Artificial Sequence
  Description of Artificial Sequence: Synthetic oligonucleotide
  Sense strand starting at position 262 of SEQ ID NO: 917106
cgauaauuagcguagaucu

SEQ ID NO: 1209069 - RNA, 19 nt, Artificial Sequence
  Description of Artificial Sequence: Synthetic oligonucleotide
  Antisense strand to SEQ ID NO: 1209068
agaucuacgcuaauuaucg

SEQ ID NO: 1209070 - RNA, 19 nt, Artificial Sequence
  Description of Artificial Sequence: Synthetic oligonucleotide
  Sense strand starting at position 282 of SEQ ID NO: 917106
ugcuccuaucaccgaaauu

SEQ ID NO: 1209071 - RNA, 19 nt, Artificial Sequence
  Description of Artificial Sequence: Synthetic oligonucleotide
  Antisense strand to SEQ ID NO: 1209070
aauuucggugauaggagca

SEQ ID NO: 1209072 - RNA, 19 nt, Artificial Sequence
  Description of Artificial Sequence: Synthetic oligonucleotide
  Sense strand starting at position 360 of SEQ ID NO: 917106
gcuaucaauuugggaaaug

SEQ ID NO: 1209073 - RNA, 19 nt, Artificial Sequence
  Description of Artificial Sequence: Synthetic oligonucleotide
  Antisense strand to SEQ ID NO: 1209072
cauuucccaaauugauagc

SEQ ID NO: 1209074 - RNA, 19 nt, Artificial Sequence
  Description of Artificial Sequence: Synthetic oligonucleotide
  Sense strand starting at position 447 of SEQ ID NO: 917106
acaugcuaacauugaaagu

SEQ ID NO: 1209075 - RNA, 19 nt, Artificial Sequence
  Description of Artificial Sequence: Synthetic oligonucleotide
  Antisense strand to SEQ ID NO: 1209074
acuuucaauguuagcaugu

SEQ ID NO: 1209076 - RNA, 19 nt, Artificial Sequence
  Description of Artificial Sequence: Synthetic oligonucleotide
  Sense strand starting at position 471 of SEQ ID NO: 917106
ugcaacaguccuuguuaaa

SEQ ID NO: 1209077 - RNA, 19 nt, Artificial Sequence
  Description of Artificial Sequence: Synthetic oligonucleotide
  Antisense strand to SEQ ID NO: 1209076
uuuaacaaggacuguugca

SEQ ID NO: 1209078 - RNA, 19 nt, Artificial Sequence
  Description of Artificial Sequence: Synthetic oligonucleotide
  Sense strand starting at position 498 of SEQ ID NO: 917106
aaaugauguuaagugcaca

SEQ ID NO: 1209079 - RNA, 19 nt, Artificial Sequence
  Description of Artificial Sequence: Synthetic oligonucleotide
  Antisense strand to SEQ ID NO: 1209078
ugugcacuuaacaucauuu

SEQ ID NO: 1209080 - RNA, 19 nt, Artificial Sequence
  Description of Artificial Sequence: Synthetic oligonucleotide
  Sense strand starting at position 569 of SEQ ID NO: 917106
gucggcaucccugaagaca

SEQ ID NO: 1209081 - RNA, 19 nt, Artificial Sequence
  Description of Artificial Sequence: Synthetic oligonucleotide
  Antisense strand to SEQ ID NO: 1209080
ugucuucagggaugccgac

SEQ ID NO: 1209082 - RNA, 19 nt, Artificial Sequence
  Description of Artificial Sequence: Synthetic oligonucleotide
  Sense strand starting at position 581 of SEQ ID NO: 917106
gaagacagagguugauagu

SEQ ID NO: 1209083 - RNA, 19 nt, Artificial Sequence
  Description of Artificial Sequence: Synthetic oligonucleotide
  Antisense strand to SEQ ID NO: 1209082
acuaucaaccucugucuuc

SEQ ID NO: 1209084 - RNA, 19 nt, Artificial Sequence
  Description of Artificial Sequence: Synthetic oligonucleotide
  Sense strand starting at position 610 of SEQ ID NO: 917106
augccaucucugugauaug

SEQ ID NO: 1209085 - RNA, 19 nt, Artificial Sequence
  Description of Artificial Sequence: Synthetic oligonucleotide
  Antisense strand to SEQ ID NO: 1209084
cauaucacagagauggcau

SEQ ID NO: 1209086 - RNA, 19 nt, Artificial Sequence
  Description of Artificial Sequence: Synthetic oligonucleotide
  Sense strand starting at position 697 of SEQ ID NO: 917106
cggguugaacaaggucaau

SEQ ID NO: 1209087 - RNA, 19 nt, Artificial Sequence
  Description of Artificial Sequence: Synthetic oligonucleotide
  Antisense strand to SEQ ID NO: 1209086
auugaccuuguucaacccg

SEQ ID NO: 1209088 - RNA, 19 nt, Artificial Sequence
  Description of Artificial Sequence: Synthetic oligonucleotide
  Sense strand starting at position 729 of SEQ ID NO: 917106
aaacuaugcgucuaugaag

SEQ ID NO: 1209089 - RNA, 19 nt, Artificial Sequence
  Description of Artificial Sequence: Synthetic oligonucleotide
  Antisense strand to SEQ ID NO: 1209088
cuucauagacgcauaguuu

SEQ ID NO: 1209090 - RNA, 19 nt, Artificial Sequence
  Description of Artificial Sequence: Synthetic oligonucleotide
  Sense strand starting at position 735 of SEQ ID NO: 917106
ugcgucuaugaaggaaaua

SEQ ID NO: 1209091 - RNA, 19 nt, Artificial Sequence
  Description of Artificial Sequence: Synthetic oligonucleotide
  Antisense strand to SEQ ID NO: 1209090
uauuuccuucauagacgca

SEQ ID NO: 1209092 - RNA, 19 nt, Artificial Sequence
  Description of Artificial Sequence: Synthetic oligonucleotide
  Sense strand starting at position 969 of SEQ ID NO: 917106
guuagaguucggcaagaaa

SEQ ID NO: 1209093 - RNA, 19 nt, Artificial Sequence
  Description of Artificial Sequence: Synthetic oligonucleotide
  Antisense strand to SEQ ID NO: 1209092
uuucuugccgaacucuaac

SEQ ID NO: 1209094 - RNA, 19 nt, Artificial Sequence
  Description of Artificial Sequence: Synthetic oligonucleotide
  Sense strand starting at position 1024 of SEQ ID NO: 917106
aggugauguggcggagaga

SEQ ID NO: 1209095 - RNA, 19 nt, Artificial Sequence
  Description of Artificial Sequence: Synthetic oligonucleotide
  Antisense strand to SEQ ID NO: 1209094
ucucuccgccacaucaccu

SEQ ID NO: 1209096 - RNA, 19 nt, Artificial Sequence
  Description of Artificial Sequence: Synthetic oligonucleotide
  Sense strand starting at position 1025 of SEQ ID NO: 917106
ggugauguggcggagagau

SEQ ID NO: 1209097 - RNA, 19 nt, Artificial Sequence
  Description of Artificial Sequence: Synthetic oligonucleotide
  Antisense strand to SEQ ID NO: 1209096
aucucuccgccacaucacc

SEQ ID NO: 1209098 - RNA, 19 nt, Artificial Sequence
  Description of Artificial Sequence: Synthetic oligonucleotide
  Sense strand starting at position 1041 of SEQ ID NO: 917106
gauggauccggacgggaaa

SEQ ID NO: 1209099 - RNA, 19 nt, Artificial Sequence
  Description of Artificial Sequence: Synthetic oligonucleotide
  Antisense strand to SEQ ID NO: 1209098
uuucccguccggauccauc

SEQ ID NO: 1209100 - RNA, 19 nt, Artificial Sequence
  Description of Artificial Sequence: Synthetic oligonucleotide
  Sense strand starting at position 1074 of SEQ ID NO: 917106
guauacggaguucaugaga

SEQ ID NO: 1209101 - RNA, 19 nt, Artificial Sequence
  Description of Artificial Sequence: Synthetic oligonucleotide
  Antisense strand to SEQ ID NO: 1209100
ucucaugaacuccguauac

SEQ ID NO: 1209102 - RNA, 19 nt, Artificial Sequence
  Description of Artificial Sequence: Synthetic oligonucleotide
  Sense strand starting at position 1187 of SEQ ID NO: 917106
ccgguuuaccugggugaga

SEQ ID NO: 1209103 - RNA, 19 nt, Artificial Sequence
  Description of Artificial Sequence: Synthetic oligonucleotide
  Antisense strand to SEQ ID NO: 1209102
ucucacccagguaaaccgg

SEQ ID NO: 1209104 - RNA, 19 nt, Artificial Sequence
  Description of Artificial Sequence: Synthetic oligonucleotide
  Sense strand starting at position 1188 of SEQ ID NO: 917106
cgguuuaccugggugagaa

SEQ ID NO: 1209105 - RNA, 19 nt, Artificial Sequence
  Description of Artificial Sequence: Synthetic oligonucleotide
  Antisense strand to SEQ ID NO: 1209104
uucucacccagguaaaccg

SEQ ID NO: 1209106 - RNA, 19 nt, Artificial Sequence
  Description of Artificial Sequence: Synthetic oligonucleotide
  Sense strand starting at position 1189 of SEQ ID NO: 917106
gguuuaccugggugagaau

SEQ ID NO: 1209107 - RNA, 19 nt, Artificial Sequence
  Description of Artificial Sequence: Synthetic oligonucleotide
  Antisense strand to SEQ ID NO: 1209106
auucucacccagguaaacc

SEQ ID NO: 1209108 - RNA, 19 nt, Artificial Sequence
  Description of Artificial Sequence: Synthetic oligonucleotide
  Sense strand starting at position 2338 of SEQ ID NO: 917106
ccgccucgccaagugaaua

SEQ ID NO: 1209109 - RNA, 19 nt, Artificial Sequence
  Description of Artificial Sequence: Synthetic oligonucleotide
  Antisense strand to SEQ ID NO: 1209108
uauucacuuggcgaggcgg

SEQ ID NO: 1209110 - RNA, 19 nt, Artificial Sequence
  Description of Artificial Sequence: Synthetic oligonucleotide
  Sense strand starting at position 2789 of SEQ ID NO: 917106
ggaguucguggcgaagacu

SEQ ID NO: 1209111 - RNA, 19 nt, Artificial Sequence
  Description of Artificial Sequence: Synthetic oligonucleotide
  Antisense strand to SEQ ID NO: 1209110
agucuucgccacgaacucc

SEQ ID NO: 1209112 - RNA, 19 nt, Artificial Sequence
  Description of Artificial Sequence: Synthetic oligonucleotide
  Sense strand starting at position 3356 of SEQ ID NO: 917106
cuuugaugcggcuuuaguu

SEQ ID NO: 1209113 - RNA, 19 nt, Artificial Sequence
  Description of Artificial Sequence: Synthetic oligonucleotide
  Antisense strand to SEQ ID NO: 1209112
aacuaaagccgcaucaaag

SEQ ID NO: 1209114 - RNA, 19 nt, Artificial Sequence
  Description of Artificial Sequence: Synthetic oligonucleotide
  Sense strand starting at position 3368 of SEQ ID NO: 917106
uuuaguuuacucugaguaa

SEQ ID NO: 1209115 - RNA, 19 nt, Artificial Sequence
  Description of Artificial Sequence: Synthetic oligonucleotide
  Antisense strand to SEQ ID NO: 1209114
uuacucagaguaaacuaaa

SEQ ID NO: 1209116 - RNA, 19 nt, Artificial Sequence
  Description of Artificial Sequence: Synthetic oligonucleotide
  Sense strand starting at position 3371 of SEQ ID NO: 917106
aguuuacucugaguaacga

SEQ ID NO: 1209117 - RNA, 19 nt, Artificial Sequence
  Description of Artificial Sequence: Synthetic oligonucleotide
  Antisense strand to SEQ ID NO: 1209116
ucguuacucagaguaaacu

SEQ ID NO: 1209118 - RNA, 19 nt, Artificial Sequence
  Description of Artificial Sequence: Synthetic oligonucleotide
  Sense strand starting at position 3372 of SEQ ID NO: 917106
guuuacucugaguaacgau

SEQ ID NO: 1209119 - RNA, 19 nt, Artificial Sequence
  Description of Artificial Sequence: Synthetic oligonucleotide
  Antisense strand to SEQ ID NO: 1209118
aucguuacucagaguaaac

SEQ ID NO: 1209120 - RNA, 19 nt, Artificial Sequence
  Description of Artificial Sequence: Synthetic oligonucleotide
  Sense strand starting at position 3380 of SEQ ID NO: 917106
ugaguaacgauuugccugu

SEQ ID NO: 1209121 - RNA, 19 nt, Artificial Sequence
  Description of Artificial Sequence: Synthetic oligonucleotide
  Antisense strand to SEQ ID NO: 1209120
acaggcaaaucguuacuca

SEQ ID NO: 1209122 - RNA, 19 nt, Artificial Sequence
  Description of Artificial Sequence: Synthetic oligonucleotide
  Sense strand starting at position 3384 of SEQ ID NO: 917106
uaacgauuugccugugauu

SEQ ID NO: 1209123 - RNA, 19 nt, Artificial Sequence
  Description of Artificial Sequence: Synthetic oligonucleotide
  Antisense strand to SEQ ID NO: 1209122
aaucacaggcaaaucguua

SEQ ID NO: 1209124 - RNA, 19 nt, Artificial Sequence
  Description of Artificial Sequence: Synthetic oligonucleotide
  Sense strand starting at position 3396 of SEQ ID NO: 917106
ugugauucgugaaacggag

SEQ ID NO: 1209125 - RNA, 19 nt, Artificial Sequence
  Description of Artificial Sequence: Synthetic oligonucleotide
  Antisense strand to SEQ ID NO: 1209124
cuccguuucacgaaucaca

SEQ ID NO: 1209126 - RNA, 19 nt, Artificial Sequence
  Description of Artificial Sequence: Synthetic oligonucleotide
  Sense strand starting at position 3475 of SEQ ID NO: 917106
gagugaguuucucuaacuu

SEQ ID NO: 1209127 - RNA, 19 nt, Artificial Sequence
  Description of Artificial Sequence: Synthetic oligonucleotide
  Antisense strand to SEQ ID NO: 1209126
aaguuagagaaacucacuc

SEQ ID NO: 1209128 - RNA, 19 nt, Artificial Sequence
  Description of Artificial Sequence: Synthetic oligonucleotide
  Sense strand starting at position 3479 of SEQ ID NO: 917106
gaguuucucuaacuuaggu

SEQ ID NO: 1209129 - RNA, 19 nt, Artificial Sequence
  Description of Artificial Sequence: Synthetic oligonucleotide
  Antisense strand to SEQ ID NO: 1209128
accuaaguuagagaaacuc

SEQ ID NO: 1209130 - RNA, 19 nt, Artificial Sequence
  Description of Artificial Sequence: Synthetic oligonucleotide
  Sense strand starting at position 3501 of SEQ ID NO: 917106
caugcugaccuguauuguu

SEQ ID NO: 1209131 - RNA, 19 nt, Artificial Sequence
  Description of Artificial Sequence: Synthetic oligonucleotide
  Antisense strand to SEQ ID NO: 1209130
aacaauacaggucagcaug

SEQ ID NO: 1209132 - RNA, 19 nt, Artificial Sequence
  Description of Artificial Sequence: Synthetic oligonucleotide
  Sense strand starting at position 3536 of SEQ ID NO: 917106
uauuuagcaguacgaucua

SEQ ID NO: 1209133 - RNA, 19 nt, Artificial Sequence
  Description of Artificial Sequence: Synthetic oligonucleotide
  Antisense strand to SEQ ID NO: 1209132
uagaucguacugcuaaaua

SEQ ID NO: 1209134 - RNA, 19 nt, Artificial Sequence
  Description of Artificial Sequence: Synthetic oligonucleotide
  Sense strand starting at position 3746 of SEQ ID NO: 917106
uuuaaagagcauugguauu

SEQ ID NO: 1209135 - RNA, 19 nt, Artificial Sequence
  Description of Artificial Sequence: Synthetic oligonucleotide
  Antisense strand to SEQ ID NO: 1209134
aauaccaaugcucuuuaaa

SEQ ID NO: 1209136 - RNA, 19 nt, Artificial Sequence
  Description of Artificial Sequence: Synthetic oligonucleotide
  Sense strand starting at position 3748 of SEQ ID NO: 917106
uaaagagcauugguauuga

SEQ ID NO: 1209137 - RNA, 19 nt, Artificial Sequence
  Description of Artificial Sequence: Synthetic oligonucleotide
  Antisense strand to SEQ ID NO: 1209136
ucaauaccaaugcucuuua

SEQ ID NO: 1209138 - RNA, 19 nt, Artificial Sequence
  Description of Artificial Sequence: Synthetic oligonucleotide
  Sense strand starting at position 3927 of SEQ ID NO: 917106
ugugaaauaugcuuggaag

SEQ ID NO: 1209139 - RNA, 19 nt, Artificial Sequence
  Description of Artificial Sequence: Synthetic oligonucleotide
  Antisense strand to SEQ ID NO: 1209138
cuuccaagcauauuucaca

SEQ ID NO: 1209140 - RNA, 19 nt, Artificial Sequence
  Description of Artificial Sequence: Synthetic oligonucleotide
  Sense strand starting at position 3928 of SEQ ID NO: 917106
gugaaauaugcuuggaaga

SEQ ID NO: 1209141 - RNA, 19 nt, Artificial Sequence
  Description of Artificial Sequence: Synthetic oligonucleotide
  Antisense strand to SEQ ID NO: 1209140
ucuuccaagcauauuucac

SEQ ID NO: 1209142 - RNA, 19 nt, Artificial Sequence
  Description of Artificial Sequence: Synthetic oligonucleotide
  Sense strand starting at position 3979 of SEQ ID NO: 917106
augcguacauauccauaca

SEQ ID NO: 1209143 - RNA, 19 nt, Artificial Sequence
  Description of Artificial Sequence: Synthetic oligonucleotide
  Antisense strand to SEQ ID NO: 1209142
uguauggauauguacgcau

SEQ ID NO: 1209144 - RNA, 19 nt, Artificial Sequence
  Description of Artificial Sequence: Synthetic oligonucleotide
  Sense strand starting at position 441 of SEQ ID NO: 917107
agaaauaucgcgugaggug

SEQ ID NO: 1209145 - RNA, 19 nt, Artificial Sequence
  Description of Artificial Sequence: Synthetic oligonucleotide
  Antisense strand to SEQ ID NO: 1209144
caccucacgcgauauuucu

SEQ ID NO: 1209146 - RNA, 19 nt, Artificial Sequence
  Description of Artificial Sequence: Synthetic oligonucleotide
  Sense strand starting at position 442 of SEQ ID NO: 917107
gaaauaucgcgugaggugu

SEQ ID NO: 1209147 - RNA, 19 nt, Artificial Sequence
  Description of Artificial Sequence: Synthetic oligonucleotide
  Antisense strand to SEQ ID NO: 1209146
acaccucacgcgauauuuc

SEQ ID NO: 1209148 - RNA, 19 nt, Artificial Sequence
  Description of Artificial Sequence: Synthetic oligonucleotide
  Sense strand starting at position 450 of SEQ ID NO: 917107
gcgugagguguggcauaau

SEQ ID NO: 1209149 - RNA, 19 nt, Artificial Sequence
  Description of Artificial Sequence: Synthetic oligonucleotide
  Antisense strand to SEQ ID NO: 1209148
auuaugccacaccucacgc

SEQ ID NO: 1209150 - RNA, 19 nt, Artificial Sequence
  Description of Artificial Sequence: Synthetic oligonucleotide
  Sense strand starting at position 571 of SEQ ID NO: 917107
ucaaguaaauuacggauuu

SEQ ID NO: 1209151 - RNA, 19 nt, Artificial Sequence
  Description of Artificial Sequence: Synthetic oligonucleotide
  Antisense strand to SEQ ID NO: 1209150
aaauccguaauuuacuuga

SEQ ID NO: 1209152 - RNA, 19 nt, Artificial Sequence
  Description of Artificial Sequence: Synthetic oligonucleotide
  Sense strand starting at position 582 of SEQ ID NO: 917107
acggauuugucacaaggca

SEQ ID NO: 1209153 - RNA, 19 nt, Artificial Sequence
  Description of Artificial Sequence: Synthetic oligonucleotide
  Antisense strand to SEQ ID NO: 1209152
ugccuugugacaaauccgu

SEQ ID NO: 1209154 - RNA, 19 nt, Artificial Sequence
  Description of Artificial Sequence: Synthetic oligonucleotide
  Sense strand starting at position 622 of SEQ ID NO: 917107
uuuaaacaugacugugaug

SEQ ID NO: 1209155 - RNA, 19 nt, Artificial Sequence
  Description of Artificial Sequence: Synthetic oligonucleotide
  Antisense strand to SEQ ID NO: 1209154
caucacagucauguuuaaa

SEQ ID NO: 1209156 - RNA, 19 nt, Artificial Sequence
  Description of Artificial Sequence: Synthetic oligonucleotide
  Sense strand starting at position 625 of SEQ ID NO: 917107
aaacaugacugugaugaaa

SEQ ID NO: 1209157 - RNA, 19 nt, Artificial Sequence
  Description of Artificial Sequence: Synthetic oligonucleotide
  Antisense strand to SEQ ID NO: 1209156
uuucaucacagucauguuu

SEQ ID NO: 1209158 - RNA, 19 nt, Artificial Sequence
  Description of Artificial Sequence: Synthetic oligonucleotide
  Sense strand starting at position 627 of SEQ ID NO: 917107
acaugacugugaugaaaua

SEQ ID NO: 1209159 - RNA, 19 nt, Artificial Sequence
  Description of Artificial Sequence: Synthetic oligonucleotide
  Antisense strand to SEQ ID NO: 1209158
uauuucaucacagucaugu

SEQ ID NO: 1209160 - RNA, 19 nt, Artificial Sequence
  Description of Artificial Sequence: Synthetic oligonucleotide
  Sense strand starting at position 690 of SEQ ID NO: 917107
uuaagagaccuaugaugug

SEQ ID NO: 1209161 - RNA, 19 nt, Artificial Sequence
  Description of Artificial Sequence: Synthetic oligonucleotide
  Antisense strand to SEQ ID NO: 1209160
cacaucauaggucucuuaa

SEQ ID NO: 1209162 - RNA, 19 nt, Artificial Sequence
  Description of Artificial Sequence: Synthetic oligonucleotide
  Sense strand starting at position 712 of SEQ ID NO: 917107
ugaauaaucuaauggacua

SEQ ID NO: 1209163 - RNA, 19 nt, Artificial Sequence
  Description of Artificial Sequence: Synthetic oligonucleotide
  Antisense strand to SEQ ID NO: 1209162
uaguccauuagauuauuca

SEQ ID NO: 1209164 - RNA, 19 nt, Artificial Sequence
  Description of Artificial Sequence: Synthetic oligonucleotide
  Sense strand starting at position 739 of SEQ ID NO: 917107
cguguuuccuaucuagcaa

SEQ ID NO: 1209165 - RNA, 19 nt, Artificial Sequence
  Description of Artificial Sequence: Synthetic oligonucleotide
  Antisense strand to SEQ ID NO: 1209164
uugcuagauaggaaacacg

SEQ ID NO: 1209166 - RNA, 19 nt, Artificial Sequence
  Description of Artificial Sequence: Synthetic oligonucleotide
  Sense strand starting at position 774 of SEQ ID NO: 917107
agucauugaucccuuauuc

SEQ ID NO: 1209167 - RNA, 19 nt, Artificial Sequence
  Description of Artificial Sequence: Synthetic oligonucleotide
  Antisense strand to SEQ ID NO: 1209166
gaauaagggaucaaugacu

SEQ ID NO: 1209168 - RNA, 19 nt, Artificial Sequence
  Description of Artificial Sequence: Synthetic oligonucleotide
  Sense strand starting at position 1204 of SEQ ID NO: 917107
gugcaaccguaauuaaaua

SEQ ID NO: 1209169 - RNA, 19 nt, Artificial Sequence
  Description of Artificial Sequence: Synthetic oligonucleotide
  Antisense strand to SEQ ID NO: 1209168
uauuuaauuacgguugcac

SEQ ID NO: 1209170 - RNA, 19 nt, Artificial Sequence
  Description of Artificial Sequence: Synthetic oligonucleotide
  Sense strand starting at position 1296 of SEQ ID NO: 917107
ggauaagaauaauaaugac

SEQ ID NO: 1209171 - RNA, 19 nt, Artificial Sequence
  Description of Artificial Sequence: Synthetic oligonucleotide
  Antisense strand to SEQ ID NO: 1209170
gucauuauuauucuuaucc

SEQ ID NO: 1209172 - RNA, 19 nt, Artificial Sequence
  Description of Artificial Sequence: Synthetic oligonucleotide
  Sense strand starting at position 1620 of SEQ ID NO: 917107
uguaaauagccuuaauagg

SEQ ID NO: 1209173 - RNA, 19 nt, Artificial Sequence
  Description of Artificial Sequence: Synthetic oligonucleotide
  Antisense strand to SEQ ID NO: 1209172
ccuauuaaggcuauuuaca

SEQ ID NO: 1209174 - RNA, 19 nt, Artificial Sequence
  Description of Artificial Sequence: Synthetic oligonucleotide
  Sense strand starting at position 1708 of SEQ ID NO: 917107
caccuagaguccugagaaa

SEQ ID NO: 1209175 - RNA, 19 nt, Artificial Sequence
  Description of Artificial Sequence: Synthetic oligonucleotide
  Antisense strand to SEQ ID NO: 1209174
uuucucaggacucuaggug

SEQ ID NO: 1209176 - RNA, 19 nt, Artificial Sequence
  Description of Artificial Sequence: Synthetic oligonucleotide
  Sense strand starting at position 2029 of SEQ ID NO: 917107
agcagucuugugcacaauu

SEQ ID NO: 1209177 - RNA, 19 nt, Artificial Sequence
  Description of Artificial Sequence: Synthetic oligonucleotide
  Antisense strand to SEQ ID NO: 1209176
aauugugcacaagacugcu

SEQ ID NO: 1209178 - RNA, 19 nt, Artificial Sequence
  Description of Artificial Sequence: Synthetic oligonucleotide
  Sense strand starting at position 2382 of SEQ ID NO: 917107
agcuuuaugcccuagcaau

SEQ ID NO: 1209179 - RNA, 19 nt, Artificial Sequence
  Description of Artificial Sequence: Synthetic oligonucleotide
  Antisense strand to SEQ ID NO: 1209178
auugcuagggcauaaagcu

SEQ ID NO: 1209180 - RNA, 19 nt, Artificial Sequence
  Description of Artificial Sequence: Synthetic oligonucleotide
  Sense strand starting at position 2905 of SEQ ID NO: 917107
aucagaaauuagcaggagu

SEQ ID NO: 1209181 - RNA, 19 nt, Artificial Sequence
  Description of Artificial Sequence: Synthetic oligonucleotide
  Antisense strand to SEQ ID NO: 1209180
acuccugcuaauuucugau

SEQ ID NO: 1209182 - RNA, 19 nt, Artificial Sequence
  Description of Artificial Sequence: Synthetic oligonucleotide
  Sense strand starting at position 2907 of SEQ ID NO: 917107
cagaaauuagcaggaguac

SEQ ID NO: 1209183 - RNA, 19 nt, Artificial Sequence
  Description of Artificial Sequence: Synthetic oligonucleotide
  Antisense strand to SEQ ID NO: 1209182
guacuccugcuaauuucug

SEQ ID NO: 1209184 - RNA, 19 nt, Artificial Sequence
  Description of Artificial Sequence: Synthetic oligonucleotide
  Sense strand starting at position 2938 of SEQ ID NO: 917107
uguuucuguccugugcaua

SEQ ID NO: 1209185 - RNA, 19 nt, Artificial Sequence
  Description of Artificial Sequence: Synthetic oligonucleotide
  Antisense strand to SEQ ID NO: 1209184
uaugcacaggacagaaaca

SEQ ID NO: 1209186 - RNA, 19 nt, Artificial Sequence
  Description of Artificial Sequence: Synthetic oligonucleotide
  Sense strand starting at position 2967 of SEQ ID NO: 917107
ccucuaggaugcucagaaa

SEQ ID NO: 1209187 - RNA, 19 nt, Artificial Sequence
  Description of Artificial Sequence: Synthetic oligonucleotide
  Antisense strand to SEQ ID NO: 1209186
uuucugagcauccuagagg

SEQ ID NO: 1209188 - RNA, 19 nt, Artificial Sequence
  Description of Artificial Sequence: Synthetic oligonucleotide
  Sense strand starting at position 3018 of SEQ ID NO: 917107
gcagcucaaucugauauuu

SEQ ID NO: 1209189 - RNA, 19 nt, Artificial Sequence
  Description of Artificial Sequence: Synthetic oligonucleotide
  Antisense strand to SEQ ID NO: 1209188
aaauaucagauugagcugc

SEQ ID NO: 1209190 - RNA, 19 nt, Artificial Sequence
  Description of Artificial Sequence: Synthetic oligonucleotide
  Sense strand starting at position 3058 of SEQ ID NO: 917107
ucuugcaaucgugguuuau

SEQ ID NO: 1209191 - RNA, 19 nt, Artificial Sequence
  Description of Artificial Sequence: Synthetic oligonucleotide
  Antisense strand to SEQ ID NO: 1209190
auaaaccacgauugcaaga

SEQ ID NO: 1209192 - RNA, 19 nt, Artificial Sequence
  Description of Artificial Sequence: Synthetic oligonucleotide
  Sense strand starting at position 3060 of SEQ ID NO: 917107
uugcaaucgugguuuauau

SEQ ID NO: 1209193 - RNA, 19 nt, Artificial Sequence
  Description of Artificial Sequence: Synthetic oligonucleotide
  Antisense strand to SEQ ID NO: 1209192
auauaaaccacgauugcaa

SEQ ID NO: 1209194 - RNA, 19 nt, Artificial Sequence
  Description of Artificial Sequence: Synthetic oligonucleotide
  Sense strand starting at position 3062 of SEQ ID NO: 917107
gcaaucgugguuuauauua

SEQ ID NO: 1209195 - RNA, 19 nt, Artificial Sequence
  Description of Artificial Sequence: Synthetic oligonucleotide
  Antisense strand to SEQ ID NO: 1209194
uaauauaaaccacgauugc

SEQ ID NO: 1209196 - RNA, 19 nt, Artificial Sequence
  Description of Artificial Sequence: Synthetic oligonucleotide
  Sense strand starting at position 3079 of SEQ ID NO: 917107
uagucuuuguuaguugcaa

SEQ ID NO: 1209197 - RNA, 19 nt, Artificial Sequence
  Description of Artificial Sequence: Synthetic oligonucleotide
  Antisense strand to SEQ ID NO: 1209196
uugcaacuaacaaagacua

SEQ ID NO: 1209198 - RNA, 19 nt, Artificial Sequence
  Description of Artificial Sequence: Synthetic oligonucleotide
  Sense strand starting at position 3080 of SEQ ID NO: 917107
agucuuuguuaguugcaau

SEQ ID NO: 1209199 - RNA, 19 nt, Artificial Sequence
  Description of Artificial Sequence: Synthetic oligonucleotide
  Antisense strand to SEQ ID NO: 1209198
auugcaacuaacaaagacu

SEQ ID NO: 1209200 - RNA, 19 nt, Artificial Sequence
  Description of Artificial Sequence: Synthetic oligonucleotide
  Sense strand starting at position 3081 of SEQ ID NO: 917107
gucuuuguuaguugcaaua

SEQ ID NO: 1209201 - RNA, 19 nt, Artificial Sequence
  Description of Artificial Sequence: Synthetic oligonucleotide
  Antisense strand to SEQ ID NO: 1209200
uauugcaacuaacaaagac

SEQ ID NO: 1209202 - RNA, 19 nt, Artificial Sequence
  Description of Artificial Sequence: Synthetic oligonucleotide
  Sense strand starting at position 3091 of SEQ ID NO: 917107
guugcaauaucucugauua

SEQ ID NO: 1209203 - RNA, 19 nt, Artificial Sequence
  Description of Artificial Sequence: Synthetic oligonucleotide
  Antisense strand to SEQ ID NO: 1209202
uaaucagagauauugcaac

SEQ ID NO: 1209204 - RNA, 19 nt, Artificial Sequence
  Description of Artificial Sequence: Synthetic oligonucleotide
  Sense strand starting at position 3128 of SEQ ID NO: 917107
gagaaauaccgauguccau

SEQ ID NO: 1209205 - RNA, 19 nt, Artificial Sequence
  Description of Artificial Sequence: Synthetic oligonucleotide
  Antisense strand to SEQ ID NO: 1209204
auggacaucgguauuucuc

SEQ ID NO: 1209206 - RNA, 19 nt, Artificial Sequence
  Description of Artificial Sequence: Synthetic oligonucleotide
  Sense strand starting at position 3134 of SEQ ID NO: 917107
uaccgauguccauguauau

SEQ ID NO: 1209207 - RNA, 19 nt, Artificial Sequence
  Description of Artificial Sequence: Synthetic oligonucleotide
  Antisense strand to SEQ ID NO: 1209206
auauacauggacaucggua

SEQ ID NO: 1209208 - RNA, 19 nt, Artificial Sequence
  Description of Artificial Sequence: Synthetic oligonucleotide
  Sense strand starting at position 3230 of SEQ ID NO: 917107
auguauuauuucccugcua

SEQ ID NO: 1209209 - RNA, 19 nt, Artificial Sequence
  Description of Artificial Sequence: Synthetic oligonucleotide
  Antisense strand to SEQ ID NO: 1209208
uagcagggaaauaauacau

SEQ ID NO: 1209210 - RNA, 19 nt, Artificial Sequence
  Description of Artificial Sequence: Synthetic oligonucleotide
  Sense strand starting at position 3778 of SEQ ID NO: 917107
aucugccuuccaugaaugu

SEQ ID NO: 1209211 - RNA, 19 nt, Artificial Sequence
  Description of Artificial Sequence: Synthetic oligonucleotide
  Antisense strand to SEQ ID NO: 1209210
acauucauggaaggcagau

SEQ ID NO: 1209212 - RNA, 19 nt, Artificial Sequence
  Description of Artificial Sequence: Synthetic oligonucleotide
  Sense strand starting at position 3779 of SEQ ID NO: 917107
ucugccuuccaugaaugua

SEQ ID NO: 1209213 - RNA, 19 nt, Artificial Sequence
  Description of Artificial Sequence: Synthetic oligonucleotide
  Antisense strand to SEQ ID NO: 1209212
uacauucauggaaggcaga

SEQ ID NO: 1209214 - RNA, 19 nt, Artificial Sequence
  Description of Artificial Sequence: Synthetic oligonucleotide
  Sense strand starting at position 3877 of SEQ ID NO: 917107
ccuacaaagcuucggugaa

SEQ ID NO: 1209215 - RNA, 19 nt, Artificial Sequence
  Description of Artificial Sequence: Synthetic oligonucleotide
  Antisense strand to SEQ ID NO: 1209214
uucaccgaagcuuuguagg

SEQ ID NO: 1209216 - RNA, 19 nt, Artificial Sequence
  Description of Artificial Sequence: Synthetic oligonucleotide
  Sense strand starting at position 3879 of SEQ ID NO: 917107
uacaaagcuucggugaaac

SEQ ID NO: 1209217 - RNA, 19 nt, Artificial Sequence
  Description of Artificial Sequence: Synthetic oligonucleotide
  Antisense strand to SEQ ID NO: 1209216
guuucaccgaagcuuugua

SEQ ID NO: 1209218 - RNA, 19 nt, Artificial Sequence
  Description of Artificial Sequence: Synthetic oligonucleotide
  Sense strand starting at position 3881 of SEQ ID NO: 917107
caaagcuucggugaaacca

SEQ ID NO: 1209219 - RNA, 19 nt, Artificial Sequence
  Description of Artificial Sequence: Synthetic oligonucleotide
  Antisense strand to SEQ ID NO: 1209218
ugguuucaccgaagcuuug

SEQ ID NO: 1209220 - RNA, 19 nt, Artificial Sequence
  Description of Artificial Sequence: Synthetic oligonucleotide
  Sense strand starting at position 3923 of SEQ ID NO: 917107
cauguaagcucuuccucga

SEQ ID NO: 1209221 - RNA, 19 nt, Artificial Sequence
  Description of Artificial Sequence: Synthetic oligonucleotide
  Antisense strand to SEQ ID NO: 1209220
ucgaggaagagcuuacaug

SEQ ID NO: 1209222 - RNA, 19 nt, Artificial Sequence
  Description of Artificial Sequence: Synthetic oligonucleotide
  Sense strand starting at position 3926 of SEQ ID NO: 917107
guaagcucuuccucgaaua

SEQ ID NO: 1209223 - RNA, 19 nt, Artificial Sequence
  Description of Artificial Sequence: Synthetic oligonucleotide
  Antisense strand to SEQ ID NO: 1209222
uauucgaggaagagcuuac

SEQ ID NO: 1209224 - RNA, 19 nt, Artificial Sequence
  Description of Artificial Sequence: Synthetic oligonucleotide
  Sense strand starting at position 51 of SEQ ID NO: 917108
cucggaaccucaucacauu

SEQ ID NO: 1209225 - RNA, 19 nt, Artificial Sequence
  Description of Artificial Sequence: Synthetic oligonucleotide
  Antisense strand to SEQ ID NO: 1209224
aaugugaugagguuccgag

SEQ ID NO: 1209226 - RNA, 19 nt, Artificial Sequence
  Description of Artificial Sequence: Synthetic oligonucleotide
  Sense strand starting at position 192 of SEQ ID NO: 917108
uguucucuccuauguacau

SEQ ID NO: 1209227 - RNA, 19 nt, Artificial Sequence
  Description of Artificial Sequence: Synthetic oligonucleotide
  Antisense strand to SEQ ID NO: 1209226
auguacauaggagagaaca

SEQ ID NO: 1209228 - RNA, 19 nt, Artificial Sequence
  Description of Artificial Sequence: Synthetic oligonucleotide
  Sense strand starting at position 193 of SEQ ID NO: 917108
guucucuccuauguacaua

SEQ ID NO: 1209229 - RNA, 19 nt, Artificial Sequence
  Description of Artificial Sequence: Synthetic oligonucleotide
  Antisense strand to SEQ ID NO: 1209228
uauguacauaggagagaac

SEQ ID NO: 1209230 - RNA, 19 nt, Artificial Sequence
  Description of Artificial Sequence: Synthetic oligonucleotide
  Sense strand starting at position 272 of SEQ ID NO: 917108
uauacaaggcauugugaau

SEQ ID NO: 1209231 - RNA, 19 nt, Artificial Sequence
  Description of Artificial Sequence: Synthetic oligonucleotide
  Antisense strand to SEQ ID NO: 1209230
auucacaaugccuuguaua

SEQ ID NO: 1209232 - RNA, 19 nt, Artificial Sequence
  Description of Artificial Sequence: Synthetic oligonucleotide
  Sense strand starting at position 374 of SEQ ID NO: 917108
uuguauucccagcacaaug

SEQ ID NO: 1209233 - RNA, 19 nt, Artificial Sequence
  Description of Artificial Sequence: Synthetic oligonucleotide
  Antisense strand to SEQ ID NO: 1209232
cauugugcugggaauacaa

SEQ ID NO: 1209234 - RNA, 19 nt, Artificial Sequence
  Description of Artificial Sequence: Synthetic oligonucleotide
  Sense strand starting at position 508 of SEQ ID NO: 917108
guacacguugcuuugcaaa

SEQ ID NO: 1209235 - RNA, 19 nt, Artificial Sequence
  Description of Artificial Sequence: Synthetic oligonucleotide
  Antisense strand to SEQ ID NO: 1209234
uuugcaaagcaacguguac

SEQ ID NO: 1209236 - RNA, 19 nt, Artificial Sequence
  Description of Artificial Sequence: Synthetic oligonucleotide
  Sense strand starting at position 537 of SEQ ID NO: 917108
gugccugugaugcaguaua

SEQ ID NO: 1209237 - RNA, 19 nt, Artificial Sequence
  Description of Artificial Sequence: Synthetic oligonucleotide
  Antisense strand to SEQ ID NO: 1209236
uauacugcaucacaggcac

SEQ ID NO: 1209238 - RNA, 19 nt, Artificial Sequence
  Description of Artificial Sequence: Synthetic oligonucleotide
  Sense strand starting at position 674 of SEQ ID NO: 917108
caauauguugacuaaggca

SEQ ID NO: 1209239 - RNA, 19 nt, Artificial Sequence
  Description of Artificial Sequence: Synthetic oligonucleotide
  Antisense strand to SEQ ID NO: 1209238
ugccuuagucaacauauug

SEQ ID NO: 1209240 - RNA, 19 nt, Artificial Sequence
  Description of Artificial Sequence: Synthetic oligonucleotide
  Sense strand starting at position 723 of SEQ ID NO: 917108
cccaguuaucuuggaggag

SEQ ID NO: 1209241 - RNA, 19 nt, Artificial Sequence
  Description of Artificial Sequence: Synthetic oligonucleotide
  Antisense strand to SEQ ID NO: 1209240
cuccuccaagauaacuggg

SEQ ID NO: 1209242 - RNA, 19 nt, Artificial Sequence
  Description of Artificial Sequence: Synthetic oligonucleotide
  Sense strand starting at position 724 of SEQ ID NO: 917108
ccaguuaucuuggaggagg

SEQ ID NO: 1209243 - RNA, 19 nt, Artificial Sequence
  Description of Artificial Sequence: Synthetic oligonucleotide
  Antisense strand to SEQ ID NO: 1209242
ccuccuccaagauaacugg

SEQ ID NO: 1209244 - RNA, 19 nt, Artificial Sequence
  Description of Artificial Sequence: Synthetic oligonucleotide
  Sense strand starting at position 1123 of SEQ ID NO: 917108
gccauuacaacgugcgaua

SEQ ID NO: 1209245 - RNA, 19 nt, Artificial Sequence
  Description of Artificial Sequence: Synthetic oligonucleotide
  Antisense strand to SEQ ID NO: 1209244
uaucgcacguuguaauggc

SEQ ID NO: 1209246 - RNA, 19 nt, Artificial Sequence
  Description of Artificial Sequence: Synthetic oligonucleotide
  Sense strand starting at position 1128 of SEQ ID NO: 917108
uacaacgugcgauaugaau

SEQ ID NO: 1209247 - RNA, 19 nt, Artificial Sequence
  Description of Artificial Sequence: Synthetic oligonucleotide
  Antisense strand to SEQ ID NO: 1209246
auucauaucgcacguugua

SEQ ID NO: 1209248 - RNA, 19 nt, Artificial Sequence
  Description of Artificial Sequence: Synthetic oligonucleotide
  Sense strand starting at position 1305 of SEQ ID NO: 917108
aaaggaaaguugcuuggau

SEQ ID NO: 1209249 - RNA, 19 nt, Artificial Sequence
  Description of Artificial Sequence: Synthetic oligonucleotide
  Antisense strand to SEQ ID NO: 1209248
auccaagcaacuuuccuuu

SEQ ID NO: 1209250 - RNA, 19 nt, Artificial Sequence
  Description of Artificial Sequence: Synthetic oligonucleotide
  Sense strand starting at position 1306 of SEQ ID NO: 917108
aaggaaaguugcuuggauu

SEQ ID NO: 1209251 - RNA, 19 nt, Artificial Sequence
  Description of Artificial Sequence: Synthetic oligonucleotide
  Antisense strand to SEQ ID NO: 1209250
aauccaagcaacuuuccuu

SEQ ID NO: 1209252 - RNA, 19 nt, Artificial Sequence
  Description of Artificial Sequence: Synthetic oligonucleotide
  Sense strand starting at position 1846 of SEQ ID NO: 917108
cggcuugcgagcuacugaa

SEQ ID NO: 1209253 - RNA, 19 nt, Artificial Sequence
  Description of Artificial Sequence: Synthetic oligonucleotide
  Antisense strand to SEQ ID NO: 1209252
uucaguagcucgcaagccg

SEQ ID NO: 1209254 - RNA, 19 nt, Artificial Sequence
  Description of Artificial Sequence: Synthetic oligonucleotide
  Sense strand starting at position 2298 of SEQ ID NO: 917108
cggcccuucgaugauugua

SEQ ID NO: 1209255 - RNA, 19 nt, Artificial Sequence
  Description of Artificial Sequence: Synthetic oligonucleotide
  Antisense strand to SEQ ID NO: 1209254
uacaaucaucgaagggccg

SEQ ID NO: 1209256 - RNA, 19 nt, Artificial Sequence
  Description of Artificial Sequence: Synthetic oligonucleotide
  Sense strand starting at position 2434 of SEQ ID NO: 917108
caaguagagccagaguagu

SEQ ID NO: 1209257 - RNA, 19 nt, Artificial Sequence
  Description of Artificial Sequence: Synthetic oligonucleotide
  Antisense strand to SEQ ID NO: 1209256
acuacucuggcucuacuug

SEQ ID NO: 1209258 - RNA, 19 nt, Artificial Sequence
  Description of Artificial Sequence: Synthetic oligonucleotide
  Sense strand starting at position 2485 of SEQ ID NO: 917108
ggugguucuucuccgaauu

SEQ ID NO: 1209259 - RNA, 19 nt, Artificial Sequence
  Description of Artificial Sequence: Synthetic oligonucleotide
  Antisense strand to SEQ ID NO: 1209258
aauucggagaagaaccacc

SEQ ID NO: 1209260 - RNA, 19 nt, Artificial Sequence
  Description of Artificial Sequence: Synthetic oligonucleotide
  Sense strand starting at position 2486 of SEQ ID NO: 917108
gugguucuucuccgaauuu

SEQ ID NO: 1209261 - RNA, 19 nt, Artificial Sequence
  Description of Artificial Sequence: Synthetic oligonucleotide
  Antisense strand to SEQ ID NO: 1209260
aaauucggagaagaaccac

SEQ ID NO: 1209262 - RNA, 19 nt, Artificial Sequence
  Description of Artificial Sequence: Synthetic oligonucleotide
  Sense strand starting at position 2506 of SEQ ID NO: 917108
uuccgucaggcccagauua

SEQ ID NO: 1209263 - RNA, 19 nt, Artificial Sequence
  Description of Artificial Sequence: Synthetic oligonucleotide
  Antisense strand to SEQ ID NO: 1209262
uaaucugggccugacggaa

SEQ ID NO: 1209264 - RNA, 19 nt, Artificial Sequence
  Description of Artificial Sequence: Synthetic oligonucleotide
  Sense strand starting at position 2514 of SEQ ID NO: 917108
ggcccagauuagcagauuu

SEQ ID NO: 1209265 - RNA, 19 nt, Artificial Sequence
  Description of Artificial Sequence: Synthetic oligonucleotide
  Antisense strand to SEQ ID NO: 1209264
aaaucugcuaaucugggcc

SEQ ID NO: 1209266 - RNA, 19 nt, Artificial Sequence
  Description of Artificial Sequence: Synthetic oligonucleotide
  Sense strand starting at position 2576 of SEQ ID NO: 917108
ugcuuugugcgcucaacca

SEQ ID NO: 1209267 - RNA, 19 nt, Artificial Sequence
  Description of Artificial Sequence: Synthetic oligonucleotide
  Antisense strand to SEQ ID NO: 1209266
ugguugagcgcacaaagca

SEQ ID NO: 1209268 - RNA, 19 nt, Artificial Sequence
  Description of Artificial Sequence: Synthetic oligonucleotide
  Sense strand starting at position 2792 of SEQ ID NO: 917108
acaguagacuagucuuaug

SEQ ID NO: 1209269 - RNA, 19 nt, Artificial Sequence
  Description of Artificial Sequence: Synthetic oligonucleotide
  Antisense strand to SEQ ID NO: 1209268
cauaagacuagucuacugu

SEQ ID NO: 1209270 - RNA, 19 nt, Artificial Sequence
  Description of Artificial Sequence: Synthetic oligonucleotide
  Sense strand starting at position 2881 of SEQ ID NO: 917108
agccuuagccauuagagag

SEQ ID NO: 1209271 - RNA, 19 nt, Artificial Sequence
  Description of Artificial Sequence: Synthetic oligonucleotide
  Antisense strand to SEQ ID NO: 1209270
cucucuaauggcuaaggcu

SEQ ID NO: 1209272 - RNA, 19 nt, Artificial Sequence
  Description of Artificial Sequence: Synthetic oligonucleotide
  Sense strand starting at position 2920 of SEQ ID NO: 917108
ugcaaaugcgcuugaugga

SEQ ID NO: 1209273 - RNA, 19 nt, Artificial Sequence
  Description of Artificial Sequence: Synthetic oligonucleotide
  Antisense strand to SEQ ID NO: 1209272
uccaucaagcgcauuugca

SEQ ID NO: 1209274 - RNA, 19 nt, Artificial Sequence
  Description of Artificial Sequence: Synthetic oligonucleotide
  Sense strand starting at position 2921 of SEQ ID NO: 917108
gcaaaugcgcuugauggaa

SEQ ID NO: 1209275 - RNA, 19 nt, Artificial Sequence
  Description of Artificial Sequence: Synthetic oligonucleotide
  Antisense strand to SEQ ID NO: 1209274
uuccaucaagcgcauuugc

SEQ ID NO: 1209276 - RNA, 19 nt, Artificial Sequence
  Description of Artificial Sequence: Synthetic oligonucleotide
  Sense strand starting at position 2942 of SEQ ID NO: 917108
agaugucaauuccacugaa

SEQ ID NO: 1209277 - RNA, 19 nt, Artificial Sequence
  Description of Artificial Sequence: Synthetic oligonucleotide
  Antisense strand to SEQ ID NO: 1209276
uucaguggaauugacaucu

SEQ ID NO: 1209278 - RNA, 19 nt, Artificial Sequence
  Description of Artificial Sequence: Synthetic oligonucleotide
  Sense strand starting at position 2945 of SEQ ID NO: 917108
ugucaauuccacugaaguc

SEQ ID NO: 1209279 - RNA, 19 nt, Artificial Sequence
  Description of Artificial Sequence: Synthetic oligonucleotide
  Antisense strand to SEQ ID NO: 1209278
gacuucaguggaauugaca

SEQ ID NO: 1209280 - RNA, 19 nt, Artificial Sequence
  Description of Artificial Sequence: Synthetic oligonucleotide
  Sense strand starting at position 2969 of SEQ ID NO: 917108
uucugcuguaggugauauu

SEQ ID NO: 1209281 - RNA, 19 nt, Artificial Sequence
  Description of Artificial Sequence: Synthetic oligonucleotide
  Antisense strand to SEQ ID NO: 1209280
aauaucaccuacagcagaa

SEQ ID NO: 1209282 - RNA, 19 nt, Artificial Sequence
  Description of Artificial Sequence: Synthetic oligonucleotide
  Sense strand starting at position 2978 of SEQ ID NO: 917108
aggugauauuaugucguga

SEQ ID NO: 1209283 - RNA, 19 nt, Artificial Sequence
  Description of Artificial Sequence: Synthetic oligonucleotide
  Antisense strand to SEQ ID NO: 1209282
ucacgacauaauaucaccu

SEQ ID NO: 1209284 - RNA, 19 nt, Artificial Sequence
  Description of Artificial Sequence: Synthetic oligonucleotide
  Sense strand starting at position 2983 of SEQ ID NO: 917108
auauuaugucgugacuuua

SEQ ID NO: 1209285 - RNA, 19 nt, Artificial Sequence
  Description of Artificial Sequence: Synthetic oligonucleotide
  Antisense strand to SEQ ID NO: 1209284
uaaagucacgacauaauau

SEQ ID NO: 1209286 - RNA, 19 nt, Artificial Sequence
  Description of Artificial Sequence: Synthetic oligonucleotide
  Sense strand starting at position 3006 of SEQ ID NO: 917108
aaguaauggugauaccaaa

SEQ ID NO: 1209287 - RNA, 19 nt, Artificial Sequence
  Description of Artificial Sequence: Synthetic oligonucleotide
  Antisense strand to SEQ ID NO: 1209286
uuugguaucaccauuacuu

SEQ ID NO: 1209288 - RNA, 19 nt, Artificial Sequence
  Description of Artificial Sequence: Synthetic oligonucleotide
  Sense strand starting at position 3332 of SEQ ID NO: 917108
gggaaucauucuuaccagu

SEQ ID NO: 1209289 - RNA, 19 nt, Artificial Sequence
  Description of Artificial Sequence: Synthetic oligonucleotide
  Antisense strand to SEQ ID NO: 1209288
acugguaagaaugauuccc

SEQ ID NO: 1209290 - RNA, 19 nt, Artificial Sequence
  Description of Artificial Sequence: Synthetic oligonucleotide
  Sense strand starting at position 3340 of SEQ ID NO: 917108
uucuuaccaguuugguaua

SEQ ID NO: 1209291 - RNA, 19 nt, Artificial Sequence
  Description of Artificial Sequence: Synthetic oligonucleotide
  Antisense strand to SEQ ID NO: 1209290
uauaccaaacugguaagaa

SEQ ID NO: 1209292 - RNA, 19 nt, Artificial Sequence
  Description of Artificial Sequence: Synthetic oligonucleotide
  Sense strand starting at position 3342 of SEQ ID NO: 917108
cuuaccaguuugguauaua

SEQ ID NO: 1209293 - RNA, 19 nt, Artificial Sequence
  Description of Artificial Sequence: Synthetic oligonucleotide
  Antisense strand to SEQ ID NO: 1209292
uauauaccaaacugguaag

SEQ ID NO: 1209294 - RNA, 19 nt, Artificial Sequence
  Description of Artificial Sequence: Synthetic oligonucleotide
  Sense strand starting at position 3450 of SEQ ID NO: 917108
acaucugagucagcuaaca

SEQ ID NO: 1209295 - RNA, 19 nt, Artificial Sequence
  Description of Artificial Sequence: Synthetic oligonucleotide
  Antisense strand to SEQ ID NO: 1209294
uguuagcugacucagaugu

SEQ ID NO: 1209296 - RNA, 19 nt, Artificial Sequence
  Description of Artificial Sequence: Synthetic oligonucleotide
  Sense strand starting at position 3455 of SEQ ID NO: 917108
ugagucagcuaacauuuaa

SEQ ID NO: 1209297 - RNA, 19 nt, Artificial Sequence
  Description of Artificial Sequence: Synthetic oligonucleotide
  Antisense strand to SEQ ID NO: 1209296
uuaaauguuagcugacuca

SEQ ID NO: 1209298 - RNA, 19 nt, Artificial Sequence
  Description of Artificial Sequence: Synthetic oligonucleotide
  Sense strand starting at position 3837 of SEQ ID NO: 917108
gugccuuuccugggcaaua

SEQ ID NO: 1209299 - RNA, 19 nt, Artificial Sequence
  Description of Artificial Sequence: Synthetic oligonucleotide
  Antisense strand to SEQ ID NO: 1209298
uauugcccaggaaaggcac

SEQ ID NO: 1209300 - RNA, 19 nt, Artificial Sequence
  Description of Artificial Sequence: Synthetic oligonucleotide
  Sense strand starting at position 3838 of SEQ ID NO: 917108
ugccuuuccugggcaauaa

SEQ ID NO: 1209301 - RNA, 19 nt, Artificial Sequence
  Description of Artificial Sequence: Synthetic oligonucleotide
  Antisense strand to SEQ ID NO: 1209300
uuauugcccaggaaaggca

SEQ ID NO: 1209302 - RNA, 19 nt, Artificial Sequence
  Description of Artificial Sequence: Synthetic oligonucleotide
  Sense strand starting at position 3842 of SEQ ID NO: 917108
uuuccugggcaauaagagu

SEQ ID NO: 1209303 - RNA, 19 nt, Artificial Sequence
  Description of Artificial Sequence: Synthetic oligonucleotide
  Antisense strand to SEQ ID NO: 1209302
acucuuauugcccaggaaa

SEQ ID NO: 1209304 - RNA, 19 nt, Artificial Sequence
  Description of Artificial Sequence: Synthetic oligonucleotide
  Sense strand starting at position 263 of SEQ ID NO: 917109
cuaugaucucaccacaggu

SEQ ID NO: 1209305 - RNA, 19 nt, Artificial Sequence
  Description of Artificial Sequence: Synthetic oligonucleotide
  Antisense strand to SEQ ID NO: 1209304
accuguggugagaucauag

SEQ ID NO: 1209306 - RNA, 19 nt, Artificial Sequence
  Description of Artificial Sequence: Synthetic oligonucleotide
  Sense strand starting at position 278 of SEQ ID NO: 917109
agguaaccauucuuaggau

SEQ ID NO: 1209307 - RNA, 19 nt, Artificial Sequence
  Description of Artificial Sequence: Synthetic oligonucleotide
  Antisense strand to SEQ ID NO: 1209306
auccuaagaaugguuaccu

SEQ ID NO: 1209308 - RNA, 19 nt, Artificial Sequence
  Description of Artificial Sequence: Synthetic oligonucleotide
  Sense strand starting at position 297 of SEQ ID NO: 917109
gauggaaacuauugugaua

SEQ ID NO: 1209309 - RNA, 19 nt, Artificial Sequence
  Description of Artificial Sequence: Synthetic oligonucleotide
  Antisense strand to SEQ ID NO: 1209308
uaucacaauaguuuccauc

SEQ ID NO: 1209310 - RNA, 19 nt, Artificial Sequence
  Description of Artificial Sequence: Synthetic oligonucleotide
  Sense strand starting at position 300 of SEQ ID NO: 917109
ggaaacuauugugauauuu

SEQ ID NO: 1209311 - RNA, 19 nt, Artificial Sequence
  Description of Artificial Sequence: Synthetic oligonucleotide
  Antisense strand to SEQ ID NO: 1209310
aaauaucacaauaguuucc

SEQ ID NO: 1209312 - RNA, 19 nt, Artificial Sequence
  Description of Artificial Sequence: Synthetic oligonucleotide
  Sense strand starting at position 329 of SEQ ID NO: 917109
ggaagcauauggucauauu

SEQ ID NO: 1209313 - RNA, 19 nt, Artificial Sequence
  Description of Artificial Sequence: Synthetic oligonucleotide
  Antisense strand to SEQ ID NO: 1209312
aauaugaccauaugcuucc

SEQ ID NO: 1209314 - RNA, 19 nt, Artificial Sequence
  Description of Artificial Sequence: Synthetic oligonucleotide
  Sense strand starting at position 332 of SEQ ID NO: 917109
agcauauggucauauuuaa

SEQ ID NO: 1209315 - RNA, 19 nt, Artificial Sequence
  Description of Artificial Sequence: Synthetic oligonucleotide
  Antisense strand to SEQ ID NO: 1209314
uuaaauaugaccauaugcu

SEQ ID NO: 1209316 - RNA, 19 nt, Artificial Sequence
  Description of Artificial Sequence: Synthetic oligonucleotide
  Sense strand starting at position 368 of SEQ ID NO: 917109
uucccauuaugugaagaac

SEQ ID NO: 1209317 - RNA, 19 nt, Artificial Sequence
  Description of Artificial Sequence: Synthetic oligonucleotide
  Antisense strand to SEQ ID NO: 1209316
guucuucacauaaugggaa

SEQ ID NO: 1209318 - RNA, 19 nt, Artificial Sequence
  Description of Artificial Sequence: Synthetic oligonucleotide
  Sense strand starting at position 957 of SEQ ID NO: 917109
acuggcuccagagaaguua

SEQ ID NO: 1209319 - RNA, 19 nt, Artificial Sequence
  Description of Artificial Sequence: Synthetic oligonucleotide
  Antisense strand to SEQ ID NO: 1209318
uaacuucucuggagccagu

SEQ ID NO: 1209320 - RNA, 19 nt, Artificial Sequence
  Description of Artificial Sequence: Synthetic oligonucleotide
  Sense strand starting at position 1014 of SEQ ID NO: 917109
gucagcaugcaauaaaugu

SEQ ID NO: 1209321 - RNA, 19 nt, Artificial Sequence
  Description of Artificial Sequence: Synthetic oligonucleotide
  Antisense strand to SEQ ID NO: 1209320
acauuuauugcaugcugac

SEQ ID NO: 1209322 - RNA, 19 nt, Artificial Sequence
  Description of Artificial Sequence: Synthetic oligonucleotide
  Sense strand starting at position 2511 of SEQ ID NO: 917109
gaaagaagguaagaauuaa

SEQ ID NO: 1209323 - RNA, 19 nt, Artificial Sequence
  Description of Artificial Sequence: Synthetic oligonucleotide
  Antisense strand to SEQ ID NO: 1209322
uuaauucuuaccuucuuuc

SEQ ID NO: 1209324 - RNA, 19 nt, Artificial Sequence
  Description of Artificial Sequence: Synthetic oligonucleotide
  Sense strand starting at position 2555 of SEQ ID NO: 917109
acuggagucguagggagaa

SEQ ID NO: 1209325 - RNA, 19 nt, Artificial Sequence
  Description of Artificial Sequence: Synthetic oligonucleotide
  Antisense strand to SEQ ID NO: 1209324
uucucccuacgacuccagu

SEQ ID NO: 1209326 - RNA, 19 nt, Artificial Sequence
  Description of Artificial Sequence: Synthetic oligonucleotide
  Sense strand starting at position 2557 of SEQ ID NO: 917109
uggagucguagggagaauu

SEQ ID NO: 1209327 - RNA, 19 nt, Artificial Sequence
  Description of Artificial Sequence: Synthetic oligonucleotide
  Antisense strand to SEQ ID NO: 1209326
aauucucccuacgacucca

SEQ ID NO: 1209328 - RNA, 19 nt, Artificial Sequence
  Description of Artificial Sequence: Synthetic oligonucleotide
  Sense strand starting at position 2565 of SEQ ID NO: 917109
uagggagaauuauagguaa

SEQ ID NO: 1209329 - RNA, 19 nt, Artificial Sequence
  Description of Artificial Sequence: Synthetic oligonucleotide
  Antisense strand to SEQ ID NO: 1209328
uuaccuauaauucucccua

SEQ ID NO: 1209330 - RNA, 19 nt, Artificial Sequence
  Description of Artificial Sequence: Synthetic oligonucleotide
  Sense strand starting at position 2567 of SEQ ID NO: 917109
gggagaauuauagguaagu

SEQ ID NO: 1209331 - RNA, 19 nt, Artificial Sequence
  Description of Artificial Sequence: Synthetic oligonucleotide
  Antisense strand to SEQ ID NO: 1209330
acuuaccuauaauucuccc

SEQ ID NO: 1209332 - RNA, 19 nt, Artificial Sequence
  Description of Artificial Sequence: Synthetic oligonucleotide
  Sense strand starting at position 2568 of SEQ ID NO: 917109
ggagaauuauagguaaguc

SEQ ID NO: 1209333 - RNA, 19 nt, Artificial Sequence
  Description of Artificial Sequence: Synthetic oligonucleotide
  Antisense strand to SEQ ID NO: 1209332
gacuuaccuauaauucucc

SEQ ID NO: 1209334 - RNA, 19 nt, Artificial Sequence
  Description of Artificial Sequence: Synthetic oligonucleotide
  Sense strand starting at position 2577 of SEQ ID NO: 917109
uagguaagucacgaugcuu

SEQ ID NO: 1209335 - RNA, 19 nt, Artificial Sequence
  Description of Artificial Sequence: Synthetic oligonucleotide
  Antisense strand to SEQ ID NO: 1209334
aagcaucgugacuuaccua

SEQ ID NO: 1209336 - RNA, 19 nt, Artificial Sequence
  Description of Artificial Sequence: Synthetic oligonucleotide
  Sense strand starting at position 2583 of SEQ ID NO: 917109
agucacgaugcuuaugaca

SEQ ID NO: 1209337 - RNA, 19 nt, Artificial Sequence
  Description of Artificial Sequence: Synthetic oligonucleotide
  Antisense strand to SEQ ID NO: 1209336
ugucauaagcaucgugacu

SEQ ID NO: 1209338 - RNA, 19 nt, Artificial Sequence
  Description of Artificial Sequence: Synthetic oligonucleotide
  Sense strand starting at position 2591 of SEQ ID NO: 917109
ugcuuaugacagcaagaug

SEQ ID NO: 1209339 - RNA, 19 nt, Artificial Sequence
  Description of Artificial Sequence: Synthetic oligonucleotide
  Antisense strand to SEQ ID NO: 1209338
caucuugcugucauaagca

SEQ ID NO: 1209340 - RNA, 19 nt, Artificial Sequence
  Description of Artificial Sequence: Synthetic oligonucleotide
  Sense strand starting at position 2700 of SEQ ID NO: 917109
uuugauaauuugugacaca

SEQ ID NO: 1209341 - RNA, 19 nt, Artificial Sequence
  Description of Artificial Sequence: Synthetic oligonucleotide
  Antisense strand to SEQ ID NO: 1209340
ugugucacaaauuaucaaa

SEQ ID NO: 1209342 - RNA, 19 nt, Artificial Sequence
  Description of Artificial Sequence: Synthetic oligonucleotide
  Sense strand starting at position 2701 of SEQ ID NO: 917109
uugauaauuugugacacaa

SEQ ID NO: 1209343 - RNA, 19 nt, Artificial Sequence
  Description of Artificial Sequence: Synthetic oligonucleotide
  Antisense strand to SEQ ID NO: 1209342
uugugucacaaauuaucaa

SEQ ID NO: 1209344 - RNA, 19 nt, Artificial Sequence
  Description of Artificial Sequence: Synthetic oligonucleotide
  Sense strand starting at position 2785 of SEQ ID NO: 917109
agagauccuuugccagaaa

SEQ ID NO: 1209345 - RNA, 19 nt, Artificial Sequence
  Description of Artificial Sequence: Synthetic oligonucleotide
  Antisense strand to SEQ ID NO: 1209344
uuucuggcaaaggaucucu

SEQ ID NO: 1209346 - RNA, 19 nt, Artificial Sequence
  Description of Artificial Sequence: Synthetic oligonucleotide
  Sense strand starting at position 2786 of SEQ ID NO: 917109
gagauccuuugccagaaag

SEQ ID NO: 1209347 - RNA, 19 nt, Artificial Sequence
  Description of Artificial Sequence: Synthetic oligonucleotide
  Antisense strand to SEQ ID NO: 1209346
cuuucuggcaaaggaucuc

SEQ ID NO: 1209348 - RNA, 19 nt, Artificial Sequence
  Description of Artificial Sequence: Synthetic oligonucleotide
  Sense strand starting at position 2796 of SEQ ID NO: 917109
gccagaaagcaucauaaug

SEQ ID NO: 1209349 - RNA, 19 nt, Artificial Sequence
  Description of Artificial Sequence: Synthetic oligonucleotide
  Antisense strand to SEQ ID NO: 1209348
cauuaugaugcuuucuggc

SEQ ID NO: 1209350 - RNA, 19 nt, Artificial Sequence
  Description of Artificial Sequence: Synthetic oligonucleotide
  Sense strand starting at position 2804 of SEQ ID NO: 917109
gcaucauaaugaguugcuu

SEQ ID NO: 1209351 - RNA, 19 nt, Artificial Sequence
  Description of Artificial Sequence: Synthetic oligonucleotide
  Antisense strand to SEQ ID NO: 1209350
aagcaacucauuaugaugc

SEQ ID NO: 1209352 - RNA, 19 nt, Artificial Sequence
  Description of Artificial Sequence: Synthetic oligonucleotide
  Sense strand starting at position 2810 of SEQ ID NO: 917109
uaaugaguugcuuagugaa

SEQ ID NO: 1209353 - RNA, 19 nt, Artificial Sequence
  Description of Artificial Sequence: Synthetic oligonucleotide
  Antisense strand to SEQ ID NO: 1209352
uucacuaagcaacucauua

SEQ ID NO: 1209354 - RNA, 19 nt, Artificial Sequence
  Description of Artificial Sequence: Synthetic oligonucleotide
  Sense strand starting at position 2812 of SEQ ID NO: 917109
augaguugcuuagugaauu

SEQ ID NO: 1209355 - RNA, 19 nt, Artificial Sequence
  Description of Artificial Sequence: Synthetic oligonucleotide
  Antisense strand to SEQ ID NO: 1209354
aauucacuaagcaacucau

SEQ ID NO: 1209356 - RNA, 19 nt, Artificial Sequence
  Description of Artificial Sequence: Synthetic oligonucleotide
  Sense strand starting at position 2834 of SEQ ID NO: 917109
ucaaacauccagugauuag

SEQ ID NO: 1209357 - RNA, 19 nt, Artificial Sequence
  Description of Artificial Sequence: Synthetic oligonucleotide
  Antisense strand to SEQ ID NO: 1209356
cuaaucacuggauguuuga

SEQ ID NO: 1209358 - RNA, 19 nt, Artificial Sequence
  Description of Artificial Sequence: Synthetic oligonucleotide
  Sense strand starting at position 3041 of SEQ ID NO: 917109
caauaaauagcgugaggaa

SEQ ID NO: 1209359 - RNA, 19 nt, Artificial Sequence
  Description of Artificial Sequence: Synthetic oligonucleotide
  Antisense strand to SEQ ID NO: 1209358
uuccucacgcuauuuauug

SEQ ID NO: 1209360 - RNA, 19 nt, Artificial Sequence
  Description of Artificial Sequence: Synthetic oligonucleotide
  Sense strand starting at position 3127 of SEQ ID NO: 917109
gcaccaggcguuugagaaa

SEQ ID NO: 1209361 - RNA, 19 nt, Artificial Sequence
  Description of Artificial Sequence: Synthetic oligonucleotide
  Antisense strand to SEQ ID NO: 1209360
uuucucaaacgccuggugc

SEQ ID NO: 1209362 - RNA, 19 nt, Artificial Sequence
  Description of Artificial Sequence: Synthetic oligonucleotide
  Sense strand starting at position 3154 of SEQ ID NO: 917109
uuaauugcgaguugaccaa

SEQ ID NO: 1209363 - RNA, 19 nt, Artificial Sequence
  Description of Artificial Sequence: Synthetic oligonucleotide
  Antisense strand to SEQ ID NO: 1209362
uuggucaacucgcaauuaa

SEQ ID NO: 1209364 - RNA, 19 nt, Artificial Sequence
  Description of Artificial Sequence: Synthetic oligonucleotide
  Sense strand starting at position 3158 of SEQ ID NO: 917109
uugcgaguugaccaacaaa

SEQ ID NO: 1209365 - RNA, 19 nt, Artificial Sequence
  Description of Artificial Sequence: Synthetic oligonucleotide
  Antisense strand to SEQ ID NO: 1209364
uuuguuggucaacucgcaa

SEQ ID NO: 1209366 - RNA, 19 nt, Artificial Sequence
  Description of Artificial Sequence: Synthetic oligonucleotide
  Sense strand starting at position 3252 of SEQ ID NO: 917109
gguggauucugggauucac

SEQ ID NO: 1209367 - RNA, 19 nt, Artificial Sequence
  Description of Artificial Sequence: Synthetic oligonucleotide
  Antisense strand to SEQ ID NO: 1209366
gugaaucccagaauccacc

SEQ ID NO: 1209368 - RNA, 19 nt, Artificial Sequence
  Description of Artificial Sequence: Synthetic oligonucleotide
  Sense strand starting at position 3355 of SEQ ID NO: 917109
ugcaaauuaagguagaguu

SEQ ID NO: 1209369 - RNA, 19 nt, Artificial Sequence
  Description of Artificial Sequence: Synthetic oligonucleotide
  Antisense strand to SEQ ID NO: 1209368
aacucuaccuuaauuugca

SEQ ID NO: 1209370 - RNA, 19 nt, Artificial Sequence
  Description of Artificial Sequence: Synthetic oligonucleotide
  Sense strand starting at position 3363 of SEQ ID NO: 917109
aagguagaguuagugugaa

SEQ ID NO: 1209371 - RNA, 19 nt, Artificial Sequence
  Description of Artificial Sequence: Synthetic oligonucleotide
  Antisense strand to SEQ ID NO: 1209370
uucacacuaacucuaccuu

SEQ ID NO: 1209372 - RNA, 19 nt, Artificial Sequence
  Description of Artificial Sequence: Synthetic oligonucleotide
  Sense strand starting at position 3391 of SEQ ID NO: 917109
ggaaauucaggcugcgaca

SEQ ID NO: 1209373 - RNA, 19 nt, Artificial Sequence
  Description of Artificial Sequence: Synthetic oligonucleotide
  Antisense strand to SEQ ID NO: 1209372
ugucgcagccugaauuucc

SEQ ID NO: 1209374 - RNA, 19 nt, Artificial Sequence
  Description of Artificial Sequence: Synthetic oligonucleotide
  Sense strand starting at position 3428 of SEQ ID NO: 917109
auggacuccguuugguuau

SEQ ID NO: 1209375 - RNA, 19 nt, Artificial Sequence
  Description of Artificial Sequence: Synthetic oligonucleotide
  Antisense strand to SEQ ID NO: 1209374
auaaccaaacggaguccau

SEQ ID NO: 1209376 - RNA, 19 nt, Artificial Sequence
  Description of Artificial Sequence: Synthetic oligonucleotide
  Sense strand starting at position 3430 of SEQ ID NO: 917109
ggacuccguuugguuauau

SEQ ID NO: 1209377 - RNA, 19 nt, Artificial Sequence
  Description of Artificial Sequence: Synthetic oligonucleotide
  Antisense strand to SEQ ID NO: 1209376
auauaaccaaacggagucc

SEQ ID NO: 1209378 - RNA, 19 nt, Artificial Sequence
  Description of Artificial Sequence: Synthetic oligonucleotide
  Sense strand starting at position 3431 of SEQ ID NO: 917109
gacuccguuugguuauauu

SEQ ID NO: 1209379 - RNA, 19 nt, Artificial Sequence
  Description of Artificial Sequence: Synthetic oligonucleotide
  Antisense strand to SEQ ID NO: 1209378
aauauaaccaaacggaguc

SEQ ID NO: 1209380 - RNA, 19 nt, Artificial Sequence
  Description of Artificial Sequence: Synthetic oligonucleotide
  Sense strand starting at position 3840 of SEQ ID NO: 917109
auucguuagucacugguuu

SEQ ID NO: 1209381 - RNA, 19 nt, Artificial Sequence
  Description of Artificial Sequence: Synthetic oligonucleotide
  Antisense strand to SEQ ID NO: 1209380
aaaccagugacuaacgaau

SEQ ID NO: 1209382 - RNA, 19 nt, Artificial Sequence
  Description of Artificial Sequence: Synthetic oligonucleotide
  Sense strand starting at position 3844 of SEQ ID NO: 917109
guuagucacugguuucuuu

SEQ ID NO: 1209383 - RNA, 19 nt, Artificial Sequence
  Description of Artificial Sequence: Synthetic oligonucleotide
  Antisense strand to SEQ ID NO: 1209382
aaagaaaccagugacuaac

SEQ ID NO: 1209384 - RNA, 19 nt, Artificial Sequence
  Description of Artificial Sequence: Synthetic oligonucleotide
  Sense strand starting at position 12 of SEQ ID NO: 917110
cuauaaggcguuuaacaua

SEQ ID NO: 1209385 - RNA, 19 nt, Artificial Sequence
  Description of Artificial Sequence: Synthetic oligonucleotide
  Antisense strand to SEQ ID NO: 1209384
uauguuaaacgccuuauag

SEQ ID NO: 1209386 - RNA, 19 nt, Artificial Sequence
  Description of Artificial Sequence: Synthetic oligonucleotide
  Sense strand starting at position 168 of SEQ ID NO: 917110
uugucauuugugcauaucu

SEQ ID NO: 1209387 - RNA, 19 nt, Artificial Sequence
  Description of Artificial Sequence: Synthetic oligonucleotide
  Antisense strand to SEQ ID NO: 1209386
agauaugcacaaaugacaa

SEQ ID NO: 1209388 - RNA, 19 nt, Artificial Sequence
  Description of Artificial Sequence: Synthetic oligonucleotide
  Sense strand starting at position 559 of SEQ ID NO: 917110
cuaugaucucaccacaggu

SEQ ID NO: 1209389 - RNA, 19 nt, Artificial Sequence
  Description of Artificial Sequence: Synthetic oligonucleotide
  Antisense strand to SEQ ID NO: 1209388
accuguggugagaucauag

SEQ ID NO: 1209390 - RNA, 19 nt, Artificial Sequence
  Description of Artificial Sequence: Synthetic oligonucleotide
  Sense strand starting at position 574 of SEQ ID NO: 917110
agguaaccauucuuaggau

SEQ ID NO: 1209391 - RNA, 19 nt, Artificial Sequence
  Description of Artificial Sequence: Synthetic oligonucleotide
  Antisense strand to SEQ ID NO: 1209390
auccuaagaaugguuaccu

SEQ ID NO: 1209392 - RNA, 19 nt, Artificial Sequence
  Description of Artificial Sequence: Synthetic oligonucleotide
  Sense strand starting at position 593 of SEQ ID NO: 917110
gauggaaacuauugugaua

SEQ ID NO: 1209393 - RNA, 19 nt, Artificial Sequence
  Description of Artificial Sequence: Synthetic oligonucleotide
  Antisense strand to SEQ ID NO: 1209392
uaucacaauaguuuccauc

SEQ ID NO: 1209394 - RNA, 19 nt, Artificial Sequence
  Description of Artificial Sequence: Synthetic oligonucleotide
  Sense strand starting at position 596 of SEQ ID NO: 917110
ggaaacuauugugauauuu

SEQ ID NO: 1209395 - RNA, 19 nt, Artificial Sequence
  Description of Artificial Sequence: Synthetic oligonucleotide
  Antisense strand to SEQ ID NO: 1209394
aaauaucacaauaguuucc

SEQ ID NO: 1209396 - RNA, 19 nt, Artificial Sequence
  Description of Artificial Sequence: Synthetic oligonucleotide
  Sense strand starting at position 625 of SEQ ID NO: 917110
ggaagcauauggucauauu

SEQ ID NO: 1209397 - RNA, 19 nt, Artificial Sequence
  Description of Artificial Sequence: Synthetic oligonucleotide
  Antisense strand to SEQ ID NO: 1209396
aauaugaccauaugcuucc

SEQ ID NO: 1209398 - RNA, 19 nt, Artificial Sequence
  Description of Artificial Sequence: Synthetic oligonucleotide
  Sense strand starting at position 628 of SEQ ID NO: 917110
agcauauggucauauuuaa

SEQ ID NO: 1209399 - RNA, 19 nt, Artificial Sequence
  Description of Artificial Sequence: Synthetic oligonucleotide
  Antisense strand to SEQ ID NO: 1209398
uuaaauaugaccauaugcu

SEQ ID NO: 1209400 - RNA, 19 nt, Artificial Sequence
  Description of Artificial Sequence: Synthetic oligonucleotide
  Sense strand starting at position 664 of SEQ ID NO: 917110
uucccauuaugugaagaac

SEQ ID NO: 1209401 - RNA, 19 nt, Artificial Sequence
  Description of Artificial Sequence: Synthetic oligonucleotide
  Antisense strand to SEQ ID NO: 1209400
guucuucacauaaugggaa

SEQ ID NO: 1209402 - RNA, 19 nt, Artificial Sequence
  Description of Artificial Sequence: Synthetic oligonucleotide
  Sense strand starting at position 1253 of SEQ ID NO: 917110
acuggcuccagagaaguua

SEQ ID NO: 1209403 - RNA, 19 nt, Artificial Sequence
  Description of Artificial Sequence: Synthetic oligonucleotide
  Antisense strand to SEQ ID NO: 1209402
uaacuucucuggagccagu

SEQ ID NO: 1209404 - RNA, 19 nt, Artificial Sequence
  Description of Artificial Sequence: Synthetic oligonucleotide
  Sense strand starting at position 1310 of SEQ ID NO: 917110
gucagcaugcaauaaaugu

SEQ ID NO: 1209405 - RNA, 19 nt, Artificial Sequence
  Description of Artificial Sequence: Synthetic oligonucleotide
  Antisense strand to SEQ ID NO: 1209404
acauuuauugcaugcugac

SEQ ID NO: 1209406 - RNA, 19 nt, Artificial Sequence
  Description of Artificial Sequence: Synthetic oligonucleotide
  Sense strand starting at position 2807 of SEQ ID NO: 917110
gaaagaagguaagaauuaa

SEQ ID NO: 1209407 - RNA, 19 nt, Artificial Sequence
  Description of Artificial Sequence: Synthetic oligonucleotide
  Antisense strand to SEQ ID NO: 1209406
uuaauucuuaccuucuuuc

SEQ ID NO: 1209408 - RNA, 19 nt, Artificial Sequence
  Description of Artificial Sequence: Synthetic oligonucleotide
  Sense strand starting at position 2851 of SEQ ID NO: 917110
acuggagucguagggagaa

SEQ ID NO: 1209409 - RNA, 19 nt, Artificial Sequence
  Description of Artificial Sequence: Synthetic oligonucleotide
  Antisense strand to SEQ ID NO: 1209408
uucucccuacgacuccagu

SEQ ID NO: 1209410 - RNA, 19 nt, Artificial Sequence
  Description of Artificial Sequence: Synthetic oligonucleotide
  Sense strand starting at position 2853 of SEQ ID NO: 917110
uggagucguagggagaauu

SEQ ID NO: 1209411 - RNA, 19 nt, Artificial Sequence
  Description of Artificial Sequence: Synthetic oligonucleotide
  Antisense strand to SEQ ID NO: 1209410
aauucucccuacgacucca

SEQ ID NO: 1209412 - RNA, 19 nt, Artificial Sequence
  Description of Artificial Sequence: Synthetic oligonucleotide
  Sense strand starting at position 2861 of SEQ ID NO: 917110
uagggagaauuauagguaa

SEQ ID NO: 1209413 - RNA, 19 nt, Artificial Sequence
  Description of Artificial Sequence: Synthetic oligonucleotide
  Antisense strand to SEQ ID NO: 1209412
uuaccuauaauucucccua

SEQ ID NO: 1209414 - RNA, 19 nt, Artificial Sequence
  Description of Artificial Sequence: Synthetic oligonucleotide
  Sense strand starting at position 2863 of SEQ ID NO: 917110
gggagaauuauagguaagu

SEQ ID NO: 1209415 - RNA, 19 nt, Artificial Sequence
  Description of Artificial Sequence: Synthetic oligonucleotide
  Antisense strand to SEQ ID NO: 1209414
acuuaccuauaauucuccc

SEQ ID NO: 1209416 - RNA, 19 nt, Artificial Sequence
  Description of Artificial Sequence: Synthetic oligonucleotide
  Sense strand starting at position 2864 of SEQ ID NO: 917110
ggagaauuauagguaaguc

SEQ ID NO: 1209417 - RNA, 19 nt, Artificial Sequence
  Description of Artificial Sequence: Synthetic oligonucleotide
  Antisense strand to SEQ ID NO: 1209416
gacuuaccuauaauucucc

SEQ ID NO: 1209418 - RNA, 19 nt, Artificial Sequence
  Description of Artificial Sequence: Synthetic oligonucleotide
  Sense strand starting at position 2873 of SEQ ID NO: 917110
uagguaagucacgaugcuu

SEQ ID NO: 1209419 - RNA, 19 nt, Artificial Sequence
  Description of Artificial Sequence: Synthetic oligonucleotide
  Antisense strand to SEQ ID NO: 1209418
aagcaucgugacuuaccua

SEQ ID NO: 1209420 - RNA, 19 nt, Artificial Sequence
  Description of Artificial Sequence: Synthetic oligonucleotide
  Sense strand starting at position 2879 of SEQ ID NO: 917110
agucacgaugcuuaugaca

SEQ ID NO: 1209421 - RNA, 19 nt, Artificial Sequence
  Description of Artificial Sequence: Synthetic oligonucleotide
  Antisense strand to SEQ ID NO: 1209420
ugucauaagcaucgugacu

SEQ ID NO: 1209422 - RNA, 19 nt, Artificial Sequence
  Description of Artificial Sequence: Synthetic oligonucleotide
  Sense strand starting at position 2887 of SEQ ID NO: 917110
ugcuuaugacagcaagaug

SEQ ID NO: 1209423 - RNA, 19 nt, Artificial Sequence
  Description of Artificial Sequence: Synthetic oligonucleotide
  Antisense strand to SEQ ID NO: 1209422
caucuugcugucauaagca

SEQ ID NO: 1209424 - RNA, 19 nt, Artificial Sequence
  Description of Artificial Sequence: Synthetic oligonucleotide
  Sense strand starting at position 2996 of SEQ ID NO: 917110
uuugauaauuugugacaca

SEQ ID NO: 1209425 - RNA, 19 nt, Artificial Sequence
  Description of Artificial Sequence: Synthetic oligonucleotide
  Antisense strand to SEQ ID NO: 1209424
ugugucacaaauuaucaaa

SEQ ID NO: 1209426 - RNA, 19 nt, Artificial Sequence
  Description of Artificial Sequence: Synthetic oligonucleotide
  Sense strand starting at position 2997 of SEQ ID NO: 917110
uugauaauuugugacacaa

SEQ ID NO: 1209427 - RNA, 19 nt, Artificial Sequence
  Description of Artificial Sequence: Synthetic oligonucleotide
  Antisense strand to SEQ ID NO: 1209426
uugugucacaaauuaucaa

SEQ ID NO: 1209428 - RNA, 19 nt, Artificial Sequence
  Description of Artificial Sequence: Synthetic oligonucleotide
  Sense strand starting at position 3081 of SEQ ID NO: 917110
agagauccuuugccagaaa

SEQ ID NO: 1209429 - RNA, 19 nt, Artificial Sequence
  Description of Artificial Sequence: Synthetic oligonucleotide
  Antisense strand to SEQ ID NO: 1209428
uuucuggcaaaggaucucu

SEQ ID NO: 1209430 - RNA, 19 nt, Artificial Sequence
  Description of Artificial Sequence: Synthetic oligonucleotide
  Sense strand starting at position 3082 of SEQ ID NO: 917110
gagauccuuugccagaaag

SEQ ID NO: 1209431 - RNA, 19 nt, Artificial Sequence
  Description of Artificial Sequence: Synthetic oligonucleotide
  Antisense strand to SEQ ID NO: 1209430
cuuucuggcaaaggaucuc

SEQ ID NO: 1209432 - RNA, 19 nt, Artificial Sequence
  Description of Artificial Sequence: Synthetic oligonucleotide
  Sense strand starting at position 3092 of SEQ ID NO: 917110
gccagaaagcaucauaaug

SEQ ID NO: 1209433 - RNA, 19 nt, Artificial Sequence
  Description of Artificial Sequence: Synthetic oligonucleotide
  Antisense strand to SEQ ID NO: 1209432
cauuaugaugcuuucuggc

SEQ ID NO: 1209434 - RNA, 19 nt, Artificial Sequence
  Description of Artificial Sequence: Synthetic oligonucleotide
  Sense strand starting at position 3100 of SEQ ID NO: 917110
gcaucauaaugaguugcuu

SEQ ID NO: 1209435 - RNA, 19 nt, Artificial Sequence
  Description of Artificial Sequence: Synthetic oligonucleotide
  Antisense strand to SEQ ID NO: 1209434
aagcaacucauuaugaugc

SEQ ID NO: 1209436 - RNA, 19 nt, Artificial Sequence
  Description of Artificial Sequence: Synthetic oligonucleotide
  Sense strand starting at position 3106 of SEQ ID NO: 917110
uaaugaguugcuuagugaa

SEQ ID NO: 1209437 - RNA, 19 nt, Artificial Sequence
  Description of Artificial Sequence: Synthetic oligonucleotide
  Antisense strand to SEQ ID NO: 1209436
uucacuaagcaacucauua

SEQ ID NO: 1209438 - RNA, 19 nt, Artificial Sequence
  Description of Artificial Sequence: Synthetic oligonucleotide
  Sense strand starting at position 3108 of SEQ ID NO: 917110
augaguugcuuagugaauu

SEQ ID NO: 1209439 - RNA, 19 nt, Artificial Sequence
  Description of Artificial Sequence: Synthetic oligonucleotide
  Antisense strand to SEQ ID NO: 1209438
aauucacuaagcaacucau

SEQ ID NO: 1209440 - RNA, 19 nt, Artificial Sequence
  Description of Artificial Sequence: Synthetic oligonucleotide
  Sense strand starting at position 3130 of SEQ ID NO: 917110
ucaaacauccagugauuag

SEQ ID NO: 1209441 - RNA, 19 nt, Artificial Sequence
  Description of Artificial Sequence: Synthetic oligonucleotide
  Antisense strand to SEQ ID NO: 1209440
cuaaucacuggauguuuga

SEQ ID NO: 1209442 - RNA, 19 nt, Artificial Sequence
  Description of Artificial Sequence: Synthetic oligonucleotide
  Sense strand starting at position 3337 of SEQ ID NO: 917110
caauaaauagcgugaggaa

SEQ ID NO: 1209443 - RNA, 19 nt, Artificial Sequence
  Description of Artificial Sequence: Synthetic oligonucleotide
  Antisense strand to SEQ ID NO: 1209442
uuccucacgcuauuuauug

SEQ ID NO: 1209444 - RNA, 19 nt, Artificial Sequence
  Description of Artificial Sequence: Synthetic oligonucleotide
  Sense strand starting at position 3423 of SEQ ID NO: 917110
gcaccaggcguuugagaaa

SEQ ID NO: 1209445 - RNA, 19 nt, Artificial Sequence
  Description of Artificial Sequence: Synthetic oligonucleotide
  Antisense strand to SEQ ID NO: 1209444
uuucucaaacgccuggugc

SEQ ID NO: 1209446 - RNA, 19 nt, Artificial Sequence
  Description of Artificial Sequence: Synthetic oligonucleotide
  Sense strand starting at position 3450 of SEQ ID NO: 917110
uuaauugcgaguugaccaa

SEQ ID NO: 1209447 - RNA, 19 nt, Artificial Sequence
  Description of Artificial Sequence: Synthetic oligonucleotide
  Antisense strand to SEQ ID NO: 1209446
uuggucaacucgcaauuaa

SEQ ID NO: 1209448 - RNA, 19 nt, Artificial Sequence
  Description of Artificial Sequence: Synthetic oligonucleotide
  Sense strand starting at position 3454 of SEQ ID NO: 917110
uugcgaguugaccaacaaa

SEQ ID NO: 1209449 - RNA, 19 nt, Artificial Sequence
  Description of Artificial Sequence: Synthetic oligonucleotide
  Antisense strand to SEQ ID NO: 1209448
uuuguuggucaacucgcaa

SEQ ID NO: 1209450 - RNA, 19 nt, Artificial Sequence
  Description of Artificial Sequence: Synthetic oligonucleotide
  Sense strand starting at position 3548 of SEQ ID NO: 917110
gguggauucugggauucac

SEQ ID NO: 1209451 - RNA, 19 nt, Artificial Sequence
  Description of Artificial Sequence: Synthetic oligonucleotide
  Antisense strand to SEQ ID NO: 1209450
gugaaucccagaauccacc

SEQ ID NO: 1209452 - RNA, 19 nt, Artificial Sequence
  Description of Artificial Sequence: Synthetic oligonucleotide
  Sense strand starting at position 3651 of SEQ ID NO: 917110
ugcaaauuaagguagaguu

SEQ ID NO: 1209453 - RNA, 19 nt, Artificial Sequence
  Description of Artificial Sequence: Synthetic oligonucleotide
  Antisense strand to SEQ ID NO: 1209452
aacucuaccuuaauuugca

SEQ ID NO: 1209454 - RNA, 19 nt, Artificial Sequence
  Description of Artificial Sequence: Synthetic oligonucleotide
  Sense strand starting at position 3659 of SEQ ID NO: 917110
aagguagaguuagugugaa

SEQ ID NO: 1209455 - RNA, 19 nt, Artificial Sequence
  Description of Artificial Sequence: Synthetic oligonucleotide
  Antisense strand to SEQ ID NO: 1209454
uucacacuaacucuaccuu

SEQ ID NO: 1209456 - RNA, 19 nt, Artificial Sequence
  Description of Artificial Sequence: Synthetic oligonucleotide
  Sense strand starting at position 3687 of SEQ ID NO: 917110
ggaaauucaggcugcgaca

SEQ ID NO: 1209457 - RNA, 19 nt, Artificial Sequence
  Description of Artificial Sequence: Synthetic oligonucleotide
  Antisense strand to SEQ ID NO: 1209456
ugucgcagccugaauuucc

SEQ ID NO: 1209458 - RNA, 19 nt, Artificial Sequence
  Description of Artificial Sequence: Synthetic oligonucleotide
  Sense strand starting at position 3724 of SEQ ID NO: 917110
auggacuccguuugguuau

SEQ ID NO: 1209459 - RNA, 19 nt, Artificial Sequence
  Description of Artificial Sequence: Synthetic oligonucleotide
  Antisense strand to SEQ ID NO: 1209458
auaaccaaacggaguccau

SEQ ID NO: 1209460 - RNA, 19 nt, Artificial Sequence
  Description of Artificial Sequence: Synthetic oligonucleotide
  Sense strand starting at position 3726 of SEQ ID NO: 917110
ggacuccguuugguuauau

SEQ ID NO: 1209461 - RNA, 19 nt, Artificial Sequence
  Description of Artificial Sequence: Synthetic oligonucleotide
  Antisense strand to SEQ ID NO: 1209460
auauaaccaaacggagucc

SEQ ID NO: 1209462 - RNA, 19 nt, Artificial Sequence
  Description of Artificial Sequence: Synthetic oligonucleotide
  Sense strand starting at position 3727 of SEQ ID NO: 917110
gacuccguuugguuauauu

SEQ ID NO: 1209463 - RNA, 19 nt, Artificial Sequence
  Description of Artificial Sequence: Synthetic oligonucleotide
  Antisense strand to SEQ ID NO: 1209462
aauauaaccaaacggaguc

SEQ ID NO: 1209464 - RNA, 19 nt, Artificial Sequence
  Description of Artificial Sequence: Synthetic oligonucleotide
  Sense strand starting at position 1057 of SEQ ID NO: 917111
agaaguuaaaugcguacua

SEQ ID NO: 1209465 - RNA, 19 nt, Artificial Sequence
  Description of Artificial Sequence: Synthetic oligonucleotide
  Antisense strand to SEQ ID NO: 1209464
uaguacgcauuuaacuucu

SEQ ID NO: 1209466 - RNA, 19 nt, Artificial Sequence
  Description of Artificial Sequence: Synthetic oligonucleotide
  Sense strand starting at position 1058 of SEQ ID NO: 917111
gaaguuaaaugcguacuaa

SEQ ID NO: 1209467 - RNA, 19 nt, Artificial Sequence
  Description of Artificial Sequence: Synthetic oligonucleotide
  Antisense strand to SEQ ID NO: 1209466
uuaguacgcauuuaacuuc

SEQ ID NO: 1209468 - RNA, 19 nt, Artificial Sequence
  Description of Artificial Sequence: Synthetic oligonucleotide
  Sense strand starting at position 1059 of SEQ ID NO: 917111
aaguuaaaugcguacuaaa

SEQ ID NO: 1209469 - RNA, 19 nt, Artificial Sequence
  Description of Artificial Sequence: Synthetic oligonucleotide
  Antisense strand to SEQ ID NO: 1209468
uuuaguacgcauuuaacuu

SEQ ID NO: 1209470 - RNA, 19 nt, Artificial Sequence
  Description of Artificial Sequence: Synthetic oligonucleotide
  Sense strand starting at position 1163 of SEQ ID NO: 917111
gacugugcuguccaaauua

SEQ ID NO: 1209471 - RNA, 19 nt, Artificial Sequence
  Description of Artificial Sequence: Synthetic oligonucleotide
  Antisense strand to SEQ ID NO: 1209470
uaauuuggacagcacaguc

SEQ ID NO: 1209472 - RNA, 19 nt, Artificial Sequence
  Description of Artificial Sequence: Synthetic oligonucleotide
  Sense strand starting at position 1247 of SEQ ID NO: 917111
caaucuugugagcauaggu

SEQ ID NO: 1209473 - RNA, 19 nt, Artificial Sequence
  Description of Artificial Sequence: Synthetic oligonucleotide
  Antisense strand to SEQ ID NO: 1209472
accuaugcucacaagauug

SEQ ID NO: 1209474 - RNA, 19 nt, Artificial Sequence
  Description of Artificial Sequence: Synthetic oligonucleotide
  Sense strand starting at position 1379 of SEQ ID NO: 917111
acucauuacuagguuuaga

SEQ ID NO: 1209475 - RNA, 19 nt, Artificial Sequence
  Description of Artificial Sequence: Synthetic oligonucleotide
  Antisense strand to SEQ ID NO: 1209474
ucuaaaccuaguaaugagu

SEQ ID NO: 1209476 - RNA, 19 nt, Artificial Sequence
  Description of Artificial Sequence: Synthetic oligonucleotide
  Sense strand starting at position 1442 of SEQ ID NO: 917111
ucccguguugcuuagagaa

SEQ ID NO: 1209477 - RNA, 19 nt, Artificial Sequence
  Description of Artificial Sequence: Synthetic oligonucleotide
  Antisense strand to SEQ ID NO: 1209476
uucucuaagcaacacggga

SEQ ID NO: 1209478 - RNA, 19 nt, Artificial Sequence
  Description of Artificial Sequence: Synthetic oligonucleotide
  Sense strand starting at position 1711 of SEQ ID NO: 917111
gggacuugucccgggugaa

SEQ ID NO: 1209479 - RNA, 19 nt, Artificial Sequence
  Description of Artificial Sequence: Synthetic oligonucleotide
  Antisense strand to SEQ ID NO: 1209478
uucacccgggacaaguccc

SEQ ID NO: 1209480 - RNA, 19 nt, Artificial Sequence
  Description of Artificial Sequence: Synthetic oligonucleotide
  Sense strand starting at position 1712 of SEQ ID NO: 917111
ggacuugucccgggugaac

SEQ ID NO: 1209481 - RNA, 19 nt, Artificial Sequence
  Description of Artificial Sequence: Synthetic oligonucleotide
  Antisense strand to SEQ ID NO: 1209480
guucacccgggacaagucc

SEQ ID NO: 1209482 - RNA, 19 nt, Artificial Sequence
  Description of Artificial Sequence: Synthetic oligonucleotide
  Sense strand starting at position 2275 of SEQ ID NO: 917111
auugcagguauauacgaaa

SEQ ID NO: 1209483 - RNA, 19 nt, Artificial Sequence
  Description of Artificial Sequence: Synthetic oligonucleotide
  Antisense strand to SEQ ID NO: 1209482
uuucguauauaccugcaau

SEQ ID NO: 1209484 - RNA, 19 nt, Artificial Sequence
  Description of Artificial Sequence: Synthetic oligonucleotide
  Sense strand starting at position 2305 of SEQ ID NO: 917111
uguguuugcaucgucauca

SEQ ID NO: 1209485 - RNA, 19 nt, Artificial Sequence
  Description of Artificial Sequence: Synthetic oligonucleotide
  Antisense strand to SEQ ID NO: 1209484
ugaugacgaugcaaacaca

SEQ ID NO: 1209486 - RNA, 19 nt, Artificial Sequence
  Description of Artificial Sequence: Synthetic oligonucleotide
  Sense strand starting at position 2325 of SEQ ID NO: 917111
gcgcguguugagcccuuua

SEQ ID NO: 1209487 - RNA, 19 nt, Artificial Sequence
  Description of Artificial Sequence: Synthetic oligonucleotide
  Antisense strand to SEQ ID NO: 1209486
uaaagggcucaacacgcgc

SEQ ID NO: 1209488 - RNA, 19 nt, Artificial Sequence
  Description of Artificial Sequence: Synthetic oligonucleotide
  Sense strand starting at position 2327 of SEQ ID NO: 917111
gcguguugagcccuuuagu

SEQ ID NO: 1209489 - RNA, 19 nt, Artificial Sequence
  Description of Artificial Sequence: Synthetic oligonucleotide
  Antisense strand to SEQ ID NO: 1209488
acuaaagggcucaacacgc

SEQ ID NO: 1209490 - RNA, 19 nt, Artificial Sequence
  Description of Artificial Sequence: Synthetic oligonucleotide
  Sense strand starting at position 2328 of SEQ ID NO: 917111
cguguugagcccuuuagua

SEQ ID NO: 1209491 - RNA, 19 nt, Artificial Sequence
  Description of Artificial Sequence: Synthetic oligonucleotide
  Antisense strand to SEQ ID NO: 1209490
uacuaaagggcucaacacg

SEQ ID NO: 1209492 - RNA, 19 nt, Artificial Sequence
  Description of Artificial Sequence: Synthetic oligonucleotide
  Sense strand starting at position 2330 of SEQ ID NO: 917111
uguugagcccuuuaguaau

SEQ ID NO: 1209493 - RNA, 19 nt, Artificial Sequence
  Description of Artificial Sequence: Synthetic oligonucleotide
  Antisense strand to SEQ ID NO: 1209492
auuacuaaagggcucaaca

SEQ ID NO: 1209494 - RNA, 19 nt, Artificial Sequence
  Description of Artificial Sequence: Synthetic oligonucleotide
  Sense strand starting at position 2354 of SEQ ID NO: 917111
aguguauuagcuucguauu

SEQ ID NO: 1209495 - RNA, 19 nt, Artificial Sequence
  Description of Artificial Sequence: Synthetic oligonucleotide
  Antisense strand to SEQ ID NO: 1209494
aauacgaagcuaauacacu

SEQ ID NO: 1209496 - RNA, 19 nt, Artificial Sequence
  Description of Artificial Sequence: Synthetic oligonucleotide
  Sense strand starting at position 2355 of SEQ ID NO: 917111
guguauuagcuucguauuu

SEQ ID NO: 1209497 - RNA, 19 nt, Artificial Sequence
  Description of Artificial Sequence: Synthetic oligonucleotide
  Antisense strand to SEQ ID NO: 1209496
aaauacgaagcuaauacac

SEQ ID NO: 1209498 - RNA, 19 nt, Artificial Sequence
  Description of Artificial Sequence: Synthetic oligonucleotide
  Sense strand starting at position 2362 of SEQ ID NO: 917111
agcuucguauuucuaggua

SEQ ID NO: 1209499 - RNA, 19 nt, Artificial Sequence
  Description of Artificial Sequence: Synthetic oligonucleotide
  Antisense strand to SEQ ID NO: 1209498
uaccuagaaauacgaagcu

SEQ ID NO: 1209500 - RNA, 19 nt, Artificial Sequence
  Description of Artificial Sequence: Synthetic oligonucleotide
  Sense strand starting at position 2365 of SEQ ID NO: 917111
uucguauuucuagguagac

SEQ ID NO: 1209501 - RNA, 19 nt, Artificial Sequence
  Description of Artificial Sequence: Synthetic oligonucleotide
  Antisense strand to SEQ ID NO: 1209500
gucuaccuagaaauacgaa

SEQ ID NO: 1209502 - RNA, 19 nt, Artificial Sequence
  Description of Artificial Sequence: Synthetic oligonucleotide
  Sense strand starting at position 2381 of SEQ ID NO: 917111
gacgguaauuucgucaaug

SEQ ID NO: 1209503 - RNA, 19 nt, Artificial Sequence
  Description of Artificial Sequence: Synthetic oligonucleotide
  Antisense strand to SEQ ID NO: 1209502
cauugacgaaauuaccguc

SEQ ID NO: 1209504 - RNA, 19 nt, Artificial Sequence
  Description of Artificial Sequence: Synthetic oligonucleotide
  Sense strand starting at position 2382 of SEQ ID NO: 917111
acgguaauuucgucaauga

SEQ ID NO: 1209505 - RNA, 19 nt, Artificial Sequence
  Description of Artificial Sequence: Synthetic oligonucleotide
  Antisense strand to SEQ ID NO: 1209504
ucauugacgaaauuaccgu

SEQ ID NO: 1209506 - RNA, 19 nt, Artificial Sequence
  Description of Artificial Sequence: Synthetic oligonucleotide
  Sense strand starting at position 2480 of SEQ ID NO: 917111
ucuuguucuguggagaaua

SEQ ID NO: 1209507 - RNA, 19 nt, Artificial Sequence
  Description of Artificial Sequence: Synthetic oligonucleotide
  Antisense strand to SEQ ID NO: 1209506
uauucuccacagaacaaga

SEQ ID NO: 1209508 - RNA, 19 nt, Artificial Sequence
  Description of Artificial Sequence: Synthetic oligonucleotide
  Sense strand starting at position 2482 of SEQ ID NO: 917111
uuguucuguggagaauaac

SEQ ID NO: 1209509 - RNA, 19 nt, Artificial Sequence
  Description of Artificial Sequence: Synthetic oligonucleotide
  Antisense strand to SEQ ID NO: 1209508
guuauucuccacagaacaa

SEQ ID NO: 1209510 - RNA, 19 nt, Artificial Sequence
  Description of Artificial Sequence: Synthetic oligonucleotide
  Sense strand starting at position 2774 of SEQ ID NO: 917111
cguguuugugugguuaauc

SEQ ID NO: 1209511 - RNA, 19 nt, Artificial Sequence
  Description of Artificial Sequence: Synthetic oligonucleotide
  Antisense strand to SEQ ID NO: 1209510
gauuaaccacacaaacacg

SEQ ID NO: 1209512 - RNA, 19 nt, Artificial Sequence
  Description of Artificial Sequence: Synthetic oligonucleotide
  Sense strand starting at position 2779 of SEQ ID NO: 917111
uugugugguuaaucuauuu

SEQ ID NO: 1209513 - RNA, 19 nt, Artificial Sequence
  Description of Artificial Sequence: Synthetic oligonucleotide
  Antisense strand to SEQ ID NO: 1209512
aaauagauuaaccacacaa

SEQ ID NO: 1209514 - RNA, 19 nt, Artificial Sequence
  Description of Artificial Sequence: Synthetic oligonucleotide
  Sense strand starting at position 2881 of SEQ ID NO: 917111
acauaauaugagugucaaa

SEQ ID NO: 1209515 - RNA, 19 nt, Artificial Sequence
  Description of Artificial Sequence: Synthetic oligonucleotide
  Antisense strand to SEQ ID NO: 1209514
uuugacacucauauuaugu

SEQ ID NO: 1209516 - RNA, 19 nt, Artificial Sequence
  Description of Artificial Sequence: Synthetic oligonucleotide
  Sense strand starting at position 2890 of SEQ ID NO: 917111
gagugucaaagauaagguu

SEQ ID NO: 1209517 - RNA, 19 nt, Artificial Sequence
  Description of Artificial Sequence: Synthetic oligonucleotide
  Antisense strand to SEQ ID NO: 1209516
aaccuuaucuuugacacuc

SEQ ID NO: 1209518 - RNA, 19 nt, Artificial Sequence
  Description of Artificial Sequence: Synthetic oligonucleotide
  Sense strand starting at position 2911 of SEQ ID NO: 917111
caucaagauuucguacgua

SEQ ID NO: 1209519 - RNA, 19 nt, Artificial Sequence
  Description of Artificial Sequence: Synthetic oligonucleotide
  Antisense strand to SEQ ID NO: 1209518
uacguacgaaaucuugaug

SEQ ID NO: 1209520 - RNA, 19 nt, Artificial Sequence
  Description of Artificial Sequence: Synthetic oligonucleotide
  Sense strand starting at position 2914 of SEQ ID NO: 917111
caagauuucguacguagau

SEQ ID NO: 1209521 - RNA, 19 nt, Artificial Sequence
  Description of Artificial Sequence: Synthetic oligonucleotide
  Antisense strand to SEQ ID NO: 1209520
aucuacguacgaaaucuug

SEQ ID NO: 1209522 - RNA, 19 nt, Artificial Sequence
  Description of Artificial Sequence: Synthetic oligonucleotide
  Sense strand starting at position 2915 of SEQ ID NO: 917111
aagauuucguacguagauc

SEQ ID NO: 1209523 - RNA, 19 nt, Artificial Sequence
  Description of Artificial Sequence: Synthetic oligonucleotide
  Antisense strand to SEQ ID NO: 1209522
gaucuacguacgaaaucuu

SEQ ID NO: 1209524 - RNA, 19 nt, Artificial Sequence
  Description of Artificial Sequence: Synthetic oligonucleotide
  Sense strand starting at position 2975 of SEQ ID NO: 917111
gcuauacauuaauugcaga

SEQ ID NO: 1209525 - RNA, 19 nt, Artificial Sequence
  Description of Artificial Sequence: Synthetic oligonucleotide
  Antisense strand to SEQ ID NO: 1209524
ucugcaauuaauguauagc

SEQ ID NO: 1209526 - RNA, 19 nt, Artificial Sequence
  Description of Artificial Sequence: Synthetic oligonucleotide
  Sense strand starting at position 3058 of SEQ ID NO: 917111
caacaaguguuauuagguu

SEQ ID NO: 1209527 - RNA, 19 nt, Artificial Sequence
  Description of Artificial Sequence: Synthetic oligonucleotide
  Antisense strand to SEQ ID NO: 1209526
aaccuaauaacacuuguug

SEQ ID NO: 1209528 - RNA, 19 nt, Artificial Sequence
  Description of Artificial Sequence: Synthetic oligonucleotide
  Sense strand starting at position 3062 of SEQ ID NO: 917111
aaguguuauuagguuagaa

SEQ ID NO: 1209529 - RNA, 19 nt, Artificial Sequence
  Description of Artificial Sequence: Synthetic oligonucleotide
  Antisense strand to SEQ ID NO: 1209528
uucuaaccuaauaacacuu

SEQ ID NO: 1209530 - RNA, 19 nt, Artificial Sequence
  Description of Artificial Sequence: Synthetic oligonucleotide
  Sense strand starting at position 3064 of SEQ ID NO: 917111
guguuauuagguuagaaau

SEQ ID NO: 1209531 - RNA, 19 nt, Artificial Sequence
  Description of Artificial Sequence: Synthetic oligonucleotide
  Antisense strand to SEQ ID NO: 1209530
auuucuaaccuaauaacac

SEQ ID NO: 1209532 - RNA, 19 nt, Artificial Sequence
  Description of Artificial Sequence: Synthetic oligonucleotide
  Sense strand starting at position 3074 of SEQ ID NO: 917111
guuagaaaugacugcaguu

SEQ ID NO: 1209533 - RNA, 19 nt, Artificial Sequence
  Description of Artificial Sequence: Synthetic oligonucleotide
  Antisense strand to SEQ ID NO: 1209532
aacugcagucauuucuaac

SEQ ID NO: 1209534 - RNA, 19 nt, Artificial Sequence
  Description of Artificial Sequence: Synthetic oligonucleotide
  Sense strand starting at position 3088 of SEQ ID NO: 917111
caguuaggucuccgagaac

SEQ ID NO: 1209535 - RNA, 19 nt, Artificial Sequence
  Description of Artificial Sequence: Synthetic oligonucleotide
  Antisense strand to SEQ ID NO: 1209534
guucucggagaccuaacug

SEQ ID NO: 1209536 - RNA, 19 nt, Artificial Sequence
  Description of Artificial Sequence: Synthetic oligonucleotide
  Sense strand starting at position 3314 of SEQ ID NO: 917111
aguauaugcuagucacaag

SEQ ID NO: 1209537 - RNA, 19 nt, Artificial Sequence
  Description of Artificial Sequence: Synthetic oligonucleotide
  Antisense strand to SEQ ID NO: 1209536
cuugugacuagcauauacu

SEQ ID NO: 1209538 - RNA, 19 nt, Artificial Sequence
  Description of Artificial Sequence: Synthetic oligonucleotide
  Sense strand starting at position 3394 of SEQ ID NO: 917111
auaagcacugucuggaaau

SEQ ID NO: 1209539 - RNA, 19 nt, Artificial Sequence
  Description of Artificial Sequence: Synthetic oligonucleotide
  Antisense strand to SEQ ID NO: 1209538
auuuccagacagugcuuau

SEQ ID NO: 1209540 - RNA, 19 nt, Artificial Sequence
  Description of Artificial Sequence: Synthetic oligonucleotide
  Sense strand starting at position 3707 of SEQ ID NO: 917111
aggcaauucuuacuagaag

SEQ ID NO: 1209541 - RNA, 19 nt, Artificial Sequence
  Description of Artificial Sequence: Synthetic oligonucleotide
  Antisense strand to SEQ ID NO: 1209540
cuucuaguaagaauugccu

SEQ ID NO: 1209542 - RNA, 19 nt, Artificial Sequence
  Description of Artificial Sequence: Synthetic oligonucleotide
  Sense strand starting at position 3730 of SEQ ID NO: 917111
aaggaugaguaagaauaaa

SEQ ID NO: 1209543 - RNA, 19 nt, Artificial Sequence
  Description of Artificial Sequence: Synthetic oligonucleotide
  Antisense strand to SEQ ID NO: 1209542
uuuauucuuacucauccuu

SEQ ID NO: 1209544 - RNA, 19 nt, Artificial Sequence
  Description of Artificial Sequence: Synthetic oligonucleotide
  Sense strand starting at position 6 of SEQ ID NO: 917112
acaagaguaagcgacucau

SEQ ID NO: 1209545 - RNA, 19 nt, Artificial Sequence
  Description of Artificial Sequence: Synthetic oligonucleotide
  Antisense strand to SEQ ID NO: 1209544
augagucgcuuacucuugu

SEQ ID NO: 1209546 - RNA, 19 nt, Artificial Sequence
  Description of Artificial Sequence: Synthetic oligonucleotide
  Sense strand starting at position 242 of SEQ ID NO: 917112
acccuagguugucccauaa

SEQ ID NO: 1209547 - RNA, 19 nt, Artificial Sequence
  Description of Artificial Sequence: Synthetic oligonucleotide
  Antisense strand to SEQ ID NO: 1209546
uuaugggacaaccuagggu

SEQ ID NO: 1209548 - RNA, 19 nt, Artificial Sequence
  Description of Artificial Sequence: Synthetic oligonucleotide
  Sense strand starting at position 267 of SEQ ID NO: 917112
gcaauaucaacauguggga

SEQ ID NO: 1209549 - RNA, 19 nt, Artificial Sequence
  Description of Artificial Sequence: Synthetic oligonucleotide
  Antisense strand to SEQ ID NO: 1209548
ucccacauguugauauugc

SEQ ID NO: 1209550 - RNA, 19 nt, Artificial Sequence
  Description of Artificial Sequence: Synthetic oligonucleotide
  Sense strand starting at position 362 of SEQ ID NO: 917112
ggcuuauguaguuagcaga

SEQ ID NO: 1209551 - RNA, 19 nt, Artificial Sequence
  Description of Artificial Sequence: Synthetic oligonucleotide
  Antisense strand to SEQ ID NO: 1209550
ucugcuaacuacauaagcc

SEQ ID NO: 1209552 - RNA, 19 nt, Artificial Sequence
  Description of Artificial Sequence: Synthetic oligonucleotide
  Sense strand starting at position 369 of SEQ ID NO: 917112
guaguuagcagacggaauu

SEQ ID NO: 1209553 - RNA, 19 nt, Artificial Sequence
  Description of Artificial Sequence: Synthetic oligonucleotide
  Antisense strand to SEQ ID NO: 1209552
aauuccgucugcuaacuac

SEQ ID NO: 1209554 - RNA, 19 nt, Artificial Sequence
  Description of Artificial Sequence: Synthetic oligonucleotide
  Sense strand starting at position 725 of SEQ ID NO: 917112
agucuuucuccguuuguuu

SEQ ID NO: 1209555 - RNA, 19 nt, Artificial Sequence
  Description of Artificial Sequence: Synthetic oligonucleotide
  Antisense strand to SEQ ID NO: 1209554
aaacaaacggagaaagacu

SEQ ID NO: 1209556 - RNA, 19 nt, Artificial Sequence
  Description of Artificial Sequence: Synthetic oligonucleotide
  Sense strand starting at position 809 of SEQ ID NO: 917112
gguagaacuccugguagga

SEQ ID NO: 1209557 - RNA, 19 nt, Artificial Sequence
  Description of Artificial Sequence: Synthetic oligonucleotide
  Antisense strand to SEQ ID NO: 1209556
uccuaccaggaguucuacc

SEQ ID NO: 1209558 - RNA, 19 nt, Artificial Sequence
  Description of Artificial Sequence: Synthetic oligonucleotide
  Sense strand starting at position 835 of SEQ ID NO: 917112
gcaucaagaccauggauca

SEQ ID NO: 1209559 - RNA, 19 nt, Artificial Sequence
  Description of Artificial Sequence: Synthetic oligonucleotide
  Antisense strand to SEQ ID NO: 1209558
ugauccauggucuugaugc

SEQ ID NO: 1209560 - RNA, 19 nt, Artificial Sequence
  Description of Artificial Sequence: Synthetic oligonucleotide
  Sense strand starting at position 848 of SEQ ID NO: 917112
ggaucaccucucugaaggu

SEQ ID NO: 1209561 - RNA, 19 nt, Artificial Sequence
  Description of Artificial Sequence: Synthetic oligonucleotide
  Antisense strand to SEQ ID NO: 1209560
accuucagagaggugaucc

SEQ ID NO: 1209562 - RNA, 19 nt, Artificial Sequence
  Description of Artificial Sequence: Synthetic oligonucleotide
  Sense strand starting at position 1142 of SEQ ID NO: 917112
agcccuggucacugagaca

SEQ ID NO: 1209563 - RNA, 19 nt, Artificial Sequence
  Description of Artificial Sequence: Synthetic oligonucleotide
  Antisense strand to SEQ ID NO: 1209562
ugucucagugaccagggcu

SEQ ID NO: 1209564 - RNA, 19 nt, Artificial Sequence
  Description of Artificial Sequence: Synthetic oligonucleotide
  Sense strand starting at position 1222 of SEQ ID NO: 917112
ucucguaaggaauaucgga

SEQ ID NO: 1209565 - RNA, 19 nt, Artificial Sequence
  Description of Artificial Sequence: Synthetic oligonucleotide
  Antisense strand to SEQ ID NO: 1209564
uccgauauuccuuacgaga

SEQ ID NO: 1209566 - RNA, 19 nt, Artificial Sequence
  Description of Artificial Sequence: Synthetic oligonucleotide
  Sense strand starting at position 1266 of SEQ ID NO: 917112
ggcauagguccaggacacu

SEQ ID NO: 1209567 - RNA, 19 nt, Artificial Sequence
  Description of Artificial Sequence: Synthetic oligonucleotide
  Antisense strand to SEQ ID NO: 1209566
aguguccuggaccuaugcc

SEQ ID NO: 1209568 - RNA, 19 nt, Artificial Sequence
  Description of Artificial Sequence: Synthetic oligonucleotide
  Sense strand starting at position 1283 of SEQ ID NO: 917112
cuaauuaggcuuuggcuga

SEQ ID NO: 1209569 - RNA, 19 nt, Artificial Sequence
  Description of Artificial Sequence: Synthetic oligonucleotide
  Antisense strand to SEQ ID NO: 1209568
ucagccaaagccuaauuag

SEQ ID NO: 1209570 - RNA, 19 nt, Artificial Sequence
  Description of Artificial Sequence: Synthetic oligonucleotide
  Sense strand starting at position 1287 of SEQ ID NO: 917112
uuaggcuuuggcugagauc

SEQ ID NO: 1209571 - RNA, 19 nt, Artificial Sequence
  Description of Artificial Sequence: Synthetic oligonucleotide
  Antisense strand to SEQ ID NO: 1209570
gaucucagccaaagccuaa

SEQ ID NO: 1209572 - RNA, 19 nt, Artificial Sequence
  Description of Artificial Sequence: Synthetic oligonucleotide
  Sense strand starting at position 1288 of SEQ ID NO: 917112
uaggcuuuggcugagauca

SEQ ID NO: 1209573 - RNA, 19 nt, Artificial Sequence
  Description of Artificial Sequence: Synthetic oligonucleotide
  Antisense strand to SEQ ID NO: 1209572
ugaucucagccaaagccua

SEQ ID NO: 1209574 - RNA, 19 nt, Artificial Sequence
  Description of Artificial Sequence: Synthetic oligonucleotide
  Sense strand starting at position 1310 of SEQ ID NO: 917112
aaaggaaacuguucguaag

SEQ ID NO: 1209575 - RNA, 19 nt, Artificial Sequence
  Description of Artificial Sequence: Synthetic oligonucleotide
  Antisense strand to SEQ ID NO: 1209574
cuuacgaacaguuuccuuu

SEQ ID NO: 1209576 - RNA, 19 nt, Artificial Sequence
  Description of Artificial Sequence: Synthetic oligonucleotide
  Sense strand starting at position 1320 of SEQ ID NO: 917112
guucguaagcugcuuacuu

SEQ ID NO: 1209577 - RNA, 19 nt, Artificial Sequence
  Description of Artificial Sequence: Synthetic oligonucleotide
  Antisense strand to SEQ ID NO: 1209576
aaguaagcagcuuacgaac

SEQ ID NO: 1209578 - RNA, 19 nt, Artificial Sequence
  Description of Artificial Sequence: Synthetic oligonucleotide
  Sense strand starting at position 1356 of SEQ ID NO: 917112
ugcguuugaguucaggaga

SEQ ID NO: 1209579 - RNA, 19 nt, Artificial Sequence
  Description of Artificial Sequence: Synthetic oligonucleotide
  Antisense strand to SEQ ID NO: 1209578
ucuccugaacucaaacgca

SEQ ID NO: 1209580 - RNA, 19 nt, Artificial Sequence
  Description of Artificial Sequence: Synthetic oligonucleotide
  Sense strand starting at position 1359 of SEQ ID NO: 917112
guuugaguucaggagacug

SEQ ID NO: 1209581 - RNA, 19 nt, Artificial Sequence
  Description of Artificial Sequence: Synthetic oligonucleotide
  Antisense strand to SEQ ID NO: 1209580
cagucuccugaacucaaac

SEQ ID NO: 1209582 - RNA, 19 nt, Artificial Sequence
  Description of Artificial Sequence: Synthetic oligonucleotide
  Sense strand starting at position 2315 of SEQ ID NO: 917112
gagugaaacuuuccgaaau

SEQ ID NO: 1209583 - RNA, 19 nt, Artificial Sequence
  Description of Artificial Sequence: Synthetic oligonucleotide
  Antisense strand to SEQ ID NO: 1209582
auuucggaaaguuucacuc

SEQ ID NO: 1209584 - RNA, 19 nt, Artificial Sequence
  Description of Artificial Sequence: Synthetic oligonucleotide
  Sense strand starting at position 2564 of SEQ ID NO: 917112
agcaaaguuuagccacaga

SEQ ID NO: 1209585 - RNA, 19 nt, Artificial Sequence
  Description of Artificial Sequence: Synthetic oligonucleotide
  Antisense strand to SEQ ID NO: 1209584
ucuguggcuaaacuuugcu

SEQ ID NO: 1209586 - RNA, 19 nt, Artificial Sequence
  Description of Artificial Sequence: Synthetic oligonucleotide
  Sense strand starting at position 2575 of SEQ ID NO: 917112
gccacagauuauccuugua

SEQ ID NO: 1209587 - RNA, 19 nt, Artificial Sequence
  Description of Artificial Sequence: Synthetic oligonucleotide
  Antisense strand to SEQ ID NO: 1209586
uacaaggauaaucuguggc

SEQ ID NO: 1209588 - RNA, 19 nt, Artificial Sequence
  Description of Artificial Sequence: Synthetic oligonucleotide
  Sense strand starting at position 2578 of SEQ ID NO: 917112
acagauuauccuuguagag

SEQ ID NO: 1209589 - RNA, 19 nt, Artificial Sequence
  Description of Artificial Sequence: Synthetic oligonucleotide
  Antisense strand to SEQ ID NO: 1209588
cucuacaaggauaaucugu

SEQ ID NO: 1209590 - RNA, 19 nt, Artificial Sequence
  Description of Artificial Sequence: Synthetic oligonucleotide
  Sense strand starting at position 2596 of SEQ ID NO: 917112
gcugcaagaccucaagaaa

SEQ ID NO: 1209591 - RNA, 19 nt, Artificial Sequence
  Description of Artificial Sequence: Synthetic oligonucleotide
  Antisense strand to SEQ ID NO: 1209590
uuucuugaggucuugcagc

SEQ ID NO: 1209592 - RNA, 19 nt, Artificial Sequence
  Description of Artificial Sequence: Synthetic oligonucleotide
  Sense strand starting at position 2607 of SEQ ID NO: 917112
ucaagaaagccggguaacu

SEQ ID NO: 1209593 - RNA, 19 nt, Artificial Sequence
  Description of Artificial Sequence: Synthetic oligonucleotide
  Antisense strand to SEQ ID NO: 1209592
aguuacccggcuuucuuga

SEQ ID NO: 1209594 - RNA, 19 nt, Artificial Sequence
  Description of Artificial Sequence: Synthetic oligonucleotide
  Sense strand starting at position 2615 of SEQ ID NO: 917112
gccggguaacucgagagua

SEQ ID NO: 1209595 - RNA, 19 nt, Artificial Sequence
  Description of Artificial Sequence: Synthetic oligonucleotide
  Antisense strand to SEQ ID NO: 1209594
uacucucgaguuacccggc

SEQ ID NO: 1209596 - RNA, 19 nt, Artificial Sequence
  Description of Artificial Sequence: Synthetic oligonucleotide
  Sense strand starting at position 2617 of SEQ ID NO: 917112
cggguaacucgagaguaug

SEQ ID NO: 1209597 - RNA, 19 nt, Artificial Sequence
  Description of Artificial Sequence: Synthetic oligonucleotide
  Antisense strand to SEQ ID NO: 1209596
cauacucucgaguuacccg

SEQ ID NO: 1209598 - RNA, 19 nt, Artificial Sequence
  Description of Artificial Sequence: Synthetic oligonucleotide
  Sense strand starting at position 2625 of SEQ ID NO: 917112
ucgagaguaugacccagau

SEQ ID NO: 1209599 - RNA, 19 nt, Artificial Sequence
  Description of Artificial Sequence: Synthetic oligonucleotide
  Antisense strand to SEQ ID NO: 1209598
aucugggucauacucucga

SEQ ID NO: 1209600 - RNA, 19 nt, Artificial Sequence
  Description of Artificial Sequence: Synthetic oligonucleotide
  Sense strand starting at position 2781 of SEQ ID NO: 917112
gccugaugauuucugucgu

SEQ ID NO: 1209601 - RNA, 19 nt, Artificial Sequence
  Description of Artificial Sequence: Synthetic oligonucleotide
  Antisense strand to SEQ ID NO: 1209600
acgacagaaaucaucaggc

SEQ ID NO: 1209602 - RNA, 19 nt, Artificial Sequence
  Description of Artificial Sequence: Synthetic oligonucleotide
  Sense strand starting at position 3116 of SEQ ID NO: 917112
gaagccaaaugauugucau

SEQ ID NO: 1209603 - RNA, 19 nt, Artificial Sequence
  Description of Artificial Sequence: Synthetic oligonucleotide
  Antisense strand to SEQ ID NO: 1209602
augacaaucauuuggcuuc

SEQ ID NO: 1209604 - RNA, 19 nt, Artificial Sequence
  Description of Artificial Sequence: Synthetic oligonucleotide
  Sense strand starting at position 3119 of SEQ ID NO: 917112
gccaaaugauugucaugga

SEQ ID NO: 1209605 - RNA, 19 nt, Artificial Sequence
  Description of Artificial Sequence: Synthetic oligonucleotide
  Antisense strand to SEQ ID NO: 1209604
uccaugacaaucauuuggc

SEQ ID NO: 1209606 - RNA, 19 nt, Artificial Sequence
  Description of Artificial Sequence: Synthetic oligonucleotide
  Sense strand starting at position 3123 of SEQ ID NO: 917112
aaugauugucauggagguu

SEQ ID NO: 1209607 - RNA, 19 nt, Artificial Sequence
  Description of Artificial Sequence: Synthetic oligonucleotide
  Antisense strand to SEQ ID NO: 1209606
aaccuccaugacaaucauu

SEQ ID NO: 1209608 - RNA, 19 nt, Artificial Sequence
  Description of Artificial Sequence: Synthetic oligonucleotide
  Sense strand starting at position 3124 of SEQ ID NO: 917112
augauugucauggagguuu

SEQ ID NO: 1209609 - RNA, 19 nt, Artificial Sequence
  Description of Artificial Sequence: Synthetic oligonucleotide
  Antisense strand to SEQ ID NO: 1209608
aaaccuccaugacaaucau

SEQ ID NO: 1209610 - RNA, 19 nt, Artificial Sequence
  Description of Artificial Sequence: Synthetic oligonucleotide
  Sense strand starting at position 3126 of SEQ ID NO: 917112
gauugucauggagguuuau

SEQ ID NO: 1209611 - RNA, 19 nt, Artificial Sequence
  Description of Artificial Sequence: Synthetic oligonucleotide
  Antisense strand to SEQ ID NO: 1209610
auaaaccuccaugacaauc

SEQ ID NO: 1209612 - RNA, 19 nt, Artificial Sequence
  Description of Artificial Sequence: Synthetic oligonucleotide
  Sense strand starting at position 3406 of SEQ ID NO: 917112
gcagaacuuguccagucuu

SEQ ID NO: 1209613 - RNA, 19 nt, Artificial Sequence
  Description of Artificial Sequence: Synthetic oligonucleotide
  Antisense strand to SEQ ID NO: 1209612
aagacuggacaaguucugc

SEQ ID NO: 1209614 - RNA, 19 nt, Artificial Sequence
  Description of Artificial Sequence: Synthetic oligonucleotide
  Sense strand starting at position 3453 of SEQ ID NO: 917112
gcaauaagccuaugucuaa

SEQ ID NO: 1209615 - RNA, 19 nt, Artificial Sequence
  Description of Artificial Sequence: Synthetic oligonucleotide
  Antisense strand to SEQ ID NO: 1209614
uuagacauaggcuuauugc

SEQ ID NO: 1209616 - RNA, 19 nt, Artificial Sequence
  Description of Artificial Sequence: Synthetic oligonucleotide
  Sense strand starting at position 3520 of SEQ ID NO: 917112
agaauaugcugguugaaug

SEQ ID NO: 1209617 - RNA, 19 nt, Artificial Sequence
  Description of Artificial Sequence: Synthetic oligonucleotide
  Antisense strand to SEQ ID NO: 1209616
cauucaaccagcauauucu

SEQ ID NO: 1209618 - RNA, 19 nt, Artificial Sequence
  Description of Artificial Sequence: Synthetic oligonucleotide
  Sense strand starting at position 3531 of SEQ ID NO: 917112
guugaauggcuguaggaau

SEQ ID NO: 1209619 - RNA, 19 nt, Artificial Sequence
  Description of Artificial Sequence: Synthetic oligonucleotide
  Antisense strand to SEQ ID NO: 1209618
auuccuacagccauucaac

SEQ ID NO: 1209620 - RNA, 19 nt, Artificial Sequence
  Description of Artificial Sequence: Synthetic oligonucleotide
  Sense strand starting at position 3599 of SEQ ID NO: 917112
ucagucauuucuguggcua

SEQ ID NO: 1209621 - RNA, 19 nt, Artificial Sequence
  Description of Artificial Sequence: Synthetic oligonucleotide
  Antisense strand to SEQ ID NO: 1209620
uagccacagaaaugacuga

SEQ ID NO: 1209622 - RNA, 19 nt, Artificial Sequence
  Description of Artificial Sequence: Synthetic oligonucleotide
  Sense strand starting at position 3600 of SEQ ID NO: 917112
cagucauuucuguggcuac

SEQ ID NO: 1209623 - RNA, 19 nt, Artificial Sequence
  Description of Artificial Sequence: Synthetic oligonucleotide
  Antisense strand to SEQ ID NO: 1209622
guagccacagaaaugacug

SEQ ID NO: 1209624 - RNA, 19 nt, Artificial Sequence
  Description of Artificial Sequence: Synthetic oligonucleotide
  Sense strand starting at position 3600 of SEQ ID NO: 917113
cagucauuucuguggcuac

SEQ ID NO: 1209625 - RNA, 19 nt, Artificial Sequence
  Description of Artificial Sequence: Synthetic oligonucleotide
  Antisense strand to SEQ ID NO: 1209624
guagccacagaaaugacug

SEQ ID NO: 1209626 - RNA, 19 nt, Artificial Sequence
  Description of Artificial Sequence: Synthetic oligonucleotide
  Sense strand starting at position 107 of SEQ ID NO: 917113
ccaagaggucuuugaugug

SEQ ID NO: 1209627 - RNA, 19 nt, Artificial Sequence
  Description of Artificial Sequence: Synthetic oligonucleotide
  Antisense strand to SEQ ID NO: 1209626
cacaucaaagaccucuugg

SEQ ID NO: 1209628 - RNA, 19 nt, Artificial Sequence
  Description of Artificial Sequence: Synthetic oligonucleotide
  Sense strand starting at position 116 of SEQ ID NO: 917113
cuuugaugugcccaagaag

SEQ ID NO: 1209629 - RNA, 19 nt, Artificial Sequence
  Description of Artificial Sequence: Synthetic oligonucleotide
  Antisense strand to SEQ ID NO: 1209628
cuucuugggcacaucaaag

SEQ ID NO: 1209630 - RNA, 19 nt, Artificial Sequence
  Description of Artificial Sequence: Synthetic oligonucleotide
  Sense strand starting at position 242 of SEQ ID NO: 917113
gagucauggucuguuaaga

SEQ ID NO: 1209631 - RNA, 19 nt, Artificial Sequence
  Description of Artificial Sequence: Synthetic oligonucleotide
  Antisense strand to SEQ ID NO: 1209630
ucuuaacagaccaugacuc

SEQ ID NO: 1209632 - RNA, 19 nt, Artificial Sequence
  Description of Artificial Sequence: Synthetic oligonucleotide
  Sense strand starting at position 255 of SEQ ID NO: 917113
uuaagagauagguagcuuu

SEQ ID NO: 1209633 - RNA, 19 nt, Artificial Sequence
  Description of Artificial Sequence: Synthetic oligonucleotide
  Antisense strand to SEQ ID NO: 1209632
aaagcuaccuaucucuuaa

SEQ ID NO: 1209634 - RNA, 19 nt, Artificial Sequence
  Description of Artificial Sequence: Synthetic oligonucleotide
  Sense strand starting at position 371 of SEQ ID NO: 917113
guguuaagugcagcuacuu

SEQ ID NO: 1209635 - RNA, 19 nt, Artificial Sequence
  Description of Artificial Sequence: Synthetic oligonucleotide
  Antisense strand to SEQ ID NO: 1209634
aaguagcugcacuuaacac

SEQ ID NO: 1209636 - RNA, 19 nt, Artificial Sequence
  Description of Artificial Sequence: Synthetic oligonucleotide
  Sense strand starting at position 425 of SEQ ID NO: 917113
uauagcagaguaugugaaa

SEQ ID NO: 1209637 - RNA, 19 nt, Artificial Sequence
  Description of Artificial Sequence: Synthetic oligonucleotide
  Antisense strand to SEQ ID NO: 1209636
uuucacauacucugcuaua

SEQ ID NO: 1209638 - RNA, 19 nt, Artificial Sequence
  Description of Artificial Sequence: Synthetic oligonucleotide
  Sense strand starting at position 569 of SEQ ID NO: 917113
gguaguagauccucuagaa

SEQ ID NO: 1209639 - RNA, 19 nt, Artificial Sequence
  Description of Artificial Sequence: Synthetic oligonucleotide
  Antisense strand to SEQ ID NO: 1209638
uucuagaggaucuacuacc

SEQ ID NO: 1209640 - RNA, 19 nt, Artificial Sequence
  Description of Artificial Sequence: Synthetic oligonucleotide
  Sense strand starting at position 573 of SEQ ID NO: 917113
guagauccucuagaaagcu

SEQ ID NO: 1209641 - RNA, 19 nt, Artificial Sequence
  Description of Artificial Sequence: Synthetic oligonucleotide
  Antisense strand to SEQ ID NO: 1209640
agcuuucuagaggaucuac

SEQ ID NO: 1209642 - RNA, 19 nt, Artificial Sequence
  Description of Artificial Sequence: Synthetic oligonucleotide
  Sense strand starting at position 582 of SEQ ID NO: 917113
cuagaaagcuuuccuugga

SEQ ID NO: 1209643 - RNA, 19 nt, Artificial Sequence
  Description of Artificial Sequence: Synthetic oligonucleotide
  Antisense strand to SEQ ID NO: 1209642
uccaaggaaagcuuucuag

SEQ ID NO: 1209644 - RNA, 19 nt, Artificial Sequence
  Description of Artificial Sequence: Synthetic oligonucleotide
  Sense strand starting at position 666 of SEQ ID NO: 917113
acuauuacagcguaauuaa

SEQ ID NO: 1209645 - RNA, 19 nt, Artificial Sequence
  Description of Artificial Sequence: Synthetic oligonucleotide
  Antisense strand to SEQ ID NO: 1209644
uuaauuacgcuguaauagu

SEQ ID NO: 1209646 - RNA, 19 nt, Artificial Sequence
  Description of Artificial Sequence: Synthetic oligonucleotide
  Sense strand starting at position 702 of SEQ ID NO: 917113
ugaguuccucgaugacaga

SEQ ID NO: 1209647 - RNA, 19 nt, Artificial Sequence
  Description of Artificial Sequence: Synthetic oligonucleotide
  Antisense strand to SEQ ID NO: 1209646
ucugucaucgaggaacuca

SEQ ID NO: 1209648 - RNA, 19 nt, Artificial Sequence
  Description of Artificial Sequence: Synthetic oligonucleotide
  Sense strand starting at position 810 of SEQ ID NO: 917113
ugaugucuuagguaggaua

SEQ ID NO: 1209649 - RNA, 19 nt, Artificial Sequence
  Description of Artificial Sequence: Synthetic oligonucleotide
  Antisense strand to SEQ ID NO: 1209648
uauccuaccuaagacauca

SEQ ID NO: 1209650 - RNA, 19 nt, Artificial Sequence
  Description of Artificial Sequence: Synthetic oligonucleotide
  Sense strand starting at position 812 of SEQ ID NO: 917113
augucuuagguaggauauc

SEQ ID NO: 1209651 - RNA, 19 nt, Artificial Sequence
  Description of Artificial Sequence: Synthetic oligonucleotide
  Antisense strand to SEQ ID NO: 1209650
gauauccuaccuaagacau

SEQ ID NO: 1209652 - RNA, 19 nt, Artificial Sequence
  Description of Artificial Sequence: Synthetic oligonucleotide
  Sense strand starting at position 902 of SEQ ID NO: 917113
acgagugauuucccuaagc

SEQ ID NO: 1209653 - RNA, 19 nt, Artificial Sequence
  Description of Artificial Sequence: Synthetic oligonucleotide
  Antisense strand to SEQ ID NO: 1209652
gcuuagggaaaucacucgu

SEQ ID NO: 1209654 - RNA, 19 nt, Artificial Sequence
  Description of Artificial Sequence: Synthetic oligonucleotide
  Sense strand starting at position 1090 of SEQ ID NO: 917113
cgauaccuuggguaguaau

SEQ ID NO: 1209655 - RNA, 19 nt, Artificial Sequence
  Description of Artificial Sequence: Synthetic oligonucleotide
  Antisense strand to SEQ ID NO: 1209654
auuacuacccaagguaucg

SEQ ID NO: 1209656 - RNA, 19 nt, Artificial Sequence
  Description of Artificial Sequence: Synthetic oligonucleotide
  Sense strand starting at position 1279 of SEQ ID NO: 917113
aaccuaguagcuggaauua

SEQ ID NO: 1209657 - RNA, 19 nt, Artificial Sequence
  Description of Artificial Sequence: Synthetic oligonucleotide
  Antisense strand to SEQ ID NO: 1209656
uaauuccagcuacuagguu

SEQ ID NO: 1209658 - RNA, 19 nt, Artificial Sequence
  Description of Artificial Sequence: Synthetic oligonucleotide
  Sense strand starting at position 1354 of SEQ ID NO: 917113
uagggaucuuagguuugua

SEQ ID NO: 1209659 - RNA, 19 nt, Artificial Sequence
  Description of Artificial Sequence: Synthetic oligonucleotide
  Antisense strand to SEQ ID NO: 1209658
uacaaaccuaagaucccua

SEQ ID NO: 1209660 - RNA, 19 nt, Artificial Sequence
  Description of Artificial Sequence: Synthetic oligonucleotide
  Sense strand starting at position 1358 of SEQ ID NO: 917113
gaucuuagguuuguacaca

SEQ ID NO: 1209661 - RNA, 19 nt, Artificial Sequence
  Description of Artificial Sequence: Synthetic oligonucleotide
  Antisense strand to SEQ ID NO: 1209660
uguguacaaaccuaagauc

SEQ ID NO: 1209662 - RNA, 19 nt, Artificial Sequence
  Description of Artificial Sequence: Synthetic oligonucleotide
  Sense strand starting at position 2251 of SEQ ID NO: 917113
gcagguuugcggagcaauu

SEQ ID NO: 1209663 - RNA, 19 nt, Artificial Sequence
  Description of Artificial Sequence: Synthetic oligonucleotide
  Antisense strand to SEQ ID NO: 1209662
aauugcuccgcaaaccugc

SEQ ID NO: 1209664 - RNA, 19 nt, Artificial Sequence
  Description of Artificial Sequence: Synthetic oligonucleotide
  Sense strand starting at position 2261 of SEQ ID NO: 917113
ggagcaauuuguucugccu

SEQ ID NO: 1209665 - RNA, 19 nt, Artificial Sequence
  Description of Artificial Sequence: Synthetic oligonucleotide
  Antisense strand to SEQ ID NO: 1209664
aggcagaacaaauugcucc

SEQ ID NO: 1209666 - RNA, 19 nt, Artificial Sequence
  Description of Artificial Sequence: Synthetic oligonucleotide
  Sense strand starting at position 2264 of SEQ ID NO: 917113
gcaauuuguucugccugau

SEQ ID NO: 1209667 - RNA, 19 nt, Artificial Sequence
  Description of Artificial Sequence: Synthetic oligonucleotide
  Antisense strand to SEQ ID NO: 1209666
aucaggcagaacaaauugc

SEQ ID NO: 1209668 - RNA, 19 nt, Artificial Sequence
  Description of Artificial Sequence: Synthetic oligonucleotide
  Sense strand starting at position 2286 of SEQ ID NO: 917113
guuguuaagggugucgcaa

SEQ ID NO: 1209669 - RNA, 19 nt, Artificial Sequence
  Description of Artificial Sequence: Synthetic oligonucleotide
  Antisense strand to SEQ ID NO: 1209668
uugcgacacccuuaacaac

SEQ ID NO: 1209670 - RNA, 19 nt, Artificial Sequence
  Description of Artificial Sequence: Synthetic oligonucleotide
  Sense strand starting at position 2599 of SEQ ID NO: 917113
guacacacuuguuuacaga

SEQ ID NO: 1209671 - RNA, 19 nt, Artificial Sequence
  Description of Artificial Sequence: Synthetic oligonucleotide
  Antisense strand to SEQ ID NO: 1209670
ucuguaaacaaguguguac

SEQ ID NO: 1209672 - RNA, 19 nt, Artificial Sequence
  Description of Artificial Sequence: Synthetic oligonucleotide
  Sense strand starting at position 2635 of SEQ ID NO: 917113
uugggcuuuccuuauucua

SEQ ID NO: 1209673 - RNA, 19 nt, Artificial Sequence
  Description of Artificial Sequence: Synthetic oligonucleotide
  Antisense strand to SEQ ID NO: 1209672
uagaauaaggaaagcccaa

SEQ ID NO: 1209674 - RNA, 19 nt, Artificial Sequence
  Description of Artificial Sequence: Synthetic oligonucleotide
  Sense strand starting at position 3316 of SEQ ID NO: 917113
gccugugguguuguuguua

SEQ ID NO: 1209675 - RNA, 19 nt, Artificial Sequence
  Description of Artificial Sequence: Synthetic oligonucleotide
  Antisense strand to SEQ ID NO: 1209674
uaacaacaacaccacaggc

SEQ ID NO: 1209676 - RNA, 19 nt, Artificial Sequence
  Description of Artificial Sequence: Synthetic oligonucleotide
  Sense strand starting at position 3328 of SEQ ID NO: 917113
guuguuauugaacauaugu

SEQ ID NO: 1209677 - RNA, 19 nt, Artificial Sequence
  Description of Artificial Sequence: Synthetic oligonucleotide
  Antisense strand to SEQ ID NO: 1209676
acauauguucaauaacaac

SEQ ID NO: 1209678 - RNA, 19 nt, Artificial Sequence
  Description of Artificial Sequence: Synthetic oligonucleotide
  Sense strand starting at position 3330 of SEQ ID NO: 917113
uguuauugaacauaugugu

SEQ ID NO: 1209679 - RNA, 19 nt, Artificial Sequence
  Description of Artificial Sequence: Synthetic oligonucleotide
  Antisense strand to SEQ ID NO: 1209678
acacauauguucaauaaca

SEQ ID NO: 1209680 - RNA, 19 nt, Artificial Sequence
  Description of Artificial Sequence: Synthetic oligonucleotide
  Sense strand starting at position 3361 of SEQ ID NO: 917113
uggagagcuccaggucaaa

SEQ ID NO: 1209681 - RNA, 19 nt, Artificial Sequence
  Description of Artificial Sequence: Synthetic oligonucleotide
  Antisense strand to SEQ ID NO: 1209680
uuugaccuggagcucucca

SEQ ID NO: 1209682 - RNA, 19 nt, Artificial Sequence
  Description of Artificial Sequence: Synthetic oligonucleotide
  Sense strand starting at position 3383 of SEQ ID NO: 917113
ggguucuugaaucauagcu

SEQ ID NO: 1209683 - RNA, 19 nt, Artificial Sequence
  Description of Artificial Sequence: Synthetic oligonucleotide
  Antisense strand to SEQ ID NO: 1209682
agcuaugauucaagaaccc

SEQ ID NO: 1209684 - RNA, 19 nt, Artificial Sequence
  Description of Artificial Sequence: Synthetic oligonucleotide
  Sense strand starting at position 3402 of SEQ ID NO: 917113
uccuaaucuugaucacgga

SEQ ID NO: 1209685 - RNA, 19 nt, Artificial Sequence
  Description of Artificial Sequence: Synthetic oligonucleotide
  Antisense strand to SEQ ID NO: 1209684
uccgugaucaagauuagga

SEQ ID NO: 1209686 - RNA, 19 nt, Artificial Sequence
  Description of Artificial Sequence: Synthetic oligonucleotide
  Sense strand starting at position 3482 of SEQ ID NO: 917113
ucuagaagauacuuaguga

SEQ ID NO: 1209687 - RNA, 19 nt, Artificial Sequence
  Description of Artificial Sequence: Synthetic oligonucleotide
  Antisense strand to SEQ ID NO: 1209686
ucacuaaguaucuucuaga

SEQ ID NO: 1209688 - RNA, 19 nt, Artificial Sequence
  Description of Artificial Sequence: Synthetic oligonucleotide
  Sense strand starting at position 3506 of SEQ ID NO: 917113
acccuugauugucuuugaa

SEQ ID NO: 1209689 - RNA, 19 nt, Artificial Sequence
  Description of Artificial Sequence: Synthetic oligonucleotide
  Antisense strand to SEQ ID NO: 1209688
uucaaagacaaucaagggu

SEQ ID NO: 1209690 - RNA, 19 nt, Artificial Sequence
  Description of Artificial Sequence: Synthetic oligonucleotide
  Sense strand starting at position 3509 of SEQ ID NO: 917113
cuugauugucuuugaacca

SEQ ID NO: 1209691 - RNA, 19 nt, Artificial Sequence
  Description of Artificial Sequence: Synthetic oligonucleotide
  Antisense strand to SEQ ID NO: 1209690
ugguucaaagacaaucaag

SEQ ID NO: 1209692 - RNA, 19 nt, Artificial Sequence
  Description of Artificial Sequence: Synthetic oligonucleotide
  Sense strand starting at position 3554 of SEQ ID NO: 917113
gagacugggcuuugaauca

SEQ ID NO: 1209693 - RNA, 19 nt, Artificial Sequence
  Description of Artificial Sequence: Synthetic oligonucleotide
  Antisense strand to SEQ ID NO: 1209692
ugauucaaagcccagucuc

SEQ ID NO: 1209694 - RNA, 19 nt, Artificial Sequence
  Description of Artificial Sequence: Synthetic oligonucleotide
  Sense strand starting at position 3650 of SEQ ID NO: 917113
gagcucaguagagguugaa

SEQ ID NO: 1209695 - RNA, 19 nt, Artificial Sequence
  Description of Artificial Sequence: Synthetic oligonucleotide
  Antisense strand to SEQ ID NO: 1209694
uucaaccucuacugagcuc

SEQ ID NO: 1209696 - RNA, 19 nt, Artificial Sequence
  Description of Artificial Sequence: Synthetic oligonucleotide
  Sense strand starting at position 3653 of SEQ ID NO: 917113
cucaguagagguugaacaa

SEQ ID NO: 1209697 - RNA, 19 nt, Artificial Sequence
  Description of Artificial Sequence: Synthetic oligonucleotide
  Antisense strand to SEQ ID NO: 1209696
uuguucaaccucuacugag

SEQ ID NO: 1209698 - RNA, 19 nt, Artificial Sequence
  Description of Artificial Sequence: Synthetic oligonucleotide
  Sense strand starting at position 3843 of SEQ ID NO: 917113
caggcauauuaggucaauu

SEQ ID NO: 1209699 - RNA, 19 nt, Artificial Sequence
  Description of Artificial Sequence: Synthetic oligonucleotide
  Antisense strand to SEQ ID NO: 1209698
aauugaccuaauaugccug

SEQ ID NO: 1209700 - RNA, 19 nt, Artificial Sequence
  Description of Artificial Sequence: Synthetic oligonucleotide
  Sense strand starting at position 3845 of SEQ ID NO: 917113
ggcauauuaggucaauuag

SEQ ID NO: 1209701 - RNA, 19 nt, Artificial Sequence
  Description of Artificial Sequence: Synthetic oligonucleotide
  Antisense strand to SEQ ID NO: 1209700
cuaauugaccuaauaugcc

SEQ ID NO: 1209702 - RNA, 19 nt, Artificial Sequence
  Description of Artificial Sequence: Synthetic oligonucleotide
  Sense strand starting at position 3883 of SEQ ID NO: 917113
gaauguucuugggcuagac

SEQ ID NO: 1209703 - RNA, 19 nt, Artificial Sequence
  Description of Artificial Sequence: Synthetic oligonucleotide
  Antisense strand to SEQ ID NO: 1209702
gucuagcccaagaacauuc

SEQ ID NO: 1209704 - RNA, 19 nt, Artificial Sequence
  Description of Artificial Sequence: Synthetic oligonucleotide
  Sense strand starting at position 3925 of SEQ ID NO: 917114
cugaaugaaaugugucagu

SEQ ID NO: 1209705 - RNA, 19 nt, Artificial Sequence
  Description of Artificial Sequence: Synthetic oligonucleotide
  Antisense strand to SEQ ID NO: 1209704
acugacacauuucauucag

SEQ ID NO: 1209706 - RNA, 19 nt, Artificial Sequence
  Description of Artificial Sequence: Synthetic oligonucleotide
  Sense strand starting at position 754 of SEQ ID NO: 917114
ccgggagccuuaucuuauc

SEQ ID NO: 1209707 - RNA, 19 nt, Artificial Sequence
  Description of Artificial Sequence: Synthetic oligonucleotide
  Antisense strand to SEQ ID NO: 1209706
gauaagauaaggcucccgg

SEQ ID NO: 1209708 - RNA, 19 nt, Artificial Sequence
  Description of Artificial Sequence: Synthetic oligonucleotide
  Sense strand starting at position 821 of SEQ ID NO: 917114
uggcauuccucugcuguga

SEQ ID NO: 1209709 - RNA, 19 nt, Artificial Sequence
  Description of Artificial Sequence: Synthetic oligonucleotide
  Antisense strand to SEQ ID NO: 1209708
ucacagcagaggaaugcca

SEQ ID NO: 1209710 - RNA, 19 nt, Artificial Sequence
  Description of Artificial Sequence: Synthetic oligonucleotide
  Sense strand starting at position 977 of SEQ ID NO: 917114
gagcaaaugccucguagga

SEQ ID NO: 1209711 - RNA, 19 nt, Artificial Sequence
  Description of Artificial Sequence: Synthetic oligonucleotide
  Antisense strand to SEQ ID NO: 1209710
uccuacgaggcauuugcuc

SEQ ID NO: 1209712 - RNA, 19 nt, Artificial Sequence
  Description of Artificial Sequence: Synthetic oligonucleotide
  Sense strand starting at position 1370 of SEQ ID NO: 917114
uggcuuuaacucuauuaga

SEQ ID NO: 1209713 - RNA, 19 nt, Artificial Sequence
  Description of Artificial Sequence: Synthetic oligonucleotide
  Antisense strand to SEQ ID NO: 1209712
ucuaauagaguuaaagcca

SEQ ID NO: 1209714 - RNA, 19 nt, Artificial Sequence
  Description of Artificial Sequence: Synthetic oligonucleotide
  Sense strand starting at position 1395 of SEQ ID NO: 917114
aggugcuaggccuaguuaa

SEQ ID NO: 1209715 - RNA, 19 nt, Artificial Sequence
  Description of Artificial Sequence: Synthetic oligonucleotide
  Antisense strand to SEQ ID NO: 1209714
uuaacuaggccuagcaccu

SEQ ID NO: 1209716 - RNA, 19 nt, Artificial Sequence
  Description of Artificial Sequence: Synthetic oligonucleotide
  Sense strand starting at position 1512 of SEQ ID NO: 917114
acgugaucugccgcauauc

SEQ ID NO: 1209717 - RNA, 19 nt, Artificial Sequence
  Description of Artificial Sequence: Synthetic oligonucleotide
  Antisense strand to SEQ ID NO: 1209716
gauaugcggcagaucacgu

SEQ ID NO: 1209718 - RNA, 19 nt, Artificial Sequence
  Description of Artificial Sequence: Synthetic oligonucleotide
  Sense strand starting at position 1513 of SEQ ID NO: 917114
cgugaucugccgcauauca

SEQ ID NO: 1209719 - RNA, 19 nt, Artificial Sequence
  Description of Artificial Sequence: Synthetic oligonucleotide
  Antisense strand to SEQ ID NO: 1209718
ugauaugcggcagaucacg

SEQ ID NO: 1209720 - RNA, 19 nt, Artificial Sequence
  Description of Artificial Sequence: Synthetic oligonucleotide
  Sense strand starting at position 1515 of SEQ ID NO: 917114
ugaucugccgcauaucaaa

SEQ ID NO: 1209721 - RNA, 19 nt, Artificial Sequence
  Description of Artificial Sequence: Synthetic oligonucleotide
  Antisense strand to SEQ ID NO: 1209720
uuugauaugcggcagauca

SEQ ID NO: 1209722 - RNA, 19 nt, Artificial Sequence
  Description of Artificial Sequence: Synthetic oligonucleotide
  Sense strand starting at position 1537 of SEQ ID NO: 917114
gagggacacucagauuaaa

SEQ ID NO: 1209723 - RNA, 19 nt, Artificial Sequence
  Description of Artificial Sequence: Synthetic oligonucleotide
  Antisense strand to SEQ ID NO: 1209722
uuuaaucugagugucccuc

SEQ ID NO: 1209724 - RNA, 19 nt, Artificial Sequence
  Description of Artificial Sequence: Synthetic oligonucleotide
  Sense strand starting at position 1625 of SEQ ID NO: 917114
gaggcuuacugggagaacu

SEQ ID NO: 1209725 - RNA, 19 nt, Artificial Sequence
  Description of Artificial Sequence: Synthetic oligonucleotide
  Antisense strand to SEQ ID NO: 1209724
aguucucccaguaagccuc

SEQ ID NO: 1209726 - RNA, 19 nt, Artificial Sequence
  Description of Artificial Sequence: Synthetic oligonucleotide
  Sense strand starting at position 1753 of SEQ ID NO: 917114
ggccauucuccuggcgaga

SEQ ID NO: 1209727 - RNA, 19 nt, Artificial Sequence
  Description of Artificial Sequence: Synthetic oligonucleotide
  Antisense strand to SEQ ID NO: 1209726
ucucgccaggagaauggcc

SEQ ID NO: 1209728 - RNA, 19 nt, Artificial Sequence
  Description of Artificial Sequence: Synthetic oligonucleotide
  Sense strand starting at position 1756 of SEQ ID NO: 917114
cauucuccuggcgagagua

SEQ ID NO: 1209729 - RNA, 19 nt, Artificial Sequence
  Description of Artificial Sequence: Synthetic oligonucleotide
  Antisense strand to SEQ ID NO: 1209728
uacucucgccaggagaaug

SEQ ID NO: 1209730 - RNA, 19 nt, Artificial Sequence
  Description of Artificial Sequence: Synthetic oligonucleotide
  Sense strand starting at position 1845 of SEQ ID NO: 917114
gcagacauuucuguagcca

SEQ ID NO: 1209731 - RNA, 19 nt, Artificial Sequence
  Description of Artificial Sequence: Synthetic oligonucleotide
  Antisense strand to SEQ ID NO: 1209730
uggcuacagaaaugucugc

SEQ ID NO: 1209732 - RNA, 19 nt, Artificial Sequence
  Description of Artificial Sequence: Synthetic oligonucleotide
  Sense strand starting at position 1990 of SEQ ID NO: 917114
uauaguggucacuguguca

SEQ ID NO: 1209733 - RNA, 19 nt, Artificial Sequence
  Description of Artificial Sequence: Synthetic oligonucleotide
  Antisense strand to SEQ ID NO: 1209732
ugacacagugaccacuaua

SEQ ID NO: 1209734 - RNA, 19 nt, Artificial Sequence
  Description of Artificial Sequence: Synthetic oligonucleotide
  Sense strand starting at position 2430 of SEQ ID NO: 917114
uguugagauuaaucuguga

SEQ ID NO: 1209735 - RNA, 19 nt, Artificial Sequence
  Description of Artificial Sequence: Synthetic oligonucleotide
  Antisense strand to SEQ ID NO: 1209734
ucacagauuaaucucaaca

SEQ ID NO: 1209736 - RNA, 19 nt, Artificial Sequence
  Description of Artificial Sequence: Synthetic oligonucleotide
  Sense strand starting at position 2433 of SEQ ID NO: 917114
ugagauuaaucugugacau

SEQ ID NO: 1209737 - RNA, 19 nt, Artificial Sequence
  Description of Artificial Sequence: Synthetic oligonucleotide
  Antisense strand to SEQ ID NO: 1209736
augucacagauuaaucuca

SEQ ID NO: 1209738 - RNA, 19 nt, Artificial Sequence
  Description of Artificial Sequence: Synthetic oligonucleotide
  Sense strand starting at position 2434 of SEQ ID NO: 917114
gagauuaaucugugacaug

SEQ ID NO: 1209739 - RNA, 19 nt, Artificial Sequence
  Description of Artificial Sequence: Synthetic oligonucleotide
  Antisense strand to SEQ ID NO: 1209738
caugucacagauuaaucuc

SEQ ID NO: 1209740 - RNA, 19 nt, Artificial Sequence
  Description of Artificial Sequence: Synthetic oligonucleotide
  Sense strand starting at position 2439 of SEQ ID NO: 917114
uaaucugugacaugcgguu

SEQ ID NO: 1209741 - RNA, 19 nt, Artificial Sequence
  Description of Artificial Sequence: Synthetic oligonucleotide
  Antisense strand to SEQ ID NO: 1209740
aaccgcaugucacagauua

SEQ ID NO: 1209742 - RNA, 19 nt, Artificial Sequence
  Description of Artificial Sequence: Synthetic oligonucleotide
  Sense strand starting at position 2477 of SEQ ID NO: 917114
ucgauuaugaaauguguuu

SEQ ID NO: 1209743 - RNA, 19 nt, Artificial Sequence
  Description of Artificial Sequence: Synthetic oligonucleotide
  Antisense strand to SEQ ID NO: 1209742
aaacacauuucauaaucga

SEQ ID NO: 1209744 - RNA, 19 nt, Artificial Sequence
  Description of Artificial Sequence: Synthetic oligonucleotide
  Sense strand starting at position 2543 of SEQ ID NO: 917114
ucuagcuccugugugaaca

SEQ ID NO: 1209745 - RNA, 19 nt, Artificial Sequence
  Description of Artificial Sequence: Synthetic oligonucleotide
  Antisense strand to SEQ ID NO: 1209744
uguucacacaggagcuaga

SEQ ID NO: 1209746 - RNA, 19 nt, Artificial Sequence
  Description of Artificial Sequence: Synthetic oligonucleotide
  Sense strand starting at position 2544 of SEQ ID NO: 917114
cuagcuccugugugaacaa

SEQ ID NO: 1209747 - RNA, 19 nt, Artificial Sequence
  Description of Artificial Sequence: Synthetic oligonucleotide
  Antisense strand to SEQ ID NO: 1209746
uuguucacacaggagcuag

SEQ ID NO: 1209748 - RNA, 19 nt, Artificial Sequence
  Description of Artificial Sequence: Synthetic oligonucleotide
  Sense strand starting at position 2557 of SEQ ID NO: 917114
gaacaaugacggugucuuc

SEQ ID NO: 1209749 - RNA, 19 nt, Artificial Sequence
  Description of Artificial Sequence: Synthetic oligonucleotide
  Antisense strand to SEQ ID NO: 1209748
gaagacaccgucauuguuc

SEQ ID NO: 1209750 - RNA, 19 nt, Artificial Sequence
  Description of Artificial Sequence: Synthetic oligonucleotide
  Sense strand starting at position 2564 of SEQ ID NO: 917114
gacggugucuucucagcau

SEQ ID NO: 1209751 - RNA, 19 nt, Artificial Sequence
  Description of Artificial Sequence: Synthetic oligonucleotide
  Antisense strand to SEQ ID NO: 1209750
augcugagaagacaccguc

SEQ ID NO: 1209752 - RNA, 19 nt, Artificial Sequence
  Description of Artificial Sequence: Synthetic oligonucleotide
  Sense strand starting at position 2676 of SEQ ID NO: 917114
cggucagcucaguguauuu

SEQ ID NO: 1209753 - RNA, 19 nt, Artificial Sequence
  Description of Artificial Sequence: Synthetic oligonucleotide
  Antisense strand to SEQ ID NO: 1209752
aaauacacugagcugaccg

SEQ ID NO: 1209754 - RNA, 19 nt, Artificial Sequence
  Description of Artificial Sequence: Synthetic oligonucleotide
  Sense strand starting at position 2769 of SEQ ID NO: 917114
caggguuccugguuugaaa

SEQ ID NO: 1209755 - RNA, 19 nt, Artificial Sequence
  Description of Artificial Sequence: Synthetic oligonucleotide
  Antisense strand to SEQ ID NO: 1209754
uuucaaaccaggaacccug

SEQ ID NO: 1209756 - RNA, 19 nt, Artificial Sequence
  Description of Artificial Sequence: Synthetic oligonucleotide
  Sense strand starting at position 2771 of SEQ ID NO: 917114
ggguuccugguuugaaaua

SEQ ID NO: 1209757 - RNA, 19 nt, Artificial Sequence
  Description of Artificial Sequence: Synthetic oligonucleotide
  Antisense strand to SEQ ID NO: 1209756
uauuucaaaccaggaaccc

SEQ ID NO: 1209758 - RNA, 19 nt, Artificial Sequence
  Description of Artificial Sequence: Synthetic oligonucleotide
  Sense strand starting at position 2921 of SEQ ID NO: 917114
agaguuacaccuggacuga

SEQ ID NO: 1209759 - RNA, 19 nt, Artificial Sequence
  Description of Artificial Sequence: Synthetic oligonucleotide
  Antisense strand to SEQ ID NO: 1209758
ucaguccagguguaacucu

SEQ ID NO: 1209760 - RNA, 19 nt, Artificial Sequence
  Description of Artificial Sequence: Synthetic oligonucleotide
  Sense strand starting at position 2939 of SEQ ID NO: 917114
aagaaaugcgucugauaaa

SEQ ID NO: 1209761 - RNA, 19 nt, Artificial Sequence
  Description of Artificial Sequence: Synthetic oligonucleotide
  Antisense strand to SEQ ID NO: 1209760
uuuaucagacgcauuucuu

SEQ ID NO: 1209762 - RNA, 19 nt, Artificial Sequence
  Description of Artificial Sequence: Synthetic oligonucleotide
  Sense strand starting at position 3005 of SEQ ID NO: 917114
gcguuauaucagcacuugu

SEQ ID NO: 1209763 - RNA, 19 nt, Artificial Sequence
  Description of Artificial Sequence: Synthetic oligonucleotide
  Antisense strand to SEQ ID NO: 1209762
acaagugcugauauaacgc

SEQ ID NO: 1209764 - RNA, 19 nt, Artificial Sequence
  Description of Artificial Sequence: Synthetic oligonucleotide
  Sense strand starting at position 3108 of SEQ ID NO: 917114
uagcaugauccugagauuc

SEQ ID NO: 1209765 - RNA, 19 nt, Artificial Sequence
  Description of Artificial Sequence: Synthetic oligonucleotide
  Antisense strand to SEQ ID NO: 1209764
gaaucucaggaucaugcua

SEQ ID NO: 1209766 - RNA, 19 nt, Artificial Sequence
  Description of Artificial Sequence: Synthetic oligonucleotide
  Sense strand starting at position 3638 of SEQ ID NO: 917114
ggcggaaaccuuugccaag

SEQ ID NO: 1209767 - RNA, 19 nt, Artificial Sequence
  Description of Artificial Sequence: Synthetic oligonucleotide
  Antisense strand to SEQ ID NO: 1209766
cuuggcaaagguuuccgcc

SEQ ID NO: 1209768 - RNA, 19 nt, Artificial Sequence
  Description of Artificial Sequence: Synthetic oligonucleotide
  Sense strand starting at position 3639 of SEQ ID NO: 917114
gcggaaaccuuugccaaga

SEQ ID NO: 1209769 - RNA, 19 nt, Artificial Sequence
  Description of Artificial Sequence: Synthetic oligonucleotide
  Antisense strand to SEQ ID NO: 1209768
ucuuggcaaagguuuccgc

SEQ ID NO: 1209770 - RNA, 19 nt, Artificial Sequence
  Description of Artificial Sequence: Synthetic oligonucleotide
  Sense strand starting at position 3688 of SEQ ID NO: 917114
gggauaagguuagcucguu

SEQ ID NO: 1209771 - RNA, 19 nt, Artificial Sequence
  Description of Artificial Sequence: Synthetic oligonucleotide
  Antisense strand to SEQ ID NO: 1209770
aacgagcuaaccuuauccc

SEQ ID NO: 1209772 - RNA, 19 nt, Artificial Sequence
  Description of Artificial Sequence: Synthetic oligonucleotide
  Sense strand starting at position 3689 of SEQ ID NO: 917114
ggauaagguuagcucguuu

SEQ ID NO: 1209773 - RNA, 19 nt, Artificial Sequence
  Description of Artificial Sequence: Synthetic oligonucleotide
  Antisense strand to SEQ ID NO: 1209772
aaacgagcuaaccuuaucc

SEQ ID NO: 1209774 - RNA, 19 nt, Artificial Sequence
  Description of Artificial Sequence: Synthetic oligonucleotide
  Sense strand starting at position 3847 of SEQ ID NO: 917114
ugacauguacaaugucacu

SEQ ID NO: 1209775 - RNA, 19 nt, Artificial Sequence
  Description of Artificial Sequence: Synthetic oligonucleotide
  Antisense strand to SEQ ID NO: 1209774
agugacauuguacauguca

SEQ ID NO: 1209776 - RNA, 19 nt, Artificial Sequence
  Description of Artificial Sequence: Synthetic oligonucleotide
  Sense strand starting at position 3852 of SEQ ID NO: 917114
uguacaaugucacugagag

SEQ ID NO: 1209777 - RNA, 19 nt, Artificial Sequence
  Description of Artificial Sequence: Synthetic oligonucleotide
  Antisense strand to SEQ ID NO: 1209776
cucucagugacauuguaca

SEQ ID NO: 1209778 - RNA, 19 nt, Artificial Sequence
  Description of Artificial Sequence: Synthetic oligonucleotide
  Sense strand starting at position 3853 of SEQ ID NO: 917114
guacaaugucacugagagg

SEQ ID NO: 1209779 - RNA, 19 nt, Artificial Sequence
  Description of Artificial Sequence: Synthetic oligonucleotide
  Antisense strand to SEQ ID NO: 1209778
ccucucagugacauuguac

SEQ ID NO: 1209780 - RNA, 19 nt, Artificial Sequence
  Description of Artificial Sequence: Synthetic oligonucleotide
  Sense strand starting at position 3870 of SEQ ID NO: 917114
ggagcuggcguuguugauu

SEQ ID NO: 1209781 - RNA, 19 nt, Artificial Sequence
  Description of Artificial Sequence: Synthetic oligonucleotide
  Antisense strand to SEQ ID NO: 1209780
aaucaacaacgccagcucc

SEQ ID NO: 1209782 - RNA, 19 nt, Artificial Sequence
  Description of Artificial Sequence: Synthetic oligonucleotide
  Sense strand starting at position 3953 of SEQ ID NO: 917114
ggccguuugccuccgauaa

SEQ ID NO: 1209783 - RNA, 19 nt, Artificial Sequence
  Description of Artificial Sequence: Synthetic oligonucleotide
  Antisense strand to SEQ ID NO: 1209782
uuaucggaggcaaacggcc

SEQ ID NO: 1209784 - RNA, 19 nt, Artificial Sequence
  Description of Artificial Sequence: Synthetic oligonucleotide
  Sense strand starting at position 3957 of SEQ ID NO: 917115
guuugccuccgauaaggga

SEQ ID NO: 1209785 - RNA, 19 nt, Artificial Sequence
  Description of Artificial Sequence: Synthetic oligonucleotide
  Antisense strand to SEQ ID NO: 1209784
ucccuuaucggaggcaaac

SEQ ID NO: 1209786 - RNA, 19 nt, Artificial Sequence
  Description of Artificial Sequence: Synthetic oligonucleotide
  Sense strand starting at position 217 of SEQ ID NO: 917115
guguguauggcgucuacau

SEQ ID NO: 1209787 - RNA, 19 nt, Artificial Sequence
  Description of Artificial Sequence: Synthetic oligonucleotide
  Antisense strand to SEQ ID NO: 1209786
auguagacgccauacacac

SEQ ID NO: 1209788 - RNA, 19 nt, Artificial Sequence
  Description of Artificial Sequence: Synthetic oligonucleotide
  Sense strand starting at position 248 of SEQ ID NO: 917115
gugugcauggcgucuacau

SEQ ID NO: 1209789 - RNA, 19 nt, Artificial Sequence
  Description of Artificial Sequence: Synthetic oligonucleotide
  Antisense strand to SEQ ID NO: 1209788
auguagacgccaugcacac

SEQ ID NO: 1209790 - RNA, 19 nt, Artificial Sequence
  Description of Artificial Sequence: Synthetic oligonucleotide
  Sense strand starting at position 311 of SEQ ID NO: 917115
uguguauggugucuacaug

SEQ ID NO: 1209791 - RNA, 19 nt, Artificial Sequence
  Description of Artificial Sequence: Synthetic oligonucleotide
  Antisense strand to SEQ ID NO: 1209790
cauguagacaccauacaca

SEQ ID NO: 1209792 - RNA, 19 nt, Artificial Sequence
  Description of Artificial Sequence: Synthetic oligonucleotide
  Sense strand starting at position 432 of SEQ ID NO: 917115
uguguauggugucuacaca

SEQ ID NO: 1209793 - RNA, 19 nt, Artificial Sequence
  Description of Artificial Sequence: Synthetic oligonucleotide
  Antisense strand to SEQ ID NO: 1209792
uguguagacaccauacaca

SEQ ID NO: 1209794 - RNA, 19 nt, Artificial Sequence
  Description of Artificial Sequence: Synthetic oligonucleotide
  Sense strand starting at position 450 of SEQ ID NO: 917115
acauguugucugcacacau

SEQ ID NO: 1209795 - RNA, 19 nt, Artificial Sequence
  Description of Artificial Sequence: Synthetic oligonucleotide
  Antisense strand to SEQ ID NO: 1209794
augugugcagacaacaugu

SEQ ID NO: 1209796 - RNA, 19 nt, Artificial Sequence
  Description of Artificial Sequence: Synthetic oligonucleotide
  Sense strand starting at position 469 of SEQ ID NO: 917115
gguguugugugcaugcaca

SEQ ID NO: 1209797 - RNA, 19 nt, Artificial Sequence
  Description of Artificial Sequence: Synthetic oligonucleotide
  Antisense strand to SEQ ID NO: 1209796
ugugcaugcacacaacacc

SEQ ID NO: 1209798 - RNA, 19 nt, Artificial Sequence
  Description of Artificial Sequence: Synthetic oligonucleotide
  Sense strand starting at position 541 of SEQ ID NO: 917115
gagagaauguggcaagacu

SEQ ID NO: 1209799 - RNA, 19 nt, Artificial Sequence
  Description of Artificial Sequence: Synthetic oligonucleotide
  Antisense strand to SEQ ID NO: 1209798
agucuugccacauucucuc

SEQ ID NO: 1209800 - RNA, 19 nt, Artificial Sequence
  Description of Artificial Sequence: Synthetic oligonucleotide
  Sense strand starting at position 552 of SEQ ID NO: 917115
gcaagacugugguuuggga

SEQ ID NO: 1209801 - RNA, 19 nt, Artificial Sequence
  Description of Artificial Sequence: Synthetic oligonucleotide
  Antisense strand to SEQ ID NO: 1209800
ucccaaaccacagucuugc

SEQ ID NO: 1209802 - RNA, 19 nt, Artificial Sequence
  Description of Artificial Sequence: Synthetic oligonucleotide
  Sense strand starting at position 554 of SEQ ID NO: 917115
aagacugugguuugggaga

SEQ ID NO: 1209803 - RNA, 19 nt, Artificial Sequence
  Description of Artificial Sequence: Synthetic oligonucleotide
  Antisense strand to SEQ ID NO: 1209802
ucucccaaaccacagucuu

SEQ ID NO: 1209804 - RNA, 19 nt, Artificial Sequence
  Description of Artificial Sequence: Synthetic oligonucleotide
  Sense strand starting at position 608 of SEQ ID NO: 917115
gcugcauuccugcaggaau

SEQ ID NO: 1209805 - RNA, 19 nt, Artificial Sequence
  Description of Artificial Sequence: Synthetic oligonucleotide
  Antisense strand to SEQ ID NO: 1209804
auuccugcaggaaugcagc

SEQ ID NO: 1209806 - RNA, 19 nt, Artificial Sequence
  Description of Artificial Sequence: Synthetic oligonucleotide
  Sense strand starting at position 610 of SEQ ID NO: 917115
ugcauuccugcaggaauua

SEQ ID NO: 1209807 - RNA, 19 nt, Artificial Sequence
  Description of Artificial Sequence: Synthetic oligonucleotide
  Antisense strand to SEQ ID NO: 1209806
uaauuccugcaggaaugca

SEQ ID NO: 1209808 - RNA, 19 nt, Artificial Sequence
  Description of Artificial Sequence: Synthetic oligonucleotide
  Sense strand starting at position 611 of SEQ ID NO: 917115
gcauuccugcaggaauuaa

SEQ ID NO: 1209809 - RNA, 19 nt, Artificial Sequence
  Description of Artificial Sequence: Synthetic oligonucleotide
  Antisense strand to SEQ ID NO: 1209808
uuaauuccugcaggaaugc

SEQ ID NO: 1209810 - RNA, 19 nt, Artificial Sequence
  Description of Artificial Sequence: Synthetic oligonucleotide
  Sense strand starting at position 684 of SEQ ID NO: 917115
uguccaggcugugucuaaa

SEQ ID NO: 1209811 - RNA, 19 nt, Artificial Sequence
  Description of Artificial Sequence: Synthetic oligonucleotide
  Antisense strand to SEQ ID NO: 1209810
uuuagacacagccuggaca

SEQ ID NO: 1209812 - RNA, 19 nt, Artificial Sequence
  Description of Artificial Sequence: Synthetic oligonucleotide
  Sense strand starting at position 758 of SEQ ID NO: 917115
caacucaguccuggguuaa

SEQ ID NO: 1209813 - RNA, 19 nt, Artificial Sequence
  Description of Artificial Sequence: Synthetic oligonucleotide
  Antisense strand to SEQ ID NO: 1209812
uuaacccaggacugaguug

SEQ ID NO: 1209814 - RNA, 19 nt, Artificial Sequence
  Description of Artificial Sequence: Synthetic oligonucleotide
  Sense strand starting at position 759 of SEQ ID NO: 917115
aacucaguccuggguuaac

SEQ ID NO: 1209815 - RNA, 19 nt, Artificial Sequence
  Description of Artificial Sequence: Synthetic oligonucleotide
  Antisense strand to SEQ ID NO: 1209814
guuaacccaggacugaguu

SEQ ID NO: 1209816 - RNA, 19 nt, Artificial Sequence
  Description of Artificial Sequence: Synthetic oligonucleotide
  Sense strand starting at position 831 of SEQ ID NO: 917115
acaugaaaugucuguauuc

SEQ ID NO: 1209817 - RNA, 19 nt, Artificial Sequence
  Description of Artificial Sequence: Synthetic oligonucleotide
  Antisense strand to SEQ ID NO: 1209816
gaauacagacauuucaugu

SEQ ID NO: 1209818 - RNA, 19 nt, Artificial Sequence
  Description of Artificial Sequence: Synthetic oligonucleotide
  Sense strand starting at position 979 of SEQ ID NO: 917115
gggucucuuuccuuuggga

SEQ ID NO: 1209819 - RNA, 19 nt, Artificial Sequence
  Description of Artificial Sequence: Synthetic oligonucleotide
  Antisense strand to SEQ ID NO: 1209818
ucccaaaggaaagagaccc

SEQ ID NO: 1209820 - RNA, 19 nt, Artificial Sequence
  Description of Artificial Sequence: Synthetic oligonucleotide
  Sense strand starting at position 981 of SEQ ID NO: 917115
gucucuuuccuuugggaca

SEQ ID NO: 1209821 - RNA, 19 nt, Artificial Sequence
  Description of Artificial Sequence: Synthetic oligonucleotide
  Antisense strand to SEQ ID NO: 1209820
ugucccaaaggaaagagac

SEQ ID NO: 1209822 - RNA, 19 nt, Artificial Sequence
  Description of Artificial Sequence: Synthetic oligonucleotide
  Sense strand starting at position 1023 of SEQ ID NO: 917115
ccugucuggucuccugaaa

SEQ ID NO: 1209823 - RNA, 19 nt, Artificial Sequence
  Description of Artificial Sequence: Synthetic oligonucleotide
  Antisense strand to SEQ ID NO: 1209822
uuucaggagaccagacagg

SEQ ID NO: 1209824 - RNA, 19 nt, Artificial Sequence
  Description of Artificial Sequence: Synthetic oligonucleotide
  Sense strand starting at position 1566 of SEQ ID NO: 917115
ccugaaguuggcugaguga

SEQ ID NO: 1209825 - RNA, 19 nt, Artificial Sequence
  Description of Artificial Sequence: Synthetic oligonucleotide
  Antisense strand to SEQ ID NO: 1209824
ucacucagccaacuucagg

SEQ ID NO: 1209826 - RNA, 19 nt, Artificial Sequence
  Description of Artificial Sequence: Synthetic oligonucleotide
  Sense strand starting at position 1590 of SEQ ID NO: 917115
agggcagagacaugucaga

SEQ ID NO: 1209827 - RNA, 19 nt, Artificial Sequence
  Description of Artificial Sequence: Synthetic oligonucleotide
  Antisense strand to SEQ ID NO: 1209826
ucugacaugucucugcccu

SEQ ID NO: 1209828 - RNA, 19 nt, Artificial Sequence
  Description of Artificial Sequence: Synthetic oligonucleotide
  Sense strand starting at position 1675 of SEQ ID NO: 917115
cugguugcuccguuuaauc

SEQ ID NO: 1209829 - RNA, 19 nt, Artificial Sequence
  Description of Artificial Sequence: Synthetic oligonucleotide
  Antisense strand to SEQ ID NO: 1209828
gauuaaacggagcaaccag

SEQ ID NO: 1209830 - RNA, 19 nt, Artificial Sequence
  Description of Artificial Sequence: Synthetic oligonucleotide
  Sense strand starting at position 1683 of SEQ ID NO: 917115
uccguuuaauccucuguga

SEQ ID NO: 1209831 - RNA, 19 nt, Artificial Sequence
  Description of Artificial Sequence: Synthetic oligonucleotide
  Antisense strand to SEQ ID NO: 1209830
ucacagaggauuaaacgga

SEQ ID NO: 1209832 - RNA, 19 nt, Artificial Sequence
  Description of Artificial Sequence: Synthetic oligonucleotide
  Sense strand starting at position 1685 of SEQ ID NO: 917115
cguuuaauccucugugacc

SEQ ID NO: 1209833 - RNA, 19 nt, Artificial Sequence
  Description of Artificial Sequence: Synthetic oligonucleotide
  Antisense strand to SEQ ID NO: 1209832
ggucacagaggauuaaacg

SEQ ID NO: 1209834 - RNA, 19 nt, Artificial Sequence
  Description of Artificial Sequence: Synthetic oligonucleotide
  Sense strand starting at position 1686 of SEQ ID NO: 917115
guuuaauccucugugaccu

SEQ ID NO: 1209835 - RNA, 19 nt, Artificial Sequence
  Description of Artificial Sequence: Synthetic oligonucleotide
  Antisense strand to SEQ ID NO: 1209834
aggucacagaggauuaaac

SEQ ID NO: 1209836 - RNA, 19 nt, Artificial Sequence
  Description of Artificial Sequence: Synthetic oligonucleotide
  Sense strand starting at position 1869 of SEQ ID NO: 917115
ugccaagugacuuggugau

SEQ ID NO: 1209837 - RNA, 19 nt, Artificial Sequence
  Description of Artificial Sequence: Synthetic oligonucleotide
  Antisense strand to SEQ ID NO: 1209836
aucaccaagucacuuggca

SEQ ID NO: 1209838 - RNA, 19 nt, Artificial Sequence
  Description of Artificial Sequence: Synthetic oligonucleotide
  Sense strand starting at position 1871 of SEQ ID NO: 917115
ccaagugacuuggugauaa

SEQ ID NO: 1209839 - RNA, 19 nt, Artificial Sequence
  Description of Artificial Sequence: Synthetic oligonucleotide
  Antisense strand to SEQ ID NO: 1209838
uuaucaccaagucacuugg

SEQ ID NO: 1209840 - RNA, 19 nt, Artificial Sequence
  Description of Artificial Sequence: Synthetic oligonucleotide
  Sense strand starting at position 1883 of SEQ ID NO: 917115
gugauaaugcgcuggcaac

SEQ ID NO: 1209841 - RNA, 19 nt, Artificial Sequence
  Description of Artificial Sequence: Synthetic oligonucleotide
  Antisense strand to SEQ ID NO: 1209840
guugccagcgcauuaucac

SEQ ID NO: 1209842 - RNA, 19 nt, Artificial Sequence
  Description of Artificial Sequence: Synthetic oligonucleotide
  Sense strand starting at position 1884 of SEQ ID NO: 917115
ugauaaugcgcuggcaaca

SEQ ID NO: 1209843 - RNA, 19 nt, Artificial Sequence
  Description of Artificial Sequence: Synthetic oligonucleotide
  Antisense strand to SEQ ID NO: 1209842
uguugccagcgcauuauca

SEQ ID NO: 1209844 - RNA, 19 nt, Artificial Sequence
  Description of Artificial Sequence: Synthetic oligonucleotide
  Sense strand starting at position 2522 of SEQ ID NO: 917115
caggguuugccagaccaca

SEQ ID NO: 1209845 - RNA, 19 nt, Artificial Sequence
  Description of Artificial Sequence: Synthetic oligonucleotide
  Antisense strand to SEQ ID NO: 1209844
uguggucuggcaaacccug

SEQ ID NO: 1209846 - RNA, 19 nt, Artificial Sequence
  Description of Artificial Sequence: Synthetic oligonucleotide
  Sense strand starting at position 2619 of SEQ ID NO: 917115
gucugccugucuuuggaaa

SEQ ID NO: 1209847 - RNA, 19 nt, Artificial Sequence
  Description of Artificial Sequence: Synthetic oligonucleotide
  Antisense strand to SEQ ID NO: 1209846
uuuccaaagacaggcagac

SEQ ID NO: 1209848 - RNA, 19 nt, Artificial Sequence
  Description of Artificial Sequence: Synthetic oligonucleotide
  Sense strand starting at position 2794 of SEQ ID NO: 917115
gccugaaccucucuguaug

SEQ ID NO: 1209849 - RNA, 19 nt, Artificial Sequence
  Description of Artificial Sequence: Synthetic oligonucleotide
  Antisense strand to SEQ ID NO: 1209848
cauacagagagguucaggc

SEQ ID NO: 1209850 - RNA, 19 nt, Artificial Sequence
  Description of Artificial Sequence: Synthetic oligonucleotide
  Sense strand starting at position 2866 of SEQ ID NO: 917115
ggagcauguguggaggaua

SEQ ID NO: 1209851 - RNA, 19 nt, Artificial Sequence
  Description of Artificial Sequence: Synthetic oligonucleotide
  Antisense strand to SEQ ID NO: 1209850
uauccuccacacaugcucc

SEQ ID NO: 1209852 - RNA, 19 nt, Artificial Sequence
  Description of Artificial Sequence: Synthetic oligonucleotide
  Sense strand starting at position 2869 of SEQ ID NO: 917115
gcauguguggaggauaaca

SEQ ID NO: 1209853 - RNA, 19 nt, Artificial Sequence
  Description of Artificial Sequence: Synthetic oligonucleotide
  Antisense strand to SEQ ID NO: 1209852
uguuauccuccacacaugc

SEQ ID NO: 1209854 - RNA, 19 nt, Artificial Sequence
  Description of Artificial Sequence: Synthetic oligonucleotide
  Sense strand starting at position 2980 of SEQ ID NO: 917115
uuccuaggcugaucuagaa

SEQ ID NO: 1209855 - RNA, 19 nt, Artificial Sequence
  Description of Artificial Sequence: Synthetic oligonucleotide
  Antisense strand to SEQ ID NO: 1209854
uucuagaucagccuaggaa

SEQ ID NO: 1209856 - RNA, 19 nt, Artificial Sequence
  Description of Artificial Sequence: Synthetic oligonucleotide
  Sense strand starting at position 3152 of SEQ ID NO: 917115
aagugaaauuucgacuuug

SEQ ID NO: 1209857 - RNA, 19 nt, Artificial Sequence
  Description of Artificial Sequence: Synthetic oligonucleotide
  Antisense strand to SEQ ID NO: 1209856
caaagucgaaauuucacuu

SEQ ID NO: 1209858 - RNA, 19 nt, Artificial Sequence
  Description of Artificial Sequence: Synthetic oligonucleotide
  Sense strand starting at position 3424 of SEQ ID NO: 917115
ggguaaagaaugcgaguca

SEQ ID NO: 1209859 - RNA, 19 nt, Artificial Sequence
  Description of Artificial Sequence: Synthetic oligonucleotide
  Antisense strand to SEQ ID NO: 1209858
ugacucgcauucuuuaccc

SEQ ID NO: 1209860 - RNA, 19 nt, Artificial Sequence
  Description of Artificial Sequence: Synthetic oligonucleotide
  Sense strand starting at position 3435 of SEQ ID NO: 917115
gcgagucaccuccaauggu

SEQ ID NO: 1209861 - RNA, 19 nt, Artificial Sequence
  Description of Artificial Sequence: Synthetic oligonucleotide
  Antisense strand to SEQ ID NO: 1209860
accauuggaggugacucgc

SEQ ID NO: 1209862 - RNA, 19 nt, Artificial Sequence
  Description of Artificial Sequence: Synthetic oligonucleotide
  Sense strand starting at position 3574 of SEQ ID NO: 917115
agggacuauuaguacugau

SEQ ID NO: 1209863 - RNA, 19 nt, Artificial Sequence
  Description of Artificial Sequence: Synthetic oligonucleotide
  Antisense strand to SEQ ID NO: 1209862
aucaguacuaauagucccu

SEQ ID NO: 1209864 - RNA, 19 nt, Artificial Sequence
  Description of Artificial Sequence: Synthetic oligonucleotide
  Sense strand starting at position 3773 of SEQ ID NO: 917116
agagcagucuucucuaaac

SEQ ID NO: 1209865 - RNA, 19 nt, Artificial Sequence
  Description of Artificial Sequence: Synthetic oligonucleotide
  Antisense strand to SEQ ID NO: 1209864
guuuagagaagacugcucu

SEQ ID NO: 1209866 - RNA, 19 nt, Artificial Sequence
  Description of Artificial Sequence: Synthetic oligonucleotide
  Sense strand starting at position 64 of SEQ ID NO: 917116
guuugaaacccuugccaaa

SEQ ID NO: 1209867 - RNA, 19 nt, Artificial Sequence
  Description of Artificial Sequence: Synthetic oligonucleotide
  Antisense strand to SEQ ID NO: 1209866
uuuggcaaggguuucaaac

SEQ ID NO: 1209868 - RNA, 19 nt, Artificial Sequence
  Description of Artificial Sequence: Synthetic oligonucleotide
  Sense strand starting at position 417 of SEQ ID NO: 917116
cuagacuuaucccuggagu

SEQ ID NO: 1209869 - RNA, 19 nt, Artificial Sequence
  Description of Artificial Sequence: Synthetic oligonucleotide
  Antisense strand to SEQ ID NO: 1209868
acuccagggauaagucuag

SEQ ID NO: 1209870 - RNA, 19 nt, Artificial Sequence
  Description of Artificial Sequence: Synthetic oligonucleotide
  Sense strand starting at position 418 of SEQ ID NO: 917116
uagacuuaucccuggaguu

SEQ ID NO: 1209871 - RNA, 19 nt, Artificial Sequence
  Description of Artificial Sequence: Synthetic oligonucleotide
  Antisense strand to SEQ ID NO: 1209870
aacuccagggauaagucua

SEQ ID NO: 1209872 - RNA, 19 nt, Artificial Sequence
  Description of Artificial Sequence: Synthetic oligonucleotide
  Sense strand starting at position 419 of SEQ ID NO: 917116
agacuuaucccuggaguuc

SEQ ID NO: 1209873 - RNA, 19 nt, Artificial Sequence
  Description of Artificial Sequence: Synthetic oligonucleotide
  Antisense strand to SEQ ID NO: 1209872
gaacuccagggauaagucu

SEQ ID NO: 1209874 - RNA, 19 nt, Artificial Sequence
  Description of Artificial Sequence: Synthetic oligonucleotide
  Sense strand starting at position 540 of SEQ ID NO: 917116
cugcuaggcccuuaucaau

SEQ ID NO: 1209875 - RNA, 19 nt, Artificial Sequence
  Description of Artificial Sequence: Synthetic oligonucleotide
  Antisense strand to SEQ ID NO: 1209874
auugauaagggccuagcag

SEQ ID NO: 1209876 - RNA, 19 nt, Artificial Sequence
  Description of Artificial Sequence: Synthetic oligonucleotide
  Sense strand starting at position 551 of SEQ ID NO: 917116
uuaucaauauugucgauac

SEQ ID NO: 1209877 - RNA, 19 nt, Artificial Sequence
  Description of Artificial Sequence: Synthetic oligonucleotide
  Antisense strand to SEQ ID NO: 1209876
guaucgacaauauugauaa

SEQ ID NO: 1209878 - RNA, 19 nt, Artificial Sequence
  Description of Artificial Sequence: Synthetic oligonucleotide
  Sense strand starting at position 555 of SEQ ID NO: 917116
caauauugucgauacugca

SEQ ID NO: 1209879 - RNA, 19 nt, Artificial Sequence
  Description of Artificial Sequence: Synthetic oligonucleotide
  Antisense strand to SEQ ID NO: 1209878
ugcaguaucgacaauauug

SEQ ID NO: 1209880 - RNA, 19 nt, Artificial Sequence
  Description of Artificial Sequence: Synthetic oligonucleotide
  Sense strand starting at position 572 of SEQ ID NO: 917116
caguuauguggguacauac

SEQ ID NO: 1209881 - RNA, 19 nt, Artificial Sequence
  Description of Artificial Sequence: Synthetic oligonucleotide
  Antisense strand to SEQ ID NO: 1209880
guauguacccacauaacug

SEQ ID NO: 1209882 - RNA, 19 nt, Artificial Sequence
  Description of Artificial Sequence: Synthetic oligonucleotide
  Sense strand starting at position 664 of SEQ ID NO: 917116
cuguuacagcuacaauagu

SEQ ID NO: 1209883 - RNA, 19 nt, Artificial Sequence
  Description of Artificial Sequence: Synthetic oligonucleotide
  Antisense strand to SEQ ID NO: 1209882
acuauuguagcuguaacag

SEQ ID NO: 1209884 - RNA, 19 nt, Artificial Sequence
  Description of Artificial Sequence: Synthetic oligonucleotide
  Sense strand starting at position 879 of SEQ ID NO: 917116
auaucugugcauuacugau

SEQ ID NO: 1209885 - RNA, 19 nt, Artificial Sequence
  Description of Artificial Sequence: Synthetic oligonucleotide
  Antisense strand to SEQ ID NO: 1209884
aucaguaaugcacagauau

SEQ ID NO: 1209886 - RNA, 19 nt, Artificial Sequence
  Description of Artificial Sequence: Synthetic oligonucleotide
  Sense strand starting at position 1061 of SEQ ID NO: 917116
uaaagcuauuagguaugua

SEQ ID NO: 1209887 - RNA, 19 nt, Artificial Sequence
  Description of Artificial Sequence: Synthetic oligonucleotide
  Antisense strand to SEQ ID NO: 1209886
uacauaccuaauagcuuua

SEQ ID NO: 1209888 - RNA, 19 nt, Artificial Sequence
  Description of Artificial Sequence: Synthetic oligonucleotide
  Sense strand starting at position 1277 of SEQ ID NO: 917116
agcuuagaugccuggauua

SEQ ID NO: 1209889 - RNA, 19 nt, Artificial Sequence
  Description of Artificial Sequence: Synthetic oligonucleotide
  Antisense strand to SEQ ID NO: 1209888
uaauccaggcaucuaagcu

SEQ ID NO: 1209890 - RNA, 19 nt, Artificial Sequence
  Description of Artificial Sequence: Synthetic oligonucleotide
  Sense strand starting at position 1279 of SEQ ID NO: 917116
cuuagaugccuggauuaac

SEQ ID NO: 1209891 - RNA, 19 nt, Artificial Sequence
  Description of Artificial Sequence: Synthetic oligonucleotide
  Antisense strand to SEQ ID NO: 1209890
guuaauccaggcaucuaag

SEQ ID NO: 1209892 - RNA, 19 nt, Artificial Sequence
  Description of Artificial Sequence: Synthetic oligonucleotide
  Sense strand starting at position 1288 of SEQ ID NO: 917116
cuggauuaacagcaguaua

SEQ ID NO: 1209893 - RNA, 19 nt, Artificial Sequence
  Description of Artificial Sequence: Synthetic oligonucleotide
  Antisense strand to SEQ ID NO: 1209892
uauacugcuguuaauccag

SEQ ID NO: 1209894 - RNA, 19 nt, Artificial Sequence
  Description of Artificial Sequence: Synthetic oligonucleotide
  Sense strand starting at position 1359 of SEQ ID NO: 917116
gagaguauuugacagcaaa

SEQ ID NO: 1209895 - RNA, 19 nt, Artificial Sequence
  Description of Artificial Sequence: Synthetic oligonucleotide
  Antisense strand to SEQ ID NO: 1209894
uuugcugucaaauacucuc

SEQ ID NO: 1209896 - RNA, 19 nt, Artificial Sequence
  Description of Artificial Sequence: Synthetic oligonucleotide
  Sense strand starting at position 1414 of SEQ ID NO: 917116
uuccguuuacaagaucuga

SEQ ID NO: 1209897 - RNA, 19 nt, Artificial Sequence
  Description of Artificial Sequence: Synthetic oligonucleotide
  Antisense strand to SEQ ID NO: 1209896
ucagaucuuguaaacggaa

SEQ ID NO: 1209898 - RNA, 19 nt, Artificial Sequence
  Description of Artificial Sequence: Synthetic oligonucleotide
  Sense strand starting at position 1470 of SEQ ID NO: 917116
gaaggaugcuguucgggaa

SEQ ID NO: 1209899 - RNA, 19 nt, Artificial Sequence
  Description of Artificial Sequence: Synthetic oligonucleotide
  Antisense strand to SEQ ID NO: 1209898
uucccgaacagcauccuuc

SEQ ID NO: 1209900 - RNA, 19 nt, Artificial Sequence
  Description of Artificial Sequence: Synthetic oligonucleotide
  Sense strand starting at position 1474 of SEQ ID NO: 917116
gaugcuguucgggaacaaa

SEQ ID NO: 1209901 - RNA, 19 nt, Artificial Sequence
  Description of Artificial Sequence: Synthetic oligonucleotide
  Antisense strand to SEQ ID NO: 1209900
uuuguucccgaacagcauc

SEQ ID NO: 1209902 - RNA, 19 nt, Artificial Sequence
  Description of Artificial Sequence: Synthetic oligonucleotide
  Sense strand starting at position 1515 of SEQ ID NO: 917116
gcaaauguuccugugcgca

SEQ ID NO: 1209903 - RNA, 19 nt, Artificial Sequence
  Description of Artificial Sequence: Synthetic oligonucleotide
  Antisense strand to SEQ ID NO: 1209902
ugcgcacaggaacauuugc

SEQ ID NO: 1209904 - RNA, 19 nt, Artificial Sequence
  Description of Artificial Sequence: Synthetic oligonucleotide
  Sense strand starting at position 1602 of SEQ ID NO: 917116
auggaaacagccugucauu

SEQ ID NO: 1209905 - RNA, 19 nt, Artificial Sequence
  Description of Artificial Sequence: Synthetic oligonucleotide
  Antisense strand to SEQ ID NO: 1209904
aaugacaggcuguuuccau

SEQ ID NO: 1209906 - RNA, 19 nt, Artificial Sequence
  Description of Artificial Sequence: Synthetic oligonucleotide
  Sense strand starting at position 2471 of SEQ ID NO: 917116
uggcuugcuccgcagauuu

SEQ ID NO: 1209907 - RNA, 19 nt, Artificial Sequence
  Description of Artificial Sequence: Synthetic oligonucleotide
  Antisense strand to SEQ ID NO: 1209906
aaaucugcggagcaagcca

SEQ ID NO: 1209908 - RNA, 19 nt, Artificial Sequence
  Description of Artificial Sequence: Synthetic oligonucleotide
  Sense strand starting at position 2812 of SEQ ID NO: 917116
aagcuuuggucacugggaa

SEQ ID NO: 1209909 - RNA, 19 nt, Artificial Sequence
  Description of Artificial Sequence: Synthetic oligonucleotide
  Antisense strand to SEQ ID NO: 1209908
uucccagugaccaaagcuu

SEQ ID NO: 1209910 - RNA, 19 nt, Artificial Sequence
  Description of Artificial Sequence: Synthetic oligonucleotide
  Sense strand starting at position 2849 of SEQ ID NO: 917116
agcuguuauggugauuauu

SEQ ID NO: 1209911 - RNA, 19 nt, Artificial Sequence
  Description of Artificial Sequence: Synthetic oligonucleotide
  Antisense strand to SEQ ID NO: 1209910
aauaaucaccauaacagcu

SEQ ID NO: 1209912 - RNA, 19 nt, Artificial Sequence
  Description of Artificial Sequence: Synthetic oligonucleotide
  Sense strand starting at position 2937 of SEQ ID NO: 917116
aguggaaacaccuggcaau

SEQ ID NO: 1209913 - RNA, 19 nt, Artificial Sequence
  Description of Artificial Sequence: Synthetic oligonucleotide
  Antisense strand to SEQ ID NO: 1209912
auugccagguguuuccacu

SEQ ID NO: 1209914 - RNA, 19 nt, Artificial Sequence
  Description of Artificial Sequence: Synthetic oligonucleotide
  Sense strand starting at position 2938 of SEQ ID NO: 917116
guggaaacaccuggcaaua

SEQ ID NO: 1209915 - RNA, 19 nt, Artificial Sequence
  Description of Artificial Sequence: Synthetic oligonucleotide
  Antisense strand to SEQ ID NO: 1209914
uauugccagguguuuccac

SEQ ID NO: 1209916 - RNA, 19 nt, Artificial Sequence
  Description of Artificial Sequence: Synthetic oligonucleotide
  Sense strand starting at position 3032 of SEQ ID NO: 917116
gggugcauucguuuguuca

SEQ ID NO: 1209917 - RNA, 19 nt, Artificial Sequence
  Description of Artificial Sequence: Synthetic oligonucleotide
  Antisense strand to SEQ ID NO: 1209916
ugaacaaacgaaugcaccc

SEQ ID NO: 1209918 - RNA, 19 nt, Artificial Sequence
  Description of Artificial Sequence: Synthetic oligonucleotide
  Sense strand starting at position 3075 of SEQ ID NO: 917116
cuaggcuguugauugaaca

SEQ ID NO: 1209919 - RNA, 19 nt, Artificial Sequence
  Description of Artificial Sequence: Synthetic oligonucleotide
  Antisense strand to SEQ ID NO: 1209918
uguucaaucaacagccuag

SEQ ID NO: 1209920 - RNA, 19 nt, Artificial Sequence
  Description of Artificial Sequence: Synthetic oligonucleotide
  Sense strand starting at position 3076 of SEQ ID NO: 917116
uaggcuguugauugaacaa

SEQ ID NO: 1209921 - RNA, 19 nt, Artificial Sequence
  Description of Artificial Sequence: Synthetic oligonucleotide
  Antisense strand to SEQ ID NO: 1209920
uuguucaaucaacagccua

SEQ ID NO: 1209922 - RNA, 19 nt, Artificial Sequence
  Description of Artificial Sequence: Synthetic oligonucleotide
  Sense strand starting at position 3103 of SEQ ID NO: 917116
acaaguaguguagauucua

SEQ ID NO: 1209923 - RNA, 19 nt, Artificial Sequence
  Description of Artificial Sequence: Synthetic oligonucleotide
  Antisense strand to SEQ ID NO: 1209922
uagaaucuacacuacuugu

SEQ ID NO: 1209924 - RNA, 19 nt, Artificial Sequence
  Description of Artificial Sequence: Synthetic oligonucleotide
  Sense strand starting at position 3121 of SEQ ID NO: 917116
agggaacuuaucugagggu

SEQ ID NO: 1209925 - RNA, 19 nt, Artificial Sequence
  Description of Artificial Sequence: Synthetic oligonucleotide
  Antisense strand to SEQ ID NO: 1209924
acccucagauaaguucccu

SEQ ID NO: 1209926 - RNA, 19 nt, Artificial Sequence
  Description of Artificial Sequence: Synthetic oligonucleotide
  Sense strand starting at position 3168 of SEQ ID NO: 917116
gcuguaugcaaagaaguua

SEQ ID NO: 1209927 - RNA, 19 nt, Artificial Sequence
  Description of Artificial Sequence: Synthetic oligonucleotide
  Antisense strand to SEQ ID NO: 1209926
uaacuucuuugcauacagc

SEQ ID NO: 1209928 - RNA, 19 nt, Artificial Sequence
  Description of Artificial Sequence: Synthetic oligonucleotide
  Sense strand starting at position 3391 of SEQ ID NO: 917116
cuuucuugagccuggagau

SEQ ID NO: 1209929 - RNA, 19 nt, Artificial Sequence
  Description of Artificial Sequence: Synthetic oligonucleotide
  Antisense strand to SEQ ID NO: 1209928
aucuccaggcucaagaaag

SEQ ID NO: 1209930 - RNA, 19 nt, Artificial Sequence
  Description of Artificial Sequence: Synthetic oligonucleotide
  Sense strand starting at position 3499 of SEQ ID NO: 917116
gccgauuucggucaggagu

SEQ ID NO: 1209931 - RNA, 19 nt, Artificial Sequence
  Description of Artificial Sequence: Synthetic oligonucleotide
  Antisense strand to SEQ ID NO: 1209930
acuccugaccgaaaucggc

SEQ ID NO: 1209932 - RNA, 19 nt, Artificial Sequence
  Description of Artificial Sequence: Synthetic oligonucleotide
  Sense strand starting at position 3567 of SEQ ID NO: 917116
uauuguagacuuggaaugu

SEQ ID NO: 1209933 - RNA, 19 nt, Artificial Sequence
  Description of Artificial Sequence: Synthetic oligonucleotide
  Antisense strand to SEQ ID NO: 1209932
acauuccaagucuacaaua

SEQ ID NO: 1209934 - RNA, 19 nt, Artificial Sequence
  Description of Artificial Sequence: Synthetic oligonucleotide
  Sense strand starting at position 3579 of SEQ ID NO: 917116
ggaauguuucuggguggag

SEQ ID NO: 1209935 - RNA, 19 nt, Artificial Sequence
  Description of Artificial Sequence: Synthetic oligonucleotide
  Antisense strand to SEQ ID NO: 1209934
cuccacccagaaacauucc

SEQ ID NO: 1209936 - RNA, 19 nt, Artificial Sequence
  Description of Artificial Sequence: Synthetic oligonucleotide
  Sense strand starting at position 3641 of SEQ ID NO: 917116
aggcauauuucugaucaga

SEQ ID NO: 1209937 - RNA, 19 nt, Artificial Sequence
  Description of Artificial Sequence: Synthetic oligonucleotide
  Antisense strand to SEQ ID NO: 1209936
ucugaucagaaauaugccu

SEQ ID NO: 1209938 - RNA, 19 nt, Artificial Sequence
  Description of Artificial Sequence: Synthetic oligonucleotide
  Sense strand starting at position 3681 of SEQ ID NO: 917116
gaaaguuucuggucagaag

SEQ ID NO: 1209939 - RNA, 19 nt, Artificial Sequence
  Description of Artificial Sequence: Synthetic oligonucleotide
  Antisense strand to SEQ ID NO: 1209938
cuucugaccagaaacuuuc

SEQ ID NO: 1209940 - RNA, 19 nt, Artificial Sequence
  Description of Artificial Sequence: Synthetic oligonucleotide
  Sense strand starting at position 3682 of SEQ ID NO: 917116
aaaguuucuggucagaagu

SEQ ID NO: 1209941 - RNA, 19 nt, Artificial Sequence
  Description of Artificial Sequence: Synthetic oligonucleotide
  Antisense strand to SEQ ID NO: 1209940
acuucugaccagaaacuuu

SEQ ID NO: 1209942 - RNA, 19 nt, Artificial Sequence
  Description of Artificial Sequence: Synthetic oligonucleotide
  Sense strand starting at position 3695 of SEQ ID NO: 917116
agaaguguuauuugugguu

SEQ ID NO: 1209943 - RNA, 19 nt, Artificial Sequence
  Description of Artificial Sequence: Synthetic oligonucleotide
  Antisense strand to SEQ ID NO: 1209942
aaccacaaauaacacuucu

SEQ ID NO: 1209944 - RNA, 19 nt, Artificial Sequence
  Description of Artificial Sequence: Synthetic oligonucleotide
  Sense strand starting at position 3863 of SEQ ID NO: 917117
ggcuuuguuagccaagaaa

SEQ ID NO: 1209945 - RNA, 19 nt, Artificial Sequence
  Description of Artificial Sequence: Synthetic oligonucleotide
  Antisense strand to SEQ ID NO: 1209944
uuucuuggcuaacaaagcc

SEQ ID NO: 1209946 - RNA, 19 nt, Artificial Sequence
  Description of Artificial Sequence: Synthetic oligonucleotide
  Sense strand starting at position 139 of SEQ ID NO: 917117
cuggcuuaacgugaaacca

SEQ ID NO: 1209947 - RNA, 19 nt, Artificial Sequence
  Description of Artificial Sequence: Synthetic oligonucleotide
  Antisense strand to SEQ ID NO: 1209946
ugguuucacguuaagccag

SEQ ID NO: 1209948 - RNA, 19 nt, Artificial Sequence
  Description of Artificial Sequence: Synthetic oligonucleotide
  Sense strand starting at position 236 of SEQ ID NO: 917117
ggcuaacuuagacauguag

SEQ ID NO: 1209949 - RNA, 19 nt, Artificial Sequence
  Description of Artificial Sequence: Synthetic oligonucleotide
  Antisense strand to SEQ ID NO: 1209948
cuacaugucuaaguuagcc

SEQ ID NO: 1209950 - RNA, 19 nt, Artificial Sequence
  Description of Artificial Sequence: Synthetic oligonucleotide
  Sense strand starting at position 694 of SEQ ID NO: 917117
aggacaguuugcuuucuca

SEQ ID NO: 1209951 - RNA, 19 nt, Artificial Sequence
  Description of Artificial Sequence: Synthetic oligonucleotide
  Antisense strand to SEQ ID NO: 1209950
ugagaaagcaaacuguccu

SEQ ID NO: 1209952 - RNA, 19 nt, Artificial Sequence
  Description of Artificial Sequence: Synthetic oligonucleotide
  Sense strand starting at position 742 of SEQ ID NO: 917117
gcagcugacccauauaaug

SEQ ID NO: 1209953 - RNA, 19 nt, Artificial Sequence
  Description of Artificial Sequence: Synthetic oligonucleotide
  Antisense strand to SEQ ID NO: 1209952
cauuauaugggucagcugc

SEQ ID NO: 1209954 - RNA, 19 nt, Artificial Sequence
  Description of Artificial Sequence: Synthetic oligonucleotide
  Sense strand starting at position 784 of SEQ ID NO: 917117
ucaaauaauuuagguggga

SEQ ID NO: 1209955 - RNA, 19 nt, Artificial Sequence
  Description of Artificial Sequence: Synthetic oligonucleotide
  Antisense strand to SEQ ID NO: 1209954
ucccaccuaaauuauuuga

SEQ ID NO: 1209956 - RNA, 19 nt, Artificial Sequence
  Description of Artificial Sequence: Synthetic oligonucleotide
  Sense strand starting at position 855 of SEQ ID NO: 917117
gcugcauaauaacuaaagu

SEQ ID NO: 1209957 - RNA, 19 nt, Artificial Sequence
  Description of Artificial Sequence: Synthetic oligonucleotide
  Antisense strand to SEQ ID NO: 1209956
acuuuaguuauuaugcagc

SEQ ID NO: 1209958 - RNA, 19 nt, Artificial Sequence
  Description of Artificial Sequence: Synthetic oligonucleotide
  Sense strand starting at position 871 of SEQ ID NO: 917117
aguuaaaccuguccuuuaa

SEQ ID NO: 1209959 - RNA, 19 nt, Artificial Sequence
  Description of Artificial Sequence: Synthetic oligonucleotide
  Antisense strand to SEQ ID NO: 1209958
uuaaaggacagguuuaacu

SEQ ID NO: 1209960 - RNA, 19 nt, Artificial Sequence
  Description of Artificial Sequence: Synthetic oligonucleotide
  Sense strand starting at position 873 of SEQ ID NO: 917117
uuaaaccuguccuuuaagu

SEQ ID NO: 1209961 - RNA, 19 nt, Artificial Sequence
  Description of Artificial Sequence: Synthetic oligonucleotide
  Antisense strand to SEQ ID NO: 1209960
acuuaaaggacagguuuaa

SEQ ID NO: 1209962 - RNA, 19 nt, Artificial Sequence
  Description of Artificial Sequence: Synthetic oligonucleotide
  Sense strand starting at position 920 of SEQ ID NO: 917117
aauguaaagcacugaggaa

SEQ ID NO: 1209963 - RNA, 19 nt, Artificial Sequence
  Description of Artificial Sequence: Synthetic oligonucleotide
  Antisense strand to SEQ ID NO: 1209962
uuccucagugcuuuacauu

SEQ ID NO: 1209964 - RNA, 19 nt, Artificial Sequence
  Description of Artificial Sequence: Synthetic oligonucleotide
  Sense strand starting at position 933 of SEQ ID NO: 917117
gaggaauauuacguaugac

SEQ ID NO: 1209965 - RNA, 19 nt, Artificial Sequence
  Description of Artificial Sequence: Synthetic oligonucleotide
  Antisense strand to SEQ ID NO: 1209964
gucauacguaauauuccuc

SEQ ID NO: 1209966 - RNA, 19 nt, Artificial Sequence
  Description of Artificial Sequence: Synthetic oligonucleotide
  Sense strand starting at position 936 of SEQ ID NO: 917117
gaauauuacguaugacagg

SEQ ID NO: 1209967 - RNA, 19 nt, Artificial Sequence
  Description of Artificial Sequence: Synthetic oligonucleotide
  Antisense strand to SEQ ID NO: 1209966
ccugucauacguaauauuc

SEQ ID NO: 1209968 - RNA, 19 nt, Artificial Sequence
  Description of Artificial Sequence: Synthetic oligonucleotide
  Sense strand starting at position 941 of SEQ ID NO: 917117
uuacguaugacagggaaga

SEQ ID NO: 1209969 - RNA, 19 nt, Artificial Sequence
  Description of Artificial Sequence: Synthetic oligonucleotide
  Antisense strand to SEQ ID NO: 1209968
ucuucccugucauacguaa

SEQ ID NO: 1209970 - RNA, 19 nt, Artificial Sequence
  Description of Artificial Sequence: Synthetic oligonucleotide
  Sense strand starting at position 1045 of SEQ ID NO: 917117
agaagaaaugccugaacuu

SEQ ID NO: 1209971 - RNA, 19 nt, Artificial Sequence
  Description of Artificial Sequence: Synthetic oligonucleotide
  Antisense strand to SEQ ID NO: 1209970
aaguucaggcauuucuucu

SEQ ID NO: 1209972 - RNA, 19 nt, Artificial Sequence
  Description of Artificial Sequence: Synthetic oligonucleotide
  Sense strand starting at position 1282 of SEQ ID NO: 917117
uggcuaucuccggauggua

SEQ ID NO: 1209973 - RNA, 19 nt, Artificial Sequence
  Description of Artificial Sequence: Synthetic oligonucleotide
  Antisense strand to SEQ ID NO: 1209972
uaccauccggagauagcca

SEQ ID NO: 1209974 - RNA, 19 nt, Artificial Sequence
  Description of Artificial Sequence: Synthetic oligonucleotide
  Sense strand starting at position 1465 of SEQ ID NO: 917117
auuuaagugacguguuaac

SEQ ID NO: 1209975 - RNA, 19 nt, Artificial Sequence
  Description of Artificial Sequence: Synthetic oligonucleotide
  Antisense strand to SEQ ID NO: 1209974
guuaacacgucacuuaaau

SEQ ID NO: 1209976 - RNA, 19 nt, Artificial Sequence
  Description of Artificial Sequence: Synthetic oligonucleotide
  Sense strand starting at position 1508 of SEQ ID NO: 917117
aguagaaacuaagaugaga

SEQ ID NO: 1209977 - RNA, 19 nt, Artificial Sequence
  Description of Artificial Sequence: Synthetic oligonucleotide
  Antisense strand to SEQ ID NO: 1209976
ucucaucuuaguuucuacu

SEQ ID NO: 1209978 - RNA, 19 nt, Artificial Sequence
  Description of Artificial Sequence: Synthetic oligonucleotide
  Sense strand starting at position 1619 of SEQ ID NO: 917117
ugaauaauuuaugacagac

SEQ ID NO: 1209979 - RNA, 19 nt, Artificial Sequence
  Description of Artificial Sequence: Synthetic oligonucleotide
  Antisense strand to SEQ ID NO: 1209978
gucugucauaaauuauuca

SEQ ID NO: 1209980 - RNA, 19 nt, Artificial Sequence
  Description of Artificial Sequence: Synthetic oligonucleotide
  Sense strand starting at position 1635 of SEQ ID NO: 917117
gacuaacuggagugugaaa

SEQ ID NO: 1209981 - RNA, 19 nt, Artificial Sequence
  Description of Artificial Sequence: Synthetic oligonucleotide
  Antisense strand to SEQ ID NO: 1209980
uuucacacuccaguuaguc

SEQ ID NO: 1209982 - RNA, 19 nt, Artificial Sequence
  Description of Artificial Sequence: Synthetic oligonucleotide
  Sense strand starting at position 1791 of SEQ ID NO: 917117
ugcucauuggccugagaaa

SEQ ID NO: 1209983 - RNA, 19 nt, Artificial Sequence
  Description of Artificial Sequence: Synthetic oligonucleotide
  Antisense strand to SEQ ID NO: 1209982
uuucucaggccaaugagca

SEQ ID NO: 1209984 - RNA, 19 nt, Artificial Sequence
  Description of Artificial Sequence: Synthetic oligonucleotide
  Sense strand starting at position 1792 of SEQ ID NO: 917117
gcucauuggccugagaaau

SEQ ID NO: 1209985 - RNA, 19 nt, Artificial Sequence
  Description of Artificial Sequence: Synthetic oligonucleotide
  Antisense strand to SEQ ID NO: 1209984
auuucucaggccaaugagc

SEQ ID NO: 1209986 - RNA, 19 nt, Artificial Sequence
  Description of Artificial Sequence: Synthetic oligonucleotide
  Sense strand starting at position 2062 of SEQ ID NO: 917117
gccaauugugcguuacuau

SEQ ID NO: 1209987 - RNA, 19 nt, Artificial Sequence
  Description of Artificial Sequence: Synthetic oligonucleotide
  Antisense strand to SEQ ID NO: 1209986
auaguaacgcacaauuggc

SEQ ID NO: 1209988 - RNA, 19 nt, Artificial Sequence
  Description of Artificial Sequence: Synthetic oligonucleotide
  Sense strand starting at position 2104 of SEQ ID NO: 917117
cggccuuccagccaauaga

SEQ ID NO: 1209989 - RNA, 19 nt, Artificial Sequence
  Description of Artificial Sequence: Synthetic oligonucleotide
  Antisense strand to SEQ ID NO: 1209988
ucuauuggcuggaaggccg

SEQ ID NO: 1209990 - RNA, 19 nt, Artificial Sequence
  Description of Artificial Sequence: Synthetic oligonucleotide
  Sense strand starting at position 2575 of SEQ ID NO: 917117
gugagaucccaguacagug

SEQ ID NO: 1209991 - RNA, 19 nt, Artificial Sequence
  Description of Artificial Sequence: Synthetic oligonucleotide
  Antisense strand to SEQ ID NO: 1209990
cacuguacugggaucucac

SEQ ID NO: 1209992 - RNA, 19 nt, Artificial Sequence
  Description of Artificial Sequence: Synthetic oligonucleotide
  Sense strand starting at position 2838 of SEQ ID NO: 917117
uugaaucauccgugugaag

SEQ ID NO: 1209993 - RNA, 19 nt, Artificial Sequence
  Description of Artificial Sequence: Synthetic oligonucleotide
  Antisense strand to SEQ ID NO: 1209992
cuucacacggaugauucaa

SEQ ID NO: 1209994 - RNA, 19 nt, Artificial Sequence
  Description of Artificial Sequence: Synthetic oligonucleotide
  Sense strand starting at position 2840 of SEQ ID NO: 917117
gaaucauccgugugaagag

SEQ ID NO: 1209995 - RNA, 19 nt, Artificial Sequence
  Description of Artificial Sequence: Synthetic oligonucleotide
  Antisense strand to SEQ ID NO: 1209994
cucuucacacggaugauuc

SEQ ID NO: 1209996 - RNA, 19 nt, Artificial Sequence
  Description of Artificial Sequence: Synthetic oligonucleotide
  Sense strand starting at position 3006 of SEQ ID NO: 917117
ugcucugagccagaucaga

SEQ ID NO: 1209997 - RNA, 19 nt, Artificial Sequence
  Description of Artificial Sequence: Synthetic oligonucleotide
  Antisense strand to SEQ ID NO: 1209996
ucugaucuggcucagagca

SEQ ID NO: 1209998 - RNA, 19 nt, Artificial Sequence
  Description of Artificial Sequence: Synthetic oligonucleotide
  Sense strand starting at position 3408 of SEQ ID NO: 917117
gaaguuaguuaccuggaga

SEQ ID NO: 1209999 - RNA, 19 nt, Artificial Sequence
  Description of Artificial Sequence: Synthetic oligonucleotide
  Antisense strand to SEQ ID NO: 1209998
ucuccagguaacuaacuuc

SEQ ID NO: 1210000 - RNA, 19 nt, Artificial Sequence
  Description of Artificial Sequence: Synthetic oligonucleotide
  Sense strand starting at position 3411 of SEQ ID NO: 917117
guuaguuaccuggagaagu

SEQ ID NO: 1210001 - RNA, 19 nt, Artificial Sequence
  Description of Artificial Sequence: Synthetic oligonucleotide
  Antisense strand to SEQ ID NO: 1210000
acuucuccagguaacuaac

SEQ ID NO: 1210002 - RNA, 19 nt, Artificial Sequence
  Description of Artificial Sequence: Synthetic oligonucleotide
  Sense strand starting at position 3441 of SEQ ID NO: 917117
uggugcuuggaccagauau

SEQ ID NO: 1210003 - RNA, 19 nt, Artificial Sequence
  Description of Artificial Sequence: Synthetic oligonucleotide
  Antisense strand to SEQ ID NO: 1210002
auaucugguccaagcacca

SEQ ID NO: 1210004 - RNA, 19 nt, Artificial Sequence
  Description of Artificial Sequence: Synthetic oligonucleotide
  Sense strand starting at position 3447 of SEQ ID NO: 917117
uuggaccagauaugguaua

SEQ ID NO: 1210005 - RNA, 19 nt, Artificial Sequence
  Description of Artificial Sequence: Synthetic oligonucleotide
  Antisense strand to SEQ ID NO: 1210004
uauaccauaucugguccaa

SEQ ID NO: 1210006 - RNA, 19 nt, Artificial Sequence
  Description of Artificial Sequence: Synthetic oligonucleotide
  Sense strand starting at position 3464 of SEQ ID NO: 917117
uaucgagguccuggaacuu

SEQ ID NO: 1210007 - RNA, 19 nt, Artificial Sequence
  Description of Artificial Sequence: Synthetic oligonucleotide
  Antisense strand to SEQ ID NO: 1210006
aaguuccaggaccucgaua

SEQ ID NO: 1210008 - RNA, 19 nt, Artificial Sequence
  Description of Artificial Sequence: Synthetic oligonucleotide
  Sense strand starting at position 3674 of SEQ ID NO: 917117
aguugauacagugguuaac

SEQ ID NO: 1210009 - RNA, 19 nt, Artificial Sequence
  Description of Artificial Sequence: Synthetic oligonucleotide
  Antisense strand to SEQ ID NO: 1210008
guuaaccacuguaucaacu

SEQ ID NO: 1210010 - RNA, 19 nt, Artificial Sequence
  Description of Artificial Sequence: Synthetic oligonucleotide
  Sense strand starting at position 3676 of SEQ ID NO: 917117
uugauacagugguuaacaa

SEQ ID NO: 1210011 - RNA, 19 nt, Artificial Sequence
  Description of Artificial Sequence: Synthetic oligonucleotide
  Antisense strand to SEQ ID NO: 1210010
uuguuaaccacuguaucaa

SEQ ID NO: 1210012 - RNA, 19 nt, Artificial Sequence
  Description of Artificial Sequence: Synthetic oligonucleotide
  Sense strand starting at position 3683 of SEQ ID NO: 917117
agugguuaacaagacaugu

SEQ ID NO: 1210013 - RNA, 19 nt, Artificial Sequence
  Description of Artificial Sequence: Synthetic oligonucleotide
  Antisense strand to SEQ ID NO: 1210012
acaugucuuguuaaccacu

SEQ ID NO: 1210014 - RNA, 19 nt, Artificial Sequence
  Description of Artificial Sequence: Synthetic oligonucleotide
  Sense strand starting at position 3741 of SEQ ID NO: 917117
guuucauuuguaugaggug

SEQ ID NO: 1210015 - RNA, 19 nt, Artificial Sequence
  Description of Artificial Sequence: Synthetic oligonucleotide
  Antisense strand to SEQ ID NO: 1210014
caccucauacaaaugaaac

SEQ ID NO: 1210016 - RNA, 19 nt, Artificial Sequence
  Description of Artificial Sequence: Synthetic oligonucleotide
  Sense strand starting at position 3780 of SEQ ID NO: 917117
aaaugagaucacuguaugu

SEQ ID NO: 1210017 - RNA, 19 nt, Artificial Sequence
  Description of Artificial Sequence: Synthetic oligonucleotide
  Antisense strand to SEQ ID NO: 1210016
acauacagugaucucauuu

SEQ ID NO: 1210018 - RNA, 19 nt, Artificial Sequence
  Description of Artificial Sequence: Synthetic oligonucleotide
  Sense strand starting at position 3812 of SEQ ID NO: 917117
ucaguuuaacgauauaucu

SEQ ID NO: 1210019 - RNA, 19 nt, Artificial Sequence
  Description of Artificial Sequence: Synthetic oligonucleotide
  Antisense strand to SEQ ID NO: 1210018
agauauaucguuaaacuga

SEQ ID NO: 1210020 - RNA, 19 nt, Artificial Sequence
  Description of Artificial Sequence: Synthetic oligonucleotide
  Sense strand starting at position 3874 of SEQ ID NO: 917117
acaguuuggacgcaucaua

SEQ ID NO: 1210021 - RNA, 19 nt, Artificial Sequence
  Description of Artificial Sequence: Synthetic oligonucleotide
  Antisense strand to SEQ ID NO: 1210020
uaugaugcguccaaacugu

SEQ ID NO: 1210022 - RNA, 19 nt, Artificial Sequence
  Description of Artificial Sequence: Synthetic oligonucleotide
  Sense strand starting at position 3915 of SEQ ID NO: 917117
guggacguucuguuugcua

SEQ ID NO: 1210023 - RNA, 19 nt, Artificial Sequence
  Description of Artificial Sequence: Synthetic oligonucleotide
  Antisense strand to SEQ ID NO: 1210022
uagcaaacagaacguccac

SEQ ID NO: 1210024 - RNA, 19 nt, Artificial Sequence
  Description of Artificial Sequence: Synthetic oligonucleotide
  Sense strand starting at position 3956 of SEQ ID NO: 917118
agugaacaucuuuguacau

SEQ ID NO: 1210025 - RNA, 19 nt, Artificial Sequence
  Description of Artificial Sequence: Synthetic oligonucleotide
  Antisense strand to SEQ ID NO: 1210024
auguacaaagauguucacu

SEQ ID NO: 1210026 - RNA, 19 nt, Artificial Sequence
  Description of Artificial Sequence: Synthetic oligonucleotide
  Sense strand starting at position 153 of SEQ ID NO: 917118
acugucaacugauuaagag

SEQ ID NO: 1210027 - RNA, 19 nt, Artificial Sequence
  Description of Artificial Sequence: Synthetic oligonucleotide
  Antisense strand to SEQ ID NO: 1210026
cucuuaaucaguugacagu

SEQ ID NO: 1210028 - RNA, 19 nt, Artificial Sequence
  Description of Artificial Sequence: Synthetic oligonucleotide
  Sense strand starting at position 209 of SEQ ID NO: 917118
uuuggauccugauuggaac

SEQ ID NO: 1210029 - RNA, 19 nt, Artificial Sequence
  Description of Artificial Sequence: Synthetic oligonucleotide
  Antisense strand to SEQ ID NO: 1210028
guuccaaucaggauccaaa

SEQ ID NO: 1210030 - RNA, 19 nt, Artificial Sequence
  Description of Artificial Sequence: Synthetic oligonucleotide
  Sense strand starting at position 244 of SEQ ID NO: 917118
ugagacauauaugagacaa

SEQ ID NO: 1210031 - RNA, 19 nt, Artificial Sequence
  Description of Artificial Sequence: Synthetic oligonucleotide
  Antisense strand to SEQ ID NO: 1210030
uugucucauauaugucuca

SEQ ID NO: 1210032 - RNA, 19 nt, Artificial Sequence
  Description of Artificial Sequence: Synthetic oligonucleotide
  Sense strand starting at position 246 of SEQ ID NO: 917118
agacauauaugagacaagu

SEQ ID NO: 1210033 - RNA, 19 nt, Artificial Sequence
  Description of Artificial Sequence: Synthetic oligonucleotide
  Antisense strand to SEQ ID NO: 1210032
acuugucucauauaugucu

SEQ ID NO: 1210034 - RNA, 19 nt, Artificial Sequence
  Description of Artificial Sequence: Synthetic oligonucleotide
  Sense strand starting at position 348 of SEQ ID NO: 917118
aggaccuuaucuguuagaa

SEQ ID NO: 1210035 - RNA, 19 nt, Artificial Sequence
  Description of Artificial Sequence: Synthetic oligonucleotide
  Antisense strand to SEQ ID NO: 1210034
uucuaacagauaagguccu

SEQ ID NO: 1210036 - RNA, 19 nt, Artificial Sequence
  Description of Artificial Sequence: Synthetic oligonucleotide
  Sense strand starting at position 500 of SEQ ID NO: 917118
augauuucuugcucuggca

SEQ ID NO: 1210037 - RNA, 19 nt, Artificial Sequence
  Description of Artificial Sequence: Synthetic oligonucleotide
  Antisense strand to SEQ ID NO: 1210036
ugccagagcaagaaaucau

SEQ ID NO: 1210038 - RNA, 19 nt, Artificial Sequence
  Description of Artificial Sequence: Synthetic oligonucleotide
  Sense strand starting at position 502 of SEQ ID NO: 917118
gauuucuugcucuggcauu

SEQ ID NO: 1210039 - RNA, 19 nt, Artificial Sequence
  Description of Artificial Sequence: Synthetic oligonucleotide
  Antisense strand to SEQ ID NO: 1210038
aaugccagagcaagaaauc

SEQ ID NO: 1210040 - RNA, 19 nt, Artificial Sequence
  Description of Artificial Sequence: Synthetic oligonucleotide
  Sense strand starting at position 536 of SEQ ID NO: 917118
ucacuaguugugcaacauu

SEQ ID NO: 1210041 - RNA, 19 nt, Artificial Sequence
  Description of Artificial Sequence: Synthetic oligonucleotide
  Antisense strand to SEQ ID NO: 1210040
aauguugcacaacuaguga

SEQ ID NO: 1210042 - RNA, 19 nt, Artificial Sequence
  Description of Artificial Sequence: Synthetic oligonucleotide
  Sense strand starting at position 581 of SEQ ID NO: 917118
auguuuccucaccaguaaa

SEQ ID NO: 1210043 - RNA, 19 nt, Artificial Sequence
  Description of Artificial Sequence: Synthetic oligonucleotide
  Antisense strand to SEQ ID NO: 1210042
uuuacuggugaggaaacau

SEQ ID NO: 1210044 - RNA, 19 nt, Artificial Sequence
  Description of Artificial Sequence: Synthetic oligonucleotide
  Sense strand starting at position 790 of SEQ ID NO: 917118
ucaaucuaagaauguguga

SEQ ID NO: 1210045 - RNA, 19 nt, Artificial Sequence
  Description of Artificial Sequence: Synthetic oligonucleotide
  Antisense strand to SEQ ID NO: 1210044
ucacacauucuuagauuga

SEQ ID NO: 1210046 - RNA, 19 nt, Artificial Sequence
  Description of Artificial Sequence: Synthetic oligonucleotide
  Sense strand starting at position 793 of SEQ ID NO: 917118
aucuaagaaugugugaauc

SEQ ID NO: 1210047 - RNA, 19 nt, Artificial Sequence
  Description of Artificial Sequence: Synthetic oligonucleotide
  Antisense strand to SEQ ID NO: 1210046
gauucacacauucuuagau

SEQ ID NO: 1210048 - RNA, 19 nt, Artificial Sequence
  Description of Artificial Sequence: Synthetic oligonucleotide
  Sense strand starting at position 1053 of SEQ ID NO: 917118
cuagguggcuaaucugaau

SEQ ID NO: 1210049 - RNA, 19 nt, Artificial Sequence
  Description of Artificial Sequence: Synthetic oligonucleotide
  Antisense strand to SEQ ID NO: 1210048
auucagauuagccaccuag

SEQ ID NO: 1210050 - RNA, 19 nt, Artificial Sequence
  Description of Artificial Sequence: Synthetic oligonucleotide
  Sense strand starting at position 1134 of SEQ ID NO: 917118
gggagagaguucgccaauu

SEQ ID NO: 1210051 - RNA, 19 nt, Artificial Sequence
  Description of Artificial Sequence: Synthetic oligonucleotide
  Antisense strand to SEQ ID NO: 1210050
aauuggcgaacucucuccc

SEQ ID NO: 1210052 - RNA, 19 nt, Artificial Sequence
  Description of Artificial Sequence: Synthetic oligonucleotide
  Sense strand starting at position 1168 of SEQ ID NO: 917118
aucagcaaguguuuacaau

SEQ ID NO: 1210053 - RNA, 19 nt, Artificial Sequence
  Description of Artificial Sequence: Synthetic oligonucleotide
  Antisense strand to SEQ ID NO: 1210052
auuguaaacacuugcugau

SEQ ID NO: 1210054 - RNA, 19 nt, Artificial Sequence
  Description of Artificial Sequence: Synthetic oligonucleotide
  Sense strand starting at position 1209 of SEQ ID NO: 917118
ggcaaagacaaucgaguuu

SEQ ID NO: 1210055 - RNA, 19 nt, Artificial Sequence
  Description of Artificial Sequence: Synthetic oligonucleotide
  Antisense strand to SEQ ID NO: 1210054
aaacucgauugucuuugcc

SEQ ID NO: 1210056 - RNA, 19 nt, Artificial Sequence
  Description of Artificial Sequence: Synthetic oligonucleotide
  Sense strand starting at position 1221 of SEQ ID NO: 917118
cgaguuugcauucuaucgu

SEQ ID NO: 1210057 - RNA, 19 nt, Artificial Sequence
  Description of Artificial Sequence: Synthetic oligonucleotide
  Antisense strand to SEQ ID NO: 1210056
acgauagaaugcaaacucg

SEQ ID NO: 1210058 - RNA, 19 nt, Artificial Sequence
  Description of Artificial Sequence: Synthetic oligonucleotide
  Sense strand starting at position 1234 of SEQ ID NO: 917118
uaucguccugccuuguuua

SEQ ID NO: 1210059 - RNA, 19 nt, Artificial Sequence
  Description of Artificial Sequence: Synthetic oligonucleotide
  Antisense strand to SEQ ID NO: 1210058
uaaacaaggcaggacgaua

SEQ ID NO: 1210060 - RNA, 19 nt, Artificial Sequence
  Description of Artificial Sequence: Synthetic oligonucleotide
  Sense strand starting at position 1271 of SEQ ID NO: 917118
ugcuuaauucugggacaca

SEQ ID NO: 1210061 - RNA, 19 nt, Artificial Sequence
  Description of Artificial Sequence: Synthetic oligonucleotide
  Antisense strand to SEQ ID NO: 1210060
ugugucccagaauuaagca

SEQ ID NO: 1210062 - RNA, 19 nt, Artificial Sequence
  Description of Artificial Sequence: Synthetic oligonucleotide
  Sense strand starting at position 1365 of SEQ ID NO: 917118
cgcauuuauucccauuugu

SEQ ID NO: 1210063 - RNA, 19 nt, Artificial Sequence
  Description of Artificial Sequence: Synthetic oligonucleotide
  Antisense strand to SEQ ID NO: 1210062
acaaaugggaauaaaugcg

SEQ ID NO: 1210064 - RNA, 19 nt, Artificial Sequence
  Description of Artificial Sequence: Synthetic oligonucleotide
  Sense strand starting at position 1641 of SEQ ID NO: 917118
acaagucucugagcacaca

SEQ ID NO: 1210065 - RNA, 19 nt, Artificial Sequence
  Description of Artificial Sequence: Synthetic oligonucleotide
  Antisense strand to SEQ ID NO: 1210064
ugugugcucagagacuugu

SEQ ID NO: 1210066 - RNA, 19 nt, Artificial Sequence
  Description of Artificial Sequence: Synthetic oligonucleotide
  Sense strand starting at position 1662 of SEQ ID NO: 917118
gagauaagauuccaaggga

SEQ ID NO: 1210067 - RNA, 19 nt, Artificial Sequence
  Description of Artificial Sequence: Synthetic oligonucleotide
  Antisense strand to SEQ ID NO: 1210066
ucccuuggaaucuuaucuc

SEQ ID NO: 1210068 - RNA, 19 nt, Artificial Sequence
  Description of Artificial Sequence: Synthetic oligonucleotide
  Sense strand starting at position 1758 of SEQ ID NO: 917118
aagggacuucuccgagaac

SEQ ID NO: 1210069 - RNA, 19 nt, Artificial Sequence
  Description of Artificial Sequence: Synthetic oligonucleotide
  Antisense strand to SEQ ID NO: 1210068
guucucggagaagucccuu

SEQ ID NO: 1210070 - RNA, 19 nt, Artificial Sequence
  Description of Artificial Sequence: Synthetic oligonucleotide
  Sense strand starting at position 2133 of SEQ ID NO: 917118
guuuaucaaguaugcaaga

SEQ ID NO: 1210071 - RNA, 19 nt, Artificial Sequence
  Description of Artificial Sequence: Synthetic oligonucleotide
  Antisense strand to SEQ ID NO: 1210070
ucuugcauacuugauaaac

SEQ ID NO: 1210072 - RNA, 19 nt, Artificial Sequence
  Description of Artificial Sequence: Synthetic oligonucleotide
  Sense strand starting at position 2144 of SEQ ID NO: 917118
augcaagacgucuacuuaa

SEQ ID NO: 1210073 - RNA, 19 nt, Artificial Sequence
  Description of Artificial Sequence: Synthetic oligonucleotide
  Antisense strand to SEQ ID NO: 1210072
uuaaguagacgucuugcau

SEQ ID NO: 1210074 - RNA, 19 nt, Artificial Sequence
  Description of Artificial Sequence: Synthetic oligonucleotide
  Sense strand starting at position 2224 of SEQ ID NO: 917118
ccauacgacucauccaguu

SEQ ID NO: 1210075 - RNA, 19 nt, Artificial Sequence
  Description of Artificial Sequence: Synthetic oligonucleotide
  Antisense strand to SEQ ID NO: 1210074
aacuggaugagucguaugg

SEQ ID NO: 1210076 - RNA, 19 nt, Artificial Sequence
  Description of Artificial Sequence: Synthetic oligonucleotide
  Sense strand starting at position 2243 of SEQ ID NO: 917118
acagguuucugguuuauua

SEQ ID NO: 1210077 - RNA, 19 nt, Artificial Sequence
  Description of Artificial Sequence: Synthetic oligonucleotide
  Antisense strand to SEQ ID NO: 1210076
uaauaaaccagaaaccugu

SEQ ID NO: 1210078 - RNA, 19 nt, Artificial Sequence
  Description of Artificial Sequence: Synthetic oligonucleotide
  Sense strand starting at position 2245 of SEQ ID NO: 917118
agguuucugguuuauuaca

SEQ ID NO: 1210079 - RNA, 19 nt, Artificial Sequence
  Description of Artificial Sequence: Synthetic oligonucleotide
  Antisense strand to SEQ ID NO: 1210078
uguaauaaaccagaaaccu

SEQ ID NO: 1210080 - RNA, 19 nt, Artificial Sequence
  Description of Artificial Sequence: Synthetic oligonucleotide
  Sense strand starting at position 2247 of SEQ ID NO: 917118
guuucugguuuauuacauu

SEQ ID NO: 1210081 - RNA, 19 nt, Artificial Sequence
  Description of Artificial Sequence: Synthetic oligonucleotide
  Antisense strand to SEQ ID NO: 1210080
aauguaauaaaccagaaac

SEQ ID NO: 1210082 - RNA, 19 nt, Artificial Sequence
  Description of Artificial Sequence: Synthetic oligonucleotide
  Sense strand starting at position 2319 of SEQ ID NO: 917118
uuacaauagugaguggcau

SEQ ID NO: 1210083 - RNA, 19 nt, Artificial Sequence
  Description of Artificial Sequence: Synthetic oligonucleotide
  Antisense strand to SEQ ID NO: 1210082
augccacucacuauuguaa

SEQ ID NO: 1210084 - RNA, 19 nt, Artificial Sequence
  Description of Artificial Sequence: Synthetic oligonucleotide
  Sense strand starting at position 2320 of SEQ ID NO: 917118
uacaauagugaguggcauu

SEQ ID NO: 1210085 - RNA, 19 nt, Artificial Sequence
  Description of Artificial Sequence: Synthetic oligonucleotide
  Antisense strand to SEQ ID NO: 1210084
aaugccacucacuauugua

SEQ ID NO: 1210086 - RNA, 19 nt, Artificial Sequence
  Description of Artificial Sequence: Synthetic oligonucleotide
  Sense strand starting at position 2321 of SEQ ID NO: 917118
acaauagugaguggcauua

SEQ ID NO: 1210087 - RNA, 19 nt, Artificial Sequence
  Description of Artificial Sequence: Synthetic oligonucleotide
  Antisense strand to SEQ ID NO: 1210086
uaaugccacucacuauugu

SEQ ID NO: 1210088 - RNA, 19 nt, Artificial Sequence
  Description of Artificial Sequence: Synthetic oligonucleotide
  Sense strand starting at position 3001 of SEQ ID NO: 917118
agguuucucauguguugga

SEQ ID NO: 1210089 - RNA, 19 nt, Artificial Sequence
  Description of Artificial Sequence: Synthetic oligonucleotide
  Antisense strand to SEQ ID NO: 1210088
uccaacacaugagaaaccu

SEQ ID NO: 1210090 - RNA, 19 nt, Artificial Sequence
  Description of Artificial Sequence: Synthetic oligonucleotide
  Sense strand starting at position 3027 of SEQ ID NO: 917118
gcccuugaccagugaagag

SEQ ID NO: 1210091 - RNA, 19 nt, Artificial Sequence
  Description of Artificial Sequence: Synthetic oligonucleotide
  Antisense strand to SEQ ID NO: 1210090
cucuucacuggucaagggc

SEQ ID NO: 1210092 - RNA, 19 nt, Artificial Sequence
  Description of Artificial Sequence: Synthetic oligonucleotide
  Sense strand starting at position 3062 of SEQ ID NO: 917118
gccuaagucacaggcagaa

SEQ ID NO: 1210093 - RNA, 19 nt, Artificial Sequence
  Description of Artificial Sequence: Synthetic oligonucleotide
  Antisense strand to SEQ ID NO: 1210092
uucugccugugacuuaggc

SEQ ID NO: 1210094 - RNA, 19 nt, Artificial Sequence
  Description of Artificial Sequence: Synthetic oligonucleotide
  Sense strand starting at position 3123 of SEQ ID NO: 917118
uugauucugcgcuagaaac

SEQ ID NO: 1210095 - RNA, 19 nt, Artificial Sequence
  Description of Artificial Sequence: Synthetic oligonucleotide
  Antisense strand to SEQ ID NO: 1210094
guuucuagcgcagaaucaa

SEQ ID NO: 1210096 - RNA, 19 nt, Artificial Sequence
  Description of Artificial Sequence: Synthetic oligonucleotide
  Sense strand starting at position 3141 of SEQ ID NO: 917118
cccuguuaucuccgaacug

SEQ ID NO: 1210097 - RNA, 19 nt, Artificial Sequence
  Description of Artificial Sequence: Synthetic oligonucleotide
  Antisense strand to SEQ ID NO: 1210096
caguucggagauaacaggg

SEQ ID NO: 1210098 - RNA, 19 nt, Artificial Sequence
  Description of Artificial Sequence: Synthetic oligonucleotide
  Sense strand starting at position 3163 of SEQ ID NO: 917118
guguuauucugagucacag

SEQ ID NO: 1210099 - RNA, 19 nt, Artificial Sequence
  Description of Artificial Sequence: Synthetic oligonucleotide
  Antisense strand to SEQ ID NO: 1210098
cugugacucagaauaacac

SEQ ID NO: 1210100 - RNA, 19 nt, Artificial Sequence
  Description of Artificial Sequence: Synthetic oligonucleotide
  Sense strand starting at position 3501 of SEQ ID NO: 917118
ggcagcuuccuuuaacucu

SEQ ID NO: 1210101 - RNA, 19 nt, Artificial Sequence
  Description of Artificial Sequence: Synthetic oligonucleotide
  Antisense strand to SEQ ID NO: 1210100
agaguuaaaggaagcugcc

SEQ ID NO: 1210102 - RNA, 19 nt, Artificial Sequence
  Description of Artificial Sequence: Synthetic oligonucleotide
  Sense strand starting at position 3628 of SEQ ID NO: 917118
agggcuucuuccucaguga

SEQ ID NO: 1210103 - RNA, 19 nt, Artificial Sequence
  Description of Artificial Sequence: Synthetic oligonucleotide
  Antisense strand to SEQ ID NO: 1210102
ucacugaggaagaagcccu

SEQ ID NO: 1210104 - RNA, 19 nt, Artificial Sequence
  Description of Artificial Sequence: Synthetic oligonucleotide
  Sense strand starting at position 3729 of SEQ ID NO: 917118
aggagacauaguuguaauc

SEQ ID NO: 1210105 - RNA, 19 nt, Artificial Sequence
  Description of Artificial Sequence: Synthetic oligonucleotide
  Antisense strand to SEQ ID NO: 1210104
gauuacaacuaugucuccu

SEQ ID NO: 1210106 - RNA, 19 nt, Artificial Sequence
  Description of Artificial Sequence: Synthetic oligonucleotide
  Sense strand starting at position 3729 of SEQ ID NO: 917119
aggagacauaguuguaauc

SEQ ID NO: 1210107 - RNA, 19 nt, Artificial Sequence
  Description of Artificial Sequence: Synthetic oligonucleotide
  Antisense strand to SEQ ID NO: 1210106
gauuacaacuaugucuccu

SEQ ID NO: 1210108 - RNA, 19 nt, Artificial Sequence
  Description of Artificial Sequence: Synthetic oligonucleotide
  Sense strand starting at position 70 of SEQ ID NO: 917119
ugcaauguggcagaacuau

SEQ ID NO: 1210109 - RNA, 19 nt, Artificial Sequence
  Description of Artificial Sequence: Synthetic oligonucleotide
  Antisense strand to SEQ ID NO: 1210108
auaguucugccacauugca

SEQ ID NO: 1210110 - RNA, 19 nt, Artificial Sequence
  Description of Artificial Sequence: Synthetic oligonucleotide
  Sense strand starting at position 97 of SEQ ID NO: 917119
agccauauuguuuauuaga

SEQ ID NO: 1210111 - RNA, 19 nt, Artificial Sequence
  Description of Artificial Sequence: Synthetic oligonucleotide
  Antisense strand to SEQ ID NO: 1210110
ucuaauaaacaauauggcu

SEQ ID NO: 1210112 - RNA, 19 nt, Artificial Sequence
  Description of Artificial Sequence: Synthetic oligonucleotide
  Sense strand starting at position 133 of SEQ ID NO: 917119
auacauuaagugcaguaaa

SEQ ID NO: 1210113 - RNA, 19 nt, Artificial Sequence
  Description of Artificial Sequence: Synthetic oligonucleotide
  Antisense strand to SEQ ID NO: 1210112
uuuacugcacuuaauguau

SEQ ID NO: 1210114 - RNA, 19 nt, Artificial Sequence
  Description of Artificial Sequence: Synthetic oligonucleotide
  Sense strand starting at position 136 of SEQ ID NO: 917119
cauuaagugcaguaaaugu

SEQ ID NO: 1210115 - RNA, 19 nt, Artificial Sequence
  Description of Artificial Sequence: Synthetic oligonucleotide
  Antisense strand to SEQ ID NO: 1210114
acauuuacugcacuuaaug

SEQ ID NO: 1210116 - RNA, 19 nt, Artificial Sequence
  Description of Artificial Sequence: Synthetic oligonucleotide
  Sense strand starting at position 175 of SEQ ID NO: 917119
cuuuguacccaaugucuca

SEQ ID NO: 1210117 - RNA, 19 nt, Artificial Sequence
  Description of Artificial Sequence: Synthetic oligonucleotide
  Antisense strand to SEQ ID NO: 1210116
ugagacauuggguacaaag

SEQ ID NO: 1210118 - RNA, 19 nt, Artificial Sequence
  Description of Artificial Sequence: Synthetic oligonucleotide
  Sense strand starting at position 274 of SEQ ID NO: 917119
ggaacuuggccauagucau

SEQ ID NO: 1210119 - RNA, 19 nt, Artificial Sequence
  Description of Artificial Sequence: Synthetic oligonucleotide
  Antisense strand to SEQ ID NO: 1210118
augacuauggccaaguucc

SEQ ID NO: 1210120 - RNA, 19 nt, Artificial Sequence
  Description of Artificial Sequence: Synthetic oligonucleotide
  Sense strand starting at position 282 of SEQ ID NO: 917119
gccauagucaugugacaag

SEQ ID NO: 1210121 - RNA, 19 nt, Artificial Sequence
  Description of Artificial Sequence: Synthetic oligonucleotide
  Antisense strand to SEQ ID NO: 1210120
cuugucacaugacuauggc

SEQ ID NO: 1210122 - RNA, 19 nt, Artificial Sequence
  Description of Artificial Sequence: Synthetic oligonucleotide
  Sense strand starting at position 350 of SEQ ID NO: 917119
acccaauuguuucugaaug

SEQ ID NO: 1210123 - RNA, 19 nt, Artificial Sequence
  Description of Artificial Sequence: Synthetic oligonucleotide
  Antisense strand to SEQ ID NO: 1210122
cauucagaaacaauugggu

SEQ ID NO: 1210124 - RNA, 19 nt, Artificial Sequence
  Description of Artificial Sequence: Synthetic oligonucleotide
  Sense strand starting at position 563 of SEQ ID NO: 917119
gggaguacaguggguaaua

SEQ ID NO: 1210125 - RNA, 19 nt, Artificial Sequence
  Description of Artificial Sequence: Synthetic oligonucleotide
  Antisense strand to SEQ ID NO: 1210124
uauuacccacuguacuccc

SEQ ID NO: 1210126 - RNA, 19 nt, Artificial Sequence
  Description of Artificial Sequence: Synthetic oligonucleotide
  Sense strand starting at position 564 of SEQ ID NO: 917119
ggaguacaguggguaauau

SEQ ID NO: 1210127 - RNA, 19 nt, Artificial Sequence
  Description of Artificial Sequence: Synthetic oligonucleotide
  Antisense strand to SEQ ID NO: 1210126
auauuacccacuguacucc

SEQ ID NO: 1210128 - RNA, 19 nt, Artificial Sequence
  Description of Artificial Sequence: Synthetic oligonucleotide
  Sense strand starting at position 598 of SEQ ID NO: 917119
cggaguugcccgcaaagga

SEQ ID NO: 1210129 - RNA, 19 nt, Artificial Sequence
  Description of Artificial Sequence: Synthetic oligonucleotide
  Antisense strand to SEQ ID NO: 1210128
uccuuugcgggcaacuccg

SEQ ID NO: 1210130 - RNA, 19 nt, Artificial Sequence
  Description of Artificial Sequence: Synthetic oligonucleotide
  Sense strand starting at position 701 of SEQ ID NO: 917119
gugugacggcguaagcuua

SEQ ID NO: 1210131 - RNA, 19 nt, Artificial Sequence
  Description of Artificial Sequence: Synthetic oligonucleotide
  Antisense strand to SEQ ID NO: 1210130
uaagcuuacgccgucacac

SEQ ID NO: 1210132 - RNA, 19 nt, Artificial Sequence
  Description of Artificial Sequence: Synthetic oligonucleotide
  Sense strand starting at position 1226 of SEQ ID NO: 917119
gugaaucucugagcacuca

SEQ ID NO: 1210133 - RNA, 19 nt, Artificial Sequence
  Description of Artificial Sequence: Synthetic oligonucleotide
  Antisense strand to SEQ ID NO: 1210132
ugagugcucagagauucac

SEQ ID NO: 1210134 - RNA, 19 nt, Artificial Sequence
  Description of Artificial Sequence: Synthetic oligonucleotide
  Sense strand starting at position 1312 of SEQ ID NO: 917119
ggcaucuguucucuaaaga

SEQ ID NO: 1210135 - RNA, 19 nt, Artificial Sequence
  Description of Artificial Sequence: Synthetic oligonucleotide
  Antisense strand to SEQ ID NO: 1210134
ucuuuagagaacagaugcc

SEQ ID NO: 1210136 - RNA, 19 nt, Artificial Sequence
  Description of Artificial Sequence: Synthetic oligonucleotide
  Sense strand starting at position 1313 of SEQ ID NO: 917119
gcaucuguucucuaaagag

SEQ ID NO: 1210137 - RNA, 19 nt, Artificial Sequence
  Description of Artificial Sequence: Synthetic oligonucleotide
  Antisense strand to SEQ ID NO: 1210136
cucuuuagagaacagaugc

SEQ ID NO: 1210138 - RNA, 19 nt, Artificial Sequence
  Description of Artificial Sequence: Synthetic oligonucleotide
  Sense strand starting at position 1356 of SEQ ID NO: 917119
gguaacuccuguuauuuaa

SEQ ID NO: 1210139 - RNA, 19 nt, Artificial Sequence
  Description of Artificial Sequence: Synthetic oligonucleotide
  Antisense strand to SEQ ID NO: 1210138
uuaaauaacaggaguuacc

SEQ ID NO: 1210140 - RNA, 19 nt, Artificial Sequence
  Description of Artificial Sequence: Synthetic oligonucleotide
  Sense strand starting at position 1380 of SEQ ID NO: 917119
ggcagagaguuccuuuagu

SEQ ID NO: 1210141 - RNA, 19 nt, Artificial Sequence
  Description of Artificial Sequence: Synthetic oligonucleotide
  Antisense strand to SEQ ID NO: 1210140
acuaaaggaacucucugcc

SEQ ID NO: 1210142 - RNA, 19 nt, Artificial Sequence
  Description of Artificial Sequence: Synthetic oligonucleotide
  Sense strand starting at position 1468 of SEQ ID NO: 917119
acagguagaguuugauaua

SEQ ID NO: 1210143 - RNA, 19 nt, Artificial Sequence
  Description of Artificial Sequence: Synthetic oligonucleotide
  Antisense strand to SEQ ID NO: 1210142
uauaucaaacucuaccugu

SEQ ID NO: 1210144 - RNA, 19 nt, Artificial Sequence
  Description of Artificial Sequence: Synthetic oligonucleotide
  Sense strand starting at position 1571 of SEQ ID NO: 917119
ucaaauuuguaggaggcau

SEQ ID NO: 1210145 - RNA, 19 nt, Artificial Sequence
  Description of Artificial Sequence: Synthetic oligonucleotide
  Antisense strand to SEQ ID NO: 1210144
augccuccuacaaauuuga

SEQ ID NO: 1210146 - RNA, 19 nt, Artificial Sequence
  Description of Artificial Sequence: Synthetic oligonucleotide
  Sense strand starting at position 2122 of SEQ ID NO: 917119
gucagagggccagaaguua

SEQ ID NO: 1210147 - RNA, 19 nt, Artificial Sequence
  Description of Artificial Sequence: Synthetic oligonucleotide
  Antisense strand to SEQ ID NO: 1210146
uaacuucuggcccucugac

SEQ ID NO: 1210148 - RNA, 19 nt, Artificial Sequence
  Description of Artificial Sequence: Synthetic oligonucleotide
  Sense strand starting at position 2411 of SEQ ID NO: 917119
caggcuuugcucgaacuca

SEQ ID NO: 1210149 - RNA, 19 nt, Artificial Sequence
  Description of Artificial Sequence: Synthetic oligonucleotide
  Antisense strand to SEQ ID NO: 1210148
ugaguucgagcaaagccug

SEQ ID NO: 1210150 - RNA, 19 nt, Artificial Sequence
  Description of Artificial Sequence: Synthetic oligonucleotide
  Sense strand starting at position 2454 of SEQ ID NO: 917119
uugcuaagucaggauugga

SEQ ID NO: 1210151 - RNA, 19 nt, Artificial Sequence
  Description of Artificial Sequence: Synthetic oligonucleotide
  Antisense strand to SEQ ID NO: 1210150
uccaauccugacuuagcaa

SEQ ID NO: 1210152 - RNA, 19 nt, Artificial Sequence
  Description of Artificial Sequence: Synthetic oligonucleotide
  Sense strand starting at position 2492 of SEQ ID NO: 917119
gaagauuagugagcucaug

SEQ ID NO: 1210153 - RNA, 19 nt, Artificial Sequence
  Description of Artificial Sequence: Synthetic oligonucleotide
  Antisense strand to SEQ ID NO: 1210152
caugagcucacuaaucuuc

SEQ ID NO: 1210154 - RNA, 19 nt, Artificial Sequence
  Description of Artificial Sequence: Synthetic oligonucleotide
  Sense strand starting at position 2712 of SEQ ID NO: 917119
acagacauccucuguuguu

SEQ ID NO: 1210155 - RNA, 19 nt, Artificial Sequence
  Description of Artificial Sequence: Synthetic oligonucleotide
  Antisense strand to SEQ ID NO: 1210154
aacaacagaggaugucugu

SEQ ID NO: 1210156 - RNA, 19 nt, Artificial Sequence
  Description of Artificial Sequence: Synthetic oligonucleotide
  Sense strand starting at position 2721 of SEQ ID NO: 917119
cucuguuguuaucuaggga

SEQ ID NO: 1210157 - RNA, 19 nt, Artificial Sequence
  Description of Artificial Sequence: Synthetic oligonucleotide
  Antisense strand to SEQ ID NO: 1210156
ucccuagauaacaacagag

SEQ ID NO: 1210158 - RNA, 19 nt, Artificial Sequence
  Description of Artificial Sequence: Synthetic oligonucleotide
  Sense strand starting at position 2722 of SEQ ID NO: 917119
ucuguuguuaucuagggaa

SEQ ID NO: 1210159 - RNA, 19 nt, Artificial Sequence
  Description of Artificial Sequence: Synthetic oligonucleotide
  Antisense strand to SEQ ID NO: 1210158
uucccuagauaacaacaga

SEQ ID NO: 1210160 - RNA, 19 nt, Artificial Sequence
  Description of Artificial Sequence: Synthetic oligonucleotide
  Sense strand starting at position 2724 of SEQ ID NO: 917119
uguuguuaucuagggaagc

SEQ ID NO: 1210161 - RNA, 19 nt, Artificial Sequence
  Description of Artificial Sequence: Synthetic oligonucleotide
  Antisense strand to SEQ ID NO: 1210160
gcuucccuagauaacaaca

SEQ ID NO: 1210162 - RNA, 19 nt, Artificial Sequence
  Description of Artificial Sequence: Synthetic oligonucleotide
  Sense strand starting at position 2726 of SEQ ID NO: 917119
uuguuaucuagggaagcag

SEQ ID NO: 1210163 - RNA, 19 nt, Artificial Sequence
  Description of Artificial Sequence: Synthetic oligonucleotide
  Antisense strand to SEQ ID NO: 1210162
cugcuucccuagauaacaa

SEQ ID NO: 1210164 - RNA, 19 nt, Artificial Sequence
  Description of Artificial Sequence: Synthetic oligonucleotide
  Sense strand starting at position 2765 of SEQ ID NO: 917119
ggaaacauauuccuucugu

SEQ ID NO: 1210165 - RNA, 19 nt, Artificial Sequence
  Description of Artificial Sequence: Synthetic oligonucleotide
  Antisense strand to SEQ ID NO: 1210164
acagaaggaauauguuucc

SEQ ID NO: 1210166 - RNA, 19 nt, Artificial Sequence
  Description of Artificial Sequence: Synthetic oligonucleotide
  Sense strand starting at position 3286 of SEQ ID NO: 917119
ggacuagucugucuccgaa

SEQ ID NO: 1210167 - RNA, 19 nt, Artificial Sequence
  Description of Artificial Sequence: Synthetic oligonucleotide
  Antisense strand to SEQ ID NO: 1210166
uucggagacagacuagucc

SEQ ID NO: 1210168 - RNA, 19 nt, Artificial Sequence
  Description of Artificial Sequence: Synthetic oligonucleotide
  Sense strand starting at position 3288 of SEQ ID NO: 917119
acuagucugucuccgaaac

SEQ ID NO: 1210169 - RNA, 19 nt, Artificial Sequence
  Description of Artificial Sequence: Synthetic oligonucleotide
  Antisense strand to SEQ ID NO: 1210168
guuucggagacagacuagu

SEQ ID NO: 1210170 - RNA, 19 nt, Artificial Sequence
  Description of Artificial Sequence: Synthetic oligonucleotide
  Sense strand starting at position 3443 of SEQ ID NO: 917119
acgggccuguaauccaaua

SEQ ID NO: 1210171 - RNA, 19 nt, Artificial Sequence
  Description of Artificial Sequence: Synthetic oligonucleotide
  Antisense strand to SEQ ID NO: 1210170
uauuggauuacaggcccgu

SEQ ID NO: 1210172 - RNA, 19 nt, Artificial Sequence
  Description of Artificial Sequence: Synthetic oligonucleotide
  Sense strand starting at position 3454 of SEQ ID NO: 917119
auccaauaugaccgauguu

SEQ ID NO: 1210173 - RNA, 19 nt, Artificial Sequence
  Description of Artificial Sequence: Synthetic oligonucleotide
  Antisense strand to SEQ ID NO: 1210172
aacaucggucauauuggau

SEQ ID NO: 1210174 - RNA, 19 nt, Artificial Sequence
  Description of Artificial Sequence: Synthetic oligonucleotide
  Sense strand starting at position 3457 of SEQ ID NO: 917119
caauaugaccgauguucuu

SEQ ID NO: 1210175 - RNA, 19 nt, Artificial Sequence
  Description of Artificial Sequence: Synthetic oligonucleotide
  Antisense strand to SEQ ID NO: 1210174
aagaacaucggucauauug

SEQ ID NO: 1210176 - RNA, 19 nt, Artificial Sequence
  Description of Artificial Sequence: Synthetic oligonucleotide
  Sense strand starting at position 3638 of SEQ ID NO: 917119
ccagauuucuagcauccag

SEQ ID NO: 1210177 - RNA, 19 nt, Artificial Sequence
  Description of Artificial Sequence: Synthetic oligonucleotide
  Antisense strand to SEQ ID NO: 1210176
cuggaugcuagaaaucugg

SEQ ID NO: 1210178 - RNA, 19 nt, Artificial Sequence
  Description of Artificial Sequence: Synthetic oligonucleotide
  Sense strand starting at position 3754 of SEQ ID NO: 917119
agcucagauugauucuuua

SEQ ID NO: 1210179 - RNA, 19 nt, Artificial Sequence
  Description of Artificial Sequence: Synthetic oligonucleotide
  Antisense strand to SEQ ID NO: 1210178
uaaagaaucaaucugagcu

SEQ ID NO: 1210180 - RNA, 19 nt, Artificial Sequence
  Description of Artificial Sequence: Synthetic oligonucleotide
  Sense strand starting at position 3757 of SEQ ID NO: 917119
ucagauugauucuuuauga

SEQ ID NO: 1210181 - RNA, 19 nt, Artificial Sequence
  Description of Artificial Sequence: Synthetic oligonucleotide
  Antisense strand to SEQ ID NO: 1210180
ucauaaagaaucaaucuga

SEQ ID NO: 1210182 - RNA, 19 nt, Artificial Sequence
  Description of Artificial Sequence: Synthetic oligonucleotide
  Sense strand starting at position 3793 of SEQ ID NO: 917119
gauagaagaugcuuguguu

SEQ ID NO: 1210183 - RNA, 19 nt, Artificial Sequence
  Description of Artificial Sequence: Synthetic oligonucleotide
  Antisense strand to SEQ ID NO: 1210182
aacacaagcaucuucuauc

SEQ ID NO: 1210184 - RNA, 19 nt, Artificial Sequence
  Description of Artificial Sequence: Synthetic oligonucleotide
  Sense strand starting at position 3794 of SEQ ID NO: 917119
auagaagaugcuuguguuu

SEQ ID NO: 1210185 - RNA, 19 nt, Artificial Sequence
  Description of Artificial Sequence: Synthetic oligonucleotide
  Antisense strand to SEQ ID NO: 1210184
aaacacaagcaucuucuau

SEQ ID NO: 1210186 - RNA, 19 nt, Artificial Sequence
  Description of Artificial Sequence: Synthetic oligonucleotide
  Sense strand starting at position 3949 of SEQ ID NO: 917120
ggcaguguaaguggauuua

SEQ ID NO: 1210187 - RNA, 19 nt, Artificial Sequence
  Description of Artificial Sequence: Synthetic oligonucleotide
  Antisense strand to SEQ ID NO: 1210186
uaaauccacuuacacugcc

SEQ ID NO: 1210188 - RNA, 19 nt, Artificial Sequence
  Description of Artificial Sequence: Synthetic oligonucleotide
  Sense strand starting at position 137 of SEQ ID NO: 917120
uggcaaaguccaggagaaa

SEQ ID NO: 1210189 - RNA, 19 nt, Artificial Sequence
  Description of Artificial Sequence: Synthetic oligonucleotide
  Antisense strand to SEQ ID NO: 1210188
uuucuccuggacuuugcca

SEQ ID NO: 1210190 - RNA, 19 nt, Artificial Sequence
  Description of Artificial Sequence: Synthetic oligonucleotide
  Sense strand starting at position 208 of SEQ ID NO: 917120
aggagaaccuguccuugaa

SEQ ID NO: 1210191 - RNA, 19 nt, Artificial Sequence
  Description of Artificial Sequence: Synthetic oligonucleotide
  Antisense strand to SEQ ID NO: 1210190
uucaaggacagguucuccu

SEQ ID NO: 1210192 - RNA, 19 nt, Artificial Sequence
  Description of Artificial Sequence: Synthetic oligonucleotide
  Sense strand starting at position 210 of SEQ ID NO: 917120
gagaaccuguccuugaaac

SEQ ID NO: 1210193 - RNA, 19 nt, Artificial Sequence
  Description of Artificial Sequence: Synthetic oligonucleotide
  Antisense strand to SEQ ID NO: 1210192
guuucaaggacagguucuc

SEQ ID NO: 1210194 - RNA, 19 nt, Artificial Sequence
  Description of Artificial Sequence: Synthetic oligonucleotide
  Sense strand starting at position 211 of SEQ ID NO: 917120
agaaccuguccuugaaaca

SEQ ID NO: 1210195 - RNA, 19 nt, Artificial Sequence
  Description of Artificial Sequence: Synthetic oligonucleotide
  Antisense strand to SEQ ID NO: 1210194
uguuucaaggacagguucu

SEQ ID NO: 1210196 - RNA, 19 nt, Artificial Sequence
  Description of Artificial Sequence: Synthetic oligonucleotide
  Sense strand starting at position 453 of SEQ ID NO: 917120
acagcuaccuuugcagaga

SEQ ID NO: 1210197 - RNA, 19 nt, Artificial Sequence
  Description of Artificial Sequence: Synthetic oligonucleotide
  Antisense strand to SEQ ID NO: 1210196
ucucugcaaagguagcugu

SEQ ID NO: 1210198 - RNA, 19 nt, Artificial Sequence
  Description of Artificial Sequence: Synthetic oligonucleotide
  Sense strand starting at position 492 of SEQ ID NO: 917120
ugaccuguccaucacugua

SEQ ID NO: 1210199 - RNA, 19 nt, Artificial Sequence
  Description of Artificial Sequence: Synthetic oligonucleotide
  Antisense strand to SEQ ID NO: 1210198
uacagugauggacagguca

SEQ ID NO: 1210200 - RNA, 19 nt, Artificial Sequence
  Description of Artificial Sequence: Synthetic oligonucleotide
  Sense strand starting at position 546 of SEQ ID NO: 917120
gaauacuaucugggccaga

SEQ ID NO: 1210201 - RNA, 19 nt, Artificial Sequence
  Description of Artificial Sequence: Synthetic oligonucleotide
  Antisense strand to SEQ ID NO: 1210200
ucuggcccagauaguauuc

SEQ ID NO: 1210202 - RNA, 19 nt, Artificial Sequence
  Description of Artificial Sequence: Synthetic oligonucleotide
  Sense strand starting at position 625 of SEQ ID NO: 917120
aagggagcccugugugaaa

SEQ ID NO: 1210203 - RNA, 19 nt, Artificial Sequence
  Description of Artificial Sequence: Synthetic oligonucleotide
  Antisense strand to SEQ ID NO: 1210202
uuucacacagggcucccuu

SEQ ID NO: 1210204 - RNA, 19 nt, Artificial Sequence
  Description of Artificial Sequence: Synthetic oligonucleotide
  Sense strand starting at position 705 of SEQ ID NO: 917120
cuuuguuguguguaauuua

SEQ ID NO: 1210205 - RNA, 19 nt, Artificial Sequence
  Description of Artificial Sequence: Synthetic oligonucleotide
  Antisense strand to SEQ ID NO: 1210204
uaaauuacacacaacaaag

SEQ ID NO: 1210206 - RNA, 19 nt, Artificial Sequence
  Description of Artificial Sequence: Synthetic oligonucleotide
  Sense strand starting at position 708 of SEQ ID NO: 917120
uguuguguguaauuuagua

SEQ ID NO: 1210207 - RNA, 19 nt, Artificial Sequence
  Description of Artificial Sequence: Synthetic oligonucleotide
  Antisense strand to SEQ ID NO: 1210206
uacuaaauuacacacaaca

SEQ ID NO: 1210208 - RNA, 19 nt, Artificial Sequence
  Description of Artificial Sequence: Synthetic oligonucleotide
  Sense strand starting at position 904 of SEQ ID NO: 917120
gugauuaaauacucaaagu

SEQ ID NO: 1210209 - RNA, 19 nt, Artificial Sequence
  Description of Artificial Sequence: Synthetic oligonucleotide
  Antisense strand to SEQ ID NO: 1210208
acuuugaguauuuaaucac

SEQ ID NO: 1210210 - RNA, 19 nt, Artificial Sequence
  Description of Artificial Sequence: Synthetic oligonucleotide
  Sense strand starting at position 1043 of SEQ ID NO: 917120
aguuaugaaaguggucuga

SEQ ID NO: 1210211 - RNA, 19 nt, Artificial Sequence
  Description of Artificial Sequence: Synthetic oligonucleotide
  Antisense strand to SEQ ID NO: 1210210
ucagaccacuuucauaacu

SEQ ID NO: 1210212 - RNA, 19 nt, Artificial Sequence
  Description of Artificial Sequence: Synthetic oligonucleotide
  Sense strand starting at position 1047 of SEQ ID NO: 917120
augaaaguggucugaggca

SEQ ID NO: 1210213 - RNA, 19 nt, Artificial Sequence
  Description of Artificial Sequence: Synthetic oligonucleotide
  Antisense strand to SEQ ID NO: 1210212
ugccucagaccacuuucau

SEQ ID NO: 1210214 - RNA, 19 nt, Artificial Sequence
  Description of Artificial Sequence: Synthetic oligonucleotide
  Sense strand starting at position 1230 of SEQ ID NO: 917120
ugaaguauacacugcauau

SEQ ID NO: 1210215 - RNA, 19 nt, Artificial Sequence
  Description of Artificial Sequence: Synthetic oligonucleotide
  Antisense strand to SEQ ID NO: 1210214
auaugcaguguauacuuca

SEQ ID NO: 1210216 - RNA, 19 nt, Artificial Sequence
  Description of Artificial Sequence: Synthetic oligonucleotide
  Sense strand starting at position 1234 of SEQ ID NO: 917120
guauacacugcauaugaaa

SEQ ID NO: 1210217 - RNA, 19 nt, Artificial Sequence
  Description of Artificial Sequence: Synthetic oligonucleotide
  Antisense strand to SEQ ID NO: 1210216
uuucauaugcaguguauac

SEQ ID NO: 1210218 - RNA, 19 nt, Artificial Sequence
  Description of Artificial Sequence: Synthetic oligonucleotide
  Sense strand starting at position 1448 of SEQ ID NO: 917120
cccaguaucugaguaaaug

SEQ ID NO: 1210219 - RNA, 19 nt, Artificial Sequence
  Description of Artificial Sequence: Synthetic oligonucleotide
  Antisense strand to SEQ ID NO: 1210218
cauuuacucagauacuggg

SEQ ID NO: 1210220 - RNA, 19 nt, Artificial Sequence
  Description of Artificial Sequence: Synthetic oligonucleotide
  Sense strand starting at position 1449 of SEQ ID NO: 917120
ccaguaucugaguaaaugu

SEQ ID NO: 1210221 - RNA, 19 nt, Artificial Sequence
  Description of Artificial Sequence: Synthetic oligonucleotide
  Antisense strand to SEQ ID NO: 1210220
acauuuacucagauacugg

SEQ ID NO: 1210222 - RNA, 19 nt, Artificial Sequence
  Description of Artificial Sequence: Synthetic oligonucleotide
  Sense strand starting at position 1456 of SEQ ID NO: 917120
cugaguaaauguguauauc

SEQ ID NO: 1210223 - RNA, 19 nt, Artificial Sequence
  Description of Artificial Sequence: Synthetic oligonucleotide
  Antisense strand to SEQ ID NO: 1210222
gauauacacauuuacucag

SEQ ID NO: 1210224 - RNA, 19 nt, Artificial Sequence
  Description of Artificial Sequence: Synthetic oligonucleotide
  Sense strand starting at position 1457 of SEQ ID NO: 917120
ugaguaaauguguauauca

SEQ ID NO: 1210225 - RNA, 19 nt, Artificial Sequence
  Description of Artificial Sequence: Synthetic oligonucleotide
  Antisense strand to SEQ ID NO: 1210224
ugauauacacauuuacuca

SEQ ID NO: 1210226 - RNA, 19 nt, Artificial Sequence
  Description of Artificial Sequence: Synthetic oligonucleotide
  Sense strand starting at position 1459 of SEQ ID NO: 917120
aguaaauguguauaucaug

SEQ ID NO: 1210227 - RNA, 19 nt, Artificial Sequence
  Description of Artificial Sequence: Synthetic oligonucleotide
  Antisense strand to SEQ ID NO: 1210226
caugauauacacauuuacu

SEQ ID NO: 1210228 - RNA, 19 nt, Artificial Sequence
  Description of Artificial Sequence: Synthetic oligonucleotide
  Sense strand starting at position 1508 of SEQ ID NO: 917120
cuugccuggccacauuaau

SEQ ID NO: 1210229 - RNA, 19 nt, Artificial Sequence
  Description of Artificial Sequence: Synthetic oligonucleotide
  Antisense strand to SEQ ID NO: 1210228
auuaauguggccaggcaag

SEQ ID NO: 1210230 - RNA, 19 nt, Artificial Sequence
  Description of Artificial Sequence: Synthetic oligonucleotide
  Sense strand starting at position 1757 of SEQ ID NO: 917120
guuuaagccugacuuccaa

SEQ ID NO: 1210231 - RNA, 19 nt, Artificial Sequence
  Description of Artificial Sequence: Synthetic oligonucleotide
  Antisense strand to SEQ ID NO: 1210230
uuggaagucaggcuuaaac

SEQ ID NO: 1210232 - RNA, 19 nt, Artificial Sequence
  Description of Artificial Sequence: Synthetic oligonucleotide
  Sense strand starting at position 1802 of SEQ ID NO: 917120
cuguucuucccugagugaa

SEQ ID NO: 1210233 - RNA, 19 nt, Artificial Sequence
  Description of Artificial Sequence: Synthetic oligonucleotide
  Antisense strand to SEQ ID NO: 1210232
uucacucagggaagaacag

SEQ ID NO: 1210234 - RNA, 19 nt, Artificial Sequence
  Description of Artificial Sequence: Synthetic oligonucleotide
  Sense strand starting at position 2170 of SEQ ID NO: 917120
acauuuccuugucauggga

SEQ ID NO: 1210235 - RNA, 19 nt, Artificial Sequence
  Description of Artificial Sequence: Synthetic oligonucleotide
  Antisense strand to SEQ ID NO: 1210234
ucccaugacaaggaaaugu

SEQ ID NO: 1210236 - RNA, 19 nt, Artificial Sequence
  Description of Artificial Sequence: Synthetic oligonucleotide
  Sense strand starting at position 2173 of SEQ ID NO: 917120
uuuccuugucaugggaaac

SEQ ID NO: 1210237 - RNA, 19 nt, Artificial Sequence
  Description of Artificial Sequence: Synthetic oligonucleotide
  Antisense strand to SEQ ID NO: 1210236
guuucccaugacaaggaaa

SEQ ID NO: 1210238 - RNA, 19 nt, Artificial Sequence
  Description of Artificial Sequence: Synthetic oligonucleotide
  Sense strand starting at position 2185 of SEQ ID NO: 917120
gggaaacuucccugagagu

SEQ ID NO: 1210239 - RNA, 19 nt, Artificial Sequence
  Description of Artificial Sequence: Synthetic oligonucleotide
  Antisense strand to SEQ ID NO: 1210238
acucucagggaaguuuccc

SEQ ID NO: 1210240 - RNA, 19 nt, Artificial Sequence
  Description of Artificial Sequence: Synthetic oligonucleotide
  Sense strand starting at position 2194 of SEQ ID NO: 917120
cccugagagucuccagaau

SEQ ID NO: 1210241 - RNA, 19 nt, Artificial Sequence
  Description of Artificial Sequence: Synthetic oligonucleotide
  Antisense strand to SEQ ID NO: 1210240
auucuggagacucucaggg

SEQ ID NO: 1210242 - RNA, 19 nt, Artificial Sequence
  Description of Artificial Sequence: Synthetic oligonucleotide
  Sense strand starting at position 2626 of SEQ ID NO: 917120
ccacauaagguuugaauga

SEQ ID NO: 1210243 - RNA, 19 nt, Artificial Sequence
  Description of Artificial Sequence: Synthetic oligonucleotide
  Antisense strand to SEQ ID NO: 1210242
ucauucaaaccuuaugugg

SEQ ID NO: 1210244 - RNA, 19 nt, Artificial Sequence
  Description of Artificial Sequence: Synthetic oligonucleotide
  Sense strand starting at position 2779 of SEQ ID NO: 917120
aguuacagaugaucccuaa

SEQ ID NO: 1210245 - RNA, 19 nt, Artificial Sequence
  Description of Artificial Sequence: Synthetic oligonucleotide
  Antisense strand to SEQ ID NO: 1210244
uuagggaucaucuguaacu

SEQ ID NO: 1210246 - RNA, 19 nt, Artificial Sequence
  Description of Artificial Sequence: Synthetic oligonucleotide
  Sense strand starting at position 2953 of SEQ ID NO: 917120
cagcucagaucagugugaa

SEQ ID NO: 1210247 - RNA, 19 nt, Artificial Sequence
  Description of Artificial Sequence: Synthetic oligonucleotide
  Antisense strand to SEQ ID NO: 1210246
uucacacugaucugagcug

SEQ ID NO: 1210248 - RNA, 19 nt, Artificial Sequence
  Description of Artificial Sequence: Synthetic oligonucleotide
  Sense strand starting at position 2954 of SEQ ID NO: 917120
agcucagaucagugugaau

SEQ ID NO: 1210249 - RNA, 19 nt, Artificial Sequence
  Description of Artificial Sequence: Synthetic oligonucleotide
  Antisense strand to SEQ ID NO: 1210248
auucacacugaucugagcu

SEQ ID NO: 1210250 - RNA, 19 nt, Artificial Sequence
  Description of Artificial Sequence: Synthetic oligonucleotide
  Sense strand starting at position 3016 of SEQ ID NO: 917120
aucuuugucccagacuuag

SEQ ID NO: 1210251 - RNA, 19 nt, Artificial Sequence
  Description of Artificial Sequence: Synthetic oligonucleotide
  Antisense strand to SEQ ID NO: 1210250
cuaagucugggacaaagau

SEQ ID NO: 1210252 - RNA, 19 nt, Artificial Sequence
  Description of Artificial Sequence: Synthetic oligonucleotide
  Sense strand starting at position 3022 of SEQ ID NO: 917120
gucccagacuuagcuauuu

SEQ ID NO: 1210253 - RNA, 19 nt, Artificial Sequence
  Description of Artificial Sequence: Synthetic oligonucleotide
  Antisense strand to SEQ ID NO: 1210252
aaauagcuaagucugggac

SEQ ID NO: 1210254 - RNA, 19 nt, Artificial Sequence
  Description of Artificial Sequence: Synthetic oligonucleotide
  Sense strand starting at position 3034 of SEQ ID NO: 917120
gcuauuuggcauugguuaa

SEQ ID NO: 1210255 - RNA, 19 nt, Artificial Sequence
  Description of Artificial Sequence: Synthetic oligonucleotide
  Antisense strand to SEQ ID NO: 1210254
uuaaccaaugccaaauagc

SEQ ID NO: 1210256 - RNA, 19 nt, Artificial Sequence
  Description of Artificial Sequence: Synthetic oligonucleotide
  Sense strand starting at position 3134 of SEQ ID NO: 917120
cacggaagaggucagugua

SEQ ID NO: 1210257 - RNA, 19 nt, Artificial Sequence
  Description of Artificial Sequence: Synthetic oligonucleotide
  Antisense strand to SEQ ID NO: 1210256
uacacugaccucuuccgug

SEQ ID NO: 1210258 - RNA, 19 nt, Artificial Sequence
  Description of Artificial Sequence: Synthetic oligonucleotide
  Sense strand starting at position 3155 of SEQ ID NO: 917120
ggaagauauugcucccuca

SEQ ID NO: 1210259 - RNA, 19 nt, Artificial Sequence
  Description of Artificial Sequence: Synthetic oligonucleotide
  Antisense strand to SEQ ID NO: 1210258
ugagggagcaauaucuucc

SEQ ID NO: 1210260 - RNA, 19 nt, Artificial Sequence
  Description of Artificial Sequence: Synthetic oligonucleotide
  Sense strand starting at position 3158 of SEQ ID NO: 917120
agauauugcucccucauag

SEQ ID NO: 1210261 - RNA, 19 nt, Artificial Sequence
  Description of Artificial Sequence: Synthetic oligonucleotide
  Antisense strand to SEQ ID NO: 1210260
cuaugagggagcaauaucu

SEQ ID NO: 1210262 - RNA, 19 nt, Artificial Sequence
  Description of Artificial Sequence: Synthetic oligonucleotide
  Sense strand starting at position 3303 of SEQ ID NO: 917120
uuggguacucccugaguac

SEQ ID NO: 1210263 - RNA, 19 nt, Artificial Sequence
  Description of Artificial Sequence: Synthetic oligonucleotide
  Antisense strand to SEQ ID NO: 1210262
guacucagggaguacccaa

SEQ ID NO: 1210264 - RNA, 19 nt, Artificial Sequence
  Description of Artificial Sequence: Synthetic oligonucleotide
  Sense strand starting at position 3325 of SEQ ID NO: 917120
gggcacuuuguagaguaua

SEQ ID NO: 1210265 - RNA, 19 nt, Artificial Sequence
  Description of Artificial Sequence: Synthetic oligonucleotide
  Antisense strand to SEQ ID NO: 1210264
uauacucuacaaagugccc

SEQ ID NO: 1210266 - RNA, 19 nt, Artificial Sequence
  Description of Artificial Sequence: Synthetic oligonucleotide
  Sense strand starting at position 3811 of SEQ ID NO: 917121
gggaauucuuuacuuaguc

SEQ ID NO: 1210267 - RNA, 19 nt, Artificial Sequence
  Description of Artificial Sequence: Synthetic oligonucleotide
  Antisense strand to SEQ ID NO: 1210266
gacuaaguaaagaauuccc

SEQ ID NO: 1210268 - RNA, 19 nt, Artificial Sequence
  Description of Artificial Sequence: Synthetic oligonucleotide
  Sense strand starting at position 169 of SEQ ID NO: 917121
ccucuuggucugcaauaau

SEQ ID NO: 1210269 - RNA, 19 nt, Artificial Sequence
  Description of Artificial Sequence: Synthetic oligonucleotide
  Antisense strand to SEQ ID NO: 1210268
auuauugcagaccaagagg

SEQ ID NO: 1210270 - RNA, 19 nt, Artificial Sequence
  Description of Artificial Sequence: Synthetic oligonucleotide
  Sense strand starting at position 172 of SEQ ID NO: 917121
cuuggucugcaauaauauc

SEQ ID NO: 1210271 - RNA, 19 nt, Artificial Sequence
  Description of Artificial Sequence: Synthetic oligonucleotide
  Antisense strand to SEQ ID NO: 1210270
gauauuauugcagaccaag

SEQ ID NO: 1210272 - RNA, 19 nt, Artificial Sequence
  Description of Artificial Sequence: Synthetic oligonucleotide
  Sense strand starting at position 1349 of SEQ ID NO: 917121
ggauaagccgcuuucguca

SEQ ID NO: 1210273 - RNA, 19 nt, Artificial Sequence
  Description of Artificial Sequence: Synthetic oligonucleotide
  Antisense strand to SEQ ID NO: 1210272
ugacgaaagcggcuuaucc

SEQ ID NO: 1210274 - RNA, 19 nt, Artificial Sequence
  Description of Artificial Sequence: Synthetic oligonucleotide
  Sense strand starting at position 1473 of SEQ ID NO: 917121
cccgcaagggcuuauauaa

SEQ ID NO: 1210275 - RNA, 19 nt, Artificial Sequence
  Description of Artificial Sequence: Synthetic oligonucleotide
  Antisense strand to SEQ ID NO: 1210274
uuauauaagcccuugcggg

SEQ ID NO: 1210276 - RNA, 19 nt, Artificial Sequence
  Description of Artificial Sequence: Synthetic oligonucleotide
  Sense strand starting at position 1585 of SEQ ID NO: 917121
ucgagucguaauuauggaa

SEQ ID NO: 1210277 - RNA, 19 nt, Artificial Sequence
  Description of Artificial Sequence: Synthetic oligonucleotide
  Antisense strand to SEQ ID NO: 1210276
uuccauaauuacgacucga

SEQ ID NO: 1210278 - RNA, 19 nt, Artificial Sequence
  Description of Artificial Sequence: Synthetic oligonucleotide
  Sense strand starting at position 1632 of SEQ ID NO: 917121
ucggauuccuucucuagac

SEQ ID NO: 1210279 - RNA, 19 nt, Artificial Sequence
  Description of Artificial Sequence: Synthetic oligonucleotide
  Antisense strand to SEQ ID NO: 1210278
gucuagagaaggaauccga

SEQ ID NO: 1210280 - RNA, 19 nt, Artificial Sequence
  Description of Artificial Sequence: Synthetic oligonucleotide
  Sense strand starting at position 1633 of SEQ ID NO: 917121
cggauuccuucucuagacu

SEQ ID NO: 1210281 - RNA, 19 nt, Artificial Sequence
  Description of Artificial Sequence: Synthetic oligonucleotide
  Antisense strand to SEQ ID NO: 1210280
agucuagagaaggaauccg

SEQ ID NO: 1210282 - RNA, 19 nt, Artificial Sequence
  Description of Artificial Sequence: Synthetic oligonucleotide
  Sense strand starting at position 1852 of SEQ ID NO: 917121
augucuuguccagagcuga

SEQ ID NO: 1210283 - RNA, 19 nt, Artificial Sequence
  Description of Artificial Sequence: Synthetic oligonucleotide
  Antisense strand to SEQ ID NO: 1210282
ucagcucuggacaagacau

SEQ ID NO: 1210284 - RNA, 19 nt, Artificial Sequence
  Description of Artificial Sequence: Synthetic oligonucleotide
  Sense strand starting at position 1893 of SEQ ID NO: 917121
guggcugucauugugguua

SEQ ID NO: 1210285 - RNA, 19 nt, Artificial Sequence
  Description of Artificial Sequence: Synthetic oligonucleotide
  Antisense strand to SEQ ID NO: 1210284
uaaccacaaugacagccac

SEQ ID NO: 1210286 - RNA, 19 nt, Artificial Sequence
  Description of Artificial Sequence: Synthetic oligonucleotide
  Sense strand starting at position 2006 of SEQ ID NO: 917121
gcaccuuugggacaaccau

SEQ ID NO: 1210287 - RNA, 19 nt, Artificial Sequence
  Description of Artificial Sequence: Synthetic oligonucleotide
  Antisense strand to SEQ ID NO: 1210286
augguugucccaaaggugc

SEQ ID NO: 1210288 - RNA, 19 nt, Artificial Sequence
  Description of Artificial Sequence: Synthetic oligonucleotide
  Sense strand starting at position 2012 of SEQ ID NO: 917121
uugggacaaccaugacuuu

SEQ ID NO: 1210289 - RNA, 19 nt, Artificial Sequence
  Description of Artificial Sequence: Synthetic oligonucleotide
  Antisense strand to SEQ ID NO: 1210288
aaagucaugguugucccaa

SEQ ID NO: 1210290 - RNA, 19 nt, Artificial Sequence
  Description of Artificial Sequence: Synthetic oligonucleotide
  Sense strand starting at position 2322 of SEQ ID NO: 917121
gggaucucugcagacauuc

SEQ ID NO: 1210291 - RNA, 19 nt, Artificial Sequence
  Description of Artificial Sequence: Synthetic oligonucleotide
  Antisense strand to SEQ ID NO: 1210290
gaaugucugcagagauccc

SEQ ID NO: 1210292 - RNA, 19 nt, Artificial Sequence
  Description of Artificial Sequence: Synthetic oligonucleotide
  Sense strand starting at position 2652 of SEQ ID NO: 917121
uuugcauuaggccaauaaa

SEQ ID NO: 1210293 - RNA, 19 nt, Artificial Sequence
  Description of Artificial Sequence: Synthetic oligonucleotide
  Antisense strand to SEQ ID NO: 1210292
uuuauuggccuaaugcaaa

SEQ ID NO: 1210294 - RNA, 19 nt, Artificial Sequence
  Description of Artificial Sequence: Synthetic oligonucleotide
  Sense strand starting at position 2701 of SEQ ID NO: 917121
uuauaaaugacguauguug

SEQ ID NO: 1210295 - RNA, 19 nt, Artificial Sequence
  Description of Artificial Sequence: Synthetic oligonucleotide
  Antisense strand to SEQ ID NO: 1210294
caacauacgucauuuauaa

SEQ ID NO: 1210296 - RNA, 19 nt, Artificial Sequence
  Description of Artificial Sequence: Synthetic oligonucleotide
  Sense strand starting at position 2735 of SEQ ID NO: 917121
guuguuaugagauacagcu

SEQ ID NO: 1210297 - RNA, 19 nt, Artificial Sequence
  Description of Artificial Sequence: Synthetic oligonucleotide
  Antisense strand to SEQ ID NO: 1210296
agcuguaucucauaacaac

SEQ ID NO: 1210298 - RNA, 19 nt, Artificial Sequence
  Description of Artificial Sequence: Synthetic oligonucleotide
  Sense strand starting at position 2741 of SEQ ID NO: 917121
augagauacagcugguuaa

SEQ ID NO: 1210299 - RNA, 19 nt, Artificial Sequence
  Description of Artificial Sequence: Synthetic oligonucleotide
  Antisense strand to SEQ ID NO: 1210298
uuaaccagcuguaucucau

SEQ ID NO: 1210300 - RNA, 19 nt, Artificial Sequence
  Description of Artificial Sequence: Synthetic oligonucleotide
  Sense strand starting at position 2742 of SEQ ID NO: 917121
ugagauacagcugguuaaa

SEQ ID NO: 1210301 - RNA, 19 nt, Artificial Sequence
  Description of Artificial Sequence: Synthetic oligonucleotide
  Antisense strand to SEQ ID NO: 1210300
uuuaaccagcuguaucuca

SEQ ID NO: 1210302 - RNA, 19 nt, Artificial Sequence
  Description of Artificial Sequence: Synthetic oligonucleotide
  Sense strand starting at position 2836 of SEQ ID NO: 917121
cgaagaaaucaaugaguuc

SEQ ID NO: 1210303 - RNA, 19 nt, Artificial Sequence
  Description of Artificial Sequence: Synthetic oligonucleotide
  Antisense strand to SEQ ID NO: 1210302
gaacucauugauuucuucg

SEQ ID NO: 1210304 - RNA, 19 nt, Artificial Sequence
  Description of Artificial Sequence: Synthetic oligonucleotide
  Sense strand starting at position 2869 of SEQ ID NO: 917121
uugucacuuccagacucua

SEQ ID NO: 1210305 - RNA, 19 nt, Artificial Sequence
  Description of Artificial Sequence: Synthetic oligonucleotide
  Antisense strand to SEQ ID NO: 1210304
uagagucuggaagugacaa

SEQ ID NO: 1210306 - RNA, 19 nt, Artificial Sequence
  Description of Artificial Sequence: Synthetic oligonucleotide
  Sense strand starting at position 2953 of SEQ ID NO: 917121
gagagaggcuuucccggau

SEQ ID NO: 1210307 - RNA, 19 nt, Artificial Sequence
  Description of Artificial Sequence: Synthetic oligonucleotide
  Antisense strand to SEQ ID NO: 1210306
auccgggaaagccucucuc

SEQ ID NO: 1210308 - RNA, 19 nt, Artificial Sequence
  Description of Artificial Sequence: Synthetic oligonucleotide
  Sense strand starting at position 2957 of SEQ ID NO: 917121
gaggcuuucccggauucua

SEQ ID NO: 1210309 - RNA, 19 nt, Artificial Sequence
  Description of Artificial Sequence: Synthetic oligonucleotide
  Antisense strand to SEQ ID NO: 1210308
uagaauccgggaaagccuc

SEQ ID NO: 1210310 - RNA, 19 nt, Artificial Sequence
  Description of Artificial Sequence: Synthetic oligonucleotide
  Sense strand starting at position 2980 of SEQ ID NO: 917121
accgcuugacaugaugaau

SEQ ID NO: 1210311 - RNA, 19 nt, Artificial Sequence
  Description of Artificial Sequence: Synthetic oligonucleotide
  Antisense strand to SEQ ID NO: 1210310
auucaucaugucaagcggu

SEQ ID NO: 1210312 - RNA, 19 nt, Artificial Sequence
  Description of Artificial Sequence: Synthetic oligonucleotide
  Sense strand starting at position 3029 of SEQ ID NO: 917121
cguguaaggaacuguaaag

SEQ ID NO: 1210313 - RNA, 19 nt, Artificial Sequence
  Description of Artificial Sequence: Synthetic oligonucleotide
  Antisense strand to SEQ ID NO: 1210312
cuuuacaguuccuuacacg

SEQ ID NO: 1210314 - RNA, 19 nt, Artificial Sequence
  Description of Artificial Sequence: Synthetic oligonucleotide
  Sense strand starting at position 3053 of SEQ ID NO: 917121
cccauuuguuacgucuuua

SEQ ID NO: 1210315 - RNA, 19 nt, Artificial Sequence
  Description of Artificial Sequence: Synthetic oligonucleotide
  Antisense strand to SEQ ID NO: 1210314
uaaagacguaacaaauggg

SEQ ID NO: 1210316 - RNA, 19 nt, Artificial Sequence
  Description of Artificial Sequence: Synthetic oligonucleotide
  Sense strand starting at position 3146 of SEQ ID NO: 917121
cccauacaguugcuuagau

SEQ ID NO: 1210317 - RNA, 19 nt, Artificial Sequence
  Description of Artificial Sequence: Synthetic oligonucleotide
  Antisense strand to SEQ ID NO: 1210316
aucuaagcaacuguauggg

SEQ ID NO: 1210318 - RNA, 19 nt, Artificial Sequence
  Description of Artificial Sequence: Synthetic oligonucleotide
  Sense strand starting at position 3147 of SEQ ID NO: 917121
ccauacaguugcuuagauu

SEQ ID NO: 1210319 - RNA, 19 nt, Artificial Sequence
  Description of Artificial Sequence: Synthetic oligonucleotide
  Antisense strand to SEQ ID NO: 1210318
aaucuaagcaacuguaugg

SEQ ID NO: 1210320 - RNA, 19 nt, Artificial Sequence
  Description of Artificial Sequence: Synthetic oligonucleotide
  Sense strand starting at position 3192 of SEQ ID NO: 917121
uuuggaagaguuugugacu

SEQ ID NO: 1210321 - RNA, 19 nt, Artificial Sequence
  Description of Artificial Sequence: Synthetic oligonucleotide
  Antisense strand to SEQ ID NO: 1210320
agucacaaacucuuccaaa

SEQ ID NO: 1210322 - RNA, 19 nt, Artificial Sequence
  Description of Artificial Sequence: Synthetic oligonucleotide
  Sense strand starting at position 3197 of SEQ ID NO: 917121
aagaguuugugacugggau

SEQ ID NO: 1210323 - RNA, 19 nt, Artificial Sequence
  Description of Artificial Sequence: Synthetic oligonucleotide
  Antisense strand to SEQ ID NO: 1210322
aucccagucacaaacucuu

SEQ ID NO: 1210324 - RNA, 19 nt, Artificial Sequence
  Description of Artificial Sequence: Synthetic oligonucleotide
  Sense strand starting at position 3198 of SEQ ID NO: 917121
agaguuugugacugggauc

SEQ ID NO: 1210325 - RNA, 19 nt, Artificial Sequence
  Description of Artificial Sequence: Synthetic oligonucleotide
  Antisense strand to SEQ ID NO: 1210324
gaucccagucacaaacucu

SEQ ID NO: 1210326 - RNA, 19 nt, Artificial Sequence
  Description of Artificial Sequence: Synthetic oligonucleotide
  Sense strand starting at position 3199 of SEQ ID NO: 917121
gaguuugugacugggauca

SEQ ID NO: 1210327 - RNA, 19 nt, Artificial Sequence
  Description of Artificial Sequence: Synthetic oligonucleotide
  Antisense strand to SEQ ID NO: 1210326
ugaucccagucacaaacuc

SEQ ID NO: 1210328 - RNA, 19 nt, Artificial Sequence
  Description of Artificial Sequence: Synthetic oligonucleotide
  Sense strand starting at position 3223 of SEQ ID NO: 917121
aaguaagucgccuauuaaa

SEQ ID NO: 1210329 - RNA, 19 nt, Artificial Sequence
  Description of Artificial Sequence: Synthetic oligonucleotide
  Antisense strand to SEQ ID NO: 1210328
uuuaauaggcgacuuacuu

SEQ ID NO: 1210330 - RNA, 19 nt, Artificial Sequence
  Description of Artificial Sequence: Synthetic oligonucleotide
  Sense strand starting at position 3248 of SEQ ID NO: 917121
cccuuucuccacugggaga

SEQ ID NO: 1210331 - RNA, 19 nt, Artificial Sequence
  Description of Artificial Sequence: Synthetic oligonucleotide
  Antisense strand to SEQ ID NO: 1210330
ucucccaguggagaaaggg

SEQ ID NO: 1210332 - RNA, 19 nt, Artificial Sequence
  Description of Artificial Sequence: Synthetic oligonucleotide
  Sense strand starting at position 3250 of SEQ ID NO: 917121
cuuucuccacugggagaaa

SEQ ID NO: 1210333 - RNA, 19 nt, Artificial Sequence
  Description of Artificial Sequence: Synthetic oligonucleotide
  Antisense strand to SEQ ID NO: 1210332
uuucucccaguggagaaag

SEQ ID NO: 1210334 - RNA, 19 nt, Artificial Sequence
  Description of Artificial Sequence: Synthetic oligonucleotide
  Sense strand starting at position 3261 of SEQ ID NO: 917121
gggagaaaguggucugcuu

SEQ ID NO: 1210335 - RNA, 19 nt, Artificial Sequence
  Description of Artificial Sequence: Synthetic oligonucleotide
  Antisense strand to SEQ ID NO: 1210334
aagcagaccacuuucuccc

SEQ ID NO: 1210336 - RNA, 19 nt, Artificial Sequence
  Description of Artificial Sequence: Synthetic oligonucleotide
  Sense strand starting at position 3263 of SEQ ID NO: 917121
gagaaaguggucugcuuau

SEQ ID NO: 1210337 - RNA, 19 nt, Artificial Sequence
  Description of Artificial Sequence: Synthetic oligonucleotide
  Antisense strand to SEQ ID NO: 1210336
auaagcagaccacuuucuc

SEQ ID NO: 1210338 - RNA, 19 nt, Artificial Sequence
  Description of Artificial Sequence: Synthetic oligonucleotide
  Sense strand starting at position 3297 of SEQ ID NO: 917121
ggucaaaugugacucuaau

SEQ ID NO: 1210339 - RNA, 19 nt, Artificial Sequence
  Description of Artificial Sequence: Synthetic oligonucleotide
  Antisense strand to SEQ ID NO: 1210338
auuagagucacauuugacc

SEQ ID NO: 1210340 - RNA, 19 nt, Artificial Sequence
  Description of Artificial Sequence: Synthetic oligonucleotide
  Sense strand starting at position 3342 of SEQ ID NO: 917121
ggagaaaucugauagagga

SEQ ID NO: 1210341 - RNA, 19 nt, Artificial Sequence
  Description of Artificial Sequence: Synthetic oligonucleotide
  Antisense strand to SEQ ID NO: 1210340
uccucuaucagauuucucc

SEQ ID NO: 1210342 - RNA, 19 nt, Artificial Sequence
  Description of Artificial Sequence: Synthetic oligonucleotide
  Sense strand starting at position 3456 of SEQ ID NO: 917121
aguuacuggcccugagaua

SEQ ID NO: 1210343 - RNA, 19 nt, Artificial Sequence
  Description of Artificial Sequence: Synthetic oligonucleotide
  Antisense strand to SEQ ID NO: 1210342
uaucucagggccaguaacu

SEQ ID NO: 1210344 - RNA, 19 nt, Artificial Sequence
  Description of Artificial Sequence: Synthetic oligonucleotide
  Sense strand starting at position 3565 of SEQ ID NO: 917121
acucaaaguccuuguuaca

SEQ ID NO: 1210345 - RNA, 19 nt, Artificial Sequence
  Description of Artificial Sequence: Synthetic oligonucleotide
  Antisense strand to SEQ ID NO: 1210344
uguaacaaggacuuugagu

SEQ ID NO: 1210346 - RNA, 19 nt, Artificial Sequence
  Description of Artificial Sequence: Synthetic oligonucleotide
  Sense strand starting at position 3701 of SEQ ID NO: 917122
guugguuagagccagguua

SEQ ID NO: 1210347 - RNA, 19 nt, Artificial Sequence
  Description of Artificial Sequence: Synthetic oligonucleotide
  Antisense strand to SEQ ID NO: 1210346
uaaccuggcucuaaccaac

SEQ ID NO: 1210348 - RNA, 19 nt, Artificial Sequence
  Description of Artificial Sequence: Synthetic oligonucleotide
  Sense strand starting at position 285 of SEQ ID NO: 917122
ccucuuggucugcaauaau

SEQ ID NO: 1210349 - RNA, 19 nt, Artificial Sequence
  Description of Artificial Sequence: Synthetic oligonucleotide
  Antisense strand to SEQ ID NO: 1210348
auuauugcagaccaagagg

SEQ ID NO: 1210350 - RNA, 19 nt, Artificial Sequence
  Description of Artificial Sequence: Synthetic oligonucleotide
  Sense strand starting at position 288 of SEQ ID NO: 917122
cuuggucugcaauaauauc

SEQ ID NO: 1210351 - RNA, 19 nt, Artificial Sequence
  Description of Artificial Sequence: Synthetic oligonucleotide
  Antisense strand to SEQ ID NO: 1210350
gauauuauugcagaccaag

SEQ ID NO: 1210352 - RNA, 19 nt, Artificial Sequence
  Description of Artificial Sequence: Synthetic oligonucleotide
  Sense strand starting at position 1465 of SEQ ID NO: 917122
ggauaagccgcuuucguca

SEQ ID NO: 1210353 - RNA, 19 nt, Artificial Sequence
  Description of Artificial Sequence: Synthetic oligonucleotide
  Antisense strand to SEQ ID NO: 1210352
ugacgaaagcggcuuaucc

SEQ ID NO: 1210354 - RNA, 19 nt, Artificial Sequence
  Description of Artificial Sequence: Synthetic oligonucleotide
  Sense strand starting at position 1589 of SEQ ID NO: 917122
cccgcaagggcuuauauaa

SEQ ID NO: 1210355 - RNA, 19 nt, Artificial Sequence
  Description of Artificial Sequence: Synthetic oligonucleotide
  Antisense strand to SEQ ID NO: 1210354
uuauauaagcccuugcggg

SEQ ID NO: 1210356 - RNA, 19 nt, Artificial Sequence
  Description of Artificial Sequence: Synthetic oligonucleotide
  Sense strand starting at position 1701 of SEQ ID NO: 917122
ucgagucguaauuauggaa

SEQ ID NO: 1210357 - RNA, 19 nt, Artificial Sequence
  Description of Artificial Sequence: Synthetic oligonucleotide
  Antisense strand to SEQ ID NO: 1210356
uuccauaauuacgacucga

SEQ ID NO: 1210358 - RNA, 19 nt, Artificial Sequence
  Description of Artificial Sequence: Synthetic oligonucleotide
  Sense strand starting at position 1748 of SEQ ID NO: 917122
ucggauuccuucucuagac

SEQ ID NO: 1210359 - RNA, 19 nt, Artificial Sequence
  Description of Artificial Sequence: Synthetic oligonucleotide
  Antisense strand to SEQ ID NO: 1210358
gucuagagaaggaauccga

SEQ ID NO: 1210360 - RNA, 19 nt, Artificial Sequence
  Description of Artificial Sequence: Synthetic oligonucleotide
  Sense strand starting at position 1749 of SEQ ID NO: 917122
cggauuccuucucuagacu

SEQ ID NO: 1210361 - RNA, 19 nt, Artificial Sequence
  Description of Artificial Sequence: Synthetic oligonucleotide
  Antisense strand to SEQ ID NO: 1210360
agucuagagaaggaauccg

SEQ ID NO: 1210362 - RNA, 19 nt, Artificial Sequence
  Description of Artificial Sequence: Synthetic oligonucleotide
  Sense strand starting at position 1968 of SEQ ID NO: 917122
augucuuguccagagcuga

SEQ ID NO: 1210363 - RNA, 19 nt, Artificial Sequence
  Description of Artificial Sequence: Synthetic oligonucleotide
  Antisense strand to SEQ ID NO: 1210362
ucagcucuggacaagacau

SEQ ID NO: 1210364 - RNA, 19 nt, Artificial Sequence
  Description of Artificial Sequence: Synthetic oligonucleotide
  Sense strand starting at position 2009 of SEQ ID NO: 917122
guggcugucauugugguua

SEQ ID NO: 1210365 - RNA, 19 nt, Artificial Sequence
  Description of Artificial Sequence: Synthetic oligonucleotide
  Antisense strand to SEQ ID NO: 1210364
uaaccacaaugacagccac

SEQ ID NO: 1210366 - RNA, 19 nt, Artificial Sequence
  Description of Artificial Sequence: Synthetic oligonucleotide
  Sense strand starting at position 2122 of SEQ ID NO: 917122
gcaccuuugggacaaccau

SEQ ID NO: 1210367 - RNA, 19 nt, Artificial Sequence
  Description of Artificial Sequence: Synthetic oligonucleotide
  Antisense strand to SEQ ID NO: 1210366
augguugucccaaaggugc

SEQ ID NO: 1210368 - RNA, 19 nt, Artificial Sequence
  Description of Artificial Sequence: Synthetic oligonucleotide
  Sense strand starting at position 2128 of SEQ ID NO: 917122
uugggacaaccaugacuuu

SEQ ID NO: 1210369 - RNA, 19 nt, Artificial Sequence
  Description of Artificial Sequence: Synthetic oligonucleotide
  Antisense strand to SEQ ID NO: 1210368
aaagucaugguugucccaa

SEQ ID NO: 1210370 - RNA, 19 nt, Artificial Sequence
  Description of Artificial Sequence: Synthetic oligonucleotide
  Sense strand starting at position 2438 of SEQ ID NO: 917122
gggaucucugcagacauuc

SEQ ID NO: 1210371 - RNA, 19 nt, Artificial Sequence
  Description of Artificial Sequence: Synthetic oligonucleotide
  Antisense strand to SEQ ID NO: 1210370
gaaugucugcagagauccc

SEQ ID NO: 1210372 - RNA, 19 nt, Artificial Sequence
  Description of Artificial Sequence: Synthetic oligonucleotide
  Sense strand starting at position 2768 of SEQ ID NO: 917122
uuugcauuaggccaauaaa

SEQ ID NO: 1210373 - RNA, 19 nt, Artificial Sequence
  Description of Artificial Sequence: Synthetic oligonucleotide
  Antisense strand to SEQ ID NO: 1210372
uuuauuggccuaaugcaaa

SEQ ID NO: 1210374 - RNA, 19 nt, Artificial Sequence
  Description of Artificial Sequence: Synthetic oligonucleotide
  Sense strand starting at position 2817 of SEQ ID NO: 917122
uuauaaaugacguauguug

SEQ ID NO: 1210375 - RNA, 19 nt, Artificial Sequence
  Description of Artificial Sequence: Synthetic oligonucleotide
  Antisense strand to SEQ ID NO: 1210374
caacauacgucauuuauaa

SEQ ID NO: 1210376 - RNA, 19 nt, Artificial Sequence
  Description of Artificial Sequence: Synthetic oligonucleotide
  Sense strand starting at position 2851 of SEQ ID NO: 917122
guuguuaugagauacagcu

SEQ ID NO: 1210377 - RNA, 19 nt, Artificial Sequence
  Description of Artificial Sequence: Synthetic oligonucleotide
  Antisense strand to SEQ ID NO: 1210376
agcuguaucucauaacaac

SEQ ID NO: 1210378 - RNA, 19 nt, Artificial Sequence
  Description of Artificial Sequence: Synthetic oligonucleotide
  Sense strand starting at position 2857 of SEQ ID NO: 917122
augagauacagcugguuaa

SEQ ID NO: 1210379 - RNA, 19 nt, Artificial Sequence
  Description of Artificial Sequence: Synthetic oligonucleotide
  Antisense strand to SEQ ID NO: 1210378
uuaaccagcuguaucucau

SEQ ID NO: 1210380 - RNA, 19 nt, Artificial Sequence
  Description of Artificial Sequence: Synthetic oligonucleotide
  Sense strand starting at position 2858 of SEQ ID NO: 917122
ugagauacagcugguuaaa

SEQ ID NO: 1210381 - RNA, 19 nt, Artificial Sequence
  Description of Artificial Sequence: Synthetic oligonucleotide
  Antisense strand to SEQ ID NO: 1210380
uuuaaccagcuguaucuca

SEQ ID NO: 1210382 - RNA, 19 nt, Artificial Sequence
  Description of Artificial Sequence: Synthetic oligonucleotide
  Sense strand starting at position 2952 of SEQ ID NO: 917122
cgaagaaaucaaugaguuc

SEQ ID NO: 1210383 - RNA, 19 nt, Artificial Sequence
  Description of Artificial Sequence: Synthetic oligonucleotide
  Antisense strand to SEQ ID NO: 1210382
gaacucauugauuucuucg

SEQ ID NO: 1210384 - RNA, 19 nt, Artificial Sequence
  Description of Artificial Sequence: Synthetic oligonucleotide
  Sense strand starting at position 2985 of SEQ ID NO: 917122
uugucacuuccagacucua

SEQ ID NO: 1210385 - RNA, 19 nt, Artificial Sequence
  Description of Artificial Sequence: Synthetic oligonucleotide
  Antisense strand to SEQ ID NO: 1210384
uagagucuggaagugacaa

SEQ ID NO: 1210386 - RNA, 19 nt, Artificial Sequence
  Description of Artificial Sequence: Synthetic oligonucleotide
  Sense strand starting at position 3069 of SEQ ID NO: 917122
gagagaggcuuucccggau

SEQ ID NO: 1210387 - RNA, 19 nt, Artificial Sequence
  Description of Artificial Sequence: Synthetic oligonucleotide
  Antisense strand to SEQ ID NO: 1210386
auccgggaaagccucucuc

SEQ ID NO: 1210388 - RNA, 19 nt, Artificial Sequence
  Description of Artificial Sequence: Synthetic oligonucleotide
  Sense strand starting at position 3073 of SEQ ID NO: 917122
gaggcuuucccggauucua

SEQ ID NO: 1210389 - RNA, 19 nt, Artificial Sequence
  Description of Artificial Sequence: Synthetic oligonucleotide
  Antisense strand to SEQ ID NO: 1210388
uagaauccgggaaagccuc

SEQ ID NO: 1210390 - RNA, 19 nt, Artificial Sequence
  Description of Artificial Sequence: Synthetic oligonucleotide
  Sense strand starting at position 3096 of SEQ ID NO: 917122
accgcuugacaugaugaau

SEQ ID NO: 1210391 - RNA, 19 nt, Artificial Sequence
  Description of Artificial Sequence: Synthetic oligonucleotide
  Antisense strand to SEQ ID NO: 1210390
auucaucaugucaagcggu

SEQ ID NO: 1210392 - RNA, 19 nt, Artificial Sequence
  Description of Artificial Sequence: Synthetic oligonucleotide
  Sense strand starting at position 3145 of SEQ ID NO: 917122
cguguaaggaacuguaaag

SEQ ID NO: 1210393 - RNA, 19 nt, Artificial Sequence
  Description of Artificial Sequence: Synthetic oligonucleotide
  Antisense strand to SEQ ID NO: 1210392
cuuuacaguuccuuacacg

SEQ ID NO: 1210394 - RNA, 19 nt, Artificial Sequence
  Description of Artificial Sequence: Synthetic oligonucleotide
  Sense strand starting at position 3169 of SEQ ID NO: 917122
cccauuuguuacgucuuua

SEQ ID NO: 1210395 - RNA, 19 nt, Artificial Sequence
  Description of Artificial Sequence: Synthetic oligonucleotide
  Antisense strand to SEQ ID NO: 1210394
uaaagacguaacaaauggg

SEQ ID NO: 1210396 - RNA, 19 nt, Artificial Sequence
  Description of Artificial Sequence: Synthetic oligonucleotide
  Sense strand starting at position 3262 of SEQ ID NO: 917122
cccauacaguugcuuagau

SEQ ID NO: 1210397 - RNA, 19 nt, Artificial Sequence
  Description of Artificial Sequence: Synthetic oligonucleotide
  Antisense strand to SEQ ID NO: 1210396
aucuaagcaacuguauggg

SEQ ID NO: 1210398 - RNA, 19 nt, Artificial Sequence
  Description of Artificial Sequence: Synthetic oligonucleotide
  Sense strand starting at position 3263 of SEQ ID NO: 917122
ccauacaguugcuuagauu

SEQ ID NO: 1210399 - RNA, 19 nt, Artificial Sequence
  Description of Artificial Sequence: Synthetic oligonucleotide
  Antisense strand to SEQ ID NO: 1210398
aaucuaagcaacuguaugg

SEQ ID NO: 1210400 - RNA, 19 nt, Artificial Sequence
  Description of Artificial Sequence: Synthetic oligonucleotide
  Sense strand starting at position 3308 of SEQ ID NO: 917122
uuuggaagaguuugugacu

SEQ ID NO: 1210401 - RNA, 19 nt, Artificial Sequence
  Description of Artificial Sequence: Synthetic oligonucleotide
  Antisense strand to SEQ ID NO: 1210400
agucacaaacucuuccaaa

SEQ ID NO: 1210402 - RNA, 19 nt, Artificial Sequence
  Description of Artificial Sequence: Synthetic oligonucleotide
  Sense strand starting at position 3313 of SEQ ID NO: 917122
aagaguuugugacugggau

SEQ ID NO: 1210403 - RNA, 19 nt, Artificial Sequence
  Description of Artificial Sequence: Synthetic oligonucleotide
  Antisense strand to SEQ ID NO: 1210402
aucccagucacaaacucuu

SEQ ID NO: 1210404 - RNA, 19 nt, Artificial Sequence
  Description of Artificial Sequence: Synthetic oligonucleotide
  Sense strand starting at position 3314 of SEQ ID NO: 917122
agaguuugugacugggauc

SEQ ID NO: 1210405 - RNA, 19 nt, Artificial Sequence
  Description of Artificial Sequence: Synthetic oligonucleotide
  Antisense strand to SEQ ID NO: 1210404
gaucccagucacaaacucu

SEQ ID NO: 1210406 - RNA, 19 nt, Artificial Sequence
  Description of Artificial Sequence: Synthetic oligonucleotide
  Sense strand starting at position 3315 of SEQ ID NO: 917122
gaguuugugacugggauca

SEQ ID NO: 1210407 - RNA, 19 nt, Artificial Sequence
  Description of Artificial Sequence: Synthetic oligonucleotide
  Antisense strand to SEQ ID NO: 1210406
ugaucccagucacaaacuc

SEQ ID NO: 1210408 - RNA, 19 nt, Artificial Sequence
  Description of Artificial Sequence: Synthetic oligonucleotide
  Sense strand starting at position 3339 of SEQ ID NO: 917122
aaguaagucgccuauuaaa

SEQ ID NO: 1210409 - RNA, 19 nt, Artificial Sequence
  Description of Artificial Sequence: Synthetic oligonucleotide
  Antisense strand to SEQ ID NO: 1210408
uuuaauaggcgacuuacuu

SEQ ID NO: 1210410 - RNA, 19 nt, Artificial Sequence
  Description of Artificial Sequence: Synthetic oligonucleotide
  Sense strand starting at position 3364 of SEQ ID NO: 917122
cccuuucuccacugggaga

SEQ ID NO: 1210411 - RNA, 19 nt, Artificial Sequence
  Description of Artificial Sequence: Synthetic oligonucleotide
  Antisense strand to SEQ ID NO: 1210410
ucucccaguggagaaaggg

SEQ ID NO: 1210412 - RNA, 19 nt, Artificial Sequence
  Description of Artificial Sequence: Synthetic oligonucleotide
  Sense strand starting at position 3366 of SEQ ID NO: 917122
cuuucuccacugggagaaa

SEQ ID NO: 1210413 - RNA, 19 nt, Artificial Sequence
  Description of Artificial Sequence: Synthetic oligonucleotide
  Antisense strand to SEQ ID NO: 1210412
uuucucccaguggagaaag

SEQ ID NO: 1210414 - RNA, 19 nt, Artificial Sequence
  Description of Artificial Sequence: Synthetic oligonucleotide
  Sense strand starting at position 3377 of SEQ ID NO: 917122
gggagaaaguggucugcuu

SEQ ID NO: 1210415 - RNA, 19 nt, Artificial Sequence
  Description of Artificial Sequence: Synthetic oligonucleotide
  Antisense strand to SEQ ID NO: 1210414
aagcagaccacuuucuccc

SEQ ID NO: 1210416 - RNA, 19 nt, Artificial Sequence
  Description of Artificial Sequence: Synthetic oligonucleotide
  Sense strand starting at position 3379 of SEQ ID NO: 917122
gagaaaguggucugcuuau

SEQ ID NO: 1210417 - RNA, 19 nt, Artificial Sequence
  Description of Artificial Sequence: Synthetic oligonucleotide
  Antisense strand to SEQ ID NO: 1210416
auaagcagaccacuuucuc

SEQ ID NO: 1210418 - RNA, 19 nt, Artificial Sequence
  Description of Artificial Sequence: Synthetic oligonucleotide
  Sense strand starting at position 3413 of SEQ ID NO: 917122
ggucaaaugugacucuaau

SEQ ID NO: 1210419 - RNA, 19 nt, Artificial Sequence
  Description of Artificial Sequence: Synthetic oligonucleotide
  Antisense strand to SEQ ID NO: 1210418
auuagagucacauuugacc

SEQ ID NO: 1210420 - RNA, 19 nt, Artificial Sequence
  Description of Artificial Sequence: Synthetic oligonucleotide
  Sense strand starting at position 3458 of SEQ ID NO: 917122
ggagaaaucugauagagga

SEQ ID NO: 1210421 - RNA, 19 nt, Artificial Sequence
  Description of Artificial Sequence: Synthetic oligonucleotide
  Antisense strand to SEQ ID NO: 1210420
uccucuaucagauuucucc

SEQ ID NO: 1210422 - RNA, 19 nt, Artificial Sequence
  Description of Artificial Sequence: Synthetic oligonucleotide
  Sense strand starting at position 3572 of SEQ ID NO: 917122
aguuacuggcccugagaua

SEQ ID NO: 1210423 - RNA, 19 nt, Artificial Sequence
  Description of Artificial Sequence: Synthetic oligonucleotide
  Antisense strand to SEQ ID NO: 1210422
uaucucagggccaguaacu

SEQ ID NO: 1210424 - RNA, 19 nt, Artificial Sequence
  Description of Artificial Sequence: Synthetic oligonucleotide
  Sense strand starting at position 3681 of SEQ ID NO: 917122
acucaaaguccuuguuaca

SEQ ID NO: 1210425 - RNA, 19 nt, Artificial Sequence
  Description of Artificial Sequence: Synthetic oligonucleotide
  Antisense strand to SEQ ID NO: 1210424
uguaacaaggacuuugagu

SEQ ID NO: 1210426 - RNA, 19 nt, Artificial Sequence
  Description of Artificial Sequence: Synthetic oligonucleotide
  Sense strand starting at position 3817 of SEQ ID NO: 917123
guugguuagagccagguua

SEQ ID NO: 1210427 - RNA, 19 nt, Artificial Sequence
  Description of Artificial Sequence: Synthetic oligonucleotide
  Antisense strand to SEQ ID NO: 1210426
uaaccuggcucuaaccaac

SEQ ID NO: 1210428 - RNA, 19 nt, Artificial Sequence
  Description of Artificial Sequence: Synthetic oligonucleotide
  Sense strand starting at position 12 of SEQ ID NO: 917123
ggaggcaccacuggauuaa

SEQ ID NO: 1210429 - RNA, 19 nt, Artificial Sequence
  Description of Artificial Sequence: Synthetic oligonucleotide
  Antisense strand to SEQ ID NO: 1210428
uuaauccaguggugccucc

SEQ ID NO: 1210430 - RNA, 19 nt, Artificial Sequence
  Description of Artificial Sequence: Synthetic oligonucleotide
  Sense strand starting at position 38 of SEQ ID NO: 917123
aagugaccaucuguaauga

SEQ ID NO: 1210431 - RNA, 19 nt, Artificial Sequence
  Description of Artificial Sequence: Synthetic oligonucleotide
  Antisense strand to SEQ ID NO: 1210430
ucauuacagauggucacuu

SEQ ID NO: 1210432 - RNA, 19 nt, Artificial Sequence
  Description of Artificial Sequence: Synthetic oligonucleotide
  Sense strand starting at position 97 of SEQ ID NO: 917123
cccaguauugugucguucu

SEQ ID NO: 1210433 - RNA, 19 nt, Artificial Sequence
  Description of Artificial Sequence: Synthetic oligonucleotide
  Antisense strand to SEQ ID NO: 1210432
agaacgacacaauacuggg

SEQ ID NO: 1210434 - RNA, 19 nt, Artificial Sequence
  Description of Artificial Sequence: Synthetic oligonucleotide
  Sense strand starting at position 99 of SEQ ID NO: 917123
caguauugugucguucuca

SEQ ID NO: 1210435 - RNA, 19 nt, Artificial Sequence
  Description of Artificial Sequence: Synthetic oligonucleotide
  Antisense strand to SEQ ID NO: 1210434
ugagaacgacacaauacug

SEQ ID NO: 1210436 - RNA, 19 nt, Artificial Sequence
  Description of Artificial Sequence: Synthetic oligonucleotide
  Sense strand starting at position 108 of SEQ ID NO: 917123
gucguucucaaccagggua

SEQ ID NO: 1210437 - RNA, 19 nt, Artificial Sequence
  Description of Artificial Sequence: Synthetic oligonucleotide
  Antisense strand to SEQ ID NO: 1210436
uacccugguugagaacgac

SEQ ID NO: 1210438 - RNA, 19 nt, Artificial Sequence
  Description of Artificial Sequence: Synthetic oligonucleotide
  Sense strand starting at position 111 of SEQ ID NO: 917123
guucucaaccaggguagaa

SEQ ID NO: 1210439 - RNA, 19 nt, Artificial Sequence
  Description of Artificial Sequence: Synthetic oligonucleotide
  Antisense strand to SEQ ID NO: 1210438
uucuacccugguugagaac

SEQ ID NO: 1210440 - RNA, 19 nt, Artificial Sequence
  Description of Artificial Sequence: Synthetic oligonucleotide
  Sense strand starting at position 139 of SEQ ID NO: 917123
uccuaaaguuuaguguaaa

SEQ ID NO: 1210441 - RNA, 19 nt, Artificial Sequence
  Description of Artificial Sequence: Synthetic oligonucleotide
  Antisense strand to SEQ ID NO: 1210440
uuuacacuaaacuuuagga

SEQ ID NO: 1210442 - RNA, 19 nt, Artificial Sequence
  Description of Artificial Sequence: Synthetic oligonucleotide
  Sense strand starting at position 204 of SEQ ID NO: 917123
uacugacugccucgggaaa

SEQ ID NO: 1210443 - RNA, 19 nt, Artificial Sequence
  Description of Artificial Sequence: Synthetic oligonucleotide
  Antisense strand to SEQ ID NO: 1210442
uuucccgaggcagucagua

SEQ ID NO: 1210444 - RNA, 19 nt, Artificial Sequence
  Description of Artificial Sequence: Synthetic oligonucleotide
  Sense strand starting at position 205 of SEQ ID NO: 917123
acugacugccucgggaaau

SEQ ID NO: 1210445 - RNA, 19 nt, Artificial Sequence
  Description of Artificial Sequence: Synthetic oligonucleotide
  Antisense strand to SEQ ID NO: 1210444
auuucccgaggcagucagu

SEQ ID NO: 1210446 - RNA, 19 nt, Artificial Sequence
  Description of Artificial Sequence: Synthetic oligonucleotide
  Sense strand starting at position 367 of SEQ ID NO: 917123
gcccuugaggacugauuaa

SEQ ID NO: 1210447 - RNA, 19 nt, Artificial Sequence
  Description of Artificial Sequence: Synthetic oligonucleotide
  Antisense strand to SEQ ID NO: 1210446
uuaaucaguccucaagggc

SEQ ID NO: 1210448 - RNA, 19 nt, Artificial Sequence
  Description of Artificial Sequence: Synthetic oligonucleotide
  Sense strand starting at position 714 of SEQ ID NO: 917123
uucugaaaugcacggugaa

SEQ ID NO: 1210449 - RNA, 19 nt, Artificial Sequence
  Description of Artificial Sequence: Synthetic oligonucleotide
  Antisense strand to SEQ ID NO: 1210448
uucaccgugcauuucagaa

SEQ ID NO: 1210450 - RNA, 19 nt, Artificial Sequence
  Description of Artificial Sequence: Synthetic oligonucleotide
  Sense strand starting at position 715 of SEQ ID NO: 917123
ucugaaaugcacggugaaa

SEQ ID NO: 1210451 - RNA, 19 nt, Artificial Sequence
  Description of Artificial Sequence: Synthetic oligonucleotide
  Antisense strand to SEQ ID NO: 1210450
uuucaccgugcauuucaga

SEQ ID NO: 1210452 - RNA, 19 nt, Artificial Sequence
  Description of Artificial Sequence: Synthetic oligonucleotide
  Sense strand starting at position 717 of SEQ ID NO: 917123
ugaaaugcacggugaaauc

SEQ ID NO: 1210453 - RNA, 19 nt, Artificial Sequence
  Description of Artificial Sequence: Synthetic oligonucleotide
  Antisense strand to SEQ ID NO: 1210452
gauuucaccgugcauuuca

SEQ ID NO: 1210454 - RNA, 19 nt, Artificial Sequence
  Description of Artificial Sequence: Synthetic oligonucleotide
  Sense strand starting at position 738 of SEQ ID NO: 917123
auuuaagauuucugagagc

SEQ ID NO: 1210455 - RNA, 19 nt, Artificial Sequence
  Description of Artificial Sequence: Synthetic oligonucleotide
  Antisense strand to SEQ ID NO: 1210454
gcucucagaaaucuuaaau

SEQ ID NO: 1210456 - RNA, 19 nt, Artificial Sequence
  Description of Artificial Sequence: Synthetic oligonucleotide
  Sense strand starting at position 741 of SEQ ID NO: 917123
uaagauuucugagagcaag

SEQ ID NO: 1210457 - RNA, 19 nt, Artificial Sequence
  Description of Artificial Sequence: Synthetic oligonucleotide
  Antisense strand to SEQ ID NO: 1210456
cuugcucucagaaaucuua

SEQ ID NO: 1210458 - RNA, 19 nt, Artificial Sequence
  Description of Artificial Sequence: Synthetic oligonucleotide
  Sense strand starting at position 783 of SEQ ID NO: 917123
ggaaacgguagcuauccaa

SEQ ID NO: 1210459 - RNA, 19 nt, Artificial Sequence
  Description of Artificial Sequence: Synthetic oligonucleotide
  Antisense strand to SEQ ID NO: 1210458
uuggauagcuaccguuucc

SEQ ID NO: 1210460 - RNA, 19 nt, Artificial Sequence
  Description of Artificial Sequence: Synthetic oligonucleotide
  Sense strand starting at position 914 of SEQ ID NO: 917123
ugcaguaauuuagauccaa

SEQ ID NO: 1210461 - RNA, 19 nt, Artificial Sequence
  Description of Artificial Sequence: Synthetic oligonucleotide
  Antisense strand to SEQ ID NO: 1210460
uuggaucuaaauuacugca

SEQ ID NO: 1210462 - RNA, 19 nt, Artificial Sequence
  Description of Artificial Sequence: Synthetic oligonucleotide
  Sense strand starting at position 1193 of SEQ ID NO: 917123
ggcgacuucgcggccuaau

SEQ ID NO: 1210463 - RNA, 19 nt, Artificial Sequence
  Description of Artificial Sequence: Synthetic oligonucleotide
  Antisense strand to SEQ ID NO: 1210462
auuaggccgcgaagucgcc

SEQ ID NO: 1210464 - RNA, 19 nt, Artificial Sequence
  Description of Artificial Sequence: Synthetic oligonucleotide
  Sense strand starting at position 1194 of SEQ ID NO: 917123
gcgacuucgcggccuaaua

SEQ ID NO: 1210465 - RNA, 19 nt, Artificial Sequence
  Description of Artificial Sequence: Synthetic oligonucleotide
  Antisense strand to SEQ ID NO: 1210464
uauuaggccgcgaagucgc

SEQ ID NO: 1210466 - RNA, 19 nt, Artificial Sequence
  Description of Artificial Sequence: Synthetic oligonucleotide
  Sense strand starting at position 2764 of SEQ ID NO: 917123
ggugaaguuguccaguaaa

SEQ ID NO: 1210467 - RNA, 19 nt, Artificial Sequence
  Description of Artificial Sequence: Synthetic oligonucleotide
  Antisense strand to SEQ ID NO: 1210466
uuuacuggacaacuucacc

SEQ ID NO: 1210468 - RNA, 19 nt, Artificial Sequence
  Description of Artificial Sequence: Synthetic oligonucleotide
  Sense strand starting at position 2839 of SEQ ID NO: 917123
agcccuaguuccuuacaga

SEQ ID NO: 1210469 - RNA, 19 nt, Artificial Sequence
  Description of Artificial Sequence: Synthetic oligonucleotide
  Antisense strand to SEQ ID NO: 1210468
ucuguaaggaacuagggcu

SEQ ID NO: 1210470 - RNA, 19 nt, Artificial Sequence
  Description of Artificial Sequence: Synthetic oligonucleotide
  Sense strand starting at position 2840 of SEQ ID NO: 917123
gcccuaguuccuuacagag

SEQ ID NO: 1210471 - RNA, 19 nt, Artificial Sequence
  Description of Artificial Sequence: Synthetic oligonucleotide
  Antisense strand to SEQ ID NO: 1210470
cucuguaaggaacuagggc

SEQ ID NO: 1210472 - RNA, 19 nt, Artificial Sequence
  Description of Artificial Sequence: Synthetic oligonucleotide
  Sense strand starting at position 2860 of SEQ ID NO: 917123
aggacagauuccucgguuu

SEQ ID NO: 1210473 - RNA, 19 nt, Artificial Sequence
  Description of Artificial Sequence: Synthetic oligonucleotide
  Antisense strand to SEQ ID NO: 1210472
aaaccgaggaaucuguccu

SEQ ID NO: 1210474 - RNA, 19 nt, Artificial Sequence
  Description of Artificial Sequence: Synthetic oligonucleotide
  Sense strand starting at position 2915 of SEQ ID NO: 917123
gggcuaggacuauacguuu

SEQ ID NO: 1210475 - RNA, 19 nt, Artificial Sequence
  Description of Artificial Sequence: Synthetic oligonucleotide
  Antisense strand to SEQ ID NO: 1210474
aaacguauaguccuagccc

SEQ ID NO: 1210476 - RNA, 19 nt, Artificial Sequence
  Description of Artificial Sequence: Synthetic oligonucleotide
  Sense strand starting at position 2934 of SEQ ID NO: 917123
gcaaguuuaagagauaagc

SEQ ID NO: 1210477 - RNA, 19 nt, Artificial Sequence
  Description of Artificial Sequence: Synthetic oligonucleotide
  Antisense strand to SEQ ID NO: 1210476
gcuuaucucuuaaacuugc

SEQ ID NO: 1210478 - RNA, 19 nt, Artificial Sequence
  Description of Artificial Sequence: Synthetic oligonucleotide
  Sense strand starting at position 3081 of SEQ ID NO: 917123
uuaugaaagcaucaguaau

SEQ ID NO: 1210479 - RNA, 19 nt, Artificial Sequence
  Description of Artificial Sequence: Synthetic oligonucleotide
  Antisense strand to SEQ ID NO: 1210478
auuacugaugcuuucauaa

SEQ ID NO: 1210480 - RNA, 19 nt, Artificial Sequence
  Description of Artificial Sequence: Synthetic oligonucleotide
  Sense strand starting at position 3255 of SEQ ID NO: 917123
gcaauuagaugucuaggga

SEQ ID NO: 1210481 - RNA, 19 nt, Artificial Sequence
  Description of Artificial Sequence: Synthetic oligonucleotide
  Antisense strand to SEQ ID NO: 1210480
ucccuagacaucuaauugc

SEQ ID NO: 1210482 - RNA, 19 nt, Artificial Sequence
  Description of Artificial Sequence: Synthetic oligonucleotide
  Sense strand starting at position 3258 of SEQ ID NO: 917123
auuagaugucuagggaagu

SEQ ID NO: 1210483 - RNA, 19 nt, Artificial Sequence
  Description of Artificial Sequence: Synthetic oligonucleotide
  Antisense strand to SEQ ID NO: 1210482
acuucccuagacaucuaau

SEQ ID NO: 1210484 - RNA, 19 nt, Artificial Sequence
  Description of Artificial Sequence: Synthetic oligonucleotide
  Sense strand starting at position 3274 of SEQ ID NO: 917123
aguacugaugcacgagaaa

SEQ ID NO: 1210485 - RNA, 19 nt, Artificial Sequence
  Description of Artificial Sequence: Synthetic oligonucleotide
  Antisense strand to SEQ ID NO: 1210484
uuucucgugcaucaguacu

SEQ ID NO: 1210486 - RNA, 19 nt, Artificial Sequence
  Description of Artificial Sequence: Synthetic oligonucleotide
  Sense strand starting at position 3299 of SEQ ID NO: 917123
ugcagcauugguuaauaaa

SEQ ID NO: 1210487 - RNA, 19 nt, Artificial Sequence
  Description of Artificial Sequence: Synthetic oligonucleotide
  Antisense strand to SEQ ID NO: 1210486
uuuauuaaccaaugcugca

SEQ ID NO: 1210488 - RNA, 19 nt, Artificial Sequence
  Description of Artificial Sequence: Synthetic oligonucleotide
  Sense strand starting at position 3411 of SEQ ID NO: 917123
uguugaguacaaugcugaa

SEQ ID NO: 1210489 - RNA, 19 nt, Artificial Sequence
  Description of Artificial Sequence: Synthetic oligonucleotide
  Antisense strand to SEQ ID NO: 1210488
uucagcauuguacucaaca

SEQ ID NO: 1210490 - RNA, 19 nt, Artificial Sequence
  Description of Artificial Sequence: Synthetic oligonucleotide
  Sense strand starting at position 3526 of SEQ ID NO: 917123
uaucuucucccagggaguu

SEQ ID NO: 1210491 - RNA, 19 nt, Artificial Sequence
  Description of Artificial Sequence: Synthetic oligonucleotide
  Antisense strand to SEQ ID NO: 1210490
aacucccugggagaagaua

SEQ ID NO: 1210492 - RNA, 19 nt, Artificial Sequence
  Description of Artificial Sequence: Synthetic oligonucleotide
  Sense strand starting at position 3527 of SEQ ID NO: 917123
aucuucucccagggaguuu

SEQ ID NO: 1210493 - RNA, 19 nt, Artificial Sequence
  Description of Artificial Sequence: Synthetic oligonucleotide
  Antisense strand to SEQ ID NO: 1210492
aaacucccugggagaagau

SEQ ID NO: 1210494 - RNA, 19 nt, Artificial Sequence
  Description of Artificial Sequence: Synthetic oligonucleotide
  Sense strand starting at position 3538 of SEQ ID NO: 917123
gggaguuuguaaucuguua

SEQ ID NO: 1210495 - RNA, 19 nt, Artificial Sequence
  Description of Artificial Sequence: Synthetic oligonucleotide
  Antisense strand to SEQ ID NO: 1210494
uaacagauuacaaacuccc

SEQ ID NO: 1210496 - RNA, 19 nt, Artificial Sequence
  Description of Artificial Sequence: Synthetic oligonucleotide
  Sense strand starting at position 3551 of SEQ ID NO: 917123
cuguuagugaagcaggaaa

SEQ ID NO: 1210497 - RNA, 19 nt, Artificial Sequence
  Description of Artificial Sequence: Synthetic oligonucleotide
  Antisense strand to SEQ ID NO: 1210496
uuuccugcuucacuaacag

SEQ ID NO: 1210498 - RNA, 19 nt, Artificial Sequence
  Description of Artificial Sequence: Synthetic oligonucleotide
  Sense strand starting at position 3639 of SEQ ID NO: 917123
uuguuuacucuagaacgua

SEQ ID NO: 1210499 - RNA, 19 nt, Artificial Sequence
  Description of Artificial Sequence: Synthetic oligonucleotide
  Antisense strand to SEQ ID NO: 1210498
uacguucuagaguaaacaa

SEQ ID NO: 1210500 - RNA, 19 nt, Artificial Sequence
  Description of Artificial Sequence: Synthetic oligonucleotide
  Sense strand starting at position 3820 of SEQ ID NO: 917123
gcauucugggaauggugaa

SEQ ID NO: 1210501 - RNA, 19 nt, Artificial Sequence
  Description of Artificial Sequence: Synthetic oligonucleotide
  Antisense strand to SEQ ID NO: 1210500
uucaccauucccagaaugc

SEQ ID NO: 1210502 - RNA, 19 nt, Artificial Sequence
  Description of Artificial Sequence: Synthetic oligonucleotide
  Sense strand starting at position 3838 of SEQ ID NO: 917123
aacagagauggugguaagu

SEQ ID NO: 1210503 - RNA, 19 nt, Artificial Sequence
  Description of Artificial Sequence: Synthetic oligonucleotide
  Antisense strand to SEQ ID NO: 1210502
acuuaccaccaucucuguu

SEQ ID NO: 1210504 - RNA, 19 nt, Artificial Sequence
  Description of Artificial Sequence: Synthetic oligonucleotide
  Sense strand starting at position 3889 of SEQ ID NO: 917123
uguggcagagcuuagaaua

SEQ ID NO: 1210505 - RNA, 19 nt, Artificial Sequence
  Description of Artificial Sequence: Synthetic oligonucleotide
  Antisense strand to SEQ ID NO: 1210504
uauucuaagcucugccaca

SEQ ID NO: 1210506 - RNA, 19 nt, Artificial Sequence
  Description of Artificial Sequence: Synthetic oligonucleotide
  Sense strand starting at position 3922 of SEQ ID NO: 917123
guuccaacccacuguuaga

SEQ ID NO: 1210507 - RNA, 19 nt, Artificial Sequence
  Description of Artificial Sequence: Synthetic oligonucleotide
  Antisense strand to SEQ ID NO: 1210506
ucuaacaguggguuggaac

SEQ ID NO: 1210508 - RNA, 19 nt, Artificial Sequence
  Description of Artificial Sequence: Synthetic oligonucleotide
  Sense strand starting at position 3922 of SEQ ID NO: 917124
guuccaacccacuguuaga

SEQ ID NO: 1210509 - RNA, 19 nt, Artificial Sequence
  Description of Artificial Sequence: Synthetic oligonucleotide
  Antisense strand to SEQ ID NO: 1210508
ucuaacaguggguuggaac

SEQ ID NO: 1210510 - RNA, 19 nt, Artificial Sequence
  Description of Artificial Sequence: Synthetic oligonucleotide
  Sense strand starting at position 401 of SEQ ID NO: 917124
aucaaaguacgaugaucau

SEQ ID NO: 1210511 - RNA, 19 nt, Artificial Sequence
  Description of Artificial Sequence: Synthetic oligonucleotide
  Antisense strand to SEQ ID NO: 1210510
augaucaucguacuuugau

SEQ ID NO: 1210512 - RNA, 19 nt, Artificial Sequence
  Description of Artificial Sequence: Synthetic oligonucleotide
  Sense strand starting at position 463 of SEQ ID NO: 917124
auuccuuuaguuugggauu

SEQ ID NO: 1210513 - RNA, 19 nt, Artificial Sequence
  Description of Artificial Sequence: Synthetic oligonucleotide
  Antisense strand to SEQ ID NO: 1210512
aaucccaaacuaaaggaau

SEQ ID NO: 1210514 - RNA, 19 nt, Artificial Sequence
  Description of Artificial Sequence: Synthetic oligonucleotide
  Sense strand starting at position 653 of SEQ ID NO: 917124
acguguuugcuacaggaau

SEQ ID NO: 1210515 - RNA, 19 nt, Artificial Sequence
  Description of Artificial Sequence: Synthetic oligonucleotide
  Antisense strand to SEQ ID NO: 1210514
auuccuguagcaaacacgu

SEQ ID NO: 1210516 - RNA, 19 nt, Artificial Sequence
  Description of Artificial Sequence: Synthetic oligonucleotide
  Sense strand starting at position 694 of SEQ ID NO: 917124
uaggcuuugggauggugau

SEQ ID NO: 1210517 - RNA, 19 nt, Artificial Sequence
  Description of Artificial Sequence: Synthetic oligonucleotide
  Antisense strand to SEQ ID NO: 1210516
aucaccaucccaaagccua

SEQ ID NO: 1210518 - RNA, 19 nt, Artificial Sequence
  Description of Artificial Sequence: Synthetic oligonucleotide
  Sense strand starting at position 695 of SEQ ID NO: 917124
aggcuuugggauggugauu

SEQ ID NO: 1210519 - RNA, 19 nt, Artificial Sequence
  Description of Artificial Sequence: Synthetic oligonucleotide
  Antisense strand to SEQ ID NO: 1210518
aaucaccaucccaaagccu

SEQ ID NO: 1210520 - RNA, 19 nt, Artificial Sequence
  Description of Artificial Sequence: Synthetic oligonucleotide
  Sense strand starting at position 700 of SEQ ID NO: 917124
uugggauggugauuacaca

SEQ ID NO: 1210521 - RNA, 19 nt, Artificial Sequence
  Description of Artificial Sequence: Synthetic oligonucleotide
  Antisense strand to SEQ ID NO: 1210520
uguguaaucaccaucccaa

SEQ ID NO: 1210522 - RNA, 19 nt, Artificial Sequence
  Description of Artificial Sequence: Synthetic oligonucleotide
  Sense strand starting at position 707 of SEQ ID NO: 917124
ggugauuacacaggugaau

SEQ ID NO: 1210523 - RNA, 19 nt, Artificial Sequence
  Description of Artificial Sequence: Synthetic oligonucleotide
  Antisense strand to SEQ ID NO: 1210522
auucaccuguguaaucacc

SEQ ID NO: 1210524 - RNA, 19 nt, Artificial Sequence
  Description of Artificial Sequence: Synthetic oligonucleotide
  Sense strand starting at position 754 of SEQ ID NO: 917124
acacuuaaggucuaugcuu

SEQ ID NO: 1210525 - RNA, 19 nt, Artificial Sequence
  Description of Artificial Sequence: Synthetic oligonucleotide
  Antisense strand to SEQ ID NO: 1210524
aagcauagaccuuaagugu

SEQ ID NO: 1210526 - RNA, 19 nt, Artificial Sequence
  Description of Artificial Sequence: Synthetic oligonucleotide
  Sense strand starting at position 887 of SEQ ID NO: 917124
ccaccuaaaguguaugauu

SEQ ID NO: 1210527 - RNA, 19 nt, Artificial Sequence
  Description of Artificial Sequence: Synthetic oligonucleotide
  Antisense strand to SEQ ID NO: 1210526
aaucauacacuuuaggugg

SEQ ID NO: 1210528 - RNA, 19 nt, Artificial Sequence
  Description of Artificial Sequence: Synthetic oligonucleotide
  Sense strand starting at position 895 of SEQ ID NO: 917124
aguguaugauucccgagau

SEQ ID NO: 1210529 - RNA, 19 nt, Artificial Sequence
  Description of Artificial Sequence: Synthetic oligonucleotide
  Antisense strand to SEQ ID NO: 1210528
aucucgggaaucauacacu

SEQ ID NO: 1210530 - RNA, 19 nt, Artificial Sequence
  Description of Artificial Sequence: Synthetic oligonucleotide
  Sense strand starting at position 899 of SEQ ID NO: 917124
uaugauucccgagauuagu

SEQ ID NO: 1210531 - RNA, 19 nt, Artificial Sequence
  Description of Artificial Sequence: Synthetic oligonucleotide
  Antisense strand to SEQ ID NO: 1210530
acuaaucucgggaaucaua

SEQ ID NO: 1210532 - RNA, 19 nt, Artificial Sequence
  Description of Artificial Sequence: Synthetic oligonucleotide
  Sense strand starting at position 902 of SEQ ID NO: 917124
gauucccgagauuaguuaa

SEQ ID NO: 1210533 - RNA, 19 nt, Artificial Sequence
  Description of Artificial Sequence: Synthetic oligonucleotide
  Antisense strand to SEQ ID NO: 1210532
uuaacuaaucucgggaauc

SEQ ID NO: 1210534 - RNA, 19 nt, Artificial Sequence
  Description of Artificial Sequence: Synthetic oligonucleotide
  Sense strand starting at position 909 of SEQ ID NO: 917124
gagauuaguuaaguccugu

SEQ ID NO: 1210535 - RNA, 19 nt, Artificial Sequence
  Description of Artificial Sequence: Synthetic oligonucleotide
  Antisense strand to SEQ ID NO: 1210534
acaggacuuaacuaaucuc

SEQ ID NO: 1210536 - RNA, 19 nt, Artificial Sequence
  Description of Artificial Sequence: Synthetic oligonucleotide
  Sense strand starting at position 1169 of SEQ ID NO: 917124
ugcucaagcccucgaauuu

SEQ ID NO: 1210537 - RNA, 19 nt, Artificial Sequence
  Description of Artificial Sequence: Synthetic oligonucleotide
  Antisense strand to SEQ ID NO: 1210536
aaauucgagggcuugagca

SEQ ID NO: 1210538 - RNA, 19 nt, Artificial Sequence
  Description of Artificial Sequence: Synthetic oligonucleotide
  Sense strand starting at position 1420 of SEQ ID NO: 917124
gcucgaacuccgcuuucuu

SEQ ID NO: 1210539 - RNA, 19 nt, Artificial Sequence
  Description of Artificial Sequence: Synthetic oligonucleotide
  Antisense strand to SEQ ID NO: 1210538
aagaaagcggaguucgagc

SEQ ID NO: 1210540 - RNA, 19 nt, Artificial Sequence
  Description of Artificial Sequence: Synthetic oligonucleotide
  Sense strand starting at position 2242 of SEQ ID NO: 917124
gaaguugauugauugcauu

SEQ ID NO: 1210541 - RNA, 19 nt, Artificial Sequence
  Description of Artificial Sequence: Synthetic oligonucleotide
  Antisense strand to SEQ ID NO: 1210540
aaugcaaucaaucaacuuc

SEQ ID NO: 1210542 - RNA, 19 nt, Artificial Sequence
  Description of Artificial Sequence: Synthetic oligonucleotide
  Sense strand starting at position 2337 of SEQ ID NO: 917124
uggacuuaguuuccucauu

SEQ ID NO: 1210543 - RNA, 19 nt, Artificial Sequence
  Description of Artificial Sequence: Synthetic oligonucleotide
  Antisense strand to SEQ ID NO: 1210542
aaugaggaaacuaagucca

SEQ ID NO: 1210544 - RNA, 19 nt, Artificial Sequence
  Description of Artificial Sequence: Synthetic oligonucleotide
  Sense strand starting at position 2348 of SEQ ID NO: 917124
uccucauucguagaaugga

SEQ ID NO: 1210545 - RNA, 19 nt, Artificial Sequence
  Description of Artificial Sequence: Synthetic oligonucleotide
  Antisense strand to SEQ ID NO: 1210544
uccauucuacgaaugagga

SEQ ID NO: 1210546 - RNA, 19 nt, Artificial Sequence
  Description of Artificial Sequence: Synthetic oligonucleotide
  Sense strand starting at position 2378 of SEQ ID NO: 917124
uucugaagugcuuaugaga

SEQ ID NO: 1210547 - RNA, 19 nt, Artificial Sequence
  Description of Artificial Sequence: Synthetic oligonucleotide
  Antisense strand to SEQ ID NO: 1210546
ucucauaagcacuucagaa

SEQ ID NO: 1210548 - RNA, 19 nt, Artificial Sequence
  Description of Artificial Sequence: Synthetic oligonucleotide
  Sense strand starting at position 2387 of SEQ ID NO: 917124
gcuuaugagacuugcagga

SEQ ID NO: 1210549 - RNA, 19 nt, Artificial Sequence
  Description of Artificial Sequence: Synthetic oligonucleotide
  Antisense strand to SEQ ID NO: 1210548
uccugcaagucucauaagc

SEQ ID NO: 1210550 - RNA, 19 nt, Artificial Sequence
  Description of Artificial Sequence: Synthetic oligonucleotide
  Sense strand starting at position 2391 of SEQ ID NO: 917124
augagacuugcaggaggua

SEQ ID NO: 1210551 - RNA, 19 nt, Artificial Sequence
  Description of Artificial Sequence: Synthetic oligonucleotide
  Antisense strand to SEQ ID NO: 1210550
uaccuccugcaagucucau

SEQ ID NO: 1210552 - RNA, 19 nt, Artificial Sequence
  Description of Artificial Sequence: Synthetic oligonucleotide
  Sense strand starting at position 2426 of SEQ ID NO: 917124
ugaugaauguaaccuaaug

SEQ ID NO: 1210553 - RNA, 19 nt, Artificial Sequence
  Description of Artificial Sequence: Synthetic oligonucleotide
  Antisense strand to SEQ ID NO: 1210552
cauuagguuacauucauca

SEQ ID NO: 1210554 - RNA, 19 nt, Artificial Sequence
  Description of Artificial Sequence: Synthetic oligonucleotide
  Sense strand starting at position 2559 of SEQ ID NO: 917124
gagguccacagagguuaaa

SEQ ID NO: 1210555 - RNA, 19 nt, Artificial Sequence
  Description of Artificial Sequence: Synthetic oligonucleotide
  Antisense strand to SEQ ID NO: 1210554
uuuaaccucuguggaccuc

SEQ ID NO: 1210556 - RNA, 19 nt, Artificial Sequence
  Description of Artificial Sequence: Synthetic oligonucleotide
  Sense strand starting at position 2570 of SEQ ID NO: 917124
agguuaaauaagggucaca

SEQ ID NO: 1210557 - RNA, 19 nt, Artificial Sequence
  Description of Artificial Sequence: Synthetic oligonucleotide
  Antisense strand to SEQ ID NO: 1210556
ugugacccuuauuuaaccu

SEQ ID NO: 1210558 - RNA, 19 nt, Artificial Sequence
  Description of Artificial Sequence: Synthetic oligonucleotide
  Sense strand starting at position 2984 of SEQ ID NO: 917124
guaauaaggcccuaguaaa

SEQ ID NO: 1210559 - RNA, 19 nt, Artificial Sequence
  Description of Artificial Sequence: Synthetic oligonucleotide
  Antisense strand to SEQ ID NO: 1210558
uuuacuagggccuuauuac

SEQ ID NO: 1210560 - RNA, 19 nt, Artificial Sequence
  Description of Artificial Sequence: Synthetic oligonucleotide
  Sense strand starting at position 3016 of SEQ ID NO: 917124
guauucuuaggugaguagu

SEQ ID NO: 1210561 - RNA, 19 nt, Artificial Sequence
  Description of Artificial Sequence: Synthetic oligonucleotide
  Antisense strand to SEQ ID NO: 1210560
acuacucaccuaagaauac

SEQ ID NO: 1210562 - RNA, 19 nt, Artificial Sequence
  Description of Artificial Sequence: Synthetic oligonucleotide
  Sense strand starting at position 3018 of SEQ ID NO: 917124
auucuuaggugaguaguca

SEQ ID NO: 1210563 - RNA, 19 nt, Artificial Sequence
  Description of Artificial Sequence: Synthetic oligonucleotide
  Antisense strand to SEQ ID NO: 1210562
ugacuacucaccuaagaau

SEQ ID NO: 1210564 - RNA, 19 nt, Artificial Sequence
  Description of Artificial Sequence: Synthetic oligonucleotide
  Sense strand starting at position 3026 of SEQ ID NO: 917124
gugaguagucaguaucaaa

SEQ ID NO: 1210565 - RNA, 19 nt, Artificial Sequence
  Description of Artificial Sequence: Synthetic oligonucleotide
  Antisense strand to SEQ ID NO: 1210564
uuugauacugacuacucac

SEQ ID NO: 1210566 - RNA, 19 nt, Artificial Sequence
  Description of Artificial Sequence: Synthetic oligonucleotide
  Sense strand starting at position 3084 of SEQ ID NO: 917124
ugcaauucucaugagaguc

SEQ ID NO: 1210567 - RNA, 19 nt, Artificial Sequence
  Description of Artificial Sequence: Synthetic oligonucleotide
  Antisense strand to SEQ ID NO: 1210566
gacucucaugagaauugca

SEQ ID NO: 1210568 - RNA, 19 nt, Artificial Sequence
  Description of Artificial Sequence: Synthetic oligonucleotide
  Sense strand starting at position 3198 of SEQ ID NO: 917124
agaagaguaguguauuagu

SEQ ID NO: 1210569 - RNA, 19 nt, Artificial Sequence
  Description of Artificial Sequence: Synthetic oligonucleotide
  Antisense strand to SEQ ID NO: 1210568
acuaauacacuacucuucu

SEQ ID NO: 1210570 - RNA, 19 nt, Artificial Sequence
  Description of Artificial Sequence: Synthetic oligonucleotide
  Sense strand starting at position 3284 of SEQ ID NO: 917124
aguucugaaaguuggaaau

SEQ ID NO: 1210571 - RNA, 19 nt, Artificial Sequence
  Description of Artificial Sequence: Synthetic oligonucleotide
  Antisense strand to SEQ ID NO: 1210570
auuuccaacuuucagaacu

SEQ ID NO: 1210572 - RNA, 19 nt, Artificial Sequence
  Description of Artificial Sequence: Synthetic oligonucleotide
  Sense strand starting at position 3294 of SEQ ID NO: 917124
guuggaaauccaggaucca

SEQ ID NO: 1210573 - RNA, 19 nt, Artificial Sequence
  Description of Artificial Sequence: Synthetic oligonucleotide
  Antisense strand to SEQ ID NO: 1210572
uggauccuggauuuccaac

SEQ ID NO: 1210574 - RNA, 19 nt, Artificial Sequence
  Description of Artificial Sequence: Synthetic oligonucleotide
  Sense strand starting at position 3385 of SEQ ID NO: 917124
gugcccucacaugauagaa

SEQ ID NO: 1210575 - RNA, 19 nt, Artificial Sequence
  Description of Artificial Sequence: Synthetic oligonucleotide
  Antisense strand to SEQ ID NO: 1210574
uucuaucaugugagggcac

SEQ ID NO: 1210576 - RNA, 19 nt, Artificial Sequence
  Description of Artificial Sequence: Synthetic oligonucleotide
  Sense strand starting at position 3493 of SEQ ID NO: 917124
ucaccagugcaauaguauu

SEQ ID NO: 1210577 - RNA, 19 nt, Artificial Sequence
  Description of Artificial Sequence: Synthetic oligonucleotide
  Antisense strand to SEQ ID NO: 1210576
aauacuauugcacugguga

SEQ ID NO: 1210578 - RNA, 19 nt, Artificial Sequence
  Description of Artificial Sequence: Synthetic oligonucleotide
  Sense strand starting at position 3525 of SEQ ID NO: 917124
uugggauauugauuagguc

SEQ ID NO: 1210579 - RNA, 19 nt, Artificial Sequence
  Description of Artificial Sequence: Synthetic oligonucleotide
  Antisense strand to SEQ ID NO: 1210578
gaccuaaucaauaucccaa

SEQ ID NO: 1210580 - RNA, 19 nt, Artificial Sequence
  Description of Artificial Sequence: Synthetic oligonucleotide
  Sense strand starting at position 3529 of SEQ ID NO: 917124
gauauugauuaggucauga

SEQ ID NO: 1210581 - RNA, 19 nt, Artificial Sequence
  Description of Artificial Sequence: Synthetic oligonucleotide
  Antisense strand to SEQ ID NO: 1210580
ucaugaccuaaucaauauc

SEQ ID NO: 1210582 - RNA, 19 nt, Artificial Sequence
  Description of Artificial Sequence: Synthetic oligonucleotide
  Sense strand starting at position 3548 of SEQ ID NO: 917124
gggcucuaaccucauaacu

SEQ ID NO: 1210583 - RNA, 19 nt, Artificial Sequence
  Description of Artificial Sequence: Synthetic oligonucleotide
  Antisense strand to SEQ ID NO: 1210582
aguuaugagguuagagccc

SEQ ID NO: 1210584 - RNA, 19 nt, Artificial Sequence
  Description of Artificial Sequence: Synthetic oligonucleotide
  Sense strand starting at position 3567 of SEQ ID NO: 917124
ggaauuagugccuaucuca

SEQ ID NO: 1210585 - RNA, 19 nt, Artificial Sequence
  Description of Artificial Sequence: Synthetic oligonucleotide
  Antisense strand to SEQ ID NO: 1210584
ugagauaggcacuaauucc

SEQ ID NO: 1210586 - RNA, 19 nt, Artificial Sequence
  Description of Artificial Sequence: Synthetic oligonucleotide
  Sense strand starting at position 3609 of SEQ ID NO: 917124
aauacuuuagacugaguga

SEQ ID NO: 1210587 - RNA, 19 nt, Artificial Sequence
  Description of Artificial Sequence: Synthetic oligonucleotide
  Antisense strand to SEQ ID NO: 1210586
ucacucagucuaaaguauu

SEQ ID NO: 1210588 - RNA, 19 nt, Artificial Sequence
  Description of Artificial Sequence: Synthetic oligonucleotide
  Sense strand starting at position 3653 of SEQ ID NO: 917125
cagaguucugaaggcuaag

SEQ ID NO: 1210589 - RNA, 19 nt, Artificial Sequence
  Description of Artificial Sequence: Synthetic oligonucleotide
  Antisense strand to SEQ ID NO: 1210588
cuuagccuucagaacucug

SEQ ID NO: 1210590 - RNA, 19 nt, Artificial Sequence
  Description of Artificial Sequence: Synthetic oligonucleotide
  Sense strand starting at position 14 of SEQ ID NO: 917125
auugaagucggccaaucaa

SEQ ID NO: 1210591 - RNA, 19 nt, Artificial Sequence
  Description of Artificial Sequence: Synthetic oligonucleotide
  Antisense strand to SEQ ID NO: 1210590
uugauuggccgacuucaau

SEQ ID NO: 1210592 - RNA, 19 nt, Artificial Sequence
  Description of Artificial Sequence: Synthetic oligonucleotide
  Sense strand starting at position 21 of SEQ ID NO: 917125
ucggccaaucaauauuaau

SEQ ID NO: 1210593 - RNA, 19 nt, Artificial Sequence
  Description of Artificial Sequence: Synthetic oligonucleotide
  Antisense strand to SEQ ID NO: 1210592
auuaauauugauuggccga

SEQ ID NO: 1210594 - RNA, 19 nt, Artificial Sequence
  Description of Artificial Sequence: Synthetic oligonucleotide
  Sense strand starting at position 61 of SEQ ID NO: 917125
auauucuuugauggcgaca

SEQ ID NO: 1210595 - RNA, 19 nt, Artificial Sequence
  Description of Artificial Sequence: Synthetic oligonucleotide
  Antisense strand to SEQ ID NO: 1210594
ugucgccaucaaagaauau

SEQ ID NO: 1210596 - RNA, 19 nt, Artificial Sequence
  Description of Artificial Sequence: Synthetic oligonucleotide
  Sense strand starting at position 117 of SEQ ID NO: 917125
uuugcucuuagggauggaa

SEQ ID NO: 1210597 - RNA, 19 nt, Artificial Sequence
  Description of Artificial Sequence: Synthetic oligonucleotide
  Antisense strand to SEQ ID NO: 1210596
uuccaucccuaagagcaaa

SEQ ID NO: 1210598 - RNA, 19 nt, Artificial Sequence
  Description of Artificial Sequence: Synthetic oligonucleotide
  Sense strand starting at position 119 of SEQ ID NO: 917125
ugcucuuagggauggaaca

SEQ ID NO: 1210599 - RNA, 19 nt, Artificial Sequence
  Description of Artificial Sequence: Synthetic oligonucleotide
  Antisense strand to SEQ ID NO: 1210598
uguuccaucccuaagagca

SEQ ID NO: 1210600 - RNA, 19 nt, Artificial Sequence
  Description of Artificial Sequence: Synthetic oligonucleotide
  Sense strand starting at position 161 of SEQ ID NO: 917125
gugaacuuugcaugcauuu

SEQ ID NO: 1210601 - RNA, 19 nt, Artificial Sequence
  Description of Artificial Sequence: Synthetic oligonucleotide
  Antisense strand to SEQ ID NO: 1210600
aaaugcaugcaaaguucac

SEQ ID NO: 1210602 - RNA, 19 nt, Artificial Sequence
  Description of Artificial Sequence: Synthetic oligonucleotide
  Sense strand starting at position 241 of SEQ ID NO: 917125
uuugaaugccuugaaaguc

SEQ ID NO: 1210603 - RNA, 19 nt, Artificial Sequence
  Description of Artificial Sequence: Synthetic oligonucleotide
  Antisense strand to SEQ ID NO: 1210602
gacuuucaaggcauucaaa

SEQ ID NO: 1210604 - RNA, 19 nt, Artificial Sequence
  Description of Artificial Sequence: Synthetic oligonucleotide
  Sense strand starting at position 387 of SEQ ID NO: 917125
ucauaaagauguuccaagu

SEQ ID NO: 1210605 - RNA, 19 nt, Artificial Sequence
  Description of Artificial Sequence: Synthetic oligonucleotide
  Antisense strand to SEQ ID NO: 1210604
acuuggaacaucuuuauga

SEQ ID NO: 1210606 - RNA, 19 nt, Artificial Sequence
  Description of Artificial Sequence: Synthetic oligonucleotide
  Sense strand starting at position 672 of SEQ ID NO: 917125
ugaucuuaacgcuauauau

SEQ ID NO: 1210607 - RNA, 19 nt, Artificial Sequence
  Description of Artificial Sequence: Synthetic oligonucleotide
  Antisense strand to SEQ ID NO: 1210606
auauauagcguuaagauca

SEQ ID NO: 1210608 - RNA, 19 nt, Artificial Sequence
  Description of Artificial Sequence: Synthetic oligonucleotide
  Sense strand starting at position 674 of SEQ ID NO: 917125
aucuuaacgcuauauauug

SEQ ID NO: 1210609 - RNA, 19 nt, Artificial Sequence
  Description of Artificial Sequence: Synthetic oligonucleotide
  Antisense strand to SEQ ID NO: 1210608
caauauauagcguuaagau

SEQ ID NO: 1210610 - RNA, 19 nt, Artificial Sequence
  Description of Artificial Sequence: Synthetic oligonucleotide
  Sense strand starting at position 975 of SEQ ID NO: 917125
uuaacaagccuugaagagu

SEQ ID NO: 1210611 - RNA, 19 nt, Artificial Sequence
  Description of Artificial Sequence: Synthetic oligonucleotide
  Antisense strand to SEQ ID NO: 1210610
acucuucaaggcuuguuaa

SEQ ID NO: 1210612 - RNA, 19 nt, Artificial Sequence
  Description of Artificial Sequence: Synthetic oligonucleotide
  Sense strand starting at position 986 of SEQ ID NO: 917125
ugaagagugccaggacuua

SEQ ID NO: 1210613 - RNA, 19 nt, Artificial Sequence
  Description of Artificial Sequence: Synthetic oligonucleotide
  Antisense strand to SEQ ID NO: 1210612
uaaguccuggcacucuuca

SEQ ID NO: 1210614 - RNA, 19 nt, Artificial Sequence
  Description of Artificial Sequence: Synthetic oligonucleotide
  Sense strand starting at position 1019 of SEQ ID NO: 917125
cguccucucggcucggaua

SEQ ID NO: 1210615 - RNA, 19 nt, Artificial Sequence
  Description of Artificial Sequence: Synthetic oligonucleotide
  Antisense strand to SEQ ID NO: 1210614
uauccgagccgagaggacg

SEQ ID NO: 1210616 - RNA, 19 nt, Artificial Sequence
  Description of Artificial Sequence: Synthetic oligonucleotide
  Sense strand starting at position 1057 of SEQ ID NO: 917125
gggaaaguaguagaucguu

SEQ ID NO: 1210617 - RNA, 19 nt, Artificial Sequence
  Description of Artificial Sequence: Synthetic oligonucleotide
  Antisense strand to SEQ ID NO: 1210616
aacgaucuacuacuuuccc

SEQ ID NO: 1210618 - RNA, 19 nt, Artificial Sequence
  Description of Artificial Sequence: Synthetic oligonucleotide
  Sense strand starting at position 1095 of SEQ ID NO: 917125
uacagaugcgugccucuuu

SEQ ID NO: 1210619 - RNA, 19 nt, Artificial Sequence
  Description of Artificial Sequence: Synthetic oligonucleotide
  Antisense strand to SEQ ID NO: 1210618
aaagaggcacgcaucugua

SEQ ID NO: 1210620 - RNA, 19 nt, Artificial Sequence
  Description of Artificial Sequence: Synthetic oligonucleotide
  Sense strand starting at position 1122 of SEQ ID NO: 917125
agagcaaccggucaauuaa

SEQ ID NO: 1210621 - RNA, 19 nt, Artificial Sequence
  Description of Artificial Sequence: Synthetic oligonucleotide
  Antisense strand to SEQ ID NO: 1210620
uuaauugaccgguugcucu

SEQ ID NO: 1210622 - RNA, 19 nt, Artificial Sequence
  Description of Artificial Sequence: Synthetic oligonucleotide
  Sense strand starting at position 1172 of SEQ ID NO: 917125
gcaagaacuguccacacaa

SEQ ID NO: 1210623 - RNA, 19 nt, Artificial Sequence
  Description of Artificial Sequence: Synthetic oligonucleotide
  Antisense strand to SEQ ID NO: 1210622
uuguguggacaguucuugc

SEQ ID NO: 1210624 - RNA, 19 nt, Artificial Sequence
  Description of Artificial Sequence: Synthetic oligonucleotide
  Sense strand starting at position 1578 of SEQ ID NO: 917125
gggacuuacuuucucgaug

SEQ ID NO: 1210625 - RNA, 19 nt, Artificial Sequence
  Description of Artificial Sequence: Synthetic oligonucleotide
  Antisense strand to SEQ ID NO: 1210624
caucgagaaaguaaguccc

SEQ ID NO: 1210626 - RNA, 19 nt, Artificial Sequence
  Description of Artificial Sequence: Synthetic oligonucleotide
  Sense strand starting at position 2285 of SEQ ID NO: 917125
uuugaauucgugagcguug

SEQ ID NO: 1210627 - RNA, 19 nt, Artificial Sequence
  Description of Artificial Sequence: Synthetic oligonucleotide
  Antisense strand to SEQ ID NO: 1210626
caacgcucacgaauucaaa

SEQ ID NO: 1210628 - RNA, 19 nt, Artificial Sequence
  Description of Artificial Sequence: Synthetic oligonucleotide
  Sense strand starting at position 2296 of SEQ ID NO: 917125
gagcguugaaaugaugaag

SEQ ID NO: 1210629 - RNA, 19 nt, Artificial Sequence
  Description of Artificial Sequence: Synthetic oligonucleotide
  Antisense strand to SEQ ID NO: 1210628
cuucaucauuucaacgcuc

SEQ ID NO: 1210630 - RNA, 19 nt, Artificial Sequence
  Description of Artificial Sequence: Synthetic oligonucleotide
  Sense strand starting at position 2429 of SEQ ID NO: 917125
cagaaaugaugguuccauc

SEQ ID NO: 1210631 - RNA, 19 nt, Artificial Sequence
  Description of Artificial Sequence: Synthetic oligonucleotide
  Antisense strand to SEQ ID NO: 1210630
gauggaaccaucauuucug

SEQ ID NO: 1210632 - RNA, 19 nt, Artificial Sequence
  Description of Artificial Sequence: Synthetic oligonucleotide
  Sense strand starting at position 2665 of SEQ ID NO: 917125
gaagaucugggcugugaaa

SEQ ID NO: 1210633 - RNA, 19 nt, Artificial Sequence
  Description of Artificial Sequence: Synthetic oligonucleotide
  Antisense strand to SEQ ID NO: 1210632
uuucacagcccagaucuuc

SEQ ID NO: 1210634 - RNA, 19 nt, Artificial Sequence
  Description of Artificial Sequence: Synthetic oligonucleotide
  Sense strand starting at position 2849 of SEQ ID NO: 917125
cccaguuugcucgcuauga

SEQ ID NO: 1210635 - RNA, 19 nt, Artificial Sequence
  Description of Artificial Sequence: Synthetic oligonucleotide
  Antisense strand to SEQ ID NO: 1210634
ucauagcgagcaaacuggg

SEQ ID NO: 1210636 - RNA, 19 nt, Artificial Sequence
  Description of Artificial Sequence: Synthetic oligonucleotide
  Sense strand starting at position 2995 of SEQ ID NO: 917125
ugccuucugccgguggauu

SEQ ID NO: 1210637 - RNA, 19 nt, Artificial Sequence
  Description of Artificial Sequence: Synthetic oligonucleotide
  Antisense strand to SEQ ID NO: 1210636
aauccaccggcagaaggca

SEQ ID NO: 1210638 - RNA, 19 nt, Artificial Sequence
  Description of Artificial Sequence: Synthetic oligonucleotide
  Sense strand starting at position 3103 of SEQ ID NO: 917125
guaugaauucuggauuacg

SEQ ID NO: 1210639 - RNA, 19 nt, Artificial Sequence
  Description of Artificial Sequence: Synthetic oligonucleotide
  Antisense strand to SEQ ID NO: 1210638
cguaauccagaauucauac

SEQ ID NO: 1210640 - RNA, 19 nt, Artificial Sequence
  Description of Artificial Sequence: Synthetic oligonucleotide
  Sense strand starting at position 3111 of SEQ ID NO: 917125
ucuggauuacgaggacaau

SEQ ID NO: 1210641 - RNA, 19 nt, Artificial Sequence
  Description of Artificial Sequence: Synthetic oligonucleotide
  Antisense strand to SEQ ID NO: 1210640
auuguccucguaauccaga

SEQ ID NO: 1210642 - RNA, 19 nt, Artificial Sequence
  Description of Artificial Sequence: Synthetic oligonucleotide
  Sense strand starting at position 3122 of SEQ ID NO: 917125
aggacaaugugcucaguga

SEQ ID NO: 1210643 - RNA, 19 nt, Artificial Sequence
  Description of Artificial Sequence: Synthetic oligonucleotide
  Antisense strand to SEQ ID NO: 1210642
ucacugagcacauuguccu

SEQ ID NO: 1210644 - RNA, 19 nt, Artificial Sequence
  Description of Artificial Sequence: Synthetic oligonucleotide
  Sense strand starting at position 3123 of SEQ ID NO: 917125
ggacaaugugcucagugau

SEQ ID NO: 1210645 - RNA, 19 nt, Artificial Sequence
  Description of Artificial Sequence: Synthetic oligonucleotide
  Antisense strand to SEQ ID NO: 1210644
aucacugagcacauugucc

SEQ ID NO: 1210646 - RNA, 19 nt, Artificial Sequence
  Description of Artificial Sequence: Synthetic oligonucleotide
  Sense strand starting at position 3301 of SEQ ID NO: 917125
ccuauaagcuuucuaggaa

SEQ ID NO: 1210647 - RNA, 19 nt, Artificial Sequence
  Description of Artificial Sequence: Synthetic oligonucleotide
  Antisense strand to SEQ ID NO: 1210646
uuccuagaaagcuuauagg

SEQ ID NO: 1210648 - RNA, 19 nt, Artificial Sequence
  Description of Artificial Sequence: Synthetic oligonucleotide
  Sense strand starting at position 3304 of SEQ ID NO: 917125
auaagcuuucuaggaaaca

SEQ ID NO: 1210649 - RNA, 19 nt, Artificial Sequence
  Description of Artificial Sequence: Synthetic oligonucleotide
  Antisense strand to SEQ ID NO: 1210648
uguuuccuagaaagcuuau

SEQ ID NO: 1210650 - RNA, 19 nt, Artificial Sequence
  Description of Artificial Sequence: Synthetic oligonucleotide
  Sense strand starting at position 3359 of SEQ ID NO: 917125
agugucuucguggaaggaa

SEQ ID NO: 1210651 - RNA, 19 nt, Artificial Sequence
  Description of Artificial Sequence: Synthetic oligonucleotide
  Antisense strand to SEQ ID NO: 1210650
uuccuuccacgaagacacu

SEQ ID NO: 1210652 - RNA, 19 nt, Artificial Sequence
  Description of Artificial Sequence: Synthetic oligonucleotide
  Sense strand starting at position 3479 of SEQ ID NO: 917125
cuacuaaauucgguuugau

SEQ ID NO: 1210653 - RNA, 19 nt, Artificial Sequence
  Description of Artificial Sequence: Synthetic oligonucleotide
  Antisense strand to SEQ ID NO: 1210652
aucaaaccgaauuuaguag

SEQ ID NO: 1210654 - RNA, 19 nt, Artificial Sequence
  Description of Artificial Sequence: Synthetic oligonucleotide
  Sense strand starting at position 3482 of SEQ ID NO: 917125
cuaaauucgguuugauacu

SEQ ID NO: 1210655 - RNA, 19 nt, Artificial Sequence
  Description of Artificial Sequence: Synthetic oligonucleotide
  Antisense strand to SEQ ID NO: 1210654
aguaucaaaccgaauuuag

SEQ ID NO: 1210656 - RNA, 19 nt, Artificial Sequence
  Description of Artificial Sequence: Synthetic oligonucleotide
  Sense strand starting at position 3488 of SEQ ID NO: 917125
ucgguuugauacuuauaag

SEQ ID NO: 1210657 - RNA, 19 nt, Artificial Sequence
  Description of Artificial Sequence: Synthetic oligonucleotide
  Antisense strand to SEQ ID NO: 1210656
cuuauaaguaucaaaccga

SEQ ID NO: 1210658 - RNA, 19 nt, Artificial Sequence
  Description of Artificial Sequence: Synthetic oligonucleotide
  Sense strand starting at position 3489 of SEQ ID NO: 917125
cgguuugauacuuauaagg

SEQ ID NO: 1210659 - RNA, 19 nt, Artificial Sequence
  Description of Artificial Sequence: Synthetic oligonucleotide
  Antisense strand to SEQ ID NO: 1210658
ccuuauaaguaucaaaccg

SEQ ID NO: 1210660 - RNA, 19 nt, Artificial Sequence
  Description of Artificial Sequence: Synthetic oligonucleotide
  Sense strand starting at position 3496 of SEQ ID NO: 917125
auacuuauaaggugguaga

SEQ ID NO: 1210661 - RNA, 19 nt, Artificial Sequence
  Description of Artificial Sequence: Synthetic oligonucleotide
  Antisense strand to SEQ ID NO: 1210660
ucuaccaccuuauaaguau

SEQ ID NO: 1210662 - RNA, 19 nt, Artificial Sequence
  Description of Artificial Sequence: Synthetic oligonucleotide
  Sense strand starting at position 3506 of SEQ ID NO: 917125
ggugguagacuugaguaag

SEQ ID NO: 1210663 - RNA, 19 nt, Artificial Sequence
  Description of Artificial Sequence: Synthetic oligonucleotide
  Antisense strand to SEQ ID NO: 1210662
cuuacucaagucuaccacc

SEQ ID NO: 1210664 - RNA, 19 nt, Artificial Sequence
  Description of Artificial Sequence: Synthetic oligonucleotide
  Sense strand starting at position 3625 of SEQ ID NO: 917125
acccacaguccagguauua

SEQ ID NO: 1210665 - RNA, 19 nt, Artificial Sequence
  Description of Artificial Sequence: Synthetic oligonucleotide
  Antisense strand to SEQ ID NO: 1210664
uaauaccuggacugugggu

SEQ ID NO: 1210666 - RNA, 19 nt, Artificial Sequence
  Description of Artificial Sequence: Synthetic oligonucleotide
  Sense strand starting at position 3685 of SEQ ID NO: 917125
acacuuuaugguuacuagu

SEQ ID NO: 1210667 - RNA, 19 nt, Artificial Sequence
  Description of Artificial Sequence: Synthetic oligonucleotide
  Antisense strand to SEQ ID NO: 1210666
acuaguaaccauaaagugu

SEQ ID NO: 1210668 - RNA, 19 nt, Artificial Sequence
  Description of Artificial Sequence: Synthetic oligonucleotide
  Sense strand starting at position 3770 of SEQ ID NO: 917125
aguaacauugcucaaagcu

SEQ ID NO: 1210669 - RNA, 19 nt, Artificial Sequence
  Description of Artificial Sequence: Synthetic oligonucleotide
  Antisense strand to SEQ ID NO: 1210668
agcuuugagcaauguuacu

SEQ ID NO: 1210670 - RNA, 19 nt, Artificial Sequence
  Description of Artificial Sequence: Synthetic oligonucleotide
  Sense strand starting at position 3770 of SEQ ID NO: 917126
aguaacauugcucaaagcu

SEQ ID NO: 1210671 - RNA, 19 nt, Artificial Sequence
  Description of Artificial Sequence: Synthetic oligonucleotide
  Antisense strand to SEQ ID NO: 1210670
agcuuugagcaauguuacu

SEQ ID NO: 1210672 - RNA, 19 nt, Artificial Sequence
  Description of Artificial Sequence: Synthetic oligonucleotide
  Sense strand starting at position 8 of SEQ ID NO: 917126
gcaguuaggucaccgaaga

SEQ ID NO: 1210673 - RNA, 19 nt, Artificial Sequence
  Description of Artificial Sequence: Synthetic oligonucleotide
  Antisense strand to SEQ ID NO: 1210672
ucuucggugaccuaacugc

SEQ ID NO: 1210674 - RNA, 19 nt, Artificial Sequence
  Description of Artificial Sequence: Synthetic oligonucleotide
  Sense strand starting at position 122 of SEQ ID NO: 917126
uuaucaacacaguauguau

SEQ ID NO: 1210675 - RNA, 19 nt, Artificial Sequence
  Description of Artificial Sequence: Synthetic oligonucleotide
  Antisense strand to SEQ ID NO: 1210674
auacauacuguguugauaa

SEQ ID NO: 1210676 - RNA, 19 nt, Artificial Sequence
  Description of Artificial Sequence: Synthetic oligonucleotide
  Sense strand starting at position 133 of SEQ ID NO: 917126
guauguauuccauggcaaa

SEQ ID NO: 1210677 - RNA, 19 nt, Artificial Sequence
  Description of Artificial Sequence: Synthetic oligonucleotide
  Antisense strand to SEQ ID NO: 1210676
uuugccauggaauacauac

SEQ ID NO: 1210678 - RNA, 19 nt, Artificial Sequence
  Description of Artificial Sequence: Synthetic oligonucleotide
  Sense strand starting at position 269 of SEQ ID NO: 917126
gcacauucuuucgcagaag

SEQ ID NO: 1210679 - RNA, 19 nt, Artificial Sequence
  Description of Artificial Sequence: Synthetic oligonucleotide
  Antisense strand to SEQ ID NO: 1210678
cuucugcgaaagaaugugc

SEQ ID NO: 1210680 - RNA, 19 nt, Artificial Sequence
  Description of Artificial Sequence: Synthetic oligonucleotide
  Sense strand starting at position 358 of SEQ ID NO: 917126
agcaguggacucugacaga

SEQ ID NO: 1210681 - RNA, 19 nt, Artificial Sequence
  Description of Artificial Sequence: Synthetic oligonucleotide
  Antisense strand to SEQ ID NO: 1210680
ucugucagaguccacugcu

SEQ ID NO: 1210682 - RNA, 19 nt, Artificial Sequence
  Description of Artificial Sequence: Synthetic oligonucleotide
  Sense strand starting at position 556 of SEQ ID NO: 917126
ugagaugucagcugaagcu

SEQ ID NO: 1210683 - RNA, 19 nt, Artificial Sequence
  Description of Artificial Sequence: Synthetic oligonucleotide
  Antisense strand to SEQ ID NO: 1210682
agcuucagcugacaucuca

SEQ ID NO: 1210684 - RNA, 19 nt, Artificial Sequence
  Description of Artificial Sequence: Synthetic oligonucleotide
  Sense strand starting at position 751 of SEQ ID NO: 917126
ucaggaauccuaugagcua

SEQ ID NO: 1210685 - RNA, 19 nt, Artificial Sequence
  Description of Artificial Sequence: Synthetic oligonucleotide
  Antisense strand to SEQ ID NO: 1210684
uagcucauaggauuccuga

SEQ ID NO: 1210686 - RNA, 19 nt, Artificial Sequence
  Description of Artificial Sequence: Synthetic oligonucleotide
  Sense strand starting at position 787 of SEQ ID NO: 917126
ggcugugcucgguucauaa

SEQ ID NO: 1210687 - RNA, 19 nt, Artificial Sequence
  Description of Artificial Sequence: Synthetic oligonucleotide
  Antisense strand to SEQ ID NO: 1210686
uuaugaaccgagcacagcc

SEQ ID NO: 1210688 - RNA, 19 nt, Artificial Sequence
  Description of Artificial Sequence: Synthetic oligonucleotide
  Sense strand starting at position 789 of SEQ ID NO: 917126
cugugcucgguucauaaga

SEQ ID NO: 1210689 - RNA, 19 nt, Artificial Sequence
  Description of Artificial Sequence: Synthetic oligonucleotide
  Antisense strand to SEQ ID NO: 1210688
ucuuaugaaccgagcacag

SEQ ID NO: 1210690 - RNA, 19 nt, Artificial Sequence
  Description of Artificial Sequence: Synthetic oligonucleotide
  Sense strand starting at position 884 of SEQ ID NO: 917126
acgggaagacauugcuuga

SEQ ID NO: 1210691 - RNA, 19 nt, Artificial Sequence
  Description of Artificial Sequence: Synthetic oligonucleotide
  Antisense strand to SEQ ID NO: 1210690
ucaagcaaugucuucccgu

SEQ ID NO: 1210692 - RNA, 19 nt, Artificial Sequence
  Description of Artificial Sequence: Synthetic oligonucleotide
  Sense strand starting at position 976 of SEQ ID NO: 917126
cuggaugucagaugucaca

SEQ ID NO: 1210693 - RNA, 19 nt, Artificial Sequence
  Description of Artificial Sequence: Synthetic oligonucleotide
  Antisense strand to SEQ ID NO: 1210692
ugugacaucugacauccag

SEQ ID NO: 1210694 - RNA, 19 nt, Artificial Sequence
  Description of Artificial Sequence: Synthetic oligonucleotide
  Sense strand starting at position 1046 of SEQ ID NO: 917126
cacuccaauguuugggauu

SEQ ID NO: 1210695 - RNA, 19 nt, Artificial Sequence
  Description of Artificial Sequence: Synthetic oligonucleotide
  Antisense strand to SEQ ID NO: 1210694
aaucccaaacauuggagug

SEQ ID NO: 1210696 - RNA, 19 nt, Artificial Sequence
  Description of Artificial Sequence: Synthetic oligonucleotide
  Sense strand starting at position 1146 of SEQ ID NO: 917126
aggaauaucuuccacagaa

SEQ ID NO: 1210697 - RNA, 19 nt, Artificial Sequence
  Description of Artificial Sequence: Synthetic oligonucleotide
  Antisense strand to SEQ ID NO: 1210696
uucuguggaagauauuccu

SEQ ID NO: 1210698 - RNA, 19 nt, Artificial Sequence
  Description of Artificial Sequence: Synthetic oligonucleotide
  Sense strand starting at position 1198 of SEQ ID NO: 917126
gaucgugugauaugucuaa

SEQ ID NO: 1210699 - RNA, 19 nt, Artificial Sequence
  Description of Artificial Sequence: Synthetic oligonucleotide
  Antisense strand to SEQ ID NO: 1210698
uuagacauaucacacgauc

SEQ ID NO: 1210700 - RNA, 19 nt, Artificial Sequence
  Description of Artificial Sequence: Synthetic oligonucleotide
  Sense strand starting at position 1202 of SEQ ID NO: 917126
gugugauaugucuaauaua

SEQ ID NO: 1210701 - RNA, 19 nt, Artificial Sequence
  Description of Artificial Sequence: Synthetic oligonucleotide
  Antisense strand to SEQ ID NO: 1210700
uauauuagacauaucacac

SEQ ID NO: 1210702 - RNA, 19 nt, Artificial Sequence
  Description of Artificial Sequence: Synthetic oligonucleotide
  Sense strand starting at position 1256 of SEQ ID NO: 917126
uaaagauccugugucagaa

SEQ ID NO: 1210703 - RNA, 19 nt, Artificial Sequence
  Description of Artificial Sequence: Synthetic oligonucleotide
  Antisense strand to SEQ ID NO: 1210702
uucugacacaggaucuuua

SEQ ID NO: 1210704 - RNA, 19 nt, Artificial Sequence
  Description of Artificial Sequence: Synthetic oligonucleotide
  Sense strand starting at position 1326 of SEQ ID NO: 917126
aggaaauuauugguucgca

SEQ ID NO: 1210705 - RNA, 19 nt, Artificial Sequence
  Description of Artificial Sequence: Synthetic oligonucleotide
  Antisense strand to SEQ ID NO: 1210704
ugcgaaccaauaauuuccu

SEQ ID NO: 1210706 - RNA, 19 nt, Artificial Sequence
  Description of Artificial Sequence: Synthetic oligonucleotide
  Sense strand starting at position 1327 of SEQ ID NO: 917126
ggaaauuauugguucgcac

SEQ ID NO: 1210707 - RNA, 19 nt, Artificial Sequence
  Description of Artificial Sequence: Synthetic oligonucleotide
  Antisense strand to SEQ ID NO: 1210706
gugcgaaccaauaauuucc

SEQ ID NO: 1210708 - RNA, 19 nt, Artificial Sequence
  Description of Artificial Sequence: Synthetic oligonucleotide
  Sense strand starting at position 1329 of SEQ ID NO: 917126
aaauuauugguucgcacaa

SEQ ID NO: 1210709 - RNA, 19 nt, Artificial Sequence
  Description of Artificial Sequence: Synthetic oligonucleotide
  Antisense strand to SEQ ID NO: 1210708
uugugcgaaccaauaauuu

SEQ ID NO: 1210710 - RNA, 19 nt, Artificial Sequence
  Description of Artificial Sequence: Synthetic oligonucleotide
  Sense strand starting at position 1984 of SEQ ID NO: 917126
cggagaggccucugcaaug

SEQ ID NO: 1210711 - RNA, 19 nt, Artificial Sequence
  Description of Artificial Sequence: Synthetic oligonucleotide
  Antisense strand to SEQ ID NO: 1210710
cauugcagaggccucuccg

SEQ ID NO: 1210712 - RNA, 19 nt, Artificial Sequence
  Description of Artificial Sequence: Synthetic oligonucleotide
  Sense strand starting at position 2077 of SEQ ID NO: 917126
ccaggaacuugagaaaguu

SEQ ID NO: 1210713 - RNA, 19 nt, Artificial Sequence
  Description of Artificial Sequence: Synthetic oligonucleotide
  Antisense strand to SEQ ID NO: 1210712
aacuuucucaaguuccugg

SEQ ID NO: 1210714 - RNA, 19 nt, Artificial Sequence
  Description of Artificial Sequence: Synthetic oligonucleotide
  Sense strand starting at position 2085 of SEQ ID NO: 917126
uugagaaaguuauucuuga

SEQ ID NO: 1210715 - RNA, 19 nt, Artificial Sequence
  Description of Artificial Sequence: Synthetic oligonucleotide
  Antisense strand to SEQ ID NO: 1210714
ucaagaauaacuuucucaa

SEQ ID NO: 1210716 - RNA, 19 nt, Artificial Sequence
  Description of Artificial Sequence: Synthetic oligonucleotide
  Sense strand starting at position 2086 of SEQ ID NO: 917126
ugagaaaguuauucuugac

SEQ ID NO: 1210717 - RNA, 19 nt, Artificial Sequence
  Description of Artificial Sequence: Synthetic oligonucleotide
  Antisense strand to SEQ ID NO: 1210716
gucaagaauaacuuucuca

SEQ ID NO: 1210718 - RNA, 19 nt, Artificial Sequence
  Description of Artificial Sequence: Synthetic oligonucleotide
  Sense strand starting at position 2134 of SEQ ID NO: 917126
uggagugugguuugcaaag

SEQ ID NO: 1210719 - RNA, 19 nt, Artificial Sequence
  Description of Artificial Sequence: Synthetic oligonucleotide
  Antisense strand to SEQ ID NO: 1210718
cuuugcaaaccacacucca

SEQ ID NO: 1210720 - RNA, 19 nt, Artificial Sequence
  Description of Artificial Sequence: Synthetic oligonucleotide
  Sense strand starting at position 2168 of SEQ ID NO: 917126
uuguccuaucacugucaaa

SEQ ID NO: 1210721 - RNA, 19 nt, Artificial Sequence
  Description of Artificial Sequence: Synthetic oligonucleotide
  Antisense strand to SEQ ID NO: 1210720
uuugacagugauaggacaa

SEQ ID NO: 1210722 - RNA, 19 nt, Artificial Sequence
  Description of Artificial Sequence: Synthetic oligonucleotide
  Sense strand starting at position 2233 of SEQ ID NO: 917126
aguggugcuauuuaaguuu

SEQ ID NO: 1210723 - RNA, 19 nt, Artificial Sequence
  Description of Artificial Sequence: Synthetic oligonucleotide
  Antisense strand to SEQ ID NO: 1210722
aaacuuaaauagcaccacu

SEQ ID NO: 1210724 - RNA, 19 nt, Artificial Sequence
  Description of Artificial Sequence: Synthetic oligonucleotide
  Sense strand starting at position 2236 of SEQ ID NO: 917126
ggugcuauuuaaguuuaau

SEQ ID NO: 1210725 - RNA, 19 nt, Artificial Sequence
  Description of Artificial Sequence: Synthetic oligonucleotide
  Antisense strand to SEQ ID NO: 1210724
auuaaacuuaaauagcacc

SEQ ID NO: 1210726 - RNA, 19 nt, Artificial Sequence
  Description of Artificial Sequence: Synthetic oligonucleotide
  Sense strand starting at position 2255 of SEQ ID NO: 917126
gcaaaugguccauauuguu

SEQ ID NO: 1210727 - RNA, 19 nt, Artificial Sequence
  Description of Artificial Sequence: Synthetic oligonucleotide
  Antisense strand to SEQ ID NO: 1210726
aacaauauggaccauuugc

SEQ ID NO: 1210728 - RNA, 19 nt, Artificial Sequence
  Description of Artificial Sequence: Synthetic oligonucleotide
  Sense strand starting at position 2477 of SEQ ID NO: 917126
uguggauuccacuguauca

SEQ ID NO: 1210729 - RNA, 19 nt, Artificial Sequence
  Description of Artificial Sequence: Synthetic oligonucleotide
  Antisense strand to SEQ ID NO: 1210728
ugauacaguggaauccaca

SEQ ID NO: 1210730 - RNA, 19 nt, Artificial Sequence
  Description of Artificial Sequence: Synthetic oligonucleotide
  Sense strand starting at position 2479 of SEQ ID NO: 917126
uggauuccacuguaucaac

SEQ ID NO: 1210731 - RNA, 19 nt, Artificial Sequence
  Description of Artificial Sequence: Synthetic oligonucleotide
  Antisense strand to SEQ ID NO: 1210730
guugauacaguggaaucca

SEQ ID NO: 1210732 - RNA, 19 nt, Artificial Sequence
  Description of Artificial Sequence: Synthetic oligonucleotide
  Sense strand starting at position 2624 of SEQ ID NO: 917126
ggcucuucccaacaagaug

SEQ ID NO: 1210733 - RNA, 19 nt, Artificial Sequence
  Description of Artificial Sequence: Synthetic oligonucleotide
  Antisense strand to SEQ ID NO: 1210732
caucuuguugggaagagcc

SEQ ID NO: 1210734 - RNA, 19 nt, Artificial Sequence
  Description of Artificial Sequence: Synthetic oligonucleotide
  Sense strand starting at position 3035 of SEQ ID NO: 917126
gguggucucagacacaacu

SEQ ID NO: 1210735 - RNA, 19 nt, Artificial Sequence
  Description of Artificial Sequence: Synthetic oligonucleotide
  Antisense strand to SEQ ID NO: 1210734
aguugugucugagaccacc

SEQ ID NO: 1210736 - RNA, 19 nt, Artificial Sequence
  Description of Artificial Sequence: Synthetic oligonucleotide
  Sense strand starting at position 3125 of SEQ ID NO: 917126
agcacaugccugcaaagaa

SEQ ID NO: 1210737 - RNA, 19 nt, Artificial Sequence
  Description of Artificial Sequence: Synthetic oligonucleotide
  Antisense strand to SEQ ID NO: 1210736
uucuuugcaggcaugugcu

SEQ ID NO: 1210738 - RNA, 19 nt, Artificial Sequence
  Description of Artificial Sequence: Synthetic oligonucleotide
  Sense strand starting at position 3157 of SEQ ID NO: 917126
gccagaaagugagcacaua

SEQ ID NO: 1210739 - RNA, 19 nt, Artificial Sequence
  Description of Artificial Sequence: Synthetic oligonucleotide
  Antisense strand to SEQ ID NO: 1210738
uaugugcucacuuucuggc

SEQ ID NO: 1210740 - RNA, 19 nt, Artificial Sequence
  Description of Artificial Sequence: Synthetic oligonucleotide
  Sense strand starting at position 3311 of SEQ ID NO: 917126
uugagaaguuucucaagau

SEQ ID NO: 1210741 - RNA, 19 nt, Artificial Sequence
  Description of Artificial Sequence: Synthetic oligonucleotide
  Antisense strand to SEQ ID NO: 1210740
aucuugagaaacuucucaa

SEQ ID NO: 1210742 - RNA, 19 nt, Artificial Sequence
  Description of Artificial Sequence: Synthetic oligonucleotide
  Sense strand starting at position 3498 of SEQ ID NO: 917126
gcagauggacucugaauga

SEQ ID NO: 1210743 - RNA, 19 nt, Artificial Sequence
  Description of Artificial Sequence: Synthetic oligonucleotide
  Antisense strand to SEQ ID NO: 1210742
ucauucagaguccaucugc

SEQ ID NO: 1210744 - RNA, 19 nt, Artificial Sequence
  Description of Artificial Sequence: Synthetic oligonucleotide
  Sense strand starting at position 3750 of SEQ ID NO: 917126
acuggauucuaaccggaac

SEQ ID NO: 1210745 - RNA, 19 nt, Artificial Sequence
  Description of Artificial Sequence: Synthetic oligonucleotide
  Antisense strand to SEQ ID NO: 1210744
guuccgguuagaauccagu

SEQ ID NO: 1210746 - RNA, 19 nt, Artificial Sequence
  Description of Artificial Sequence: Synthetic oligonucleotide
  Sense strand starting at position 3789 of SEQ ID NO: 917126
cacaacagucucugaggaa

SEQ ID NO: 1210747 - RNA, 19 nt, Artificial Sequence
  Description of Artificial Sequence: Synthetic oligonucleotide
  Antisense strand to SEQ ID NO: 1210746
uuccucagagacuguugug

SEQ ID NO: 1210748 - RNA, 19 nt, Artificial Sequence
  Description of Artificial Sequence: Synthetic oligonucleotide
  Sense strand starting at position 3877 of SEQ ID NO: 917126
ccaucugaagugugacaca

SEQ ID NO: 1210749 - RNA, 19 nt, Artificial Sequence
  Description of Artificial Sequence: Synthetic oligonucleotide
  Antisense strand to SEQ ID NO: 1210748
ugugucacacuucagaugg

SEQ ID NO: 1210750 - RNA, 19 nt, Artificial Sequence
  Description of Artificial Sequence: Synthetic oligonucleotide
  Sense strand starting at position 3911 of SEQ ID NO: 917127
gaaagugucucccucagcu

SEQ ID NO: 1210751 - RNA, 19 nt, Artificial Sequence
  Description of Artificial Sequence: Synthetic oligonucleotide
  Antisense strand to SEQ ID NO: 1210750
agcugagggagacacuuuc

SEQ ID NO: 1210752 - RNA, 19 nt, Artificial Sequence
  Description of Artificial Sequence: Synthetic oligonucleotide
  Sense strand starting at position 208 of SEQ ID NO: 917127
ggcccuaaguuucuuggaa

SEQ ID NO: 1210753 - RNA, 19 nt, Artificial Sequence
  Description of Artificial Sequence: Synthetic oligonucleotide
  Antisense strand to SEQ ID NO: 1210752
uuccaagaaacuuagggcc

SEQ ID NO: 1210754 - RNA, 19 nt, Artificial Sequence
  Description of Artificial Sequence: Synthetic oligonucleotide
  Sense strand starting at position 209 of SEQ ID NO: 917127
gcccuaaguuucuuggaau

SEQ ID NO: 1210755 - RNA, 19 nt, Artificial Sequence
  Description of Artificial Sequence: Synthetic oligonucleotide
  Antisense strand to SEQ ID NO: 1210754
auuccaagaaacuuagggc

SEQ ID NO: 1210756 - RNA, 19 nt, Artificial Sequence
  Description of Artificial Sequence: Synthetic oligonucleotide
  Sense strand starting at position 383 of SEQ ID NO: 917127
guaaccugcccucacagau

SEQ ID NO: 1210757 - RNA, 19 nt, Artificial Sequence
  Description of Artificial Sequence: Synthetic oligonucleotide
  Antisense strand to SEQ ID NO: 1210756
aucugugagggcagguuac

SEQ ID NO: 1210758 - RNA, 19 nt, Artificial Sequence
  Description of Artificial Sequence: Synthetic oligonucleotide
  Sense strand starting at position 454 of SEQ ID NO: 917127
gaaaccucuguuggguuau

SEQ ID NO: 1210759 - RNA, 19 nt, Artificial Sequence
  Description of Artificial Sequence: Synthetic oligonucleotide
  Antisense strand to SEQ ID NO: 1210758
auaacccaacagagguuuc

SEQ ID NO: 1210760 - RNA, 19 nt, Artificial Sequence
  Description of Artificial Sequence: Synthetic oligonucleotide
  Sense strand starting at position 460 of SEQ ID NO: 917127
ucuguuggguuauccuaca

SEQ ID NO: 1210761 - RNA, 19 nt, Artificial Sequence
  Description of Artificial Sequence: Synthetic oligonucleotide
  Antisense strand to SEQ ID NO: 1210760
uguaggauaacccaacaga

SEQ ID NO: 1210762 - RNA, 19 nt, Artificial Sequence
  Description of Artificial Sequence: Synthetic oligonucleotide
  Sense strand starting at position 597 of SEQ ID NO: 917127
ggcauagucccguaaacau

SEQ ID NO: 1210763 - RNA, 19 nt, Artificial Sequence
  Description of Artificial Sequence: Synthetic oligonucleotide
  Antisense strand to SEQ ID NO: 1210762
auguuuacgggacuaugcc

SEQ ID NO: 1210764 - RNA, 19 nt, Artificial Sequence
  Description of Artificial Sequence: Synthetic oligonucleotide
  Sense strand starting at position 738 of SEQ ID NO: 917127
auccaagguuggcugaaua

SEQ ID NO: 1210765 - RNA, 19 nt, Artificial Sequence
  Description of Artificial Sequence: Synthetic oligonucleotide
  Antisense strand to SEQ ID NO: 1210764
uauucagccaaccuuggau

SEQ ID NO: 1210766 - RNA, 19 nt, Artificial Sequence
  Description of Artificial Sequence: Synthetic oligonucleotide
  Sense strand starting at position 793 of SEQ ID NO: 917127
uacucuuaucugggagcuu

SEQ ID NO: 1210767 - RNA, 19 nt, Artificial Sequence
  Description of Artificial Sequence: Synthetic oligonucleotide
  Antisense strand to SEQ ID NO: 1210766
aagcucccagauaagagua

SEQ ID NO: 1210768 - RNA, 19 nt, Artificial Sequence
  Description of Artificial Sequence: Synthetic oligonucleotide
  Sense strand starting at position 819 of SEQ ID NO: 917127
cccaucucaguuuacagau

SEQ ID NO: 1210769 - RNA, 19 nt, Artificial Sequence
  Description of Artificial Sequence: Synthetic oligonucleotide
  Antisense strand to SEQ ID NO: 1210768
aucuguaaacugagauggg

SEQ ID NO: 1210770 - RNA, 19 nt, Artificial Sequence
  Description of Artificial Sequence: Synthetic oligonucleotide
  Sense strand starting at position 976 of SEQ ID NO: 917127
gaagaaucgcaauagcaaa

SEQ ID NO: 1210771 - RNA, 19 nt, Artificial Sequence
  Description of Artificial Sequence: Synthetic oligonucleotide
  Antisense strand to SEQ ID NO: 1210770
uuugcuauugcgauucuuc

SEQ ID NO: 1210772 - RNA, 19 nt, Artificial Sequence
  Description of Artificial Sequence: Synthetic oligonucleotide
  Sense strand starting at position 1050 of SEQ ID NO: 917127
uguuuaguaaagugacaca

SEQ ID NO: 1210773 - RNA, 19 nt, Artificial Sequence
  Description of Artificial Sequence: Synthetic oligonucleotide
  Antisense strand to SEQ ID NO: 1210772
ugugucacuuuacuaaaca

SEQ ID NO: 1210774 - RNA, 19 nt, Artificial Sequence
  Description of Artificial Sequence: Synthetic oligonucleotide
  Sense strand starting at position 1132 of SEQ ID NO: 917127
gucacauacugguuaaugu

SEQ ID NO: 1210775 - RNA, 19 nt, Artificial Sequence
  Description of Artificial Sequence: Synthetic oligonucleotide
  Antisense strand to SEQ ID NO: 1210774
acauuaaccaguaugugac

SEQ ID NO: 1210776 - RNA, 19 nt, Artificial Sequence
  Description of Artificial Sequence: Synthetic oligonucleotide
  Sense strand starting at position 1147 of SEQ ID NO: 917127
augugaauucucuggacau

SEQ ID NO: 1210777 - RNA, 19 nt, Artificial Sequence
  Description of Artificial Sequence: Synthetic oligonucleotide
  Antisense strand to SEQ ID NO: 1210776
auguccagagaauucacau

SEQ ID NO: 1210778 - RNA, 19 nt, Artificial Sequence
  Description of Artificial Sequence: Synthetic oligonucleotide
  Sense strand starting at position 1162 of SEQ ID NO: 917127
acauuaaguguugagggua

SEQ ID NO: 1210779 - RNA, 19 nt, Artificial Sequence
  Description of Artificial Sequence: Synthetic oligonucleotide
  Antisense strand to SEQ ID NO: 1210778
uacccucaacacuuaaugu

SEQ ID NO: 1210780 - RNA, 19 nt, Artificial Sequence
  Description of Artificial Sequence: Synthetic oligonucleotide
  Sense strand starting at position 1267 of SEQ ID NO: 917127
uuuauuucugcacgacuuu

SEQ ID NO: 1210781 - RNA, 19 nt, Artificial Sequence
  Description of Artificial Sequence: Synthetic oligonucleotide
  Antisense strand to SEQ ID NO: 1210780
aaagucgugcagaaauaaa

SEQ ID NO: 1210782 - RNA, 19 nt, Artificial Sequence
  Description of Artificial Sequence: Synthetic oligonucleotide
  Sense strand starting at position 1289 of SEQ ID NO: 917127
ugaucaccugcugaggauu

SEQ ID NO: 1210783 - RNA, 19 nt, Artificial Sequence
  Description of Artificial Sequence: Synthetic oligonucleotide
  Antisense strand to SEQ ID NO: 1210782
aauccucagcaggugauca

SEQ ID NO: 1210784 - RNA, 19 nt, Artificial Sequence
  Description of Artificial Sequence: Synthetic oligonucleotide
  Sense strand starting at position 1329 of SEQ ID NO: 917127
gaugccagcccuuagauga

SEQ ID NO: 1210785 - RNA, 19 nt, Artificial Sequence
  Description of Artificial Sequence: Synthetic oligonucleotide
  Antisense strand to SEQ ID NO: 1210784
ucaucuaagggcuggcauc

SEQ ID NO: 1210786 - RNA, 19 nt, Artificial Sequence
  Description of Artificial Sequence: Synthetic oligonucleotide
  Sense strand starting at position 1405 of SEQ ID NO: 917127
cugauaaacgguuguugaa

SEQ ID NO: 1210787 - RNA, 19 nt, Artificial Sequence
  Description of Artificial Sequence: Synthetic oligonucleotide
  Antisense strand to SEQ ID NO: 1210786
uucaacaaccguuuaucag

SEQ ID NO: 1210788 - RNA, 19 nt, Artificial Sequence
  Description of Artificial Sequence: Synthetic oligonucleotide
  Sense strand starting at position 2612 of SEQ ID NO: 917127
gggauuaaggugcaauguu

SEQ ID NO: 1210789 - RNA, 19 nt, Artificial Sequence
  Description of Artificial Sequence: Synthetic oligonucleotide
  Antisense strand to SEQ ID NO: 1210788
aacauugcaccuuaauccc

SEQ ID NO: 1210790 - RNA, 19 nt, Artificial Sequence
  Description of Artificial Sequence: Synthetic oligonucleotide
  Sense strand starting at position 2688 of SEQ ID NO: 917127
accaguaagucagcugaga

SEQ ID NO: 1210791 - RNA, 19 nt, Artificial Sequence
  Description of Artificial Sequence: Synthetic oligonucleotide
  Antisense strand to SEQ ID NO: 1210790
ucucagcugacuuacuggu

SEQ ID NO: 1210792 - RNA, 19 nt, Artificial Sequence
  Description of Artificial Sequence: Synthetic oligonucleotide
  Sense strand starting at position 2763 of SEQ ID NO: 917127
agugcuuuaguccaaggua

SEQ ID NO: 1210793 - RNA, 19 nt, Artificial Sequence
  Description of Artificial Sequence: Synthetic oligonucleotide
  Antisense strand to SEQ ID NO: 1210792
uaccuuggacuaaagcacu

SEQ ID NO: 1210794 - RNA, 19 nt, Artificial Sequence
  Description of Artificial Sequence: Synthetic oligonucleotide
  Sense strand starting at position 2766 of SEQ ID NO: 917127
gcuuuaguccaagguagaa

SEQ ID NO: 1210795 - RNA, 19 nt, Artificial Sequence
  Description of Artificial Sequence: Synthetic oligonucleotide
  Antisense strand to SEQ ID NO: 1210794
uucuaccuuggacuaaagc

SEQ ID NO: 1210796 - RNA, 19 nt, Artificial Sequence
  Description of Artificial Sequence: Synthetic oligonucleotide
  Sense strand starting at position 2885 of SEQ ID NO: 917127
aagccugaggcauacgaaa

SEQ ID NO: 1210797 - RNA, 19 nt, Artificial Sequence
  Description of Artificial Sequence: Synthetic oligonucleotide
  Antisense strand to SEQ ID NO: 1210796
uuucguaugccucaggcuu

SEQ ID NO: 1210798 - RNA, 19 nt, Artificial Sequence
  Description of Artificial Sequence: Synthetic oligonucleotide
  Sense strand starting at position 2969 of SEQ ID NO: 917127
augugaagacauuaagcgu

SEQ ID NO: 1210799 - RNA, 19 nt, Artificial Sequence
  Description of Artificial Sequence: Synthetic oligonucleotide
  Antisense strand to SEQ ID NO: 1210798
acgcuuaaugucuucacau

SEQ ID NO: 1210800 - RNA, 19 nt, Artificial Sequence
  Description of Artificial Sequence: Synthetic oligonucleotide
  Sense strand starting at position 2976 of SEQ ID NO: 917127
gacauuaagcguugacauu

SEQ ID NO: 1210801 - RNA, 19 nt, Artificial Sequence
  Description of Artificial Sequence: Synthetic oligonucleotide
  Antisense strand to SEQ ID NO: 1210800
aaugucaacgcuuaauguc

SEQ ID NO: 1210802 - RNA, 19 nt, Artificial Sequence
  Description of Artificial Sequence: Synthetic oligonucleotide
  Sense strand starting at position 2996 of SEQ ID NO: 917127
aaacuaaugcgucaucuag

SEQ ID NO: 1210803 - RNA, 19 nt, Artificial Sequence
  Description of Artificial Sequence: Synthetic oligonucleotide
  Antisense strand to SEQ ID NO: 1210802
cuagaugacgcauuaguuu

SEQ ID NO: 1210804 - RNA, 19 nt, Artificial Sequence
  Description of Artificial Sequence: Synthetic oligonucleotide
  Sense strand starting at position 2998 of SEQ ID NO: 917127
acuaaugcgucaucuagaa

SEQ ID NO: 1210805 - RNA, 19 nt, Artificial Sequence
  Description of Artificial Sequence: Synthetic oligonucleotide
  Antisense strand to SEQ ID NO: 1210804
uucuagaugacgcauuagu

SEQ ID NO: 1210806 - RNA, 19 nt, Artificial Sequence
  Description of Artificial Sequence: Synthetic oligonucleotide
  Sense strand starting at position 3002 of SEQ ID NO: 917127
augcgucaucuagaacucu

SEQ ID NO: 1210807 - RNA, 19 nt, Artificial Sequence
  Description of Artificial Sequence: Synthetic oligonucleotide
  Antisense strand to SEQ ID NO: 1210806
agaguucuagaugacgcau

SEQ ID NO: 1210808 - RNA, 19 nt, Artificial Sequence
  Description of Artificial Sequence: Synthetic oligonucleotide
  Sense strand starting at position 3011 of SEQ ID NO: 917127
cuagaacucuagcauuuga

SEQ ID NO: 1210809 - RNA, 19 nt, Artificial Sequence
  Description of Artificial Sequence: Synthetic oligonucleotide
  Antisense strand to SEQ ID NO: 1210808
ucaaaugcuagaguucuag

SEQ ID NO: 1210810 - RNA, 19 nt, Artificial Sequence
  Description of Artificial Sequence: Synthetic oligonucleotide
  Sense strand starting at position 3051 of SEQ ID NO: 917127
ccuucuguacuguaggaga

SEQ ID NO: 1210811 - RNA, 19 nt, Artificial Sequence
  Description of Artificial Sequence: Synthetic oligonucleotide
  Antisense strand to SEQ ID NO: 1210810
ucuccuacaguacagaagg

SEQ ID NO: 1210812 - RNA, 19 nt, Artificial Sequence
  Description of Artificial Sequence: Synthetic oligonucleotide
  Sense strand starting at position 3053 of SEQ ID NO: 917127
uucuguacuguaggagaaa

SEQ ID NO: 1210813 - RNA, 19 nt, Artificial Sequence
  Description of Artificial Sequence: Synthetic oligonucleotide
  Antisense strand to SEQ ID NO: 1210812
uuucuccuacaguacagaa

SEQ ID NO: 1210814 - RNA, 19 nt, Artificial Sequence
  Description of Artificial Sequence: Synthetic oligonucleotide
  Sense strand starting at position 3235 of SEQ ID NO: 917127
acauguuuccaucgaaacu

SEQ ID NO: 1210815 - RNA, 19 nt, Artificial Sequence
  Description of Artificial Sequence: Synthetic oligonucleotide
  Antisense strand to SEQ ID NO: 1210814
aguuucgauggaaacaugu

SEQ ID NO: 1210816 - RNA, 19 nt, Artificial Sequence
  Description of Artificial Sequence: Synthetic oligonucleotide
  Sense strand starting at position 3379 of SEQ ID NO: 917127
aguuguaaaggauguaauu

SEQ ID NO: 1210817 - RNA, 19 nt, Artificial Sequence
  Description of Artificial Sequence: Synthetic oligonucleotide
  Antisense strand to SEQ ID NO: 1210816
aauuacauccuuuacaacu

SEQ ID NO: 1210818 - RNA, 19 nt, Artificial Sequence
  Description of Artificial Sequence: Synthetic oligonucleotide
  Sense strand starting at position 3391 of SEQ ID NO: 917127
uguaauuucugacauucug

SEQ ID NO: 1210819 - RNA, 19 nt, Artificial Sequence
  Description of Artificial Sequence: Synthetic oligonucleotide
  Antisense strand to SEQ ID NO: 1210818
cagaaugucagaaauuaca

SEQ ID NO: 1210820 - RNA, 19 nt, Artificial Sequence
  Description of Artificial Sequence: Synthetic oligonucleotide
  Sense strand starting at position 3768 of SEQ ID NO: 917127
uuuggaucaccuuauguac

SEQ ID NO: 1210821 - RNA, 19 nt, Artificial Sequence
  Description of Artificial Sequence: Synthetic oligonucleotide
  Antisense strand to SEQ ID NO: 1210820
guacauaaggugauccaaa

SEQ ID NO: 1210822 - RNA, 19 nt, Artificial Sequence
  Description of Artificial Sequence: Synthetic oligonucleotide
  Sense strand starting at position 3793 of SEQ ID NO: 917127
ccagcugugcuugaauaag

SEQ ID NO: 1210823 - RNA, 19 nt, Artificial Sequence
  Description of Artificial Sequence: Synthetic oligonucleotide
  Antisense strand to SEQ ID NO: 1210822
cuuauucaagcacagcugg

SEQ ID NO: 1210824 - RNA, 19 nt, Artificial Sequence
  Description of Artificial Sequence: Synthetic oligonucleotide
  Sense strand starting at position 3835 of SEQ ID NO: 917127
aguucucauucuguaaaca

SEQ ID NO: 1210825 - RNA, 19 nt, Artificial Sequence
  Description of Artificial Sequence: Synthetic oligonucleotide
  Antisense strand to SEQ ID NO: 1210824
uguuuacagaaugagaacu

SEQ ID NO: 1210826 - RNA, 19 nt, Artificial Sequence
  Description of Artificial Sequence: Synthetic oligonucleotide
  Sense strand starting at position 3836 of SEQ ID NO: 917127
guucucauucuguaaacau

SEQ ID NO: 1210827 - RNA, 19 nt, Artificial Sequence
  Description of Artificial Sequence: Synthetic oligonucleotide
  Antisense strand to SEQ ID NO: 1210826
auguuuacagaaugagaac

SEQ ID NO: 1210828 - RNA, 19 nt, Artificial Sequence
  Description of Artificial Sequence: Synthetic oligonucleotide
  Sense strand starting at position 3948 of SEQ ID NO: 917127
cugaaaugcugucuaaugu

SEQ ID NO: 1210829 - RNA, 19 nt, Artificial Sequence
  Description of Artificial Sequence: Synthetic oligonucleotide
  Antisense strand to SEQ ID NO: 1210828
acauuagacagcauuucag

SEQ ID NO: 1210830 - RNA, 19 nt, Artificial Sequence
  Description of Artificial Sequence: Synthetic oligonucleotide
  Sense strand starting at position 3949 of SEQ ID NO: 917125
ugaaaugcugucuaauguc

SEQ ID NO: 1210831 - RNA, 19 nt, Artificial Sequence
  Description of Artificial Sequence: Synthetic oligonucleotide
  Antisense strand to SEQ ID NO: 1210830
gacauuagacagcauuuca

SEQ ID NO: 1210832 - RNA, 19 nt, Artificial Sequence
  Description of Artificial Sequence: Synthetic oligonucleotide
  Sense strand starting at position 3770 of SEQ ID NO: 917128
aguaacauugcucaaagcu

SEQ ID NO: 1210833 - RNA, 19 nt, Artificial Sequence
  Description of Artificial Sequence: Synthetic oligonucleotide
  Antisense strand to SEQ ID NO: 1210832
agcuuugagcaauguuacu

SEQ ID NO: 1210834 - RNA, 19 nt, Artificial Sequence
  Description of Artificial Sequence: Synthetic oligonucleotide
  Sense strand starting at position 175 of SEQ ID NO: 917128
ggaugugugagucaccauc

SEQ ID NO: 1210835 - RNA, 19 nt, Artificial Sequence
  Description of Artificial Sequence: Synthetic oligonucleotide
  Antisense strand to SEQ ID NO: 1210834
gauggugacucacacaucc

SEQ ID NO: 1210836 - RNA, 19 nt, Artificial Sequence
  Description of Artificial Sequence: Synthetic oligonucleotide
  Sense strand starting at position 181 of SEQ ID NO: 917128
gugagucaccaucagcuaa

SEQ ID NO: 1210837 - RNA, 19 nt, Artificial Sequence
  Description of Artificial Sequence: Synthetic oligonucleotide
  Antisense strand to SEQ ID NO: 1210836
uuagcugauggugacucac

SEQ ID NO: 1210838 - RNA, 19 nt, Artificial Sequence
  Description of Artificial Sequence: Synthetic oligonucleotide
  Sense strand starting at position 199 of SEQ ID NO: 917128
accugucucugggucagau

SEQ ID NO: 1210839 - RNA, 19 nt, Artificial Sequence
  Description of Artificial Sequence: Synthetic oligonucleotide
  Antisense strand to SEQ ID NO: 1210838
aucugacccagagacaggu

SEQ ID NO: 1210840 - RNA, 19 nt, Artificial Sequence
  Description of Artificial Sequence: Synthetic oligonucleotide
  Sense strand starting at position 201 of SEQ ID NO: 917128
cugucucugggucagauaa

SEQ ID NO: 1210841 - RNA, 19 nt, Artificial Sequence
  Description of Artificial Sequence: Synthetic oligonucleotide
  Antisense strand to SEQ ID NO: 1210840
uuaucugacccagagacag

SEQ ID NO: 1210842 - RNA, 19 nt, Artificial Sequence
  Description of Artificial Sequence: Synthetic oligonucleotide
  Sense strand starting at position 203 of SEQ ID NO: 917128
gucucugggucagauaaga

SEQ ID NO: 1210843 - RNA, 19 nt, Artificial Sequence
  Description of Artificial Sequence: Synthetic oligonucleotide
  Antisense strand to SEQ ID NO: 1210842
ucuuaucugacccagagac

SEQ ID NO: 1210844 - RNA, 19 nt, Artificial Sequence
  Description of Artificial Sequence: Synthetic oligonucleotide
  Sense strand starting at position 218 of SEQ ID NO: 917128
aagaguggucccugagcag

SEQ ID NO: 1210845 - RNA, 19 nt, Artificial Sequence
  Description of Artificial Sequence: Synthetic oligonucleotide
  Antisense strand to SEQ ID NO: 1210844
cugcucagggaccacucuu

SEQ ID NO: 1210846 - RNA, 19 nt, Artificial Sequence
  Description of Artificial Sequence: Synthetic oligonucleotide
  Sense strand starting at position 259 of SEQ ID NO: 917128
agacauuccugaggaguua

SEQ ID NO: 1210847 - RNA, 19 nt, Artificial Sequence
  Description of Artificial Sequence: Synthetic oligonucleotide
  Antisense strand to SEQ ID NO: 1210846
uaacuccucaggaaugucu

SEQ ID NO: 1210848 - RNA, 19 nt, Artificial Sequence
  Description of Artificial Sequence: Synthetic oligonucleotide
  Sense strand starting at position 311 of SEQ ID NO: 917128
agagcugguucaguagaaa

SEQ ID NO: 1210849 - RNA, 19 nt, Artificial Sequence
  Description of Artificial Sequence: Synthetic oligonucleotide
  Antisense strand to SEQ ID NO: 1210848
uuucuacugaaccagcucu

SEQ ID NO: 1210850 - RNA, 19 nt, Artificial Sequence
  Description of Artificial Sequence: Synthetic oligonucleotide
  Sense strand starting at position 355 of SEQ ID NO: 917128
gcuggucuguggcuucuaa

SEQ ID NO: 1210851 - RNA, 19 nt, Artificial Sequence
  Description of Artificial Sequence: Synthetic oligonucleotide
  Antisense strand to SEQ ID NO: 1210850
uuagaagccacagaccagc

SEQ ID NO: 1210852 - RNA, 19 nt, Artificial Sequence
  Description of Artificial Sequence: Synthetic oligonucleotide
  Sense strand starting at position 434 of SEQ ID NO: 917128
gagugagaaggaugguuca

SEQ ID NO: 1210853 - RNA, 19 nt, Artificial Sequence
  Description of Artificial Sequence: Synthetic oligonucleotide
  Antisense strand to SEQ ID NO: 1210852
ugaaccauccuucucacuc

SEQ ID NO: 1210854 - RNA, 19 nt, Artificial Sequence
  Description of Artificial Sequence: Synthetic oligonucleotide
  Sense strand starting at position 488 of SEQ ID NO: 917128
ccaguacuaugucuuggaa

SEQ ID NO: 1210855 - RNA, 19 nt, Artificial Sequence
  Description of Artificial Sequence: Synthetic oligonucleotide
  Antisense strand to SEQ ID NO: 1210854
uuccaagacauaguacugg

SEQ ID NO: 1210856 - RNA, 19 nt, Artificial Sequence
  Description of Artificial Sequence: Synthetic oligonucleotide
  Sense strand starting at position 490 of SEQ ID NO: 917128
aguacuaugucuuggaaac

SEQ ID NO: 1210857 - RNA, 19 nt, Artificial Sequence
  Description of Artificial Sequence: Synthetic oligonucleotide
  Antisense strand to SEQ ID NO: 1210856
guuuccaagacauaguacu

SEQ ID NO: 1210858 - RNA, 19 nt, Artificial Sequence
  Description of Artificial Sequence: Synthetic oligonucleotide
  Sense strand starting at position 491 of SEQ ID NO: 917128
guacuaugucuuggaaaca

SEQ ID NO: 1210859 - RNA, 19 nt, Artificial Sequence
  Description of Artificial Sequence: Synthetic oligonucleotide
  Antisense strand to SEQ ID NO: 1210858
uguuuccaagacauaguac

SEQ ID NO: 1210860 - RNA, 19 nt, Artificial Sequence
  Description of Artificial Sequence: Synthetic oligonucleotide
  Sense strand starting at position 513 of SEQ ID NO: 917128
ugaggugucacuuaaugac

SEQ ID NO: 1210861 - RNA, 19 nt, Artificial Sequence
  Description of Artificial Sequence: Synthetic oligonucleotide
  Antisense strand to SEQ ID NO: 1210860
gucauuaagugacaccuca

SEQ ID NO: 1210862 - RNA, 19 nt, Artificial Sequence
  Description of Artificial Sequence: Synthetic oligonucleotide
  Sense strand starting at position 674 of SEQ ID NO: 917128
gguacagcauuccuguaau

SEQ ID NO: 1210863 - RNA, 19 nt, Artificial Sequence
  Description of Artificial Sequence: Synthetic oligonucleotide
  Antisense strand to SEQ ID NO: 1210862
auuacaggaaugcuguacc

SEQ ID NO: 1210864 - RNA, 19 nt, Artificial Sequence
  Description of Artificial Sequence: Synthetic oligonucleotide
  Sense strand starting at position 684 of SEQ ID NO: 917128
uccuguaauggguacugua

SEQ ID NO: 1210865 - RNA, 19 nt, Artificial Sequence
  Description of Artificial Sequence: Synthetic oligonucleotide
  Antisense strand to SEQ ID NO: 1210864
uacaguacccauuacagga

SEQ ID NO: 1210866 - RNA, 19 nt, Artificial Sequence
  Description of Artificial Sequence: Synthetic oligonucleotide
  Sense strand starting at position 911 of SEQ ID NO: 917128
auuuaugagucagagcaaa

SEQ ID NO: 1210867 - RNA, 19 nt, Artificial Sequence
  Description of Artificial Sequence: Synthetic oligonucleotide
  Antisense strand to SEQ ID NO: 1210866
uuugcucugacucauaaau

SEQ ID NO: 1210868 - RNA, 19 nt, Artificial Sequence
  Description of Artificial Sequence: Synthetic oligonucleotide
  Sense strand starting at position 932 of SEQ ID NO: 917128
aguuuccuccacugucuua

SEQ ID NO: 1210869 - RNA, 19 nt, Artificial Sequence
  Description of Artificial Sequence: Synthetic oligonucleotide
  Antisense strand to SEQ ID NO: 1210868
uaagacaguggaggaaacu

SEQ ID NO: 1210870 - RNA, 19 nt, Artificial Sequence
  Description of Artificial Sequence: Synthetic oligonucleotide
  Sense strand starting at position 943 of SEQ ID NO: 917128
cugucuuaccaaggucaau

SEQ ID NO: 1210871 - RNA, 19 nt, Artificial Sequence
  Description of Artificial Sequence: Synthetic oligonucleotide
  Antisense strand to SEQ ID NO: 1210870
auugaccuugguaagacag

SEQ ID NO: 1210872 - RNA, 19 nt, Artificial Sequence
  Description of Artificial Sequence: Synthetic oligonucleotide
  Sense strand starting at position 1545 of SEQ ID NO: 917128
agacgaugccugcguggaa

SEQ ID NO: 1210873 - RNA, 19 nt, Artificial Sequence
  Description of Artificial Sequence: Synthetic oligonucleotide
  Antisense strand to SEQ ID NO: 1210872
uuccacgcaggcaucgucu

SEQ ID NO: 1210874 - RNA, 19 nt, Artificial Sequence
  Description of Artificial Sequence: Synthetic oligonucleotide
  Sense strand starting at position 1626 of SEQ ID NO: 917128
gagguaagccucuacucau

SEQ ID NO: 1210875 - RNA, 19 nt, Artificial Sequence
  Description of Artificial Sequence: Synthetic oligonucleotide
  Antisense strand to SEQ ID NO: 1210874
augaguagaggcuuaccuc

SEQ ID NO: 1210876 - RNA, 19 nt, Artificial Sequence
  Description of Artificial Sequence: Synthetic oligonucleotide
  Sense strand starting at position 2072 of SEQ ID NO: 917128
cugagcuccucgcagagaa

SEQ ID NO: 1210877 - RNA, 19 nt, Artificial Sequence
  Description of Artificial Sequence: Synthetic oligonucleotide
  Antisense strand to SEQ ID NO: 1210876
uucucugcgaggagcucag

SEQ ID NO: 1210878 - RNA, 19 nt, Artificial Sequence
  Description of Artificial Sequence: Synthetic oligonucleotide
  Sense strand starting at position 2074 of SEQ ID NO: 917128
gagcuccucgcagagaauu

SEQ ID NO: 1210879 - RNA, 19 nt, Artificial Sequence
  Description of Artificial Sequence: Synthetic oligonucleotide
  Antisense strand to SEQ ID NO: 1210878
aauucucugcgaggagcuc

SEQ ID NO: 1210880 - RNA, 19 nt, Artificial Sequence
  Description of Artificial Sequence: Synthetic oligonucleotide
  Sense strand starting at position 2085 of SEQ ID NO: 917128
agagaauucugaccucuuc

SEQ ID NO: 1210881 - RNA, 19 nt, Artificial Sequence
  Description of Artificial Sequence: Synthetic oligonucleotide
  Antisense strand to SEQ ID NO: 1210880
gaagaggucagaauucucu

SEQ ID NO: 1210882 - RNA, 19 nt, Artificial Sequence
  Description of Artificial Sequence: Synthetic oligonucleotide
  Sense strand starting at position 2108 of SEQ ID NO: 917128
caguacaugccucaagguu

SEQ ID NO: 1210883 - RNA, 19 nt, Artificial Sequence
  Description of Artificial Sequence: Synthetic oligonucleotide
  Antisense strand to SEQ ID NO: 1210882
aaccuugaggcauguacug

SEQ ID NO: 1210884 - RNA, 19 nt, Artificial Sequence
  Description of Artificial Sequence: Synthetic oligonucleotide
  Sense strand starting at position 2138 of SEQ ID NO: 917128
uagagauucucugauuugc

SEQ ID NO: 1210885 - RNA, 19 nt, Artificial Sequence
  Description of Artificial Sequence: Synthetic oligonucleotide
  Antisense strand to SEQ ID NO: 1210884
gcaaaucagagaaucucua

SEQ ID NO: 1210886 - RNA, 19 nt, Artificial Sequence
  Description of Artificial Sequence: Synthetic oligonucleotide
  Sense strand starting at position 2293 of SEQ ID NO: 917128
cuccuaagcaagugggauu

SEQ ID NO: 1210887 - RNA, 19 nt, Artificial Sequence
  Description of Artificial Sequence: Synthetic oligonucleotide
  Antisense strand to SEQ ID NO: 1210886
aaucccacuugcuuaggag

SEQ ID NO: 1210888 - RNA, 19 nt, Artificial Sequence
  Description of Artificial Sequence: Synthetic oligonucleotide
  Sense strand starting at position 2296 of SEQ ID NO: 917128
cuaagcaagugggauuaua

SEQ ID NO: 1210889 - RNA, 19 nt, Artificial Sequence
  Description of Artificial Sequence: Synthetic oligonucleotide
  Antisense strand to SEQ ID NO: 1210888
uauaaucccacuugcuuag

SEQ ID NO: 1210890 - RNA, 19 nt, Artificial Sequence
  Description of Artificial Sequence: Synthetic oligonucleotide
  Sense strand starting at position 2727 of SEQ ID NO: 917128
cugucuacauaugaugaaa

SEQ ID NO: 1210891 - RNA, 19 nt, Artificial Sequence
  Description of Artificial Sequence: Synthetic oligonucleotide
  Antisense strand to SEQ ID NO: 1210890
uuucaucauauguagacag

SEQ ID NO: 1210892 - RNA, 19 nt, Artificial Sequence
  Description of Artificial Sequence: Synthetic oligonucleotide
  Sense strand starting at position 2760 of SEQ ID NO: 917128
guauguaugaugcagauca

SEQ ID NO: 1210893 - RNA, 19 nt, Artificial Sequence
  Description of Artificial Sequence: Synthetic oligonucleotide
  Antisense strand to SEQ ID NO: 1210892
ugaucugcaucauacauac

SEQ ID NO: 1210894 - RNA, 19 nt, Artificial Sequence
  Description of Artificial Sequence: Synthetic oligonucleotide
  Sense strand starting at position 2762 of SEQ ID NO: 917128
auguaugaugcagaucaac

SEQ ID NO: 1210895 - RNA, 19 nt, Artificial Sequence
  Description of Artificial Sequence: Synthetic oligonucleotide
  Antisense strand to SEQ ID NO: 1210894
guugaucugcaucauacau

SEQ ID NO: 1210896 - RNA, 19 nt, Artificial Sequence
  Description of Artificial Sequence: Synthetic oligonucleotide
  Sense strand starting at position 3413 of SEQ ID NO: 917128
gcuucuaaucucgagugau

SEQ ID NO: 1210897 - RNA, 19 nt, Artificial Sequence
  Description of Artificial Sequence: Synthetic oligonucleotide
  Antisense strand to SEQ ID NO: 1210896
aucacucgagauuagaagc

SEQ ID NO: 1210898 - RNA, 19 nt, Artificial Sequence
  Description of Artificial Sequence: Synthetic oligonucleotide
  Sense strand starting at position 3416 of SEQ ID NO: 917128
ucuaaucucgagugaucug

SEQ ID NO: 1210899 - RNA, 19 nt, Artificial Sequence
  Description of Artificial Sequence: Synthetic oligonucleotide
  Antisense strand to SEQ ID NO: 1210898
cagaucacucgagauuaga

SEQ ID NO: 1210900 - RNA, 19 nt, Artificial Sequence
  Description of Artificial Sequence: Synthetic oligonucleotide
  Sense strand starting at position 3531 of SEQ ID NO: 917128
auugacuagucagaaacca

SEQ ID NO: 1210901 - RNA, 19 nt, Artificial Sequence
  Description of Artificial Sequence: Synthetic oligonucleotide
  Antisense strand to SEQ ID NO: 1210900
ugguuucugacuagucaau

SEQ ID NO: 1210902 - RNA, 19 nt, Artificial Sequence
  Description of Artificial Sequence: Synthetic oligonucleotide
  Sense strand starting at position 3561 of SEQ ID NO: 917128
gguauugaauuuggauaug

SEQ ID NO: 1210903 - RNA, 19 nt, Artificial Sequence
  Description of Artificial Sequence: Synthetic oligonucleotide
  Antisense strand to SEQ ID NO: 1210902
cauauccaaauucaauacc

SEQ ID NO: 1210904 - RNA, 19 nt, Artificial Sequence
  Description of Artificial Sequence: Synthetic oligonucleotide
  Sense strand starting at position 3606 of SEQ ID NO: 917128
ccaguaaucuuugugcugu

SEQ ID NO: 1210905 - RNA, 19 nt, Artificial Sequence
  Description of Artificial Sequence: Synthetic oligonucleotide
  Antisense strand to SEQ ID NO: 1210904
acagcacaaagauuacugg

SEQ ID NO: 1210906 - RNA, 19 nt, Artificial Sequence
  Description of Artificial Sequence: Synthetic oligonucleotide
  Sense strand starting at position 3608 of SEQ ID NO: 917128
aguaaucuuugugcuguuu

SEQ ID NO: 1210907 - RNA, 19 nt, Artificial Sequence
  Description of Artificial Sequence: Synthetic oligonucleotide
  Antisense strand to SEQ ID NO: 1210906
aaacagcacaaagauuacu

SEQ ID NO: 1210908 - RNA, 19 nt, Artificial Sequence
  Description of Artificial Sequence: Synthetic oligonucleotide
  Sense strand starting at position 3662 of SEQ ID NO: 917128
agacucaaguuggauguua

SEQ ID NO: 1210909 - RNA, 19 nt, Artificial Sequence
  Description of Artificial Sequence: Synthetic oligonucleotide
  Antisense strand to SEQ ID NO: 1210908
uaacauccaacuugagucu

SEQ ID NO: 1210910 - RNA, 19 nt, Artificial Sequence
  Description of Artificial Sequence: Synthetic oligonucleotide
  Sense strand starting at position 3664 of SEQ ID NO: 917128
acucaaguuggauguuaug

SEQ ID NO: 1210911 - RNA, 19 nt, Artificial Sequence
  Description of Artificial Sequence: Synthetic oligonucleotide
  Antisense strand to SEQ ID NO: 1210910
cauaacauccaacuugagu

SEQ ID NO: 1210912 - RNA, 19 nt, Artificial Sequence
  Description of Artificial Sequence: Synthetic oligonucleotide
  Sense strand starting at position 3670 of SEQ ID NO: 917129
guuggauguuaugacucuu

SEQ ID NO: 1210913 - RNA, 19 nt, Artificial Sequence
  Description of Artificial Sequence: Synthetic oligonucleotide
  Antisense strand to SEQ ID NO: 1210912
aagagucauaacauccaac

SEQ ID NO: 1210914 - RNA, 19 nt, Artificial Sequence
  Description of Artificial Sequence: Synthetic oligonucleotide
  Sense strand starting at position 40 of SEQ ID NO: 917129
uuuaacacugaguguuaga

SEQ ID NO: 1210915 - RNA, 19 nt, Artificial Sequence
  Description of Artificial Sequence: Synthetic oligonucleotide
  Antisense strand to SEQ ID NO: 1210914
ucuaacacucaguguuaaa

SEQ ID NO: 1210916 - RNA, 19 nt, Artificial Sequence
  Description of Artificial Sequence: Synthetic oligonucleotide
  Sense strand starting at position 85 of SEQ ID NO: 917129
gcgggcaaagugaguguua

SEQ ID NO: 1210917 - RNA, 19 nt, Artificial Sequence
  Description of Artificial Sequence: Synthetic oligonucleotide
  Antisense strand to SEQ ID NO: 1210916
uaacacucacuuugcccgc

SEQ ID NO: 1210918 - RNA, 19 nt, Artificial Sequence
  Description of Artificial Sequence: Synthetic oligonucleotide
  Sense strand starting at position 116 of SEQ ID NO: 917129
uuccauuucgcucgaagga

SEQ ID NO: 1210919 - RNA, 19 nt, Artificial Sequence
  Description of Artificial Sequence: Synthetic oligonucleotide
  Antisense strand to SEQ ID NO: 1210918
uccuucgagcgaaauggaa

SEQ ID NO: 1210920 - RNA, 19 nt, Artificial Sequence
  Description of Artificial Sequence: Synthetic oligonucleotide
  Sense strand starting at position 167 of SEQ ID NO: 917129
cacacuucugagcgacaca

SEQ ID NO: 1210921 - RNA, 19 nt, Artificial Sequence
  Description of Artificial Sequence: Synthetic oligonucleotide
  Antisense strand to SEQ ID NO: 1210920
ugugucgcucagaagugug

SEQ ID NO: 1210922 - RNA, 19 nt, Artificial Sequence
  Description of Artificial Sequence: Synthetic oligonucleotide
  Sense strand starting at position 193 of SEQ ID NO: 917129
acagaagcuuccgcccaau

SEQ ID NO: 1210923 - RNA, 19 nt, Artificial Sequence
  Description of Artificial Sequence: Synthetic oligonucleotide
  Antisense strand to SEQ ID NO: 1210922
auugggcggaagcuucugu

SEQ ID NO: 1210924 - RNA, 19 nt, Artificial Sequence
  Description of Artificial Sequence: Synthetic oligonucleotide
  Sense strand starting at position 231 of SEQ ID NO: 917129
gcagguuaccuauagucac

SEQ ID NO: 1210925 - RNA, 19 nt, Artificial Sequence
  Description of Artificial Sequence: Synthetic oligonucleotide
  Antisense strand to SEQ ID NO: 1210924
gugacuauagguaaccugc

SEQ ID NO: 1210926 - RNA, 19 nt, Artificial Sequence
  Description of Artificial Sequence: Synthetic oligonucleotide
  Sense strand starting at position 238 of SEQ ID NO: 917129
accuauagucacugugauu

SEQ ID NO: 1210927 - RNA, 19 nt, Artificial Sequence
  Description of Artificial Sequence: Synthetic oligonucleotide
  Antisense strand to SEQ ID NO: 1210926
aaucacagugacuauaggu

SEQ ID NO: 1210928 - RNA, 19 nt, Artificial Sequence
  Description of Artificial Sequence: Synthetic oligonucleotide
  Sense strand starting at position 251 of SEQ ID NO: 917129
gugauugggucuucuauaa

SEQ ID NO: 1210929 - RNA, 19 nt, Artificial Sequence
  Description of Artificial Sequence: Synthetic oligonucleotide
  Antisense strand to SEQ ID NO: 1210928
uuauagaagacccaaucac

SEQ ID NO: 1210930 - RNA, 19 nt, Artificial Sequence
  Description of Artificial Sequence: Synthetic oligonucleotide
  Sense strand starting at position 255 of SEQ ID NO: 917129
uugggucuucuauaacguu

SEQ ID NO: 1210931 - RNA, 19 nt, Artificial Sequence
  Description of Artificial Sequence: Synthetic oligonucleotide
  Antisense strand to SEQ ID NO: 1210930
aacguuauagaagacccaa

SEQ ID NO: 1210932 - RNA, 19 nt, Artificial Sequence
  Description of Artificial Sequence: Synthetic oligonucleotide
  Sense strand starting at position 269 of SEQ ID NO: 917129
acguuaccacagugaaaca

SEQ ID NO: 1210933 - RNA, 19 nt, Artificial Sequence
  Description of Artificial Sequence: Synthetic oligonucleotide
  Antisense strand to SEQ ID NO: 1210932
uguuucacugugguaacgu

SEQ ID NO: 1210934 - RNA, 19 nt, Artificial Sequence
  Description of Artificial Sequence: Synthetic oligonucleotide
  Sense strand starting at position 375 of SEQ ID NO: 917129
agaucuagcaucggaauca

SEQ ID NO: 1210935 - RNA, 19 nt, Artificial Sequence
  Description of Artificial Sequence: Synthetic oligonucleotide
  Antisense strand to SEQ ID NO: 1210934
ugauuccgaugcuagaucu

SEQ ID NO: 1210936 - RNA, 19 nt, Artificial Sequence
  Description of Artificial Sequence: Synthetic oligonucleotide
  Sense strand starting at position 409 of SEQ ID NO: 917129
gugaguucucuccacuuaa

SEQ ID NO: 1210937 - RNA, 19 nt, Artificial Sequence
  Description of Artificial Sequence: Synthetic oligonucleotide
  Antisense strand to SEQ ID NO: 1210936
uuaaguggagagaacucac

SEQ ID NO: 1210938 - RNA, 19 nt, Artificial Sequence
  Description of Artificial Sequence: Synthetic oligonucleotide
  Sense strand starting at position 472 of SEQ ID NO: 917129
cgauguaaggugcacucaa

SEQ ID NO: 1210939 - RNA, 19 nt, Artificial Sequence
  Description of Artificial Sequence: Synthetic oligonucleotide
  Antisense strand to SEQ ID NO: 1210938
uugagugcaccuuacaucg

SEQ ID NO: 1210940 - RNA, 19 nt, Artificial Sequence
  Description of Artificial Sequence: Synthetic oligonucleotide
  Sense strand starting at position 585 of SEQ ID NO: 917129
uggccaaggucuccuauuu

SEQ ID NO: 1210941 - RNA, 19 nt, Artificial Sequence
  Description of Artificial Sequence: Synthetic oligonucleotide
  Antisense strand to SEQ ID NO: 1210940
aaauaggagaccuuggcca

SEQ ID NO: 1210942 - RNA, 19 nt, Artificial Sequence
  Description of Artificial Sequence: Synthetic oligonucleotide
  Sense strand starting at position 637 of SEQ ID NO: 917129
gguaauuccuaugccggga

SEQ ID NO: 1210943 - RNA, 19 nt, Artificial Sequence
  Description of Artificial Sequence: Synthetic oligonucleotide
  Antisense strand to SEQ ID NO: 1210942
ucccggcauaggaauuacc

SEQ ID NO: 1210944 - RNA, 19 nt, Artificial Sequence
  Description of Artificial Sequence: Synthetic oligonucleotide
  Sense strand starting at position 641 of SEQ ID NO: 917129
auuccuaugccgggaaaga

SEQ ID NO: 1210945 - RNA, 19 nt, Artificial Sequence
  Description of Artificial Sequence: Synthetic oligonucleotide
  Antisense strand to SEQ ID NO: 1210944
ucuuucccggcauaggaau

SEQ ID NO: 1210946 - RNA, 19 nt, Artificial Sequence
  Description of Artificial Sequence: Synthetic oligonucleotide
  Sense strand starting at position 642 of SEQ ID NO: 917129
uuccuaugccgggaaagaa

SEQ ID NO: 1210947 - RNA, 19 nt, Artificial Sequence
  Description of Artificial Sequence: Synthetic oligonucleotide
  Antisense strand to SEQ ID NO: 1210946
uucuuucccggcauaggaa

SEQ ID NO: 1210948 - RNA, 19 nt, Artificial Sequence
  Description of Artificial Sequence: Synthetic oligonucleotide
  Sense strand starting at position 701 of SEQ ID NO: 917129
gugcaugcgacuucucgaa

SEQ ID NO: 1210949 - RNA, 19 nt, Artificial Sequence
  Description of Artificial Sequence: Synthetic oligonucleotide
  Antisense strand to SEQ ID NO: 1210948
uucgagaagucgcaugcac

SEQ ID NO: 1210950 - RNA, 19 nt, Artificial Sequence
  Description of Artificial Sequence: Synthetic oligonucleotide
  Sense strand starting at position 719 of SEQ ID NO: 917129
accugugauugaccaguga

SEQ ID NO: 1210951 - RNA, 19 nt, Artificial Sequence
  Description of Artificial Sequence: Synthetic oligonucleotide
  Antisense strand to SEQ ID NO: 1210950
ucacuggucaaucacaggu

SEQ ID NO: 1210952 - RNA, 19 nt, Artificial Sequence
  Description of Artificial Sequence: Synthetic oligonucleotide
  Sense strand starting at position 1300 of SEQ ID NO: 917129
ccggacuucugaucuaauu

SEQ ID NO: 1210953 - RNA, 19 nt, Artificial Sequence
  Description of Artificial Sequence: Synthetic oligonucleotide
  Antisense strand to SEQ ID NO: 1210952
aauuagaucagaaguccgg

SEQ ID NO: 1210954 - RNA, 19 nt, Artificial Sequence
  Description of Artificial Sequence: Synthetic oligonucleotide
  Sense strand starting at position 1309 of SEQ ID NO: 917129
ugaucuaauugguuacuuu

SEQ ID NO: 1210955 - RNA, 19 nt, Artificial Sequence
  Description of Artificial Sequence: Synthetic oligonucleotide
  Antisense strand to SEQ ID NO: 1210954
aaaguaaccaauuagauca

SEQ ID NO: 1210956 - RNA, 19 nt, Artificial Sequence
  Description of Artificial Sequence: Synthetic oligonucleotide
  Sense strand starting at position 1864 of SEQ ID NO: 917129
ggagcacucacguaucugu

SEQ ID NO: 1210957 - RNA, 19 nt, Artificial Sequence
  Description of Artificial Sequence: Synthetic oligonucleotide
  Antisense strand to SEQ ID NO: 1210956
acagauacgugagugcucc

SEQ ID NO: 1210958 - RNA, 19 nt, Artificial Sequence
  Description of Artificial Sequence: Synthetic oligonucleotide
  Sense strand starting at position 2736 of SEQ ID NO: 917129
gggagaucuccugagccga

SEQ ID NO: 1210959 - RNA, 19 nt, Artificial Sequence
  Description of Artificial Sequence: Synthetic oligonucleotide
  Antisense strand to SEQ ID NO: 1210958
ucggcucaggagaucuccc

SEQ ID NO: 1210960 - RNA, 19 nt, Artificial Sequence
  Description of Artificial Sequence: Synthetic oligonucleotide
  Sense strand starting at position 3011 of SEQ ID NO: 917129
ggcgguggcguguccuuaa

SEQ ID NO: 1210961 - RNA, 19 nt, Artificial Sequence
  Description of Artificial Sequence: Synthetic oligonucleotide
  Antisense strand to SEQ ID NO: 1210960
uuaaggacacgccaccgcc

SEQ ID NO: 1210962 - RNA, 19 nt, Artificial Sequence
  Description of Artificial Sequence: Synthetic oligonucleotide
  Sense strand starting at position 3155 of SEQ ID NO: 917129
acggucagccuugacuuaa

SEQ ID NO: 1210963 - RNA, 19 nt, Artificial Sequence
  Description of Artificial Sequence: Synthetic oligonucleotide
  Antisense strand to SEQ ID NO: 1210962
uuaagucaaggcugaccgu

SEQ ID NO: 1210964 - RNA, 19 nt, Artificial Sequence
  Description of Artificial Sequence: Synthetic oligonucleotide
  Sense strand starting at position 3280 of SEQ ID NO: 917129
gggucuuaggaaggcaauu

SEQ ID NO: 1210965 - RNA, 19 nt, Artificial Sequence
  Description of Artificial Sequence: Synthetic oligonucleotide
  Antisense strand to SEQ ID NO: 1210964
aauugccuuccuaagaccc

SEQ ID NO: 1210966 - RNA, 19 nt, Artificial Sequence
  Description of Artificial Sequence: Synthetic oligonucleotide
  Sense strand starting at position 3292 of SEQ ID NO: 917129
ggcaauugaauaugaaugu

SEQ ID NO: 1210967 - RNA, 19 nt, Artificial Sequence
  Description of Artificial Sequence: Synthetic oligonucleotide
  Antisense strand to SEQ ID NO: 1210966
acauucauauucaauugcc

SEQ ID NO: 1210968 - RNA, 19 nt, Artificial Sequence
  Description of Artificial Sequence: Synthetic oligonucleotide
  Sense strand starting at position 3301 of SEQ ID NO: 917129
auaugaauguucucccgag

SEQ ID NO: 1210969 - RNA, 19 nt, Artificial Sequence
  Description of Artificial Sequence: Synthetic oligonucleotide
  Antisense strand to SEQ ID NO: 1210968
cucgggagaacauucauau

SEQ ID NO: 1210970 - RNA, 19 nt, Artificial Sequence
  Description of Artificial Sequence: Synthetic oligonucleotide
  Sense strand starting at position 3302 of SEQ ID NO: 917129
uaugaauguucucccgagu

SEQ ID NO: 1210971 - RNA, 19 nt, Artificial Sequence
  Description of Artificial Sequence: Synthetic oligonucleotide
  Antisense strand to SEQ ID NO: 1210970
acucgggagaacauucaua

SEQ ID NO: 1210972 - RNA, 19 nt, Artificial Sequence
  Description of Artificial Sequence: Synthetic oligonucleotide
  Sense strand starting at position 3305 of SEQ ID NO: 917129
gaauguucucccgagugcu

SEQ ID NO: 1210973 - RNA, 19 nt, Artificial Sequence
  Description of Artificial Sequence: Synthetic oligonucleotide
  Antisense strand to SEQ ID NO: 1210972
agcacucgggagaacauuc

SEQ ID NO: 1210974 - RNA, 19 nt, Artificial Sequence
  Description of Artificial Sequence: Synthetic oligonucleotide
  Sense strand starting at position 3376 of SEQ ID NO: 917129
agugaacacuaaucauagu

SEQ ID NO: 1210975 - RNA, 19 nt, Artificial Sequence
  Description of Artificial Sequence: Synthetic oligonucleotide
  Antisense strand to SEQ ID NO: 1210974
acuaugauuaguguucacu

SEQ ID NO: 1210976 - RNA, 19 nt, Artificial Sequence
  Description of Artificial Sequence: Synthetic oligonucleotide
  Sense strand starting at position 3413 of SEQ ID NO: 917129
ucccauuuguugucggcua

SEQ ID NO: 1210977 - RNA, 19 nt, Artificial Sequence
  Description of Artificial Sequence: Synthetic oligonucleotide
  Antisense strand to SEQ ID NO: 1210976
uagccgacaacaaauggga

SEQ ID NO: 1210978 - RNA, 19 nt, Artificial Sequence
  Description of Artificial Sequence: Synthetic oligonucleotide
  Sense strand starting at position 3415 of SEQ ID NO: 917129
ccauuuguugucggcuaaa

SEQ ID NO: 1210979 - RNA, 19 nt, Artificial Sequence
  Description of Artificial Sequence: Synthetic oligonucleotide
  Antisense strand to SEQ ID NO: 1210978
uuuagccgacaacaaaugg

SEQ ID NO: 1210980 - RNA, 19 nt, Artificial Sequence
  Description of Artificial Sequence: Synthetic oligonucleotide
  Sense strand starting at position 3707 of SEQ ID NO: 917129
gccucuuagggugagacau

SEQ ID NO: 1210981 - RNA, 19 nt, Artificial Sequence
  Description of Artificial Sequence: Synthetic oligonucleotide
  Antisense strand to SEQ ID NO: 1210980
augucucacccuaagaggc

SEQ ID NO: 1210982 - RNA, 19 nt, Artificial Sequence
  Description of Artificial Sequence: Synthetic oligonucleotide
  Sense strand starting at position 3722 of SEQ ID NO: 917129
acauguugucggucugcca

SEQ ID NO: 1210983 - RNA, 19 nt, Artificial Sequence
  Description of Artificial Sequence: Synthetic oligonucleotide
  Antisense strand to SEQ ID NO: 1210982
uggcagaccgacaacaugu

SEQ ID NO: 1210984 - RNA, 19 nt, Artificial Sequence
  Description of Artificial Sequence: Synthetic oligonucleotide
  Sense strand starting at position 3742 of SEQ ID NO: 917129
uguugcuggucccuaaaua

SEQ ID NO: 1210985 - RNA, 19 nt, Artificial Sequence
  Description of Artificial Sequence: Synthetic oligonucleotide
  Antisense strand to SEQ ID NO: 1210984
uauuuagggaccagcaaca

SEQ ID NO: 1210986 - RNA, 19 nt, Artificial Sequence
  Description of Artificial Sequence: Synthetic oligonucleotide
  Sense strand starting at position 3743 of SEQ ID NO: 917129
guugcuggucccuaaauag

SEQ ID NO: 1210987 - RNA, 19 nt, Artificial Sequence
  Description of Artificial Sequence: Synthetic oligonucleotide
  Antisense strand to SEQ ID NO: 1210986
cuauuuagggaccagcaac

SEQ ID NO: 1210988 - RNA, 19 nt, Artificial Sequence
  Description of Artificial Sequence: Synthetic oligonucleotide
  Sense strand starting at position 3944 of SEQ ID NO: 917129
gcaaucagagguuguauaa

SEQ ID NO: 1210989 - RNA, 19 nt, Artificial Sequence
  Description of Artificial Sequence: Synthetic oligonucleotide
  Antisense strand to SEQ ID NO: 1210988
uuauacaaccucugauugc

SEQ ID NO: 1210990 - RNA, 19 nt, Artificial Sequence
  Description of Artificial Sequence: Synthetic oligonucleotide
  Sense strand starting at position 3953 of SEQ ID NO: 917129
gguuguauaaggcacuaga

SEQ ID NO: 1210991 - RNA, 19 nt, Artificial Sequence
  Description of Artificial Sequence: Synthetic oligonucleotide
  Antisense strand to SEQ ID NO: 1210990
ucuagugccuuauacaacc

SEQ ID NO: 1210992 - RNA, 19 nt, Artificial Sequence
  Description of Artificial Sequence: Synthetic oligonucleotide
  Sense strand starting at position 3956 of SEQ ID NO: 917129
uguauaaggcacuagauca

SEQ ID NO: 1210993 - RNA, 19 nt, Artificial Sequence
  Description of Artificial Sequence: Synthetic oligonucleotide
  Antisense strand to SEQ ID NO: 1210992
ugaucuagugccuuauaca

SEQ ID NO: 1210994 - RNA, 19 nt, Artificial Sequence
  Description of Artificial Sequence: Synthetic oligonucleotide
  Sense strand starting at position 3956 of SEQ ID NO: 917130
uguauaaggcacuagauca

SEQ ID NO: 1210995 - RNA, 19 nt, Artificial Sequence
  Description of Artificial Sequence: Synthetic oligonucleotide
  Antisense strand to SEQ ID NO: 1210994
ugaucuagugccuuauaca

SEQ ID NO: 1210996 - RNA, 19 nt, Artificial Sequence
  Description of Artificial Sequence: Synthetic oligonucleotide
  Sense strand starting at position 105 of SEQ ID NO: 917130
cuuagauggugcuugagaa

SEQ ID NO: 1210997 - RNA, 19 nt, Artificial Sequence
  Description of Artificial Sequence: Synthetic oligonucleotide
  Antisense strand to SEQ ID NO: 1210996
uucucaagcaccaucuaag

SEQ ID NO: 1210998 - RNA, 19 nt, Artificial Sequence
  Description of Artificial Sequence: Synthetic oligonucleotide
  Sense strand starting at position 106 of SEQ ID NO: 917130
uuagauggugcuugagaaa

SEQ ID NO: 1210999 - RNA, 19 nt, Artificial Sequence
  Description of Artificial Sequence: Synthetic oligonucleotide
  Antisense strand to SEQ ID NO: 1210998
uuucucaagcaccaucuaa

SEQ ID NO: 1211000 - RNA, 19 nt, Artificial Sequence
  Description of Artificial Sequence: Synthetic oligonucleotide
  Sense strand starting at position 778 of SEQ ID NO: 917130
ugcgccugucaggaucauu

SEQ ID NO: 1211001 - RNA, 19 nt, Artificial Sequence
  Description of Artificial Sequence: Synthetic oligonucleotide
  Antisense strand to SEQ ID NO: 1211000
aaugauccugacaggcgca

SEQ ID NO: 1211002 - RNA, 19 nt, Artificial Sequence
  Description of Artificial Sequence: Synthetic oligonucleotide
  Sense strand starting at position 789 of SEQ ID NO: 917130
ggaucauugcgagauccgu

SEQ ID NO: 1211003 - RNA, 19 nt, Artificial Sequence
  Description of Artificial Sequence: Synthetic oligonucleotide
  Antisense strand to SEQ ID NO: 1211002
acggaucucgcaaugaucc

SEQ ID NO: 1211004 - RNA, 19 nt, Artificial Sequence
  Description of Artificial Sequence: Synthetic oligonucleotide
  Sense strand starting at position 793 of SEQ ID NO: 917130
cauugcgagauccgugaaa

SEQ ID NO: 1211005 - RNA, 19 nt, Artificial Sequence
  Description of Artificial Sequence: Synthetic oligonucleotide
  Antisense strand to SEQ ID NO: 1211004
uuucacggaucucgcaaug

SEQ ID NO: 1211006 - RNA, 19 nt, Artificial Sequence
  Description of Artificial Sequence: Synthetic oligonucleotide
  Sense strand starting at position 795 of SEQ ID NO: 917130
uugcgagauccgugaaacc

SEQ ID NO: 1211007 - RNA, 19 nt, Artificial Sequence
  Description of Artificial Sequence: Synthetic oligonucleotide
  Antisense strand to SEQ ID NO: 1211006
gguuucacggaucucgcaa

SEQ ID NO: 1211008 - RNA, 19 nt, Artificial Sequence
  Description of Artificial Sequence: Synthetic oligonucleotide
  Sense strand starting at position 946 of SEQ ID NO: 917130
gaaggcuuugcaugugaug

SEQ ID NO: 1211009 - RNA, 19 nt, Artificial Sequence
  Description of Artificial Sequence: Synthetic oligonucleotide
  Antisense strand to SEQ ID NO: 1211008
caucacaugcaaagccuuc

SEQ ID NO: 1211010 - RNA, 19 nt, Artificial Sequence
  Description of Artificial Sequence: Synthetic oligonucleotide
  Sense strand starting at position 948 of SEQ ID NO: 917130
aggcuuugcaugugaugag

SEQ ID NO: 1211011 - RNA, 19 nt, Artificial Sequence
  Description of Artificial Sequence: Synthetic oligonucleotide
  Antisense strand to SEQ ID NO: 1211010
cucaucacaugcaaagccu

SEQ ID NO: 1211012 - RNA, 19 nt, Artificial Sequence
  Description of Artificial Sequence: Synthetic oligonucleotide
  Sense strand starting at position 1058 of SEQ ID NO: 917130
guuguuaaauccguaacuc

SEQ ID NO: 1211013 - RNA, 19 nt, Artificial Sequence
  Description of Artificial Sequence: Synthetic oligonucleotide
  Antisense strand to SEQ ID NO: 1211012
gaguuacggauuuaacaac

SEQ ID NO: 1211014 - RNA, 19 nt, Artificial Sequence
  Description of Artificial Sequence: Synthetic oligonucleotide
  Sense strand starting at position 1059 of SEQ ID NO: 917130
uuguuaaauccguaacuca

SEQ ID NO: 1211015 - RNA, 19 nt, Artificial Sequence
  Description of Artificial Sequence: Synthetic oligonucleotide
  Antisense strand to SEQ ID NO: 1211014
ugaguuacggauuuaacaa

SEQ ID NO: 1211016 - RNA, 19 nt, Artificial Sequence
  Description of Artificial Sequence: Synthetic oligonucleotide
  Sense strand starting at position 2040 of SEQ ID NO: 917130
ggaauuaauuauuaagcag

SEQ ID NO: 1211017 - RNA, 19 nt, Artificial Sequence
  Description of Artificial Sequence: Synthetic oligonucleotide
  Antisense strand to SEQ ID NO: 1211016
cugcuuaauaauuaauucc

SEQ ID NO: 1211018 - RNA, 19 nt, Artificial Sequence
  Description of Artificial Sequence: Synthetic oligonucleotide
  Sense strand starting at position 2097 of SEQ ID NO: 917130
uuuagauauuucuggaguu

SEQ ID NO: 1211019 - RNA, 19 nt, Artificial Sequence
  Description of Artificial Sequence: Synthetic oligonucleotide
  Antisense strand to SEQ ID NO: 1211018
aacuccagaaauaucuaaa

SEQ ID NO: 1211020 - RNA, 19 nt, Artificial Sequence
  Description of Artificial Sequence: Synthetic oligonucleotide
  Sense strand starting at position 2098 of SEQ ID NO: 917130
uuagauauuucuggaguuu

SEQ ID NO: 1211021 - RNA, 19 nt, Artificial Sequence
  Description of Artificial Sequence: Synthetic oligonucleotide
  Antisense strand to SEQ ID NO: 1211020
aaacuccagaaauaucuaa

SEQ ID NO: 1211022 - RNA, 19 nt, Artificial Sequence
  Description of Artificial Sequence: Synthetic oligonucleotide
  Sense strand starting at position 2143 of SEQ ID NO: 917130
cugguaggucaccaccaua

SEQ ID NO: 1211023 - RNA, 19 nt, Artificial Sequence
  Description of Artificial Sequence: Synthetic oligonucleotide
  Antisense strand to SEQ ID NO: 1211022
uaugguggugaccuaccag

SEQ ID NO: 1211024 - RNA, 19 nt, Artificial Sequence
  Description of Artificial Sequence: Synthetic oligonucleotide
  Sense strand starting at position 2157 of SEQ ID NO: 917130
ccauauguagcuuguauua

SEQ ID NO: 1211025 - RNA, 19 nt, Artificial Sequence
  Description of Artificial Sequence: Synthetic oligonucleotide
  Antisense strand to SEQ ID NO: 1211024
uaauacaagcuacauaugg

SEQ ID NO: 1211026 - RNA, 19 nt, Artificial Sequence
  Description of Artificial Sequence: Synthetic oligonucleotide
  Sense strand starting at position 2170 of SEQ ID NO: 917130
guauuauacggucacacac

SEQ ID NO: 1211027 - RNA, 19 nt, Artificial Sequence
  Description of Artificial Sequence: Synthetic oligonucleotide
  Antisense strand to SEQ ID NO: 1211026
gugugugaccguauaauac

SEQ ID NO: 1211028 - RNA, 19 nt, Artificial Sequence
  Description of Artificial Sequence: Synthetic oligonucleotide
  Sense strand starting at position 2197 of SEQ ID NO: 917130
gcugaaguucucgaugcag

SEQ ID NO: 1211029 - RNA, 19 nt, Artificial Sequence
  Description of Artificial Sequence: Synthetic oligonucleotide
  Antisense strand to SEQ ID NO: 1211028
cugcaucgagaacuucagc

SEQ ID NO: 1211030 - RNA, 19 nt, Artificial Sequence
  Description of Artificial Sequence: Synthetic oligonucleotide
  Sense strand starting at position 2199 of SEQ ID NO: 917130
ugaaguucucgaugcagaa

SEQ ID NO: 1211031 - RNA, 19 nt, Artificial Sequence
  Description of Artificial Sequence: Synthetic oligonucleotide
  Antisense strand to SEQ ID NO: 1211030
uucugcaucgagaacuuca

SEQ ID NO: 1211032 - RNA, 19 nt, Artificial Sequence
  Description of Artificial Sequence: Synthetic oligonucleotide
  Sense strand starting at position 2326 of SEQ ID NO: 917130
aggguuacuugcuuugcaa

SEQ ID NO: 1211033 - RNA, 19 nt, Artificial Sequence
  Description of Artificial Sequence: Synthetic oligonucleotide
  Antisense strand to SEQ ID NO: 1211032
uugcaaagcaaguaacccu

SEQ ID NO: 1211034 - RNA, 19 nt, Artificial Sequence
  Description of Artificial Sequence: Synthetic oligonucleotide
  Sense strand starting at position 2328 of SEQ ID NO: 917130
gguuacuugcuuugcaaau

SEQ ID NO: 1211035 - RNA, 19 nt, Artificial Sequence
  Description of Artificial Sequence: Synthetic oligonucleotide
  Antisense strand to SEQ ID NO: 1211034
auuugcaaagcaaguaacc

SEQ ID NO: 1211036 - RNA, 19 nt, Artificial Sequence
  Description of Artificial Sequence: Synthetic oligonucleotide
  Sense strand starting at position 2357 of SEQ ID NO: 917130
uuaacaauuugucagagua

SEQ ID NO: 1211037 - RNA, 19 nt, Artificial Sequence
  Description of Artificial Sequence: Synthetic oligonucleotide
  Antisense strand to SEQ ID NO: 1211036
uacucugacaaauuguuaa

SEQ ID NO: 1211038 - RNA, 19 nt, Artificial Sequence
  Description of Artificial Sequence: Synthetic oligonucleotide
  Sense strand starting at position 2367 of SEQ ID NO: 917130
gucagaguauugguuaaag

SEQ ID NO: 1211039 - RNA, 19 nt, Artificial Sequence
  Description of Artificial Sequence: Synthetic oligonucleotide
  Antisense strand to SEQ ID NO: 1211038
cuuuaaccaauacucugac

SEQ ID NO: 1211040 - RNA, 19 nt, Artificial Sequence
  Description of Artificial Sequence: Synthetic oligonucleotide
  Sense strand starting at position 2376 of SEQ ID NO: 917130
uugguuaaagauuguaaga

SEQ ID NO: 1211041 - RNA, 19 nt, Artificial Sequence
  Description of Artificial Sequence: Synthetic oligonucleotide
  Antisense strand to SEQ ID NO: 1211040
ucuuacaaucuuuaaccaa

SEQ ID NO: 1211042 - RNA, 19 nt, Artificial Sequence
  Description of Artificial Sequence: Synthetic oligonucleotide
  Sense strand starting at position 2378 of SEQ ID NO: 917130
gguuaaagauuguaagaaa

SEQ ID NO: 1211043 - RNA, 19 nt, Artificial Sequence
  Description of Artificial Sequence: Synthetic oligonucleotide
  Antisense strand to SEQ ID NO: 1211042
uuucuuacaaucuuuaacc

SEQ ID NO: 1211044 - RNA, 19 nt, Artificial Sequence
  Description of Artificial Sequence: Synthetic oligonucleotide
  Sense strand starting at position 2421 of SEQ ID NO: 917130
auggcuguguuucucagaa

SEQ ID NO: 1211045 - RNA, 19 nt, Artificial Sequence
  Description of Artificial Sequence: Synthetic oligonucleotide
  Antisense strand to SEQ ID NO: 1211044
uucugagaaacacagccau

SEQ ID NO: 1211046 - RNA, 19 nt, Artificial Sequence
  Description of Artificial Sequence: Synthetic oligonucleotide
  Sense strand starting at position 2434 of SEQ ID NO: 917130
ucagaauuaguaugugaac

SEQ ID NO: 1211047 - RNA, 19 nt, Artificial Sequence
  Description of Artificial Sequence: Synthetic oligonucleotide
  Antisense strand to SEQ ID NO: 1211046
guucacauacuaauucuga

SEQ ID NO: 1211048 - RNA, 19 nt, Artificial Sequence
  Description of Artificial Sequence: Synthetic oligonucleotide
  Sense strand starting at position 2435 of SEQ ID NO: 917130
cagaauuaguaugugaaca

SEQ ID NO: 1211049 - RNA, 19 nt, Artificial Sequence
  Description of Artificial Sequence: Synthetic oligonucleotide
  Antisense strand to SEQ ID NO: 1211048
uguucacauacuaauucug

SEQ ID NO: 1211050 - RNA, 19 nt, Artificial Sequence
  Description of Artificial Sequence: Synthetic oligonucleotide
  Sense strand starting at position 2775 of SEQ ID NO: 917130
ugcugaauuauugagugaa

SEQ ID NO: 1211051 - RNA, 19 nt, Artificial Sequence
  Description of Artificial Sequence: Synthetic oligonucleotide
  Antisense strand to SEQ ID NO: 1211050
uucacucaauaauucagca

SEQ ID NO: 1211052 - RNA, 19 nt, Artificial Sequence
  Description of Artificial Sequence: Synthetic oligonucleotide
  Sense strand starting at position 2777 of SEQ ID NO: 917130
cugaauuauugagugaauu

SEQ ID NO: 1211053 - RNA, 19 nt, Artificial Sequence
  Description of Artificial Sequence: Synthetic oligonucleotide
  Antisense strand to SEQ ID NO: 1211052
aauucacucaauaauucag

SEQ ID NO: 1211054 - RNA, 19 nt, Artificial Sequence
  Description of Artificial Sequence: Synthetic oligonucleotide
  Sense strand starting at position 2778 of SEQ ID NO: 917130
ugaauuauugagugaauuc

SEQ ID NO: 1211055 - RNA, 19 nt, Artificial Sequence
  Description of Artificial Sequence: Synthetic oligonucleotide
  Antisense strand to SEQ ID NO: 1211054
gaauucacucaauaauuca

SEQ ID NO: 1211056 - RNA, 19 nt, Artificial Sequence
  Description of Artificial Sequence: Synthetic oligonucleotide
  Sense strand starting at position 2785 of SEQ ID NO: 917130
uugagugaauucgccucuu

SEQ ID NO: 1211057 - RNA, 19 nt, Artificial Sequence
  Description of Artificial Sequence: Synthetic oligonucleotide
  Antisense strand to SEQ ID NO: 1211056
aagaggcgaauucacucaa

SEQ ID NO: 1211058 - RNA, 19 nt, Artificial Sequence
  Description of Artificial Sequence: Synthetic oligonucleotide
  Sense strand starting at position 2849 of SEQ ID NO: 917130
ugaggaaugaucggguugu

SEQ ID NO: 1211059 - RNA, 19 nt, Artificial Sequence
  Description of Artificial Sequence: Synthetic oligonucleotide
  Antisense strand to SEQ ID NO: 1211058
acaacccgaucauuccuca

SEQ ID NO: 1211060 - RNA, 19 nt, Artificial Sequence
  Description of Artificial Sequence: Synthetic oligonucleotide
  Sense strand starting at position 2853 of SEQ ID NO: 917130
gaaugaucggguugucuga

SEQ ID NO: 1211061 - RNA, 19 nt, Artificial Sequence
  Description of Artificial Sequence: Synthetic oligonucleotide
  Antisense strand to SEQ ID NO: 1211060
ucagacaacccgaucauuc

SEQ ID NO: 1211062 - RNA, 19 nt, Artificial Sequence
  Description of Artificial Sequence: Synthetic oligonucleotide
  Sense strand starting at position 3087 of SEQ ID NO: 917130
uuuagauguuuccuccuga

SEQ ID NO: 1211063 - RNA, 19 nt, Artificial Sequence
  Description of Artificial Sequence: Synthetic oligonucleotide
  Antisense strand to SEQ ID NO: 1211062
ucaggaggaaacaucuaaa

SEQ ID NO: 1211064 - RNA, 19 nt, Artificial Sequence
  Description of Artificial Sequence: Synthetic oligonucleotide
  Sense strand starting at position 3088 of SEQ ID NO: 917130
uuagauguuuccuccugag

SEQ ID NO: 1211065 - RNA, 19 nt, Artificial Sequence
  Description of Artificial Sequence: Synthetic oligonucleotide
  Antisense strand to SEQ ID NO: 1211064
cucaggaggaaacaucuaa

SEQ ID NO: 1211066 - RNA, 19 nt, Artificial Sequence
  Description of Artificial Sequence: Synthetic oligonucleotide
  Sense strand starting at position 3092 of SEQ ID NO: 917130
auguuuccuccugagcuga

SEQ ID NO: 1211067 - RNA, 19 nt, Artificial Sequence
  Description of Artificial Sequence: Synthetic oligonucleotide
  Antisense strand to SEQ ID NO: 1211066
ucagcucaggaggaaacau

SEQ ID NO: 1211068 - RNA, 19 nt, Artificial Sequence
  Description of Artificial Sequence: Synthetic oligonucleotide
  Sense strand starting at position 3094 of SEQ ID NO: 917130
guuuccuccugagcugaga

SEQ ID NO: 1211069 - RNA, 19 nt, Artificial Sequence
  Description of Artificial Sequence: Synthetic oligonucleotide
  Antisense strand to SEQ ID NO: 1211068
ucucagcucaggaggaaac

SEQ ID NO: 1211070 - RNA, 19 nt, Artificial Sequence
  Description of Artificial Sequence: Synthetic oligonucleotide
  Sense strand starting at position 3260 of SEQ ID NO: 917130
ccgaaugcccaaggucaaa

SEQ ID NO: 1211071 - RNA, 19 nt, Artificial Sequence
  Description of Artificial Sequence: Synthetic oligonucleotide
  Antisense strand to SEQ ID NO: 1211070
uuugaccuugggcauucgg

SEQ ID NO: 1211072 - RNA, 19 nt, Artificial Sequence
  Description of Artificial Sequence: Synthetic oligonucleotide
  Sense strand starting at position 3272 of SEQ ID NO: 917130
ggucaaaguguaggcagaa

SEQ ID NO: 1211073 - RNA, 19 nt, Artificial Sequence
  Description of Artificial Sequence: Synthetic oligonucleotide
  Antisense strand to SEQ ID NO: 1211072
uucugccuacacuuugacc

SEQ ID NO: 1211074 - RNA, 19 nt, Artificial Sequence
  Description of Artificial Sequence: Synthetic oligonucleotide
  Sense strand starting at position 3273 of SEQ ID NO: 917131
gucaaaguguaggcagaaa

SEQ ID NO: 1211075 - RNA, 19 nt, Artificial Sequence
  Description of Artificial Sequence: Synthetic oligonucleotide
  Antisense strand to SEQ ID NO: 1211074
uuucugccuacacuuugac

SEQ ID NO: 1211076 - RNA, 19 nt, Artificial Sequence
  Description of Artificial Sequence: Synthetic oligonucleotide
  Sense strand starting at position 598 of SEQ ID NO: 917131
gacugaaugucugugguaa

SEQ ID NO: 1211077 - RNA, 19 nt, Artificial Sequence
  Description of Artificial Sequence: Synthetic oligonucleotide
  Antisense strand to SEQ ID NO: 1211076
uuaccacagacauucaguc

SEQ ID NO: 1211078 - RNA, 19 nt, Artificial Sequence
  Description of Artificial Sequence: Synthetic oligonucleotide
  Sense strand starting at position 599 of SEQ ID NO: 917131
acugaaugucugugguaag

SEQ ID NO: 1211079 - RNA, 19 nt, Artificial Sequence
  Description of Artificial Sequence: Synthetic oligonucleotide
  Antisense strand to SEQ ID NO: 1211078
cuuaccacagacauucagu

SEQ ID NO: 1211080 - RNA, 19 nt, Artificial Sequence
  Description of Artificial Sequence: Synthetic oligonucleotide
  Sense strand starting at position 611 of SEQ ID NO: 917131
ugguaagagguggguucua

SEQ ID NO: 1211081 - RNA, 19 nt, Artificial Sequence
  Description of Artificial Sequence: Synthetic oligonucleotide
  Antisense strand to SEQ ID NO: 1211080
uagaacccaccucuuacca

SEQ ID NO: 1211082 - RNA, 19 nt, Artificial Sequence
  Description of Artificial Sequence: Synthetic oligonucleotide
  Sense strand starting at position 1165 of SEQ ID NO: 917131
cugugagguuuccuuagaa

SEQ ID NO: 1211083 - RNA, 19 nt, Artificial Sequence
  Description of Artificial Sequence: Synthetic oligonucleotide
  Antisense strand to SEQ ID NO: 1211082
uucuaaggaaaccucacag

SEQ ID NO: 1211084 - RNA, 19 nt, Artificial Sequence
  Description of Artificial Sequence: Synthetic oligonucleotide
  Sense strand starting at position 1169 of SEQ ID NO: 917131
gagguuuccuuagaaccuc

SEQ ID NO: 1211085 - RNA, 19 nt, Artificial Sequence
  Description of Artificial Sequence: Synthetic oligonucleotide
  Antisense strand to SEQ ID NO: 1211084
gagguucuaaggaaaccuc

SEQ ID NO: 1211086 - RNA, 19 nt, Artificial Sequence
  Description of Artificial Sequence: Synthetic oligonucleotide
  Sense strand starting at position 1175 of SEQ ID NO: 917131
uccuuagaaccucgagguu

SEQ ID NO: 1211087 - RNA, 19 nt, Artificial Sequence
  Description of Artificial Sequence: Synthetic oligonucleotide
  Antisense strand to SEQ ID NO: 1211086
aaccucgagguucuaagga

SEQ ID NO: 1211088 - RNA, 19 nt, Artificial Sequence
  Description of Artificial Sequence: Synthetic oligonucleotide
  Sense strand starting at position 1206 of SEQ ID NO: 917131
cgagguuuccucugaggug

SEQ ID NO: 1211089 - RNA, 19 nt, Artificial Sequence
  Description of Artificial Sequence: Synthetic oligonucleotide
  Antisense strand to SEQ ID NO: 1211088
caccucagaggaaaccucg

SEQ ID NO: 1211090 - RNA, 19 nt, Artificial Sequence
  Description of Artificial Sequence: Synthetic oligonucleotide
  Sense strand starting at position 2287 of SEQ ID NO: 917131
uggagaugucccggcuaga

SEQ ID NO: 1211091 - RNA, 19 nt, Artificial Sequence
  Description of Artificial Sequence: Synthetic oligonucleotide
  Antisense strand to SEQ ID NO: 1211090
ucuagccgggacaucucca

SEQ ID NO: 1211092 - RNA, 19 nt, Artificial Sequence
  Description of Artificial Sequence: Synthetic oligonucleotide
  Sense strand starting at position 2348 of SEQ ID NO: 917131
ucaagcuuccgagagaauu

SEQ ID NO: 1211093 - RNA, 19 nt, Artificial Sequence
  Description of Artificial Sequence: Synthetic oligonucleotide
  Antisense strand to SEQ ID NO: 1211092
aauucucucggaagcuuga

SEQ ID NO: 1211094 - RNA, 19 nt, Artificial Sequence
  Description of Artificial Sequence: Synthetic oligonucleotide
  Sense strand starting at position 2356 of SEQ ID NO: 917131
ccgagagaauuugggaaua

SEQ ID NO: 1211095 - RNA, 19 nt, Artificial Sequence
  Description of Artificial Sequence: Synthetic oligonucleotide
  Antisense strand to SEQ ID NO: 1211094
uauucccaaauucucucgg

SEQ ID NO: 1211096 - RNA, 19 nt, Artificial Sequence
  Description of Artificial Sequence: Synthetic oligonucleotide
  Sense strand starting at position 2376 of SEQ ID NO: 917131
cugagagacucugaagagu

SEQ ID NO: 1211097 - RNA, 19 nt, Artificial Sequence
  Description of Artificial Sequence: Synthetic oligonucleotide
  Antisense strand to SEQ ID NO: 1211096
acucuucagagucucucag

SEQ ID NO: 1211098 - RNA, 19 nt, Artificial Sequence
  Description of Artificial Sequence: Synthetic oligonucleotide
  Sense strand starting at position 2385 of SEQ ID NO: 917131
ucugaagaguagcugaauu

SEQ ID NO: 1211099 - RNA, 19 nt, Artificial Sequence
  Description of Artificial Sequence: Synthetic oligonucleotide
  Antisense strand to SEQ ID NO: 1211098
aauucagcuacucuucaga

SEQ ID NO: 1211100 - RNA, 19 nt, Artificial Sequence
  Description of Artificial Sequence: Synthetic oligonucleotide
  Sense strand starting at position 2396 of SEQ ID NO: 917131
gcugaauuaauuugccgga

SEQ ID NO: 1211101 - RNA, 19 nt, Artificial Sequence
  Description of Artificial Sequence: Synthetic oligonucleotide
  Antisense strand to SEQ ID NO: 1211100
uccggcaaauuaauucagc

SEQ ID NO: 1211102 - RNA, 19 nt, Artificial Sequence
  Description of Artificial Sequence: Synthetic oligonucleotide
  Sense strand starting at position 2475 of SEQ ID NO: 917131
aggauuagggucggugaga

SEQ ID NO: 1211103 - RNA, 19 nt, Artificial Sequence
  Description of Artificial Sequence: Synthetic oligonucleotide
  Antisense strand to SEQ ID NO: 1211102
ucucaccgacccuaauccu

SEQ ID NO: 1211104 - RNA, 19 nt, Artificial Sequence
  Description of Artificial Sequence: Synthetic oligonucleotide
  Sense strand starting at position 2562 of SEQ ID NO: 917131
gaggucugucuccaccuau

SEQ ID NO: 1211105 - RNA, 19 nt, Artificial Sequence
  Description of Artificial Sequence: Synthetic oligonucleotide
  Antisense strand to SEQ ID NO: 1211104
auagguggagacagaccuc

SEQ ID NO: 1211106 - RNA, 19 nt, Artificial Sequence
  Description of Artificial Sequence: Synthetic oligonucleotide
  Sense strand starting at position 2637 of SEQ ID NO: 917131
gaaaguugaugugcauacu

SEQ ID NO: 1211107 - RNA, 19 nt, Artificial Sequence
  Description of Artificial Sequence: Synthetic oligonucleotide
  Antisense strand to SEQ ID NO: 1211106
aguaugcacaucaacuuuc

SEQ ID NO: 1211108 - RNA, 19 nt, Artificial Sequence
  Description of Artificial Sequence: Synthetic oligonucleotide
  Sense strand starting at position 2638 of SEQ ID NO: 917131
aaaguugaugugcauacua

SEQ ID NO: 1211109 - RNA, 19 nt, Artificial Sequence
  Description of Artificial Sequence: Synthetic oligonucleotide
  Antisense strand to SEQ ID NO: 1211108
uaguaugcacaucaacuuu

SEQ ID NO: 1211110 - RNA, 19 nt, Artificial Sequence
  Description of Artificial Sequence: Synthetic oligonucleotide
  Sense strand starting at position 2640 of SEQ ID NO: 917131
aguugaugugcauacuaaa

SEQ ID NO: 1211111 - RNA, 19 nt, Artificial Sequence
  Description of Artificial Sequence: Synthetic oligonucleotide
  Antisense strand to SEQ ID NO: 1211110
uuuaguaugcacaucaacu

SEQ ID NO: 1211112 - RNA, 19 nt, Artificial Sequence
  Description of Artificial Sequence: Synthetic oligonucleotide
  Sense strand starting at position 2844 of SEQ ID NO: 917131
agagauauuuagcaguuaa

SEQ ID NO: 1211113 - RNA, 19 nt, Artificial Sequence
  Description of Artificial Sequence: Synthetic oligonucleotide
  Antisense strand to SEQ ID NO: 1211112
uuaacugcuaaauaucucu

SEQ ID NO: 1211114 - RNA, 19 nt, Artificial Sequence
  Description of Artificial Sequence: Synthetic oligonucleotide
  Sense strand starting at position 2855 of SEQ ID NO: 917131
gcaguuaacaguggaggaa

SEQ ID NO: 1211115 - RNA, 19 nt, Artificial Sequence
  Description of Artificial Sequence: Synthetic oligonucleotide
  Antisense strand to SEQ ID NO: 1211114
uuccuccacuguuaacugc

SEQ ID NO: 1211116 - RNA, 19 nt, Artificial Sequence
  Description of Artificial Sequence: Synthetic oligonucleotide
  Sense strand starting at position 2909 of SEQ ID NO: 917131
gucuuaaagucagugaaga

SEQ ID NO: 1211117 - RNA, 19 nt, Artificial Sequence
  Description of Artificial Sequence: Synthetic oligonucleotide
  Antisense strand to SEQ ID NO: 1211116
ucuucacugacuuuaagac

SEQ ID NO: 1211118 - RNA, 19 nt, Artificial Sequence
  Description of Artificial Sequence: Synthetic oligonucleotide
  Sense strand starting at position 2910 of SEQ ID NO: 917131
ucuuaaagucagugaagaa

SEQ ID NO: 1211119 - RNA, 19 nt, Artificial Sequence
  Description of Artificial Sequence: Synthetic oligonucleotide
  Antisense strand to SEQ ID NO: 1211118
uucuucacugacuuuaaga

SEQ ID NO: 1211120 - RNA, 19 nt, Artificial Sequence
  Description of Artificial Sequence: Synthetic oligonucleotide
  Sense strand starting at position 2966 of SEQ ID NO: 917131
acgaauagaguuuaguaau

SEQ ID NO: 1211121 - RNA, 19 nt, Artificial Sequence
  Description of Artificial Sequence: Synthetic oligonucleotide
  Antisense strand to SEQ ID NO: 1211120
auuacuaaacucuauucgu

SEQ ID NO: 1211122 - RNA, 19 nt, Artificial Sequence
  Description of Artificial Sequence: Synthetic oligonucleotide
  Sense strand starting at position 2969 of SEQ ID NO: 917131
aauagaguuuaguaaucag

SEQ ID NO: 1211123 - RNA, 19 nt, Artificial Sequence
  Description of Artificial Sequence: Synthetic oligonucleotide
  Antisense strand to SEQ ID NO: 1211122
cugauuacuaaacucuauu

SEQ ID NO: 1211124 - RNA, 19 nt, Artificial Sequence
  Description of Artificial Sequence: Synthetic oligonucleotide
  Sense strand starting at position 2972 of SEQ ID NO: 917131
agaguuuaguaaucagcac

SEQ ID NO: 1211125 - RNA, 19 nt, Artificial Sequence
  Description of Artificial Sequence: Synthetic oligonucleotide
  Antisense strand to SEQ ID NO: 1211124
gugcugauuacuaaacucu

SEQ ID NO: 1211126 - RNA, 19 nt, Artificial Sequence
  Description of Artificial Sequence: Synthetic oligonucleotide
  Sense strand starting at position 3081 of SEQ ID NO: 917131
ccuugaugcucugcuaaua

SEQ ID NO: 1211127 - RNA, 19 nt, Artificial Sequence
  Description of Artificial Sequence: Synthetic oligonucleotide
  Antisense strand to SEQ ID NO: 1211126
uauuagcagagcaucaagg

SEQ ID NO: 1211128 - RNA, 19 nt, Artificial Sequence
  Description of Artificial Sequence: Synthetic oligonucleotide
  Sense strand starting at position 3105 of SEQ ID NO: 917131
ccauuuagauaaggacuaa

SEQ ID NO: 1211129 - RNA, 19 nt, Artificial Sequence
  Description of Artificial Sequence: Synthetic oligonucleotide
  Antisense strand to SEQ ID NO: 1211128
uuaguccuuaucuaaaugg

SEQ ID NO: 1211130 - RNA, 19 nt, Artificial Sequence
  Description of Artificial Sequence: Synthetic oligonucleotide
  Sense strand starting at position 3118 of SEQ ID NO: 917131
gacuaauaggagggugcua

SEQ ID NO: 1211131 - RNA, 19 nt, Artificial Sequence
  Description of Artificial Sequence: Synthetic oligonucleotide
  Antisense strand to SEQ ID NO: 1211130
uagcacccuccuauuaguc

SEQ ID NO: 1211132 - RNA, 19 nt, Artificial Sequence
  Description of Artificial Sequence: Synthetic oligonucleotide
  Sense strand starting at position 3264 of SEQ ID NO: 917131
acuagaacaucuggcagaa

SEQ ID NO: 1211133 - RNA, 19 nt, Artificial Sequence
  Description of Artificial Sequence: Synthetic oligonucleotide
  Antisense strand to SEQ ID NO: 1211132
uucugccagauguucuagu

SEQ ID NO: 1211134 - RNA, 19 nt, Artificial Sequence
  Description of Artificial Sequence: Synthetic oligonucleotide
  Sense strand starting at position 3668 of SEQ ID NO: 917131
gcccaauucuaauuaggaa

SEQ ID NO: 1211135 - RNA, 19 nt, Artificial Sequence
  Description of Artificial Sequence: Synthetic oligonucleotide
  Antisense strand to SEQ ID NO: 1211134
uuccuaauuagaauugggc

SEQ ID NO: 1211136 - RNA, 19 nt, Artificial Sequence
  Description of Artificial Sequence: Synthetic oligonucleotide
  Sense strand starting at position 3744 of SEQ ID NO: 917131
ugacuauaguuggugguga

SEQ ID NO: 1211137 - RNA, 19 nt, Artificial Sequence
  Description of Artificial Sequence: Synthetic oligonucleotide
  Antisense strand to SEQ ID NO: 1211136
ucaccaccaacuauaguca

SEQ ID NO: 1211138 - RNA, 19 nt, Artificial Sequence
  Description of Artificial Sequence: Synthetic oligonucleotide
  Sense strand starting at position 3798 of SEQ ID NO: 917131
uuugaaguguuagcaguua

SEQ ID NO: 1211139 - RNA, 19 nt, Artificial Sequence
  Description of Artificial Sequence: Synthetic oligonucleotide
  Antisense strand to SEQ ID NO: 1211138
uaacugcuaacacuucaaa

SEQ ID NO: 1211140 - RNA, 19 nt, Artificial Sequence
  Description of Artificial Sequence: Synthetic oligonucleotide
  Sense strand starting at position 3803 of SEQ ID NO: 917131
aguguuagcaguuagagac

SEQ ID NO: 1211141 - RNA, 19 nt, Artificial Sequence
  Description of Artificial Sequence: Synthetic oligonucleotide
  Antisense strand to SEQ ID NO: 1211140
gucucuaacugcuaacacu

SEQ ID NO: 1211142 - RNA, 19 nt, Artificial Sequence
  Description of Artificial Sequence: Synthetic oligonucleotide
  Sense strand starting at position 3809 of SEQ ID NO: 917131
agcaguuagagacgugguu

SEQ ID NO: 1211143 - RNA, 19 nt, Artificial Sequence
  Description of Artificial Sequence: Synthetic oligonucleotide
  Antisense strand to SEQ ID NO: 1211142
aaccacgucucuaacugcu

SEQ ID NO: 1211144 - RNA, 19 nt, Artificial Sequence
  Description of Artificial Sequence: Synthetic oligonucleotide
  Sense strand starting at position 3863 of SEQ ID NO: 917131
auggcauauuugugaucuu

SEQ ID NO: 1211145 - RNA, 19 nt, Artificial Sequence
  Description of Artificial Sequence: Synthetic oligonucleotide
  Antisense strand to SEQ ID NO: 1211144
aagaucacaaauaugccau

SEQ ID NO: 1211146 - RNA, 19 nt, Artificial Sequence
  Description of Artificial Sequence: Synthetic oligonucleotide
  Sense strand starting at position 3864 of SEQ ID NO: 917131
uggcauauuugugaucuua

SEQ ID NO: 1211147 - RNA, 19 nt, Artificial Sequence
  Description of Artificial Sequence: Synthetic oligonucleotide
  Antisense strand to SEQ ID NO: 1211146
uaagaucacaaauaugcca

SEQ ID NO: 1211148 - RNA, 19 nt, Artificial Sequence
  Description of Artificial Sequence: Synthetic oligonucleotide
  Sense strand starting at position 3933 of SEQ ID NO: 917131
auguguuguacccgacaua

SEQ ID NO: 1211149 - RNA, 19 nt, Artificial Sequence
  Description of Artificial Sequence: Synthetic oligonucleotide
  Antisense strand to SEQ ID NO: 1211148
uaugucggguacaacacau

SEQ ID NO: 1211150 - RNA, 19 nt, Artificial Sequence
  Description of Artificial Sequence: Synthetic oligonucleotide
  Sense strand starting at position 3934 of SEQ ID NO: 917131
uguguuguacccgacauag

SEQ ID NO: 1211151 - RNA, 19 nt, Artificial Sequence
  Description of Artificial Sequence: Synthetic oligonucleotide
  Antisense strand to SEQ ID NO: 1211150
cuaugucggguacaacaca

SEQ ID NO: 1211152 - RNA, 19 nt, Artificial Sequence
  Description of Artificial Sequence: Synthetic oligonucleotide
  Sense strand starting at position 3951 of SEQ ID NO: 917131
agugaacugucuccauagu

SEQ ID NO: 1211153 - RNA, 19 nt, Artificial Sequence
  Description of Artificial Sequence: Synthetic oligonucleotide
  Antisense strand to SEQ ID NO: 1211152
acuauggagacaguucacu

SEQ ID NO: 1211154 - RNA, 19 nt, Artificial Sequence
  Description of Artificial Sequence: Synthetic oligonucleotide
  Sense strand starting at position 3952 of SEQ ID NO: 917131
gugaacugucuccauagug

SEQ ID NO: 1211155 - RNA, 19 nt, Artificial Sequence
  Description of Artificial Sequence: Synthetic oligonucleotide
  Antisense strand to SEQ ID NO: 1211154
cacuauggagacaguucac

SEQ ID NO: 1211156 - RNA, 19 nt, Artificial Sequence
  Description of Artificial Sequence: Synthetic oligonucleotide
  Sense strand starting at position 3952 of SEQ ID NO: 917132
gugaacugucuccauagug

SEQ ID NO: 1211157 - RNA, 19 nt, Artificial Sequence
  Description of Artificial Sequence: Synthetic oligonucleotide
  Antisense strand to SEQ ID NO: 1211156
cacuauggagacaguucac

SEQ ID NO: 1211158 - RNA, 19 nt, Artificial Sequence
  Description of Artificial Sequence: Synthetic oligonucleotide
  Sense strand starting at position 33 of SEQ ID NO: 917132
ugauguggcuucuauuuga

SEQ ID NO: 1211159 - RNA, 19 nt, Artificial Sequence
  Description of Artificial Sequence: Synthetic oligonucleotide
  Antisense strand to SEQ ID NO: 1211158
ucaaauagaagccacauca

SEQ ID NO: 1211160 - RNA, 19 nt, Artificial Sequence
  Description of Artificial Sequence: Synthetic oligonucleotide
  Sense strand starting at position 36 of SEQ ID NO: 917132
uguggcuucuauuugacuu

SEQ ID NO: 1211161 - RNA, 19 nt, Artificial Sequence
  Description of Artificial Sequence: Synthetic oligonucleotide
  Antisense strand to SEQ ID NO: 1211160
aagucaaauagaagccaca

SEQ ID NO: 1211162 - RNA, 19 nt, Artificial Sequence
  Description of Artificial Sequence: Synthetic oligonucleotide
  Sense strand starting at position 462 of SEQ ID NO: 917132
guaagaauaacguguccua

SEQ ID NO: 1211163 - RNA, 19 nt, Artificial Sequence
  Description of Artificial Sequence: Synthetic oligonucleotide
  Antisense strand to SEQ ID NO: 1211162
uaggacacguuauucuuac

SEQ ID NO: 1211164 - RNA, 19 nt, Artificial Sequence
  Description of Artificial Sequence: Synthetic oligonucleotide
  Sense strand starting at position 465 of SEQ ID NO: 917132
agaauaacguguccuauuc

SEQ ID NO: 1211165 - RNA, 19 nt, Artificial Sequence
  Description of Artificial Sequence: Synthetic oligonucleotide
  Antisense strand to SEQ ID NO: 1211164
gaauaggacacguuauucu

SEQ ID NO: 1211166 - RNA, 19 nt, Artificial Sequence
  Description of Artificial Sequence: Synthetic oligonucleotide
  Sense strand starting at position 626 of SEQ ID NO: 917132
augggagucucagcaucua

SEQ ID NO: 1211167 - RNA, 19 nt, Artificial Sequence
  Description of Artificial Sequence: Synthetic oligonucleotide
  Antisense strand to SEQ ID NO: 1211166
uagaugcugagacucccau

SEQ ID NO: 1211168 - RNA, 19 nt, Artificial Sequence
  Description of Artificial Sequence: Synthetic oligonucleotide
  Sense strand starting at position 912 of SEQ ID NO: 917132
gggauuuggcagcguguca

SEQ ID NO: 1211169 - RNA, 19 nt, Artificial Sequence
  Description of Artificial Sequence: Synthetic oligonucleotide
  Antisense strand to SEQ ID NO: 1211168
ugacacgcugccaaauccc

SEQ ID NO: 1211170 - RNA, 19 nt, Artificial Sequence
  Description of Artificial Sequence: Synthetic oligonucleotide
  Sense strand starting at position 1452 of SEQ ID NO: 917132
caggucauugcgugaaucu

SEQ ID NO: 1211171 - RNA, 19 nt, Artificial Sequence
  Description of Artificial Sequence: Synthetic oligonucleotide
  Antisense strand to SEQ ID NO: 1211170
agauucacgcaaugaccug

SEQ ID NO: 1211172 - RNA, 19 nt, Artificial Sequence
  Description of Artificial Sequence: Synthetic oligonucleotide
  Sense strand starting at position 1453 of SEQ ID NO: 917132
aggucauugcgugaaucug

SEQ ID NO: 1211173 - RNA, 19 nt, Artificial Sequence
  Description of Artificial Sequence: Synthetic oligonucleotide
  Antisense strand to SEQ ID NO: 1211172
cagauucacgcaaugaccu

SEQ ID NO: 1211174 - RNA, 19 nt, Artificial Sequence
  Description of Artificial Sequence: Synthetic oligonucleotide
  Sense strand starting at position 1461 of SEQ ID NO: 917132
gcgugaaucugugugacca

SEQ ID NO: 1211175 - RNA, 19 nt, Artificial Sequence
  Description of Artificial Sequence: Synthetic oligonucleotide
  Antisense strand to SEQ ID NO: 1211174
uggucacacagauucacgc

SEQ ID NO: 1211176 - RNA, 19 nt, Artificial Sequence
  Description of Artificial Sequence: Synthetic oligonucleotide
  Sense strand starting at position 1462 of SEQ ID NO: 917132
cgugaaucugugugaccaa

SEQ ID NO: 1211177 - RNA, 19 nt, Artificial Sequence
  Description of Artificial Sequence: Synthetic oligonucleotide
  Antisense strand to SEQ ID NO: 1211176
uuggucacacagauucacg

SEQ ID NO: 1211178 - RNA, 19 nt, Artificial Sequence
  Description of Artificial Sequence: Synthetic oligonucleotide
  Sense strand starting at position 1465 of SEQ ID NO: 917132
gaaucugugugaccaagga

SEQ ID NO: 1211179 - RNA, 19 nt, Artificial Sequence
  Description of Artificial Sequence: Synthetic oligonucleotide
  Antisense strand to SEQ ID NO: 1211178
uccuuggucacacagauuc

SEQ ID NO: 1211180 - RNA, 19 nt, Artificial Sequence
  Description of Artificial Sequence: Synthetic oligonucleotide
  Sense strand starting at position 1469 of SEQ ID NO: 917132
cugugugaccaaggaauca

SEQ ID NO: 1211181 - RNA, 19 nt, Artificial Sequence
  Description of Artificial Sequence: Synthetic oligonucleotide
  Antisense strand to SEQ ID NO: 1211180
ugauuccuuggucacacag

SEQ ID NO: 1211182 - RNA, 19 nt, Artificial Sequence
  Description of Artificial Sequence: Synthetic oligonucleotide
  Sense strand starting at position 1556 of SEQ ID NO: 917132
cagacauacggcugacauu

SEQ ID NO: 1211183 - RNA, 19 nt, Artificial Sequence
  Description of Artificial Sequence: Synthetic oligonucleotide
  Antisense strand to SEQ ID NO: 1211182
aaugucagccguaugucug

SEQ ID NO: 1211184 - RNA, 19 nt, Artificial Sequence
  Description of Artificial Sequence: Synthetic oligonucleotide
  Sense strand starting at position 2025 of SEQ ID NO: 917132
uuuauaguuuccucugcca

SEQ ID NO: 1211185 - RNA, 19 nt, Artificial Sequence
  Description of Artificial Sequence: Synthetic oligonucleotide
  Antisense strand to SEQ ID NO: 1211184
uggcagaggaaacuauaaa

SEQ ID NO: 1211186 - RNA, 19 nt, Artificial Sequence
  Description of Artificial Sequence: Synthetic oligonucleotide
  Sense strand starting at position 2214 of SEQ ID NO: 917132
agcuuugucugcucugauu

SEQ ID NO: 1211187 - RNA, 19 nt, Artificial Sequence
  Description of Artificial Sequence: Synthetic oligonucleotide
  Antisense strand to SEQ ID NO: 1211186
aaucagagcagacaaagcu

SEQ ID NO: 1211188 - RNA, 19 nt, Artificial Sequence
  Description of Artificial Sequence: Synthetic oligonucleotide
  Sense strand starting at position 2299 of SEQ ID NO: 917132
gagggagauugaggucaga

SEQ ID NO: 1211189 - RNA, 19 nt, Artificial Sequence
  Description of Artificial Sequence: Synthetic oligonucleotide
  Antisense strand to SEQ ID NO: 1211188
ucugaccucaaucucccuc

SEQ ID NO: 1211190 - RNA, 19 nt, Artificial Sequence
  Description of Artificial Sequence: Synthetic oligonucleotide
  Sense strand starting at position 2687 of SEQ ID NO: 917132
cccugagcaucuguugaau

SEQ ID NO: 1211191 - RNA, 19 nt, Artificial Sequence
  Description of Artificial Sequence: Synthetic oligonucleotide
  Antisense strand to SEQ ID NO: 1211190
auucaacagaugcucaggg

SEQ ID NO: 1211192 - RNA, 19 nt, Artificial Sequence
  Description of Artificial Sequence: Synthetic oligonucleotide
  Sense strand starting at position 2690 of SEQ ID NO: 917132
ugagcaucuguugaaugca

SEQ ID NO: 1211193 - RNA, 19 nt, Artificial Sequence
  Description of Artificial Sequence: Synthetic oligonucleotide
  Antisense strand to SEQ ID NO: 1211192
ugcauucaacagaugcuca

SEQ ID NO: 1211194 - RNA, 19 nt, Artificial Sequence
  Description of Artificial Sequence: Synthetic oligonucleotide
  Sense strand starting at position 2890 of SEQ ID NO: 917132
ccacuuccgcccggagauu

SEQ ID NO: 1211195 - RNA, 19 nt, Artificial Sequence
  Description of Artificial Sequence: Synthetic oligonucleotide
  Antisense strand to SEQ ID NO: 1211194
aaucuccgggcggaagugg

SEQ ID NO: 1211196 - RNA, 19 nt, Artificial Sequence
  Description of Artificial Sequence: Synthetic oligonucleotide
  Sense strand starting at position 2902 of SEQ ID NO: 917132
ggagauucugccugagccu

SEQ ID NO: 1211197 - RNA, 19 nt, Artificial Sequence
  Description of Artificial Sequence: Synthetic oligonucleotide
  Antisense strand to SEQ ID NO: 1211196
aggcucaggcagaaucucc

SEQ ID NO: 1211198 - RNA, 19 nt, Artificial Sequence
  Description of Artificial Sequence: Synthetic oligonucleotide
  Sense strand starting at position 3004 of SEQ ID NO: 917132
cgcuuugcuguuggagaca

SEQ ID NO: 1211199 - RNA, 19 nt, Artificial Sequence
  Description of Artificial Sequence: Synthetic oligonucleotide
  Antisense strand to SEQ ID NO: 1211198
ugucuccaacagcaaagcg

SEQ ID NO: 1211200 - RNA, 19 nt, Artificial Sequence
  Description of Artificial Sequence: Synthetic oligonucleotide
  Sense strand starting at position 3153 of SEQ ID NO: 917132
agcccuguguguccagaau

SEQ ID NO: 1211201 - RNA, 19 nt, Artificial Sequence
  Description of Artificial Sequence: Synthetic oligonucleotide
  Antisense strand to SEQ ID NO: 1211200
auucuggacacacagggcu

SEQ ID NO: 1211202 - RNA, 19 nt, Artificial Sequence
  Description of Artificial Sequence: Synthetic oligonucleotide
  Sense strand starting at position 3219 of SEQ ID NO: 917132
ggacccguguaaccaaauu

SEQ ID NO: 1211203 - RNA, 19 nt, Artificial Sequence
  Description of Artificial Sequence: Synthetic oligonucleotide
  Antisense strand to SEQ ID NO: 1211202
aauuugguuacacgggucc

SEQ ID NO: 1211204 - RNA, 19 nt, Artificial Sequence
  Description of Artificial Sequence: Synthetic oligonucleotide
  Sense strand starting at position 3265 of SEQ ID NO: 917132
uaggcauuacgcugcuuua

SEQ ID NO: 1211205 - RNA, 19 nt, Artificial Sequence
  Description of Artificial Sequence: Synthetic oligonucleotide
  Antisense strand to SEQ ID NO: 1211204
uaaagcagcguaaugccua

SEQ ID NO: 1211206 - RNA, 19 nt, Artificial Sequence
  Description of Artificial Sequence: Synthetic oligonucleotide
  Sense strand starting at position 3268 of SEQ ID NO: 917132
gcauuacgcugcuuuaauu

SEQ ID NO: 1211207 - RNA, 19 nt, Artificial Sequence
  Description of Artificial Sequence: Synthetic oligonucleotide
  Antisense strand to SEQ ID NO: 1211206
aauuaaagcagcguaaugc

SEQ ID NO: 1211208 - RNA, 19 nt, Artificial Sequence
  Description of Artificial Sequence: Synthetic oligonucleotide
  Sense strand starting at position 3532 of SEQ ID NO: 917132
gccauaauuucuuaaugga

SEQ ID NO: 1211209 - RNA, 19 nt, Artificial Sequence
  Description of Artificial Sequence: Synthetic oligonucleotide
  Antisense strand to SEQ ID NO: 1211208
uccauuaagaaauuauggc

SEQ ID NO: 1211210 - RNA, 19 nt, Artificial Sequence
  Description of Artificial Sequence: Synthetic oligonucleotide
  Sense strand starting at position 3590 of SEQ ID NO: 917132
gaauguuagggcgauaaga

SEQ ID NO: 1211211 - RNA, 19 nt, Artificial Sequence
  Description of Artificial Sequence: Synthetic oligonucleotide
  Antisense strand to SEQ ID NO: 1211210
ucuuaucgcccuaacauuc

SEQ ID NO: 1211212 - RNA, 19 nt, Artificial Sequence
  Description of Artificial Sequence: Synthetic oligonucleotide
  Sense strand starting at position 3592 of SEQ ID NO: 917132
auguuagggcgauaagaac

SEQ ID NO: 1211213 - RNA, 19 nt, Artificial Sequence
  Description of Artificial Sequence: Synthetic oligonucleotide
  Antisense strand to SEQ ID NO: 1211212
guucuuaucgcccuaacau

SEQ ID NO: 1211214 - RNA, 19 nt, Artificial Sequence
  Description of Artificial Sequence: Synthetic oligonucleotide
  Sense strand starting at position 3703 of SEQ ID NO: 917132
agcaacuguugucugugaa

SEQ ID NO: 1211215 - RNA, 19 nt, Artificial Sequence
  Description of Artificial Sequence: Synthetic oligonucleotide
  Antisense strand to SEQ ID NO: 1211214
uucacagacaacaguugcu

SEQ ID NO: 1211216 - RNA, 19 nt, Artificial Sequence
  Description of Artificial Sequence: Synthetic oligonucleotide
  Sense strand starting at position 3704 of SEQ ID NO: 917132
gcaacuguugucugugaag

SEQ ID NO: 1211217 - RNA, 19 nt, Artificial Sequence
  Description of Artificial Sequence: Synthetic oligonucleotide
  Antisense strand to SEQ ID NO: 1211216
cuucacagacaacaguugc

SEQ ID NO: 1211218 - RNA, 19 nt, Artificial Sequence
  Description of Artificial Sequence: Synthetic oligonucleotide
  Sense strand starting at position 3709 of SEQ ID NO: 917132
uguugucugugaaggguau

SEQ ID NO: 1211219 - RNA, 19 nt, Artificial Sequence
  Description of Artificial Sequence: Synthetic oligonucleotide
  Antisense strand to SEQ ID NO: 1211218
auacccuucacagacaaca

SEQ ID NO: 1211220 - RNA, 19 nt, Artificial Sequence
  Description of Artificial Sequence: Synthetic oligonucleotide
  Sense strand starting at position 3710 of SEQ ID NO: 917132
guugucugugaaggguaua

SEQ ID NO: 1211221 - RNA, 19 nt, Artificial Sequence
  Description of Artificial Sequence: Synthetic oligonucleotide
  Antisense strand to SEQ ID NO: 1211220
uauacccuucacagacaac

SEQ ID NO: 1211222 - RNA, 19 nt, Artificial Sequence
  Description of Artificial Sequence: Synthetic oligonucleotide
  Sense strand starting at position 3713 of SEQ ID NO: 917132
gucugugaaggguauagau

SEQ ID NO: 1211223 - RNA, 19 nt, Artificial Sequence
  Description of Artificial Sequence: Synthetic oligonucleotide
  Antisense strand to SEQ ID NO: 1211222
aucuauacccuucacagac

SEQ ID NO: 1211224 - RNA, 19 nt, Artificial Sequence
  Description of Artificial Sequence: Synthetic oligonucleotide
  Sense strand starting at position 3722 of SEQ ID NO: 917132
ggguauagaugcucuugaa

SEQ ID NO: 1211225 - RNA, 19 nt, Artificial Sequence
  Description of Artificial Sequence: Synthetic oligonucleotide
  Antisense strand to SEQ ID NO: 1211224
uucaagagcaucuauaccc

SEQ ID NO: 1211226 - RNA, 19 nt, Artificial Sequence
  Description of Artificial Sequence: Synthetic oligonucleotide
  Sense strand starting at position 3785 of SEQ ID NO: 917132
uuccuaauguagucucuga

SEQ ID NO: 1211227 - RNA, 19 nt, Artificial Sequence
  Description of Artificial Sequence: Synthetic oligonucleotide
  Antisense strand to SEQ ID NO: 1211226
ucagagacuacauuaggaa

SEQ ID NO: 1211228 - RNA, 19 nt, Artificial Sequence
  Description of Artificial Sequence: Synthetic oligonucleotide
  Sense strand starting at position 3823 of SEQ ID NO: 917132
ugugcugagcuguacacau

SEQ ID NO: 1211229 - RNA, 19 nt, Artificial Sequence
  Description of Artificial Sequence: Synthetic oligonucleotide
  Antisense strand to SEQ ID NO: 1211228
auguguacagcucagcaca

SEQ ID NO: 1211230 - RNA, 19 nt, Artificial Sequence
  Description of Artificial Sequence: Synthetic oligonucleotide
  Sense strand starting at position 3834 of SEQ ID NO: 917132
guacacauguuaucagaau

SEQ ID NO: 1211231 - RNA, 19 nt, Artificial Sequence
  Description of Artificial Sequence: Synthetic oligonucleotide
  Antisense strand to SEQ ID NO: 1211230
auucugauaacauguguac

SEQ ID NO: 1211232 - RNA, 19 nt, Artificial Sequence
  Description of Artificial Sequence: Synthetic oligonucleotide
  Sense strand starting at position 3840 of SEQ ID NO: 917132
auguuaucagaaugaccuu

SEQ ID NO: 1211233 - RNA, 19 nt, Artificial Sequence
  Description of Artificial Sequence: Synthetic oligonucleotide
  Antisense strand to SEQ ID NO: 1211232
aaggucauucugauaacau

SEQ ID NO: 1211234 - RNA, 19 nt, Artificial Sequence
  Description of Artificial Sequence: Synthetic oligonucleotide
  Sense strand starting at position 3943 of SEQ ID NO: 917132
cuaggugcucuauacaaau

SEQ ID NO: 1211235 - RNA, 19 nt, Artificial Sequence
  Description of Artificial Sequence: Synthetic oligonucleotide
  Antisense strand to SEQ ID NO: 1211234
auuuguauagagcaccuag

SEQ ID NO: 1211236 - RNA, 19 nt, Artificial Sequence
  Description of Artificial Sequence: Synthetic oligonucleotide
  Sense strand starting at position 3957 of SEQ ID NO: 917133
caaauugggugccagacaa

SEQ ID NO: 1211237 - RNA, 19 nt, Artificial Sequence
  Description of Artificial Sequence: Synthetic oligonucleotide
  Antisense strand to SEQ ID NO: 1211236
uugucuggcacccaauuug

SEQ ID NO: 1211238 - RNA, 19 nt, Artificial Sequence
  Description of Artificial Sequence: Synthetic oligonucleotide
  Sense strand starting at position 71 of SEQ ID NO: 917133
uugagaucuuauguuguaa

SEQ ID NO: 1211239 - RNA, 19 nt, Artificial Sequence
  Description of Artificial Sequence: Synthetic oligonucleotide
  Antisense strand to SEQ ID NO: 1211238
uuacaacauaagaucucaa

SEQ ID NO: 1211240 - RNA, 19 nt, Artificial Sequence
  Description of Artificial Sequence: Synthetic oligonucleotide
  Sense strand starting at position 239 of SEQ ID NO: 917133
cuccaacuaggauguaaau

SEQ ID NO: 1211241 - RNA, 19 nt, Artificial Sequence
  Description of Artificial Sequence: Synthetic oligonucleotide
  Antisense strand to SEQ ID NO: 1211240
auuuacauccuaguuggag

SEQ ID NO: 1211242 - RNA, 19 nt, Artificial Sequence
  Description of Artificial Sequence: Synthetic oligonucleotide
  Sense strand starting at position 403 of SEQ ID NO: 917133
gaggauuaaacgcgagagu

SEQ ID NO: 1211243 - RNA, 19 nt, Artificial Sequence
  Description of Artificial Sequence: Synthetic oligonucleotide
  Antisense strand to SEQ ID NO: 1211242
acucucgcguuuaauccuc

SEQ ID NO: 1211244 - RNA, 19 nt, Artificial Sequence
  Description of Artificial Sequence: Synthetic oligonucleotide
  Sense strand starting at position 429 of SEQ ID NO: 917133
gagggauaugagugccuaa

SEQ ID NO: 1211245 - RNA, 19 nt, Artificial Sequence
  Description of Artificial Sequence: Synthetic oligonucleotide
  Antisense strand to SEQ ID NO: 1211244
uuaggcacucauaucccuc

SEQ ID NO: 1211246 - RNA, 19 nt, Artificial Sequence
  Description of Artificial Sequence: Synthetic oligonucleotide
  Sense strand starting at position 432 of SEQ ID NO: 917133
ggauaugagugccuaacac

SEQ ID NO: 1211247 - RNA, 19 nt, Artificial Sequence
  Description of Artificial Sequence: Synthetic oligonucleotide
  Antisense strand to SEQ ID NO: 1211246
guguuaggcacucauaucc

SEQ ID NO: 1211248 - RNA, 19 nt, Artificial Sequence
  Description of Artificial Sequence: Synthetic oligonucleotide
  Sense strand starting at position 531 of SEQ ID NO: 917133
ggagcaguuacagaacguu

SEQ ID NO: 1211249 - RNA, 19 nt, Artificial Sequence
  Description of Artificial Sequence: Synthetic oligonucleotide
  Antisense strand to SEQ ID NO: 1211248
aacguucuguaacugcucc

SEQ ID NO: 1211250 - RNA, 19 nt, Artificial Sequence
  Description of Artificial Sequence: Synthetic oligonucleotide
  Sense strand starting at position 570 of SEQ ID NO: 917133
gagcuugauuuggaaggau

SEQ ID NO: 1211251 - RNA, 19 nt, Artificial Sequence
  Description of Artificial Sequence: Synthetic oligonucleotide
  Antisense strand to SEQ ID NO: 1211250
auccuuccaaaucaagcuc

SEQ ID NO: 1211252 - RNA, 19 nt, Artificial Sequence
  Description of Artificial Sequence: Synthetic oligonucleotide
  Sense strand starting at position 867 of SEQ ID NO: 917133
gcaauccaggccuaaguau

SEQ ID NO: 1211253 - RNA, 19 nt, Artificial Sequence
  Description of Artificial Sequence: Synthetic oligonucleotide
  Antisense strand to SEQ ID NO: 1211252
auacuuaggccuggauugc

SEQ ID NO: 1211254 - RNA, 19 nt, Artificial Sequence
  Description of Artificial Sequence: Synthetic oligonucleotide
  Sense strand starting at position 896 of SEQ ID NO: 917133
gaaauagugucagcauuaa

SEQ ID NO: 1211255 - RNA, 19 nt, Artificial Sequence
  Description of Artificial Sequence: Synthetic oligonucleotide
  Antisense strand to SEQ ID NO: 1211254
uuaaugcugacacuauuuc

SEQ ID NO: 1211256 - RNA, 19 nt, Artificial Sequence
  Description of Artificial Sequence: Synthetic oligonucleotide
  Sense strand starting at position 998 of SEQ ID NO: 917133
aaacuaugaugcguccaaa

SEQ ID NO: 1211257 - RNA, 19 nt, Artificial Sequence
  Description of Artificial Sequence: Synthetic oligonucleotide
  Antisense strand to SEQ ID NO: 1211256
uuuggacgcaucauaguuu

SEQ ID NO: 1211258 - RNA, 19 nt, Artificial Sequence
  Description of Artificial Sequence: Synthetic oligonucleotide
  Sense strand starting at position 1001 of SEQ ID NO: 917133
cuaugaugcguccaaacug

SEQ ID NO: 1211259 - RNA, 19 nt, Artificial Sequence
  Description of Artificial Sequence: Synthetic oligonucleotide
  Antisense strand to SEQ ID NO: 1211258
caguuuggacgcaucauag

SEQ ID NO: 1211260 - RNA, 19 nt, Artificial Sequence
  Description of Artificial Sequence: Synthetic oligonucleotide
  Sense strand starting at position 1156 of SEQ ID NO: 917133
aaagauuucucugaaugug

SEQ ID NO: 1211261 - RNA, 19 nt, Artificial Sequence
  Description of Artificial Sequence: Synthetic oligonucleotide
  Antisense strand to SEQ ID NO: 1211260
cacauucagagaaaucuuu

SEQ ID NO: 1211262 - RNA, 19 nt, Artificial Sequence
  Description of Artificial Sequence: Synthetic oligonucleotide
  Sense strand starting at position 1165 of SEQ ID NO: 917133
ucugaaugugugcauauua

SEQ ID NO: 1211263 - RNA, 19 nt, Artificial Sequence
  Description of Artificial Sequence: Synthetic oligonucleotide
  Antisense strand to SEQ ID NO: 1211262
uaauaugcacacauucaga

SEQ ID NO: 1211264 - RNA, 19 nt, Artificial Sequence
  Description of Artificial Sequence: Synthetic oligonucleotide
  Sense strand starting at position 1187 of SEQ ID NO: 917133
auagauacaugucuuguua

SEQ ID NO: 1211265 - RNA, 19 nt, Artificial Sequence
  Description of Artificial Sequence: Synthetic oligonucleotide
  Antisense strand to SEQ ID NO: 1211264
uaacaagacauguaucuau

SEQ ID NO: 1211266 - RNA, 19 nt, Artificial Sequence
  Description of Artificial Sequence: Synthetic oligonucleotide
  Sense strand starting at position 1191 of SEQ ID NO: 917133
auacaugucuuguuaacca

SEQ ID NO: 1211267 - RNA, 19 nt, Artificial Sequence
  Description of Artificial Sequence: Synthetic oligonucleotide
  Antisense strand to SEQ ID NO: 1211266
ugguuaacaagacauguau

SEQ ID NO: 1211268 - RNA, 19 nt, Artificial Sequence
  Description of Artificial Sequence: Synthetic oligonucleotide
  Sense strand starting at position 1224 of SEQ ID NO: 917133
cacugugugccugaaacau

SEQ ID NO: 1211269 - RNA, 19 nt, Artificial Sequence
  Description of Artificial Sequence: Synthetic oligonucleotide
  Antisense strand to SEQ ID NO: 1211268
auguuucaggcacacagug

SEQ ID NO: 1211270 - RNA, 19 nt, Artificial Sequence
  Description of Artificial Sequence: Synthetic oligonucleotide
  Sense strand starting at position 1228 of SEQ ID NO: 917133
gugugccugaaacauagaa

SEQ ID NO: 1211271 - RNA, 19 nt, Artificial Sequence
  Description of Artificial Sequence: Synthetic oligonucleotide
  Antisense strand to SEQ ID NO: 1211270
uucuauguuucaggcacac

SEQ ID NO: 1211272 - RNA, 19 nt, Artificial Sequence
  Description of Artificial Sequence: Synthetic oligonucleotide
  Sense strand starting at position 1265 of SEQ ID NO: 917133
gccgaaugaagacauaugu

SEQ ID NO: 1211273 - RNA, 19 nt, Artificial Sequence
  Description of Artificial Sequence: Synthetic oligonucleotide
  Antisense strand to SEQ ID NO: 1211272
acauaugucuucauucggc

SEQ ID NO: 1211274 - RNA, 19 nt, Artificial Sequence
  Description of Artificial Sequence: Synthetic oligonucleotide
  Sense strand starting at position 1271 of SEQ ID NO: 917133
ugaagacauauguacguga

SEQ ID NO: 1211275 - RNA, 19 nt, Artificial Sequence
  Description of Artificial Sequence: Synthetic oligonucleotide
  Antisense strand to SEQ ID NO: 1211274
ucacguacauaugucuuca

SEQ ID NO: 1211276 - RNA, 19 nt, Artificial Sequence
  Description of Artificial Sequence: Synthetic oligonucleotide
  Sense strand starting at position 1273 of SEQ ID NO: 917133
aagacauauguacgugaau

SEQ ID NO: 1211277 - RNA, 19 nt, Artificial Sequence
  Description of Artificial Sequence: Synthetic oligonucleotide
  Antisense strand to SEQ ID NO: 1211276
auucacguacauaugucuu

SEQ ID NO: 1211278 - RNA, 19 nt, Artificial Sequence
  Description of Artificial Sequence: Synthetic oligonucleotide
  Sense strand starting at position 1274 of SEQ ID NO: 917133
agacauauguacgugaaua

SEQ ID NO: 1211279 - RNA, 19 nt, Artificial Sequence
  Description of Artificial Sequence: Synthetic oligonucleotide
  Antisense strand to SEQ ID NO: 1211278
uauucacguacauaugucu

SEQ ID NO: 1211280 - RNA, 19 nt, Artificial Sequence
  Description of Artificial Sequence: Synthetic oligonucleotide
  Sense strand starting at position 1275 of SEQ ID NO: 917133
gacauauguacgugaauag

SEQ ID NO: 1211281 - RNA, 19 nt, Artificial Sequence
  Description of Artificial Sequence: Synthetic oligonucleotide
  Antisense strand to SEQ ID NO: 1211280
cuauucacguacauauguc

SEQ ID NO: 1211282 - RNA, 19 nt, Artificial Sequence
  Description of Artificial Sequence: Synthetic oligonucleotide
  Sense strand starting at position 1276 of SEQ ID NO: 917133
acauauguacgugaauaga

SEQ ID NO: 1211283 - RNA, 19 nt, Artificial Sequence
  Description of Artificial Sequence: Synthetic oligonucleotide
  Antisense strand to SEQ ID NO: 1211282
ucuauucacguacauaugu

SEQ ID NO: 1211284 - RNA, 19 nt, Artificial Sequence
  Description of Artificial Sequence: Synthetic oligonucleotide
  Sense strand starting at position 1414 of SEQ ID NO: 917133
guuccaggaccucgauaua

SEQ ID NO: 1211285 - RNA, 19 nt, Artificial Sequence
  Description of Artificial Sequence: Synthetic oligonucleotide
  Antisense strand to SEQ ID NO: 1211284
uauaucgagguccuggaac

SEQ ID NO: 1211286 - RNA, 19 nt, Artificial Sequence
  Description of Artificial Sequence: Synthetic oligonucleotide
  Sense strand starting at position 1458 of SEQ ID NO: 917133
cugaguaacuucuccaggu

SEQ ID NO: 1211287 - RNA, 19 nt, Artificial Sequence
  Description of Artificial Sequence: Synthetic oligonucleotide
  Antisense strand to SEQ ID NO: 1211286
accuggagaaguuacucag

SEQ ID NO: 1211288 - RNA, 19 nt, Artificial Sequence
  Description of Artificial Sequence: Synthetic oligonucleotide
  Sense strand starting at position 1459 of SEQ ID NO: 917133
ugaguaacuucuccaggua

SEQ ID NO: 1211289 - RNA, 19 nt, Artificial Sequence
  Description of Artificial Sequence: Synthetic oligonucleotide
  Antisense strand to SEQ ID NO: 1211288
uaccuggagaaguuacuca

SEQ ID NO: 1211290 - RNA, 19 nt, Artificial Sequence
  Description of Artificial Sequence: Synthetic oligonucleotide
  Sense strand starting at position 1460 of SEQ ID NO: 917133
gaguaacuucuccagguaa

SEQ ID NO: 1211291 - RNA, 19 nt, Artificial Sequence
  Description of Artificial Sequence: Synthetic oligonucleotide
  Antisense strand to SEQ ID NO: 1211290
uuaccuggagaaguuacuc

SEQ ID NO: 1211292 - RNA, 19 nt, Artificial Sequence
  Description of Artificial Sequence: Synthetic oligonucleotide
  Sense strand starting at position 1462 of SEQ ID NO: 917133
guaacuucuccagguaacu

SEQ ID NO: 1211293 - RNA, 19 nt, Artificial Sequence
  Description of Artificial Sequence: Synthetic oligonucleotide
  Antisense strand to SEQ ID NO: 1211292
aguuaccuggagaaguuac

SEQ ID NO: 1211294 - RNA, 19 nt, Artificial Sequence
  Description of Artificial Sequence: Synthetic oligonucleotide
  Sense strand starting at position 1498 of SEQ ID NO: 917133
ccauuagggcucuagcaca

SEQ ID NO: 1211295 - RNA, 19 nt, Artificial Sequence
  Description of Artificial Sequence: Synthetic oligonucleotide
  Antisense strand to SEQ ID NO: 1211294
ugugcuagagcccuaaugg

SEQ ID NO: 1211296 - RNA, 19 nt, Artificial Sequence
  Description of Artificial Sequence: Synthetic oligonucleotide
  Sense strand starting at position 1858 of SEQ ID NO: 917133
accgaauucuucucugauc

SEQ ID NO: 1211297 - RNA, 19 nt, Artificial Sequence
  Description of Artificial Sequence: Synthetic oligonucleotide
  Antisense strand to SEQ ID NO: 1211296
gaucagagaagaauucggu

SEQ ID NO: 1211298 - RNA, 19 nt, Artificial Sequence
  Description of Artificial Sequence: Synthetic oligonucleotide
  Sense strand starting at position 3138 of SEQ ID NO: 917133
uggaauagacuaggucuua

SEQ ID NO: 1211299 - RNA, 19 nt, Artificial Sequence
  Description of Artificial Sequence: Synthetic oligonucleotide
  Antisense strand to SEQ ID NO: 1211298
uaagaccuagucuauucca

SEQ ID NO: 1211300 - RNA, 19 nt, Artificial Sequence
  Description of Artificial Sequence: Synthetic oligonucleotide
  Sense strand starting at position 3296 of SEQ ID NO: 917133
uuacgauugagccacgaga

SEQ ID NO: 1211301 - RNA, 19 nt, Artificial Sequence
  Description of Artificial Sequence: Synthetic oligonucleotide
  Antisense strand to SEQ ID NO: 1211300
ucucguggcucaaucguaa

SEQ ID NO: 1211302 - RNA, 19 nt, Artificial Sequence
  Description of Artificial Sequence: Synthetic oligonucleotide
  Sense strand starting at position 3298 of SEQ ID NO: 917133
acgauugagccacgagaca

SEQ ID NO: 1211303 - RNA, 19 nt, Artificial Sequence
  Description of Artificial Sequence: Synthetic oligonucleotide
  Antisense strand to SEQ ID NO: 1211302
ugucucguggcucaaucgu

SEQ ID NO: 1211304 - RNA, 19 nt, Artificial Sequence
  Description of Artificial Sequence: Synthetic oligonucleotide
  Sense strand starting at position 3409 of SEQ ID NO: 917133
uuguuaacacgucacuuaa

SEQ ID NO: 1211305 - RNA, 19 nt, Artificial Sequence
  Description of Artificial Sequence: Synthetic oligonucleotide
  Antisense strand to SEQ ID NO: 1211304
uuaagugacguguuaacaa

SEQ ID NO: 1211306 - RNA, 19 nt, Artificial Sequence
  Description of Artificial Sequence: Synthetic oligonucleotide
  Sense strand starting at position 3525 of SEQ ID NO: 917133
cguguauaugcuguuucuu

SEQ ID NO: 1211307 - RNA, 19 nt, Artificial Sequence
  Description of Artificial Sequence: Synthetic oligonucleotide
  Antisense strand to SEQ ID NO: 1211306
aagaaacagcauauacacg

SEQ ID NO: 1211308 - RNA, 19 nt, Artificial Sequence
  Description of Artificial Sequence: Synthetic oligonucleotide
  Sense strand starting at position 3799 of SEQ ID NO: 917133
ccugaauagcaguauauac

SEQ ID NO: 1211309 - RNA, 19 nt, Artificial Sequence
  Description of Artificial Sequence: Synthetic oligonucleotide
  Antisense strand to SEQ ID NO: 1211308
guauauacugcuauucagg

SEQ ID NO: 1211310 - RNA, 19 nt, Artificial Sequence
  Description of Artificial Sequence: Synthetic oligonucleotide
  Sense strand starting at position 3837 of SEQ ID NO: 917133
aggcauuucuucuucguuu

SEQ ID NO: 1211311 - RNA, 19 nt, Artificial Sequence
  Description of Artificial Sequence: Synthetic oligonucleotide
  Antisense strand to SEQ ID NO: 1211310
aaacgaagaagaaaugccu

SEQ ID NO: 1211312 - RNA, 19 nt, Artificial Sequence
  Description of Artificial Sequence: Synthetic oligonucleotide
  Sense strand starting at position 3904 of SEQ ID NO: 917133
augagaaagucuguuauca

SEQ ID NO: 1211313 - RNA, 19 nt, Artificial Sequence
  Description of Artificial Sequence: Synthetic oligonucleotide
  Antisense strand to SEQ ID NO: 1211312
ugauaacagacuuucucau

SEQ ID NO: 1211314 - RNA, 19 nt, Artificial Sequence
  Description of Artificial Sequence: Synthetic oligonucleotide
  Sense strand starting at position 3957 of SEQ ID NO: 917133
uccucagugcuuuacauua

SEQ ID NO: 1211315 - RNA, 19 nt, Artificial Sequence
  Description of Artificial Sequence: Synthetic oligonucleotide
  Antisense strand to SEQ ID NO: 1211314
uaauguaaagcacugagga

SEQ ID NO: 1211316 - RNA, 19 nt, Artificial Sequence
  Description of Artificial Sequence: Synthetic oligonucleotide
  Sense strand starting at position 3962 of SEQ ID NO: 917133
agugcuuuacauuauaaug

SEQ ID NO: 1211317 - RNA, 19 nt, Artificial Sequence
  Description of Artificial Sequence: Synthetic oligonucleotide
  Antisense strand to SEQ ID NO: 1211316
cauuauaauguaaagcacu

SEQ ID NO: 1211318 - RNA, 19 nt, Artificial Sequence
  Description of Artificial Sequence: Synthetic oligonucleotide
  Sense strand starting at position 3962 of SEQ ID NO: 917134
agugcuuuacauuauaaug

SEQ ID NO: 1211319 - RNA, 19 nt, Artificial Sequence
  Description of Artificial Sequence: Synthetic oligonucleotide
  Antisense strand to SEQ ID NO: 1211318
cauuauaauguaaagcacu

SEQ ID NO: 1211320 - RNA, 19 nt, Artificial Sequence
  Description of Artificial Sequence: Synthetic oligonucleotide
  Sense strand starting at position 30 of SEQ ID NO: 917134
auugacagcugaucacaua

SEQ ID NO: 1211321 - RNA, 19 nt, Artificial Sequence
  Description of Artificial Sequence: Synthetic oligonucleotide
  Antisense strand to SEQ ID NO: 1211320
uaugugaucagcugucaau

SEQ ID NO: 1211322 - RNA, 19 nt, Artificial Sequence
  Description of Artificial Sequence: Synthetic oligonucleotide
  Sense strand starting at position 538 of SEQ ID NO: 917134
cugccuccaccuugggaaa

SEQ ID NO: 1211323 - RNA, 19 nt, Artificial Sequence
  Description of Artificial Sequence: Synthetic oligonucleotide
  Antisense strand to SEQ ID NO: 1211322
uuucccaagguggaggcag

SEQ ID NO: 1211324 - RNA, 19 nt, Artificial Sequence
  Description of Artificial Sequence: Synthetic oligonucleotide
  Sense strand starting at position 549 of SEQ ID NO: 917134
uugggaaauucucacaccu

SEQ ID NO: 1211325 - RNA, 19 nt, Artificial Sequence
  Description of Artificial Sequence: Synthetic oligonucleotide
  Antisense strand to SEQ ID NO: 1211324
aggugugagaauuucccaa

SEQ ID NO: 1211326 - RNA, 19 nt, Artificial Sequence
  Description of Artificial Sequence: Synthetic oligonucleotide
  Sense strand starting at position 674 of SEQ ID NO: 917134
augugaaaguguccugacu

SEQ ID NO: 1211327 - RNA, 19 nt, Artificial Sequence
  Description of Artificial Sequence: Synthetic oligonucleotide
  Antisense strand to SEQ ID NO: 1211326
agucaggacacuuucacau

SEQ ID NO: 1211328 - RNA, 19 nt, Artificial Sequence
  Description of Artificial Sequence: Synthetic oligonucleotide
  Sense strand starting at position 714 of SEQ ID NO: 917134
uggcuuaaauuaccugaua

SEQ ID NO: 1211329 - RNA, 19 nt, Artificial Sequence
  Description of Artificial Sequence: Synthetic oligonucleotide
  Antisense strand to SEQ ID NO: 1211328
uaucagguaauuuaagcca

SEQ ID NO: 1211330 - RNA, 19 nt, Artificial Sequence
  Description of Artificial Sequence: Synthetic oligonucleotide
  Sense strand starting at position 715 of SEQ ID NO: 917134
ggcuuaaauuaccugauaa

SEQ ID NO: 1211331 - RNA, 19 nt, Artificial Sequence
  Description of Artificial Sequence: Synthetic oligonucleotide
  Antisense strand to SEQ ID NO: 1211330
uuaucagguaauuuaagcc

SEQ ID NO: 1211332 - RNA, 19 nt, Artificial Sequence
  Description of Artificial Sequence: Synthetic oligonucleotide
  Sense strand starting at position 896 of SEQ ID NO: 917134
gccgcaguccugaaacggu

SEQ ID NO: 1211333 - RNA, 19 nt, Artificial Sequence
  Description of Artificial Sequence: Synthetic oligonucleotide
  Antisense strand to SEQ ID NO: 1211332
accguuucaggacugcggc

SEQ ID NO: 1211334 - RNA, 19 nt, Artificial Sequence
  Description of Artificial Sequence: Synthetic oligonucleotide
  Sense strand starting at position 935 of SEQ ID NO: 917134
ccucuuuacgucugcauua

SEQ ID NO: 1211335 - RNA, 19 nt, Artificial Sequence
  Description of Artificial Sequence: Synthetic oligonucleotide
  Antisense strand to SEQ ID NO: 1211334
uaaugcagacguaaagagg

SEQ ID NO: 1211336 - RNA, 19 nt, Artificial Sequence
  Description of Artificial Sequence: Synthetic oligonucleotide
  Sense strand starting at position 936 of SEQ ID NO: 917134
cucuuuacgucugcauuaa

SEQ ID NO: 1211337 - RNA, 19 nt, Artificial Sequence
  Description of Artificial Sequence: Synthetic oligonucleotide
  Antisense strand to SEQ ID NO: 1211336
uuaaugcagacguaaagag

SEQ ID NO: 1211338 - RNA, 19 nt, Artificial Sequence
  Description of Artificial Sequence: Synthetic oligonucleotide
  Sense strand starting at position 940 of SEQ ID NO: 917134
uuacgucugcauuaacuaa

SEQ ID NO: 1211339 - RNA, 19 nt, Artificial Sequence
  Description of Artificial Sequence: Synthetic oligonucleotide
  Antisense strand to SEQ ID NO: 1211338
uuaguuaaugcagacguaa

SEQ ID NO: 1211340 - RNA, 19 nt, Artificial Sequence
  Description of Artificial Sequence: Synthetic oligonucleotide
  Sense strand starting at position 980 of SEQ ID NO: 917134
gugucauagccacauaaca

SEQ ID NO: 1211341 - RNA, 19 nt, Artificial Sequence
  Description of Artificial Sequence: Synthetic oligonucleotide
  Antisense strand to SEQ ID NO: 1211340
uguuauguggcuaugacac

SEQ ID NO: 1211342 - RNA, 19 nt, Artificial Sequence
  Description of Artificial Sequence: Synthetic oligonucleotide
  Sense strand starting at position 1008 of SEQ ID NO: 917134
acgacaucauaguuucuaa

SEQ ID NO: 1211343 - RNA, 19 nt, Artificial Sequence
  Description of Artificial Sequence: Synthetic oligonucleotide
  Antisense strand to SEQ ID NO: 1211342
uuagaaacuaugaugucgu

SEQ ID NO: 1211344 - RNA, 19 nt, Artificial Sequence
  Description of Artificial Sequence: Synthetic oligonucleotide
  Sense strand starting at position 1019 of SEQ ID NO: 917134
guuucuaaauguguucuau

SEQ ID NO: 1211345 - RNA, 19 nt, Artificial Sequence
  Description of Artificial Sequence: Synthetic oligonucleotide
  Antisense strand to SEQ ID NO: 1211344
auagaacacauuuagaaac

SEQ ID NO: 1211346 - RNA, 19 nt, Artificial Sequence
  Description of Artificial Sequence: Synthetic oligonucleotide
  Sense strand starting at position 1028 of SEQ ID NO: 917134
uguguucuauaaucauaga

SEQ ID NO: 1211347 - RNA, 19 nt, Artificial Sequence
  Description of Artificial Sequence: Synthetic oligonucleotide
  Antisense strand to SEQ ID NO: 1211346
ucuaugauuauagaacaca

SEQ ID NO: 1211348 - RNA, 19 nt, Artificial Sequence
  Description of Artificial Sequence: Synthetic oligonucleotide
  Sense strand starting at position 1052 of SEQ ID NO: 917134
ggccucuaacagugugagu

SEQ ID NO: 1211349 - RNA, 19 nt, Artificial Sequence
  Description of Artificial Sequence: Synthetic oligonucleotide
  Antisense strand to SEQ ID NO: 1211348
acucacacuguuagaggcc

SEQ ID NO: 1211350 - RNA, 19 nt, Artificial Sequence
  Description of Artificial Sequence: Synthetic oligonucleotide
  Sense strand starting at position 1061 of SEQ ID NO: 917134
cagugugaguggucgggua

SEQ ID NO: 1211351 - RNA, 19 nt, Artificial Sequence
  Description of Artificial Sequence: Synthetic oligonucleotide
  Antisense strand to SEQ ID NO: 1211350
uacccgaccacucacacug

SEQ ID NO: 1211352 - RNA, 19 nt, Artificial Sequence
  Description of Artificial Sequence: Synthetic oligonucleotide
  Sense strand starting at position 1062 of SEQ ID NO: 917134
agugugaguggucggguau

SEQ ID NO: 1211353 - RNA, 19 nt, Artificial Sequence
  Description of Artificial Sequence: Synthetic oligonucleotide
  Antisense strand to SEQ ID NO: 1211352
auacccgaccacucacacu

SEQ ID NO: 1211354 - RNA, 19 nt, Artificial Sequence
  Description of Artificial Sequence: Synthetic oligonucleotide
  Sense strand starting at position 1066 of SEQ ID NO: 917134
ugaguggucggguauggua

SEQ ID NO: 1211355 - RNA, 19 nt, Artificial Sequence
  Description of Artificial Sequence: Synthetic oligonucleotide
  Antisense strand to SEQ ID NO: 1211354
uaccauacccgaccacuca

SEQ ID NO: 1211356 - RNA, 19 nt, Artificial Sequence
  Description of Artificial Sequence: Synthetic oligonucleotide
  Sense strand starting at position 1088 of SEQ ID NO: 917134
gcguguuuggcuuuagguu

SEQ ID NO: 1211357 - RNA, 19 nt, Artificial Sequence
  Description of Artificial Sequence: Synthetic oligonucleotide
  Antisense strand to SEQ ID NO: 1211356
aaccuaaagccaaacacgc

SEQ ID NO: 1211358 - RNA, 19 nt, Artificial Sequence
  Description of Artificial Sequence: Synthetic oligonucleotide
  Sense strand starting at position 1223 of SEQ ID NO: 917134
gaugguuguaugcacggau

SEQ ID NO: 1211359 - RNA, 19 nt, Artificial Sequence
  Description of Artificial Sequence: Synthetic oligonucleotide
  Antisense strand to SEQ ID NO: 1211358
auccgugcauacaaccauc

SEQ ID NO: 1211360 - RNA, 19 nt, Artificial Sequence
  Description of Artificial Sequence: Synthetic oligonucleotide
  Sense strand starting at position 1227 of SEQ ID NO: 917134
guuguaugcacggaugguu

SEQ ID NO: 1211361 - RNA, 19 nt, Artificial Sequence
  Description of Artificial Sequence: Synthetic oligonucleotide
  Antisense strand to SEQ ID NO: 1211360
aaccauccgugcauacaac

SEQ ID NO: 1211362 - RNA, 19 nt, Artificial Sequence
  Description of Artificial Sequence: Synthetic oligonucleotide
  Sense strand starting at position 1298 of SEQ ID NO: 917134
gugagaaucacucgaggga

SEQ ID NO: 1211363 - RNA, 19 nt, Artificial Sequence
  Description of Artificial Sequence: Synthetic oligonucleotide
  Antisense strand to SEQ ID NO: 1211362
ucccucgagugauucucac

SEQ ID NO: 1211364 - RNA, 19 nt, Artificial Sequence
  Description of Artificial Sequence: Synthetic oligonucleotide
  Sense strand starting at position 2160 of SEQ ID NO: 917134
cugggagggauccgcaaua

SEQ ID NO: 1211365 - RNA, 19 nt, Artificial Sequence
  Description of Artificial Sequence: Synthetic oligonucleotide
  Antisense strand to SEQ ID NO: 1211364
uauugcggaucccucccag

SEQ ID NO: 1211366 - RNA, 19 nt, Artificial Sequence
  Description of Artificial Sequence: Synthetic oligonucleotide
  Sense strand starting at position 2239 of SEQ ID NO: 917134
ggagauugggccuguacuu

SEQ ID NO: 1211367 - RNA, 19 nt, Artificial Sequence
  Description of Artificial Sequence: Synthetic oligonucleotide
  Antisense strand to SEQ ID NO: 1211366
aaguacaggcccaaucucc

SEQ ID NO: 1211368 - RNA, 19 nt, Artificial Sequence
  Description of Artificial Sequence: Synthetic oligonucleotide
  Sense strand starting at position 2308 of SEQ ID NO: 917134
ccugucugcuaccuauuua

SEQ ID NO: 1211369 - RNA, 19 nt, Artificial Sequence
  Description of Artificial Sequence: Synthetic oligonucleotide
  Antisense strand to SEQ ID NO: 1211368
uaaauagguagcagacagg

SEQ ID NO: 1211370 - RNA, 19 nt, Artificial Sequence
  Description of Artificial Sequence: Synthetic oligonucleotide
  Sense strand starting at position 2427 of SEQ ID NO: 917134
ggugggaucuguguaggga

SEQ ID NO: 1211371 - RNA, 19 nt, Artificial Sequence
  Description of Artificial Sequence: Synthetic oligonucleotide
  Antisense strand to SEQ ID NO: 1211370
ucccuacacagaucccacc

SEQ ID NO: 1211372 - RNA, 19 nt, Artificial Sequence
  Description of Artificial Sequence: Synthetic oligonucleotide
  Sense strand starting at position 2442 of SEQ ID NO: 917134
gggacuucguggaaggguu

SEQ ID NO: 1211373 - RNA, 19 nt, Artificial Sequence
  Description of Artificial Sequence: Synthetic oligonucleotide
  Antisense strand to SEQ ID NO: 1211372
aacccuuccacgaaguccc

SEQ ID NO: 1211374 - RNA, 19 nt, Artificial Sequence
  Description of Artificial Sequence: Synthetic oligonucleotide
  Sense strand starting at position 2798 of SEQ ID NO: 917134
uaauguuuagacugugcuu

SEQ ID NO: 1211375 - RNA, 19 nt, Artificial Sequence
  Description of Artificial Sequence: Synthetic oligonucleotide
  Antisense strand to SEQ ID NO: 1211374
aagcacagucuaaacauua

SEQ ID NO: 1211376 - RNA, 19 nt, Artificial Sequence
  Description of Artificial Sequence: Synthetic oligonucleotide
  Sense strand starting at position 2815 of SEQ ID NO: 917134
uuggucuuucugggcacaa

SEQ ID NO: 1211377 - RNA, 19 nt, Artificial Sequence
  Description of Artificial Sequence: Synthetic oligonucleotide
  Antisense strand to SEQ ID NO: 1211376
uugugcccagaaagaccaa

SEQ ID NO: 1211378 - RNA, 19 nt, Artificial Sequence
  Description of Artificial Sequence: Synthetic oligonucleotide
  Sense strand starting at position 2816 of SEQ ID NO: 917134
uggucuuucugggcacaau

SEQ ID NO: 1211379 - RNA, 19 nt, Artificial Sequence
  Description of Artificial Sequence: Synthetic oligonucleotide
  Antisense strand to SEQ ID NO: 1211378
auugugcccagaaagacca

SEQ ID NO: 1211380 - RNA, 19 nt, Artificial Sequence
  Description of Artificial Sequence: Synthetic oligonucleotide
  Sense strand starting at position 2827 of SEQ ID NO: 917134
ggcacaaucccaugaagau

SEQ ID NO: 1211381 - RNA, 19 nt, Artificial Sequence
  Description of Artificial Sequence: Synthetic oligonucleotide
  Antisense strand to SEQ ID NO: 1211380
aucuucaugggauugugcc

SEQ ID NO: 1211382 - RNA, 19 nt, Artificial Sequence
  Description of Artificial Sequence: Synthetic oligonucleotide
  Sense strand starting at position 2855 of SEQ ID NO: 917134
ucuuuauugugccugauga

SEQ ID NO: 1211383 - RNA, 19 nt, Artificial Sequence
  Description of Artificial Sequence: Synthetic oligonucleotide
  Antisense strand to SEQ ID NO: 1211382
ucaucaggcacaauaaaga

SEQ ID NO: 1211384 - RNA, 19 nt, Artificial Sequence
  Description of Artificial Sequence: Synthetic oligonucleotide
  Sense strand starting at position 2856 of SEQ ID NO: 917134
cuuuauugugccugaugac

SEQ ID NO: 1211385 - RNA, 19 nt, Artificial Sequence
  Description of Artificial Sequence: Synthetic oligonucleotide
  Antisense strand to SEQ ID NO: 1211384
gucaucaggcacaauaaag

SEQ ID NO: 1211386 - RNA, 19 nt, Artificial Sequence
  Description of Artificial Sequence: Synthetic oligonucleotide
  Sense strand starting at position 2857 of SEQ ID NO: 917134
uuuauugugccugaugaca

SEQ ID NO: 1211387 - RNA, 19 nt, Artificial Sequence
  Description of Artificial Sequence: Synthetic oligonucleotide
  Antisense strand to SEQ ID NO: 1211386
ugucaucaggcacaauaaa

SEQ ID NO: 1211388 - RNA, 19 nt, Artificial Sequence
  Description of Artificial Sequence: Synthetic oligonucleotide
  Sense strand starting at position 2873 of SEQ ID NO: 917134
acauucugaccucggagua

SEQ ID NO: 1211389 - RNA, 19 nt, Artificial Sequence
  Description of Artificial Sequence: Synthetic oligonucleotide
  Antisense strand to SEQ ID NO: 1211388
uacuccgaggucagaaugu

SEQ ID NO: 1211390 - RNA, 19 nt, Artificial Sequence
  Description of Artificial Sequence: Synthetic oligonucleotide
  Sense strand starting at position 2874 of SEQ ID NO: 917134
cauucugaccucggaguaa

SEQ ID NO: 1211391 - RNA, 19 nt, Artificial Sequence
  Description of Artificial Sequence: Synthetic oligonucleotide
  Antisense strand to SEQ ID NO: 1211390
uuacuccgaggucagaaug

SEQ ID NO: 1211392 - RNA, 19 nt, Artificial Sequence
  Description of Artificial Sequence: Synthetic oligonucleotide
  Sense strand starting at position 2946 of SEQ ID NO: 917134
uacugaugcgagcauuaca

SEQ ID NO: 1211393 - RNA, 19 nt, Artificial Sequence
  Description of Artificial Sequence: Synthetic oligonucleotide
  Antisense strand to SEQ ID NO: 1211392
uguaaugcucgcaucagua

SEQ ID NO: 1211394 - RNA, 19 nt, Artificial Sequence
  Description of Artificial Sequence: Synthetic oligonucleotide
  Sense strand starting at position 2998 of SEQ ID NO: 917134
caaggaguaguacagaguu

SEQ ID NO: 1211395 - RNA, 19 nt, Artificial Sequence
  Description of Artificial Sequence: Synthetic oligonucleotide
  Antisense strand to SEQ ID NO: 1211394
aacucuguacuacuccuug

SEQ ID NO: 1211396 - RNA, 19 nt, Artificial Sequence
  Description of Artificial Sequence: Synthetic oligonucleotide
  Sense strand starting at position 3908 of SEQ ID NO: 917134
uucuaaauuguugagcuaa

SEQ ID NO: 1211397 - RNA, 19 nt, Artificial Sequence
  Description of Artificial Sequence: Synthetic oligonucleotide
  Antisense strand to SEQ ID NO: 1211396
uuagcucaacaauuuagaa

SEQ ID NO: 1211398 - RNA, 19 nt, Artificial Sequence
  Description of Artificial Sequence: Synthetic oligonucleotide
  Sense strand starting at position 3963 of SEQ ID NO: 917135
auugcugcugaggauaaau

SEQ ID NO: 1211399 - RNA, 19 nt, Artificial Sequence
  Description of Artificial Sequence: Synthetic oligonucleotide
  Antisense strand to SEQ ID NO: 1211398
auuuauccucagcagcaau

SEQ ID NO: 1211400 - RNA, 19 nt, Artificial Sequence
  Description of Artificial Sequence: Synthetic oligonucleotide
  Sense strand starting at position 300 of SEQ ID NO: 917135
ccaguacagcauuauaaag

SEQ ID NO: 1211401 - RNA, 19 nt, Artificial Sequence
  Description of Artificial Sequence: Synthetic oligonucleotide
  Antisense strand to SEQ ID NO: 1211400
cuuuauaaugcuguacugg

SEQ ID NO: 1211402 - RNA, 19 nt, Artificial Sequence
  Description of Artificial Sequence: Synthetic oligonucleotide
  Sense strand starting at position 317 of SEQ ID NO: 917135
agugcagugcuauaaauag

SEQ ID NO: 1211403 - RNA, 19 nt, Artificial Sequence
  Description of Artificial Sequence: Synthetic oligonucleotide
  Antisense strand to SEQ ID NO: 1211402
cuauuuauagcacugcacu

SEQ ID NO: 1211404 - RNA, 19 nt, Artificial Sequence
  Description of Artificial Sequence: Synthetic oligonucleotide
  Sense strand starting at position 361 of SEQ ID NO: 917135
ccauuugguuaguugcaaa

SEQ ID NO: 1211405 - RNA, 19 nt, Artificial Sequence
  Description of Artificial Sequence: Synthetic oligonucleotide
  Antisense strand to SEQ ID NO: 1211404
uuugcaacuaaccaaaugg

SEQ ID NO: 1211406 - RNA, 19 nt, Artificial Sequence
  Description of Artificial Sequence: Synthetic oligonucleotide
  Sense strand starting at position 835 of SEQ ID NO: 917135
ccagcaagucuggguuaga

SEQ ID NO: 1211407 - RNA, 19 nt, Artificial Sequence
  Description of Artificial Sequence: Synthetic oligonucleotide
  Antisense strand to SEQ ID NO: 1211406
ucuaacccagacuugcugg

SEQ ID NO: 1211408 - RNA, 19 nt, Artificial Sequence
  Description of Artificial Sequence: Synthetic oligonucleotide
  Sense strand starting at position 838 of SEQ ID NO: 917135
gcaagucuggguuagagga

SEQ ID NO: 1211409 - RNA, 19 nt, Artificial Sequence
  Description of Artificial Sequence: Synthetic oligonucleotide
  Antisense strand to SEQ ID NO: 1211408
uccucuaacccagacuugc

SEQ ID NO: 1211410 - RNA, 19 nt, Artificial Sequence
  Description of Artificial Sequence: Synthetic oligonucleotide
  Sense strand starting at position 2319 of SEQ ID NO: 917135
aguaguucuaccugugaag

SEQ ID NO: 1211411 - RNA, 19 nt, Artificial Sequence
  Description of Artificial Sequence: Synthetic oligonucleotide
  Antisense strand to SEQ ID NO: 1211410
cuucacagguagaacuacu

SEQ ID NO: 1211412 - RNA, 19 nt, Artificial Sequence
  Description of Artificial Sequence: Synthetic oligonucleotide
  Sense strand starting at position 2336 of SEQ ID NO: 917135
aguggaagcgagcaguaau

SEQ ID NO: 1211413 - RNA, 19 nt, Artificial Sequence
  Description of Artificial Sequence: Synthetic oligonucleotide
  Antisense strand to SEQ ID NO: 1211412
auuacugcucgcuuccacu

SEQ ID NO: 1211414 - RNA, 19 nt, Artificial Sequence
  Description of Artificial Sequence: Synthetic oligonucleotide
  Sense strand starting at position 2420 of SEQ ID NO: 917135
uuaauauuguuggcaccaa

SEQ ID NO: 1211415 - RNA, 19 nt, Artificial Sequence
  Description of Artificial Sequence: Synthetic oligonucleotide
  Antisense strand to SEQ ID NO: 1211414
uuggugccaacaauauuaa

SEQ ID NO: 1211416 - RNA, 19 nt, Artificial Sequence
  Description of Artificial Sequence: Synthetic oligonucleotide
  Sense strand starting at position 2542 of SEQ ID NO: 917135
aaacaaguuuguguaaaug

SEQ ID NO: 1211417 - RNA, 19 nt, Artificial Sequence
  Description of Artificial Sequence: Synthetic oligonucleotide
  Antisense strand to SEQ ID NO: 1211416
cauuuacacaaacuuguuu

SEQ ID NO: 1211418 - RNA, 19 nt, Artificial Sequence
  Description of Artificial Sequence: Synthetic oligonucleotide
  Sense strand starting at position 2600 of SEQ ID NO: 917135
ggaagagaguggguguaau

SEQ ID NO: 1211419 - RNA, 19 nt, Artificial Sequence
  Description of Artificial Sequence: Synthetic oligonucleotide
  Antisense strand to SEQ ID NO: 1211418
auuacacccacucucuucc

SEQ ID NO: 1211420 - RNA, 19 nt, Artificial Sequence
  Description of Artificial Sequence: Synthetic oligonucleotide
  Sense strand starting at position 2860 of SEQ ID NO: 917135
ucacuucuguuuccaagga

SEQ ID NO: 1211421 - RNA, 19 nt, Artificial Sequence
  Description of Artificial Sequence: Synthetic oligonucleotide
  Antisense strand to SEQ ID NO: 1211420
uccuuggaaacagaaguga

SEQ ID NO: 1211422 - RNA, 19 nt, Artificial Sequence
  Description of Artificial Sequence: Synthetic oligonucleotide
  Sense strand starting at position 2973 of SEQ ID NO: 917135
ggauaccuacuaugugacu

SEQ ID NO: 1211423 - RNA, 19 nt, Artificial Sequence
  Description of Artificial Sequence: Synthetic oligonucleotide
  Antisense strand to SEQ ID NO: 1211422
agucacauaguagguaucc

SEQ ID NO: 1211424 - RNA, 19 nt, Artificial Sequence
  Description of Artificial Sequence: Synthetic oligonucleotide
  Sense strand starting at position 2979 of SEQ ID NO: 917135
cuacuaugugacugcaacu

SEQ ID NO: 1211425 - RNA, 19 nt, Artificial Sequence
  Description of Artificial Sequence: Synthetic oligonucleotide
  Antisense strand to SEQ ID NO: 1211424
aguugcagucacauaguag

SEQ ID NO: 1211426 - RNA, 19 nt, Artificial Sequence
  Description of Artificial Sequence: Synthetic oligonucleotide
  Sense strand starting at position 2999 of SEQ ID NO: 917135
ugcuaagcacccuaggaau

SEQ ID NO: 1211427 - RNA, 19 nt, Artificial Sequence
  Description of Artificial Sequence: Synthetic oligonucleotide
  Antisense strand to SEQ ID NO: 1211426
auuccuagggugcuuagca

SEQ ID NO: 1211428 - RNA, 19 nt, Artificial Sequence
  Description of Artificial Sequence: Synthetic oligonucleotide
  Sense strand starting at position 3011 of SEQ ID NO: 917135
uaggaaugccaguaucuuu

SEQ ID NO: 1211429 - RNA, 19 nt, Artificial Sequence
  Description of Artificial Sequence: Synthetic oligonucleotide
  Antisense strand to SEQ ID NO: 1211428
aaagauacuggcauuccua

SEQ ID NO: 1211430 - RNA, 19 nt, Artificial Sequence
  Description of Artificial Sequence: Synthetic oligonucleotide
  Sense strand starting at position 3096 of SEQ ID NO: 917135
guaggauggcccugggaau

SEQ ID NO: 1211431 - RNA, 19 nt, Artificial Sequence
  Description of Artificial Sequence: Synthetic oligonucleotide
  Antisense strand to SEQ ID NO: 1211430
auucccagggccauccuac

SEQ ID NO: 1211432 - RNA, 19 nt, Artificial Sequence
  Description of Artificial Sequence: Synthetic oligonucleotide
  Sense strand starting at position 3097 of SEQ ID NO: 917135
uaggauggcccugggaaua

SEQ ID NO: 1211433 - RNA, 19 nt, Artificial Sequence
  Description of Artificial Sequence: Synthetic oligonucleotide
  Antisense strand to SEQ ID NO: 1211432
uauucccagggccauccua

SEQ ID NO: 1211434 - RNA, 19 nt, Artificial Sequence
  Description of Artificial Sequence: Synthetic oligonucleotide
  Sense strand starting at position 3119 of SEQ ID NO: 917135
guaggauguccuggagaca

SEQ ID NO: 1211435 - RNA, 19 nt, Artificial Sequence
  Description of Artificial Sequence: Synthetic oligonucleotide
  Antisense strand to SEQ ID NO: 1211434
ugucuccaggacauccuac

SEQ ID NO: 1211436 - RNA, 19 nt, Artificial Sequence
  Description of Artificial Sequence: Synthetic oligonucleotide
  Sense strand starting at position 3140 of SEQ ID NO: 917135
gaagcaggugcugaauaaa

SEQ ID NO: 1211437 - RNA, 19 nt, Artificial Sequence
  Description of Artificial Sequence: Synthetic oligonucleotide
  Antisense strand to SEQ ID NO: 1211436
uuuauucagcaccugcuuc

SEQ ID NO: 1211438 - RNA, 19 nt, Artificial Sequence
  Description of Artificial Sequence: Synthetic oligonucleotide
  Sense strand starting at position 3200 of SEQ ID NO: 917135
ggacuuaggcucuaaugca

SEQ ID NO: 1211439 - RNA, 19 nt, Artificial Sequence
  Description of Artificial Sequence: Synthetic oligonucleotide
  Antisense strand to SEQ ID NO: 1211438
ugcauuagagccuaagucc

SEQ ID NO: 1211440 - RNA, 19 nt, Artificial Sequence
  Description of Artificial Sequence: Synthetic oligonucleotide
  Sense strand starting at position 3208 of SEQ ID NO: 917135
gcucuaaugcauuaggaca

SEQ ID NO: 1211441 - RNA, 19 nt, Artificial Sequence
  Description of Artificial Sequence: Synthetic oligonucleotide
  Antisense strand to SEQ ID NO: 1211440
uguccuaaugcauuagagc

SEQ ID NO: 1211442 - RNA, 19 nt, Artificial Sequence
  Description of Artificial Sequence: Synthetic oligonucleotide
  Sense strand starting at position 3213 of SEQ ID NO: 917135
aaugcauuaggacaguauu

SEQ ID NO: 1211443 - RNA, 19 nt, Artificial Sequence
  Description of Artificial Sequence: Synthetic oligonucleotide
  Antisense strand to SEQ ID NO: 1211442
aauacuguccuaaugcauu

SEQ ID NO: 1211444 - RNA, 19 nt, Artificial Sequence
  Description of Artificial Sequence: Synthetic oligonucleotide
  Sense strand starting at position 3221 of SEQ ID NO: 917135
aggacaguauugucugcaa

SEQ ID NO: 1211445 - RNA, 19 nt, Artificial Sequence
  Description of Artificial Sequence: Synthetic oligonucleotide
  Antisense strand to SEQ ID NO: 1211444
uugcagacaauacuguccu

SEQ ID NO: 1211446 - RNA, 19 nt, Artificial Sequence
  Description of Artificial Sequence: Synthetic oligonucleotide
  Sense strand starting at position 3306 of SEQ ID NO: 917135
gguuuauauugacuucuua

SEQ ID NO: 1211447 - RNA, 19 nt, Artificial Sequence
  Description of Artificial Sequence: Synthetic oligonucleotide
  Antisense strand to SEQ ID NO: 1211446
uaagaagucaauauaaacc

SEQ ID NO: 1211448 - RNA, 19 nt, Artificial Sequence
  Description of Artificial Sequence: Synthetic oligonucleotide
  Sense strand starting at position 3356 of SEQ ID NO: 917135
cauuuagugugagugcaaa

SEQ ID NO: 1211449 - RNA, 19 nt, Artificial Sequence
  Description of Artificial Sequence: Synthetic oligonucleotide
  Antisense strand to SEQ ID NO: 1211448
uuugcacucacacuaaaug

SEQ ID NO: 1211450 - RNA, 19 nt, Artificial Sequence
  Description of Artificial Sequence: Synthetic oligonucleotide
  Sense strand starting at position 3410 of SEQ ID NO: 917135
gucucuugucaauaccauu

SEQ ID NO: 1211451 - RNA, 19 nt, Artificial Sequence
  Description of Artificial Sequence: Synthetic oligonucleotide
  Antisense strand to SEQ ID NO: 1211450
aaugguauugacaagagac

SEQ ID NO: 1211452 - RNA, 19 nt, Artificial Sequence
  Description of Artificial Sequence: Synthetic oligonucleotide
  Sense strand starting at position 3488 of SEQ ID NO: 917135
caaaucuaugguugacuga

SEQ ID NO: 1211453 - RNA, 19 nt, Artificial Sequence
  Description of Artificial Sequence: Synthetic oligonucleotide
  Antisense strand to SEQ ID NO: 1211452
ucagucaaccauagauuug

SEQ ID NO: 1211454 - RNA, 19 nt, Artificial Sequence
  Description of Artificial Sequence: Synthetic oligonucleotide
  Sense strand starting at position 3491 of SEQ ID NO: 917135
aucuaugguugacugaauu

SEQ ID NO: 1211455 - RNA, 19 nt, Artificial Sequence
  Description of Artificial Sequence: Synthetic oligonucleotide
  Antisense strand to SEQ ID NO: 1211454
aauucagucaaccauagau

SEQ ID NO: 1211456 - RNA, 19 nt, Artificial Sequence
  Description of Artificial Sequence: Synthetic oligonucleotide
  Sense strand starting at position 3549 of SEQ ID NO: 917135
cuaguaguucuagauuguu

SEQ ID NO: 1211457 - RNA, 19 nt, Artificial Sequence
  Description of Artificial Sequence: Synthetic oligonucleotide
  Antisense strand to SEQ ID NO: 1211456
aacaaucuagaacuacuag

SEQ ID NO: 1211458 - RNA, 19 nt, Artificial Sequence
  Description of Artificial Sequence: Synthetic oligonucleotide
  Sense strand starting at position 3554 of SEQ ID NO: 917135
aguucuagauuguuuccaa

SEQ ID NO: 1211459 - RNA, 19 nt, Artificial Sequence
  Description of Artificial Sequence: Synthetic oligonucleotide
  Antisense strand to SEQ ID NO: 1211458
uuggaaacaaucuagaacu

SEQ ID NO: 1211460 - RNA, 19 nt, Artificial Sequence
  Description of Artificial Sequence: Synthetic oligonucleotide
  Sense strand starting at position 3555 of SEQ ID NO: 917135
guucuagauuguuuccaau

SEQ ID NO: 1211461 - RNA, 19 nt, Artificial Sequence
  Description of Artificial Sequence: Synthetic oligonucleotide
  Antisense strand to SEQ ID NO: 1211460
auuggaaacaaucuagaac

SEQ ID NO: 1211462 - RNA, 19 nt, Artificial Sequence
  Description of Artificial Sequence: Synthetic oligonucleotide
  Sense strand starting at position 3678 of SEQ ID NO: 917135
gggucaaaugccuacucca

SEQ ID NO: 1211463 - RNA, 19 nt, Artificial Sequence
  Description of Artificial Sequence: Synthetic oligonucleotide
  Antisense strand to SEQ ID NO: 1211462
uggaguaggcauuugaccc

SEQ ID NO: 1211464 - RNA, 19 nt, Artificial Sequence
  Description of Artificial Sequence: Synthetic oligonucleotide
  Sense strand starting at position 3709 of SEQ ID NO: 917135
acuccuggugcuuaaucaa

SEQ ID NO: 1211465 - RNA, 19 nt, Artificial Sequence
  Description of Artificial Sequence: Synthetic oligonucleotide
  Antisense strand to SEQ ID NO: 1211464
uugauuaagcaccaggagu

SEQ ID NO: 1211466 - RNA, 19 nt, Artificial Sequence
  Description of Artificial Sequence: Synthetic oligonucleotide
  Sense strand starting at position 3753 of SEQ ID NO: 917135
agaguauuacuauguucca

SEQ ID NO: 1211467 - RNA, 19 nt, Artificial Sequence
  Description of Artificial Sequence: Synthetic oligonucleotide
  Antisense strand to SEQ ID NO: 1211466
uggaacauaguaauacucu

SEQ ID NO: 1211468 - RNA, 19 nt, Artificial Sequence
  Description of Artificial Sequence: Synthetic oligonucleotide
  Sense strand starting at position 3754 of SEQ ID NO: 917135
gaguauuacuauguuccag

SEQ ID NO: 1211469 - RNA, 19 nt, Artificial Sequence
  Description of Artificial Sequence: Synthetic oligonucleotide
  Antisense strand to SEQ ID NO: 1211468
cuggaacauaguaauacuc

SEQ ID NO: 1211470 - RNA, 19 nt, Artificial Sequence
  Description of Artificial Sequence: Synthetic oligonucleotide
  Sense strand starting at position 3756 of SEQ ID NO: 917135
guauuacuauguuccagaa

SEQ ID NO: 1211471 - RNA, 19 nt, Artificial Sequence
  Description of Artificial Sequence: Synthetic oligonucleotide
  Antisense strand to SEQ ID NO: 1211470
uucuggaacauaguaauac

SEQ ID NO: 1211472 - RNA, 19 nt, Artificial Sequence
  Description of Artificial Sequence: Synthetic oligonucleotide
  Sense strand starting at position 3806 of SEQ ID NO: 917135
cagagaacacaccguuuaa

SEQ ID NO: 1211473 - RNA, 19 nt, Artificial Sequence
  Description of Artificial Sequence: Synthetic oligonucleotide
  Antisense strand to SEQ ID NO: 1211472
uuaaacgguguguucucug

SEQ ID NO: 1211474 - RNA, 19 nt, Artificial Sequence
  Description of Artificial Sequence: Synthetic oligonucleotide
  Sense strand starting at position 3810 of SEQ ID NO: 917135
gaacacaccguuuaaguaa

SEQ ID NO: 1211475 - RNA, 19 nt, Artificial Sequence
  Description of Artificial Sequence: Synthetic oligonucleotide
  Antisense strand to SEQ ID NO: 1211474
uuacuuaaacgguguguuc

SEQ ID NO: 1211476 - RNA, 19 nt, Artificial Sequence
  Description of Artificial Sequence: Synthetic oligonucleotide
  Sense strand starting at position 3846 of SEQ ID NO: 917135
ccuuccuuuccacaguaga

SEQ ID NO: 1211477 - RNA, 19 nt, Artificial Sequence
  Description of Artificial Sequence: Synthetic oligonucleotide
  Antisense strand to SEQ ID NO: 1211476
ucuacuguggaaaggaagg

SEQ ID NO: 1211478 - RNA, 19 nt, Artificial Sequence
  Description of Artificial Sequence: Synthetic oligonucleotide
  Sense strand starting at position 3849 of SEQ ID NO: 917136
uccuuuccacaguagacau

SEQ ID NO: 1211479 - RNA, 19 nt, Artificial Sequence
  Description of Artificial Sequence: Synthetic oligonucleotide
  Antisense strand to SEQ ID NO: 1211478
augucuacuguggaaagga

SEQ ID NO: 1211480 - RNA, 19 nt, Artificial Sequence
  Description of Artificial Sequence: Synthetic oligonucleotide
  Sense strand starting at position 66 of SEQ ID NO: 917136
uaucaaguuuaugagagaa

SEQ ID NO: 1211481 - RNA, 19 nt, Artificial Sequence
  Description of Artificial Sequence: Synthetic oligonucleotide
  Antisense strand to SEQ ID NO: 1211480
uucucucauaaacuugaua

SEQ ID NO: 1211482 - RNA, 19 nt, Artificial Sequence
  Description of Artificial Sequence: Synthetic oligonucleotide
  Sense strand starting at position 137 of SEQ ID NO: 917136
ccugaucgauauccuguau

SEQ ID NO: 1211483 - RNA, 19 nt, Artificial Sequence
  Description of Artificial Sequence: Synthetic oligonucleotide
  Antisense strand to SEQ ID NO: 1211482
auacaggauaucgaucagg

SEQ ID NO: 1211484 - RNA, 19 nt, Artificial Sequence
  Description of Artificial Sequence: Synthetic oligonucleotide
  Sense strand starting at position 141 of SEQ ID NO: 917136
aucgauauccuguauagaa

SEQ ID NO: 1211485 - RNA, 19 nt, Artificial Sequence
  Description of Artificial Sequence: Synthetic oligonucleotide
  Antisense strand to SEQ ID NO: 1211484
uucuauacaggauaucgau

SEQ ID NO: 1211486 - RNA, 19 nt, Artificial Sequence
  Description of Artificial Sequence: Synthetic oligonucleotide
  Sense strand starting at position 190 of SEQ ID NO: 917136
ccucguaagggucgaauau

SEQ ID NO: 1211487 - RNA, 19 nt, Artificial Sequence
  Description of Artificial Sequence: Synthetic oligonucleotide
  Antisense strand to SEQ ID NO: 1211486
auauucgacccuuacgagg

SEQ ID NO: 1211488 - RNA, 19 nt, Artificial Sequence
  Description of Artificial Sequence: Synthetic oligonucleotide
  Sense strand starting at position 191 of SEQ ID NO: 917136
cucguaagggucgaauaug

SEQ ID NO: 1211489 - RNA, 19 nt, Artificial Sequence
  Description of Artificial Sequence: Synthetic oligonucleotide
  Antisense strand to SEQ ID NO: 1211488
cauauucgacccuuacgag

SEQ ID NO: 1211490 - RNA, 19 nt, Artificial Sequence
  Description of Artificial Sequence: Synthetic oligonucleotide
  Sense strand starting at position 843 of SEQ ID NO: 917136
cgauucgacuguuugagua

SEQ ID NO: 1211491 - RNA, 19 nt, Artificial Sequence
  Description of Artificial Sequence: Synthetic oligonucleotide
  Antisense strand to SEQ ID NO: 1211490
uacucaaacagucgaaucg

SEQ ID NO: 1211492 - RNA, 19 nt, Artificial Sequence
  Description of Artificial Sequence: Synthetic oligonucleotide
  Sense strand starting at position 857 of SEQ ID NO: 917136
gaguaaacgagucgguauc

SEQ ID NO: 1211493 - RNA, 19 nt, Artificial Sequence
  Description of Artificial Sequence: Synthetic oligonucleotide
  Antisense strand to SEQ ID NO: 1211492
gauaccgacucguuuacuc

SEQ ID NO: 1211494 - RNA, 19 nt, Artificial Sequence
  Description of Artificial Sequence: Synthetic oligonucleotide
  Sense strand starting at position 859 of SEQ ID NO: 917136
guaaacgagucgguaucau

SEQ ID NO: 1211495 - RNA, 19 nt, Artificial Sequence
  Description of Artificial Sequence: Synthetic oligonucleotide
  Antisense strand to SEQ ID NO: 1211494
augauaccgacucguuuac

SEQ ID NO: 1211496 - RNA, 19 nt, Artificial Sequence
  Description of Artificial Sequence: Synthetic oligonucleotide
  Sense strand starting at position 1372 of SEQ ID NO: 917136
ccgguaucgaauuaaguaa

SEQ ID NO: 1211497 - RNA, 19 nt, Artificial Sequence
  Description of Artificial Sequence: Synthetic oligonucleotide
  Antisense strand to SEQ ID NO: 1211496
uuacuuaauucgauaccgg

SEQ ID NO: 1211498 - RNA, 19 nt, Artificial Sequence
  Description of Artificial Sequence: Synthetic oligonucleotide
  Sense strand starting at position 2351 of SEQ ID NO: 917136
guggaucauuucgagaguc

SEQ ID NO: 1211499 - RNA, 19 nt, Artificial Sequence
  Description of Artificial Sequence: Synthetic oligonucleotide
  Antisense strand to SEQ ID NO: 1211498
gacucucgaaaugauccac

SEQ ID NO: 1211500 - RNA, 19 nt, Artificial Sequence
  Description of Artificial Sequence: Synthetic oligonucleotide
  Sense strand starting at position 2373 of SEQ ID NO: 917136
cuuguaaauguuuggcacu

SEQ ID NO: 1211501 - RNA, 19 nt, Artificial Sequence
  Description of Artificial Sequence: Synthetic oligonucleotide
  Antisense strand to SEQ ID NO: 1211500
agugccaaacauuuacaag

SEQ ID NO: 1211502 - RNA, 19 nt, Artificial Sequence
  Description of Artificial Sequence: Synthetic oligonucleotide
  Sense strand starting at position 2406 of SEQ ID NO: 917136
cuucuuucuggcgacaguu

SEQ ID NO: 1211503 - RNA, 19 nt, Artificial Sequence
  Description of Artificial Sequence: Synthetic oligonucleotide
  Antisense strand to SEQ ID NO: 1211502
aacugucgccagaaagaag

SEQ ID NO: 1211504 - RNA, 19 nt, Artificial Sequence
  Description of Artificial Sequence: Synthetic oligonucleotide
  Sense strand starting at position 2554 of SEQ ID NO: 917136
gggaauaaguaagucgaga

SEQ ID NO: 1211505 - RNA, 19 nt, Artificial Sequence
  Description of Artificial Sequence: Synthetic oligonucleotide
  Antisense strand to SEQ ID NO: 1211504
ucucgacuuacuuauuccc

SEQ ID NO: 1211506 - RNA, 19 nt, Artificial Sequence
  Description of Artificial Sequence: Synthetic oligonucleotide
  Sense strand starting at position 2655 of SEQ ID NO: 917136
agcaguuuauauuccagga

SEQ ID NO: 1211507 - RNA, 19 nt, Artificial Sequence
  Description of Artificial Sequence: Synthetic oligonucleotide
  Antisense strand to SEQ ID NO: 1211506
uccuggaauauaaacugcu

SEQ ID NO: 1211508 - RNA, 19 nt, Artificial Sequence
  Description of Artificial Sequence: Synthetic oligonucleotide
  Sense strand starting at position 2659 of SEQ ID NO: 917136
guuuauauuccaggauauu

SEQ ID NO: 1211509 - RNA, 19 nt, Artificial Sequence
  Description of Artificial Sequence: Synthetic oligonucleotide
  Antisense strand to SEQ ID NO: 1211508
aauauccuggaauauaaac

SEQ ID NO: 1211510 - RNA, 19 nt, Artificial Sequence
  Description of Artificial Sequence: Synthetic oligonucleotide
  Sense strand starting at position 2702 of SEQ ID NO: 917136
uguagaaauuguuccgaau

SEQ ID NO: 1211511 - RNA, 19 nt, Artificial Sequence
  Description of Artificial Sequence: Synthetic oligonucleotide
  Antisense strand to SEQ ID NO: 1211510
auucggaacaauuucuaca

SEQ ID NO: 1211512 - RNA, 19 nt, Artificial Sequence
  Description of Artificial Sequence: Synthetic oligonucleotide
  Sense strand starting at position 2792 of SEQ ID NO: 917136
ccacauuaucagggcaaga

SEQ ID NO: 1211513 - RNA, 19 nt, Artificial Sequence
  Description of Artificial Sequence: Synthetic oligonucleotide
  Antisense strand to SEQ ID NO: 1211512
ucuugcccugauaaugugg

SEQ ID NO: 1211514 - RNA, 19 nt, Artificial Sequence
  Description of Artificial Sequence: Synthetic oligonucleotide
  Sense strand starting at position 2819 of SEQ ID NO: 917136
cuccacuuugcuggaaaua

SEQ ID NO: 1211515 - RNA, 19 nt, Artificial Sequence
  Description of Artificial Sequence: Synthetic oligonucleotide
  Antisense strand to SEQ ID NO: 1211514
uauuuccagcaaaguggag

SEQ ID NO: 1211516 - RNA, 19 nt, Artificial Sequence
  Description of Artificial Sequence: Synthetic oligonucleotide
  Sense strand starting at position 2830 of SEQ ID NO: 917136
uggaaauacuguuucuaac

SEQ ID NO: 1211517 - RNA, 19 nt, Artificial Sequence
  Description of Artificial Sequence: Synthetic oligonucleotide
  Antisense strand to SEQ ID NO: 1211516
guuagaaacaguauuucca

SEQ ID NO: 1211518 - RNA, 19 nt, Artificial Sequence
  Description of Artificial Sequence: Synthetic oligonucleotide
  Sense strand starting at position 2879 of SEQ ID NO: 917136
uaaaccuaguuguuagaga

SEQ ID NO: 1211519 - RNA, 19 nt, Artificial Sequence
  Description of Artificial Sequence: Synthetic oligonucleotide
  Antisense strand to SEQ ID NO: 1211518
ucucuaacaacuagguuua

SEQ ID NO: 1211520 - RNA, 19 nt, Artificial Sequence
  Description of Artificial Sequence: Synthetic oligonucleotide
  Sense strand starting at position 2884 of SEQ ID NO: 917136
cuaguuguuagagacuuga

SEQ ID NO: 1211521 - RNA, 19 nt, Artificial Sequence
  Description of Artificial Sequence: Synthetic oligonucleotide
  Antisense strand to SEQ ID NO: 1211520
ucaagucucuaacaacuag

SEQ ID NO: 1211522 - RNA, 19 nt, Artificial Sequence
  Description of Artificial Sequence: Synthetic oligonucleotide
  Sense strand starting at position 3007 of SEQ ID NO: 917136
cagaguucggaaggaaagu

SEQ ID NO: 1211523 - RNA, 19 nt, Artificial Sequence
  Description of Artificial Sequence: Synthetic oligonucleotide
  Antisense strand to SEQ ID NO: 1211522
acuuuccuuccgaacucug

SEQ ID NO: 1211524 - RNA, 19 nt, Artificial Sequence
  Description of Artificial Sequence: Synthetic oligonucleotide
  Sense strand starting at position 3127 of SEQ ID NO: 917136
uucugaaaugauugucucu

SEQ ID NO: 1211525 - RNA, 19 nt, Artificial Sequence
  Description of Artificial Sequence: Synthetic oligonucleotide
  Antisense strand to SEQ ID NO: 1211524
agagacaaucauuucagaa

SEQ ID NO: 1211526 - RNA, 19 nt, Artificial Sequence
  Description of Artificial Sequence: Synthetic oligonucleotide
  Sense strand starting at position 3129 of SEQ ID NO: 917136
cugaaaugauugucucuau

SEQ ID NO: 1211527 - RNA, 19 nt, Artificial Sequence
  Description of Artificial Sequence: Synthetic oligonucleotide
  Antisense strand to SEQ ID NO: 1211526
auagagacaaucauuucag

SEQ ID NO: 1211528 - RNA, 19 nt, Artificial Sequence
  Description of Artificial Sequence: Synthetic oligonucleotide
  Sense strand starting at position 3130 of SEQ ID NO: 917136
ugaaaugauugucucuauu

SEQ ID NO: 1211529 - RNA, 19 nt, Artificial Sequence
  Description of Artificial Sequence: Synthetic oligonucleotide
  Antisense strand to SEQ ID NO: 1211528
aauagagacaaucauuuca

SEQ ID NO: 1211530 - RNA, 19 nt, Artificial Sequence
  Description of Artificial Sequence: Synthetic oligonucleotide
  Sense strand starting at position 3140 of SEQ ID NO: 917136
gucucuauuauugguggau

SEQ ID NO: 1211531 - RNA, 19 nt, Artificial Sequence
  Description of Artificial Sequence: Synthetic oligonucleotide
  Antisense strand to SEQ ID NO: 1211530
auccaccaauaauagagac

SEQ ID NO: 1211532 - RNA, 19 nt, Artificial Sequence
  Description of Artificial Sequence: Synthetic oligonucleotide
  Sense strand starting at position 3215 of SEQ ID NO: 917136
aaaggcagguuguaaauuu

SEQ ID NO: 1211533 - RNA, 19 nt, Artificial Sequence
  Description of Artificial Sequence: Synthetic oligonucleotide
  Antisense strand to SEQ ID NO: 1211532
aaauuuacaaccugccuuu

SEQ ID NO: 1211534 - RNA, 19 nt, Artificial Sequence
  Description of Artificial Sequence: Synthetic oligonucleotide
  Sense strand starting at position 3599 of SEQ ID NO: 917136
caggccugagcgugauuua

SEQ ID NO: 1211535 - RNA, 19 nt, Artificial Sequence
  Description of Artificial Sequence: Synthetic oligonucleotide
  Antisense strand to SEQ ID NO: 1211534
uaaaucacgcucaggccug

SEQ ID NO: 1211536 - RNA, 19 nt, Artificial Sequence
  Description of Artificial Sequence: Synthetic oligonucleotide
  Sense strand starting at position 3600 of SEQ ID NO: 917136
aggccugagcgugauuuau

SEQ ID NO: 1211537 - RNA, 19 nt, Artificial Sequence
  Description of Artificial Sequence: Synthetic oligonucleotide
  Antisense strand to SEQ ID NO: 1211536
auaaaucacgcucaggccu

SEQ ID NO: 1211538 - RNA, 19 nt, Artificial Sequence
  Description of Artificial Sequence: Synthetic oligonucleotide
  Sense strand starting at position 3602 of SEQ ID NO: 917136
gccugagcgugauuuauaa

SEQ ID NO: 1211539 - RNA, 19 nt, Artificial Sequence
  Description of Artificial Sequence: Synthetic oligonucleotide
  Antisense strand to SEQ ID NO: 1211538
uuauaaaucacgcucaggc

SEQ ID NO: 1211540 - RNA, 19 nt, Artificial Sequence
  Description of Artificial Sequence: Synthetic oligonucleotide
  Sense strand starting at position 3609 of SEQ ID NO: 917136
cgugauuuauaauacugau

SEQ ID NO: 1211541 - RNA, 19 nt, Artificial Sequence
  Description of Artificial Sequence: Synthetic oligonucleotide
  Antisense strand to SEQ ID NO: 1211540
aucaguauuauaaaucacg

SEQ ID NO: 1211542 - RNA, 19 nt, Artificial Sequence
  Description of Artificial Sequence: Synthetic oligonucleotide
  Sense strand starting at position 3665 of SEQ ID NO: 917136
gaucauuaucuuugggagc

SEQ ID NO: 1211543 - RNA, 19 nt, Artificial Sequence
  Description of Artificial Sequence: Synthetic oligonucleotide
  Antisense strand to SEQ ID NO: 1211542
gcucccaaagauaaugauc

SEQ ID NO: 1211544 - RNA, 19 nt, Artificial Sequence
  Description of Artificial Sequence: Synthetic oligonucleotide
  Sense strand starting at position 3671 of SEQ ID NO: 917136
uaucuuugggagcaucauu

SEQ ID NO: 1211545 - RNA, 19 nt, Artificial Sequence
  Description of Artificial Sequence: Synthetic oligonucleotide
  Antisense strand to SEQ ID NO: 1211544
aaugaugcucccaaagaua

SEQ ID NO: 1211546 - RNA, 19 nt, Artificial Sequence
  Description of Artificial Sequence: Synthetic oligonucleotide
  Sense strand starting at position 3679 of SEQ ID NO: 917136
ggagcaucauuugaucaca

SEQ ID NO: 1211547 - RNA, 19 nt, Artificial Sequence
  Description of Artificial Sequence: Synthetic oligonucleotide
  Antisense strand to SEQ ID NO: 1211546
ugugaucaaaugaugcucc

SEQ ID NO: 1211548 - RNA, 19 nt, Artificial Sequence
  Description of Artificial Sequence: Synthetic oligonucleotide
  Sense strand starting at position 3749 of SEQ ID NO: 917136
uggaaugcaugaguauguu

SEQ ID NO: 1211549 - RNA, 19 nt, Artificial Sequence
  Description of Artificial Sequence: Synthetic oligonucleotide
  Antisense strand to SEQ ID NO: 1211548
aacauacucaugcauucca

SEQ ID NO: 1211550 - RNA, 19 nt, Artificial Sequence
  Description of Artificial Sequence: Synthetic oligonucleotide
  Sense strand starting at position 3799 of SEQ ID NO: 917136
acuccauugugacuguuua

SEQ ID NO: 1211551 - RNA, 19 nt, Artificial Sequence
  Description of Artificial Sequence: Synthetic oligonucleotide
  Antisense strand to SEQ ID NO: 1211550
uaaacagucacaauggagu

SEQ ID NO: 1211552 - RNA, 19 nt, Artificial Sequence
  Description of Artificial Sequence: Synthetic oligonucleotide
  Sense strand starting at position 3800 of SEQ ID NO: 917136
cuccauugugacuguuuaa

SEQ ID NO: 1211553 - RNA, 19 nt, Artificial Sequence
  Description of Artificial Sequence: Synthetic oligonucleotide
  Antisense strand to SEQ ID NO: 1211552
uuaaacagucacaauggag

SEQ ID NO: 1211554 - RNA, 19 nt, Artificial Sequence
  Description of Artificial Sequence: Synthetic oligonucleotide
  Sense strand starting at position 3803 of SEQ ID NO: 917136
cauugugacuguuuaauga

SEQ ID NO: 1211555 - RNA, 19 nt, Artificial Sequence
  Description of Artificial Sequence: Synthetic oligonucleotide
  Antisense strand to SEQ ID NO: 1211554
ucauuaaacagucacaaug

SEQ ID NO: 1211556 - RNA, 19 nt, Artificial Sequence
  Description of Artificial Sequence: Synthetic oligonucleotide
  Sense strand starting at position 3829 of SEQ ID NO: 917136
ucauguuaucuuggccauu

SEQ ID NO: 1211557 - RNA, 19 nt, Artificial Sequence
  Description of Artificial Sequence: Synthetic oligonucleotide
  Antisense strand to SEQ ID NO: 1211556
aauggccaagauaacauga

SEQ ID NO: 1211558 - RNA, 19 nt, Artificial Sequence
  Description of Artificial Sequence: Synthetic oligonucleotide
  Sense strand starting at position 3921 of SEQ ID NO: 917136
aaucauauguuagaggaag

SEQ ID NO: 1211559 - RNA, 19 nt, Artificial Sequence
  Description of Artificial Sequence: Synthetic oligonucleotide
  Antisense strand to SEQ ID NO: 1211558
cuuccucuaacauaugauu

SEQ ID NO: 1211560 - RNA, 19 nt, Artificial Sequence
  Description of Artificial Sequence: Synthetic oligonucleotide
  Sense strand starting at position 3921 of SEQ ID NO: 917137
aaucauauguuagaggaag

SEQ ID NO: 1211561 - RNA, 19 nt, Artificial Sequence
  Description of Artificial Sequence: Synthetic oligonucleotide
  Antisense strand to SEQ ID NO: 1211560
cuuccucuaacauaugauu

SEQ ID NO: 1211562 - RNA, 19 nt, Artificial Sequence
  Description of Artificial Sequence: Synthetic oligonucleotide
  Sense strand starting at position 194 of SEQ ID NO: 917137
uagcuagauugaucaguuu

SEQ ID NO: 1211563 - RNA, 19 nt, Artificial Sequence
  Description of Artificial Sequence: Synthetic oligonucleotide
  Antisense strand to SEQ ID NO: 1211562
aaacugaucaaucuagcua

SEQ ID NO: 1211564 - RNA, 19 nt, Artificial Sequence
  Description of Artificial Sequence: Synthetic oligonucleotide
  Sense strand starting at position 358 of SEQ ID NO: 917137
gucagaaauuaacagaaau

SEQ ID NO: 1211565 - RNA, 19 nt, Artificial Sequence
  Description of Artificial Sequence: Synthetic oligonucleotide
  Antisense strand to SEQ ID NO: 1211564
auuucuguuaauuucugac

SEQ ID NO: 1211566 - RNA, 19 nt, Artificial Sequence
  Description of Artificial Sequence: Synthetic oligonucleotide
  Sense strand starting at position 725 of SEQ ID NO: 917137
gcaacuucggucuagagau

SEQ ID NO: 1211567 - RNA, 19 nt, Artificial Sequence
  Description of Artificial Sequence: Synthetic oligonucleotide
  Antisense strand to SEQ ID NO: 1211566
aucucuagaccgaaguugc

SEQ ID NO: 1211568 - RNA, 19 nt, Artificial Sequence
  Description of Artificial Sequence: Synthetic oligonucleotide
  Sense strand starting at position 849 of SEQ ID NO: 917137
auuucuaucugccauagga

SEQ ID NO: 1211569 - RNA, 19 nt, Artificial Sequence
  Description of Artificial Sequence: Synthetic oligonucleotide
  Antisense strand to SEQ ID NO: 1211568
uccuauggcagauagaaau

SEQ ID NO: 1211570 - RNA, 19 nt, Artificial Sequence
  Description of Artificial Sequence: Synthetic oligonucleotide
  Sense strand starting at position 874 of SEQ ID NO: 917137
cauugcaacugugaaaguu

SEQ ID NO: 1211571 - RNA, 19 nt, Artificial Sequence
  Description of Artificial Sequence: Synthetic oligonucleotide
  Antisense strand to SEQ ID NO: 1211570
aacuuucacaguugcaaug

SEQ ID NO: 1211572 - RNA, 19 nt, Artificial Sequence
  Description of Artificial Sequence: Synthetic oligonucleotide
  Sense strand starting at position 894 of SEQ ID NO: 917137
ugcacaaccucgguaaaca

SEQ ID NO: 1211573 - RNA, 19 nt, Artificial Sequence
  Description of Artificial Sequence: Synthetic oligonucleotide
  Antisense strand to SEQ ID NO: 1211572
uguuuaccgagguugugca

SEQ ID NO: 1211574 - RNA, 19 nt, Artificial Sequence
  Description of Artificial Sequence: Synthetic oligonucleotide
  Sense strand starting at position 919 of SEQ ID NO: 917137
ucuuaaauugagcaguaca

SEQ ID NO: 1211575 - RNA, 19 nt, Artificial Sequence
  Description of Artificial Sequence: Synthetic oligonucleotide
  Antisense strand to SEQ ID NO: 1211574
uguacugcucaauuuaaga

SEQ ID NO: 1211576 - RNA, 19 nt, Artificial Sequence
  Description of Artificial Sequence: Synthetic oligonucleotide
  Sense strand starting at position 1026 of SEQ ID NO: 917137
aaagauguuuggucaggaa

SEQ ID NO: 1211577 - RNA, 19 nt, Artificial Sequence
  Description of Artificial Sequence: Synthetic oligonucleotide
  Antisense strand to SEQ ID NO: 1211576
uuccugaccaaacaucuuu

SEQ ID NO: 1211578 - RNA, 19 nt, Artificial Sequence
  Description of Artificial Sequence: Synthetic oligonucleotide
  Sense strand starting at position 1029 of SEQ ID NO: 917137
gauguuuggucaggaaaua

SEQ ID NO: 1211579 - RNA, 19 nt, Artificial Sequence
  Description of Artificial Sequence: Synthetic oligonucleotide
  Antisense strand to SEQ ID NO: 1211578
uauuuccugaccaaacauc

SEQ ID NO: 1211580 - RNA, 19 nt, Artificial Sequence
  Description of Artificial Sequence: Synthetic oligonucleotide
  Sense strand starting at position 1087 of SEQ ID NO: 917137
uuauucuagccauguuauu

SEQ ID NO: 1211581 - RNA, 19 nt, Artificial Sequence
  Description of Artificial Sequence: Synthetic oligonucleotide
  Antisense strand to SEQ ID NO: 1211580
aauaacauggcuagaauaa

SEQ ID NO: 1211582 - RNA, 19 nt, Artificial Sequence
  Description of Artificial Sequence: Synthetic oligonucleotide
  Sense strand starting at position 1185 of SEQ ID NO: 917137
caaagcuuaugcuugaagu

SEQ ID NO: 1211583 - RNA, 19 nt, Artificial Sequence
  Description of Artificial Sequence: Synthetic oligonucleotide
  Antisense strand to SEQ ID NO: 1211582
acuucaagcauaagcuuug

SEQ ID NO: 1211584 - RNA, 19 nt, Artificial Sequence
  Description of Artificial Sequence: Synthetic oligonucleotide
  Sense strand starting at position 1186 of SEQ ID NO: 917137
aaagcuuaugcuugaaguu

SEQ ID NO: 1211585 - RNA, 19 nt, Artificial Sequence
  Description of Artificial Sequence: Synthetic oligonucleotide
  Antisense strand to SEQ ID NO: 1211584
aacuucaagcauaagcuuu

SEQ ID NO: 1211586 - RNA, 19 nt, Artificial Sequence
  Description of Artificial Sequence: Synthetic oligonucleotide
  Sense strand starting at position 1187 of SEQ ID NO: 917137
aagcuuaugcuugaaguuu

SEQ ID NO: 1211587 - RNA, 19 nt, Artificial Sequence
  Description of Artificial Sequence: Synthetic oligonucleotide
  Antisense strand to SEQ ID NO: 1211586
aaacuucaagcauaagcuu

SEQ ID NO: 1211588 - RNA, 19 nt, Artificial Sequence
  Description of Artificial Sequence: Synthetic oligonucleotide
  Sense strand starting at position 1195 of SEQ ID NO: 917137
gcuugaaguuuccagugga

SEQ ID NO: 1211589 - RNA, 19 nt, Artificial Sequence
  Description of Artificial Sequence: Synthetic oligonucleotide
  Antisense strand to SEQ ID NO: 1211588
uccacuggaaacuucaagc

SEQ ID NO: 1211590 - RNA, 19 nt, Artificial Sequence
  Description of Artificial Sequence: Synthetic oligonucleotide
  Sense strand starting at position 1198 of SEQ ID NO: 917137
ugaaguuuccaguggaagc

SEQ ID NO: 1211591 - RNA, 19 nt, Artificial Sequence
  Description of Artificial Sequence: Synthetic oligonucleotide
  Antisense strand to SEQ ID NO: 1211590
gcuuccacuggaaacuuca

SEQ ID NO: 1211592 - RNA, 19 nt, Artificial Sequence
  Description of Artificial Sequence: Synthetic oligonucleotide
  Sense strand starting at position 1274 of SEQ ID NO: 917137
acaagaugauagccauguu

SEQ ID NO: 1211593 - RNA, 19 nt, Artificial Sequence
  Description of Artificial Sequence: Synthetic oligonucleotide
  Antisense strand to SEQ ID NO: 1211592
aacauggcuaucaucuugu

SEQ ID NO: 1211594 - RNA, 19 nt, Artificial Sequence
  Description of Artificial Sequence: Synthetic oligonucleotide
  Sense strand starting at position 1277 of SEQ ID NO: 917137
agaugauagccauguuccu

SEQ ID NO: 1211595 - RNA, 19 nt, Artificial Sequence
  Description of Artificial Sequence: Synthetic oligonucleotide
  Antisense strand to SEQ ID NO: 1211594
aggaacauggcuaucaucu

SEQ ID NO: 1211596 - RNA, 19 nt, Artificial Sequence
  Description of Artificial Sequence: Synthetic oligonucleotide
  Sense strand starting at position 1286 of SEQ ID NO: 917137
ccauguuccuuaucuagua

SEQ ID NO: 1211597 - RNA, 19 nt, Artificial Sequence
  Description of Artificial Sequence: Synthetic oligonucleotide
  Antisense strand to SEQ ID NO: 1211596
uacuagauaaggaacaugg

SEQ ID NO: 1211598 - RNA, 19 nt, Artificial Sequence
  Description of Artificial Sequence: Synthetic oligonucleotide
  Sense strand starting at position 1310 of SEQ ID NO: 917137
caaggaaacuauguguaau

SEQ ID NO: 1211599 - RNA, 19 nt, Artificial Sequence
  Description of Artificial Sequence: Synthetic oligonucleotide
  Antisense strand to SEQ ID NO: 1211598
auuacacauaguuuccuug

SEQ ID NO: 1211600 - RNA, 19 nt, Artificial Sequence
  Description of Artificial Sequence: Synthetic oligonucleotide
  Sense strand starting at position 1322 of SEQ ID NO: 917137
guguaauggcaagauuaaa

SEQ ID NO: 1211601 - RNA, 19 nt, Artificial Sequence
  Description of Artificial Sequence: Synthetic oligonucleotide
  Antisense strand to SEQ ID NO: 1211600
uuuaaucuugccauuacac

SEQ ID NO: 1211602 - RNA, 19 nt, Artificial Sequence
  Description of Artificial Sequence: Synthetic oligonucleotide
  Sense strand starting at position 2545 of SEQ ID NO: 917137
ggcaaaguaucugaauagu

SEQ ID NO: 1211603 - RNA, 19 nt, Artificial Sequence
  Description of Artificial Sequence: Synthetic oligonucleotide
  Antisense strand to SEQ ID NO: 1211602
acuauucagauacuuugcc

SEQ ID NO: 1211604 - RNA, 19 nt, Artificial Sequence
  Description of Artificial Sequence: Synthetic oligonucleotide
  Sense strand starting at position 2556 of SEQ ID NO: 917137
ugaauagugucuucuccaa

SEQ ID NO: 1211605 - RNA, 19 nt, Artificial Sequence
  Description of Artificial Sequence: Synthetic oligonucleotide
  Antisense strand to SEQ ID NO: 1211604
uuggagaagacacuauuca

SEQ ID NO: 1211606 - RNA, 19 nt, Artificial Sequence
  Description of Artificial Sequence: Synthetic oligonucleotide
  Sense strand starting at position 2981 of SEQ ID NO: 917137
acgcuagaauggcuauaau

SEQ ID NO: 1211607 - RNA, 19 nt, Artificial Sequence
  Description of Artificial Sequence: Synthetic oligonucleotide
  Antisense strand to SEQ ID NO: 1211606
auuauagccauucuagcgu

SEQ ID NO: 1211608 - RNA, 19 nt, Artificial Sequence
  Description of Artificial Sequence: Synthetic oligonucleotide
  Sense strand starting at position 3139 of SEQ ID NO: 917137
agguauauauccgugacag

SEQ ID NO: 1211609 - RNA, 19 nt, Artificial Sequence
  Description of Artificial Sequence: Synthetic oligonucleotide
  Antisense strand to SEQ ID NO: 1211608
cugucacggauauauaccu

SEQ ID NO: 1211610 - RNA, 19 nt, Artificial Sequence
  Description of Artificial Sequence: Synthetic oligonucleotide
  Sense strand starting at position 3140 of SEQ ID NO: 917137
gguauauauccgugacaga

SEQ ID NO: 1211611 - RNA, 19 nt, Artificial Sequence
  Description of Artificial Sequence: Synthetic oligonucleotide
  Antisense strand to SEQ ID NO: 1211610
ucugucacggauauauacc

SEQ ID NO: 1211612 - RNA, 19 nt, Artificial Sequence
  Description of Artificial Sequence: Synthetic oligonucleotide
  Sense strand starting at position 3141 of SEQ ID NO: 917137
guauauauccgugacagau

SEQ ID NO: 1211613 - RNA, 19 nt, Artificial Sequence
  Description of Artificial Sequence: Synthetic oligonucleotide
  Antisense strand to SEQ ID NO: 1211612
aucugucacggauauauac

SEQ ID NO: 1211614 - RNA, 19 nt, Artificial Sequence
  Description of Artificial Sequence: Synthetic oligonucleotide
  Sense strand starting at position 3143 of SEQ ID NO: 917137
auauauccgugacagauga

SEQ ID NO: 1211615 - RNA, 19 nt, Artificial Sequence
  Description of Artificial Sequence: Synthetic oligonucleotide
  Antisense strand to SEQ ID NO: 1211614
ucaucugucacggauauau

SEQ ID NO: 1211616 - RNA, 19 nt, Artificial Sequence
  Description of Artificial Sequence: Synthetic oligonucleotide
  Sense strand starting at position 3366 of SEQ ID NO: 917137
agaagaucgucacaaagga

SEQ ID NO: 1211617 - RNA, 19 nt, Artificial Sequence
  Description of Artificial Sequence: Synthetic oligonucleotide
  Antisense strand to SEQ ID NO: 1211616
uccuuugugacgaucuucu

SEQ ID NO: 1211618 - RNA, 19 nt, Artificial Sequence
  Description of Artificial Sequence: Synthetic oligonucleotide
  Sense strand starting at position 3381 of SEQ ID NO: 917137
aggaccagauaguguauua

SEQ ID NO: 1211619 - RNA, 19 nt, Artificial Sequence
  Description of Artificial Sequence: Synthetic oligonucleotide
  Antisense strand to SEQ ID NO: 1211618
uaauacacuaucugguccu

SEQ ID NO: 1211620 - RNA, 19 nt, Artificial Sequence
  Description of Artificial Sequence: Synthetic oligonucleotide
  Sense strand starting at position 3519 of SEQ ID NO: 917137
ucuauaaaugauuguggca

SEQ ID NO: 1211621 - RNA, 19 nt, Artificial Sequence
  Description of Artificial Sequence: Synthetic oligonucleotide
  Antisense strand to SEQ ID NO: 1211620
ugccacaaucauuuauaga

SEQ ID NO: 1211622 - RNA, 19 nt, Artificial Sequence
  Description of Artificial Sequence: Synthetic oligonucleotide
  Sense strand starting at position 3521 of SEQ ID NO: 917137
uauaaaugauuguggcaau

SEQ ID NO: 1211623 - RNA, 19 nt, Artificial Sequence
  Description of Artificial Sequence: Synthetic oligonucleotide
  Antisense strand to SEQ ID NO: 1211622
auugccacaaucauuuaua

SEQ ID NO: 1211624 - RNA, 19 nt, Artificial Sequence
  Description of Artificial Sequence: Synthetic oligonucleotide
  Sense strand starting at position 3524 of SEQ ID NO: 917137
aaaugauuguggcaaugaa

SEQ ID NO: 1211625 - RNA, 19 nt, Artificial Sequence
  Description of Artificial Sequence: Synthetic oligonucleotide
  Antisense strand to SEQ ID NO: 1211624
uucauugccacaaucauuu

SEQ ID NO: 1211626 - RNA, 19 nt, Artificial Sequence
  Description of Artificial Sequence: Synthetic oligonucleotide
  Sense strand starting at position 3568 of SEQ ID NO: 917137
gccaaugaauugcauaacu

SEQ ID NO: 1211627 - RNA, 19 nt, Artificial Sequence
  Description of Artificial Sequence: Synthetic oligonucleotide
  Antisense strand to SEQ ID NO: 1211626
aguuaugcaauucauuggc

SEQ ID NO: 1211628 - RNA, 19 nt, Artificial Sequence
  Description of Artificial Sequence: Synthetic oligonucleotide
  Sense strand starting at position 3578 of SEQ ID NO: 917137
ugcauaacuuaauggguaa

SEQ ID NO: 1211629 - RNA, 19 nt, Artificial Sequence
  Description of Artificial Sequence: Synthetic oligonucleotide
  Antisense strand to SEQ ID NO: 1211628
uuacccauuaaguuaugca

SEQ ID NO: 1211630 - RNA, 19 nt, Artificial Sequence
  Description of Artificial Sequence: Synthetic oligonucleotide
  Sense strand starting at position 3835 of SEQ ID NO: 917137
ugauuccuuuagggaagaa

SEQ ID NO: 1211631 - RNA, 19 nt, Artificial Sequence
  Description of Artificial Sequence: Synthetic oligonucleotide
  Antisense strand to SEQ ID NO: 1211630
uucuucccuaaaggaauca

SEQ ID NO: 1211632 - RNA, 19 nt, Artificial Sequence
  Description of Artificial Sequence: Synthetic oligonucleotide
  Sense strand starting at position 3909 of SEQ ID NO: 917137
agaggaaguccuuggugaa

SEQ ID NO: 1211633 - RNA, 19 nt, Artificial Sequence
  Description of Artificial Sequence: Synthetic oligonucleotide
  Antisense strand to SEQ ID NO: 1211632
uucaccaaggacuuccucu

SEQ ID NO: 1211634 - RNA, 19 nt, Artificial Sequence
  Description of Artificial Sequence: Synthetic oligonucleotide
  Sense strand starting at position 3912 of SEQ ID NO: 917137
ggaaguccuuggugaauug

SEQ ID NO: 1211635 - RNA, 19 nt, Artificial Sequence
  Description of Artificial Sequence: Synthetic oligonucleotide
  Antisense strand to SEQ ID NO: 1211634
caauucaccaaggacuucc

SEQ ID NO: 1211636 - RNA, 19 nt, Artificial Sequence
  Description of Artificial Sequence: Synthetic oligonucleotide
  Sense strand starting at position 3913 of SEQ ID NO: 917138
gaaguccuuggugaauuga

SEQ ID NO: 1211637 - RNA, 19 nt, Artificial Sequence
  Description of Artificial Sequence: Synthetic oligonucleotide
  Antisense strand to SEQ ID NO: 1211636
ucaauucaccaaggacuuc

SEQ ID NO: 1211638 - RNA, 19 nt, Artificial Sequence
  Description of Artificial Sequence: Synthetic oligonucleotide
  Sense strand starting at position 42 of SEQ ID NO: 917138
ugauauuacucaucuaguu

SEQ ID NO: 1211639 - RNA, 19 nt, Artificial Sequence
  Description of Artificial Sequence: Synthetic oligonucleotide
  Antisense strand to SEQ ID NO: 1211638
aacuagaugaguaauauca

SEQ ID NO: 1211640 - RNA, 19 nt, Artificial Sequence
  Description of Artificial Sequence: Synthetic oligonucleotide
  Sense strand starting at position 54 of SEQ ID NO: 917138
ucuaguucuguuuaacaca

SEQ ID NO: 1211641 - RNA, 19 nt, Artificial Sequence
  Description of Artificial Sequence: Synthetic oligonucleotide
  Antisense strand to SEQ ID NO: 1211640
uguguuaaacagaacuaga

SEQ ID NO: 1211642 - RNA, 19 nt, Artificial Sequence
  Description of Artificial Sequence: Synthetic oligonucleotide
  Sense strand starting at position 130 of SEQ ID NO: 917138
aguuucaaaugguugggaa

SEQ ID NO: 1211643 - RNA, 19 nt, Artificial Sequence
  Description of Artificial Sequence: Synthetic oligonucleotide
  Antisense strand to SEQ ID NO: 1211642
uucccaaccauuugaaacu

SEQ ID NO: 1211644 - RNA, 19 nt, Artificial Sequence
  Description of Artificial Sequence: Synthetic oligonucleotide
  Sense strand starting at position 131 of SEQ ID NO: 917138
guuucaaaugguugggaaa

SEQ ID NO: 1211645 - RNA, 19 nt, Artificial Sequence
  Description of Artificial Sequence: Synthetic oligonucleotide
  Antisense strand to SEQ ID NO: 1211644
uuucccaaccauuugaaac

SEQ ID NO: 1211646 - RNA, 19 nt, Artificial Sequence
  Description of Artificial Sequence: Synthetic oligonucleotide
  Sense strand starting at position 215 of SEQ ID NO: 917138
gcuguauuggaacagagua

SEQ ID NO: 1211647 - RNA, 19 nt, Artificial Sequence
  Description of Artificial Sequence: Synthetic oligonucleotide
  Antisense strand to SEQ ID NO: 1211646
uacucuguuccaauacagc

SEQ ID NO: 1211648 - RNA, 19 nt, Artificial Sequence
  Description of Artificial Sequence: Synthetic oligonucleotide
  Sense strand starting at position 223 of SEQ ID NO: 917138
ggaacagaguaacauuuau

SEQ ID NO: 1211649 - RNA, 19 nt, Artificial Sequence
  Description of Artificial Sequence: Synthetic oligonucleotide
  Antisense strand to SEQ ID NO: 1211648
auaaauguuacucuguucc

SEQ ID NO: 1211650 - RNA, 19 nt, Artificial Sequence
  Description of Artificial Sequence: Synthetic oligonucleotide
  Sense strand starting at position 280 of SEQ ID NO: 917138
gacagaagugaguaguugu

SEQ ID NO: 1211651 - RNA, 19 nt, Artificial Sequence
  Description of Artificial Sequence: Synthetic oligonucleotide
  Antisense strand to SEQ ID NO: 1211650
acaacuacucacuucuguc

SEQ ID NO: 1211652 - RNA, 19 nt, Artificial Sequence
  Description of Artificial Sequence: Synthetic oligonucleotide
  Sense strand starting at position 307 of SEQ ID NO: 917138
ccaaaugaccuguaaagcu

SEQ ID NO: 1211653 - RNA, 19 nt, Artificial Sequence
  Description of Artificial Sequence: Synthetic oligonucleotide
  Antisense strand to SEQ ID NO: 1211652
agcuuuacaggucauuugg

SEQ ID NO: 1211654 - RNA, 19 nt, Artificial Sequence
  Description of Artificial Sequence: Synthetic oligonucleotide
  Sense strand starting at position 353 of SEQ ID NO: 917138
gaaaguuugugacccauac

SEQ ID NO: 1211655 - RNA, 19 nt, Artificial Sequence
  Description of Artificial Sequence: Synthetic oligonucleotide
  Antisense strand to SEQ ID NO: 1211654
guaugggucacaaacuuuc

SEQ ID NO: 1211656 - RNA, 19 nt, Artificial Sequence
  Description of Artificial Sequence: Synthetic oligonucleotide
  Sense strand starting at position 362 of SEQ ID NO: 917138
ugacccauacaucggagua

SEQ ID NO: 1211657 - RNA, 19 nt, Artificial Sequence
  Description of Artificial Sequence: Synthetic oligonucleotide
  Antisense strand to SEQ ID NO: 1211656
uacuccgauguauggguca

SEQ ID NO: 1211658 - RNA, 19 nt, Artificial Sequence
  Description of Artificial Sequence: Synthetic oligonucleotide
  Sense strand starting at position 377 of SEQ ID NO: 917138
aguauaaccuccuuaagga

SEQ ID NO: 1211659 - RNA, 19 nt, Artificial Sequence
  Description of Artificial Sequence: Synthetic oligonucleotide
  Antisense strand to SEQ ID NO: 1211658
uccuuaaggagguuauacu

SEQ ID NO: 1211660 - RNA, 19 nt, Artificial Sequence
  Description of Artificial Sequence: Synthetic oligonucleotide
  Sense strand starting at position 493 of SEQ ID NO: 917138
agaacagaauauuagauga

SEQ ID NO: 1211661 - RNA, 19 nt, Artificial Sequence
  Description of Artificial Sequence: Synthetic oligonucleotide
  Antisense strand to SEQ ID NO: 1211660
ucaucuaauauucuguucu

SEQ ID NO: 1211662 - RNA, 19 nt, Artificial Sequence
  Description of Artificial Sequence: Synthetic oligonucleotide
  Sense strand starting at position 590 of SEQ ID NO: 917138
acguauguucuugaacuua

SEQ ID NO: 1211663 - RNA, 19 nt, Artificial Sequence
  Description of Artificial Sequence: Synthetic oligonucleotide
  Antisense strand to SEQ ID NO: 1211662
uaaguucaagaacauacgu

SEQ ID NO: 1211664 - RNA, 19 nt, Artificial Sequence
  Description of Artificial Sequence: Synthetic oligonucleotide
  Sense strand starting at position 1047 of SEQ ID NO: 917138
aaauguacucgacaaaugu

SEQ ID NO: 1211665 - RNA, 19 nt, Artificial Sequence
  Description of Artificial Sequence: Synthetic oligonucleotide
  Antisense strand to SEQ ID NO: 1211664
acauuugucgaguacauuu

SEQ ID NO: 1211666 - RNA, 19 nt, Artificial Sequence
  Description of Artificial Sequence: Synthetic oligonucleotide
  Sense strand starting at position 1145 of SEQ ID NO: 917138
ucaacugauccucgaaaca

SEQ ID NO: 1211667 - RNA, 19 nt, Artificial Sequence
  Description of Artificial Sequence: Synthetic oligonucleotide
  Antisense strand to SEQ ID NO: 1211666
uguuucgaggaucaguuga

SEQ ID NO: 1211668 - RNA, 19 nt, Artificial Sequence
  Description of Artificial Sequence: Synthetic oligonucleotide
  Sense strand starting at position 1165 of SEQ ID NO: 917138
ccuugaaagcuauagcagu

SEQ ID NO: 1211669 - RNA, 19 nt, Artificial Sequence
  Description of Artificial Sequence: Synthetic oligonucleotide
  Antisense strand to SEQ ID NO: 1211668
acugcuauagcuuucaagg

SEQ ID NO: 1211670 - RNA, 19 nt, Artificial Sequence
  Description of Artificial Sequence: Synthetic oligonucleotide
  Sense strand starting at position 1178 of SEQ ID NO: 917138
agcaguaacuuacuaguga

SEQ ID NO: 1211671 - RNA, 19 nt, Artificial Sequence
  Description of Artificial Sequence: Synthetic oligonucleotide
  Antisense strand to SEQ ID NO: 1211670
ucacuaguaaguuacugcu

SEQ ID NO: 1211672 - RNA, 19 nt, Artificial Sequence
  Description of Artificial Sequence: Synthetic oligonucleotide
  Sense strand starting at position 1223 of SEQ ID NO: 917138
agagaagugaaguggcuua

SEQ ID NO: 1211673 - RNA, 19 nt, Artificial Sequence
  Description of Artificial Sequence: Synthetic oligonucleotide
  Antisense strand to SEQ ID NO: 1211672
uaagccacuucacuucucu

SEQ ID NO: 1211674 - RNA, 19 nt, Artificial Sequence
  Description of Artificial Sequence: Synthetic oligonucleotide
  Sense strand starting at position 1269 of SEQ ID NO: 917138
cagaucugccucugaggaa

SEQ ID NO: 1211675 - RNA, 19 nt, Artificial Sequence
  Description of Artificial Sequence: Synthetic oligonucleotide
  Antisense strand to SEQ ID NO: 1211674
uuccucagaggcagaucug

SEQ ID NO: 1211676 - RNA, 19 nt, Artificial Sequence
  Description of Artificial Sequence: Synthetic oligonucleotide
  Sense strand starting at position 1377 of SEQ ID NO: 917138
cuaugaacauucuucggau

SEQ ID NO: 1211677 - RNA, 19 nt, Artificial Sequence
  Description of Artificial Sequence: Synthetic oligonucleotide
  Antisense strand to SEQ ID NO: 1211676
auccgaagaauguucauag

SEQ ID NO: 1211678 - RNA, 19 nt, Artificial Sequence
  Description of Artificial Sequence: Synthetic oligonucleotide
  Sense strand starting at position 1383 of SEQ ID NO: 917138
acauucuucggauacccua

SEQ ID NO: 1211679 - RNA, 19 nt, Artificial Sequence
  Description of Artificial Sequence: Synthetic oligonucleotide
  Antisense strand to SEQ ID NO: 1211678
uaggguauccgaagaaugu

SEQ ID NO: 1211680 - RNA, 19 nt, Artificial Sequence
  Description of Artificial Sequence: Synthetic oligonucleotide
  Sense strand starting at position 1391 of SEQ ID NO: 917138
cggauacccuauccaacua

SEQ ID NO: 1211681 - RNA, 19 nt, Artificial Sequence
  Description of Artificial Sequence: Synthetic oligonucleotide
  Antisense strand to SEQ ID NO: 1211680
uaguuggauaggguauccg

SEQ ID NO: 1211682 - RNA, 19 nt, Artificial Sequence
  Description of Artificial Sequence: Synthetic oligonucleotide
  Sense strand starting at position 1480 of SEQ ID NO: 917138
gaguccuagccagagaagu

SEQ ID NO: 1211683 - RNA, 19 nt, Artificial Sequence
  Description of Artificial Sequence: Synthetic oligonucleotide
  Antisense strand to SEQ ID NO: 1211682
acuucucuggcuaggacuc

SEQ ID NO: 1211684 - RNA, 19 nt, Artificial Sequence
  Description of Artificial Sequence: Synthetic oligonucleotide
  Sense strand starting at position 1482 of SEQ ID NO: 917138
guccuagccagagaaguau

SEQ ID NO: 1211685 - RNA, 19 nt, Artificial Sequence
  Description of Artificial Sequence: Synthetic oligonucleotide
  Antisense strand to SEQ ID NO: 1211684
auacuucucuggcuaggac

SEQ ID NO: 1211686 - RNA, 19 nt, Artificial Sequence
  Description of Artificial Sequence: Synthetic oligonucleotide
  Sense strand starting at position 1488 of SEQ ID NO: 917138
gccagagaaguaugauuga

SEQ ID NO: 1211687 - RNA, 19 nt, Artificial Sequence
  Description of Artificial Sequence: Synthetic oligonucleotide
  Antisense strand to SEQ ID NO: 1211686
ucaaucauacuucucuggc

SEQ ID NO: 1211688 - RNA, 19 nt, Artificial Sequence
  Description of Artificial Sequence: Synthetic oligonucleotide
  Sense strand starting at position 2294 of SEQ ID NO: 917138
gccuuagccauggcgagua

SEQ ID NO: 1211689 - RNA, 19 nt, Artificial Sequence
  Description of Artificial Sequence: Synthetic oligonucleotide
  Antisense strand to SEQ ID NO: 1211688
uacucgccauggcuaaggc

SEQ ID NO: 1211690 - RNA, 19 nt, Artificial Sequence
  Description of Artificial Sequence: Synthetic oligonucleotide
  Sense strand starting at position 2488 of SEQ ID NO: 917138
ggcaucuuccaagaucuuu

SEQ ID NO: 1211691 - RNA, 19 nt, Artificial Sequence
  Description of Artificial Sequence: Synthetic oligonucleotide
  Antisense strand to SEQ ID NO: 1211690
aaagaucuuggaagaugcc

SEQ ID NO: 1211692 - RNA, 19 nt, Artificial Sequence
  Description of Artificial Sequence: Synthetic oligonucleotide
  Sense strand starting at position 2496 of SEQ ID NO: 917138
ccaagaucuuugguaggga

SEQ ID NO: 1211693 - RNA, 19 nt, Artificial Sequence
  Description of Artificial Sequence: Synthetic oligonucleotide
  Antisense strand to SEQ ID NO: 1211692
ucccuaccaaagaucuugg

SEQ ID NO: 1211694 - RNA, 19 nt, Artificial Sequence
  Description of Artificial Sequence: Synthetic oligonucleotide
  Sense strand starting at position 2539 of SEQ ID NO: 917138
gcccuaucccuugagaguu

SEQ ID NO: 1211695 - RNA, 19 nt, Artificial Sequence
  Description of Artificial Sequence: Synthetic oligonucleotide
  Antisense strand to SEQ ID NO: 1211694
aacucucaagggauagggc

SEQ ID NO: 1211696 - RNA, 19 nt, Artificial Sequence
  Description of Artificial Sequence: Synthetic oligonucleotide
  Sense strand starting at position 2686 of SEQ ID NO: 917138
gcccgaucuccugcgguga

SEQ ID NO: 1211697 - RNA, 19 nt, Artificial Sequence
  Description of Artificial Sequence: Synthetic oligonucleotide
  Antisense strand to SEQ ID NO: 1211696
ucaccgcaggagaucgggc

SEQ ID NO: 1211698 - RNA, 19 nt, Artificial Sequence
  Description of Artificial Sequence: Synthetic oligonucleotide
  Sense strand starting at position 2877 of SEQ ID NO: 917138
uuaauauccggcgaaugaa

SEQ ID NO: 1211699 - RNA, 19 nt, Artificial Sequence
  Description of Artificial Sequence: Synthetic oligonucleotide
  Antisense strand to SEQ ID NO: 1211698
uucauucgccggauauuaa

SEQ ID NO: 1211700 - RNA, 19 nt, Artificial Sequence
  Description of Artificial Sequence: Synthetic oligonucleotide
  Sense strand starting at position 2909 of SEQ ID NO: 917138
ggucauaauuauccuaguu

SEQ ID NO: 1211701 - RNA, 19 nt, Artificial Sequence
  Description of Artificial Sequence: Synthetic oligonucleotide
  Antisense strand to SEQ ID NO: 1211700
aacuaggauaauuaugacc

SEQ ID NO: 1211702 - RNA, 19 nt, Artificial Sequence
  Description of Artificial Sequence: Synthetic oligonucleotide
  Sense strand starting at position 2998 of SEQ ID NO: 917138
gugugugaagccuacacaa

SEQ ID NO: 1211703 - RNA, 19 nt, Artificial Sequence
  Description of Artificial Sequence: Synthetic oligonucleotide
  Antisense strand to SEQ ID NO: 1211702
uuguguaggcuucacacac

SEQ ID NO: 1211704 - RNA, 19 nt, Artificial Sequence
  Description of Artificial Sequence: Synthetic oligonucleotide
  Sense strand starting at position 3000 of SEQ ID NO: 917138
gugugaagccuacacaagu

SEQ ID NO: 1211705 - RNA, 19 nt, Artificial Sequence
  Description of Artificial Sequence: Synthetic oligonucleotide
  Antisense strand to SEQ ID NO: 1211704
acuuguguaggcuucacac

SEQ ID NO: 1211706 - RNA, 19 nt, Artificial Sequence
  Description of Artificial Sequence: Synthetic oligonucleotide
  Sense strand starting at position 3178 of SEQ ID NO: 917138
accuccaggaguugugaau

SEQ ID NO: 1211707 - RNA, 19 nt, Artificial Sequence
  Description of Artificial Sequence: Synthetic oligonucleotide
  Antisense strand to SEQ ID NO: 1211706
auucacaacuccuggaggu

SEQ ID NO: 1211708 - RNA, 19 nt, Artificial Sequence
  Description of Artificial Sequence: Synthetic oligonucleotide
  Sense strand starting at position 3323 of SEQ ID NO: 917138
gaguguuugaucgauguug

SEQ ID NO: 1211709 - RNA, 19 nt, Artificial Sequence
  Description of Artificial Sequence: Synthetic oligonucleotide
  Antisense strand to SEQ ID NO: 1211708
caacaucgaucaaacacuc

SEQ ID NO: 1211710 - RNA, 19 nt, Artificial Sequence
  Description of Artificial Sequence: Synthetic oligonucleotide
  Sense strand starting at position 3324 of SEQ ID NO: 917138
aguguuugaucgauguugu

SEQ ID NO: 1211711 - RNA, 19 nt, Artificial Sequence
  Description of Artificial Sequence: Synthetic oligonucleotide
  Antisense strand to SEQ ID NO: 1211710
acaacaucgaucaaacacu

SEQ ID NO: 1211712 - RNA, 19 nt, Artificial Sequence
  Description of Artificial Sequence: Synthetic oligonucleotide
  Sense strand starting at position 3384 of SEQ ID NO: 917138
ucagcuuccgucucuguua

SEQ ID NO: 1211713 - RNA, 19 nt, Artificial Sequence
  Description of Artificial Sequence: Synthetic oligonucleotide
  Antisense strand to SEQ ID NO: 1211712
uaacagagacggaagcuga

SEQ ID NO: 1211714 - RNA, 19 nt, Artificial Sequence
  Description of Artificial Sequence: Synthetic oligonucleotide
  Sense strand starting at position 3894 of SEQ ID NO: 917138
cugagaauguuacucuuaa

SEQ ID NO: 1211715 - RNA, 19 nt, Artificial Sequence
  Description of Artificial Sequence: Synthetic oligonucleotide
  Antisense strand to SEQ ID NO: 1211714
uuaagaguaacauucucag

SEQ ID NO: 1211716 - RNA, 19 nt, Artificial Sequence
  Description of Artificial Sequence: Synthetic oligonucleotide
  Sense strand starting at position 3895 of SEQ ID NO: 917139
ugagaauguuacucuuaau

SEQ ID NO: 1211717 - RNA, 19 nt, Artificial Sequence
  Description of Artificial Sequence: Synthetic oligonucleotide
  Antisense strand to SEQ ID NO: 1211716
auuaagaguaacauucuca

SEQ ID NO: 1211718 - RNA, 19 nt, Artificial Sequence
  Description of Artificial Sequence: Synthetic oligonucleotide
  Sense strand starting at position 60 of SEQ ID NO: 917139
gcuguauuggaacagagua

SEQ ID NO: 1211719 - RNA, 19 nt, Artificial Sequence
  Description of Artificial Sequence: Synthetic oligonucleotide
  Antisense strand to SEQ ID NO: 1211718
uacucuguuccaauacagc

SEQ ID NO: 1211720 - RNA, 19 nt, Artificial Sequence
  Description of Artificial Sequence: Synthetic oligonucleotide
  Sense strand starting at position 68 of SEQ ID NO: 917139
ggaacagaguaacauuuau

SEQ ID NO: 1211721 - RNA, 19 nt, Artificial Sequence
  Description of Artificial Sequence: Synthetic oligonucleotide
  Antisense strand to SEQ ID NO: 1211720
auaaauguuacucuguucc

SEQ ID NO: 1211722 - RNA, 19 nt, Artificial Sequence
  Description of Artificial Sequence: Synthetic oligonucleotide
  Sense strand starting at position 125 of SEQ ID NO: 917139
gacagaagugaguaguugu

SEQ ID NO: 1211723 - RNA, 19 nt, Artificial Sequence
  Description of Artificial Sequence: Synthetic oligonucleotide
  Antisense strand to SEQ ID NO: 1211722
acaacuacucacuucuguc

SEQ ID NO: 1211724 - RNA, 19 nt, Artificial Sequence
  Description of Artificial Sequence: Synthetic oligonucleotide
  Sense strand starting at position 152 of SEQ ID NO: 917139
ccaaaugaccuguaaagcu

SEQ ID NO: 1211725 - RNA, 19 nt, Artificial Sequence
  Description of Artificial Sequence: Synthetic oligonucleotide
  Antisense strand to SEQ ID NO: 1211724
agcuuuacaggucauuugg

SEQ ID NO: 1211726 - RNA, 19 nt, Artificial Sequence
  Description of Artificial Sequence: Synthetic oligonucleotide
  Sense strand starting at position 198 of SEQ ID NO: 917139
gaaaguuugugacccauac

SEQ ID NO: 1211727 - RNA, 19 nt, Artificial Sequence
  Description of Artificial Sequence: Synthetic oligonucleotide
  Antisense strand to SEQ ID NO: 1211726
guaugggucacaaacuuuc

SEQ ID NO: 1211728 - RNA, 19 nt, Artificial Sequence
  Description of Artificial Sequence: Synthetic oligonucleotide
  Sense strand starting at position 207 of SEQ ID NO: 917139
ugacccauacaucggagua

SEQ ID NO: 1211729 - RNA, 19 nt, Artificial Sequence
  Description of Artificial Sequence: Synthetic oligonucleotide
  Antisense strand to SEQ ID NO: 1211728
uacuccgauguauggguca

SEQ ID NO: 1211730 - RNA, 19 nt, Artificial Sequence
  Description of Artificial Sequence: Synthetic oligonucleotide
  Sense strand starting at position 222 of SEQ ID NO: 917139
aguauaaccuccuuaagga

SEQ ID NO: 1211731 - RNA, 19 nt, Artificial Sequence
  Description of Artificial Sequence: Synthetic oligonucleotide
  Antisense strand to SEQ ID NO: 1211730
uccuuaaggagguuauacu

SEQ ID NO: 1211732 - RNA, 19 nt, Artificial Sequence
  Description of Artificial Sequence: Synthetic oligonucleotide
  Sense strand starting at position 338 of SEQ ID NO: 917139
agaacagaauauuagauga

SEQ ID NO: 1211733 - RNA, 19 nt, Artificial Sequence
  Description of Artificial Sequence: Synthetic oligonucleotide
  Antisense strand to SEQ ID NO: 1211732
ucaucuaauauucuguucu

SEQ ID NO: 1211734 - RNA, 19 nt, Artificial Sequence
  Description of Artificial Sequence: Synthetic oligonucleotide
  Sense strand starting at position 435 of SEQ ID NO: 917139
acguauguucuugaacuua

SEQ ID NO: 1211735 - RNA, 19 nt, Artificial Sequence
  Description of Artificial Sequence: Synthetic oligonucleotide
  Antisense strand to SEQ ID NO: 1211734
uaaguucaagaacauacgu

SEQ ID NO: 1211736 - RNA, 19 nt, Artificial Sequence
  Description of Artificial Sequence: Synthetic oligonucleotide
  Sense strand starting at position 892 of SEQ ID NO: 917139
aaauguacucgacaaaugu

SEQ ID NO: 1211737 - RNA, 19 nt, Artificial Sequence
  Description of Artificial Sequence: Synthetic oligonucleotide
  Antisense strand to SEQ ID NO: 1211736
acauuugucgaguacauuu

SEQ ID NO: 1211738 - RNA, 19 nt, Artificial Sequence
  Description of Artificial Sequence: Synthetic oligonucleotide
  Sense strand starting at position 990 of SEQ ID NO: 917139
ucaacugauccucgaaaca

SEQ ID NO: 1211739 - RNA, 19 nt, Artificial Sequence
  Description of Artificial Sequence: Synthetic oligonucleotide
  Antisense strand to SEQ ID NO: 1211738
uguuucgaggaucaguuga

SEQ ID NO: 1211740 - RNA, 19 nt, Artificial Sequence
  Description of Artificial Sequence: Synthetic oligonucleotide
  Sense strand starting at position 1010 of SEQ ID NO: 917139
ccuugaaagcuauagcagu

SEQ ID NO: 1211741 - RNA, 19 nt, Artificial Sequence
  Description of Artificial Sequence: Synthetic oligonucleotide
  Antisense strand to SEQ ID NO: 1211740
acugcuauagcuuucaagg

SEQ ID NO: 1211742 - RNA, 19 nt, Artificial Sequence
  Description of Artificial Sequence: Synthetic oligonucleotide
  Sense strand starting at position 1023 of SEQ ID NO: 917139
agcaguaacuuacuaguga

SEQ ID NO: 1211743 - RNA, 19 nt, Artificial Sequence
  Description of Artificial Sequence: Synthetic oligonucleotide
  Antisense strand to SEQ ID NO: 1211742
ucacuaguaaguuacugcu

SEQ ID NO: 1211744 - RNA, 19 nt, Artificial Sequence
  Description of Artificial Sequence: Synthetic oligonucleotide
  Sense strand starting at position 1068 of SEQ ID NO: 917139
agagaagugaaguggcuua

SEQ ID NO: 1211745 - RNA, 19 nt, Artificial Sequence
  Description of Artificial Sequence: Synthetic oligonucleotide
  Antisense strand to SEQ ID NO: 1211744
uaagccacuucacuucucu

SEQ ID NO: 1211746 - RNA, 19 nt, Artificial Sequence
  Description of Artificial Sequence: Synthetic oligonucleotide
  Sense strand starting at position 1114 of SEQ ID NO: 917139
cagaucugccucugaggaa

SEQ ID NO: 1211747 - RNA, 19 nt, Artificial Sequence
  Description of Artificial Sequence: Synthetic oligonucleotide
  Antisense strand to SEQ ID NO: 1211746
uuccucagaggcagaucug

SEQ ID NO: 1211748 - RNA, 19 nt, Artificial Sequence
  Description of Artificial Sequence: Synthetic oligonucleotide
  Sense strand starting at position 1222 of SEQ ID NO: 917139
cuaugaacauucuucggau

SEQ ID NO: 1211749 - RNA, 19 nt, Artificial Sequence
  Description of Artificial Sequence: Synthetic oligonucleotide
  Antisense strand to SEQ ID NO: 1211748
auccgaagaauguucauag

SEQ ID NO: 1211750 - RNA, 19 nt, Artificial Sequence
  Description of Artificial Sequence: Synthetic oligonucleotide
  Sense strand starting at position 1228 of SEQ ID NO: 917139
acauucuucggauacccua

SEQ ID NO: 1211751 - RNA, 19 nt, Artificial Sequence
  Description of Artificial Sequence: Synthetic oligonucleotide
  Antisense strand to SEQ ID NO: 1211750
uaggguauccgaagaaugu

SEQ ID NO: 1211752 - RNA, 19 nt, Artificial Sequence
  Description of Artificial Sequence: Synthetic oligonucleotide
  Sense strand starting at position 1236 of SEQ ID NO: 917139
cggauacccuauccaacua

SEQ ID NO: 1211753 - RNA, 19 nt, Artificial Sequence
  Description of Artificial Sequence: Synthetic oligonucleotide
  Antisense strand to SEQ ID NO: 1211752
uaguuggauaggguauccg

SEQ ID NO: 1211754 - RNA, 19 nt, Artificial Sequence
  Description of Artificial Sequence: Synthetic oligonucleotide
  Sense strand starting at position 1325 of SEQ ID NO: 917139
gaguccuagccagagaagu

SEQ ID NO: 1211755 - RNA, 19 nt, Artificial Sequence
  Description of Artificial Sequence: Synthetic oligonucleotide
  Antisense strand to SEQ ID NO: 1211754
acuucucuggcuaggacuc

SEQ ID NO: 1211756 - RNA, 19 nt, Artificial Sequence
  Description of Artificial Sequence: Synthetic oligonucleotide
  Sense strand starting at position 1327 of SEQ ID NO: 917139
guccuagccagagaaguau

SEQ ID NO: 1211757 - RNA, 19 nt, Artificial Sequence
  Description of Artificial Sequence: Synthetic oligonucleotide
  Antisense strand to SEQ ID NO: 1211756
auacuucucuggcuaggac

SEQ ID NO: 1211758 - RNA, 19 nt, Artificial Sequence
  Description of Artificial Sequence: Synthetic oligonucleotide
  Sense strand starting at position 1333 of SEQ ID NO: 917139
gccagagaaguaugauuga

SEQ ID NO: 1211759 - RNA, 19 nt, Artificial Sequence
  Description of Artificial Sequence: Synthetic oligonucleotide
  Antisense strand to SEQ ID NO: 1211758
ucaaucauacuucucuggc

SEQ ID NO: 1211760 - RNA, 19 nt, Artificial Sequence
  Description of Artificial Sequence: Synthetic oligonucleotide
  Sense strand starting at position 2074 of SEQ ID NO: 917139
ugugauugccucggagaga

SEQ ID NO: 1211761 - RNA, 19 nt, Artificial Sequence
  Description of Artificial Sequence: Synthetic oligonucleotide
  Antisense strand to SEQ ID NO: 1211760
ucucuccgaggcaaucaca

SEQ ID NO: 1211762 - RNA, 19 nt, Artificial Sequence
  Description of Artificial Sequence: Synthetic oligonucleotide
  Sense strand starting at position 2139 of SEQ ID NO: 917139
gccuuagccauggcgagua

SEQ ID NO: 1211763 - RNA, 19 nt, Artificial Sequence
  Description of Artificial Sequence: Synthetic oligonucleotide
  Antisense strand to SEQ ID NO: 1211762
uacucgccauggcuaaggc

SEQ ID NO: 1211764 - RNA, 19 nt, Artificial Sequence
  Description of Artificial Sequence: Synthetic oligonucleotide
  Sense strand starting at position 2226 of SEQ ID NO: 917139
ggugaguuuccguugcgcu

SEQ ID NO: 1211765 - RNA, 19 nt, Artificial Sequence
  Description of Artificial Sequence: Synthetic oligonucleotide
  Antisense strand to SEQ ID NO: 1211764
agcgcaacggaaacucacc

SEQ ID NO: 1211766 - RNA, 19 nt, Artificial Sequence
  Description of Artificial Sequence: Synthetic oligonucleotide
  Sense strand starting at position 2333 of SEQ ID NO: 917139
ggcaucuuccaagaucuuu

SEQ ID NO: 1211767 - RNA, 19 nt, Artificial Sequence
  Description of Artificial Sequence: Synthetic oligonucleotide
  Antisense strand to SEQ ID NO: 1211766
aaagaucuuggaagaugcc

SEQ ID NO: 1211768 - RNA, 19 nt, Artificial Sequence
  Description of Artificial Sequence: Synthetic oligonucleotide
  Sense strand starting at position 2341 of SEQ ID NO: 917139
ccaagaucuuugguaggga

SEQ ID NO: 1211769 - RNA, 19 nt, Artificial Sequence
  Description of Artificial Sequence: Synthetic oligonucleotide
  Antisense strand to SEQ ID NO: 1211768
ucccuaccaaagaucuugg

SEQ ID NO: 1211770 - RNA, 19 nt, Artificial Sequence
  Description of Artificial Sequence: Synthetic oligonucleotide
  Sense strand starting at position 2384 of SEQ ID NO: 917139
gcccuaucccuugagaguu

SEQ ID NO: 1211771 - RNA, 19 nt, Artificial Sequence
  Description of Artificial Sequence: Synthetic oligonucleotide
  Antisense strand to SEQ ID NO: 1211770
aacucucaagggauagggc

SEQ ID NO: 1211772 - RNA, 19 nt, Artificial Sequence
  Description of Artificial Sequence: Synthetic oligonucleotide
  Sense strand starting at position 2531 of SEQ ID NO: 917139
gcccgaucuccugcgguga

SEQ ID NO: 1211773 - RNA, 19 nt, Artificial Sequence
  Description of Artificial Sequence: Synthetic oligonucleotide
  Antisense strand to SEQ ID NO: 1211772
ucaccgcaggagaucgggc

SEQ ID NO: 1211774 - RNA, 19 nt, Artificial Sequence
  Description of Artificial Sequence: Synthetic oligonucleotide
  Sense strand starting at position 2722 of SEQ ID NO: 917139
uuaauauccggcgaaugaa

SEQ ID NO: 1211775 - RNA, 19 nt, Artificial Sequence
  Description of Artificial Sequence: Synthetic oligonucleotide
  Antisense strand to SEQ ID NO: 1211774
uucauucgccggauauuaa

SEQ ID NO: 1211776 - RNA, 19 nt, Artificial Sequence
  Description of Artificial Sequence: Synthetic oligonucleotide
  Sense strand starting at position 2754 of SEQ ID NO: 917139
ggucauaauuauccuaguu

SEQ ID NO: 1211777 - RNA, 19 nt, Artificial Sequence
  Description of Artificial Sequence: Synthetic oligonucleotide
  Antisense strand to SEQ ID NO: 1211776
aacuaggauaauuaugacc

SEQ ID NO: 1211778 - RNA, 19 nt, Artificial Sequence
  Description of Artificial Sequence: Synthetic oligonucleotide
  Sense strand starting at position 2843 of SEQ ID NO: 917139
gugugugaagccuacacaa

SEQ ID NO: 1211779 - RNA, 19 nt, Artificial Sequence
  Description of Artificial Sequence: Synthetic oligonucleotide
  Antisense strand to SEQ ID NO: 1211778
uuguguaggcuucacacac

SEQ ID NO: 1211780 - RNA, 19 nt, Artificial Sequence
  Description of Artificial Sequence: Synthetic oligonucleotide
  Sense strand starting at position 2845 of SEQ ID NO: 917139
gugugaagccuacacaagu

SEQ ID NO: 1211781 - RNA, 19 nt, Artificial Sequence
  Description of Artificial Sequence: Synthetic oligonucleotide
  Antisense strand to SEQ ID NO: 1211780
acuuguguaggcuucacac

SEQ ID NO: 1211782 - RNA, 19 nt, Artificial Sequence
  Description of Artificial Sequence: Synthetic oligonucleotide
  Sense strand starting at position 3023 of SEQ ID NO: 917139
accuccaggaguugugaau

SEQ ID NO: 1211783 - RNA, 19 nt, Artificial Sequence
  Description of Artificial Sequence: Synthetic oligonucleotide
  Antisense strand to SEQ ID NO: 1211782
auucacaacuccuggaggu

SEQ ID NO: 1211784 - RNA, 19 nt, Artificial Sequence
  Description of Artificial Sequence: Synthetic oligonucleotide
  Sense strand starting at position 3168 of SEQ ID NO: 917139
gaguguuugaucgauguug

SEQ ID NO: 1211785 - RNA, 19 nt, Artificial Sequence
  Description of Artificial Sequence: Synthetic oligonucleotide
  Antisense strand to SEQ ID NO: 1211784
caacaucgaucaaacacuc

SEQ ID NO: 1211786 - RNA, 19 nt, Artificial Sequence
  Description of Artificial Sequence: Synthetic oligonucleotide
  Sense strand starting at position 3169 of SEQ ID NO: 917139
aguguuugaucgauguugu

SEQ ID NO: 1211787 - RNA, 19 nt, Artificial Sequence
  Description of Artificial Sequence: Synthetic oligonucleotide
  Antisense strand to SEQ ID NO: 1211786
acaacaucgaucaaacacu

SEQ ID NO: 1211788 - RNA, 19 nt, Artificial Sequence
  Description of Artificial Sequence: Synthetic oligonucleotide
  Sense strand starting at position 3229 of SEQ ID NO: 917139
ucagcuuccgucucuguua

SEQ ID NO: 1211789 - RNA, 19 nt, Artificial Sequence
  Description of Artificial Sequence: Synthetic oligonucleotide
  Antisense strand to SEQ ID NO: 1211788
uaacagagacggaagcuga

SEQ ID NO: 1211790 - RNA, 19 nt, Artificial Sequence
  Description of Artificial Sequence: Synthetic oligonucleotide
  Sense strand starting at position 3260 of SEQ ID NO: 917139
augaaauucucacugcugu

SEQ ID NO: 1211791 - RNA, 19 nt, Artificial Sequence
  Description of Artificial Sequence: Synthetic oligonucleotide
  Antisense strand to SEQ ID NO: 1211790
acagcagugagaauuucau

SEQ ID NO: 1211792 - RNA, 19 nt, Artificial Sequence
  Description of Artificial Sequence: Synthetic oligonucleotide
  Sense strand starting at position 3261 of SEQ ID NO: 917139
ugaaauucucacugcugua

SEQ ID NO: 1211793 - RNA, 19 nt, Artificial Sequence
  Description of Artificial Sequence: Synthetic oligonucleotide
  Antisense strand to SEQ ID NO: 1211792
uacagcagugagaauuuca

SEQ ID NO: 1211794 - RNA, 19 nt, Artificial Sequence
  Description of Artificial Sequence: Synthetic oligonucleotide
  Sense strand starting at position 3739 of SEQ ID NO: 917139
cugagaauguuacucuuaa

SEQ ID NO: 1211795 - RNA, 19 nt, Artificial Sequence
  Description of Artificial Sequence: Synthetic oligonucleotide
  Antisense strand to SEQ ID NO: 1211794
uuaagaguaacauucucag

SEQ ID NO: 1211796 - RNA, 19 nt, Artificial Sequence
  Description of Artificial Sequence: Synthetic oligonucleotide
  Sense strand starting at position 3740 of SEQ ID NO: 917139
ugagaauguuacucuuaau

SEQ ID NO: 1211797 - RNA, 19 nt, Artificial Sequence
  Description of Artificial Sequence: Synthetic oligonucleotide
  Antisense strand to SEQ ID NO: 1211796
auuaagaguaacauucuca

SEQ ID NO: 1211798 - RNA, 19 nt, Artificial Sequence
  Description of Artificial Sequence: Synthetic oligonucleotide
  Sense strand starting at position 3740 of SEQ ID NO: 917140
ugagaauguuacucuuaau

SEQ ID NO: 1211799 - RNA, 19 nt, Artificial Sequence
  Description of Artificial Sequence: Synthetic oligonucleotide
  Antisense strand to SEQ ID NO: 1211798
auuaagaguaacauucuca

SEQ ID NO: 1211800 - RNA, 19 nt, Artificial Sequence
  Description of Artificial Sequence: Synthetic oligonucleotide
  Sense strand starting at position 201 of SEQ ID NO: 917140
gauaauaugcaauggguua

SEQ ID NO: 1211801 - RNA, 19 nt, Artificial Sequence
  Description of Artificial Sequence: Synthetic oligonucleotide
  Antisense strand to SEQ ID NO: 1211800
uaacccauugcauauuauc

SEQ ID NO: 1211802 - RNA, 19 nt, Artificial Sequence
  Description of Artificial Sequence: Synthetic oligonucleotide
  Sense strand starting at position 588 of SEQ ID NO: 917140
cuaauaugguaagcuacau

SEQ ID NO: 1211803 - RNA, 19 nt, Artificial Sequence
  Description of Artificial Sequence: Synthetic oligonucleotide
  Antisense strand to SEQ ID NO: 1211802
auguagcuuaccauauuag

SEQ ID NO: 1211804 - RNA, 19 nt, Artificial Sequence
  Description of Artificial Sequence: Synthetic oligonucleotide
  Sense strand starting at position 673 of SEQ ID NO: 917140
uggacaacuucugccauaa

SEQ ID NO: 1211805 - RNA, 19 nt, Artificial Sequence
  Description of Artificial Sequence: Synthetic oligonucleotide
  Antisense strand to SEQ ID NO: 1211804
uuauggcagaaguugucca

SEQ ID NO: 1211806 - RNA, 19 nt, Artificial Sequence
  Description of Artificial Sequence: Synthetic oligonucleotide
  Sense strand starting at position 703 of SEQ ID NO: 917140
ugcuucugauuuguuagua

SEQ ID NO: 1211807 - RNA, 19 nt, Artificial Sequence
  Description of Artificial Sequence: Synthetic oligonucleotide
  Antisense strand to SEQ ID NO: 1211806
uacuaacaaaucagaagca

SEQ ID NO: 1211808 - RNA, 19 nt, Artificial Sequence
  Description of Artificial Sequence: Synthetic oligonucleotide
  Sense strand starting at position 704 of SEQ ID NO: 917140
gcuucugauuuguuaguaa

SEQ ID NO: 1211809 - RNA, 19 nt, Artificial Sequence
  Description of Artificial Sequence: Synthetic oligonucleotide
  Antisense strand to SEQ ID NO: 1211808
uuacuaacaaaucagaagc

SEQ ID NO: 1211810 - RNA, 19 nt, Artificial Sequence
  Description of Artificial Sequence: Synthetic oligonucleotide
  Sense strand starting at position 755 of SEQ ID NO: 917140
cucuuuauccacuagacgu

SEQ ID NO: 1211811 - RNA, 19 nt, Artificial Sequence
  Description of Artificial Sequence: Synthetic oligonucleotide
  Antisense strand to SEQ ID NO: 1211810
acgucuaguggauaaagag

SEQ ID NO: 1211812 - RNA, 19 nt, Artificial Sequence
  Description of Artificial Sequence: Synthetic oligonucleotide
  Sense strand starting at position 788 of SEQ ID NO: 917140
gugguuaaccugcaaacga

SEQ ID NO: 1211813 - RNA, 19 nt, Artificial Sequence
  Description of Artificial Sequence: Synthetic oligonucleotide
  Antisense strand to SEQ ID NO: 1211812
ucguuugcagguuaaccac

SEQ ID NO: 1211814 - RNA, 19 nt, Artificial Sequence
  Description of Artificial Sequence: Synthetic oligonucleotide
  Sense strand starting at position 795 of SEQ ID NO: 917140
accugcaaacgaugauuau

SEQ ID NO: 1211815 - RNA, 19 nt, Artificial Sequence
  Description of Artificial Sequence: Synthetic oligonucleotide
  Antisense strand to SEQ ID NO: 1211814
auaaucaucguuugcaggu

SEQ ID NO: 1211816 - RNA, 19 nt, Artificial Sequence
  Description of Artificial Sequence: Synthetic oligonucleotide
  Sense strand starting at position 1092 of SEQ ID NO: 917140
agggaugcauuccuuauua

SEQ ID NO: 1211817 - RNA, 19 nt, Artificial Sequence
  Description of Artificial Sequence: Synthetic oligonucleotide
  Antisense strand to SEQ ID NO: 1211816
uaauaaggaaugcaucccu

SEQ ID NO: 1211818 - RNA, 19 nt, Artificial Sequence
  Description of Artificial Sequence: Synthetic oligonucleotide
  Sense strand starting at position 1094 of SEQ ID NO: 917140
ggaugcauuccuuauuaug

SEQ ID NO: 1211819 - RNA, 19 nt, Artificial Sequence
  Description of Artificial Sequence: Synthetic oligonucleotide
  Antisense strand to SEQ ID NO: 1211818
cauaauaaggaaugcaucc

SEQ ID NO: 1211820 - RNA, 19 nt, Artificial Sequence
  Description of Artificial Sequence: Synthetic oligonucleotide
  Sense strand starting at position 1104 of SEQ ID NO: 917140
cuuauuaugugacugaggu

SEQ ID NO: 1211821 - RNA, 19 nt, Artificial Sequence
  Description of Artificial Sequence: Synthetic oligonucleotide
  Antisense strand to SEQ ID NO: 1211820
accucagucacauaauaag

SEQ ID NO: 1211822 - RNA, 19 nt, Artificial Sequence
  Description of Artificial Sequence: Synthetic oligonucleotide
  Sense strand starting at position 1105 of SEQ ID NO: 917140
uuauuaugugacugaggua

SEQ ID NO: 1211823 - RNA, 19 nt, Artificial Sequence
  Description of Artificial Sequence: Synthetic oligonucleotide
  Antisense strand to SEQ ID NO: 1211822
uaccucagucacauaauaa

SEQ ID NO: 1211824 - RNA, 19 nt, Artificial Sequence
  Description of Artificial Sequence: Synthetic oligonucleotide
  Sense strand starting at position 1185 of SEQ ID NO: 917140
aacagcuuacugugaggau

SEQ ID NO: 1211825 - RNA, 19 nt, Artificial Sequence
  Description of Artificial Sequence: Synthetic oligonucleotide
  Antisense strand to SEQ ID NO: 1211824
auccucacaguaagcuguu

SEQ ID NO: 1211826 - RNA, 19 nt, Artificial Sequence
  Description of Artificial Sequence: Synthetic oligonucleotide
  Sense strand starting at position 1379 of SEQ ID NO: 917140
gguaauucccaucagcaug

SEQ ID NO: 1211827 - RNA, 19 nt, Artificial Sequence
  Description of Artificial Sequence: Synthetic oligonucleotide
  Antisense strand to SEQ ID NO: 1211826
caugcugaugggaauuacc

SEQ ID NO: 1211828 - RNA, 19 nt, Artificial Sequence
  Description of Artificial Sequence: Synthetic oligonucleotide
  Sense strand starting at position 1545 of SEQ ID NO: 917140
gagggaaguuaagucuuga

SEQ ID NO: 1211829 - RNA, 19 nt, Artificial Sequence
  Description of Artificial Sequence: Synthetic oligonucleotide
  Antisense strand to SEQ ID NO: 1211828
ucaagacuuaacuucccuc

SEQ ID NO: 1211830 - RNA, 19 nt, Artificial Sequence
  Description of Artificial Sequence: Synthetic oligonucleotide
  Sense strand starting at position 1550 of SEQ ID NO: 917140
aaguuaagucuugagcuga

SEQ ID NO: 1211831 - RNA, 19 nt, Artificial Sequence
  Description of Artificial Sequence: Synthetic oligonucleotide
  Antisense strand to SEQ ID NO: 1211830
ucagcucaagacuuaacuu

SEQ ID NO: 1211832 - RNA, 19 nt, Artificial Sequence
  Description of Artificial Sequence: Synthetic oligonucleotide
  Sense strand starting at position 1628 of SEQ ID NO: 917140
cucgaauuugcuuggcgaa

SEQ ID NO: 1211833 - RNA, 19 nt, Artificial Sequence
  Description of Artificial Sequence: Synthetic oligonucleotide
  Antisense strand to SEQ ID NO: 1211832
uucgccaagcaaauucgag

SEQ ID NO: 1211834 - RNA, 19 nt, Artificial Sequence
  Description of Artificial Sequence: Synthetic oligonucleotide
  Sense strand starting at position 1629 of SEQ ID NO: 917140
ucgaauuugcuuggcgaaa

SEQ ID NO: 1211835 - RNA, 19 nt, Artificial Sequence
  Description of Artificial Sequence: Synthetic oligonucleotide
  Antisense strand to SEQ ID NO: 1211834
uuucgccaagcaaauucga

SEQ ID NO: 1211836 - RNA, 19 nt, Artificial Sequence
  Description of Artificial Sequence: Synthetic oligonucleotide
  Sense strand starting at position 2087 of SEQ ID NO: 917140
uauuucucaguguggcgaa

SEQ ID NO: 1211837 - RNA, 19 nt, Artificial Sequence
  Description of Artificial Sequence: Synthetic oligonucleotide
  Antisense strand to SEQ ID NO: 1211836
uucgccacacugagaaaua

SEQ ID NO: 1211838 - RNA, 19 nt, Artificial Sequence
  Description of Artificial Sequence: Synthetic oligonucleotide
  Sense strand starting at position 2104 of SEQ ID NO: 917140
aaaggaaauuccuugucag

SEQ ID NO: 1211839 - RNA, 19 nt, Artificial Sequence
  Description of Artificial Sequence: Synthetic oligonucleotide
  Antisense strand to SEQ ID NO: 1211838
cugacaaggaauuuccuuu

SEQ ID NO: 1211840 - RNA, 19 nt, Artificial Sequence
  Description of Artificial Sequence: Synthetic oligonucleotide
  Sense strand starting at position 2105 of SEQ ID NO: 917140
aaggaaauuccuugucagg

SEQ ID NO: 1211841 - RNA, 19 nt, Artificial Sequence
  Description of Artificial Sequence: Synthetic oligonucleotide
  Antisense strand to SEQ ID NO: 1211840
ccugacaaggaauuuccuu

SEQ ID NO: 1211842 - RNA, 19 nt, Artificial Sequence
  Description of Artificial Sequence: Synthetic oligonucleotide
  Sense strand starting at position 2107 of SEQ ID NO: 917140
ggaaauuccuugucaggca

SEQ ID NO: 1211843 - RNA, 19 nt, Artificial Sequence
  Description of Artificial Sequence: Synthetic oligonucleotide
  Antisense strand to SEQ ID NO: 1211842
ugccugacaaggaauuucc

SEQ ID NO: 1211844 - RNA, 19 nt, Artificial Sequence
  Description of Artificial Sequence: Synthetic oligonucleotide
  Sense strand starting at position 2135 of SEQ ID NO: 917140
ucaguaucugaccgaauaa

SEQ ID NO: 1211845 - RNA, 19 nt, Artificial Sequence
  Description of Artificial Sequence: Synthetic oligonucleotide
  Antisense strand to SEQ ID NO: 1211844
uuauucggucagauacuga

SEQ ID NO: 1211846 - RNA, 19 nt, Artificial Sequence
  Description of Artificial Sequence: Synthetic oligonucleotide
  Sense strand starting at position 2315 of SEQ ID NO: 917140
augaaauaccuuuguucug

SEQ ID NO: 1211847 - RNA, 19 nt, Artificial Sequence
  Description of Artificial Sequence: Synthetic oligonucleotide
  Antisense strand to SEQ ID NO: 1211846
cagaacaaagguauuucau

SEQ ID NO: 1211848 - RNA, 19 nt, Artificial Sequence
  Description of Artificial Sequence: Synthetic oligonucleotide
  Sense strand starting at position 2316 of SEQ ID NO: 917140
ugaaauaccuuuguucuga

SEQ ID NO: 1211849 - RNA, 19 nt, Artificial Sequence
  Description of Artificial Sequence: Synthetic oligonucleotide
  Antisense strand to SEQ ID NO: 1211848
ucagaacaaagguauuuca

SEQ ID NO: 1211850 - RNA, 19 nt, Artificial Sequence
  Description of Artificial Sequence: Synthetic oligonucleotide
  Sense strand starting at position 2341 of SEQ ID NO: 917140
aagggauguucucucaaga

SEQ ID NO: 1211851 - RNA, 19 nt, Artificial Sequence
  Description of Artificial Sequence: Synthetic oligonucleotide
  Antisense strand to SEQ ID NO: 1211850
ucuugagagaacaucccuu

SEQ ID NO: 1211852 - RNA, 19 nt, Artificial Sequence
  Description of Artificial Sequence: Synthetic oligonucleotide
  Sense strand starting at position 2478 of SEQ ID NO: 917140
ccaguagcuguucugcuau

SEQ ID NO: 1211853 - RNA, 19 nt, Artificial Sequence
  Description of Artificial Sequence: Synthetic oligonucleotide
  Antisense strand to SEQ ID NO: 1211852
auagcagaacagcuacugg

SEQ ID NO: 1211854 - RNA, 19 nt, Artificial Sequence
  Description of Artificial Sequence: Synthetic oligonucleotide
  Sense strand starting at position 2524 of SEQ ID NO: 917140
gcccguuuccuugcuugaa

SEQ ID NO: 1211855 - RNA, 19 nt, Artificial Sequence
  Description of Artificial Sequence: Synthetic oligonucleotide
  Antisense strand to SEQ ID NO: 1211854
uucaagcaaggaaacgggc

SEQ ID NO: 1211856 - RNA, 19 nt, Artificial Sequence
  Description of Artificial Sequence: Synthetic oligonucleotide
  Sense strand starting at position 2558 of SEQ ID NO: 917140
ucuuaacucgcucaugaag

SEQ ID NO: 1211857 - RNA, 19 nt, Artificial Sequence
  Description of Artificial Sequence: Synthetic oligonucleotide
  Antisense strand to SEQ ID NO: 1211856
cuucaugagcgaguuaaga

SEQ ID NO: 1211858 - RNA, 19 nt, Artificial Sequence
  Description of Artificial Sequence: Synthetic oligonucleotide
  Sense strand starting at position 2923 of SEQ ID NO: 917140
auucuuaggauucggauca

SEQ ID NO: 1211859 - RNA, 19 nt, Artificial Sequence
  Description of Artificial Sequence: Synthetic oligonucleotide
  Antisense strand to SEQ ID NO: 1211858
ugauccgaauccuaagaau

SEQ ID NO: 1211860 - RNA, 19 nt, Artificial Sequence
  Description of Artificial Sequence: Synthetic oligonucleotide
  Sense strand starting at position 3023 of SEQ ID NO: 917140
ugaauaggguuuguuguaa

SEQ ID NO: 1211861 - RNA, 19 nt, Artificial Sequence
  Description of Artificial Sequence: Synthetic oligonucleotide
  Antisense strand to SEQ ID NO: 1211860
uuacaacaaacccuauuca

SEQ ID NO: 1211862 - RNA, 19 nt, Artificial Sequence
  Description of Artificial Sequence: Synthetic oligonucleotide
  Sense strand starting at position 3194 of SEQ ID NO: 917140
aucaguaauccuuaguugu

SEQ ID NO: 1211863 - RNA, 19 nt, Artificial Sequence
  Description of Artificial Sequence: Synthetic oligonucleotide
  Antisense strand to SEQ ID NO: 1211862
acaacuaaggauuacugau

SEQ ID NO: 1211864 - RNA, 19 nt, Artificial Sequence
  Description of Artificial Sequence: Synthetic oligonucleotide
  Sense strand starting at position 3273 of SEQ ID NO: 917140
aagaaauacgucugugauc

SEQ ID NO: 1211865 - RNA, 19 nt, Artificial Sequence
  Description of Artificial Sequence: Synthetic oligonucleotide
  Antisense strand to SEQ ID NO: 1211864
gaucacagacguauuucuu

SEQ ID NO: 1211866 - RNA, 19 nt, Artificial Sequence
  Description of Artificial Sequence: Synthetic oligonucleotide
  Sense strand starting at position 3282 of SEQ ID NO: 917140
gucugugauccuuacuaau

SEQ ID NO: 1211867 - RNA, 19 nt, Artificial Sequence
  Description of Artificial Sequence: Synthetic oligonucleotide
  Antisense strand to SEQ ID NO: 1211866
auuaguaaggaucacagac

SEQ ID NO: 1211868 - RNA, 19 nt, Artificial Sequence
  Description of Artificial Sequence: Synthetic oligonucleotide
  Sense strand starting at position 3373 of SEQ ID NO: 917140
aucuuacaguaauccugua

SEQ ID NO: 1211869 - RNA, 19 nt, Artificial Sequence
  Description of Artificial Sequence: Synthetic oligonucleotide
  Antisense strand to SEQ ID NO: 1211868
uacaggauuacuguaagau

SEQ ID NO: 1211870 - RNA, 19 nt, Artificial Sequence
  Description of Artificial Sequence: Synthetic oligonucleotide
  Sense strand starting at position 3378 of SEQ ID NO: 917140
acaguaauccuguaaauug

SEQ ID NO: 1211871 - RNA, 19 nt, Artificial Sequence
  Description of Artificial Sequence: Synthetic oligonucleotide
  Antisense strand to SEQ ID NO: 1211870
caauuuacaggauuacugu

SEQ ID NO: 1211872 - RNA, 19 nt, Artificial Sequence
  Description of Artificial Sequence: Synthetic oligonucleotide
  Sense strand starting at position 3387 of SEQ ID NO: 917140
cuguaaauuggucaguauu

SEQ ID NO: 1211873 - RNA, 19 nt, Artificial Sequence
  Description of Artificial Sequence: Synthetic oligonucleotide
  Antisense strand to SEQ ID NO: 1211872
aauacugaccaauuuacag

SEQ ID NO: 1211874 - RNA, 19 nt, Artificial Sequence
  Description of Artificial Sequence: Synthetic oligonucleotide
  Sense strand starting at position 3400 of SEQ ID NO: 917140
aguauugucagaugaggau

SEQ ID NO: 1211875 - RNA, 19 nt, Artificial Sequence
  Description of Artificial Sequence: Synthetic oligonucleotide
  Antisense strand to SEQ ID NO: 1211874
auccucaucugacaauacu

SEQ ID NO: 1211876 - RNA, 19 nt, Artificial Sequence
  Description of Artificial Sequence: Synthetic oligonucleotide
  Sense strand starting at position 3421 of SEQ ID NO: 917140
ugaaucaaguaguuaagua

SEQ ID NO: 1211877 - RNA, 19 nt, Artificial Sequence
  Description of Artificial Sequence: Synthetic oligonucleotide
  Antisense strand to SEQ ID NO: 1211876
uacuuaacuacuugauuca

SEQ ID NO: 1211878 - RNA, 19 nt, Artificial Sequence
  Description of Artificial Sequence: Synthetic oligonucleotide
  Sense strand starting at position 3742 of SEQ ID NO: 917141
agugcagcugcucaauuua

SEQ ID NO: 1211879 - RNA, 19 nt, Artificial Sequence
  Description of Artificial Sequence: Synthetic oligonucleotide
  Antisense strand to SEQ ID NO: 1211878
uaaauugagcagcugcacu

SEQ ID NO: 1211880 - RNA, 19 nt, Artificial Sequence
  Description of Artificial Sequence: Synthetic oligonucleotide
  Sense strand starting at position 50 of SEQ ID NO: 917141
cagucacugccuuggacaa

SEQ ID NO: 1211881 - RNA, 19 nt, Artificial Sequence
  Description of Artificial Sequence: Synthetic oligonucleotide
  Antisense strand to SEQ ID NO: 1211880
uuguccaaggcagugacug

SEQ ID NO: 1211882 - RNA, 19 nt, Artificial Sequence
  Description of Artificial Sequence: Synthetic oligonucleotide
  Sense strand starting at position 51 of SEQ ID NO: 917141
agucacugccuuggacaaa

SEQ ID NO: 1211883 - RNA, 19 nt, Artificial Sequence
  Description of Artificial Sequence: Synthetic oligonucleotide
  Antisense strand to SEQ ID NO: 1211882
uuuguccaaggcagugacu

SEQ ID NO: 1211884 - RNA, 19 nt, Artificial Sequence
  Description of Artificial Sequence: Synthetic oligonucleotide
  Sense strand starting at position 121 of SEQ ID NO: 917141
ggccaucauucugcagaau

SEQ ID NO: 1211885 - RNA, 19 nt, Artificial Sequence
  Description of Artificial Sequence: Synthetic oligonucleotide
  Antisense strand to SEQ ID NO: 1211884
auucugcagaaugauggcc

SEQ ID NO: 1211886 - RNA, 19 nt, Artificial Sequence
  Description of Artificial Sequence: Synthetic oligonucleotide
  Sense strand starting at position 122 of SEQ ID NO: 917141
gccaucauucugcagaaug

SEQ ID NO: 1211887 - RNA, 19 nt, Artificial Sequence
  Description of Artificial Sequence: Synthetic oligonucleotide
  Antisense strand to SEQ ID NO: 1211886
cauucugcagaaugauggc

SEQ ID NO: 1211888 - RNA, 19 nt, Artificial Sequence
  Description of Artificial Sequence: Synthetic oligonucleotide
  Sense strand starting at position 195 of SEQ ID NO: 917141
ugcaaauaacuuugaaguu

SEQ ID NO: 1211889 - RNA, 19 nt, Artificial Sequence
  Description of Artificial Sequence: Synthetic oligonucleotide
  Antisense strand to SEQ ID NO: 1211888
aacuucaaaguuauuugca

SEQ ID NO: 1211890 - RNA, 19 nt, Artificial Sequence
  Description of Artificial Sequence: Synthetic oligonucleotide
  Sense strand starting at position 263 of SEQ ID NO: 917141
ucugacucauucuccgauu

SEQ ID NO: 1211891 - RNA, 19 nt, Artificial Sequence
  Description of Artificial Sequence: Synthetic oligonucleotide
  Antisense strand to SEQ ID NO: 1211890
aaucggagaaugagucaga

SEQ ID NO: 1211892 - RNA, 19 nt, Artificial Sequence
  Description of Artificial Sequence: Synthetic oligonucleotide
  Sense strand starting at position 265 of SEQ ID NO: 917141
ugacucauucuccgauucu

SEQ ID NO: 1211893 - RNA, 19 nt, Artificial Sequence
  Description of Artificial Sequence: Synthetic oligonucleotide
  Antisense strand to SEQ ID NO: 1211892
agaaucggagaaugaguca

SEQ ID NO: 1211894 - RNA, 19 nt, Artificial Sequence
  Description of Artificial Sequence: Synthetic oligonucleotide
  Sense strand starting at position 292 of SEQ ID NO: 917141
aucuguccuuugcuaaaga

SEQ ID NO: 1211895 - RNA, 19 nt, Artificial Sequence
  Description of Artificial Sequence: Synthetic oligonucleotide
  Antisense strand to SEQ ID NO: 1211894
ucuuuagcaaaggacagau

SEQ ID NO: 1211896 - RNA, 19 nt, Artificial Sequence
  Description of Artificial Sequence: Synthetic oligonucleotide
  Sense strand starting at position 303 of SEQ ID NO: 917141
gcuaaagaaucucuugaua

SEQ ID NO: 1211897 - RNA, 19 nt, Artificial Sequence
  Description of Artificial Sequence: Synthetic oligonucleotide
  Antisense strand to SEQ ID NO: 1211896
uaucaagagauucuuuagc

SEQ ID NO: 1211898 - RNA, 19 nt, Artificial Sequence
  Description of Artificial Sequence: Synthetic oligonucleotide
  Sense strand starting at position 315 of SEQ ID NO: 917141
cuugauaaauggucaccca

SEQ ID NO: 1211899 - RNA, 19 nt, Artificial Sequence
  Description of Artificial Sequence: Synthetic oligonucleotide
  Antisense strand to SEQ ID NO: 1211898
ugggugaccauuuaucaag

SEQ ID NO: 1211900 - RNA, 19 nt, Artificial Sequence
  Description of Artificial Sequence: Synthetic oligonucleotide
  Sense strand starting at position 318 of SEQ ID NO: 917141
gauaaauggucacccagug

SEQ ID NO: 1211901 - RNA, 19 nt, Artificial Sequence
  Description of Artificial Sequence: Synthetic oligonucleotide
  Antisense strand to SEQ ID NO: 1211900
cacugggugaccauuuauc

SEQ ID NO: 1211902 - RNA, 19 nt, Artificial Sequence
  Description of Artificial Sequence: Synthetic oligonucleotide
  Sense strand starting at position 392 of SEQ ID NO: 917141
gguuaucacuccucaagau

SEQ ID NO: 1211903 - RNA, 19 nt, Artificial Sequence
  Description of Artificial Sequence: Synthetic oligonucleotide
  Antisense strand to SEQ ID NO: 1211902
aucuugaggagugauaacc

SEQ ID NO: 1211904 - RNA, 19 nt, Artificial Sequence
  Description of Artificial Sequence: Synthetic oligonucleotide
  Sense strand starting at position 439 of SEQ ID NO: 917141
guaaaccugcuagaaauca

SEQ ID NO: 1211905 - RNA, 19 nt, Artificial Sequence
  Description of Artificial Sequence: Synthetic oligonucleotide
  Antisense strand to SEQ ID NO: 1211904
ugauuucuagcagguuuac

SEQ ID NO: 1211906 - RNA, 19 nt, Artificial Sequence
  Description of Artificial Sequence: Synthetic oligonucleotide
  Sense strand starting at position 448 of SEQ ID NO: 917141
cuagaaaucagcugaguga

SEQ ID NO: 1211907 - RNA, 19 nt, Artificial Sequence
  Description of Artificial Sequence: Synthetic oligonucleotide
  Antisense strand to SEQ ID NO: 1211906
ucacucagcugauuucuag

SEQ ID NO: 1211908 - RNA, 19 nt, Artificial Sequence
  Description of Artificial Sequence: Synthetic oligonucleotide
  Sense strand starting at position 451 of SEQ ID NO: 917141
gaaaucagcugagugauau

SEQ ID NO: 1211909 - RNA, 19 nt, Artificial Sequence
  Description of Artificial Sequence: Synthetic oligonucleotide
  Antisense strand to SEQ ID NO: 1211908
auaucacucagcugauuuc

SEQ ID NO: 1211910 - RNA, 19 nt, Artificial Sequence
  Description of Artificial Sequence: Synthetic oligonucleotide
  Sense strand starting at position 452 of SEQ ID NO: 917141
aaaucagcugagugauauc

SEQ ID NO: 1211911 - RNA, 19 nt, Artificial Sequence
  Description of Artificial Sequence: Synthetic oligonucleotide
  Antisense strand to SEQ ID NO: 1211910
gauaucacucagcugauuu

SEQ ID NO: 1211912 - RNA, 19 nt, Artificial Sequence
  Description of Artificial Sequence: Synthetic oligonucleotide
  Sense strand starting at position 463 of SEQ ID NO: 917141
gugauaucuccuggguuuc

SEQ ID NO: 1211913 - RNA, 19 nt, Artificial Sequence
  Description of Artificial Sequence: Synthetic oligonucleotide
  Antisense strand to SEQ ID NO: 1211912
gaaacccaggagauaucac

SEQ ID NO: 1211914 - RNA, 19 nt, Artificial Sequence
  Description of Artificial Sequence: Synthetic oligonucleotide
  Sense strand starting at position 465 of SEQ ID NO: 917141
gauaucuccuggguuucca

SEQ ID NO: 1211915 - RNA, 19 nt, Artificial Sequence
  Description of Artificial Sequence: Synthetic oligonucleotide
  Antisense strand to SEQ ID NO: 1211914
uggaaacccaggagauauc

SEQ ID NO: 1211916 - RNA, 19 nt, Artificial Sequence
  Description of Artificial Sequence: Synthetic oligonucleotide
  Sense strand starting at position 536 of SEQ ID NO: 917141
cccggaucugacgaucuaa

SEQ ID NO: 1211917 - RNA, 19 nt, Artificial Sequence
  Description of Artificial Sequence: Synthetic oligonucleotide
  Antisense strand to SEQ ID NO: 1211916
uuagaucgucagauccggg

SEQ ID NO: 1211918 - RNA, 19 nt, Artificial Sequence
  Description of Artificial Sequence: Synthetic oligonucleotide
  Sense strand starting at position 583 of SEQ ID NO: 917141
ucgaauauauugucuucca

SEQ ID NO: 1211919 - RNA, 19 nt, Artificial Sequence
  Description of Artificial Sequence: Synthetic oligonucleotide
  Antisense strand to SEQ ID NO: 1211918
uggaagacaauauauucga

SEQ ID NO: 1211920 - RNA, 19 nt, Artificial Sequence
  Description of Artificial Sequence: Synthetic oligonucleotide
  Sense strand starting at position 584 of SEQ ID NO: 917141
cgaauauauugucuuccau

SEQ ID NO: 1211921 - RNA, 19 nt, Artificial Sequence
  Description of Artificial Sequence: Synthetic oligonucleotide
  Antisense strand to SEQ ID NO: 1211920
auggaagacaauauauucg

SEQ ID NO: 1211922 - RNA, 19 nt, Artificial Sequence
  Description of Artificial Sequence: Synthetic oligonucleotide
  Sense strand starting at position 1888 of SEQ ID NO: 917141
agauaauauaagcguuguu

SEQ ID NO: 1211923 - RNA, 19 nt, Artificial Sequence
  Description of Artificial Sequence: Synthetic oligonucleotide
  Antisense strand to SEQ ID NO: 1211922
aacaacgcuuauauuaucu

SEQ ID NO: 1211924 - RNA, 19 nt, Artificial Sequence
  Description of Artificial Sequence: Synthetic oligonucleotide
  Sense strand starting at position 1921 of SEQ ID NO: 917141
gcuuaaauugaauguaaag

SEQ ID NO: 1211925 - RNA, 19 nt, Artificial Sequence
  Description of Artificial Sequence: Synthetic oligonucleotide
  Antisense strand to SEQ ID NO: 1211924
cuuuacauucaauuuaagc

SEQ ID NO: 1211926 - RNA, 19 nt, Artificial Sequence
  Description of Artificial Sequence: Synthetic oligonucleotide
  Sense strand starting at position 2104 of SEQ ID NO: 917141
aggccaagaugucuuggaa

SEQ ID NO: 1211927 - RNA, 19 nt, Artificial Sequence
  Description of Artificial Sequence: Synthetic oligonucleotide
  Antisense strand to SEQ ID NO: 1211926
uuccaagacaucuuggccu

SEQ ID NO: 1211928 - RNA, 19 nt, Artificial Sequence
  Description of Artificial Sequence: Synthetic oligonucleotide
  Sense strand starting at position 2145 of SEQ ID NO: 917141
acguaaaucagguagcaua

SEQ ID NO: 1211929 - RNA, 19 nt, Artificial Sequence
  Description of Artificial Sequence: Synthetic oligonucleotide
  Antisense strand to SEQ ID NO: 1211928
uaugcuaccugauuuacgu

SEQ ID NO: 1211930 - RNA, 19 nt, Artificial Sequence
  Description of Artificial Sequence: Synthetic oligonucleotide
  Sense strand starting at position 2171 of SEQ ID NO: 917141
agcaccacuuaguuuagaa

SEQ ID NO: 1211931 - RNA, 19 nt, Artificial Sequence
  Description of Artificial Sequence: Synthetic oligonucleotide
  Antisense strand to SEQ ID NO: 1211930
uucuaaacuaaguggugcu

SEQ ID NO: 1211932 - RNA, 19 nt, Artificial Sequence
  Description of Artificial Sequence: Synthetic oligonucleotide
  Sense strand starting at position 2471 of SEQ ID NO: 917141
gaaggcugcuaacuguuaa

SEQ ID NO: 1211933 - RNA, 19 nt, Artificial Sequence
  Description of Artificial Sequence: Synthetic oligonucleotide
  Antisense strand to SEQ ID NO: 1211932
uuaacaguuagcagccuuc

SEQ ID NO: 1211934 - RNA, 19 nt, Artificial Sequence
  Description of Artificial Sequence: Synthetic oligonucleotide
  Sense strand starting at position 2528 of SEQ ID NO: 917141
ccuaccgcuuaauuagauu

SEQ ID NO: 1211935 - RNA, 19 nt, Artificial Sequence
  Description of Artificial Sequence: Synthetic oligonucleotide
  Antisense strand to SEQ ID NO: 1211934
aaucuaauuaagcgguagg

SEQ ID NO: 1211936 - RNA, 19 nt, Artificial Sequence
  Description of Artificial Sequence: Synthetic oligonucleotide
  Sense strand starting at position 2568 of SEQ ID NO: 917141
gccuuacgaguuuaggcau

SEQ ID NO: 1211937 - RNA, 19 nt, Artificial Sequence
  Description of Artificial Sequence: Synthetic oligonucleotide
  Antisense strand to SEQ ID NO: 1211936
augccuaaacucguaaggc

SEQ ID NO: 1211938 - RNA, 19 nt, Artificial Sequence
  Description of Artificial Sequence: Synthetic oligonucleotide
  Sense strand starting at position 2576 of SEQ ID NO: 917141
aguuuaggcauuuguguag

SEQ ID NO: 1211939 - RNA, 19 nt, Artificial Sequence
  Description of Artificial Sequence: Synthetic oligonucleotide
  Antisense strand to SEQ ID NO: 1211938
cuacacaaaugccuaaacu

SEQ ID NO: 1211940 - RNA, 19 nt, Artificial Sequence
  Description of Artificial Sequence: Synthetic oligonucleotide
  Sense strand starting at position 2579 of SEQ ID NO: 917141
uuaggcauuuguguaggua

SEQ ID NO: 1211941 - RNA, 19 nt, Artificial Sequence
  Description of Artificial Sequence: Synthetic oligonucleotide
  Antisense strand to SEQ ID NO: 1211940
uaccuacacaaaugccuaa

SEQ ID NO: 1211942 - RNA, 19 nt, Artificial Sequence
  Description of Artificial Sequence: Synthetic oligonucleotide
  Sense strand starting at position 2583 of SEQ ID NO: 917141
gcauuuguguagguaagga

SEQ ID NO: 1211943 - RNA, 19 nt, Artificial Sequence
  Description of Artificial Sequence: Synthetic oligonucleotide
  Antisense strand to SEQ ID NO: 1211942
uccuuaccuacacaaaugc

SEQ ID NO: 1211944 - RNA, 19 nt, Artificial Sequence
  Description of Artificial Sequence: Synthetic oligonucleotide
  Sense strand starting at position 2676 of SEQ ID NO: 917141
gccaguaaucauggacuca

SEQ ID NO: 1211945 - RNA, 19 nt, Artificial Sequence
  Description of Artificial Sequence: Synthetic oligonucleotide
  Antisense strand to SEQ ID NO: 1211944
ugaguccaugauuacuggc

SEQ ID NO: 1211946 - RNA, 19 nt, Artificial Sequence
  Description of Artificial Sequence: Synthetic oligonucleotide
  Sense strand starting at position 2736 of SEQ ID NO: 917141
guagcuuccagaggacaga

SEQ ID NO: 1211947 - RNA, 19 nt, Artificial Sequence
  Description of Artificial Sequence: Synthetic oligonucleotide
  Antisense strand to SEQ ID NO: 1211946
ucuguccucuggaagcuac

SEQ ID NO: 1211948 - RNA, 19 nt, Artificial Sequence
  Description of Artificial Sequence: Synthetic oligonucleotide
  Sense strand starting at position 3078 of SEQ ID NO: 917141
gaucuaauuagucggugua

SEQ ID NO: 1211949 - RNA, 19 nt, Artificial Sequence
  Description of Artificial Sequence: Synthetic oligonucleotide
  Antisense strand to SEQ ID NO: 1211948
uacaccgacuaauuagauc

SEQ ID NO: 1211950 - RNA, 19 nt, Artificial Sequence
  Description of Artificial Sequence: Synthetic oligonucleotide
  Sense strand starting at position 3079 of SEQ ID NO: 917141
aucuaauuagucgguguaa

SEQ ID NO: 1211951 - RNA, 19 nt, Artificial Sequence
  Description of Artificial Sequence: Synthetic oligonucleotide
  Antisense strand to SEQ ID NO: 1211950
uuacaccgacuaauuagau

SEQ ID NO: 1211952 - RNA, 19 nt, Artificial Sequence
  Description of Artificial Sequence: Synthetic oligonucleotide
  Sense strand starting at position 3080 of SEQ ID NO: 917141
ucuaauuagucgguguaaa

SEQ ID NO: 1211953 - RNA, 19 nt, Artificial Sequence
  Description of Artificial Sequence: Synthetic oligonucleotide
  Antisense strand to SEQ ID NO: 1211952
uuuacaccgacuaauuaga

SEQ ID NO: 1211954 - RNA, 19 nt, Artificial Sequence
  Description of Artificial Sequence: Synthetic oligonucleotide
  Sense strand starting at position 3141 of SEQ ID NO: 917141
cccacucuugguggcuaaa

SEQ ID NO: 1211955 - RNA, 19 nt, Artificial Sequence
  Description of Artificial Sequence: Synthetic oligonucleotide
  Antisense strand to SEQ ID NO: 1211954
uuuagccaccaagaguggg

SEQ ID NO: 1211956 - RNA, 19 nt, Artificial Sequence
  Description of Artificial Sequence: Synthetic oligonucleotide
  Sense strand starting at position 3354 of SEQ ID NO: 917141
cccggagagcucugagaca

SEQ ID NO: 1211957 - RNA, 19 nt, Artificial Sequence
  Description of Artificial Sequence: Synthetic oligonucleotide
  Antisense strand to SEQ ID NO: 1211956
ugucucagagcucuccggg

SEQ ID NO: 1211958 - RNA, 19 nt, Artificial Sequence
  Description of Artificial Sequence: Synthetic oligonucleotide
  Sense strand starting at position 3953 of SEQ ID NO: 917142
agcagaucacuuugggaag

SEQ ID NO: 1211959 - RNA, 19 nt, Artificial Sequence
  Description of Artificial Sequence: Synthetic oligonucleotide
  Antisense strand to SEQ ID NO: 1211958
cuucccaaagugaucugcu

SEQ ID NO: 1211960 - RNA, 19 nt, Artificial Sequence
  Description of Artificial Sequence: Synthetic oligonucleotide
  Sense strand starting at position 432 of SEQ ID NO: 917142
ugagcaaugugauugaaug

SEQ ID NO: 1211961 - RNA, 19 nt, Artificial Sequence
  Description of Artificial Sequence: Synthetic oligonucleotide
  Antisense strand to SEQ ID NO: 1211960
cauucaaucacauugcuca

SEQ ID NO: 1211962 - RNA, 19 nt, Artificial Sequence
  Description of Artificial Sequence: Synthetic oligonucleotide
  Sense strand starting at position 433 of SEQ ID NO: 917142
gagcaaugugauugaaugu

SEQ ID NO: 1211963 - RNA, 19 nt, Artificial Sequence
  Description of Artificial Sequence: Synthetic oligonucleotide
  Antisense strand to SEQ ID NO: 1211962
acauucaaucacauugcuc

SEQ ID NO: 1211964 - RNA, 19 nt, Artificial Sequence
  Description of Artificial Sequence: Synthetic oligonucleotide
  Sense strand starting at position 440 of SEQ ID NO: 917142
gugauugaauguccuucua

SEQ ID NO: 1211965 - RNA, 19 nt, Artificial Sequence
  Description of Artificial Sequence: Synthetic oligonucleotide
  Antisense strand to SEQ ID NO: 1211964
uagaaggacauucaaucac

SEQ ID NO: 1211966 - RNA, 19 nt, Artificial Sequence
  Description of Artificial Sequence: Synthetic oligonucleotide
  Sense strand starting at position 442 of SEQ ID NO: 917142
gauugaauguccuucuaag

SEQ ID NO: 1211967 - RNA, 19 nt, Artificial Sequence
  Description of Artificial Sequence: Synthetic oligonucleotide
  Antisense strand to SEQ ID NO: 1211966
cuuagaaggacauucaauc

SEQ ID NO: 1211968 - RNA, 19 nt, Artificial Sequence
  Description of Artificial Sequence: Synthetic oligonucleotide
  Sense strand starting at position 596 of SEQ ID NO: 917142
agagaaauuugguauugaa

SEQ ID NO: 1211969 - RNA, 19 nt, Artificial Sequence
  Description of Artificial Sequence: Synthetic oligonucleotide
  Antisense strand to SEQ ID NO: 1211968
uucaauaccaaauuucucu

SEQ ID NO: 1211970 - RNA, 19 nt, Artificial Sequence
  Description of Artificial Sequence: Synthetic oligonucleotide
  Sense strand starting at position 611 of SEQ ID NO: 917142
ugaauauagaaguguuugu

SEQ ID NO: 1211971 - RNA, 19 nt, Artificial Sequence
  Description of Artificial Sequence: Synthetic oligonucleotide
  Antisense strand to SEQ ID NO: 1211970
acaaacacuucuauauuca

SEQ ID NO: 1211972 - RNA, 19 nt, Artificial Sequence
  Description of Artificial Sequence: Synthetic oligonucleotide
  Sense strand starting at position 616 of SEQ ID NO: 917142
auagaaguguuugucuuag

SEQ ID NO: 1211973 - RNA, 19 nt, Artificial Sequence
  Description of Artificial Sequence: Synthetic oligonucleotide
  Antisense strand to SEQ ID NO: 1211972
cuaagacaaacacuucuau

SEQ ID NO: 1211974 - RNA, 19 nt, Artificial Sequence
  Description of Artificial Sequence: Synthetic oligonucleotide
  Sense strand starting at position 628 of SEQ ID NO: 917142
gucuuaguucucuguauuu

SEQ ID NO: 1211975 - RNA, 19 nt, Artificial Sequence
  Description of Artificial Sequence: Synthetic oligonucleotide
  Antisense strand to SEQ ID NO: 1211974
aaauacagagaacuaagac

SEQ ID NO: 1211976 - RNA, 19 nt, Artificial Sequence
  Description of Artificial Sequence: Synthetic oligonucleotide
  Sense strand starting at position 932 of SEQ ID NO: 917142
agaugugccgguuagaaag

SEQ ID NO: 1211977 - RNA, 19 nt, Artificial Sequence
  Description of Artificial Sequence: Synthetic oligonucleotide
  Antisense strand to SEQ ID NO: 1211976
cuuucuaaccggcacaucu

SEQ ID NO: 1211978 - RNA, 19 nt, Artificial Sequence
  Description of Artificial Sequence: Synthetic oligonucleotide
  Sense strand starting at position 1123 of SEQ ID NO: 917142
gugaaucauucugcauaag

SEQ ID NO: 1211979 - RNA, 19 nt, Artificial Sequence
  Description of Artificial Sequence: Synthetic oligonucleotide
  Antisense strand to SEQ ID NO: 1211978
cuuaugcagaaugauucac

SEQ ID NO: 1211980 - RNA, 19 nt, Artificial Sequence
  Description of Artificial Sequence: Synthetic oligonucleotide
  Sense strand starting at position 1124 of SEQ ID NO: 917142
ugaaucauucugcauaagu

SEQ ID NO: 1211981 - RNA, 19 nt, Artificial Sequence
  Description of Artificial Sequence: Synthetic oligonucleotide
  Antisense strand to SEQ ID NO: 1211980
acuuaugcagaaugauuca

SEQ ID NO: 1211982 - RNA, 19 nt, Artificial Sequence
  Description of Artificial Sequence: Synthetic oligonucleotide
  Sense strand starting at position 1214 of SEQ ID NO: 917142
guuguuguuauggaaagca

SEQ ID NO: 1211983 - RNA, 19 nt, Artificial Sequence
  Description of Artificial Sequence: Synthetic oligonucleotide
  Antisense strand to SEQ ID NO: 1211982
ugcuuuccauaacaacaac

SEQ ID NO: 1211984 - RNA, 19 nt, Artificial Sequence
  Description of Artificial Sequence: Synthetic oligonucleotide
  Sense strand starting at position 1441 of SEQ ID NO: 917142
ucucuauuggccucguguu

SEQ ID NO: 1211985 - RNA, 19 nt, Artificial Sequence
  Description of Artificial Sequence: Synthetic oligonucleotide
  Antisense strand to SEQ ID NO: 1211984
aacacgaggccaauagaga

SEQ ID NO: 1211986 - RNA, 19 nt, Artificial Sequence
  Description of Artificial Sequence: Synthetic oligonucleotide
  Sense strand starting at position 1530 of SEQ ID NO: 917142
ugcggugucagagaugaga

SEQ ID NO: 1211987 - RNA, 19 nt, Artificial Sequence
  Description of Artificial Sequence: Synthetic oligonucleotide
  Antisense strand to SEQ ID NO: 1211986
ucucaucucugacaccgca

SEQ ID NO: 1211988 - RNA, 19 nt, Artificial Sequence
  Description of Artificial Sequence: Synthetic oligonucleotide
  Sense strand starting at position 1532 of SEQ ID NO: 917142
cggugucagagaugagaga

SEQ ID NO: 1211989 - RNA, 19 nt, Artificial Sequence
  Description of Artificial Sequence: Synthetic oligonucleotide
  Antisense strand to SEQ ID NO: 1211988
ucucucaucucugacaccg

SEQ ID NO: 1211990 - RNA, 19 nt, Artificial Sequence
  Description of Artificial Sequence: Synthetic oligonucleotide
  Sense strand starting at position 1674 of SEQ ID NO: 917142
ucaggcuccagugaauguu

SEQ ID NO: 1211991 - RNA, 19 nt, Artificial Sequence
  Description of Artificial Sequence: Synthetic oligonucleotide
  Antisense strand to SEQ ID NO: 1211990
aacauucacuggagccuga

SEQ ID NO: 1211992 - RNA, 19 nt, Artificial Sequence
  Description of Artificial Sequence: Synthetic oligonucleotide
  Sense strand starting at position 1704 of SEQ ID NO: 917142
ggauggauggguugugagu

SEQ ID NO: 1211993 - RNA, 19 nt, Artificial Sequence
  Description of Artificial Sequence: Synthetic oligonucleotide
  Antisense strand to SEQ ID NO: 1211992
acucacaacccauccaucc

SEQ ID NO: 1211994 - RNA, 19 nt, Artificial Sequence
  Description of Artificial Sequence: Synthetic oligonucleotide
  Sense strand starting at position 1916 of SEQ ID NO: 917142
guguccugugaguuuaugu

SEQ ID NO: 1211995 - RNA, 19 nt, Artificial Sequence
  Description of Artificial Sequence: Synthetic oligonucleotide
  Antisense strand to SEQ ID NO: 1211994
acauaaacucacaggacac

SEQ ID NO: 1211996 - RNA, 19 nt, Artificial Sequence
  Description of Artificial Sequence: Synthetic oligonucleotide
  Sense strand starting at position 1966 of SEQ ID NO: 917142
ccaccagauccucaugguu

SEQ ID NO: 1211997 - RNA, 19 nt, Artificial Sequence
  Description of Artificial Sequence: Synthetic oligonucleotide
  Antisense strand to SEQ ID NO: 1211996
aaccaugaggaucuggugg

SEQ ID NO: 1211998 - RNA, 19 nt, Artificial Sequence
  Description of Artificial Sequence: Synthetic oligonucleotide
  Sense strand starting at position 2026 of SEQ ID NO: 917142
aggagaaaccuuuguugcu

SEQ ID NO: 1211999 - RNA, 19 nt, Artificial Sequence
  Description of Artificial Sequence: Synthetic oligonucleotide
  Antisense strand to SEQ ID NO: 1211998
agcaacaaagguuucuccu

SEQ ID NO: 1212000 - RNA, 19 nt, Artificial Sequence
  Description of Artificial Sequence: Synthetic oligonucleotide
  Sense strand starting at position 2157 of SEQ ID NO: 917142
ugguuauuaccaggaugac

SEQ ID NO: 1212001 - RNA, 19 nt, Artificial Sequence
  Description of Artificial Sequence: Synthetic oligonucleotide
  Antisense strand to SEQ ID NO: 1212000
gucauccugguaauaacca

SEQ ID NO: 1212002 - RNA, 19 nt, Artificial Sequence
  Description of Artificial Sequence: Synthetic oligonucleotide
  Sense strand starting at position 2160 of SEQ ID NO: 917142
uuauuaccaggaugacauu

SEQ ID NO: 1212003 - RNA, 19 nt, Artificial Sequence
  Description of Artificial Sequence: Synthetic oligonucleotide
  Antisense strand to SEQ ID NO: 1212002
aaugucauccugguaauaa

SEQ ID NO: 1212004 - RNA, 19 nt, Artificial Sequence
  Description of Artificial Sequence: Synthetic oligonucleotide
  Sense strand starting at position 2166 of SEQ ID NO: 917142
ccaggaugacauuguccuu

SEQ ID NO: 1212005 - RNA, 19 nt, Artificial Sequence
  Description of Artificial Sequence: Synthetic oligonucleotide
  Antisense strand to SEQ ID NO: 1212004
aaggacaaugucauccugg

SEQ ID NO: 1212006 - RNA, 19 nt, Artificial Sequence
  Description of Artificial Sequence: Synthetic oligonucleotide
  Sense strand starting at position 2171 of SEQ ID NO: 917142
augacauuguccuuggaag

SEQ ID NO: 1212007 - RNA, 19 nt, Artificial Sequence
  Description of Artificial Sequence: Synthetic oligonucleotide
  Antisense strand to SEQ ID NO: 1212006
cuuccaaggacaaugucau

SEQ ID NO: 1212008 - RNA, 19 nt, Artificial Sequence
  Description of Artificial Sequence: Synthetic oligonucleotide
  Sense strand starting at position 2173 of SEQ ID NO: 917142
gacauuguccuuggaaggu

SEQ ID NO: 1212009 - RNA, 19 nt, Artificial Sequence
  Description of Artificial Sequence: Synthetic oligonucleotide
  Antisense strand to SEQ ID NO: 1212008
accuuccaaggacaauguc

SEQ ID NO: 1212010 - RNA, 19 nt, Artificial Sequence
  Description of Artificial Sequence: Synthetic oligonucleotide
  Sense strand starting at position 2518 of SEQ ID NO: 917142
aagggucccucaguggaua

SEQ ID NO: 1212011 - RNA, 19 nt, Artificial Sequence
  Description of Artificial Sequence: Synthetic oligonucleotide
  Antisense strand to SEQ ID NO: 1212010
uauccacugagggacccuu

SEQ ID NO: 1212012 - RNA, 19 nt, Artificial Sequence
  Description of Artificial Sequence: Synthetic oligonucleotide
  Sense strand starting at position 2519 of SEQ ID NO: 917142
agggucccucaguggauaa

SEQ ID NO: 1212013 - RNA, 19 nt, Artificial Sequence
  Description of Artificial Sequence: Synthetic oligonucleotide
  Antisense strand to SEQ ID NO: 1212012
uuauccacugagggacccu

SEQ ID NO: 1212014 - RNA, 19 nt, Artificial Sequence
  Description of Artificial Sequence: Synthetic oligonucleotide
  Sense strand starting at position 2520 of SEQ ID NO: 917142
gggucccucaguggauaaa

SEQ ID NO: 1212015 - RNA, 19 nt, Artificial Sequence
  Description of Artificial Sequence: Synthetic oligonucleotide
  Antisense strand to SEQ ID NO: 1212014
uuuauccacugagggaccc

SEQ ID NO: 1212016 - RNA, 19 nt, Artificial Sequence
  Description of Artificial Sequence: Synthetic oligonucleotide
  Sense strand starting at position 2540 of SEQ ID NO: 917142
agauacaugcaauguggua

SEQ ID NO: 1212017 - RNA, 19 nt, Artificial Sequence
  Description of Artificial Sequence: Synthetic oligonucleotide
  Antisense strand to SEQ ID NO: 1212016
uaccacauugcauguaucu

SEQ ID NO: 1212018 - RNA, 19 nt, Artificial Sequence
  Description of Artificial Sequence: Synthetic oligonucleotide
  Sense strand starting at position 2646 of SEQ ID NO: 917142
aagugaaacuagcuaguca

SEQ ID NO: 1212019 - RNA, 19 nt, Artificial Sequence
  Description of Artificial Sequence: Synthetic oligonucleotide
  Antisense strand to SEQ ID NO: 1212018
ugacuagcuaguuucacuu

SEQ ID NO: 1212020 - RNA, 19 nt, Artificial Sequence
  Description of Artificial Sequence: Synthetic oligonucleotide
  Sense strand starting at position 2736 of SEQ ID NO: 917142
uaggaugaugguugccaga

SEQ ID NO: 1212021 - RNA, 19 nt, Artificial Sequence
  Description of Artificial Sequence: Synthetic oligonucleotide
  Antisense strand to SEQ ID NO: 1212020
ucuggcaaccaucauccua

SEQ ID NO: 1212022 - RNA, 19 nt, Artificial Sequence
  Description of Artificial Sequence: Synthetic oligonucleotide
  Sense strand starting at position 2768 of SEQ ID NO: 917142
ggaaaugggaguuguuuga

SEQ ID NO: 1212023 - RNA, 19 nt, Artificial Sequence
  Description of Artificial Sequence: Synthetic oligonucleotide
  Antisense strand to SEQ ID NO: 1212022
ucaaacaacucccauuucc

SEQ ID NO: 1212024 - RNA, 19 nt, Artificial Sequence
  Description of Artificial Sequence: Synthetic oligonucleotide
  Sense strand starting at position 2885 of SEQ ID NO: 917142
cccuuaagaugguuaagcu

SEQ ID NO: 1212025 - RNA, 19 nt, Artificial Sequence
  Description of Artificial Sequence: Synthetic oligonucleotide
  Antisense strand to SEQ ID NO: 1212024
agcuuaaccaucuuaaggg

SEQ ID NO: 1212026 - RNA, 19 nt, Artificial Sequence
  Description of Artificial Sequence: Synthetic oligonucleotide
  Sense strand starting at position 2989 of SEQ ID NO: 917142
acuguaaugagagguauuc

SEQ ID NO: 1212027 - RNA, 19 nt, Artificial Sequence
  Description of Artificial Sequence: Synthetic oligonucleotide
  Antisense strand to SEQ ID NO: 1212026
gaauaccucucauuacagu

SEQ ID NO: 1212028 - RNA, 19 nt, Artificial Sequence
  Description of Artificial Sequence: Synthetic oligonucleotide
  Sense strand starting at position 2991 of SEQ ID NO: 917142
uguaaugagagguauucuu

SEQ ID NO: 1212029 - RNA, 19 nt, Artificial Sequence
  Description of Artificial Sequence: Synthetic oligonucleotide
  Antisense strand to SEQ ID NO: 1212028
aagaauaccucucauuaca

SEQ ID NO: 1212030 - RNA, 19 nt, Artificial Sequence
  Description of Artificial Sequence: Synthetic oligonucleotide
  Sense strand starting at position 2998 of SEQ ID NO: 917142
agagguauucuuugaguca

SEQ ID NO: 1212031 - RNA, 19 nt, Artificial Sequence
  Description of Artificial Sequence: Synthetic oligonucleotide
  Antisense strand to SEQ ID NO: 1212030
ugacucaaagaauaccucu

SEQ ID NO: 1212032 - RNA, 19 nt, Artificial Sequence
  Description of Artificial Sequence: Synthetic oligonucleotide
  Sense strand starting at position 3073 of SEQ ID NO: 917142
caccuaguucgggagaagu

SEQ ID NO: 1212033 - RNA, 19 nt, Artificial Sequence
  Description of Artificial Sequence: Synthetic oligonucleotide
  Antisense strand to SEQ ID NO: 1212032
acuucucccgaacuaggug

SEQ ID NO: 1212034 - RNA, 19 nt, Artificial Sequence
  Description of Artificial Sequence: Synthetic oligonucleotide
  Sense strand starting at position 3327 of SEQ ID NO: 917142
cuugacacuuguuuacaua

SEQ ID NO: 1212035 - RNA, 19 nt, Artificial Sequence
  Description of Artificial Sequence: Synthetic oligonucleotide
  Antisense strand to SEQ ID NO: 1212034
uauguaaacaagugucaag

SEQ ID NO: 1212036 - RNA, 19 nt, Artificial Sequence
  Description of Artificial Sequence: Synthetic oligonucleotide
  Sense strand starting at position 3463 of SEQ ID NO: 917142
auguaucaucaugggagau

SEQ ID NO: 1212037 - RNA, 19 nt, Artificial Sequence
  Description of Artificial Sequence: Synthetic oligonucleotide
  Antisense strand to SEQ ID NO: 1212036
aucucccaugaugauacau

SEQ ID NO: 1212038 - RNA, 19 nt, Artificial Sequence
  Description of Artificial Sequence: Synthetic oligonucleotide
  Sense strand starting at position 3464 of SEQ ID NO: 917143
uguaucaucaugggagaug

SEQ ID NO: 1212039 - RNA, 19 nt, Artificial Sequence
  Description of Artificial Sequence: Synthetic oligonucleotide
  Antisense strand to SEQ ID NO: 1212038
caucucccaugaugauaca

SEQ ID NO: 1212040 - RNA, 19 nt, Artificial Sequence
  Description of Artificial Sequence: Synthetic oligonucleotide
  Sense strand starting at position 273 of SEQ ID NO: 917143
guuugaucauuauuugcca

SEQ ID NO: 1212041 - RNA, 19 nt, Artificial Sequence
  Description of Artificial Sequence: Synthetic oligonucleotide
  Antisense strand to SEQ ID NO: 1212040
uggcaaauaaugaucaaac

SEQ ID NO: 1212042 - RNA, 19 nt, Artificial Sequence
  Description of Artificial Sequence: Synthetic oligonucleotide
  Sense strand starting at position 314 of SEQ ID NO: 917143
cuaggaucgcccuaauaaa

SEQ ID NO: 1212043 - RNA, 19 nt, Artificial Sequence
  Description of Artificial Sequence: Synthetic oligonucleotide
  Antisense strand to SEQ ID NO: 1212042
uuuauuagggcgauccuag

SEQ ID NO: 1212044 - RNA, 19 nt, Artificial Sequence
  Description of Artificial Sequence: Synthetic oligonucleotide
  Sense strand starting at position 393 of SEQ ID NO: 917143
gaaguuugagaucaccgua

SEQ ID NO: 1212045 - RNA, 19 nt, Artificial Sequence
  Description of Artificial Sequence: Synthetic oligonucleotide
  Antisense strand to SEQ ID NO: 1212044
uacggugaucucaaacuuc

SEQ ID NO: 1212046 - RNA, 19 nt, Artificial Sequence
  Description of Artificial Sequence: Synthetic oligonucleotide
  Sense strand starting at position 838 of SEQ ID NO: 917143
ggagacuuacugugugauu

SEQ ID NO: 1212047 - RNA, 19 nt, Artificial Sequence
  Description of Artificial Sequence: Synthetic oligonucleotide
  Antisense strand to SEQ ID NO: 1212046
aaucacacaguaagucucc

SEQ ID NO: 1212048 - RNA, 19 nt, Artificial Sequence
  Description of Artificial Sequence: Synthetic oligonucleotide
  Sense strand starting at position 1081 of SEQ ID NO: 917143
uuaacugagcuaugcaaga

SEQ ID NO: 1212049 - RNA, 19 nt, Artificial Sequence
  Description of Artificial Sequence: Synthetic oligonucleotide
  Antisense strand to SEQ ID NO: 1212048
ucuugcauagcucaguuaa

SEQ ID NO: 1212050 - RNA, 19 nt, Artificial Sequence
  Description of Artificial Sequence: Synthetic oligonucleotide
  Sense strand starting at position 1086 of SEQ ID NO: 917143
ugagcuaugcaagaguaaa

SEQ ID NO: 1212051 - RNA, 19 nt, Artificial Sequence
  Description of Artificial Sequence: Synthetic oligonucleotide
  Antisense strand to SEQ ID NO: 1212050
uuuacucuugcauagcuca

SEQ ID NO: 1212052 - RNA, 19 nt, Artificial Sequence
  Description of Artificial Sequence: Synthetic oligonucleotide
  Sense strand starting at position 1198 of SEQ ID NO: 917143
gggcauuucuuguuuacuc

SEQ ID NO: 1212053 - RNA, 19 nt, Artificial Sequence
  Description of Artificial Sequence: Synthetic oligonucleotide
  Antisense strand to SEQ ID NO: 1212052
gaguaaacaagaaaugccc

SEQ ID NO: 1212054 - RNA, 19 nt, Artificial Sequence
  Description of Artificial Sequence: Synthetic oligonucleotide
  Sense strand starting at position 1199 of SEQ ID NO: 917143
ggcauuucuuguuuacuca

SEQ ID NO: 1212055 - RNA, 19 nt, Artificial Sequence
  Description of Artificial Sequence: Synthetic oligonucleotide
  Antisense strand to SEQ ID NO: 1212054
ugaguaaacaagaaaugcc

SEQ ID NO: 1212056 - RNA, 19 nt, Artificial Sequence
  Description of Artificial Sequence: Synthetic oligonucleotide
  Sense strand starting at position 1243 of SEQ ID NO: 917143
ucuaauguccacuggaauu

SEQ ID NO: 1212057 - RNA, 19 nt, Artificial Sequence
  Description of Artificial Sequence: Synthetic oligonucleotide
  Antisense strand to SEQ ID NO: 1212056
aauuccaguggacauuaga

SEQ ID NO: 1212058 - RNA, 19 nt, Artificial Sequence
  Description of Artificial Sequence: Synthetic oligonucleotide
  Sense strand starting at position 1254 of SEQ ID NO: 917143
cuggaauucgaauauguca

SEQ ID NO: 1212059 - RNA, 19 nt, Artificial Sequence
  Description of Artificial Sequence: Synthetic oligonucleotide
  Antisense strand to SEQ ID NO: 1212058
ugacauauucgaauuccag

SEQ ID NO: 1212060 - RNA, 19 nt, Artificial Sequence
  Description of Artificial Sequence: Synthetic oligonucleotide
  Sense strand starting at position 1256 of SEQ ID NO: 917143
ggaauucgaauaugucaug

SEQ ID NO: 1212061 - RNA, 19 nt, Artificial Sequence
  Description of Artificial Sequence: Synthetic oligonucleotide
  Antisense strand to SEQ ID NO: 1212060
caugacauauucgaauucc

SEQ ID NO: 1212062 - RNA, 19 nt, Artificial Sequence
  Description of Artificial Sequence: Synthetic oligonucleotide
  Sense strand starting at position 1257 of SEQ ID NO: 917143
gaauucgaauaugucauga

SEQ ID NO: 1212063 - RNA, 19 nt, Artificial Sequence
  Description of Artificial Sequence: Synthetic oligonucleotide
  Antisense strand to SEQ ID NO: 1212062
ucaugacauauucgaauuc

SEQ ID NO: 1212064 - RNA, 19 nt, Artificial Sequence
  Description of Artificial Sequence: Synthetic oligonucleotide
  Sense strand starting at position 1825 of SEQ ID NO: 917143
caacaaucagggcgagauu

SEQ ID NO: 1212065 - RNA, 19 nt, Artificial Sequence
  Description of Artificial Sequence: Synthetic oligonucleotide
  Antisense strand to SEQ ID NO: 1212064
aaucucgcccugauuguug

SEQ ID NO: 1212066 - RNA, 19 nt, Artificial Sequence
  Description of Artificial Sequence: Synthetic oligonucleotide
  Sense strand starting at position 1828 of SEQ ID NO: 917143
caaucagggcgagauuguu

SEQ ID NO: 1212067 - RNA, 19 nt, Artificial Sequence
  Description of Artificial Sequence: Synthetic oligonucleotide
  Antisense strand to SEQ ID NO: 1212066
aacaaucucgcccugauug

SEQ ID NO: 1212068 - RNA, 19 nt, Artificial Sequence
  Description of Artificial Sequence: Synthetic oligonucleotide
  Sense strand starting at position 2041 of SEQ ID NO: 917143
cggugaauucguccugcca

SEQ ID NO: 1212069 - RNA, 19 nt, Artificial Sequence
  Description of Artificial Sequence: Synthetic oligonucleotide
  Antisense strand to SEQ ID NO: 1212068
uggcaggacgaauucaccg

SEQ ID NO: 1212070 - RNA, 19 nt, Artificial Sequence
  Description of Artificial Sequence: Synthetic oligonucleotide
  Sense strand starting at position 2381 of SEQ ID NO: 917143
ugucuagugaaaggugaga

SEQ ID NO: 1212071 - RNA, 19 nt, Artificial Sequence
  Description of Artificial Sequence: Synthetic oligonucleotide
  Antisense strand to SEQ ID NO: 1212070
ucucaccuuucacuagaca

SEQ ID NO: 1212072 - RNA, 19 nt, Artificial Sequence
  Description of Artificial Sequence: Synthetic oligonucleotide
  Sense strand starting at position 2513 of SEQ ID NO: 917143
acuguauugccuuauaaag

SEQ ID NO: 1212073 - RNA, 19 nt, Artificial Sequence
  Description of Artificial Sequence: Synthetic oligonucleotide
  Antisense strand to SEQ ID NO: 1212072
cuuuauaaggcaauacagu

SEQ ID NO: 1212074 - RNA, 19 nt, Artificial Sequence
  Description of Artificial Sequence: Synthetic oligonucleotide
  Sense strand starting at position 2529 of SEQ ID NO: 917143
aagacaagucuaggguauu

SEQ ID NO: 1212075 - RNA, 19 nt, Artificial Sequence
  Description of Artificial Sequence: Synthetic oligonucleotide
  Antisense strand to SEQ ID NO: 1212074
aauacccuagacuugucuu

SEQ ID NO: 1212076 - RNA, 19 nt, Artificial Sequence
  Description of Artificial Sequence: Synthetic oligonucleotide
  Sense strand starting at position 2681 of SEQ ID NO: 917143
ugugaagagaccuacuugu

SEQ ID NO: 1212077 - RNA, 19 nt, Artificial Sequence
  Description of Artificial Sequence: Synthetic oligonucleotide
  Antisense strand to SEQ ID NO: 1212076
acaaguaggucucuucaca

SEQ ID NO: 1212078 - RNA, 19 nt, Artificial Sequence
  Description of Artificial Sequence: Synthetic oligonucleotide
  Sense strand starting at position 2789 of SEQ ID NO: 917143
caugauauucggcacugau

SEQ ID NO: 1212079 - RNA, 19 nt, Artificial Sequence
  Description of Artificial Sequence: Synthetic oligonucleotide
  Antisense strand to SEQ ID NO: 1212078
aucagugccgaauaucaug

SEQ ID NO: 1212080 - RNA, 19 nt, Artificial Sequence
  Description of Artificial Sequence: Synthetic oligonucleotide
  Sense strand starting at position 2886 of SEQ ID NO: 917143
cugguaauccgauaguuag

SEQ ID NO: 1212081 - RNA, 19 nt, Artificial Sequence
  Description of Artificial Sequence: Synthetic oligonucleotide
  Antisense strand to SEQ ID NO: 1212080
cuaacuaucggauuaccag

SEQ ID NO: 1212082 - RNA, 19 nt, Artificial Sequence
  Description of Artificial Sequence: Synthetic oligonucleotide
  Sense strand starting at position 2889 of SEQ ID NO: 917143
guaauccgauaguuagaau

SEQ ID NO: 1212083 - RNA, 19 nt, Artificial Sequence
  Description of Artificial Sequence: Synthetic oligonucleotide
  Antisense strand to SEQ ID NO: 1212082
auucuaacuaucggauuac

SEQ ID NO: 1212084 - RNA, 19 nt, Artificial Sequence
  Description of Artificial Sequence: Synthetic oligonucleotide
  Sense strand starting at position 2900 of SEQ ID NO: 917143
guuagaauucccgagagca

SEQ ID NO: 1212085 - RNA, 19 nt, Artificial Sequence
  Description of Artificial Sequence: Synthetic oligonucleotide
  Antisense strand to SEQ ID NO: 1212084
ugcucucgggaauucuaac

SEQ ID NO: 1212086 - RNA, 19 nt, Artificial Sequence
  Description of Artificial Sequence: Synthetic oligonucleotide
  Sense strand starting at position 2902 of SEQ ID NO: 917143
uagaauucccgagagcaau

SEQ ID NO: 1212087 - RNA, 19 nt, Artificial Sequence
  Description of Artificial Sequence: Synthetic oligonucleotide
  Antisense strand to SEQ ID NO: 1212086
auugcucucgggaauucua

SEQ ID NO: 1212088 - RNA, 19 nt, Artificial Sequence
  Description of Artificial Sequence: Synthetic oligonucleotide
  Sense strand starting at position 3071 of SEQ ID NO: 917143
agagauuacuagcuuaacu

SEQ ID NO: 1212089 - RNA, 19 nt, Artificial Sequence
  Description of Artificial Sequence: Synthetic oligonucleotide
  Antisense strand to SEQ ID NO: 1212088
aguuaagcuaguaaucucu

SEQ ID NO: 1212090 - RNA, 19 nt, Artificial Sequence
  Description of Artificial Sequence: Synthetic oligonucleotide
  Sense strand starting at position 3141 of SEQ ID NO: 917143
accuguucguauuucugaa

SEQ ID NO: 1212091 - RNA, 19 nt, Artificial Sequence
  Description of Artificial Sequence: Synthetic oligonucleotide
  Antisense strand to SEQ ID NO: 1212090
uucagaaauacgaacaggu

SEQ ID NO: 1212092 - RNA, 19 nt, Artificial Sequence
  Description of Artificial Sequence: Synthetic oligonucleotide
  Sense strand starting at position 3261 of SEQ ID NO: 917143
uuggauagcugguuaaaga

SEQ ID NO: 1212093 - RNA, 19 nt, Artificial Sequence
  Description of Artificial Sequence: Synthetic oligonucleotide
  Antisense strand to SEQ ID NO: 1212092
ucuuuaaccagcuauccaa

SEQ ID NO: 1212094 - RNA, 19 nt, Artificial Sequence
  Description of Artificial Sequence: Synthetic oligonucleotide
  Sense strand starting at position 3369 of SEQ ID NO: 917143
aagugugggcuuuacagau

SEQ ID NO: 1212095 - RNA, 19 nt, Artificial Sequence
  Description of Artificial Sequence: Synthetic oligonucleotide
  Antisense strand to SEQ ID NO: 1212094
aucuguaaagcccacacuu

SEQ ID NO: 1212096 - RNA, 19 nt, Artificial Sequence
  Description of Artificial Sequence: Synthetic oligonucleotide
  Sense strand starting at position 3375 of SEQ ID NO: 917143
gggcuuuacagauguacag

SEQ ID NO: 1212097 - RNA, 19 nt, Artificial Sequence
  Description of Artificial Sequence: Synthetic oligonucleotide
  Antisense strand to SEQ ID NO: 1212096
cuguacaucuguaaagccc

SEQ ID NO: 1212098 - RNA, 19 nt, Artificial Sequence
  Description of Artificial Sequence: Synthetic oligonucleotide
  Sense strand starting at position 3395 of SEQ ID NO: 917143
gcggguucgaguucugucu

SEQ ID NO: 1212099 - RNA, 19 nt, Artificial Sequence
  Description of Artificial Sequence: Synthetic oligonucleotide
  Antisense strand to SEQ ID NO: 1212098
agacagaacucgaacccgc

SEQ ID NO: 1212100 - RNA, 19 nt, Artificial Sequence
  Description of Artificial Sequence: Synthetic oligonucleotide
  Sense strand starting at position 3492 of SEQ ID NO: 917143
uacucuguucuguaggauu

SEQ ID NO: 1212101 - RNA, 19 nt, Artificial Sequence
  Description of Artificial Sequence: Synthetic oligonucleotide
  Antisense strand to SEQ ID NO: 1212100
aauccuacagaacagagua

SEQ ID NO: 1212102 - RNA, 19 nt, Artificial Sequence
  Description of Artificial Sequence: Synthetic oligonucleotide
  Sense strand starting at position 3514 of SEQ ID NO: 917143
ugauuuaaaugagaaccua

SEQ ID NO: 1212103 - RNA, 19 nt, Artificial Sequence
  Description of Artificial Sequence: Synthetic oligonucleotide
  Antisense strand to SEQ ID NO: 1212102
uagguucucauuuaaauca

SEQ ID NO: 1212104 - RNA, 19 nt, Artificial Sequence
  Description of Artificial Sequence: Synthetic oligonucleotide
  Sense strand starting at position 3522 of SEQ ID NO: 917143
augagaaccuauguaaagu

SEQ ID NO: 1212105 - RNA, 19 nt, Artificial Sequence
  Description of Artificial Sequence: Synthetic oligonucleotide
  Antisense strand to SEQ ID NO: 1212104
acuuuacauagguucucau

SEQ ID NO: 1212106 - RNA, 19 nt, Artificial Sequence
  Description of Artificial Sequence: Synthetic oligonucleotide
  Sense strand starting at position 3611 of SEQ ID NO: 917143
uaacaagugugauugaaua

SEQ ID NO: 1212107 - RNA, 19 nt, Artificial Sequence
  Description of Artificial Sequence: Synthetic oligonucleotide
  Antisense strand to SEQ ID NO: 1212106
uauucaaucacacuuguua

SEQ ID NO: 1212108 - RNA, 19 nt, Artificial Sequence
  Description of Artificial Sequence: Synthetic oligonucleotide
  Sense strand starting at position 3631 of SEQ ID NO: 917143
guaacaagagaauggucau

SEQ ID NO: 1212109 - RNA, 19 nt, Artificial Sequence
  Description of Artificial Sequence: Synthetic oligonucleotide
  Antisense strand to SEQ ID NO: 1212108
augaccauucucuuguuac

SEQ ID NO: 1212110 - RNA, 19 nt, Artificial Sequence
  Description of Artificial Sequence: Synthetic oligonucleotide
  Sense strand starting at position 3637 of SEQ ID NO: 917143
agagaauggucauuaccau

SEQ ID NO: 1212111 - RNA, 19 nt, Artificial Sequence
  Description of Artificial Sequence: Synthetic oligonucleotide
  Antisense strand to SEQ ID NO: 1212110
augguaaugaccauucucu

SEQ ID NO: 1212112 - RNA, 19 nt, Artificial Sequence
  Description of Artificial Sequence: Synthetic oligonucleotide
  Sense strand starting at position 3859 of SEQ ID NO: 917143
cuguuaguacuuuacauau

SEQ ID NO: 1212113 - RNA, 19 nt, Artificial Sequence
  Description of Artificial Sequence: Synthetic oligonucleotide
  Antisense strand to SEQ ID NO: 1212112
auauguaaaguacuaacag

SEQ ID NO: 1212114 - RNA, 19 nt, Artificial Sequence
  Description of Artificial Sequence: Synthetic oligonucleotide
  Sense strand starting at position 3943 of SEQ ID NO: 917143
uauuucuccuaggaggaga

SEQ ID NO: 1212115 - RNA, 19 nt, Artificial Sequence
  Description of Artificial Sequence: Synthetic oligonucleotide
  Antisense strand to SEQ ID NO: 1212114
ucuccuccuaggagaaaua

SEQ ID NO: 1212116 - RNA, 19 nt, Artificial Sequence
  Description of Artificial Sequence: Synthetic oligonucleotide
  Sense strand starting at position 3963 of SEQ ID NO: 917143
auaacaugaccaggguuau

SEQ ID NO: 1212117 - RNA, 19 nt, Artificial Sequence
  Description of Artificial Sequence: Synthetic oligonucleotide
  Antisense strand to SEQ ID NO: 1212116
auaacccuggucauguuau

SEQ ID NO: 1212118 - RNA, 19 nt, Artificial Sequence
  Description of Artificial Sequence: Synthetic oligonucleotide
  Sense strand starting at position 3964 of SEQ ID NO: 917144
uaacaugaccaggguuaua

SEQ ID NO: 1212119 - RNA, 19 nt, Artificial Sequence
  Description of Artificial Sequence: Synthetic oligonucleotide
  Antisense strand to SEQ ID NO: 1212118
uauaacccuggucauguua

SEQ ID NO: 1212120 - RNA, 19 nt, Artificial Sequence
  Description of Artificial Sequence: Synthetic oligonucleotide
  Sense strand starting at position 200 of SEQ ID NO: 917144
ucagaaucagcuugggaug

SEQ ID NO: 1212121 - RNA, 19 nt, Artificial Sequence
  Description of Artificial Sequence: Synthetic oligonucleotide
  Antisense strand to SEQ ID NO: 1212120
caucccaagcugauucuga

SEQ ID NO: 1212122 - RNA, 19 nt, Artificial Sequence
  Description of Artificial Sequence: Synthetic oligonucleotide
  Sense strand starting at position 201 of SEQ ID NO: 917144
cagaaucagcuugggauga

SEQ ID NO: 1212123 - RNA, 19 nt, Artificial Sequence
  Description of Artificial Sequence: Synthetic oligonucleotide
  Antisense strand to SEQ ID NO: 1212122
ucaucccaagcugauucug

SEQ ID NO: 1212124 - RNA, 19 nt, Artificial Sequence
  Description of Artificial Sequence: Synthetic oligonucleotide
  Sense strand starting at position 400 of SEQ ID NO: 917144
ucugaagaauccuuugucu

SEQ ID NO: 1212125 - RNA, 19 nt, Artificial Sequence
  Description of Artificial Sequence: Synthetic oligonucleotide
  Antisense strand to SEQ ID NO: 1212124
agacaaaggauucuucaga

SEQ ID NO: 1212126 - RNA, 19 nt, Artificial Sequence
  Description of Artificial Sequence: Synthetic oligonucleotide
  Sense strand starting at position 408 of SEQ ID NO: 917144
auccuuugucugugcauuu

SEQ ID NO: 1212127 - RNA, 19 nt, Artificial Sequence
  Description of Artificial Sequence: Synthetic oligonucleotide
  Antisense strand to SEQ ID NO: 1212126
aaaugcacagacaaaggau

SEQ ID NO: 1212128 - RNA, 19 nt, Artificial Sequence
  Description of Artificial Sequence: Synthetic oligonucleotide
  Sense strand starting at position 456 of SEQ ID NO: 917144
uagugcucugaggagucau

SEQ ID NO: 1212129 - RNA, 19 nt, Artificial Sequence
  Description of Artificial Sequence: Synthetic oligonucleotide
  Antisense strand to SEQ ID NO: 1212128
augacuccucagagcacua

SEQ ID NO: 1212130 - RNA, 19 nt, Artificial Sequence
  Description of Artificial Sequence: Synthetic oligonucleotide
  Sense strand starting at position 479 of SEQ ID NO: 917144
agauguaucccucaucugu

SEQ ID NO: 1212131 - RNA, 19 nt, Artificial Sequence
  Description of Artificial Sequence: Synthetic oligonucleotide
  Antisense strand to SEQ ID NO: 1212130
acagaugagggauacaucu

SEQ ID NO: 1212132 - RNA, 19 nt, Artificial Sequence
  Description of Artificial Sequence: Synthetic oligonucleotide
  Sense strand starting at position 495 of SEQ ID NO: 917144
uguguuucugaggacauua

SEQ ID NO: 1212133 - RNA, 19 nt, Artificial Sequence
  Description of Artificial Sequence: Synthetic oligonucleotide
  Antisense strand to SEQ ID NO: 1212132
uaauguccucagaaacaca

SEQ ID NO: 1212134 - RNA, 19 nt, Artificial Sequence
  Description of Artificial Sequence: Synthetic oligonucleotide
  Sense strand starting at position 527 of SEQ ID NO: 917144
gggaaauguuuauuccauu

SEQ ID NO: 1212135 - RNA, 19 nt, Artificial Sequence
  Description of Artificial Sequence: Synthetic oligonucleotide
  Antisense strand to SEQ ID NO: 1212134
aauggaauaaacauuuccc

SEQ ID NO: 1212136 - RNA, 19 nt, Artificial Sequence
  Description of Artificial Sequence: Synthetic oligonucleotide
  Sense strand starting at position 837 of SEQ ID NO: 917144
guuugaucauuauuugcca

SEQ ID NO: 1212137 - RNA, 19 nt, Artificial Sequence
  Description of Artificial Sequence: Synthetic oligonucleotide
  Antisense strand to SEQ ID NO: 1212136
uggcaaauaaugaucaaac

SEQ ID NO: 1212138 - RNA, 19 nt, Artificial Sequence
  Description of Artificial Sequence: Synthetic oligonucleotide
  Sense strand starting at position 878 of SEQ ID NO: 917144
cuaggaucgcccuaauaaa

SEQ ID NO: 1212139 - RNA, 19 nt, Artificial Sequence
  Description of Artificial Sequence: Synthetic oligonucleotide
  Antisense strand to SEQ ID NO: 1212138
uuuauuagggcgauccuag

SEQ ID NO: 1212140 - RNA, 19 nt, Artificial Sequence
  Description of Artificial Sequence: Synthetic oligonucleotide
  Sense strand starting at position 957 of SEQ ID NO: 917144
gaaguuugagaucaccgua

SEQ ID NO: 1212141 - RNA, 19 nt, Artificial Sequence
  Description of Artificial Sequence: Synthetic oligonucleotide
  Antisense strand to SEQ ID NO: 1212140
uacggugaucucaaacuuc

SEQ ID NO: 1212142 - RNA, 19 nt, Artificial Sequence
  Description of Artificial Sequence: Synthetic oligonucleotide
  Sense strand starting at position 1402 of SEQ ID NO: 917144
ggagacuuacugugugauu

SEQ ID NO: 1212143 - RNA, 19 nt, Artificial Sequence
  Description of Artificial Sequence: Synthetic oligonucleotide
  Antisense strand to SEQ ID NO: 1212142
aaucacacaguaagucucc

SEQ ID NO: 1212144 - RNA, 19 nt, Artificial Sequence
  Description of Artificial Sequence: Synthetic oligonucleotide
  Sense strand starting at position 1645 of SEQ ID NO: 917144
uuaacugagcuaugcaaga

SEQ ID NO: 1212145 - RNA, 19 nt, Artificial Sequence
  Description of Artificial Sequence: Synthetic oligonucleotide
  Antisense strand to SEQ ID NO: 1212144
ucuugcauagcucaguuaa

SEQ ID NO: 1212146 - RNA, 19 nt, Artificial Sequence
  Description of Artificial Sequence: Synthetic oligonucleotide
  Sense strand starting at position 1650 of SEQ ID NO: 917144
ugagcuaugcaagaguaaa

SEQ ID NO: 1212147 - RNA, 19 nt, Artificial Sequence
  Description of Artificial Sequence: Synthetic oligonucleotide
  Antisense strand to SEQ ID NO: 1212146
uuuacucuugcauagcuca

SEQ ID NO: 1212148 - RNA, 19 nt, Artificial Sequence
  Description of Artificial Sequence: Synthetic oligonucleotide
  Sense strand starting at position 1762 of SEQ ID NO: 917144
gggcauuucuuguuuacuc

SEQ ID NO: 1212149 - RNA, 19 nt, Artificial Sequence
  Description of Artificial Sequence: Synthetic oligonucleotide
  Antisense strand to SEQ ID NO: 1212148
gaguaaacaagaaaugccc

SEQ ID NO: 1212150 - RNA, 19 nt, Artificial Sequence
  Description of Artificial Sequence: Synthetic oligonucleotide
  Sense strand starting at position 1763 of SEQ ID NO: 917144
ggcauuucuuguuuacuca

SEQ ID NO: 1212151 - RNA, 19 nt, Artificial Sequence
  Description of Artificial Sequence: Synthetic oligonucleotide
  Antisense strand to SEQ ID NO: 1212150
ugaguaaacaagaaaugcc

SEQ ID NO: 1212152 - RNA, 19 nt, Artificial Sequence
  Description of Artificial Sequence: Synthetic oligonucleotide
  Sense strand starting at position 1807 of SEQ ID NO: 917144
ucuaauguccacuggaauu

SEQ ID NO: 1212153 - RNA, 19 nt, Artificial Sequence
  Description of Artificial Sequence: Synthetic oligonucleotide
  Antisense strand to SEQ ID NO: 1212152
aauuccaguggacauuaga

SEQ ID NO: 1212154 - RNA, 19 nt, Artificial Sequence
  Description of Artificial Sequence: Synthetic oligonucleotide
  Sense strand starting at position 1818 of SEQ ID NO: 917144
cuggaauucgaauauguca

SEQ ID NO: 1212155 - RNA, 19 nt, Artificial Sequence
  Description of Artificial Sequence: Synthetic oligonucleotide
  Antisense strand to SEQ ID NO: 1212154
ugacauauucgaauuccag

SEQ ID NO: 1212156 - RNA, 19 nt, Artificial Sequence
  Description of Artificial Sequence: Synthetic oligonucleotide
  Sense strand starting at position 1820 of SEQ ID NO: 917144
ggaauucgaauaugucaug

SEQ ID NO: 1212157 - RNA, 19 nt, Artificial Sequence
  Description of Artificial Sequence: Synthetic oligonucleotide
  Antisense strand to SEQ ID NO: 1212156
caugacauauucgaauucc

SEQ ID NO: 1212158 - RNA, 19 nt, Artificial Sequence
  Description of Artificial Sequence: Synthetic oligonucleotide
  Sense strand starting at position 1821 of SEQ ID NO: 917144
gaauucgaauaugucauga

SEQ ID NO: 1212159 - RNA, 19 nt, Artificial Sequence
  Description of Artificial Sequence: Synthetic oligonucleotide
  Antisense strand to SEQ ID NO: 1212158
ucaugacauauucgaauuc

SEQ ID NO: 1212160 - RNA, 19 nt, Artificial Sequence
  Description of Artificial Sequence: Synthetic oligonucleotide
  Sense strand starting at position 2389 of SEQ ID NO: 917144
caacaaucagggcgagauu

SEQ ID NO: 1212161 - RNA, 19 nt, Artificial Sequence
  Description of Artificial Sequence: Synthetic oligonucleotide
  Antisense strand to SEQ ID NO: 1212160
aaucucgcccugauuguug

SEQ ID NO: 1212162 - RNA, 19 nt, Artificial Sequence
  Description of Artificial Sequence: Synthetic oligonucleotide
  Sense strand starting at position 2392 of SEQ ID NO: 917144
caaucagggcgagauuguu

SEQ ID NO: 1212163 - RNA, 19 nt, Artificial Sequence
  Description of Artificial Sequence: Synthetic oligonucleotide
  Antisense strand to SEQ ID NO: 1212162
aacaaucucgcccugauug

SEQ ID NO: 1212164 - RNA, 19 nt, Artificial Sequence
  Description of Artificial Sequence: Synthetic oligonucleotide
  Sense strand starting at position 2605 of SEQ ID NO: 917144
cggugaauucguccugcca

SEQ ID NO: 1212165 - RNA, 19 nt, Artificial Sequence
  Description of Artificial Sequence: Synthetic oligonucleotide
  Antisense strand to SEQ ID NO: 1212164
uggcaggacgaauucaccg

SEQ ID NO: 1212166 - RNA, 19 nt, Artificial Sequence
  Description of Artificial Sequence: Synthetic oligonucleotide
  Sense strand starting at position 2945 of SEQ ID NO: 917144
ugucuagugaaaggugaga

SEQ ID NO: 1212167 - RNA, 19 nt, Artificial Sequence
  Description of Artificial Sequence: Synthetic oligonucleotide
  Antisense strand to SEQ ID NO: 1212166
ucucaccuuucacuagaca

SEQ ID NO: 1212168 - RNA, 19 nt, Artificial Sequence
  Description of Artificial Sequence: Synthetic oligonucleotide
  Sense strand starting at position 3077 of SEQ ID NO: 917144
acuguauugccuuauaaag

SEQ ID NO: 1212169 - RNA, 19 nt, Artificial Sequence
  Description of Artificial Sequence: Synthetic oligonucleotide
  Antisense strand to SEQ ID NO: 1212168
cuuuauaaggcaauacagu

SEQ ID NO: 1212170 - RNA, 19 nt, Artificial Sequence
  Description of Artificial Sequence: Synthetic oligonucleotide
  Sense strand starting at position 3093 of SEQ ID NO: 917144
aagacaagucuaggguauu

SEQ ID NO: 1212171 - RNA, 19 nt, Artificial Sequence
  Description of Artificial Sequence: Synthetic oligonucleotide
  Antisense strand to SEQ ID NO: 1212170
aauacccuagacuugucuu

SEQ ID NO: 1212172 - RNA, 19 nt, Artificial Sequence
  Description of Artificial Sequence: Synthetic oligonucleotide
  Sense strand starting at position 3232 of SEQ ID NO: 917144
uuaacauaguuggugugaa

SEQ ID NO: 1212173 - RNA, 19 nt, Artificial Sequence
  Description of Artificial Sequence: Synthetic oligonucleotide
  Antisense strand to SEQ ID NO: 1212172
uucacaccaacuauguuaa

SEQ ID NO: 1212174 - RNA, 19 nt, Artificial Sequence
  Description of Artificial Sequence: Synthetic oligonucleotide
  Sense strand starting at position 3245 of SEQ ID NO: 917144
ugugaagagaccuacuugu

SEQ ID NO: 1212175 - RNA, 19 nt, Artificial Sequence
  Description of Artificial Sequence: Synthetic oligonucleotide
  Antisense strand to SEQ ID NO: 1212174
acaaguaggucucuucaca

SEQ ID NO: 1212176 - RNA, 19 nt, Artificial Sequence
  Description of Artificial Sequence: Synthetic oligonucleotide
  Sense strand starting at position 3353 of SEQ ID NO: 917144
caugauauucggcacugau

SEQ ID NO: 1212177 - RNA, 19 nt, Artificial Sequence
  Description of Artificial Sequence: Synthetic oligonucleotide
  Antisense strand to SEQ ID NO: 1212176
aucagugccgaauaucaug

SEQ ID NO: 1212178 - RNA, 19 nt, Artificial Sequence
  Description of Artificial Sequence: Synthetic oligonucleotide
  Sense strand starting at position 3439 of SEQ ID NO: 917144
cauuauggucacugguaau

SEQ ID NO: 1212179 - RNA, 19 nt, Artificial Sequence
  Description of Artificial Sequence: Synthetic oligonucleotide
  Antisense strand to SEQ ID NO: 1212178
auuaccagugaccauaaug

SEQ ID NO: 1212180 - RNA, 19 nt, Artificial Sequence
  Description of Artificial Sequence: Synthetic oligonucleotide
  Sense strand starting at position 3450 of SEQ ID NO: 917144
cugguaauccgauaguuag

SEQ ID NO: 1212181 - RNA, 19 nt, Artificial Sequence
  Description of Artificial Sequence: Synthetic oligonucleotide
  Antisense strand to SEQ ID NO: 1212180
cuaacuaucggauuaccag

SEQ ID NO: 1212182 - RNA, 19 nt, Artificial Sequence
  Description of Artificial Sequence: Synthetic oligonucleotide
  Sense strand starting at position 3453 of SEQ ID NO: 917144
guaauccgauaguuagaau

SEQ ID NO: 1212183 - RNA, 19 nt, Artificial Sequence
  Description of Artificial Sequence: Synthetic oligonucleotide
  Antisense strand to SEQ ID NO: 1212182
auucuaacuaucggauuac

SEQ ID NO: 1212184 - RNA, 19 nt, Artificial Sequence
  Description of Artificial Sequence: Synthetic oligonucleotide
  Sense strand starting at position 3464 of SEQ ID NO: 917144
guuagaauucccgagagca

SEQ ID NO: 1212185 - RNA, 19 nt, Artificial Sequence
  Description of Artificial Sequence: Synthetic oligonucleotide
  Antisense strand to SEQ ID NO: 1212184
ugcucucgggaauucuaac

SEQ ID NO: 1212186 - RNA, 19 nt, Artificial Sequence
  Description of Artificial Sequence: Synthetic oligonucleotide
  Sense strand starting at position 3466 of SEQ ID NO: 917144
uagaauucccgagagcaau

SEQ ID NO: 1212187 - RNA, 19 nt, Artificial Sequence
  Description of Artificial Sequence: Synthetic oligonucleotide
  Antisense strand to SEQ ID NO: 1212186
auugcucucgggaauucua

SEQ ID NO: 1212188 - RNA, 19 nt, Artificial Sequence
  Description of Artificial Sequence: Synthetic oligonucleotide
  Sense strand starting at position 3635 of SEQ ID NO: 917144
agagauuacuagcuuaacu

SEQ ID NO: 1212189 - RNA, 19 nt, Artificial Sequence
  Description of Artificial Sequence: Synthetic oligonucleotide
  Antisense strand to SEQ ID NO: 1212188
aguuaagcuaguaaucucu

SEQ ID NO: 1212190 - RNA, 19 nt, Artificial Sequence
  Description of Artificial Sequence: Synthetic oligonucleotide
  Sense strand starting at position 3705 of SEQ ID NO: 917144
accuguucguauuucugaa

SEQ ID NO: 1212191 - RNA, 19 nt, Artificial Sequence
  Description of Artificial Sequence: Synthetic oligonucleotide
  Antisense strand to SEQ ID NO: 1212190
uucagaaauacgaacaggu

SEQ ID NO: 1212192 - RNA, 19 nt, Artificial Sequence
  Description of Artificial Sequence: Synthetic oligonucleotide
  Sense strand starting at position 3825 of SEQ ID NO: 917144
uuggauagcugguuaaaga

SEQ ID NO: 1212193 - RNA, 19 nt, Artificial Sequence
  Description of Artificial Sequence: Synthetic oligonucleotide
  Antisense strand to SEQ ID NO: 1212192
ucuuuaaccagcuauccaa

SEQ ID NO: 1212194 - RNA, 19 nt, Artificial Sequence
  Description of Artificial Sequence: Synthetic oligonucleotide
  Sense strand starting at position 3933 of SEQ ID NO: 917144
aagugugggcuuuacagau

SEQ ID NO: 1212195 - RNA, 19 nt, Artificial Sequence
  Description of Artificial Sequence: Synthetic oligonucleotide
  Antisense strand to SEQ ID NO: 1212194
aucuguaaagcccacacuu

SEQ ID NO: 1212196 - RNA, 19 nt, Artificial Sequence
  Description of Artificial Sequence: Synthetic oligonucleotide
  Sense strand starting at position 3939 of SEQ ID NO: 917144
gggcuuuacagauguacag

SEQ ID NO: 1212197 - RNA, 19 nt, Artificial Sequence
  Description of Artificial Sequence: Synthetic oligonucleotide
  Antisense strand to SEQ ID NO: 1212196
cuguacaucuguaaagccc

SEQ ID NO: 1212198 - RNA, 19 nt, Artificial Sequence
  Description of Artificial Sequence: Synthetic oligonucleotide
  Sense strand starting at position 3959 of SEQ ID NO: 917145
gcggguucgaguucugucu

SEQ ID NO: 1212199 - RNA, 19 nt, Artificial Sequence
  Description of Artificial Sequence: Synthetic oligonucleotide
  Antisense strand to SEQ ID NO: 1212198
agacagaacucgaacccgc

SEQ ID NO: 1212200 - RNA, 19 nt, Artificial Sequence
  Description of Artificial Sequence: Synthetic oligonucleotide
  Sense strand starting at position 126 of SEQ ID NO: 917145
aaugaugggaugugucaua

SEQ ID NO: 1212201 - RNA, 19 nt, Artificial Sequence
  Description of Artificial Sequence: Synthetic oligonucleotide
  Antisense strand to SEQ ID NO: 1212200
uaugacacaucccaucauu

SEQ ID NO: 1212202 - RNA, 19 nt, Artificial Sequence
  Description of Artificial Sequence: Synthetic oligonucleotide
  Sense strand starting at position 131 of SEQ ID NO: 917145
ugggaugugucauaauuua

SEQ ID NO: 1212203 - RNA, 19 nt, Artificial Sequence
  Description of Artificial Sequence: Synthetic oligonucleotide
  Antisense strand to SEQ ID NO: 1212202
uaaauuaugacacauccca

SEQ ID NO: 1212204 - RNA, 19 nt, Artificial Sequence
  Description of Artificial Sequence: Synthetic oligonucleotide
  Sense strand starting at position 288 of SEQ ID NO: 917145
uuuguuucuccaugcauuu

SEQ ID NO: 1212205 - RNA, 19 nt, Artificial Sequence
  Description of Artificial Sequence: Synthetic oligonucleotide
  Antisense strand to SEQ ID NO: 1212204
aaaugcauggagaaacaaa

SEQ ID NO: 1212206 - RNA, 19 nt, Artificial Sequence
  Description of Artificial Sequence: Synthetic oligonucleotide
  Sense strand starting at position 723 of SEQ ID NO: 917145
uuugguauuccugaugcga

SEQ ID NO: 1212207 - RNA, 19 nt, Artificial Sequence
  Description of Artificial Sequence: Synthetic oligonucleotide
  Antisense strand to SEQ ID NO: 1212206
ucgcaucaggaauaccaaa

SEQ ID NO: 1212208 - RNA, 19 nt, Artificial Sequence
  Description of Artificial Sequence: Synthetic oligonucleotide
  Sense strand starting at position 727 of SEQ ID NO: 917145
guauuccugaugcgagaug

SEQ ID NO: 1212209 - RNA, 19 nt, Artificial Sequence
  Description of Artificial Sequence: Synthetic oligonucleotide
  Antisense strand to SEQ ID NO: 1212208
caucucgcaucaggaauac

SEQ ID NO: 1212210 - RNA, 19 nt, Artificial Sequence
  Description of Artificial Sequence: Synthetic oligonucleotide
  Sense strand starting at position 732 of SEQ ID NO: 917145
ccugaugcgagaugucuuu

SEQ ID NO: 1212211 - RNA, 19 nt, Artificial Sequence
  Description of Artificial Sequence: Synthetic oligonucleotide
  Antisense strand to SEQ ID NO: 1212210
aaagacaucucgcaucagg

SEQ ID NO: 1212212 - RNA, 19 nt, Artificial Sequence
  Description of Artificial Sequence: Synthetic oligonucleotide
  Sense strand starting at position 738 of SEQ ID NO: 917145
gcgagaugucuuuaucaug

SEQ ID NO: 1212213 - RNA, 19 nt, Artificial Sequence
  Description of Artificial Sequence: Synthetic oligonucleotide
  Antisense strand to SEQ ID NO: 1212212
caugauaaagacaucucgc

SEQ ID NO: 1212214 - RNA, 19 nt, Artificial Sequence
  Description of Artificial Sequence: Synthetic oligonucleotide
  Sense strand starting at position 754 of SEQ ID NO: 917145
auguauuguugauuagguu

SEQ ID NO: 1212215 - RNA, 19 nt, Artificial Sequence
  Description of Artificial Sequence: Synthetic oligonucleotide
  Antisense strand to SEQ ID NO: 1212214
aaccuaaucaacaauacau

SEQ ID NO: 1212216 - RNA, 19 nt, Artificial Sequence
  Description of Artificial Sequence: Synthetic oligonucleotide
  Sense strand starting at position 814 of SEQ ID NO: 917145
gcaauaauacaucggcuuu

SEQ ID NO: 1212217 - RNA, 19 nt, Artificial Sequence
  Description of Artificial Sequence: Synthetic oligonucleotide
  Antisense strand to SEQ ID NO: 1212216
aaagccgauguauuauugc

SEQ ID NO: 1212218 - RNA, 19 nt, Artificial Sequence
  Description of Artificial Sequence: Synthetic oligonucleotide
  Sense strand starting at position 1040 of SEQ ID NO: 917145
aggugcuuucccuaacaaa

SEQ ID NO: 1212219 - RNA, 19 nt, Artificial Sequence
  Description of Artificial Sequence: Synthetic oligonucleotide
  Antisense strand to SEQ ID NO: 1212218
uuuguuagggaaagcaccu

SEQ ID NO: 1212220 - RNA, 19 nt, Artificial Sequence
  Description of Artificial Sequence: Synthetic oligonucleotide
  Sense strand starting at position 1072 of SEQ ID NO: 917145
ccaugaagugaccaagcau

SEQ ID NO: 1212221 - RNA, 19 nt, Artificial Sequence
  Description of Artificial Sequence: Synthetic oligonucleotide
  Antisense strand to SEQ ID NO: 1212220
augcuuggucacuucaugg

SEQ ID NO: 1212222 - RNA, 19 nt, Artificial Sequence
  Description of Artificial Sequence: Synthetic oligonucleotide
  Sense strand starting at position 1493 of SEQ ID NO: 917145
gucagaaucuuugcgagac

SEQ ID NO: 1212223 - RNA, 19 nt, Artificial Sequence
  Description of Artificial Sequence: Synthetic oligonucleotide
  Antisense strand to SEQ ID NO: 1212222
gucucgcaaagauucugac

SEQ ID NO: 1212224 - RNA, 19 nt, Artificial Sequence
  Description of Artificial Sequence: Synthetic oligonucleotide
  Sense strand starting at position 1695 of SEQ ID NO: 917145
cccauccuuuccgcaagua

SEQ ID NO: 1212225 - RNA, 19 nt, Artificial Sequence
  Description of Artificial Sequence: Synthetic oligonucleotide
  Antisense strand to SEQ ID NO: 1212224
uacuugcggaaaggauggg

SEQ ID NO: 1212226 - RNA, 19 nt, Artificial Sequence
  Description of Artificial Sequence: Synthetic oligonucleotide
  Sense strand starting at position 1897 of SEQ ID NO: 917145
gccucucgacuacgaguaa

SEQ ID NO: 1212227 - RNA, 19 nt, Artificial Sequence
  Description of Artificial Sequence: Synthetic oligonucleotide
  Antisense strand to SEQ ID NO: 1212226
uuacucguagucgagaggc

SEQ ID NO: 1212228 - RNA, 19 nt, Artificial Sequence
  Description of Artificial Sequence: Synthetic oligonucleotide
  Sense strand starting at position 1910 of SEQ ID NO: 917145
gaguaacuccauuggcuca

SEQ ID NO: 1212229 - RNA, 19 nt, Artificial Sequence
  Description of Artificial Sequence: Synthetic oligonucleotide
  Antisense strand to SEQ ID NO: 1212228
ugagccaauggaguuacuc

SEQ ID NO: 1212230 - RNA, 19 nt, Artificial Sequence
  Description of Artificial Sequence: Synthetic oligonucleotide
  Sense strand starting at position 2106 of SEQ ID NO: 917145
ccauguagugaucgguuua

SEQ ID NO: 1212231 - RNA, 19 nt, Artificial Sequence
  Description of Artificial Sequence: Synthetic oligonucleotide
  Antisense strand to SEQ ID NO: 1212230
uaaaccgaucacuacaugg

SEQ ID NO: 1212232 - RNA, 19 nt, Artificial Sequence
  Description of Artificial Sequence: Synthetic oligonucleotide
  Sense strand starting at position 2107 of SEQ ID NO: 917145
cauguagugaucgguuuag

SEQ ID NO: 1212233 - RNA, 19 nt, Artificial Sequence
  Description of Artificial Sequence: Synthetic oligonucleotide
  Antisense strand to SEQ ID NO: 1212232
cuaaaccgaucacuacaug

SEQ ID NO: 1212234 - RNA, 19 nt, Artificial Sequence
  Description of Artificial Sequence: Synthetic oligonucleotide
  Sense strand starting at position 2111 of SEQ ID NO: 917145
uagugaucgguuuagguag

SEQ ID NO: 1212235 - RNA, 19 nt, Artificial Sequence
  Description of Artificial Sequence: Synthetic oligonucleotide
  Antisense strand to SEQ ID NO: 1212234
cuaccuaaaccgaucacua

SEQ ID NO: 1212236 - RNA, 19 nt, Artificial Sequence
  Description of Artificial Sequence: Synthetic oligonucleotide
  Sense strand starting at position 2827 of SEQ ID NO: 917145
gccacagcccaauaaguaa

SEQ ID NO: 1212237 - RNA, 19 nt, Artificial Sequence
  Description of Artificial Sequence: Synthetic oligonucleotide
  Antisense strand to SEQ ID NO: 1212236
uuacuuauugggcuguggc

SEQ ID NO: 1212238 - RNA, 19 nt, Artificial Sequence
  Description of Artificial Sequence: Synthetic oligonucleotide
  Sense strand starting at position 2863 of SEQ ID NO: 917145
uguaauuaacugugcucuu

SEQ ID NO: 1212239 - RNA, 19 nt, Artificial Sequence
  Description of Artificial Sequence: Synthetic oligonucleotide
  Antisense strand to SEQ ID NO: 1212238
aagagcacaguuaauuaca

SEQ ID NO: 1212240 - RNA, 19 nt, Artificial Sequence
  Description of Artificial Sequence: Synthetic oligonucleotide
  Sense strand starting at position 2864 of SEQ ID NO: 917145
guaauuaacugugcucuuu

SEQ ID NO: 1212241 - RNA, 19 nt, Artificial Sequence
  Description of Artificial Sequence: Synthetic oligonucleotide
  Antisense strand to SEQ ID NO: 1212240
aaagagcacaguuaauuac

SEQ ID NO: 1212242 - RNA, 19 nt, Artificial Sequence
  Description of Artificial Sequence: Synthetic oligonucleotide
  Sense strand starting at position 2875 of SEQ ID NO: 917145
ugcucuuuggcauguggaa

SEQ ID NO: 1212243 - RNA, 19 nt, Artificial Sequence
  Description of Artificial Sequence: Synthetic oligonucleotide
  Antisense strand to SEQ ID NO: 1212242
uuccacaugccaaagagca

SEQ ID NO: 1212244 - RNA, 19 nt, Artificial Sequence
  Description of Artificial Sequence: Synthetic oligonucleotide
  Sense strand starting at position 2897 of SEQ ID NO: 917145
ugcagugagcucuguaaau

SEQ ID NO: 1212245 - RNA, 19 nt, Artificial Sequence
  Description of Artificial Sequence: Synthetic oligonucleotide
  Antisense strand to SEQ ID NO: 1212244
auuuacagagcucacugca

SEQ ID NO: 1212246 - RNA, 19 nt, Artificial Sequence
  Description of Artificial Sequence: Synthetic oligonucleotide
  Sense strand starting at position 2899 of SEQ ID NO: 917145
cagugagcucuguaaauac

SEQ ID NO: 1212247 - RNA, 19 nt, Artificial Sequence
  Description of Artificial Sequence: Synthetic oligonucleotide
  Antisense strand to SEQ ID NO: 1212246
guauuuacagagcucacug

SEQ ID NO: 1212248 - RNA, 19 nt, Artificial Sequence
  Description of Artificial Sequence: Synthetic oligonucleotide
  Sense strand starting at position 3117 of SEQ ID NO: 917145
aguaguuagaagcgugacu

SEQ ID NO: 1212249 - RNA, 19 nt, Artificial Sequence
  Description of Artificial Sequence: Synthetic oligonucleotide
  Antisense strand to SEQ ID NO: 1212248
agucacgcuucuaacuacu

SEQ ID NO: 1212250 - RNA, 19 nt, Artificial Sequence
  Description of Artificial Sequence: Synthetic oligonucleotide
  Sense strand starting at position 3119 of SEQ ID NO: 917145
uaguuagaagcgugacuaa

SEQ ID NO: 1212251 - RNA, 19 nt, Artificial Sequence
  Description of Artificial Sequence: Synthetic oligonucleotide
  Antisense strand to SEQ ID NO: 1212250
uuagucacgcuucuaacua

SEQ ID NO: 1212252 - RNA, 19 nt, Artificial Sequence
  Description of Artificial Sequence: Synthetic oligonucleotide
  Sense strand starting at position 3131 of SEQ ID NO: 917145
ugacuaacccgugguucuu

SEQ ID NO: 1212253 - RNA, 19 nt, Artificial Sequence
  Description of Artificial Sequence: Synthetic oligonucleotide
  Antisense strand to SEQ ID NO: 1212252
aagaaccacggguuaguca

SEQ ID NO: 1212254 - RNA, 19 nt, Artificial Sequence
  Description of Artificial Sequence: Synthetic oligonucleotide
  Sense strand starting at position 3144 of SEQ ID NO: 917145
guucuuaagcgugacuuaa

SEQ ID NO: 1212255 - RNA, 19 nt, Artificial Sequence
  Description of Artificial Sequence: Synthetic oligonucleotide
  Antisense strand to SEQ ID NO: 1212254
uuaagucacgcuuaagaac

SEQ ID NO: 1212256 - RNA, 19 nt, Artificial Sequence
  Description of Artificial Sequence: Synthetic oligonucleotide
  Sense strand starting at position 3155 of SEQ ID NO: 917145
ugacuuaacccgugguucu

SEQ ID NO: 1212257 - RNA, 19 nt, Artificial Sequence
  Description of Artificial Sequence: Synthetic oligonucleotide
  Antisense strand to SEQ ID NO: 1212256
agaaccacggguuaaguca

SEQ ID NO: 1212258 - RNA, 19 nt, Artificial Sequence
  Description of Artificial Sequence: Synthetic oligonucleotide
  Sense strand starting at position 3165 of SEQ ID NO: 917145
cgugguucugucguuacaa

SEQ ID NO: 1212259 - RNA, 19 nt, Artificial Sequence
  Description of Artificial Sequence: Synthetic oligonucleotide
  Antisense strand to SEQ ID NO: 1212258
uuguaacgacagaaccacg

SEQ ID NO: 1212260 - RNA, 19 nt, Artificial Sequence
  Description of Artificial Sequence: Synthetic oligonucleotide
  Sense strand starting at position 3167 of SEQ ID NO: 917145
ugguucugucguuacaauu

SEQ ID NO: 1212261 - RNA, 19 nt, Artificial Sequence
  Description of Artificial Sequence: Synthetic oligonucleotide
  Antisense strand to SEQ ID NO: 1212260
aauuguaacgacagaacca

SEQ ID NO: 1212262 - RNA, 19 nt, Artificial Sequence
  Description of Artificial Sequence: Synthetic oligonucleotide
  Sense strand starting at position 3205 of SEQ ID NO: 917145
ggaaaugguaaacguguuu

SEQ ID NO: 1212263 - RNA, 19 nt, Artificial Sequence
  Description of Artificial Sequence: Synthetic oligonucleotide
  Antisense strand to SEQ ID NO: 1212262
aaacacguuuaccauuucc

SEQ ID NO: 1212264 - RNA, 19 nt, Artificial Sequence
  Description of Artificial Sequence: Synthetic oligonucleotide
  Sense strand starting at position 3269 of SEQ ID NO: 917145
agcagacuggcuuaauuau

SEQ ID NO: 1212265 - RNA, 19 nt, Artificial Sequence
  Description of Artificial Sequence: Synthetic oligonucleotide
  Antisense strand to SEQ ID NO: 1212264
auaauuaagccagucugcu

SEQ ID NO: 1212266 - RNA, 19 nt, Artificial Sequence
  Description of Artificial Sequence: Synthetic oligonucleotide
  Sense strand starting at position 3360 of SEQ ID NO: 917145
accaguugucucuggauga

SEQ ID NO: 1212267 - RNA, 19 nt, Artificial Sequence
  Description of Artificial Sequence: Synthetic oligonucleotide
  Antisense strand to SEQ ID NO: 1212266
ucauccagagacaacuggu

SEQ ID NO: 1212268 - RNA, 19 nt, Artificial Sequence
  Description of Artificial Sequence: Synthetic oligonucleotide
  Sense strand starting at position 3373 of SEQ ID NO: 917145
ggaugaugggaugguguuu

SEQ ID NO: 1212269 - RNA, 19 nt, Artificial Sequence
  Description of Artificial Sequence: Synthetic oligonucleotide
  Antisense strand to SEQ ID NO: 1212268
aaacaccaucccaucaucc

SEQ ID NO: 1212270 - RNA, 19 nt, Artificial Sequence
  Description of Artificial Sequence: Synthetic oligonucleotide
  Sense strand starting at position 3378 of SEQ ID NO: 917145
augggaugguguuuaaauu

SEQ ID NO: 1212271 - RNA, 19 nt, Artificial Sequence
  Description of Artificial Sequence: Synthetic oligonucleotide
  Antisense strand to SEQ ID NO: 1212270
aauuuaaacaccaucccau

SEQ ID NO: 1212272 - RNA, 19 nt, Artificial Sequence
  Description of Artificial Sequence: Synthetic oligonucleotide
  Sense strand starting at position 3480 of SEQ ID NO: 917145
ggugugaacgcuggugaga

SEQ ID NO: 1212273 - RNA, 19 nt, Artificial Sequence
  Description of Artificial Sequence: Synthetic oligonucleotide
  Antisense strand to SEQ ID NO: 1212272
ucucaccagcguucacacc

SEQ ID NO: 1212274 - RNA, 19 nt, Artificial Sequence
  Description of Artificial Sequence: Synthetic oligonucleotide
  Sense strand starting at position 3947 of SEQ ID NO: 917145
acuauuacugagugugcuu

SEQ ID NO: 1212275 - RNA, 19 nt, Artificial Sequence
  Description of Artificial Sequence: Synthetic oligonucleotide
  Antisense strand to SEQ ID NO: 1212274
aagcacacucaguaauagu

SEQ ID NO: 1212276 - RNA, 19 nt, Artificial Sequence
  Description of Artificial Sequence: Synthetic oligonucleotide
  Sense strand starting at position 3958 of SEQ ID NO: 917145
gugugcuuagguggaagua

SEQ ID NO: 1212277 - RNA, 19 nt, Artificial Sequence
  Description of Artificial Sequence: Synthetic oligonucleotide
  Antisense strand to SEQ ID NO: 1212276
uacuuccaccuaagcacac

SEQ ID NO: 1212278 - RNA, 19 nt, Artificial Sequence
  Description of Artificial Sequence: Synthetic oligonucleotide
  Sense strand starting at position 3959 of SEQ ID NO: 917145
ugugcuuagguggaaguau

SEQ ID NO: 1212279 - RNA, 19 nt, Artificial Sequence
  Description of Artificial Sequence: Synthetic oligonucleotide
  Antisense strand to SEQ ID NO: 1212278
auacuuccaccuaagcaca

SEQ ID NO: 1212280 - RNA, 19 nt, Artificial Sequence
  Description of Artificial Sequence: Synthetic oligonucleotide
  Sense strand starting at position 3959 of SEQ ID NO: 917146
ugugcuuagguggaaguau

SEQ ID NO: 1212281 - RNA, 19 nt, Artificial Sequence
  Description of Artificial Sequence: Synthetic oligonucleotide
  Antisense strand to SEQ ID NO: 1212280
auacuuccaccuaagcaca

SEQ ID NO: 1212282 - RNA, 19 nt, Artificial Sequence
  Description of Artificial Sequence: Synthetic oligonucleotide
  Sense strand starting at position 181 of SEQ ID NO: 917146
cuauguaaacugcaugacu

SEQ ID NO: 1212283 - RNA, 19 nt, Artificial Sequence
  Description of Artificial Sequence: Synthetic oligonucleotide
  Antisense strand to SEQ ID NO: 1212282
agucaugcaguuuacauag

SEQ ID NO: 1212284 - RNA, 19 nt, Artificial Sequence
  Description of Artificial Sequence: Synthetic oligonucleotide
  Sense strand starting at position 358 of SEQ ID NO: 917146
acaaauugguguuccuuaa

SEQ ID NO: 1212285 - RNA, 19 nt, Artificial Sequence
  Description of Artificial Sequence: Synthetic oligonucleotide
  Antisense strand to SEQ ID NO: 1212284
uuaaggaacaccaauuugu

SEQ ID NO: 1212286 - RNA, 19 nt, Artificial Sequence
  Description of Artificial Sequence: Synthetic oligonucleotide
  Sense strand starting at position 362 of SEQ ID NO: 917146
auugguguuccuuaauauu

SEQ ID NO: 1212287 - RNA, 19 nt, Artificial Sequence
  Description of Artificial Sequence: Synthetic oligonucleotide
  Antisense strand to SEQ ID NO: 1212286
aauauuaaggaacaccaau

SEQ ID NO: 1212288 - RNA, 19 nt, Artificial Sequence
  Description of Artificial Sequence: Synthetic oligonucleotide
  Sense strand starting at position 528 of SEQ ID NO: 917146
uguuaauucuccuuggaaa

SEQ ID NO: 1212289 - RNA, 19 nt, Artificial Sequence
  Description of Artificial Sequence: Synthetic oligonucleotide
  Antisense strand to SEQ ID NO: 1212288
uuuccaaggagaauuaaca

SEQ ID NO: 1212290 - RNA, 19 nt, Artificial Sequence
  Description of Artificial Sequence: Synthetic oligonucleotide
  Sense strand starting at position 800 of SEQ ID NO: 917146
cauuauggccuuuggauau

SEQ ID NO: 1212291 - RNA, 19 nt, Artificial Sequence
  Description of Artificial Sequence: Synthetic oligonucleotide
  Antisense strand to SEQ ID NO: 1212290
auauccaaaggccauaaug

SEQ ID NO: 1212292 - RNA, 19 nt, Artificial Sequence
  Description of Artificial Sequence: Synthetic oligonucleotide
  Sense strand starting at position 822 of SEQ ID NO: 917146
uuggauacccaauguguuu

SEQ ID NO: 1212293 - RNA, 19 nt, Artificial Sequence
  Description of Artificial Sequence: Synthetic oligonucleotide
  Antisense strand to SEQ ID NO: 1212292
aaacacauuggguauccaa

SEQ ID NO: 1212294 - RNA, 19 nt, Artificial Sequence
  Description of Artificial Sequence: Synthetic oligonucleotide
  Sense strand starting at position 835 of SEQ ID NO: 917146
guguuugagggcuaaaucu

SEQ ID NO: 1212295 - RNA, 19 nt, Artificial Sequence
  Description of Artificial Sequence: Synthetic oligonucleotide
  Antisense strand to SEQ ID NO: 1212294
agauuuagcccucaaacac

SEQ ID NO: 1212296 - RNA, 19 nt, Artificial Sequence
  Description of Artificial Sequence: Synthetic oligonucleotide
  Sense strand starting at position 1073 of SEQ ID NO: 917146
guuugugcugucuaugaga

SEQ ID NO: 1212297 - RNA, 19 nt, Artificial Sequence
  Description of Artificial Sequence: Synthetic oligonucleotide
  Antisense strand to SEQ ID NO: 1212296
ucucauagacagcacaaac

SEQ ID NO: 1212298 - RNA, 19 nt, Artificial Sequence
  Description of Artificial Sequence: Synthetic oligonucleotide
  Sense strand starting at position 1075 of SEQ ID NO: 917146
uugugcugucuaugagacu

SEQ ID NO: 1212299 - RNA, 19 nt, Artificial Sequence
  Description of Artificial Sequence: Synthetic oligonucleotide
  Antisense strand to SEQ ID NO: 1212298
agucucauagacagcacaa

SEQ ID NO: 1212300 - RNA, 19 nt, Artificial Sequence
  Description of Artificial Sequence: Synthetic oligonucleotide
  Sense strand starting at position 1122 of SEQ ID NO: 917146
cggaauucagaugguaaug

SEQ ID NO: 1212301 - RNA, 19 nt, Artificial Sequence
  Description of Artificial Sequence: Synthetic oligonucleotide
  Antisense strand to SEQ ID NO: 1212300
cauuaccaucugaauuccg

SEQ ID NO: 1212302 - RNA, 19 nt, Artificial Sequence
  Description of Artificial Sequence: Synthetic oligonucleotide
  Sense strand starting at position 1242 of SEQ ID NO: 917146
gcaacucuugauugguguu

SEQ ID NO: 1212303 - RNA, 19 nt, Artificial Sequence
  Description of Artificial Sequence: Synthetic oligonucleotide
  Antisense strand to SEQ ID NO: 1212302
aacaccaaucaagaguugc

SEQ ID NO: 1212304 - RNA, 19 nt, Artificial Sequence
  Description of Artificial Sequence: Synthetic oligonucleotide
  Sense strand starting at position 1273 of SEQ ID NO: 917146
gugugauacuagguucucu

SEQ ID NO: 1212305 - RNA, 19 nt, Artificial Sequence
  Description of Artificial Sequence: Synthetic oligonucleotide
  Antisense strand to SEQ ID NO: 1212304
agagaaccuaguaucacac

SEQ ID NO: 1212306 - RNA, 19 nt, Artificial Sequence
  Description of Artificial Sequence: Synthetic oligonucleotide
  Sense strand starting at position 1506 of SEQ ID NO: 917146
uauagagauuaccuaagug

SEQ ID NO: 1212307 - RNA, 19 nt, Artificial Sequence
  Description of Artificial Sequence: Synthetic oligonucleotide
  Antisense strand to SEQ ID NO: 1212306
cacuuagguaaucucuaua

SEQ ID NO: 1212308 - RNA, 19 nt, Artificial Sequence
  Description of Artificial Sequence: Synthetic oligonucleotide
  Sense strand starting at position 1514 of SEQ ID NO: 917146
uuaccuaagugaggaaaga

SEQ ID NO: 1212309 - RNA, 19 nt, Artificial Sequence
  Description of Artificial Sequence: Synthetic oligonucleotide
  Antisense strand to SEQ ID NO: 1212308
ucuuuccucacuuagguaa

SEQ ID NO: 1212310 - RNA, 19 nt, Artificial Sequence
  Description of Artificial Sequence: Synthetic oligonucleotide
  Sense strand starting at position 1619 of SEQ ID NO: 917146
aggauuuguuagcaaauac

SEQ ID NO: 1212311 - RNA, 19 nt, Artificial Sequence
  Description of Artificial Sequence: Synthetic oligonucleotide
  Antisense strand to SEQ ID NO: 1212310
guauuugcuaacaaauccu

SEQ ID NO: 1212312 - RNA, 19 nt, Artificial Sequence
  Description of Artificial Sequence: Synthetic oligonucleotide
  Sense strand starting at position 1672 of SEQ ID NO: 917146
guacuaggauuuggauaua

SEQ ID NO: 1212313 - RNA, 19 nt, Artificial Sequence
  Description of Artificial Sequence: Synthetic oligonucleotide
  Antisense strand to SEQ ID NO: 1212312
uauauccaaauccuaguac

SEQ ID NO: 1212314 - RNA, 19 nt, Artificial Sequence
  Description of Artificial Sequence: Synthetic oligonucleotide
  Sense strand starting at position 1683 of SEQ ID NO: 917146
uggauauagugagauagaa

SEQ ID NO: 1212315 - RNA, 19 nt, Artificial Sequence
  Description of Artificial Sequence: Synthetic oligonucleotide
  Antisense strand to SEQ ID NO: 1212314
uucuaucucacuauaucca

SEQ ID NO: 1212316 - RNA, 19 nt, Artificial Sequence
  Description of Artificial Sequence: Synthetic oligonucleotide
  Sense strand starting at position 1705 of SEQ ID NO: 917146
ggaacaauaucccagcaua

SEQ ID NO: 1212317 - RNA, 19 nt, Artificial Sequence
  Description of Artificial Sequence: Synthetic oligonucleotide
  Antisense strand to SEQ ID NO: 1212316
uaugcugggauauuguucc

SEQ ID NO: 1212318 - RNA, 19 nt, Artificial Sequence
  Description of Artificial Sequence: Synthetic oligonucleotide
  Sense strand starting at position 1823 of SEQ ID NO: 917146
ggaaauacauagggaaguu

SEQ ID NO: 1212319 - RNA, 19 nt, Artificial Sequence
  Description of Artificial Sequence: Synthetic oligonucleotide
  Antisense strand to SEQ ID NO: 1212318
aacuucccuauguauuucc

SEQ ID NO: 1212320 - RNA, 19 nt, Artificial Sequence
  Description of Artificial Sequence: Synthetic oligonucleotide
  Sense strand starting at position 1869 of SEQ ID NO: 917146
gcacauauauuuguuguca

SEQ ID NO: 1212321 - RNA, 19 nt, Artificial Sequence
  Description of Artificial Sequence: Synthetic oligonucleotide
  Antisense strand to SEQ ID NO: 1212320
ugacaacaaauauaugugc

SEQ ID NO: 1212322 - RNA, 19 nt, Artificial Sequence
  Description of Artificial Sequence: Synthetic oligonucleotide
  Sense strand starting at position 1874 of SEQ ID NO: 917146
uauauuuguugucaaagga

SEQ ID NO: 1212323 - RNA, 19 nt, Artificial Sequence
  Description of Artificial Sequence: Synthetic oligonucleotide
  Antisense strand to SEQ ID NO: 1212322
uccuuugacaacaaauaua

SEQ ID NO: 1212324 - RNA, 19 nt, Artificial Sequence
  Description of Artificial Sequence: Synthetic oligonucleotide
  Sense strand starting at position 1878 of SEQ ID NO: 917146
uuuguugucaaaggaagaa

SEQ ID NO: 1212325 - RNA, 19 nt, Artificial Sequence
  Description of Artificial Sequence: Synthetic oligonucleotide
  Antisense strand to SEQ ID NO: 1212324
uucuuccuuugacaacaaa

SEQ ID NO: 1212326 - RNA, 19 nt, Artificial Sequence
  Description of Artificial Sequence: Synthetic oligonucleotide
  Sense strand starting at position 1915 of SEQ ID NO: 917146
agcuauucccuguacacuu

SEQ ID NO: 1212327 - RNA, 19 nt, Artificial Sequence
  Description of Artificial Sequence: Synthetic oligonucleotide
  Antisense strand to SEQ ID NO: 1212326
aaguguacagggaauagcu

SEQ ID NO: 1212328 - RNA, 19 nt, Artificial Sequence
  Description of Artificial Sequence: Synthetic oligonucleotide
  Sense strand starting at position 2047 of SEQ ID NO: 917146
gucacagugaagugucaca

SEQ ID NO: 1212329 - RNA, 19 nt, Artificial Sequence
  Description of Artificial Sequence: Synthetic oligonucleotide
  Antisense strand to SEQ ID NO: 1212328
ugugacacuucacugugac

SEQ ID NO: 1212330 - RNA, 19 nt, Artificial Sequence
  Description of Artificial Sequence: Synthetic oligonucleotide
  Sense strand starting at position 2404 of SEQ ID NO: 917146
auuucuccauugggauaga

SEQ ID NO: 1212331 - RNA, 19 nt, Artificial Sequence
  Description of Artificial Sequence: Synthetic oligonucleotide
  Antisense strand to SEQ ID NO: 1212330
ucuaucccaauggagaaau

SEQ ID NO: 1212332 - RNA, 19 nt, Artificial Sequence
  Description of Artificial Sequence: Synthetic oligonucleotide
  Sense strand starting at position 2539 of SEQ ID NO: 917146
agaagaauguagugagaca

SEQ ID NO: 1212333 - RNA, 19 nt, Artificial Sequence
  Description of Artificial Sequence: Synthetic oligonucleotide
  Antisense strand to SEQ ID NO: 1212332
ugucucacuacauucuucu

SEQ ID NO: 1212334 - RNA, 19 nt, Artificial Sequence
  Description of Artificial Sequence: Synthetic oligonucleotide
  Sense strand starting at position 2554 of SEQ ID NO: 917146
gacagaaucuuguauacug

SEQ ID NO: 1212335 - RNA, 19 nt, Artificial Sequence
  Description of Artificial Sequence: Synthetic oligonucleotide
  Antisense strand to SEQ ID NO: 1212334
caguauacaagauucuguc

SEQ ID NO: 1212336 - RNA, 19 nt, Artificial Sequence
  Description of Artificial Sequence: Synthetic oligonucleotide
  Sense strand starting at position 2563 of SEQ ID NO: 917146
uuguauacugcugaguaga

SEQ ID NO: 1212337 - RNA, 19 nt, Artificial Sequence
  Description of Artificial Sequence: Synthetic oligonucleotide
  Antisense strand to SEQ ID NO: 1212336
ucuacucagcaguauacaa

SEQ ID NO: 1212338 - RNA, 19 nt, Artificial Sequence
  Description of Artificial Sequence: Synthetic oligonucleotide
  Sense strand starting at position 2565 of SEQ ID NO: 917146
guauacugcugaguagaac

SEQ ID NO: 1212339 - RNA, 19 nt, Artificial Sequence
  Description of Artificial Sequence: Synthetic oligonucleotide
  Antisense strand to SEQ ID NO: 1212338
guucuacucagcaguauac

SEQ ID NO: 1212340 - RNA, 19 nt, Artificial Sequence
  Description of Artificial Sequence: Synthetic oligonucleotide
  Sense strand starting at position 2566 of SEQ ID NO: 917146
uauacugcugaguagaaca

SEQ ID NO: 1212341 - RNA, 19 nt, Artificial Sequence
  Description of Artificial Sequence: Synthetic oligonucleotide
  Antisense strand to SEQ ID NO: 1212340
uguucuacucagcaguaua

SEQ ID NO: 1212342 - RNA, 19 nt, Artificial Sequence
  Description of Artificial Sequence: Synthetic oligonucleotide
  Sense strand starting at position 2730 of SEQ ID NO: 917146
agccaagaguaucuacaaa

SEQ ID NO: 1212343 - RNA, 19 nt, Artificial Sequence
  Description of Artificial Sequence: Synthetic oligonucleotide
  Antisense strand to SEQ ID NO: 1212342
uuuguagauacucuuggcu

SEQ ID NO: 1212344 - RNA, 19 nt, Artificial Sequence
  Description of Artificial Sequence: Synthetic oligonucleotide
  Sense strand starting at position 2820 of SEQ ID NO: 917146
ugccauauauagucacaua

SEQ ID NO: 1212345 - RNA, 19 nt, Artificial Sequence
  Description of Artificial Sequence: Synthetic oligonucleotide
  Antisense strand to SEQ ID NO: 1212344
uaugugacuauauauggca

SEQ ID NO: 1212346 - RNA, 19 nt, Artificial Sequence
  Description of Artificial Sequence: Synthetic oligonucleotide
  Sense strand starting at position 3126 of SEQ ID NO: 917146
cgccauuaaguaggcauua

SEQ ID NO: 1212347 - RNA, 19 nt, Artificial Sequence
  Description of Artificial Sequence: Synthetic oligonucleotide
  Antisense strand to SEQ ID NO: 1212346
uaaugccuacuuaauggcg

SEQ ID NO: 1212348 - RNA, 19 nt, Artificial Sequence
  Description of Artificial Sequence: Synthetic oligonucleotide
  Sense strand starting at position 3127 of SEQ ID NO: 917146
gccauuaaguaggcauuaa

SEQ ID NO: 1212349 - RNA, 19 nt, Artificial Sequence
  Description of Artificial Sequence: Synthetic oligonucleotide
  Antisense strand to SEQ ID NO: 1212348
uuaaugccuacuuaauggc

SEQ ID NO: 1212350 - RNA, 19 nt, Artificial Sequence
  Description of Artificial Sequence: Synthetic oligonucleotide
  Sense strand starting at position 3804 of SEQ ID NO: 917146
aaaugugggcucugauaua

SEQ ID NO: 1212351 - RNA, 19 nt, Artificial Sequence
  Description of Artificial Sequence: Synthetic oligonucleotide
  Antisense strand to SEQ ID NO: 1212350
uauaucagagcccacauuu

SEQ ID NO: 1212352 - RNA, 19 nt, Artificial Sequence
  Description of Artificial Sequence: Synthetic oligonucleotide
  Sense strand starting at position 3854 of SEQ ID NO: 917146
uggugaagccuauagacuu

SEQ ID NO: 1212353 - RNA, 19 nt, Artificial Sequence
  Description of Artificial Sequence: Synthetic oligonucleotide
  Antisense strand to SEQ ID NO: 1212352
aagucuauaggcuucacca

SEQ ID NO: 1212354 - RNA, 19 nt, Artificial Sequence
  Description of Artificial Sequence: Synthetic oligonucleotide
  Sense strand starting at position 3865 of SEQ ID NO: 917146
auagacuucugaguuucca

SEQ ID NO: 1212355 - RNA, 19 nt, Artificial Sequence
  Description of Artificial Sequence: Synthetic oligonucleotide
  Antisense strand to SEQ ID NO: 1212354
uggaaacucagaagucuau

SEQ ID NO: 1212356 - RNA, 19 nt, Artificial Sequence
  Description of Artificial Sequence: Synthetic oligonucleotide
  Sense strand starting at position 3869 of SEQ ID NO: 917146
acuucugaguuuccauuau

SEQ ID NO: 1212357 - RNA, 19 nt, Artificial Sequence
  Description of Artificial Sequence: Synthetic oligonucleotide
  Antisense strand to SEQ ID NO: 1212356
auaauggaaacucagaagu

SEQ ID NO: 1212358 - RNA, 19 nt, Artificial Sequence
  Description of Artificial Sequence: Synthetic oligonucleotide
  Sense strand starting at position 3964 of SEQ ID NO: 917146
acuagaaugugagcuuugu

SEQ ID NO: 1212359 - RNA, 19 nt, Artificial Sequence
  Description of Artificial Sequence: Synthetic oligonucleotide
  Antisense strand to SEQ ID NO: 1212358
acaaagcucacauucuagu

SEQ ID NO: 1212360 - RNA, 19 nt, Artificial Sequence
  Description of Artificial Sequence: Synthetic oligonucleotide
  Sense strand starting at position 3974 of SEQ ID NO: 917146
gagcuuugugagggcagga

SEQ ID NO: 1212361 - RNA, 19 nt, Artificial Sequence
  Description of Artificial Sequence: Synthetic oligonucleotide
  Antisense strand to SEQ ID NO: 1212360
uccugcccucacaaagcuc

SEQ ID NO: 1212362 - RNA, 19 nt, Artificial Sequence
  Description of Artificial Sequence: Synthetic oligonucleotide
  Sense strand starting at position 3974 of SEQ ID NO: 917147
gagcuuugugagggcagga

SEQ ID NO: 1212363 - RNA, 19 nt, Artificial Sequence
  Description of Artificial Sequence: Synthetic oligonucleotide
  Antisense strand to SEQ ID NO: 1212362
uccugcccucacaaagcuc

SEQ ID NO: 1212364 - RNA, 19 nt, Artificial Sequence
  Description of Artificial Sequence: Synthetic oligonucleotide
  Sense strand starting at position 113 of SEQ ID NO: 917147
guaaauugggaaugcauua

SEQ ID NO: 1212365 - RNA, 19 nt, Artificial Sequence
  Description of Artificial Sequence: Synthetic oligonucleotide
  Antisense strand to SEQ ID NO: 1212364
uaaugcauucccaauuuac

SEQ ID NO: 1212366 - RNA, 19 nt, Artificial Sequence
  Description of Artificial Sequence: Synthetic oligonucleotide
  Sense strand starting at position 118 of SEQ ID NO: 917147
uugggaaugcauuauucuu

SEQ ID NO: 1212367 - RNA, 19 nt, Artificial Sequence
  Description of Artificial Sequence: Synthetic oligonucleotide
  Antisense strand to SEQ ID NO: 1212366
aagaauaaugcauucccaa

SEQ ID NO: 1212368 - RNA, 19 nt, Artificial Sequence
  Description of Artificial Sequence: Synthetic oligonucleotide
  Sense strand starting at position 120 of SEQ ID NO: 917147
gggaaugcauuauucuuua

SEQ ID NO: 1212369 - RNA, 19 nt, Artificial Sequence
  Description of Artificial Sequence: Synthetic oligonucleotide
  Antisense strand to SEQ ID NO: 1212368
uaaagaauaaugcauuccc

SEQ ID NO: 1212370 - RNA, 19 nt, Artificial Sequence
  Description of Artificial Sequence: Synthetic oligonucleotide
  Sense strand starting at position 153 of SEQ ID NO: 917147
uuccuaugggccugggaaa

SEQ ID NO: 1212371 - RNA, 19 nt, Artificial Sequence
  Description of Artificial Sequence: Synthetic oligonucleotide
  Antisense strand to SEQ ID NO: 1212370
uuucccaggcccauaggaa

SEQ ID NO: 1212372 - RNA, 19 nt, Artificial Sequence
  Description of Artificial Sequence: Synthetic oligonucleotide
  Sense strand starting at position 154 of SEQ ID NO: 917147
uccuaugggccugggaaau

SEQ ID NO: 1212373 - RNA, 19 nt, Artificial Sequence
  Description of Artificial Sequence: Synthetic oligonucleotide
  Antisense strand to SEQ ID NO: 1212372
auuucccaggcccauagga

SEQ ID NO: 1212374 - RNA, 19 nt, Artificial Sequence
  Description of Artificial Sequence: Synthetic oligonucleotide
  Sense strand starting at position 172 of SEQ ID NO: 917147
ugguaccaucacuaaggua

SEQ ID NO: 1212375 - RNA, 19 nt, Artificial Sequence
  Description of Artificial Sequence: Synthetic oligonucleotide
  Antisense strand to SEQ ID NO: 1212374
uaccuuagugaugguacca

SEQ ID NO: 1212376 - RNA, 19 nt, Artificial Sequence
  Description of Artificial Sequence: Synthetic oligonucleotide
  Sense strand starting at position 192 of SEQ ID NO: 917147
cacagugaaugauuaguuu

SEQ ID NO: 1212377 - RNA, 19 nt, Artificial Sequence
  Description of Artificial Sequence: Synthetic oligonucleotide
  Antisense strand to SEQ ID NO: 1212376
aaacuaaucauucacugug

SEQ ID NO: 1212378 - RNA, 19 nt, Artificial Sequence
  Description of Artificial Sequence: Synthetic oligonucleotide
  Sense strand starting at position 316 of SEQ ID NO: 917147
uugugauauuaucucuaug

SEQ ID NO: 1212379 - RNA, 19 nt, Artificial Sequence
  Description of Artificial Sequence: Synthetic oligonucleotide
  Antisense strand to SEQ ID NO: 1212378
cauagagauaauaucacaa

SEQ ID NO: 1212380 - RNA, 19 nt, Artificial Sequence
  Description of Artificial Sequence: Synthetic oligonucleotide
  Sense strand starting at position 318 of SEQ ID NO: 917147
gugauauuaucucuaugau

SEQ ID NO: 1212381 - RNA, 19 nt, Artificial Sequence
  Description of Artificial Sequence: Synthetic oligonucleotide
  Antisense strand to SEQ ID NO: 1212380
aucauagagauaauaucac

SEQ ID NO: 1212382 - RNA, 19 nt, Artificial Sequence
  Description of Artificial Sequence: Synthetic oligonucleotide
  Sense strand starting at position 547 of SEQ ID NO: 917147
uucuaauguguuuacugau

SEQ ID NO: 1212383 - RNA, 19 nt, Artificial Sequence
  Description of Artificial Sequence: Synthetic oligonucleotide
  Antisense strand to SEQ ID NO: 1212382
aucaguaaacacauuagaa

SEQ ID NO: 1212384 - RNA, 19 nt, Artificial Sequence
  Description of Artificial Sequence: Synthetic oligonucleotide
  Sense strand starting at position 560 of SEQ ID NO: 917147
acugauacucugcagaagu

SEQ ID NO: 1212385 - RNA, 19 nt, Artificial Sequence
  Description of Artificial Sequence: Synthetic oligonucleotide
  Antisense strand to SEQ ID NO: 1212384
acuucugcagaguaucagu

SEQ ID NO: 1212386 - RNA, 19 nt, Artificial Sequence
  Description of Artificial Sequence: Synthetic oligonucleotide
  Sense strand starting at position 562 of SEQ ID NO: 917147
ugauacucugcagaaguuu

SEQ ID NO: 1212387 - RNA, 19 nt, Artificial Sequence
  Description of Artificial Sequence: Synthetic oligonucleotide
  Antisense strand to SEQ ID NO: 1212386
aaacuucugcagaguauca

SEQ ID NO: 1212388 - RNA, 19 nt, Artificial Sequence
  Description of Artificial Sequence: Synthetic oligonucleotide
  Sense strand starting at position 978 of SEQ ID NO: 917147
agaggaaagcuugguauaa

SEQ ID NO: 1212389 - RNA, 19 nt, Artificial Sequence
  Description of Artificial Sequence: Synthetic oligonucleotide
  Antisense strand to SEQ ID NO: 1212388
uuauaccaagcuuuccucu

SEQ ID NO: 1212390 - RNA, 19 nt, Artificial Sequence
  Description of Artificial Sequence: Synthetic oligonucleotide
  Sense strand starting at position 979 of SEQ ID NO: 917147
gaggaaagcuugguauaaa

SEQ ID NO: 1212391 - RNA, 19 nt, Artificial Sequence
  Description of Artificial Sequence: Synthetic oligonucleotide
  Antisense strand to SEQ ID NO: 1212390
uuuauaccaagcuuuccuc

SEQ ID NO: 1212392 - RNA, 19 nt, Artificial Sequence
  Description of Artificial Sequence: Synthetic oligonucleotide
  Sense strand starting at position 1311 of SEQ ID NO: 917147
uuggaaacucuuuguaaau

SEQ ID NO: 1212393 - RNA, 19 nt, Artificial Sequence
  Description of Artificial Sequence: Synthetic oligonucleotide
  Antisense strand to SEQ ID NO: 1212392
auuuacaaagaguuuccaa

SEQ ID NO: 1212394 - RNA, 19 nt, Artificial Sequence
  Description of Artificial Sequence: Synthetic oligonucleotide
  Sense strand starting at position 1312 of SEQ ID NO: 917147
uggaaacucuuuguaaaua

SEQ ID NO: 1212395 - RNA, 19 nt, Artificial Sequence
  Description of Artificial Sequence: Synthetic oligonucleotide
  Antisense strand to SEQ ID NO: 1212394
uauuuacaaagaguuucca

SEQ ID NO: 1212396 - RNA, 19 nt, Artificial Sequence
  Description of Artificial Sequence: Synthetic oligonucleotide
  Sense strand starting at position 1364 of SEQ ID NO: 917147
cacagaauaguugguaaug

SEQ ID NO: 1212397 - RNA, 19 nt, Artificial Sequence
  Description of Artificial Sequence: Synthetic oligonucleotide
  Antisense strand to SEQ ID NO: 1212396
cauuaccaacuauucugug

SEQ ID NO: 1212398 - RNA, 19 nt, Artificial Sequence
  Description of Artificial Sequence: Synthetic oligonucleotide
  Sense strand starting at position 1398 of SEQ ID NO: 917147
gcaacagagaaguauuguu

SEQ ID NO: 1212399 - RNA, 19 nt, Artificial Sequence
  Description of Artificial Sequence: Synthetic oligonucleotide
  Antisense strand to SEQ ID NO: 1212398
aacaauacuucucuguugc

SEQ ID NO: 1212400 - RNA, 19 nt, Artificial Sequence
  Description of Artificial Sequence: Synthetic oligonucleotide
  Sense strand starting at position 1582 of SEQ ID NO: 917147
uguugauacucaccaaaug

SEQ ID NO: 1212401 - RNA, 19 nt, Artificial Sequence
  Description of Artificial Sequence: Synthetic oligonucleotide
  Antisense strand to SEQ ID NO: 1212400
cauuuggugaguaucaaca

SEQ ID NO: 1212402 - RNA, 19 nt, Artificial Sequence
  Description of Artificial Sequence: Synthetic oligonucleotide
  Sense strand starting at position 1583 of SEQ ID NO: 917147
guugauacucaccaaaugu

SEQ ID NO: 1212403 - RNA, 19 nt, Artificial Sequence
  Description of Artificial Sequence: Synthetic oligonucleotide
  Antisense strand to SEQ ID NO: 1212402
acauuuggugaguaucaac

SEQ ID NO: 1212404 - RNA, 19 nt, Artificial Sequence
  Description of Artificial Sequence: Synthetic oligonucleotide
  Sense strand starting at position 1701 of SEQ ID NO: 917147
gccuuuaucguccauuuaa

SEQ ID NO: 1212405 - RNA, 19 nt, Artificial Sequence
  Description of Artificial Sequence: Synthetic oligonucleotide
  Antisense strand to SEQ ID NO: 1212404
uuaaauggacgauaaaggc

SEQ ID NO: 1212406 - RNA, 19 nt, Artificial Sequence
  Description of Artificial Sequence: Synthetic oligonucleotide
  Sense strand starting at position 1939 of SEQ ID NO: 917147
ucuguuucuggucaaacca

SEQ ID NO: 1212407 - RNA, 19 nt, Artificial Sequence
  Description of Artificial Sequence: Synthetic oligonucleotide
  Antisense strand to SEQ ID NO: 1212406
ugguuugaccagaaacaga

SEQ ID NO: 1212408 - RNA, 19 nt, Artificial Sequence
  Description of Artificial Sequence: Synthetic oligonucleotide
  Sense strand starting at position 1961 of SEQ ID NO: 917147
ugcuuaugcguucuccacu

SEQ ID NO: 1212409 - RNA, 19 nt, Artificial Sequence
  Description of Artificial Sequence: Synthetic oligonucleotide
  Antisense strand to SEQ ID NO: 1212408
aguggagaacgcauaagca

SEQ ID NO: 1212410 - RNA, 19 nt, Artificial Sequence
  Description of Artificial Sequence: Synthetic oligonucleotide
  Sense strand starting at position 2296 of SEQ ID NO: 917147
augcuagcuccugaaggaa

SEQ ID NO: 1212411 - RNA, 19 nt, Artificial Sequence
  Description of Artificial Sequence: Synthetic oligonucleotide
  Antisense strand to SEQ ID NO: 1212410
uuccuucaggagcuagcau

SEQ ID NO: 1212412 - RNA, 19 nt, Artificial Sequence
  Description of Artificial Sequence: Synthetic oligonucleotide
  Sense strand starting at position 2311 of SEQ ID NO: 917147
ggaagaugcuauucccaac

SEQ ID NO: 1212413 - RNA, 19 nt, Artificial Sequence
  Description of Artificial Sequence: Synthetic oligonucleotide
  Antisense strand to SEQ ID NO: 1212412
guugggaauagcaucuucc

SEQ ID NO: 1212414 - RNA, 19 nt, Artificial Sequence
  Description of Artificial Sequence: Synthetic oligonucleotide
  Sense strand starting at position 2590 of SEQ ID NO: 917147
auuauugcuguuggaaaga

SEQ ID NO: 1212415 - RNA, 19 nt, Artificial Sequence
  Description of Artificial Sequence: Synthetic oligonucleotide
  Antisense strand to SEQ ID NO: 1212414
ucuuuccaacagcaauaau

SEQ ID NO: 1212416 - RNA, 19 nt, Artificial Sequence
  Description of Artificial Sequence: Synthetic oligonucleotide
  Sense strand starting at position 2741 of SEQ ID NO: 917147
uuacgaaacucucuguaag

SEQ ID NO: 1212417 - RNA, 19 nt, Artificial Sequence
  Description of Artificial Sequence: Synthetic oligonucleotide
  Antisense strand to SEQ ID NO: 1212416
cuuacagagaguuucguaa

SEQ ID NO: 1212418 - RNA, 19 nt, Artificial Sequence
  Description of Artificial Sequence: Synthetic oligonucleotide
  Sense strand starting at position 2744 of SEQ ID NO: 917147
cgaaacucucuguaagguu

SEQ ID NO: 1212419 - RNA, 19 nt, Artificial Sequence
  Description of Artificial Sequence: Synthetic oligonucleotide
  Antisense strand to SEQ ID NO: 1212418
aaccuuacagagaguuucg

SEQ ID NO: 1212420 - RNA, 19 nt, Artificial Sequence
  Description of Artificial Sequence: Synthetic oligonucleotide
  Sense strand starting at position 2807 of SEQ ID NO: 917147
gcagguuuagauggcauuu

SEQ ID NO: 1212421 - RNA, 19 nt, Artificial Sequence
  Description of Artificial Sequence: Synthetic oligonucleotide
  Antisense strand to SEQ ID NO: 1212420
aaaugccaucuaaaccugc

SEQ ID NO: 1212422 - RNA, 19 nt, Artificial Sequence
  Description of Artificial Sequence: Synthetic oligonucleotide
  Sense strand starting at position 2823 of SEQ ID NO: 917147
uuuguaggauucuuuggaa

SEQ ID NO: 1212423 - RNA, 19 nt, Artificial Sequence
  Description of Artificial Sequence: Synthetic oligonucleotide
  Antisense strand to SEQ ID NO: 1212422
uuccaaagaauccuacaaa

SEQ ID NO: 1212424 - RNA, 19 nt, Artificial Sequence
  Description of Artificial Sequence: Synthetic oligonucleotide
  Sense strand starting at position 3200 of SEQ ID NO: 917147
gaucucguuuauuuaaagu

SEQ ID NO: 1212425 - RNA, 19 nt, Artificial Sequence
  Description of Artificial Sequence: Synthetic oligonucleotide
  Antisense strand to SEQ ID NO: 1212424
acuuuaaauaaacgagauc

SEQ ID NO: 1212426 - RNA, 19 nt, Artificial Sequence
  Description of Artificial Sequence: Synthetic oligonucleotide
  Sense strand starting at position 3253 of SEQ ID NO: 917147
gguuauuucuuagcaccua

SEQ ID NO: 1212427 - RNA, 19 nt, Artificial Sequence
  Description of Artificial Sequence: Synthetic oligonucleotide
  Antisense strand to SEQ ID NO: 1212426
uaggugcuaagaaauaacc

SEQ ID NO: 1212428 - RNA, 19 nt, Artificial Sequence
  Description of Artificial Sequence: Synthetic oligonucleotide
  Sense strand starting at position 3295 of SEQ ID NO: 917147
agagauuagucugccaauu

SEQ ID NO: 1212429 - RNA, 19 nt, Artificial Sequence
  Description of Artificial Sequence: Synthetic oligonucleotide
  Antisense strand to SEQ ID NO: 1212428
aauuggcagacuaaucucu

SEQ ID NO: 1212430 - RNA, 19 nt, Artificial Sequence
  Description of Artificial Sequence: Synthetic oligonucleotide
  Sense strand starting at position 3387 of SEQ ID NO: 917147
auucuaaaucacugagggu

SEQ ID NO: 1212431 - RNA, 19 nt, Artificial Sequence
  Description of Artificial Sequence: Synthetic oligonucleotide
  Antisense strand to SEQ ID NO: 1212430
acccucagugauuuagaau

SEQ ID NO: 1212432 - RNA, 19 nt, Artificial Sequence
  Description of Artificial Sequence: Synthetic oligonucleotide
  Sense strand starting at position 3485 of SEQ ID NO: 917147
uuaggauaacugcaagguu

SEQ ID NO: 1212433 - RNA, 19 nt, Artificial Sequence
  Description of Artificial Sequence: Synthetic oligonucleotide
  Antisense strand to SEQ ID NO: 1212432
aaccuugcaguuauccuaa

SEQ ID NO: 1212434 - RNA, 19 nt, Artificial Sequence
  Description of Artificial Sequence: Synthetic oligonucleotide
  Sense strand starting at position 3488 of SEQ ID NO: 917147
ggauaacugcaagguuaau

SEQ ID NO: 1212435 - RNA, 19 nt, Artificial Sequence
  Description of Artificial Sequence: Synthetic oligonucleotide
  Antisense strand to SEQ ID NO: 1212434
auuaaccuugcaguuaucc

SEQ ID NO: 1212436 - RNA, 19 nt, Artificial Sequence
  Description of Artificial Sequence: Synthetic oligonucleotide
  Sense strand starting at position 3648 of SEQ ID NO: 917147
acagcaagagugcagaaau

SEQ ID NO: 1212437 - RNA, 19 nt, Artificial Sequence
  Description of Artificial Sequence: Synthetic oligonucleotide
  Antisense strand to SEQ ID NO: 1212436
auuucugcacucuugcugu

SEQ ID NO: 1212438 - RNA, 19 nt, Artificial Sequence
  Description of Artificial Sequence: Synthetic oligonucleotide
  Sense strand starting at position 3679 of SEQ ID NO: 917147
aggaaacuggguugaguau

SEQ ID NO: 1212439 - RNA, 19 nt, Artificial Sequence
  Description of Artificial Sequence: Synthetic oligonucleotide
  Antisense strand to SEQ ID NO: 1212438
auacucaacccaguuuccu

SEQ ID NO: 1212440 - RNA, 19 nt, Artificial Sequence
  Description of Artificial Sequence: Synthetic oligonucleotide
  Sense strand starting at position 3686 of SEQ ID NO: 917147
uggguugaguauucagaag

SEQ ID NO: 1212441 - RNA, 19 nt, Artificial Sequence
  Description of Artificial Sequence: Synthetic oligonucleotide
  Antisense strand to SEQ ID NO: 1212440
cuucugaauacucaaccca

SEQ ID NO: 1212442 - RNA, 19 nt, Artificial Sequence
  Description of Artificial Sequence: Synthetic oligonucleotide
  Sense strand starting at position 3701 of SEQ ID NO: 917148
gaaggauauugccucagua

SEQ ID NO: 1212443 - RNA, 19 nt, Artificial Sequence
  Description of Artificial Sequence: Synthetic oligonucleotide
  Antisense strand to SEQ ID NO: 1212442
uacugaggcaauauccuuc

SEQ ID NO: 1212444 - RNA, 19 nt, Artificial Sequence
  Description of Artificial Sequence: Synthetic oligonucleotide
  Sense strand starting at position 73 of SEQ ID NO: 917148
gcaaguuccagcuggcuua

SEQ ID NO: 1212445 - RNA, 19 nt, Artificial Sequence
  Description of Artificial Sequence: Synthetic oligonucleotide
  Antisense strand to SEQ ID NO: 1212444
uaagccagcuggaacuugc

SEQ ID NO: 1212446 - RNA, 19 nt, Artificial Sequence
  Description of Artificial Sequence: Synthetic oligonucleotide
  Sense strand starting at position 87 of SEQ ID NO: 917148
gcuuacugacgucaccauu

SEQ ID NO: 1212447 - RNA, 19 nt, Artificial Sequence
  Description of Artificial Sequence: Synthetic oligonucleotide
  Antisense strand to SEQ ID NO: 1212446
aauggugacgucaguaagc

SEQ ID NO: 1212448 - RNA, 19 nt, Artificial Sequence
  Description of Artificial Sequence: Synthetic oligonucleotide
  Sense strand starting at position 152 of SEQ ID NO: 917148
gaucaaaguucugaaggau

SEQ ID NO: 1212449 - RNA, 19 nt, Artificial Sequence
  Description of Artificial Sequence: Synthetic oligonucleotide
  Antisense strand to SEQ ID NO: 1212448
auccuucagaacuuugauc

SEQ ID NO: 1212450 - RNA, 19 nt, Artificial Sequence
  Description of Artificial Sequence: Synthetic oligonucleotide
  Sense strand starting at position 180 of SEQ ID NO: 917148
uugacaauaggcgacuuaa

SEQ ID NO: 1212451 - RNA, 19 nt, Artificial Sequence
  Description of Artificial Sequence: Synthetic oligonucleotide
  Antisense strand to SEQ ID NO: 1212450
uuaagucgccuauugucaa

SEQ ID NO: 1212452 - RNA, 19 nt, Artificial Sequence
  Description of Artificial Sequence: Synthetic oligonucleotide
  Sense strand starting at position 224 of SEQ ID NO: 917148
agacaauucugagucugga

SEQ ID NO: 1212453 - RNA, 19 nt, Artificial Sequence
  Description of Artificial Sequence: Synthetic oligonucleotide
  Antisense strand to SEQ ID NO: 1212452
uccagacucagaauugucu

SEQ ID NO: 1212454 - RNA, 19 nt, Artificial Sequence
  Description of Artificial Sequence: Synthetic oligonucleotide
  Sense strand starting at position 227 of SEQ ID NO: 917148
caauucugagucuggaaga

SEQ ID NO: 1212455 - RNA, 19 nt, Artificial Sequence
  Description of Artificial Sequence: Synthetic oligonucleotide
  Antisense strand to SEQ ID NO: 1212454
ucuuccagacucagaauug

SEQ ID NO: 1212456 - RNA, 19 nt, Artificial Sequence
  Description of Artificial Sequence: Synthetic oligonucleotide
  Sense strand starting at position 228 of SEQ ID NO: 917148
aauucugagucuggaagaa

SEQ ID NO: 1212457 - RNA, 19 nt, Artificial Sequence
  Description of Artificial Sequence: Synthetic oligonucleotide
  Antisense strand to SEQ ID NO: 1212456
uucuuccagacucagaauu

SEQ ID NO: 1212458 - RNA, 19 nt, Artificial Sequence
  Description of Artificial Sequence: Synthetic oligonucleotide
  Sense strand starting at position 248 of SEQ ID NO: 917148
agguuaaauuuguuuggcu

SEQ ID NO: 1212459 - RNA, 19 nt, Artificial Sequence
  Description of Artificial Sequence: Synthetic oligonucleotide
  Antisense strand to SEQ ID NO: 1212458
agccaaacaaauuuaaccu

SEQ ID NO: 1212460 - RNA, 19 nt, Artificial Sequence
  Description of Artificial Sequence: Synthetic oligonucleotide
  Sense strand starting at position 249 of SEQ ID NO: 917148
gguuaaauuuguuuggcuu

SEQ ID NO: 1212461 - RNA, 19 nt, Artificial Sequence
  Description of Artificial Sequence: Synthetic oligonucleotide
  Antisense strand to SEQ ID NO: 1212460
aagccaaacaaauuuaacc

SEQ ID NO: 1212462 - RNA, 19 nt, Artificial Sequence
  Description of Artificial Sequence: Synthetic oligonucleotide
  Sense strand starting at position 250 of SEQ ID NO: 917148
guuaaauuuguuuggcuuu

SEQ ID NO: 1212463 - RNA, 19 nt, Artificial Sequence
  Description of Artificial Sequence: Synthetic oligonucleotide
  Antisense strand to SEQ ID NO: 1212462
aaagccaaacaaauuuaac

SEQ ID NO: 1212464 - RNA, 19 nt, Artificial Sequence
  Description of Artificial Sequence: Synthetic oligonucleotide
  Sense strand starting at position 483 of SEQ ID NO: 917148
uaggcagucugauaauaaa

SEQ ID NO: 1212465 - RNA, 19 nt, Artificial Sequence
  Description of Artificial Sequence: Synthetic oligonucleotide
  Antisense strand to SEQ ID NO: 1212464
uuuauuaucagacugccua

SEQ ID NO: 1212466 - RNA, 19 nt, Artificial Sequence
  Description of Artificial Sequence: Synthetic oligonucleotide
  Sense strand starting at position 532 of SEQ ID NO: 917148
uacuaaucacgguguguga

SEQ ID NO: 1212467 - RNA, 19 nt, Artificial Sequence
  Description of Artificial Sequence: Synthetic oligonucleotide
  Antisense strand to SEQ ID NO: 1212466
ucacacaccgugauuagua

SEQ ID NO: 1212468 - RNA, 19 nt, Artificial Sequence
  Description of Artificial Sequence: Synthetic oligonucleotide
  Sense strand starting at position 534 of SEQ ID NO: 917148
cuaaucacggugugugaau

SEQ ID NO: 1212469 - RNA, 19 nt, Artificial Sequence
  Description of Artificial Sequence: Synthetic oligonucleotide
  Antisense strand to SEQ ID NO: 1212468
auucacacaccgugauuag

SEQ ID NO: 1212470 - RNA, 19 nt, Artificial Sequence
  Description of Artificial Sequence: Synthetic oligonucleotide
  Sense strand starting at position 535 of SEQ ID NO: 917148
uaaucacggugugugaauu

SEQ ID NO: 1212471 - RNA, 19 nt, Artificial Sequence
  Description of Artificial Sequence: Synthetic oligonucleotide
  Antisense strand to SEQ ID NO: 1212470
aauucacacaccgugauua

SEQ ID NO: 1212472 - RNA, 19 nt, Artificial Sequence
  Description of Artificial Sequence: Synthetic oligonucleotide
  Sense strand starting at position 536 of SEQ ID NO: 917148
aaucacggugugugaauuu

SEQ ID NO: 1212473 - RNA, 19 nt, Artificial Sequence
  Description of Artificial Sequence: Synthetic oligonucleotide
  Antisense strand to SEQ ID NO: 1212472
aaauucacacaccgugauu

SEQ ID NO: 1212474 - RNA, 19 nt, Artificial Sequence
  Description of Artificial Sequence: Synthetic oligonucleotide
  Sense strand starting at position 545 of SEQ ID NO: 917148
gugugaauuuaagguaaag

SEQ ID NO: 1212475 - RNA, 19 nt, Artificial Sequence
  Description of Artificial Sequence: Synthetic oligonucleotide
  Antisense strand to SEQ ID NO: 1212474
cuuuaccuuaaauucacac

SEQ ID NO: 1212476 - RNA, 19 nt, Artificial Sequence
  Description of Artificial Sequence: Synthetic oligonucleotide
  Sense strand starting at position 688 of SEQ ID NO: 917148
agccaaacucucugacgau

SEQ ID NO: 1212477 - RNA, 19 nt, Artificial Sequence
  Description of Artificial Sequence: Synthetic oligonucleotide
  Antisense strand to SEQ ID NO: 1212476
aucgucagagaguuuggcu

SEQ ID NO: 1212478 - RNA, 19 nt, Artificial Sequence
  Description of Artificial Sequence: Synthetic oligonucleotide
  Sense strand starting at position 749 of SEQ ID NO: 917148
caacaaauggugcguuuaa

SEQ ID NO: 1212479 - RNA, 19 nt, Artificial Sequence
  Description of Artificial Sequence: Synthetic oligonucleotide
  Antisense strand to SEQ ID NO: 1212478
uuaaacgcaccauuuguug

SEQ ID NO: 1212480 - RNA, 19 nt, Artificial Sequence
  Description of Artificial Sequence: Synthetic oligonucleotide
  Sense strand starting at position 778 of SEQ ID NO: 917148
cacucacuggcuggagaau

SEQ ID NO: 1212481 - RNA, 19 nt, Artificial Sequence
  Description of Artificial Sequence: Synthetic oligonucleotide
  Antisense strand to SEQ ID NO: 1212480
auucuccagccagugagug

SEQ ID NO: 1212482 - RNA, 19 nt, Artificial Sequence
  Description of Artificial Sequence: Synthetic oligonucleotide
  Sense strand starting at position 790 of SEQ ID NO: 917148
ggagaauccuggcuaaguc

SEQ ID NO: 1212483 - RNA, 19 nt, Artificial Sequence
  Description of Artificial Sequence: Synthetic oligonucleotide
  Antisense strand to SEQ ID NO: 1212482
gacuuagccaggauucucc

SEQ ID NO: 1212484 - RNA, 19 nt, Artificial Sequence
  Description of Artificial Sequence: Synthetic oligonucleotide
  Sense strand starting at position 791 of SEQ ID NO: 917148
gagaauccuggcuaaguca

SEQ ID NO: 1212485 - RNA, 19 nt, Artificial Sequence
  Description of Artificial Sequence: Synthetic oligonucleotide
  Antisense strand to SEQ ID NO: 1212484
ugacuuagccaggauucuc

SEQ ID NO: 1212486 - RNA, 19 nt, Artificial Sequence
  Description of Artificial Sequence: Synthetic oligonucleotide
  Sense strand starting at position 805 of SEQ ID NO: 917148
agucacuuucucugagcuu

SEQ ID NO: 1212487 - RNA, 19 nt, Artificial Sequence
  Description of Artificial Sequence: Synthetic oligonucleotide
  Antisense strand to SEQ ID NO: 1212486
aagcucagagaaagugacu

SEQ ID NO: 1212488 - RNA, 19 nt, Artificial Sequence
  Description of Artificial Sequence: Synthetic oligonucleotide
  Sense strand starting at position 832 of SEQ ID NO: 917148
cuucuauaccaagguggau

SEQ ID NO: 1212489 - RNA, 19 nt, Artificial Sequence
  Description of Artificial Sequence: Synthetic oligonucleotide
  Antisense strand to SEQ ID NO: 1212488
auccaccuugguauagaag

SEQ ID NO: 1212490 - RNA, 19 nt, Artificial Sequence
  Description of Artificial Sequence: Synthetic oligonucleotide
  Sense strand starting at position 854 of SEQ ID NO: 917148
agcaaucucuccuuaugag

SEQ ID NO: 1212491 - RNA, 19 nt, Artificial Sequence
  Description of Artificial Sequence: Synthetic oligonucleotide
  Antisense strand to SEQ ID NO: 1212490
cucauaaggagagauugcu

SEQ ID NO: 1212492 - RNA, 19 nt, Artificial Sequence
  Description of Artificial Sequence: Synthetic oligonucleotide
  Sense strand starting at position 855 of SEQ ID NO: 917148
gcaaucucuccuuaugaga

SEQ ID NO: 1212493 - RNA, 19 nt, Artificial Sequence
  Description of Artificial Sequence: Synthetic oligonucleotide
  Antisense strand to SEQ ID NO: 1212492
ucucauaaggagagauugc

SEQ ID NO: 1212494 - RNA, 19 nt, Artificial Sequence
  Description of Artificial Sequence: Synthetic oligonucleotide
  Sense strand starting at position 860 of SEQ ID NO: 917148
cucuccuuaugagaaauga

SEQ ID NO: 1212495 - RNA, 19 nt, Artificial Sequence
  Description of Artificial Sequence: Synthetic oligonucleotide
  Antisense strand to SEQ ID NO: 1212494
ucauuucucauaaggagag

SEQ ID NO: 1212496 - RNA, 19 nt, Artificial Sequence
  Description of Artificial Sequence: Synthetic oligonucleotide
  Sense strand starting at position 886 of SEQ ID NO: 917148
acgaacuacuuccuguaua

SEQ ID NO: 1212497 - RNA, 19 nt, Artificial Sequence
  Description of Artificial Sequence: Synthetic oligonucleotide
  Antisense strand to SEQ ID NO: 1212496
uauacaggaaguaguucgu

SEQ ID NO: 1212498 - RNA, 19 nt, Artificial Sequence
  Description of Artificial Sequence: Synthetic oligonucleotide
  Sense strand starting at position 1013 of SEQ ID NO: 917148
ccuuauccguucuauuuga

SEQ ID NO: 1212499 - RNA, 19 nt, Artificial Sequence
  Description of Artificial Sequence: Synthetic oligonucleotide
  Antisense strand to SEQ ID NO: 1212498
ucaaauagaacggauaagg

SEQ ID NO: 1212500 - RNA, 19 nt, Artificial Sequence
  Description of Artificial Sequence: Synthetic oligonucleotide
  Sense strand starting at position 2113 of SEQ ID NO: 917148
cccgguucuagaugauuga

SEQ ID NO: 1212501 - RNA, 19 nt, Artificial Sequence
  Description of Artificial Sequence: Synthetic oligonucleotide
  Antisense strand to SEQ ID NO: 1212500
ucaaucaucuagaaccggg

SEQ ID NO: 1212502 - RNA, 19 nt, Artificial Sequence
  Description of Artificial Sequence: Synthetic oligonucleotide
  Sense strand starting at position 2116 of SEQ ID NO: 917148
gguucuagaugauugacaa

SEQ ID NO: 1212503 - RNA, 19 nt, Artificial Sequence
  Description of Artificial Sequence: Synthetic oligonucleotide
  Antisense strand to SEQ ID NO: 1212502
uugucaaucaucuagaacc

SEQ ID NO: 1212504 - RNA, 19 nt, Artificial Sequence
  Description of Artificial Sequence: Synthetic oligonucleotide
  Sense strand starting at position 2117 of SEQ ID NO: 917148
guucuagaugauugacaag

SEQ ID NO: 1212505 - RNA, 19 nt, Artificial Sequence
  Description of Artificial Sequence: Synthetic oligonucleotide
  Antisense strand to SEQ ID NO: 1212504
cuugucaaucaucuagaac

SEQ ID NO: 1212506 - RNA, 19 nt, Artificial Sequence
  Description of Artificial Sequence: Synthetic oligonucleotide
  Sense strand starting at position 2171 of SEQ ID NO: 917148
cuaagagguucggcuggaa

SEQ ID NO: 1212507 - RNA, 19 nt, Artificial Sequence
  Description of Artificial Sequence: Synthetic oligonucleotide
  Antisense strand to SEQ ID NO: 1212506
uuccagccgaaccucuuag

SEQ ID NO: 1212508 - RNA, 19 nt, Artificial Sequence
  Description of Artificial Sequence: Synthetic oligonucleotide
  Sense strand starting at position 2254 of SEQ ID NO: 917148
aggcuugcggcguuauaga

SEQ ID NO: 1212509 - RNA, 19 nt, Artificial Sequence
  Description of Artificial Sequence: Synthetic oligonucleotide
  Antisense strand to SEQ ID NO: 1212508
ucuauaacgccgcaagccu

SEQ ID NO: 1212510 - RNA, 19 nt, Artificial Sequence
  Description of Artificial Sequence: Synthetic oligonucleotide
  Sense strand starting at position 2601 of SEQ ID NO: 917148
gugugaucccaaugcuuug

SEQ ID NO: 1212511 - RNA, 19 nt, Artificial Sequence
  Description of Artificial Sequence: Synthetic oligonucleotide
  Antisense strand to SEQ ID NO: 1212510
caaagcauugggaucacac

SEQ ID NO: 1212512 - RNA, 19 nt, Artificial Sequence
  Description of Artificial Sequence: Synthetic oligonucleotide
  Sense strand starting at position 3011 of SEQ ID NO: 917148
guguccucauugcucauua

SEQ ID NO: 1212513 - RNA, 19 nt, Artificial Sequence
  Description of Artificial Sequence: Synthetic oligonucleotide
  Antisense strand to SEQ ID NO: 1212512
uaaugagcaaugaggacac

SEQ ID NO: 1212514 - RNA, 19 nt, Artificial Sequence
  Description of Artificial Sequence: Synthetic oligonucleotide
  Sense strand starting at position 3013 of SEQ ID NO: 917148
guccucauugcucauuauu

SEQ ID NO: 1212515 - RNA, 19 nt, Artificial Sequence
  Description of Artificial Sequence: Synthetic oligonucleotide
  Antisense strand to SEQ ID NO: 1212514
aauaaugagcaaugaggac

SEQ ID NO: 1212516 - RNA, 19 nt, Artificial Sequence
  Description of Artificial Sequence: Synthetic oligonucleotide
  Sense strand starting at position 3021 of SEQ ID NO: 917148
ugcucauuauuugcugauu

SEQ ID NO: 1212517 - RNA, 19 nt, Artificial Sequence
  Description of Artificial Sequence: Synthetic oligonucleotide
  Antisense strand to SEQ ID NO: 1212516
aaucagcaaauaaugagca

SEQ ID NO: 1212518 - RNA, 19 nt, Artificial Sequence
  Description of Artificial Sequence: Synthetic oligonucleotide
  Sense strand starting at position 3022 of SEQ ID NO: 917148
gcucauuauuugcugauua

SEQ ID NO: 1212519 - RNA, 19 nt, Artificial Sequence
  Description of Artificial Sequence: Synthetic oligonucleotide
  Antisense strand to SEQ ID NO: 1212518
uaaucagcaaauaaugagc

SEQ ID NO: 1212520 - RNA, 19 nt, Artificial Sequence
  Description of Artificial Sequence: Synthetic oligonucleotide
  Sense strand starting at position 3042 of SEQ ID NO: 917148
aacguauuagcaugcuaaa

SEQ ID NO: 1212521 - RNA, 19 nt, Artificial Sequence
  Description of Artificial Sequence: Synthetic oligonucleotide
  Antisense strand to SEQ ID NO: 1212520
uuuagcaugcuaauacguu

SEQ ID NO: 1212522 - RNA, 19 nt, Artificial Sequence
  Description of Artificial Sequence: Synthetic oligonucleotide
  Sense strand starting at position 3231 of SEQ ID NO: 917149
uauaacuauguguggaguu

SEQ ID NO: 1212523 - RNA, 19 nt, Artificial Sequence
  Description of Artificial Sequence: Synthetic oligonucleotide
  Antisense strand to SEQ ID NO: 1212522
aacuccacacauaguuaua

SEQ ID NO: 1212524 - RNA, 19 nt, Artificial Sequence
  Description of Artificial Sequence: Synthetic oligonucleotide
  Sense strand starting at position 28 of SEQ ID NO: 917149
gaucaaaguucugaaggau

SEQ ID NO: 1212525 - RNA, 19 nt, Artificial Sequence
  Description of Artificial Sequence: Synthetic oligonucleotide
  Antisense strand to SEQ ID NO: 1212524
auccuucagaacuuugauc

SEQ ID NO: 1212526 - RNA, 19 nt, Artificial Sequence
  Description of Artificial Sequence: Synthetic oligonucleotide
  Sense strand starting at position 56 of SEQ ID NO: 917149
uugacaauaggcgacuuaa

SEQ ID NO: 1212527 - RNA, 19 nt, Artificial Sequence
  Description of Artificial Sequence: Synthetic oligonucleotide
  Antisense strand to SEQ ID NO: 1212526
uuaagucgccuauugucaa

SEQ ID NO: 1212528 - RNA, 19 nt, Artificial Sequence
  Description of Artificial Sequence: Synthetic oligonucleotide
  Sense strand starting at position 100 of SEQ ID NO: 917149
agacaauucugagucugga

SEQ ID NO: 1212529 - RNA, 19 nt, Artificial Sequence
  Description of Artificial Sequence: Synthetic oligonucleotide
  Antisense strand to SEQ ID NO: 1212528
uccagacucagaauugucu

SEQ ID NO: 1212530 - RNA, 19 nt, Artificial Sequence
  Description of Artificial Sequence: Synthetic oligonucleotide
  Sense strand starting at position 103 of SEQ ID NO: 917149
caauucugagucuggaaga

SEQ ID NO: 1212531 - RNA, 19 nt, Artificial Sequence
  Description of Artificial Sequence: Synthetic oligonucleotide
  Antisense strand to SEQ ID NO: 1212530
ucuuccagacucagaauug

SEQ ID NO: 1212532 - RNA, 19 nt, Artificial Sequence
  Description of Artificial Sequence: Synthetic oligonucleotide
  Sense strand starting at position 104 of SEQ ID NO: 917149
aauucugagucuggaagaa

SEQ ID NO: 1212533 - RNA, 19 nt, Artificial Sequence
  Description of Artificial Sequence: Synthetic oligonucleotide
  Antisense strand to SEQ ID NO: 1212532
uucuuccagacucagaauu

SEQ ID NO: 1212534 - RNA, 19 nt, Artificial Sequence
  Description of Artificial Sequence: Synthetic oligonucleotide
  Sense strand starting at position 124 of SEQ ID NO: 917149
agguuaaauuuguuuggcu

SEQ ID NO: 1212535 - RNA, 19 nt, Artificial Sequence
  Description of Artificial Sequence: Synthetic oligonucleotide
  Antisense strand to SEQ ID NO: 1212534
agccaaacaaauuuaaccu

SEQ ID NO: 1212536 - RNA, 19 nt, Artificial Sequence
  Description of Artificial Sequence: Synthetic oligonucleotide
  Sense strand starting at position 125 of SEQ ID NO: 917149
gguuaaauuuguuuggcuu

SEQ ID NO: 1212537 - RNA, 19 nt, Artificial Sequence
  Description of Artificial Sequence: Synthetic oligonucleotide
  Antisense strand to SEQ ID NO: 1212536
aagccaaacaaauuuaacc

SEQ ID NO: 1212538 - RNA, 19 nt, Artificial Sequence
  Description of Artificial Sequence: Synthetic oligonucleotide
  Sense strand starting at position 126 of SEQ ID NO: 917149
guuaaauuuguuuggcuuu

SEQ ID NO: 1212539 - RNA, 19 nt, Artificial Sequence
  Description of Artificial Sequence: Synthetic oligonucleotide
  Antisense strand to SEQ ID NO: 1212538
aaagccaaacaaauuuaac

SEQ ID NO: 1212540 - RNA, 19 nt, Artificial Sequence
  Description of Artificial Sequence: Synthetic oligonucleotide
  Sense strand starting at position 359 of SEQ ID NO: 917149
uaggcagucugauaauaaa

SEQ ID NO: 1212541 - RNA, 19 nt, Artificial Sequence
  Description of Artificial Sequence: Synthetic oligonucleotide
  Antisense strand to SEQ ID NO: 1212540
uuuauuaucagacugccua

SEQ ID NO: 1212542 - RNA, 19 nt, Artificial Sequence
  Description of Artificial Sequence: Synthetic oligonucleotide
  Sense strand starting at position 406 of SEQ ID NO: 917149
gcuacuaaucacggugugu

SEQ ID NO: 1212543 - RNA, 19 nt, Artificial Sequence
  Description of Artificial Sequence: Synthetic oligonucleotide
  Antisense strand to SEQ ID NO: 1212542
acacaccgugauuaguagc

SEQ ID NO: 1212544 - RNA, 19 nt, Artificial Sequence
  Description of Artificial Sequence: Synthetic oligonucleotide
  Sense strand starting at position 408 of SEQ ID NO: 917149
uacuaaucacgguguguga

SEQ ID NO: 1212545 - RNA, 19 nt, Artificial Sequence
  Description of Artificial Sequence: Synthetic oligonucleotide
  Antisense strand to SEQ ID NO: 1212544
ucacacaccgugauuagua

SEQ ID NO: 1212546 - RNA, 19 nt, Artificial Sequence
  Description of Artificial Sequence: Synthetic oligonucleotide
  Sense strand starting at position 410 of SEQ ID NO: 917149
cuaaucacggugugugaau

SEQ ID NO: 1212547 - RNA, 19 nt, Artificial Sequence
  Description of Artificial Sequence: Synthetic oligonucleotide
  Antisense strand to SEQ ID NO: 1212546
auucacacaccgugauuag

SEQ ID NO: 1212548 - RNA, 19 nt, Artificial Sequence
  Description of Artificial Sequence: Synthetic oligonucleotide
  Sense strand starting at position 411 of SEQ ID NO: 917149
uaaucacggugugugaauu

SEQ ID NO: 1212549 - RNA, 19 nt, Artificial Sequence
  Description of Artificial Sequence: Synthetic oligonucleotide
  Antisense strand to SEQ ID NO: 1212548
aauucacacaccgugauua

SEQ ID NO: 1212550 - RNA, 19 nt, Artificial Sequence
  Description of Artificial Sequence: Synthetic oligonucleotide
  Sense strand starting at position 412 of SEQ ID NO: 917149
aaucacggugugugaauuu

SEQ ID NO: 1212551 - RNA, 19 nt, Artificial Sequence
  Description of Artificial Sequence: Synthetic oligonucleotide
  Antisense strand to SEQ ID NO: 1212550
aaauucacacaccgugauu

SEQ ID NO: 1212552 - RNA, 19 nt, Artificial Sequence
  Description of Artificial Sequence: Synthetic oligonucleotide
  Sense strand starting at position 421 of SEQ ID NO: 917149
gugugaauuuaagguaaag

SEQ ID NO: 1212553 - RNA, 19 nt, Artificial Sequence
  Description of Artificial Sequence: Synthetic oligonucleotide
  Antisense strand to SEQ ID NO: 1212552
cuuuaccuuaaauucacac

SEQ ID NO: 1212554 - RNA, 19 nt, Artificial Sequence
  Description of Artificial Sequence: Synthetic oligonucleotide
  Sense strand starting at position 564 of SEQ ID NO: 917149
agccaaacucucugacgau

SEQ ID NO: 1212555 - RNA, 19 nt, Artificial Sequence
  Description of Artificial Sequence: Synthetic oligonucleotide
  Antisense strand to SEQ ID NO: 1212554
aucgucagagaguuuggcu

SEQ ID NO: 1212556 - RNA, 19 nt, Artificial Sequence
  Description of Artificial Sequence: Synthetic oligonucleotide
  Sense strand starting at position 625 of SEQ ID NO: 917149
caacaaauggugcguuuaa

SEQ ID NO: 1212557 - RNA, 19 nt, Artificial Sequence
  Description of Artificial Sequence: Synthetic oligonucleotide
  Antisense strand to SEQ ID NO: 1212556
uuaaacgcaccauuuguug

SEQ ID NO: 1212558 - RNA, 19 nt, Artificial Sequence
  Description of Artificial Sequence: Synthetic oligonucleotide
  Sense strand starting at position 654 of SEQ ID NO: 917149
cacucacuggcuggagaau

SEQ ID NO: 1212559 - RNA, 19 nt, Artificial Sequence
  Description of Artificial Sequence: Synthetic oligonucleotide
  Antisense strand to SEQ ID NO: 1212558
auucuccagccagugagug

SEQ ID NO: 1212560 - RNA, 19 nt, Artificial Sequence
  Description of Artificial Sequence: Synthetic oligonucleotide
  Sense strand starting at position 666 of SEQ ID NO: 917149
ggagaauccuggcuaaguc

SEQ ID NO: 1212561 - RNA, 19 nt, Artificial Sequence
  Description of Artificial Sequence: Synthetic oligonucleotide
  Antisense strand to SEQ ID NO: 1212560
gacuuagccaggauucucc

SEQ ID NO: 1212562 - RNA, 19 nt, Artificial Sequence
  Description of Artificial Sequence: Synthetic oligonucleotide
  Sense strand starting at position 667 of SEQ ID NO: 917149
gagaauccuggcuaaguca

SEQ ID NO: 1212563 - RNA, 19 nt, Artificial Sequence
  Description of Artificial Sequence: Synthetic oligonucleotide
  Antisense strand to SEQ ID NO: 1212562
ugacuuagccaggauucuc

SEQ ID NO: 1212564 - RNA, 19 nt, Artificial Sequence
  Description of Artificial Sequence: Synthetic oligonucleotide
  Sense strand starting at position 681 of SEQ ID NO: 917149
agucacuuucucugagcuu

SEQ ID NO: 1212565 - RNA, 19 nt, Artificial Sequence
  Description of Artificial Sequence: Synthetic oligonucleotide
  Antisense strand to SEQ ID NO: 1212564
aagcucagagaaagugacu

SEQ ID NO: 1212566 - RNA, 19 nt, Artificial Sequence
  Description of Artificial Sequence: Synthetic oligonucleotide
  Sense strand starting at position 708 of SEQ ID NO: 917149
cuucuauaccaagguggau

SEQ ID NO: 1212567 - RNA, 19 nt, Artificial Sequence
  Description of Artificial Sequence: Synthetic oligonucleotide
  Antisense strand to SEQ ID NO: 1212566
auccaccuugguauagaag

SEQ ID NO: 1212568 - RNA, 19 nt, Artificial Sequence
  Description of Artificial Sequence: Synthetic oligonucleotide
  Sense strand starting at position 730 of SEQ ID NO: 917149
agcaaucucuccuuaugag

SEQ ID NO: 1212569 - RNA, 19 nt, Artificial Sequence
  Description of Artificial Sequence: Synthetic oligonucleotide
  Antisense strand to SEQ ID NO: 1212568
cucauaaggagagauugcu

SEQ ID NO: 1212570 - RNA, 19 nt, Artificial Sequence
  Description of Artificial Sequence: Synthetic oligonucleotide
  Sense strand starting at position 731 of SEQ ID NO: 917149
gcaaucucuccuuaugaga

SEQ ID NO: 1212571 - RNA, 19 nt, Artificial Sequence
  Description of Artificial Sequence: Synthetic oligonucleotide
  Antisense strand to SEQ ID NO: 1212570
ucucauaaggagagauugc

SEQ ID NO: 1212572 - RNA, 19 nt, Artificial Sequence
  Description of Artificial Sequence: Synthetic oligonucleotide
  Sense strand starting at position 736 of SEQ ID NO: 917149
cucuccuuaugagaaauga

SEQ ID NO: 1212573 - RNA, 19 nt, Artificial Sequence
  Description of Artificial Sequence: Synthetic oligonucleotide
  Antisense strand to SEQ ID NO: 1212572
ucauuucucauaaggagag

SEQ ID NO: 1212574 - RNA, 19 nt, Artificial Sequence
  Description of Artificial Sequence: Synthetic oligonucleotide
  Sense strand starting at position 762 of SEQ ID NO: 917149
acgaacuacuuccuguaua

SEQ ID NO: 1212575 - RNA, 19 nt, Artificial Sequence
  Description of Artificial Sequence: Synthetic oligonucleotide
  Antisense strand to SEQ ID NO: 1212574
uauacaggaaguaguucgu

SEQ ID NO: 1212576 - RNA, 19 nt, Artificial Sequence
  Description of Artificial Sequence: Synthetic oligonucleotide
  Sense strand starting at position 889 of SEQ ID NO: 917149
ccuuauccguucuauuuga

SEQ ID NO: 1212577 - RNA, 19 nt, Artificial Sequence
  Description of Artificial Sequence: Synthetic oligonucleotide
  Antisense strand to SEQ ID NO: 1212576
ucaaauagaacggauaagg

SEQ ID NO: 1212578 - RNA, 19 nt, Artificial Sequence
  Description of Artificial Sequence: Synthetic oligonucleotide
  Sense strand starting at position 1989 of SEQ ID NO: 917149
cccgguucuagaugauuga

SEQ ID NO: 1212579 - RNA, 19 nt, Artificial Sequence
  Description of Artificial Sequence: Synthetic oligonucleotide
  Antisense strand to SEQ ID NO: 1212578
ucaaucaucuagaaccggg

SEQ ID NO: 1212580 - RNA, 19 nt, Artificial Sequence
  Description of Artificial Sequence: Synthetic oligonucleotide
  Sense strand starting at position 1992 of SEQ ID NO: 917149
gguucuagaugauugacaa

SEQ ID NO: 1212581 - RNA, 19 nt, Artificial Sequence
  Description of Artificial Sequence: Synthetic oligonucleotide
  Antisense strand to SEQ ID NO: 1212580
uugucaaucaucuagaacc

SEQ ID NO: 1212582 - RNA, 19 nt, Artificial Sequence
  Description of Artificial Sequence: Synthetic oligonucleotide
  Sense strand starting at position 1993 of SEQ ID NO: 917149
guucuagaugauugacaag

SEQ ID NO: 1212583 - RNA, 19 nt, Artificial Sequence
  Description of Artificial Sequence: Synthetic oligonucleotide
  Antisense strand to SEQ ID NO: 1212582
cuugucaaucaucuagaac

SEQ ID NO: 1212584 - RNA, 19 nt, Artificial Sequence
  Description of Artificial Sequence: Synthetic oligonucleotide
  Sense strand starting at position 2047 of SEQ ID NO: 917149
cuaagagguucggcuggaa

SEQ ID NO: 1212585 - RNA, 19 nt, Artificial Sequence
  Description of Artificial Sequence: Synthetic oligonucleotide
  Antisense strand to SEQ ID NO: 1212584
uuccagccgaaccucuuag

SEQ ID NO: 1212586 - RNA, 19 nt, Artificial Sequence
  Description of Artificial Sequence: Synthetic oligonucleotide
  Sense strand starting at position 2108 of SEQ ID NO: 917149
uuguguuuaucggcccauu

SEQ ID NO: 1212587 - RNA, 19 nt, Artificial Sequence
  Description of Artificial Sequence: Synthetic oligonucleotide
  Antisense strand to SEQ ID NO: 1212586
aaugggccgauaaacacaa

SEQ ID NO: 1212588 - RNA, 19 nt, Artificial Sequence
  Description of Artificial Sequence: Synthetic oligonucleotide
  Sense strand starting at position 2130 of SEQ ID NO: 917149
aggcuugcggcguuauaga

SEQ ID NO: 1212589 - RNA, 19 nt, Artificial Sequence
  Description of Artificial Sequence: Synthetic oligonucleotide
  Antisense strand to SEQ ID NO: 1212588
ucuauaacgccgcaagccu

SEQ ID NO: 1212590 - RNA, 19 nt, Artificial Sequence
  Description of Artificial Sequence: Synthetic oligonucleotide
  Sense strand starting at position 2477 of SEQ ID NO: 917149
gugugaucccaaugcuuug

SEQ ID NO: 1212591 - RNA, 19 nt, Artificial Sequence
  Description of Artificial Sequence: Synthetic oligonucleotide
  Antisense strand to SEQ ID NO: 1212590
caaagcauugggaucacac

SEQ ID NO: 1212592 - RNA, 19 nt, Artificial Sequence
  Description of Artificial Sequence: Synthetic oligonucleotide
  Sense strand starting at position 2887 of SEQ ID NO: 917149
guguccucauugcucauua

SEQ ID NO: 1212593 - RNA, 19 nt, Artificial Sequence
  Description of Artificial Sequence: Synthetic oligonucleotide
  Antisense strand to SEQ ID NO: 1212592
uaaugagcaaugaggacac

SEQ ID NO: 1212594 - RNA, 19 nt, Artificial Sequence
  Description of Artificial Sequence: Synthetic oligonucleotide
  Sense strand starting at position 2889 of SEQ ID NO: 917149
guccucauugcucauuauu

SEQ ID NO: 1212595 - RNA, 19 nt, Artificial Sequence
  Description of Artificial Sequence: Synthetic oligonucleotide
  Antisense strand to SEQ ID NO: 1212594
aauaaugagcaaugaggac

SEQ ID NO: 1212596 - RNA, 19 nt, Artificial Sequence
  Description of Artificial Sequence: Synthetic oligonucleotide
  Sense strand starting at position 2897 of SEQ ID NO: 917149
ugcucauuauuugcugauu

SEQ ID NO: 1212597 - RNA, 19 nt, Artificial Sequence
  Description of Artificial Sequence: Synthetic oligonucleotide
  Antisense strand to SEQ ID NO: 1212596
aaucagcaaauaaugagca

SEQ ID NO: 1212598 - RNA, 19 nt, Artificial Sequence
  Description of Artificial Sequence: Synthetic oligonucleotide
  Sense strand starting at position 2898 of SEQ ID NO: 917149
gcucauuauuugcugauua

SEQ ID NO: 1212599 - RNA, 19 nt, Artificial Sequence
  Description of Artificial Sequence: Synthetic oligonucleotide
  Antisense strand to SEQ ID NO: 1212598
uaaucagcaaauaaugagc

SEQ ID NO: 1212600 - RNA, 19 nt, Artificial Sequence
  Description of Artificial Sequence: Synthetic oligonucleotide
  Sense strand starting at position 2918 of SEQ ID NO: 917149
aacguauuagcaugcuaaa

SEQ ID NO: 1212601 - RNA, 19 nt, Artificial Sequence
  Description of Artificial Sequence: Synthetic oligonucleotide
  Antisense strand to SEQ ID NO: 1212600
uuuagcaugcuaauacguu

SEQ ID NO: 1212602 - RNA, 19 nt, Artificial Sequence
  Description of Artificial Sequence: Synthetic oligonucleotide
  Sense strand starting at position 3107 of SEQ ID NO: 917149
uauaacuauguguggaguu

SEQ ID NO: 1212603 - RNA, 19 nt, Artificial Sequence
  Description of Artificial Sequence: Synthetic oligonucleotide
  Antisense strand to SEQ ID NO: 1212602
aacuccacacauaguuaua

SEQ ID NO: 1212604 - RNA, 19 nt, Artificial Sequence
  Description of Artificial Sequence: Synthetic oligonucleotide
  Sense strand starting at position 3107 of SEQ ID NO: 917148
uauaacuauguguggaguu

SEQ ID NO: 1212605 - RNA, 19 nt, Artificial Sequence
  Description of Artificial Sequence: Synthetic oligonucleotide
  Antisense strand to SEQ ID NO: 1212604
aacuccacacauaguuaua

SEQ ID NO: 1212606 - RNA, 19 nt, Artificial Sequence
  Description of Artificial Sequence: Synthetic oligonucleotide
  Sense strand starting at position 3231 of SEQ ID NO: 917150
uauaacuauguguggaguu

SEQ ID NO: 1212607 - RNA, 19 nt, Artificial Sequence
  Description of Artificial Sequence: Synthetic oligonucleotide
  Antisense strand to SEQ ID NO: 1212606
aacuccacacauaguuaua

SEQ ID NO: 1212608 - RNA, 19 nt, Artificial Sequence
  Description of Artificial Sequence: Synthetic oligonucleotide
  Sense strand starting at position 69 of SEQ ID NO: 917150
cuuucugucuuugcaguua

SEQ ID NO: 1212609 - RNA, 19 nt, Artificial Sequence
  Description of Artificial Sequence: Synthetic oligonucleotide
  Antisense strand to SEQ ID NO: 1212608
uaacugcaaagacagaaag

SEQ ID NO: 1212610 - RNA, 19 nt, Artificial Sequence
  Description of Artificial Sequence: Synthetic oligonucleotide
  Sense strand starting at position 145 of SEQ ID NO: 917150
ucuucuaccuuuguggaaa

SEQ ID NO: 1212611 - RNA, 19 nt, Artificial Sequence
  Description of Artificial Sequence: Synthetic oligonucleotide
  Antisense strand to SEQ ID NO: 1212610
uuuccacaaagguagaaga

SEQ ID NO: 1212612 - RNA, 19 nt, Artificial Sequence
  Description of Artificial Sequence: Synthetic oligonucleotide
  Sense strand starting at position 253 of SEQ ID NO: 917150
aaaguauguuagcccaaag

SEQ ID NO: 1212613 - RNA, 19 nt, Artificial Sequence
  Description of Artificial Sequence: Synthetic oligonucleotide
  Antisense strand to SEQ ID NO: 1212612
cuuugggcuaacauacuuu

SEQ ID NO: 1212614 - RNA, 19 nt, Artificial Sequence
  Description of Artificial Sequence: Synthetic oligonucleotide
  Sense strand starting at position 648 of SEQ ID NO: 917150
uuagucuaggacugaacaa

SEQ ID NO: 1212615 - RNA, 19 nt, Artificial Sequence
  Description of Artificial Sequence: Synthetic oligonucleotide
  Antisense strand to SEQ ID NO: 1212614
uuguucaguccuagacuaa

SEQ ID NO: 1212616 - RNA, 19 nt, Artificial Sequence
  Description of Artificial Sequence: Synthetic oligonucleotide
  Sense strand starting at position 804 of SEQ ID NO: 917150
ccacuucgcagucagagaa

SEQ ID NO: 1212617 - RNA, 19 nt, Artificial Sequence
  Description of Artificial Sequence: Synthetic oligonucleotide
  Antisense strand to SEQ ID NO: 1212616
uucucugacugcgaagugg

SEQ ID NO: 1212618 - RNA, 19 nt, Artificial Sequence
  Description of Artificial Sequence: Synthetic oligonucleotide
  Sense strand starting at position 1170 of SEQ ID NO: 917150
uccauugucucccugaguu

SEQ ID NO: 1212619 - RNA, 19 nt, Artificial Sequence
  Description of Artificial Sequence: Synthetic oligonucleotide
  Antisense strand to SEQ ID NO: 1212618
aacucagggagacaaugga

SEQ ID NO: 1212620 - RNA, 19 nt, Artificial Sequence
  Description of Artificial Sequence: Synthetic oligonucleotide
  Sense strand starting at position 1205 of SEQ ID NO: 917150
ggguguaagugcucagaau

SEQ ID NO: 1212621 - RNA, 19 nt, Artificial Sequence
  Description of Artificial Sequence: Synthetic oligonucleotide
  Antisense strand to SEQ ID NO: 1212620
auucugagcacuuacaccc

SEQ ID NO: 1212622 - RNA, 19 nt, Artificial Sequence
  Description of Artificial Sequence: Synthetic oligonucleotide
  Sense strand starting at position 1206 of SEQ ID NO: 917150
gguguaagugcucagaauc

SEQ ID NO: 1212623 - RNA, 19 nt, Artificial Sequence
  Description of Artificial Sequence: Synthetic oligonucleotide
  Antisense strand to SEQ ID NO: 1212622
gauucugagcacuuacacc

SEQ ID NO: 1212624 - RNA, 19 nt, Artificial Sequence
  Description of Artificial Sequence: Synthetic oligonucleotide
  Sense strand starting at position 1234 of SEQ ID NO: 917150
accaaaugagguuguaaca

SEQ ID NO: 1212625 - RNA, 19 nt, Artificial Sequence
  Description of Artificial Sequence: Synthetic oligonucleotide
  Antisense strand to SEQ ID NO: 1212624
uguuacaaccucauuuggu

SEQ ID NO: 1212626 - RNA, 19 nt, Artificial Sequence
  Description of Artificial Sequence: Synthetic oligonucleotide
  Sense strand starting at position 1256 of SEQ ID NO: 917150
cccacaaugccuggaaugu

SEQ ID NO: 1212627 - RNA, 19 nt, Artificial Sequence
  Description of Artificial Sequence: Synthetic oligonucleotide
  Antisense strand to SEQ ID NO: 1212626
acauuccaggcauuguggg

SEQ ID NO: 1212628 - RNA, 19 nt, Artificial Sequence
  Description of Artificial Sequence: Synthetic oligonucleotide
  Sense strand starting at position 1257 of SEQ ID NO: 917150
ccacaaugccuggaaugua

SEQ ID NO: 1212629 - RNA, 19 nt, Artificial Sequence
  Description of Artificial Sequence: Synthetic oligonucleotide
  Antisense strand to SEQ ID NO: 1212628
uacauuccaggcauugugg

SEQ ID NO: 1212630 - RNA, 19 nt, Artificial Sequence
  Description of Artificial Sequence: Synthetic oligonucleotide
  Sense strand starting at position 1265 of SEQ ID NO: 917150
ccuggaauguaggaauuau

SEQ ID NO: 1212631 - RNA, 19 nt, Artificial Sequence
  Description of Artificial Sequence: Synthetic oligonucleotide
  Antisense strand to SEQ ID NO: 1212630
auaauuccuacauuccagg

SEQ ID NO: 1212632 - RNA, 19 nt, Artificial Sequence
  Description of Artificial Sequence: Synthetic oligonucleotide
  Sense strand starting at position 1276 of SEQ ID NO: 917150
ggaauuauucugcaucccu

SEQ ID NO: 1212633 - RNA, 19 nt, Artificial Sequence
  Description of Artificial Sequence: Synthetic oligonucleotide
  Antisense strand to SEQ ID NO: 1212632
agggaugcagaauaauucc

SEQ ID NO: 1212634 - RNA, 19 nt, Artificial Sequence
  Description of Artificial Sequence: Synthetic oligonucleotide
  Sense strand starting at position 1398 of SEQ ID NO: 917150
caaggugcgcaugaucaua

SEQ ID NO: 1212635 - RNA, 19 nt, Artificial Sequence
  Description of Artificial Sequence: Synthetic oligonucleotide
  Antisense strand to SEQ ID NO: 1212634
uaugaucaugcgcaccuug

SEQ ID NO: 1212636 - RNA, 19 nt, Artificial Sequence
  Description of Artificial Sequence: Synthetic oligonucleotide
  Sense strand starting at position 1400 of SEQ ID NO: 917150
aggugcgcaugaucauaua

SEQ ID NO: 1212637 - RNA, 19 nt, Artificial Sequence
  Description of Artificial Sequence: Synthetic oligonucleotide
  Antisense strand to SEQ ID NO: 1212636
uauaugaucaugcgcaccu

SEQ ID NO: 1212638 - RNA, 19 nt, Artificial Sequence
  Description of Artificial Sequence: Synthetic oligonucleotide
  Sense strand starting at position 1418 of SEQ ID NO: 917150
acaguugguccacagcuau

SEQ ID NO: 1212639 - RNA, 19 nt, Artificial Sequence
  Description of Artificial Sequence: Synthetic oligonucleotide
  Antisense strand to SEQ ID NO: 1212638
auagcuguggaccaacugu

SEQ ID NO: 1212640 - RNA, 19 nt, Artificial Sequence
  Description of Artificial Sequence: Synthetic oligonucleotide
  Sense strand starting at position 1429 of SEQ ID NO: 917150
acagcuauaccuggaaaca

SEQ ID NO: 1212641 - RNA, 19 nt, Artificial Sequence
  Description of Artificial Sequence: Synthetic oligonucleotide
  Antisense strand to SEQ ID NO: 1212640
uguuuccagguauagcugu

SEQ ID NO: 1212642 - RNA, 19 nt, Artificial Sequence
  Description of Artificial Sequence: Synthetic oligonucleotide
  Sense strand starting at position 1454 of SEQ ID NO: 917150
aaauccaucguguggaaca

SEQ ID NO: 1212643 - RNA, 19 nt, Artificial Sequence
  Description of Artificial Sequence: Synthetic oligonucleotide
  Antisense strand to SEQ ID NO: 1212642
uguuccacacgauggauuu

SEQ ID NO: 1212644 - RNA, 19 nt, Artificial Sequence
  Description of Artificial Sequence: Synthetic oligonucleotide
  Sense strand starting at position 1456 of SEQ ID NO: 917150
auccaucguguggaacaua

SEQ ID NO: 1212645 - RNA, 19 nt, Artificial Sequence
  Description of Artificial Sequence: Synthetic oligonucleotide
  Antisense strand to SEQ ID NO: 1212644
uauguuccacacgauggau

SEQ ID NO: 1212646 - RNA, 19 nt, Artificial Sequence
  Description of Artificial Sequence: Synthetic oligonucleotide
  Sense strand starting at position 1467 of SEQ ID NO: 917150
ggaacauauuugcaagaaa

SEQ ID NO: 1212647 - RNA, 19 nt, Artificial Sequence
  Description of Artificial Sequence: Synthetic oligonucleotide
  Antisense strand to SEQ ID NO: 1212646
uuucuugcaaauauguucc

SEQ ID NO: 1212648 - RNA, 19 nt, Artificial Sequence
  Description of Artificial Sequence: Synthetic oligonucleotide
  Sense strand starting at position 1490 of SEQ ID NO: 917150
auucgauucugaguuauaa

SEQ ID NO: 1212649 - RNA, 19 nt, Artificial Sequence
  Description of Artificial Sequence: Synthetic oligonucleotide
  Antisense strand to SEQ ID NO: 1212648
uuauaacucagaaucgaau

SEQ ID NO: 1212650 - RNA, 19 nt, Artificial Sequence
  Description of Artificial Sequence: Synthetic oligonucleotide
  Sense strand starting at position 1492 of SEQ ID NO: 917150
ucgauucugaguuauaaug

SEQ ID NO: 1212651 - RNA, 19 nt, Artificial Sequence
  Description of Artificial Sequence: Synthetic oligonucleotide
  Antisense strand to SEQ ID NO: 1212650
cauuauaacucagaaucga

SEQ ID NO: 1212652 - RNA, 19 nt, Artificial Sequence
  Description of Artificial Sequence: Synthetic oligonucleotide
  Sense strand starting at position 1494 of SEQ ID NO: 917150
gauucugaguuauaaugau

SEQ ID NO: 1212653 - RNA, 19 nt, Artificial Sequence
  Description of Artificial Sequence: Synthetic oligonucleotide
  Antisense strand to SEQ ID NO: 1212652
aucauuauaacucagaauc

SEQ ID NO: 1212654 - RNA, 19 nt, Artificial Sequence
  Description of Artificial Sequence: Synthetic oligonucleotide
  Sense strand starting at position 1943 of SEQ ID NO: 917150
gcgcguaguccucaacaug

SEQ ID NO: 1212655 - RNA, 19 nt, Artificial Sequence
  Description of Artificial Sequence: Synthetic oligonucleotide
  Antisense strand to SEQ ID NO: 1212654
cauguugaggacuacgcgc

SEQ ID NO: 1212656 - RNA, 19 nt, Artificial Sequence
  Description of Artificial Sequence: Synthetic oligonucleotide
  Sense strand starting at position 1946 of SEQ ID NO: 917150
cguaguccucaacauguca

SEQ ID NO: 1212657 - RNA, 19 nt, Artificial Sequence
  Description of Artificial Sequence: Synthetic oligonucleotide
  Antisense strand to SEQ ID NO: 1212656
ugacauguugaggacuacg

SEQ ID NO: 1212658 - RNA, 19 nt, Artificial Sequence
  Description of Artificial Sequence: Synthetic oligonucleotide
  Sense strand starting at position 3165 of SEQ ID NO: 917150
cccguaucuugagaacaaa

SEQ ID NO: 1212659 - RNA, 19 nt, Artificial Sequence
  Description of Artificial Sequence: Synthetic oligonucleotide
  Antisense strand to SEQ ID NO: 1212658
uuuguucucaagauacggg

SEQ ID NO: 1212660 - RNA, 19 nt, Artificial Sequence
  Description of Artificial Sequence: Synthetic oligonucleotide
  Sense strand starting at position 3212 of SEQ ID NO: 917150
ugacaaacgugccucuauu

SEQ ID NO: 1212661 - RNA, 19 nt, Artificial Sequence
  Description of Artificial Sequence: Synthetic oligonucleotide
  Antisense strand to SEQ ID NO: 1212660
aauagaggcacguuuguca

SEQ ID NO: 1212662 - RNA, 19 nt, Artificial Sequence
  Description of Artificial Sequence: Synthetic oligonucleotide
  Sense strand starting at position 3538 of SEQ ID NO: 917150
ggugucuugcaauacgaug

SEQ ID NO: 1212663 - RNA, 19 nt, Artificial Sequence
  Description of Artificial Sequence: Synthetic oligonucleotide
  Antisense strand to SEQ ID NO: 1212662
caucguauugcaagacacc

SEQ ID NO: 1212664 - RNA, 19 nt, Artificial Sequence
  Description of Artificial Sequence: Synthetic oligonucleotide
  Sense strand starting at position 3543 of SEQ ID NO: 917150
cuugcaauacgaugucuca

SEQ ID NO: 1212665 - RNA, 19 nt, Artificial Sequence
  Description of Artificial Sequence: Synthetic oligonucleotide
  Antisense strand to SEQ ID NO: 1212664
ugagacaucguauugcaag

SEQ ID NO: 1212666 - RNA, 19 nt, Artificial Sequence
  Description of Artificial Sequence: Synthetic oligonucleotide
  Sense strand starting at position 3604 of SEQ ID NO: 917150
aggagacguuccucugguu

SEQ ID NO: 1212667 - RNA, 19 nt, Artificial Sequence
  Description of Artificial Sequence: Synthetic oligonucleotide
  Antisense strand to SEQ ID NO: 1212666
aaccagaggaacgucuccu

SEQ ID NO: 1212668 - RNA, 19 nt, Artificial Sequence
  Description of Artificial Sequence: Synthetic oligonucleotide
  Sense strand starting at position 3687 of SEQ ID NO: 917150
acaaguguguaccuagagu

SEQ ID NO: 1212669 - RNA, 19 nt, Artificial Sequence
  Description of Artificial Sequence: Synthetic oligonucleotide
  Antisense strand to SEQ ID NO: 1212668
acucuagguacacacuugu

SEQ ID NO: 1212670 - RNA, 19 nt, Artificial Sequence
  Description of Artificial Sequence: Synthetic oligonucleotide
  Sense strand starting at position 3711 of SEQ ID NO: 917150
cucaauauccuggagucca

SEQ ID NO: 1212671 - RNA, 19 nt, Artificial Sequence
  Description of Artificial Sequence: Synthetic oligonucleotide
  Antisense strand to SEQ ID NO: 1212670
uggacuccaggauauugag

SEQ ID NO: 1212672 - RNA, 19 nt, Artificial Sequence
  Description of Artificial Sequence: Synthetic oligonucleotide
  Sense strand starting at position 3722 of SEQ ID NO: 917150
ggaguccaacucugcaauu

SEQ ID NO: 1212673 - RNA, 19 nt, Artificial Sequence
  Description of Artificial Sequence: Synthetic oligonucleotide
  Antisense strand to SEQ ID NO: 1212672
aauugcagaguuggacucc

SEQ ID NO: 1212674 - RNA, 19 nt, Artificial Sequence
  Description of Artificial Sequence: Synthetic oligonucleotide
  Sense strand starting at position 3749 of SEQ ID NO: 917150
agcuaacuguagucuaaug

SEQ ID NO: 1212675 - RNA, 19 nt, Artificial Sequence
  Description of Artificial Sequence: Synthetic oligonucleotide
  Antisense strand to SEQ ID NO: 1212674
cauuagacuacaguuagcu

SEQ ID NO: 1212676 - RNA, 19 nt, Artificial Sequence
  Description of Artificial Sequence: Synthetic oligonucleotide
  Sense strand starting at position 3751 of SEQ ID NO: 917150
cuaacuguagucuaaugua

SEQ ID NO: 1212677 - RNA, 19 nt, Artificial Sequence
  Description of Artificial Sequence: Synthetic oligonucleotide
  Antisense strand to SEQ ID NO: 1212676
uacauuagacuacaguuag

SEQ ID NO: 1212678 - RNA, 19 nt, Artificial Sequence
  Description of Artificial Sequence: Synthetic oligonucleotide
  Sense strand starting at position 3759 of SEQ ID NO: 917150
agucuaauguaaucuauug

SEQ ID NO: 1212679 - RNA, 19 nt, Artificial Sequence
  Description of Artificial Sequence: Synthetic oligonucleotide
  Antisense strand to SEQ ID NO: 1212678
caauagauuacauuagacu

SEQ ID NO: 1212680 - RNA, 19 nt, Artificial Sequence
  Description of Artificial Sequence: Synthetic oligonucleotide
  Sense strand starting at position 3886 of SEQ ID NO: 917150
ucuugccugccuuauguua

SEQ ID NO: 1212681 - RNA, 19 nt, Artificial Sequence
  Description of Artificial Sequence: Synthetic oligonucleotide
  Antisense strand to SEQ ID NO: 1212680
uaacauaaggcaggcaaga

SEQ ID NO: 1212682 - RNA, 19 nt, Artificial Sequence
  Description of Artificial Sequence: Synthetic oligonucleotide
  Sense strand starting at position 3918 of SEQ ID NO: 917150
cagugcuguguguauauuu

SEQ ID NO: 1212683 - RNA, 19 nt, Artificial Sequence
  Description of Artificial Sequence: Synthetic oligonucleotide
  Antisense strand to SEQ ID NO: 1212682
aaauauacacacagcacug

SEQ ID NO: 1212684 - RNA, 19 nt, Artificial Sequence
  Description of Artificial Sequence: Synthetic oligonucleotide
  Sense strand starting at position 3935 of SEQ ID NO: 917150
uuaucucccugaguaucuu

SEQ ID NO: 1212685 - RNA, 19 nt, Artificial Sequence
  Description of Artificial Sequence: Synthetic oligonucleotide
  Antisense strand to SEQ ID NO: 1212684
aagauacucagggagauaa

SEQ ID NO: 1212686 - RNA, 19 nt, Artificial Sequence
  Description of Artificial Sequence: Synthetic oligonucleotide
  Sense strand starting at position 3941 of SEQ ID NO: 917151
cccugaguaucuuaaauug

SEQ ID NO: 1212687 - RNA, 19 nt, Artificial Sequence
  Description of Artificial Sequence: Synthetic oligonucleotide
  Antisense strand to SEQ ID NO: 1212686
caauuuaagauacucaggg

SEQ ID NO: 1212688 - RNA, 19 nt, Artificial Sequence
  Description of Artificial Sequence: Synthetic oligonucleotide
  Sense strand starting at position 11 of SEQ ID NO: 917151
gaaaucauguggccuccaa

SEQ ID NO: 1212689 - RNA, 19 nt, Artificial Sequence
  Description of Artificial Sequence: Synthetic oligonucleotide
  Antisense strand to SEQ ID NO: 1212688
uuggaggccacaugauuuc

SEQ ID NO: 1212690 - RNA, 19 nt, Artificial Sequence
  Description of Artificial Sequence: Synthetic oligonucleotide
  Sense strand starting at position 15 of SEQ ID NO: 917151
ucauguggccuccaaagaa

SEQ ID NO: 1212691 - RNA, 19 nt, Artificial Sequence
  Description of Artificial Sequence: Synthetic oligonucleotide
  Antisense strand to SEQ ID NO: 1212690
uucuuuggaggccacauga

SEQ ID NO: 1212692 - RNA, 19 nt, Artificial Sequence
  Description of Artificial Sequence: Synthetic oligonucleotide
  Sense strand starting at position 176 of SEQ ID NO: 917151
caauguauauuugggauag

SEQ ID NO: 1212693 - RNA, 19 nt, Artificial Sequence
  Description of Artificial Sequence: Synthetic oligonucleotide
  Antisense strand to SEQ ID NO: 1212692
cuaucccaaauauacauug

SEQ ID NO: 1212694 - RNA, 19 nt, Artificial Sequence
  Description of Artificial Sequence: Synthetic oligonucleotide
  Sense strand starting at position 177 of SEQ ID NO: 917151
aauguauauuugggauaga

SEQ ID NO: 1212695 - RNA, 19 nt, Artificial Sequence
  Description of Artificial Sequence: Synthetic oligonucleotide
  Antisense strand to SEQ ID NO: 1212694
ucuaucccaaauauacauu

SEQ ID NO: 1212696 - RNA, 19 nt, Artificial Sequence
  Description of Artificial Sequence: Synthetic oligonucleotide
  Sense strand starting at position 178 of SEQ ID NO: 917151
auguauauuugggauagag

SEQ ID NO: 1212697 - RNA, 19 nt, Artificial Sequence
  Description of Artificial Sequence: Synthetic oligonucleotide
  Antisense strand to SEQ ID NO: 1212696
cucuaucccaaauauacau

SEQ ID NO: 1212698 - RNA, 19 nt, Artificial Sequence
  Description of Artificial Sequence: Synthetic oligonucleotide
  Sense strand starting at position 188 of SEQ ID NO: 917151
gggauagagucucuacauu

SEQ ID NO: 1212699 - RNA, 19 nt, Artificial Sequence
  Description of Artificial Sequence: Synthetic oligonucleotide
  Antisense strand to SEQ ID NO: 1212698
aauguagagacucuauccc

SEQ ID NO: 1212700 - RNA, 19 nt, Artificial Sequence
  Description of Artificial Sequence: Synthetic oligonucleotide
  Sense strand starting at position 268 of SEQ ID NO: 917151
ggaguaggauagagugaaa

SEQ ID NO: 1212701 - RNA, 19 nt, Artificial Sequence
  Description of Artificial Sequence: Synthetic oligonucleotide
  Antisense strand to SEQ ID NO: 1212700
uuucacucuauccuacucc

SEQ ID NO: 1212702 - RNA, 19 nt, Artificial Sequence
  Description of Artificial Sequence: Synthetic oligonucleotide
  Sense strand starting at position 299 of SEQ ID NO: 917151
aguguuaggacaugacacu

SEQ ID NO: 1212703 - RNA, 19 nt, Artificial Sequence
  Description of Artificial Sequence: Synthetic oligonucleotide
  Antisense strand to SEQ ID NO: 1212702
agugucauguccuaacacu

SEQ ID NO: 1212704 - RNA, 19 nt, Artificial Sequence
  Description of Artificial Sequence: Synthetic oligonucleotide
  Sense strand starting at position 333 of SEQ ID NO: 917151
aaggaaaugguaugcaaau

SEQ ID NO: 1212705 - RNA, 19 nt, Artificial Sequence
  Description of Artificial Sequence: Synthetic oligonucleotide
  Antisense strand to SEQ ID NO: 1212704
auuugcauaccauuuccuu

SEQ ID NO: 1212706 - RNA, 19 nt, Artificial Sequence
  Description of Artificial Sequence: Synthetic oligonucleotide
  Sense strand starting at position 334 of SEQ ID NO: 917151
aggaaaugguaugcaaaua

SEQ ID NO: 1212707 - RNA, 19 nt, Artificial Sequence
  Description of Artificial Sequence: Synthetic oligonucleotide
  Antisense strand to SEQ ID NO: 1212706
uauuugcauaccauuuccu

SEQ ID NO: 1212708 - RNA, 19 nt, Artificial Sequence
  Description of Artificial Sequence: Synthetic oligonucleotide
  Sense strand starting at position 544 of SEQ ID NO: 917151
aauuguggucuuugucaau

SEQ ID NO: 1212709 - RNA, 19 nt, Artificial Sequence
  Description of Artificial Sequence: Synthetic oligonucleotide
  Antisense strand to SEQ ID NO: 1212708
auugacaaagaccacaauu

SEQ ID NO: 1212710 - RNA, 19 nt, Artificial Sequence
  Description of Artificial Sequence: Synthetic oligonucleotide
  Sense strand starting at position 550 of SEQ ID NO: 917151
ggucuuugucaauggcaaa

SEQ ID NO: 1212711 - RNA, 19 nt, Artificial Sequence
  Description of Artificial Sequence: Synthetic oligonucleotide
  Antisense strand to SEQ ID NO: 1212710
uuugccauugacaaagacc

SEQ ID NO: 1212712 - RNA, 19 nt, Artificial Sequence
  Description of Artificial Sequence: Synthetic oligonucleotide
  Sense strand starting at position 710 of SEQ ID NO: 917151
uggugcuaggguuauugaa

SEQ ID NO: 1212713 - RNA, 19 nt, Artificial Sequence
  Description of Artificial Sequence: Synthetic oligonucleotide
  Antisense strand to SEQ ID NO: 1212712
uucaauaacccuagcacca

SEQ ID NO: 1212714 - RNA, 19 nt, Artificial Sequence
  Description of Artificial Sequence: Synthetic oligonucleotide
  Sense strand starting at position 735 of SEQ ID NO: 917151
guuuccauucuggguuagu

SEQ ID NO: 1212715 - RNA, 19 nt, Artificial Sequence
  Description of Artificial Sequence: Synthetic oligonucleotide
  Antisense strand to SEQ ID NO: 1212714
acuaacccagaauggaaac

SEQ ID NO: 1212716 - RNA, 19 nt, Artificial Sequence
  Description of Artificial Sequence: Synthetic oligonucleotide
  Sense strand starting at position 754 of SEQ ID NO: 917151
gcucccagucucuagucaa

SEQ ID NO: 1212717 - RNA, 19 nt, Artificial Sequence
  Description of Artificial Sequence: Synthetic oligonucleotide
  Antisense strand to SEQ ID NO: 1212716
uugacuagagacugggagc

SEQ ID NO: 1212718 - RNA, 19 nt, Artificial Sequence
  Description of Artificial Sequence: Synthetic oligonucleotide
  Sense strand starting at position 809 of SEQ ID NO: 917151
auucccagcuaucugagau

SEQ ID NO: 1212719 - RNA, 19 nt, Artificial Sequence
  Description of Artificial Sequence: Synthetic oligonucleotide
  Antisense strand to SEQ ID NO: 1212718
aucucagauagcugggaau

SEQ ID NO: 1212720 - RNA, 19 nt, Artificial Sequence
  Description of Artificial Sequence: Synthetic oligonucleotide
  Sense strand starting at position 819 of SEQ ID NO: 917151
aucugagauuaugagacaa

SEQ ID NO: 1212721 - RNA, 19 nt, Artificial Sequence
  Description of Artificial Sequence: Synthetic oligonucleotide
  Antisense strand to SEQ ID NO: 1212720
uugucucauaaucucagau

SEQ ID NO: 1212722 - RNA, 19 nt, Artificial Sequence
  Description of Artificial Sequence: Synthetic oligonucleotide
  Sense strand starting at position 821 of SEQ ID NO: 917151
cugagauuaugagacaaag

SEQ ID NO: 1212723 - RNA, 19 nt, Artificial Sequence
  Description of Artificial Sequence: Synthetic oligonucleotide
  Antisense strand to SEQ ID NO: 1212722
cuuugucucauaaucucag

SEQ ID NO: 1212724 - RNA, 19 nt, Artificial Sequence
  Description of Artificial Sequence: Synthetic oligonucleotide
  Sense strand starting at position 841 of SEQ ID NO: 917151
uucuuuagcgccuaccaaa

SEQ ID NO: 1212725 - RNA, 19 nt, Artificial Sequence
  Description of Artificial Sequence: Synthetic oligonucleotide
  Antisense strand to SEQ ID NO: 1212724
uuugguaggcgcuaaagaa

SEQ ID NO: 1212726 - RNA, 19 nt, Artificial Sequence
  Description of Artificial Sequence: Synthetic oligonucleotide
  Sense strand starting at position 926 of SEQ ID NO: 917151
ucucuuacucuuggaaggu

SEQ ID NO: 1212727 - RNA, 19 nt, Artificial Sequence
  Description of Artificial Sequence: Synthetic oligonucleotide
  Antisense strand to SEQ ID NO: 1212726
accuuccaagaguaagaga

SEQ ID NO: 1212728 - RNA, 19 nt, Artificial Sequence
  Description of Artificial Sequence: Synthetic oligonucleotide
  Sense strand starting at position 935 of SEQ ID NO: 917151
cuuggaaggucggauauuu

SEQ ID NO: 1212729 - RNA, 19 nt, Artificial Sequence
  Description of Artificial Sequence: Synthetic oligonucleotide
  Antisense strand to SEQ ID NO: 1212728
aaauauccgaccuuccaag

SEQ ID NO: 1212730 - RNA, 19 nt, Artificial Sequence
  Description of Artificial Sequence: Synthetic oligonucleotide
  Sense strand starting at position 1012 of SEQ ID NO: 917151
cguuauauucuuggaggac

SEQ ID NO: 1212731 - RNA, 19 nt, Artificial Sequence
  Description of Artificial Sequence: Synthetic oligonucleotide
  Antisense strand to SEQ ID NO: 1212730
guccuccaagaauauaacg

SEQ ID NO: 1212732 - RNA, 19 nt, Artificial Sequence
  Description of Artificial Sequence: Synthetic oligonucleotide
  Sense strand starting at position 1125 of SEQ ID NO: 917151
agaggacauccguguuguc

SEQ ID NO: 1212733 - RNA, 19 nt, Artificial Sequence
  Description of Artificial Sequence: Synthetic oligonucleotide
  Antisense strand to SEQ ID NO: 1212732
gacaacacggauguccucu

SEQ ID NO: 1212734 - RNA, 19 nt, Artificial Sequence
  Description of Artificial Sequence: Synthetic oligonucleotide
  Sense strand starting at position 1134 of SEQ ID NO: 917151
ccguguugucaacacaagu

SEQ ID NO: 1212735 - RNA, 19 nt, Artificial Sequence
  Description of Artificial Sequence: Synthetic oligonucleotide
  Antisense strand to SEQ ID NO: 1212734
acuuguguugacaacacgg

SEQ ID NO: 1212736 - RNA, 19 nt, Artificial Sequence
  Description of Artificial Sequence: Synthetic oligonucleotide
  Sense strand starting at position 1163 of SEQ ID NO: 917151
ggaagaguguuggucagca

SEQ ID NO: 1212737 - RNA, 19 nt, Artificial Sequence
  Description of Artificial Sequence: Synthetic oligonucleotide
  Antisense strand to SEQ ID NO: 1212736
ugcugaccaacacucuucc

SEQ ID NO: 1212738 - RNA, 19 nt, Artificial Sequence
  Description of Artificial Sequence: Synthetic oligonucleotide
  Sense strand starting at position 1165 of SEQ ID NO: 917151
aagaguguuggucagcaag

SEQ ID NO: 1212739 - RNA, 19 nt, Artificial Sequence
  Description of Artificial Sequence: Synthetic oligonucleotide
  Antisense strand to SEQ ID NO: 1212738
cuugcugaccaacacucuu

SEQ ID NO: 1212740 - RNA, 19 nt, Artificial Sequence
  Description of Artificial Sequence: Synthetic oligonucleotide
  Sense strand starting at position 1167 of SEQ ID NO: 917151
gaguguuggucagcaagaa

SEQ ID NO: 1212741 - RNA, 19 nt, Artificial Sequence
  Description of Artificial Sequence: Synthetic oligonucleotide
  Antisense strand to SEQ ID NO: 1212740
uucuugcugaccaacacuc

SEQ ID NO: 1212742 - RNA, 19 nt, Artificial Sequence
  Description of Artificial Sequence: Synthetic oligonucleotide
  Sense strand starting at position 1168 of SEQ ID NO: 917151
aguguuggucagcaagaau

SEQ ID NO: 1212743 - RNA, 19 nt, Artificial Sequence
  Description of Artificial Sequence: Synthetic oligonucleotide
  Antisense strand to SEQ ID NO: 1212742
auucuugcugaccaacacu

SEQ ID NO: 1212744 - RNA, 19 nt, Artificial Sequence
  Description of Artificial Sequence: Synthetic oligonucleotide
  Sense strand starting at position 1208 of SEQ ID NO: 917151
gagacaacagcuuguuucu

SEQ ID NO: 1212745 - RNA, 19 nt, Artificial Sequence
  Description of Artificial Sequence: Synthetic oligonucleotide
  Antisense strand to SEQ ID NO: 1212744
agaaacaagcuguugucuc

SEQ ID NO: 1212746 - RNA, 19 nt, Artificial Sequence
  Description of Artificial Sequence: Synthetic oligonucleotide
  Sense strand starting at position 1213 of SEQ ID NO: 917151
aacagcuuguuucuggaaa

SEQ ID NO: 1212747 - RNA, 19 nt, Artificial Sequence
  Description of Artificial Sequence: Synthetic oligonucleotide
  Antisense strand to SEQ ID NO: 1212746
uuuccagaaacaagcuguu

SEQ ID NO: 1212748 - RNA, 19 nt, Artificial Sequence
  Description of Artificial Sequence: Synthetic oligonucleotide
  Sense strand starting at position 1430 of SEQ ID NO: 917151
aacggcuuccauuagcaga

SEQ ID NO: 1212749 - RNA, 19 nt, Artificial Sequence
  Description of Artificial Sequence: Synthetic oligonucleotide
  Antisense strand to SEQ ID NO: 1212748
ucugcuaauggaagccguu

SEQ ID NO: 1212750 - RNA, 19 nt, Artificial Sequence
  Description of Artificial Sequence: Synthetic oligonucleotide
  Sense strand starting at position 2742 of SEQ ID NO: 917151
ggucauugcuaagugugga

SEQ ID NO: 1212751 - RNA, 19 nt, Artificial Sequence
  Description of Artificial Sequence: Synthetic oligonucleotide
  Antisense strand to SEQ ID NO: 1212750
uccacacuuagcaaugacc

SEQ ID NO: 1212752 - RNA, 19 nt, Artificial Sequence
  Description of Artificial Sequence: Synthetic oligonucleotide
  Sense strand starting at position 2745 of SEQ ID NO: 917151
cauugcuaaguguggagua

SEQ ID NO: 1212753 - RNA, 19 nt, Artificial Sequence
  Description of Artificial Sequence: Synthetic oligonucleotide
  Antisense strand to SEQ ID NO: 1212752
uacuccacacuuagcaaug

SEQ ID NO: 1212754 - RNA, 19 nt, Artificial Sequence
  Description of Artificial Sequence: Synthetic oligonucleotide
  Sense strand starting at position 2765 of SEQ ID NO: 917151
ugcgcaaauccugaaggga

SEQ ID NO: 1212755 - RNA, 19 nt, Artificial Sequence
  Description of Artificial Sequence: Synthetic oligonucleotide
  Antisense strand to SEQ ID NO: 1212754
ucccuucaggauuugcgca

SEQ ID NO: 1212756 - RNA, 19 nt, Artificial Sequence
  Description of Artificial Sequence: Synthetic oligonucleotide
  Sense strand starting at position 2839 of SEQ ID NO: 917151
uccauuuagcuucguaaac

SEQ ID NO: 1212757 - RNA, 19 nt, Artificial Sequence
  Description of Artificial Sequence: Synthetic oligonucleotide
  Antisense strand to SEQ ID NO: 1212756
guuuacgaagcuaaaugga

SEQ ID NO: 1212758 - RNA, 19 nt, Artificial Sequence
  Description of Artificial Sequence: Synthetic oligonucleotide
  Sense strand starting at position 2840 of SEQ ID NO: 917151
ccauuuagcuucguaaacu

SEQ ID NO: 1212759 - RNA, 19 nt, Artificial Sequence
  Description of Artificial Sequence: Synthetic oligonucleotide
  Antisense strand to SEQ ID NO: 1212758
aguuuacgaagcuaaaugg

SEQ ID NO: 1212760 - RNA, 19 nt, Artificial Sequence
  Description of Artificial Sequence: Synthetic oligonucleotide
  Sense strand starting at position 2951 of SEQ ID NO: 917151
acaggacuuugucuaaacu

SEQ ID NO: 1212761 - RNA, 19 nt, Artificial Sequence
  Description of Artificial Sequence: Synthetic oligonucleotide
  Antisense strand to SEQ ID NO: 1212760
aguuuagacaaaguccugu

SEQ ID NO: 1212762 - RNA, 19 nt, Artificial Sequence
  Description of Artificial Sequence: Synthetic oligonucleotide
  Sense strand starting at position 3096 of SEQ ID NO: 917151
ucuguugugacagaguaga

SEQ ID NO: 1212763 - RNA, 19 nt, Artificial Sequence
  Description of Artificial Sequence: Synthetic oligonucleotide
  Antisense strand to SEQ ID NO: 1212762
ucuacucugucacaacaga

SEQ ID NO: 1212764 - RNA, 19 nt, Artificial Sequence
  Description of Artificial Sequence: Synthetic oligonucleotide
  Sense strand starting at position 3961 of SEQ ID NO: 917151
gugggcugauuacucauua

SEQ ID NO: 1212765 - RNA, 19 nt, Artificial Sequence
  Description of Artificial Sequence: Synthetic oligonucleotide
  Antisense strand to SEQ ID NO: 1212764
uaaugaguaaucagcccac

SEQ ID NO: 1212766 - RNA, 19 nt, Artificial Sequence
  Description of Artificial Sequence: Synthetic oligonucleotide
  Sense strand starting at position 3965 of SEQ ID NO: 917152
gcugauuacucauuagcau

SEQ ID NO: 1212767 - RNA, 19 nt, Artificial Sequence
  Description of Artificial Sequence: Synthetic oligonucleotide
  Antisense strand to SEQ ID NO: 1212766
augcuaaugaguaaucagc

SEQ ID NO: 1212768 - RNA, 19 nt, Artificial Sequence
  Description of Artificial Sequence: Synthetic oligonucleotide
  Sense strand starting at position 296 of SEQ ID NO: 917152
ugacuagugaucuagcuga

SEQ ID NO: 1212769 - RNA, 19 nt, Artificial Sequence
  Description of Artificial Sequence: Synthetic oligonucleotide
  Antisense strand to SEQ ID NO: 1212768
ucagcuagaucacuaguca

SEQ ID NO: 1212770 - RNA, 19 nt, Artificial Sequence
  Description of Artificial Sequence: Synthetic oligonucleotide
  Sense strand starting at position 351 of SEQ ID NO: 917152
agugguuauuaucuacaga

SEQ ID NO: 1212771 - RNA, 19 nt, Artificial Sequence
  Description of Artificial Sequence: Synthetic oligonucleotide
  Antisense strand to SEQ ID NO: 1212770
ucuguagauaauaaccacu

SEQ ID NO: 1212772 - RNA, 19 nt, Artificial Sequence
  Description of Artificial Sequence: Synthetic oligonucleotide
  Sense strand starting at position 609 of SEQ ID NO: 917152
aggauaacauucuucguga

SEQ ID NO: 1212773 - RNA, 19 nt, Artificial Sequence
  Description of Artificial Sequence: Synthetic oligonucleotide
  Antisense strand to SEQ ID NO: 1212772
ucacgaagaauguuauccu

SEQ ID NO: 1212774 - RNA, 19 nt, Artificial Sequence
  Description of Artificial Sequence: Synthetic oligonucleotide
  Sense strand starting at position 610 of SEQ ID NO: 917152
ggauaacauucuucgugaa

SEQ ID NO: 1212775 - RNA, 19 nt, Artificial Sequence
  Description of Artificial Sequence: Synthetic oligonucleotide
  Antisense strand to SEQ ID NO: 1212774
uucacgaagaauguuaucc

SEQ ID NO: 1212776 - RNA, 19 nt, Artificial Sequence
  Description of Artificial Sequence: Synthetic oligonucleotide
  Sense strand starting at position 611 of SEQ ID NO: 917152
gauaacauucuucgugaag

SEQ ID NO: 1212777 - RNA, 19 nt, Artificial Sequence
  Description of Artificial Sequence: Synthetic oligonucleotide
  Antisense strand to SEQ ID NO: 1212776
cuucacgaagaauguuauc

SEQ ID NO: 1212778 - RNA, 19 nt, Artificial Sequence
  Description of Artificial Sequence: Synthetic oligonucleotide
  Sense strand starting at position 614 of SEQ ID NO: 917152
aacauucuucgugaagcca

SEQ ID NO: 1212779 - RNA, 19 nt, Artificial Sequence
  Description of Artificial Sequence: Synthetic oligonucleotide
  Antisense strand to SEQ ID NO: 1212778
uggcuucacgaagaauguu

SEQ ID NO: 1212780 - RNA, 19 nt, Artificial Sequence
  Description of Artificial Sequence: Synthetic oligonucleotide
  Sense strand starting at position 678 of SEQ ID NO: 917152
uauuucugucacuguguca

SEQ ID NO: 1212781 - RNA, 19 nt, Artificial Sequence
  Description of Artificial Sequence: Synthetic oligonucleotide
  Antisense strand to SEQ ID NO: 1212780
ugacacagugacagaaaua

SEQ ID NO: 1212782 - RNA, 19 nt, Artificial Sequence
  Description of Artificial Sequence: Synthetic oligonucleotide
  Sense strand starting at position 789 of SEQ ID NO: 917152
caguguuggcguccacuau

SEQ ID NO: 1212783 - RNA, 19 nt, Artificial Sequence
  Description of Artificial Sequence: Synthetic oligonucleotide
  Antisense strand to SEQ ID NO: 1212782
auaguggacgccaacacug

SEQ ID NO: 1212784 - RNA, 19 nt, Artificial Sequence
  Description of Artificial Sequence: Synthetic oligonucleotide
  Sense strand starting at position 859 of SEQ ID NO: 917152
uauugauagcaucaagagu

SEQ ID NO: 1212785 - RNA, 19 nt, Artificial Sequence
  Description of Artificial Sequence: Synthetic oligonucleotide
  Antisense strand to SEQ ID NO: 1212784
acucuugaugcuaucaaua

SEQ ID NO: 1212786 - RNA, 19 nt, Artificial Sequence
  Description of Artificial Sequence: Synthetic oligonucleotide
  Sense strand starting at position 872 of SEQ ID NO: 917152
aagaguugugauuauguca

SEQ ID NO: 1212787 - RNA, 19 nt, Artificial Sequence
  Description of Artificial Sequence: Synthetic oligonucleotide
  Antisense strand to SEQ ID NO: 1212786
ugacauaaucacaacucuu

SEQ ID NO: 1212788 - RNA, 19 nt, Artificial Sequence
  Description of Artificial Sequence: Synthetic oligonucleotide
  Sense strand starting at position 898 of SEQ ID NO: 917152
aucccuagcacggagauaa

SEQ ID NO: 1212789 - RNA, 19 nt, Artificial Sequence
  Description of Artificial Sequence: Synthetic oligonucleotide
  Antisense strand to SEQ ID NO: 1212788
uuaucuccgugcuagggau

SEQ ID NO: 1212790 - RNA, 19 nt, Artificial Sequence
  Description of Artificial Sequence: Synthetic oligonucleotide
  Sense strand starting at position 1126 of SEQ ID NO: 917152
accugccucgaaggauaau

SEQ ID NO: 1212791 - RNA, 19 nt, Artificial Sequence
  Description of Artificial Sequence: Synthetic oligonucleotide
  Antisense strand to SEQ ID NO: 1212790
auuauccuucgaggcaggu

SEQ ID NO: 1212792 - RNA, 19 nt, Artificial Sequence
  Description of Artificial Sequence: Synthetic oligonucleotide
  Sense strand starting at position 1364 of SEQ ID NO: 917152
ugaccaauucucuggagcu

SEQ ID NO: 1212793 - RNA, 19 nt, Artificial Sequence
  Description of Artificial Sequence: Synthetic oligonucleotide
  Antisense strand to SEQ ID NO: 1212792
agcuccagagaauugguca

SEQ ID NO: 1212794 - RNA, 19 nt, Artificial Sequence
  Description of Artificial Sequence: Synthetic oligonucleotide
  Sense strand starting at position 1366 of SEQ ID NO: 917152
accaauucucuggagcuga

SEQ ID NO: 1212795 - RNA, 19 nt, Artificial Sequence
  Description of Artificial Sequence: Synthetic oligonucleotide
  Antisense strand to SEQ ID NO: 1212794
ucagcuccagagaauuggu

SEQ ID NO: 1212796 - RNA, 19 nt, Artificial Sequence
  Description of Artificial Sequence: Synthetic oligonucleotide
  Sense strand starting at position 1458 of SEQ ID NO: 917152
guauaauacuuaccaaguu

SEQ ID NO: 1212797 - RNA, 19 nt, Artificial Sequence
  Description of Artificial Sequence: Synthetic oligonucleotide
  Antisense strand to SEQ ID NO: 1212796
aacuugguaaguauuauac

SEQ ID NO: 1212798 - RNA, 19 nt, Artificial Sequence
  Description of Artificial Sequence: Synthetic oligonucleotide
  Sense strand starting at position 1530 of SEQ ID NO: 917152
agaggaguaaucggaguau

SEQ ID NO: 1212799 - RNA, 19 nt, Artificial Sequence
  Description of Artificial Sequence: Synthetic oligonucleotide
  Antisense strand to SEQ ID NO: 1212798
auacuccgauuacuccucu

SEQ ID NO: 1212800 - RNA, 19 nt, Artificial Sequence
  Description of Artificial Sequence: Synthetic oligonucleotide
  Sense strand starting at position 1759 of SEQ ID NO: 917152
uugaauaauccaggacucu

SEQ ID NO: 1212801 - RNA, 19 nt, Artificial Sequence
  Description of Artificial Sequence: Synthetic oligonucleotide
  Antisense strand to SEQ ID NO: 1212800
agaguccuggauuauucaa

SEQ ID NO: 1212802 - RNA, 19 nt, Artificial Sequence
  Description of Artificial Sequence: Synthetic oligonucleotide
  Sense strand starting at position 1786 of SEQ ID NO: 917152
ccauaaugucaugaaugua

SEQ ID NO: 1212803 - RNA, 19 nt, Artificial Sequence
  Description of Artificial Sequence: Synthetic oligonucleotide
  Antisense strand to SEQ ID NO: 1212802
uacauucaugacauuaugg

SEQ ID NO: 1212804 - RNA, 19 nt, Artificial Sequence
  Description of Artificial Sequence: Synthetic oligonucleotide
  Sense strand starting at position 1840 of SEQ ID NO: 917152
ggaauaauauugcuuugac

SEQ ID NO: 1212805 - RNA, 19 nt, Artificial Sequence
  Description of Artificial Sequence: Synthetic oligonucleotide
  Antisense strand to SEQ ID NO: 1212804
gucaaagcaauauuauucc

SEQ ID NO: 1212806 - RNA, 19 nt, Artificial Sequence
  Description of Artificial Sequence: Synthetic oligonucleotide
  Sense strand starting at position 2037 of SEQ ID NO: 917152
cgugucauaguggguauuu

SEQ ID NO: 1212807 - RNA, 19 nt, Artificial Sequence
  Description of Artificial Sequence: Synthetic oligonucleotide
  Antisense strand to SEQ ID NO: 1212806
aaauacccacuaugacacg

SEQ ID NO: 1212808 - RNA, 19 nt, Artificial Sequence
  Description of Artificial Sequence: Synthetic oligonucleotide
  Sense strand starting at position 2038 of SEQ ID NO: 917152
gugucauaguggguauuua

SEQ ID NO: 1212809 - RNA, 19 nt, Artificial Sequence
  Description of Artificial Sequence: Synthetic oligonucleotide
  Antisense strand to SEQ ID NO: 1212808
uaaauacccacuaugacac

SEQ ID NO: 1212810 - RNA, 19 nt, Artificial Sequence
  Description of Artificial Sequence: Synthetic oligonucleotide
  Sense strand starting at position 2086 of SEQ ID NO: 917152
ggaaguucauagguaagau

SEQ ID NO: 1212811 - RNA, 19 nt, Artificial Sequence
  Description of Artificial Sequence: Synthetic oligonucleotide
  Antisense strand to SEQ ID NO: 1212810
aucuuaccuaugaacuucc

SEQ ID NO: 1212812 - RNA, 19 nt, Artificial Sequence
  Description of Artificial Sequence: Synthetic oligonucleotide
  Sense strand starting at position 2095 of SEQ ID NO: 917152
uagguaagauauguacacu

SEQ ID NO: 1212813 - RNA, 19 nt, Artificial Sequence
  Description of Artificial Sequence: Synthetic oligonucleotide
  Antisense strand to SEQ ID NO: 1212812
aguguacauaucuuaccua

SEQ ID NO: 1212814 - RNA, 19 nt, Artificial Sequence
  Description of Artificial Sequence: Synthetic oligonucleotide
  Sense strand starting at position 2098 of SEQ ID NO: 917152
guaagauauguacacugua

SEQ ID NO: 1212815 - RNA, 19 nt, Artificial Sequence
  Description of Artificial Sequence: Synthetic oligonucleotide
  Antisense strand to SEQ ID NO: 1212814
uacaguguacauaucuuac

SEQ ID NO: 1212816 - RNA, 19 nt, Artificial Sequence
  Description of Artificial Sequence: Synthetic oligonucleotide
  Sense strand starting at position 2103 of SEQ ID NO: 917152
auauguacacuguauaagu

SEQ ID NO: 1212817 - RNA, 19 nt, Artificial Sequence
  Description of Artificial Sequence: Synthetic oligonucleotide
  Antisense strand to SEQ ID NO: 1212816
acuuauacaguguacauau

SEQ ID NO: 1212818 - RNA, 19 nt, Artificial Sequence
  Description of Artificial Sequence: Synthetic oligonucleotide
  Sense strand starting at position 2216 of SEQ ID NO: 917152
agaauaaauuuggauuggu

SEQ ID NO: 1212819 - RNA, 19 nt, Artificial Sequence
  Description of Artificial Sequence: Synthetic oligonucleotide
  Antisense strand to SEQ ID NO: 1212818
accaauccaaauuuauucu

SEQ ID NO: 1212820 - RNA, 19 nt, Artificial Sequence
  Description of Artificial Sequence: Synthetic oligonucleotide
  Sense strand starting at position 2340 of SEQ ID NO: 917152
aguugacagguuuagcaaa

SEQ ID NO: 1212821 - RNA, 19 nt, Artificial Sequence
  Description of Artificial Sequence: Synthetic oligonucleotide
  Antisense strand to SEQ ID NO: 1212820
uuugcuaaaccugucaacu

SEQ ID NO: 1212822 - RNA, 19 nt, Artificial Sequence
  Description of Artificial Sequence: Synthetic oligonucleotide
  Sense strand starting at position 2342 of SEQ ID NO: 917152
uugacagguuuagcaaaua

SEQ ID NO: 1212823 - RNA, 19 nt, Artificial Sequence
  Description of Artificial Sequence: Synthetic oligonucleotide
  Antisense strand to SEQ ID NO: 1212822
uauuugcuaaaccugucaa

SEQ ID NO: 1212824 - RNA, 19 nt, Artificial Sequence
  Description of Artificial Sequence: Synthetic oligonucleotide
  Sense strand starting at position 2439 of SEQ ID NO: 917152
aacuauguagaauguauga

SEQ ID NO: 1212825 - RNA, 19 nt, Artificial Sequence
  Description of Artificial Sequence: Synthetic oligonucleotide
  Antisense strand to SEQ ID NO: 1212824
ucauacauucuacauaguu

SEQ ID NO: 1212826 - RNA, 19 nt, Artificial Sequence
  Description of Artificial Sequence: Synthetic oligonucleotide
  Sense strand starting at position 2573 of SEQ ID NO: 917152
aaacuaaagugucuuugga

SEQ ID NO: 1212827 - RNA, 19 nt, Artificial Sequence
  Description of Artificial Sequence: Synthetic oligonucleotide
  Antisense strand to SEQ ID NO: 1212826
uccaaagacacuuuaguuu

SEQ ID NO: 1212828 - RNA, 19 nt, Artificial Sequence
  Description of Artificial Sequence: Synthetic oligonucleotide
  Sense strand starting at position 2575 of SEQ ID NO: 917152
acuaaagugucuuuggaau

SEQ ID NO: 1212829 - RNA, 19 nt, Artificial Sequence
  Description of Artificial Sequence: Synthetic oligonucleotide
  Antisense strand to SEQ ID NO: 1212828
auuccaaagacacuuuagu

SEQ ID NO: 1212830 - RNA, 19 nt, Artificial Sequence
  Description of Artificial Sequence: Synthetic oligonucleotide
  Sense strand starting at position 2637 of SEQ ID NO: 917152
cagggagcuacuugugaug

SEQ ID NO: 1212831 - RNA, 19 nt, Artificial Sequence
  Description of Artificial Sequence: Synthetic oligonucleotide
  Antisense strand to SEQ ID NO: 1212830
caucacaaguagcucccug

SEQ ID NO: 1212832 - RNA, 19 nt, Artificial Sequence
  Description of Artificial Sequence: Synthetic oligonucleotide
  Sense strand starting at position 2663 of SEQ ID NO: 917152
cgaugucagaauuaagggu

SEQ ID NO: 1212833 - RNA, 19 nt, Artificial Sequence
  Description of Artificial Sequence: Synthetic oligonucleotide
  Antisense strand to SEQ ID NO: 1212832
acccuuaauucugacaucg

SEQ ID NO: 1212834 - RNA, 19 nt, Artificial Sequence
  Description of Artificial Sequence: Synthetic oligonucleotide
  Sense strand starting at position 2690 of SEQ ID NO: 917152
ggcagauguaaguacagua

SEQ ID NO: 1212835 - RNA, 19 nt, Artificial Sequence
  Description of Artificial Sequence: Synthetic oligonucleotide
  Antisense strand to SEQ ID NO: 1212834
uacuguacuuacaucugcc

SEQ ID NO: 1212836 - RNA, 19 nt, Artificial Sequence
  Description of Artificial Sequence: Synthetic oligonucleotide
  Sense strand starting at position 2834 of SEQ ID NO: 917152
agaguacucuuccuuugaa

SEQ ID NO: 1212837 - RNA, 19 nt, Artificial Sequence
  Description of Artificial Sequence: Synthetic oligonucleotide
  Antisense strand to SEQ ID NO: 1212836
uucaaaggaagaguacucu

SEQ ID NO: 1212838 - RNA, 19 nt, Artificial Sequence
  Description of Artificial Sequence: Synthetic oligonucleotide
  Sense strand starting at position 2835 of SEQ ID NO: 917152
gaguacucuuccuuugaag

SEQ ID NO: 1212839 - RNA, 19 nt, Artificial Sequence
  Description of Artificial Sequence: Synthetic oligonucleotide
  Antisense strand to SEQ ID NO: 1212838
cuucaaaggaagaguacuc

SEQ ID NO: 1212840 - RNA, 19 nt, Artificial Sequence
  Description of Artificial Sequence: Synthetic oligonucleotide
  Sense strand starting at position 2869 of SEQ ID NO: 917152
acuuccuuugcagauguaa

SEQ ID NO: 1212841 - RNA, 19 nt, Artificial Sequence
  Description of Artificial Sequence: Synthetic oligonucleotide
  Antisense strand to SEQ ID NO: 1212840
uuacaucugcaaaggaagu

SEQ ID NO: 1212842 - RNA, 19 nt, Artificial Sequence
  Description of Artificial Sequence: Synthetic oligonucleotide
  Sense strand starting at position 3131 of SEQ ID NO: 917152
ggaguuugagaccaguacu

SEQ ID NO: 1212843 - RNA, 19 nt, Artificial Sequence
  Description of Artificial Sequence: Synthetic oligonucleotide
  Antisense strand to SEQ ID NO: 1212842
aguacuggucucaaacucc

SEQ ID NO: 1212844 - RNA, 19 nt, Artificial Sequence
  Description of Artificial Sequence: Synthetic oligonucleotide
  Sense strand starting at position 3397 of SEQ ID NO: 917152
gucccugaacauugaagau

SEQ ID NO: 1212845 - RNA, 19 nt, Artificial Sequence
  Description of Artificial Sequence: Synthetic oligonucleotide
  Antisense strand to SEQ ID NO: 1212844
aucuucaauguucagggac

SEQ ID NO: 1212846 - RNA, 19 nt, Artificial Sequence
  Description of Artificial Sequence: Synthetic oligonucleotide
  Sense strand starting at position 3609 of SEQ ID NO: 917153
uuucuagaacuaugguaaa

SEQ ID NO: 1212847 - RNA, 19 nt, Artificial Sequence
  Description of Artificial Sequence: Synthetic oligonucleotide
  Antisense strand to SEQ ID NO: 1212846
uuuaccauaguucuagaaa

SEQ ID NO: 1212848 - RNA, 19 nt, Artificial Sequence
  Description of Artificial Sequence: Synthetic oligonucleotide
  Sense strand starting at position 88 of SEQ ID NO: 917153
ggaacaauuuacuaugaca

SEQ ID NO: 1212849 - RNA, 19 nt, Artificial Sequence
  Description of Artificial Sequence: Synthetic oligonucleotide
  Antisense strand to SEQ ID NO: 1212848
ugucauaguaaauuguucc

SEQ ID NO: 1212850 - RNA, 19 nt, Artificial Sequence
  Description of Artificial Sequence: Synthetic oligonucleotide
  Sense strand starting at position 120 of SEQ ID NO: 917153
aggacugguuaagaaauaa

SEQ ID NO: 1212851 - RNA, 19 nt, Artificial Sequence
  Description of Artificial Sequence: Synthetic oligonucleotide
  Antisense strand to SEQ ID NO: 1212850
uuauuucuuaaccaguccu

SEQ ID NO: 1212852 - RNA, 19 nt, Artificial Sequence
  Description of Artificial Sequence: Synthetic oligonucleotide
  Sense strand starting at position 165 of SEQ ID NO: 917153
uagucaguucuaggacuca

SEQ ID NO: 1212853 - RNA, 19 nt, Artificial Sequence
  Description of Artificial Sequence: Synthetic oligonucleotide
  Antisense strand to SEQ ID NO: 1212852
ugaguccuagaacugacua

SEQ ID NO: 1212854 - RNA, 19 nt, Artificial Sequence
  Description of Artificial Sequence: Synthetic oligonucleotide
  Sense strand starting at position 578 of SEQ ID NO: 917153
gaaguuaguuaccugguuu

SEQ ID NO: 1212855 - RNA, 19 nt, Artificial Sequence
  Description of Artificial Sequence: Synthetic oligonucleotide
  Antisense strand to SEQ ID NO: 1212854
aaaccagguaacuaacuuc

SEQ ID NO: 1212856 - RNA, 19 nt, Artificial Sequence
  Description of Artificial Sequence: Synthetic oligonucleotide
  Sense strand starting at position 616 of SEQ ID NO: 917153
ggcacugcacauuauuaca

SEQ ID NO: 1212857 - RNA, 19 nt, Artificial Sequence
  Description of Artificial Sequence: Synthetic oligonucleotide
  Antisense strand to SEQ ID NO: 1212856
uguaauaaugugcagugcc

SEQ ID NO: 1212858 - RNA, 19 nt, Artificial Sequence
  Description of Artificial Sequence: Synthetic oligonucleotide
  Sense strand starting at position 805 of SEQ ID NO: 917153
uuguauuaaauacggaaga

SEQ ID NO: 1212859 - RNA, 19 nt, Artificial Sequence
  Description of Artificial Sequence: Synthetic oligonucleotide
  Antisense strand to SEQ ID NO: 1212858
ucuuccguauuuaauacaa

SEQ ID NO: 1212860 - RNA, 19 nt, Artificial Sequence
  Description of Artificial Sequence: Synthetic oligonucleotide
  Sense strand starting at position 896 of SEQ ID NO: 917153
ugcuaaguucuuuauagug

SEQ ID NO: 1212861 - RNA, 19 nt, Artificial Sequence
  Description of Artificial Sequence: Synthetic oligonucleotide
  Antisense strand to SEQ ID NO: 1212860
cacuauaaagaacuuagca

SEQ ID NO: 1212862 - RNA, 19 nt, Artificial Sequence
  Description of Artificial Sequence: Synthetic oligonucleotide
  Sense strand starting at position 1022 of SEQ ID NO: 917153
aagauugcauaguuacuga

SEQ ID NO: 1212863 - RNA, 19 nt, Artificial Sequence
  Description of Artificial Sequence: Synthetic oligonucleotide
  Antisense strand to SEQ ID NO: 1212862
ucaguaacuaugcaaucuu

SEQ ID NO: 1212864 - RNA, 19 nt, Artificial Sequence
  Description of Artificial Sequence: Synthetic oligonucleotide
  Sense strand starting at position 1029 of SEQ ID NO: 917153
cauaguuacugagugacaa

SEQ ID NO: 1212865 - RNA, 19 nt, Artificial Sequence
  Description of Artificial Sequence: Synthetic oligonucleotide
  Antisense strand to SEQ ID NO: 1212864
uugucacucaguaacuaug

SEQ ID NO: 1212866 - RNA, 19 nt, Artificial Sequence
  Description of Artificial Sequence: Synthetic oligonucleotide
  Sense strand starting at position 1030 of SEQ ID NO: 917153
auaguuacugagugacaag

SEQ ID NO: 1212867 - RNA, 19 nt, Artificial Sequence
  Description of Artificial Sequence: Synthetic oligonucleotide
  Antisense strand to SEQ ID NO: 1212866
cuugucacucaguaacuau

SEQ ID NO: 1212868 - RNA, 19 nt, Artificial Sequence
  Description of Artificial Sequence: Synthetic oligonucleotide
  Sense strand starting at position 1041 of SEQ ID NO: 917153
gugacaagagauggaguuu

SEQ ID NO: 1212869 - RNA, 19 nt, Artificial Sequence
  Description of Artificial Sequence: Synthetic oligonucleotide
  Antisense strand to SEQ ID NO: 1212868
aaacuccaucucuugucac

SEQ ID NO: 1212870 - RNA, 19 nt, Artificial Sequence
  Description of Artificial Sequence: Synthetic oligonucleotide
  Sense strand starting at position 1047 of SEQ ID NO: 917153
agagauggaguuuguguuu

SEQ ID NO: 1212871 - RNA, 19 nt, Artificial Sequence
  Description of Artificial Sequence: Synthetic oligonucleotide
  Antisense strand to SEQ ID NO: 1212870
aaacacaaacuccaucucu

SEQ ID NO: 1212872 - RNA, 19 nt, Artificial Sequence
  Description of Artificial Sequence: Synthetic oligonucleotide
  Sense strand starting at position 1068 of SEQ ID NO: 917153
gcaggacuguccucaagua

SEQ ID NO: 1212873 - RNA, 19 nt, Artificial Sequence
  Description of Artificial Sequence: Synthetic oligonucleotide
  Antisense strand to SEQ ID NO: 1212872
uacuugaggacaguccugc

SEQ ID NO: 1212874 - RNA, 19 nt, Artificial Sequence
  Description of Artificial Sequence: Synthetic oligonucleotide
  Sense strand starting at position 1130 of SEQ ID NO: 917153
cucagaacgcguguaguuu

SEQ ID NO: 1212875 - RNA, 19 nt, Artificial Sequence
  Description of Artificial Sequence: Synthetic oligonucleotide
  Antisense strand to SEQ ID NO: 1212874
aaacuacacgcguucugag

SEQ ID NO: 1212876 - RNA, 19 nt, Artificial Sequence
  Description of Artificial Sequence: Synthetic oligonucleotide
  Sense strand starting at position 1186 of SEQ ID NO: 917153
ugugacuggagcuacaaua

SEQ ID NO: 1212877 - RNA, 19 nt, Artificial Sequence
  Description of Artificial Sequence: Synthetic oligonucleotide
  Antisense strand to SEQ ID NO: 1212876
uauuguagcuccagucaca

SEQ ID NO: 1212878 - RNA, 19 nt, Artificial Sequence
  Description of Artificial Sequence: Synthetic oligonucleotide
  Sense strand starting at position 1243 of SEQ ID NO: 917153
uccaauucucacgggacuu

SEQ ID NO: 1212879 - RNA, 19 nt, Artificial Sequence
  Description of Artificial Sequence: Synthetic oligonucleotide
  Antisense strand to SEQ ID NO: 1212878
aagucccgugagaauugga

SEQ ID NO: 1212880 - RNA, 19 nt, Artificial Sequence
  Description of Artificial Sequence: Synthetic oligonucleotide
  Sense strand starting at position 1569 of SEQ ID NO: 917153
cggaaagcugccuacuuaa

SEQ ID NO: 1212881 - RNA, 19 nt, Artificial Sequence
  Description of Artificial Sequence: Synthetic oligonucleotide
  Antisense strand to SEQ ID NO: 1212880
uuaaguaggcagcuuuccg

SEQ ID NO: 1212882 - RNA, 19 nt, Artificial Sequence
  Description of Artificial Sequence: Synthetic oligonucleotide
  Sense strand starting at position 1619 of SEQ ID NO: 917153
gaaucuuucgcauggaaua

SEQ ID NO: 1212883 - RNA, 19 nt, Artificial Sequence
  Description of Artificial Sequence: Synthetic oligonucleotide
  Antisense strand to SEQ ID NO: 1212882
uauuccaugcgaaagauuc

SEQ ID NO: 1212884 - RNA, 19 nt, Artificial Sequence
  Description of Artificial Sequence: Synthetic oligonucleotide
  Sense strand starting at position 2122 of SEQ ID NO: 917153
agggacacuccuugcucaa

SEQ ID NO: 1212885 - RNA, 19 nt, Artificial Sequence
  Description of Artificial Sequence: Synthetic oligonucleotide
  Antisense strand to SEQ ID NO: 1212884
uugagcaaggagugucccu

SEQ ID NO: 1212886 - RNA, 19 nt, Artificial Sequence
  Description of Artificial Sequence: Synthetic oligonucleotide
  Sense strand starting at position 2124 of SEQ ID NO: 917153
ggacacuccuugcucaaga

SEQ ID NO: 1212887 - RNA, 19 nt, Artificial Sequence
  Description of Artificial Sequence: Synthetic oligonucleotide
  Antisense strand to SEQ ID NO: 1212886
ucuugagcaaggagugucc

SEQ ID NO: 1212888 - RNA, 19 nt, Artificial Sequence
  Description of Artificial Sequence: Synthetic oligonucleotide
  Sense strand starting at position 2258 of SEQ ID NO: 917153
cggcaaagucggcuucacu

SEQ ID NO: 1212889 - RNA, 19 nt, Artificial Sequence
  Description of Artificial Sequence: Synthetic oligonucleotide
  Antisense strand to SEQ ID NO: 1212888
agugaagccgacuuugccg

SEQ ID NO: 1212890 - RNA, 19 nt, Artificial Sequence
  Description of Artificial Sequence: Synthetic oligonucleotide
  Sense strand starting at position 2344 of SEQ ID NO: 917153
gcaccagagucgcugauuu

SEQ ID NO: 1212891 - RNA, 19 nt, Artificial Sequence
  Description of Artificial Sequence: Synthetic oligonucleotide
  Antisense strand to SEQ ID NO: 1212890
aaaucagcgacucuggugc

SEQ ID NO: 1212892 - RNA, 19 nt, Artificial Sequence
  Description of Artificial Sequence: Synthetic oligonucleotide
  Sense strand starting at position 2356 of SEQ ID NO: 917153
cugauuuggcagugucgga

SEQ ID NO: 1212893 - RNA, 19 nt, Artificial Sequence
  Description of Artificial Sequence: Synthetic oligonucleotide
  Antisense strand to SEQ ID NO: 1212892
uccgacacugccaaaucag

SEQ ID NO: 1212894 - RNA, 19 nt, Artificial Sequence
  Description of Artificial Sequence: Synthetic oligonucleotide
  Sense strand starting at position 2375 of SEQ ID NO: 917153
gcgggaggaacuggucuua

SEQ ID NO: 1212895 - RNA, 19 nt, Artificial Sequence
  Description of Artificial Sequence: Synthetic oligonucleotide
  Antisense strand to SEQ ID NO: 1212894
uaagaccaguuccucccgc

SEQ ID NO: 1212896 - RNA, 19 nt, Artificial Sequence
  Description of Artificial Sequence: Synthetic oligonucleotide
  Sense strand starting at position 2746 of SEQ ID NO: 917153
acugguuccaucgggaaag

SEQ ID NO: 1212897 - RNA, 19 nt, Artificial Sequence
  Description of Artificial Sequence: Synthetic oligonucleotide
  Antisense strand to SEQ ID NO: 1212896
cuuucccgauggaaccagu

SEQ ID NO: 1212898 - RNA, 19 nt, Artificial Sequence
  Description of Artificial Sequence: Synthetic oligonucleotide
  Sense strand starting at position 2868 of SEQ ID NO: 917153
uuaggaaugucuuuagaga

SEQ ID NO: 1212899 - RNA, 19 nt, Artificial Sequence
  Description of Artificial Sequence: Synthetic oligonucleotide
  Antisense strand to SEQ ID NO: 1212898
ucucuaaagacauuccuaa

SEQ ID NO: 1212900 - RNA, 19 nt, Artificial Sequence
  Description of Artificial Sequence: Synthetic oligonucleotide
  Sense strand starting at position 2960 of SEQ ID NO: 917153
aaguguugugaauacauag

SEQ ID NO: 1212901 - RNA, 19 nt, Artificial Sequence
  Description of Artificial Sequence: Synthetic oligonucleotide
  Antisense strand to SEQ ID NO: 1212900
cuauguauucacaacacuu

SEQ ID NO: 1212902 - RNA, 19 nt, Artificial Sequence
  Description of Artificial Sequence: Synthetic oligonucleotide
  Sense strand starting at position 3017 of SEQ ID NO: 917153
uugguagacugaguauagu

SEQ ID NO: 1212903 - RNA, 19 nt, Artificial Sequence
  Description of Artificial Sequence: Synthetic oligonucleotide
  Antisense strand to SEQ ID NO: 1212902
acuauacucagucuaccaa

SEQ ID NO: 1212904 - RNA, 19 nt, Artificial Sequence
  Description of Artificial Sequence: Synthetic oligonucleotide
  Sense strand starting at position 3100 of SEQ ID NO: 917153
gcugaccucccaggaguaa

SEQ ID NO: 1212905 - RNA, 19 nt, Artificial Sequence
  Description of Artificial Sequence: Synthetic oligonucleotide
  Antisense strand to SEQ ID NO: 1212904
uuacuccugggaggucagc

SEQ ID NO: 1212906 - RNA, 19 nt, Artificial Sequence
  Description of Artificial Sequence: Synthetic oligonucleotide
  Sense strand starting at position 3220 of SEQ ID NO: 917153
acugcagauccugagacuu

SEQ ID NO: 1212907 - RNA, 19 nt, Artificial Sequence
  Description of Artificial Sequence: Synthetic oligonucleotide
  Antisense strand to SEQ ID NO: 1212906
aagucucaggaucugcagu

SEQ ID NO: 1212908 - RNA, 19 nt, Artificial Sequence
  Description of Artificial Sequence: Synthetic oligonucleotide
  Sense strand starting at position 3257 of SEQ ID NO: 917153
acgggcaaauuccuuauaa

SEQ ID NO: 1212909 - RNA, 19 nt, Artificial Sequence
  Description of Artificial Sequence: Synthetic oligonucleotide
  Antisense strand to SEQ ID NO: 1212908
uuauaaggaauuugcccgu

SEQ ID NO: 1212910 - RNA, 19 nt, Artificial Sequence
  Description of Artificial Sequence: Synthetic oligonucleotide
  Sense strand starting at position 3258 of SEQ ID NO: 917153
cgggcaaauuccuuauaau

SEQ ID NO: 1212911 - RNA, 19 nt, Artificial Sequence
  Description of Artificial Sequence: Synthetic oligonucleotide
  Antisense strand to SEQ ID NO: 1212910
auuauaaggaauuugcccg

SEQ ID NO: 1212912 - RNA, 19 nt, Artificial Sequence
  Description of Artificial Sequence: Synthetic oligonucleotide
  Sense strand starting at position 3361 of SEQ ID NO: 917153
agcuguuaagucugaaagg

SEQ ID NO: 1212913 - RNA, 19 nt, Artificial Sequence
  Description of Artificial Sequence: Synthetic oligonucleotide
  Antisense strand to SEQ ID NO: 1212912
ccuuucagacuuaacagcu

SEQ ID NO: 1212914 - RNA, 19 nt, Artificial Sequence
  Description of Artificial Sequence: Synthetic oligonucleotide
  Sense strand starting at position 3421 of SEQ ID NO: 917153
ggacuagauuaucuguuga

SEQ ID NO: 1212915 - RNA, 19 nt, Artificial Sequence
  Description of Artificial Sequence: Synthetic oligonucleotide
  Antisense strand to SEQ ID NO: 1212914
ucaacagauaaucuagucc

SEQ ID NO: 1212916 - RNA, 19 nt, Artificial Sequence
  Description of Artificial Sequence: Synthetic oligonucleotide
  Sense strand starting at position 3423 of SEQ ID NO: 917153
acuagauuaucuguugaca

SEQ ID NO: 1212917 - RNA, 19 nt, Artificial Sequence
  Description of Artificial Sequence: Synthetic oligonucleotide
  Antisense strand to SEQ ID NO: 1212916
ugucaacagauaaucuagu

SEQ ID NO: 1212918 - RNA, 19 nt, Artificial Sequence
  Description of Artificial Sequence: Synthetic oligonucleotide
  Sense strand starting at position 3770 of SEQ ID NO: 917153
aaagaucuguuagcaggau

SEQ ID NO: 1212919 - RNA, 19 nt, Artificial Sequence
  Description of Artificial Sequence: Synthetic oligonucleotide
  Antisense strand to SEQ ID NO: 1212918
auccugcuaacagaucuuu

SEQ ID NO: 1212920 - RNA, 19 nt, Artificial Sequence
  Description of Artificial Sequence: Synthetic oligonucleotide
  Sense strand starting at position 3774 of SEQ ID NO: 917153
aucuguuagcaggaucuca

SEQ ID NO: 1212921 - RNA, 19 nt, Artificial Sequence
  Description of Artificial Sequence: Synthetic oligonucleotide
  Antisense strand to SEQ ID NO: 1212920
ugagauccugcuaacagau

SEQ ID NO: 1212922 - RNA, 19 nt, Artificial Sequence
  Description of Artificial Sequence: Synthetic oligonucleotide
  Sense strand starting at position 3782 of SEQ ID NO: 917153
gcaggaucucacuguggga

SEQ ID NO: 1212923 - RNA, 19 nt, Artificial Sequence
  Description of Artificial Sequence: Synthetic oligonucleotide
  Antisense strand to SEQ ID NO: 1212922
ucccacagugagauccugc

SEQ ID NO: 1212924 - RNA, 19 nt, Artificial Sequence
  Description of Artificial Sequence: Synthetic oligonucleotide
  Sense strand starting at position 3786 of SEQ ID NO: 917153
gaucucacugugggaaauu

SEQ ID NO: 1212925 - RNA, 19 nt, Artificial Sequence
  Description of Artificial Sequence: Synthetic oligonucleotide
  Antisense strand to SEQ ID NO: 1212924
aauuucccacagugagauc

SEQ ID NO: 1212926 - RNA, 19 nt, Artificial Sequence
  Description of Artificial Sequence: Synthetic oligonucleotide
  Sense strand starting at position 3861 of SEQ ID NO: 917153
guguuucuggcagagauaa

SEQ ID NO: 1212927 - RNA, 19 nt, Artificial Sequence
  Description of Artificial Sequence: Synthetic oligonucleotide
  Antisense strand to SEQ ID NO: 1212926
uuaucucugccagaaacac

SEQ ID NO: 1212928 - RNA, 19 nt, Artificial Sequence
  Description of Artificial Sequence: Synthetic oligonucleotide
  Sense strand starting at position 3861 of SEQ ID NO: 917154
guguuucuggcagagauaa

SEQ ID NO: 1212929 - RNA, 19 nt, Artificial Sequence
  Description of Artificial Sequence: Synthetic oligonucleotide
  Antisense strand to SEQ ID NO: 1212928
uuaucucugccagaaacac

SEQ ID NO: 1212930 - RNA, 19 nt, Artificial Sequence
  Description of Artificial Sequence: Synthetic oligonucleotide
  Sense strand starting at position 88 of SEQ ID NO: 917154
ggaacaauuuacuaugaca

SEQ ID NO: 1212931 - RNA, 19 nt, Artificial Sequence
  Description of Artificial Sequence: Synthetic oligonucleotide
  Antisense strand to SEQ ID NO: 1212930
ugucauaguaaauuguucc

SEQ ID NO: 1212932 - RNA, 19 nt, Artificial Sequence
  Description of Artificial Sequence: Synthetic oligonucleotide
  Sense strand starting at position 120 of SEQ ID NO: 917154
aggacugguuaagaaauaa

SEQ ID NO: 1212933 - RNA, 19 nt, Artificial Sequence
  Description of Artificial Sequence: Synthetic oligonucleotide
  Antisense strand to SEQ ID NO: 1212932
uuauuucuuaaccaguccu

SEQ ID NO: 1212934 - RNA, 19 nt, Artificial Sequence
  Description of Artificial Sequence: Synthetic oligonucleotide
  Sense strand starting at position 165 of SEQ ID NO: 917154
uagucaguucuaggacuca

SEQ ID NO: 1212935 - RNA, 19 nt, Artificial Sequence
  Description of Artificial Sequence: Synthetic oligonucleotide
  Antisense strand to SEQ ID NO: 1212934
ugaguccuagaacugacua

SEQ ID NO: 1212936 - RNA, 19 nt, Artificial Sequence
  Description of Artificial Sequence: Synthetic oligonucleotide
  Sense strand starting at position 578 of SEQ ID NO: 917154
gaaguuaguuaccugguuu

SEQ ID NO: 1212937 - RNA, 19 nt, Artificial Sequence
  Description of Artificial Sequence: Synthetic oligonucleotide
  Antisense strand to SEQ ID NO: 1212936
aaaccagguaacuaacuuc

SEQ ID NO: 1212938 - RNA, 19 nt, Artificial Sequence
  Description of Artificial Sequence: Synthetic oligonucleotide
  Sense strand starting at position 616 of SEQ ID NO: 917154
ggcacugcacauuauuaca

SEQ ID NO: 1212939 - RNA, 19 nt, Artificial Sequence
  Description of Artificial Sequence: Synthetic oligonucleotide
  Antisense strand to SEQ ID NO: 1212938
uguaauaaugugcagugcc

SEQ ID NO: 1212940 - RNA, 19 nt, Artificial Sequence
  Description of Artificial Sequence: Synthetic oligonucleotide
  Sense strand starting at position 805 of SEQ ID NO: 917154
uuguauuaaauacggaaga

SEQ ID NO: 1212941 - RNA, 19 nt, Artificial Sequence
  Description of Artificial Sequence: Synthetic oligonucleotide
  Antisense strand to SEQ ID NO: 1212940
ucuuccguauuuaauacaa

SEQ ID NO: 1212942 - RNA, 19 nt, Artificial Sequence
  Description of Artificial Sequence: Synthetic oligonucleotide
  Sense strand starting at position 896 of SEQ ID NO: 917154
ugcuaaguucuuuauagug

SEQ ID NO: 1212943 - RNA, 19 nt, Artificial Sequence
  Description of Artificial Sequence: Synthetic oligonucleotide
  Antisense strand to SEQ ID NO: 1212942
cacuauaaagaacuuagca

SEQ ID NO: 1212944 - RNA, 19 nt, Artificial Sequence
  Description of Artificial Sequence: Synthetic oligonucleotide
  Sense strand starting at position 1022 of SEQ ID NO: 917154
aagauugcauaguuacuga

SEQ ID NO: 1212945 - RNA, 19 nt, Artificial Sequence
  Description of Artificial Sequence: Synthetic oligonucleotide
  Antisense strand to SEQ ID NO: 1212944
ucaguaacuaugcaaucuu

SEQ ID NO: 1212946 - RNA, 19 nt, Artificial Sequence
  Description of Artificial Sequence: Synthetic oligonucleotide
  Sense strand starting at position 1029 of SEQ ID NO: 917154
cauaguuacugagugacaa

SEQ ID NO: 1212947 - RNA, 19 nt, Artificial Sequence
  Description of Artificial Sequence: Synthetic oligonucleotide
  Antisense strand to SEQ ID NO: 1212946
uugucacucaguaacuaug

SEQ ID NO: 1212948 - RNA, 19 nt, Artificial Sequence
  Description of Artificial Sequence: Synthetic oligonucleotide
  Sense strand starting at position 1030 of SEQ ID NO: 917154
auaguuacugagugacaag

SEQ ID NO: 1212949 - RNA, 19 nt, Artificial Sequence
  Description of Artificial Sequence: Synthetic oligonucleotide
  Antisense strand to SEQ ID NO: 1212948
cuugucacucaguaacuau

SEQ ID NO: 1212950 - RNA, 19 nt, Artificial Sequence
  Description of Artificial Sequence: Synthetic oligonucleotide
  Sense strand starting at position 1041 of SEQ ID NO: 917154
gugacaagagauggaguuu

SEQ ID NO: 1212951 - RNA, 19 nt, Artificial Sequence
  Description of Artificial Sequence: Synthetic oligonucleotide
  Antisense strand to SEQ ID NO: 1212950
aaacuccaucucuugucac

SEQ ID NO: 1212952 - RNA, 19 nt, Artificial Sequence
  Description of Artificial Sequence: Synthetic oligonucleotide
  Sense strand starting at position 1047 of SEQ ID NO: 917154
agagauggaguuuguguuu

SEQ ID NO: 1212953 - RNA, 19 nt, Artificial Sequence
  Description of Artificial Sequence: Synthetic oligonucleotide
  Antisense strand to SEQ ID NO: 1212952
aaacacaaacuccaucucu

SEQ ID NO: 1212954 - RNA, 19 nt, Artificial Sequence
  Description of Artificial Sequence: Synthetic oligonucleotide
  Sense strand starting at position 1068 of SEQ ID NO: 917154
gcaggacuguccucaagua

SEQ ID NO: 1212955 - RNA, 19 nt, Artificial Sequence
  Description of Artificial Sequence: Synthetic oligonucleotide
  Antisense strand to SEQ ID NO: 1212954
uacuugaggacaguccugc

SEQ ID NO: 1212956 - RNA, 19 nt, Artificial Sequence
  Description of Artificial Sequence: Synthetic oligonucleotide
  Sense strand starting at position 1130 of SEQ ID NO: 917154
cucagaacgcguguaguuu

SEQ ID NO: 1212957 - RNA, 19 nt, Artificial Sequence
  Description of Artificial Sequence: Synthetic oligonucleotide
  Antisense strand to SEQ ID NO: 1212956
aaacuacacgcguucugag

SEQ ID NO: 1212958 - RNA, 19 nt, Artificial Sequence
  Description of Artificial Sequence: Synthetic oligonucleotide
  Sense strand starting at position 1186 of SEQ ID NO: 917154
ugugacuggagcuacaaua

SEQ ID NO: 1212959 - RNA, 19 nt, Artificial Sequence
  Description of Artificial Sequence: Synthetic oligonucleotide
  Antisense strand to SEQ ID NO: 1212958
uauuguagcuccagucaca

SEQ ID NO: 1212960 - RNA, 19 nt, Artificial Sequence
  Description of Artificial Sequence: Synthetic oligonucleotide
  Sense strand starting at position 1243 of SEQ ID NO: 917154
uccaauucucacgggacuu

SEQ ID NO: 1212961 - RNA, 19 nt, Artificial Sequence
  Description of Artificial Sequence: Synthetic oligonucleotide
  Antisense strand to SEQ ID NO: 1212960
aagucccgugagaauugga

SEQ ID NO: 1212962 - RNA, 19 nt, Artificial Sequence
  Description of Artificial Sequence: Synthetic oligonucleotide
  Sense strand starting at position 1569 of SEQ ID NO: 917154
cggaaagcugccuacuuaa

SEQ ID NO: 1212963 - RNA, 19 nt, Artificial Sequence
  Description of Artificial Sequence: Synthetic oligonucleotide
  Antisense strand to SEQ ID NO: 1212962
uuaaguaggcagcuuuccg

SEQ ID NO: 1212964 - RNA, 19 nt, Artificial Sequence
  Description of Artificial Sequence: Synthetic oligonucleotide
  Sense strand starting at position 1619 of SEQ ID NO: 917154
gaaucuuucgcauggaaua

SEQ ID NO: 1212965 - RNA, 19 nt, Artificial Sequence
  Description of Artificial Sequence: Synthetic oligonucleotide
  Antisense strand to SEQ ID NO: 1212964
uauuccaugcgaaagauuc

SEQ ID NO: 1212966 - RNA, 19 nt, Artificial Sequence
  Description of Artificial Sequence: Synthetic oligonucleotide
  Sense strand starting at position 2122 of SEQ ID NO: 917154
agggacacuccuugcucaa

SEQ ID NO: 1212967 - RNA, 19 nt, Artificial Sequence
  Description of Artificial Sequence: Synthetic oligonucleotide
  Antisense strand to SEQ ID NO: 1212966
uugagcaaggagugucccu

SEQ ID NO: 1212968 - RNA, 19 nt, Artificial Sequence
  Description of Artificial Sequence: Synthetic oligonucleotide
  Sense strand starting at position 2124 of SEQ ID NO: 917154
ggacacuccuugcucaaga

SEQ ID NO: 1212969 - RNA, 19 nt, Artificial Sequence
  Description of Artificial Sequence: Synthetic oligonucleotide
  Antisense strand to SEQ ID NO: 1212968
ucuugagcaaggagugucc

SEQ ID NO: 1212970 - RNA, 19 nt, Artificial Sequence
  Description of Artificial Sequence: Synthetic oligonucleotide
  Sense strand starting at position 2258 of SEQ ID NO: 917154
cggcaaagucggcuucacu

SEQ ID NO: 1212971 - RNA, 19 nt, Artificial Sequence
  Description of Artificial Sequence: Synthetic oligonucleotide
  Antisense strand to SEQ ID NO: 1212970
agugaagccgacuuugccg

SEQ ID NO: 1212972 - RNA, 19 nt, Artificial Sequence
  Description of Artificial Sequence: Synthetic oligonucleotide
  Sense strand starting at position 2344 of SEQ ID NO: 917154
gcaccagagucgcugauuu

SEQ ID NO: 1212973 - RNA, 19 nt, Artificial Sequence
  Description of Artificial Sequence: Synthetic oligonucleotide
  Antisense strand to SEQ ID NO: 1212972
aaaucagcgacucuggugc

SEQ ID NO: 1212974 - RNA, 19 nt, Artificial Sequence
  Description of Artificial Sequence: Synthetic oligonucleotide
  Sense strand starting at position 2356 of SEQ ID NO: 917154
cugauuuggcagugucgga

SEQ ID NO: 1212975 - RNA, 19 nt, Artificial Sequence
  Description of Artificial Sequence: Synthetic oligonucleotide
  Antisense strand to SEQ ID NO: 1212974
uccgacacugccaaaucag

SEQ ID NO: 1212976 - RNA, 19 nt, Artificial Sequence
  Description of Artificial Sequence: Synthetic oligonucleotide
  Sense strand starting at position 2375 of SEQ ID NO: 917154
gcgggaggaacuggucuua

SEQ ID NO: 1212977 - RNA, 19 nt, Artificial Sequence
  Description of Artificial Sequence: Synthetic oligonucleotide
  Antisense strand to SEQ ID NO: 1212976
uaagaccaguuccucccgc

SEQ ID NO: 1212978 - RNA, 19 nt, Artificial Sequence
  Description of Artificial Sequence: Synthetic oligonucleotide
  Sense strand starting at position 2746 of SEQ ID NO: 917154
acugguuccaucgggaaag

SEQ ID NO: 1212979 - RNA, 19 nt, Artificial Sequence
  Description of Artificial Sequence: Synthetic oligonucleotide
  Antisense strand to SEQ ID NO: 1212978
cuuucccgauggaaccagu

SEQ ID NO: 1212980 - RNA, 19 nt, Artificial Sequence
  Description of Artificial Sequence: Synthetic oligonucleotide
  Sense strand starting at position 2868 of SEQ ID NO: 917154
uuaggaaugucuuuagaga

SEQ ID NO: 1212981 - RNA, 19 nt, Artificial Sequence
  Description of Artificial Sequence: Synthetic oligonucleotide
  Antisense strand to SEQ ID NO: 1212980
ucucuaaagacauuccuaa

SEQ ID NO: 1212982 - RNA, 19 nt, Artificial Sequence
  Description of Artificial Sequence: Synthetic oligonucleotide
  Sense strand starting at position 2960 of SEQ ID NO: 917154
aaguguugugaauacauag

SEQ ID NO: 1212983 - RNA, 19 nt, Artificial Sequence
  Description of Artificial Sequence: Synthetic oligonucleotide
  Antisense strand to SEQ ID NO: 1212982
cuauguauucacaacacuu

SEQ ID NO: 1212984 - RNA, 19 nt, Artificial Sequence
  Description of Artificial Sequence: Synthetic oligonucleotide
  Sense strand starting at position 3017 of SEQ ID NO: 917154
uugguagacugaguauagu

SEQ ID NO: 1212985 - RNA, 19 nt, Artificial Sequence
  Description of Artificial Sequence: Synthetic oligonucleotide
  Antisense strand to SEQ ID NO: 1212984
acuauacucagucuaccaa

SEQ ID NO: 1212986 - RNA, 19 nt, Artificial Sequence
  Description of Artificial Sequence: Synthetic oligonucleotide
  Sense strand starting at position 3100 of SEQ ID NO: 917154
gcugaccucccaggaguaa

SEQ ID NO: 1212987 - RNA, 19 nt, Artificial Sequence
  Description of Artificial Sequence: Synthetic oligonucleotide
  Antisense strand to SEQ ID NO: 1212986
uuacuccugggaggucagc

SEQ ID NO: 1212988 - RNA, 19 nt, Artificial Sequence
  Description of Artificial Sequence: Synthetic oligonucleotide
  Sense strand starting at position 3220 of SEQ ID NO: 917154
acugcagauccugagacuu

SEQ ID NO: 1212989 - RNA, 19 nt, Artificial Sequence
  Description of Artificial Sequence: Synthetic oligonucleotide
  Antisense strand to SEQ ID NO: 1212988
aagucucaggaucugcagu

SEQ ID NO: 1212990 - RNA, 19 nt, Artificial Sequence
  Description of Artificial Sequence: Synthetic oligonucleotide
  Sense strand starting at position 3257 of SEQ ID NO: 917154
acgggcaaauuccuuauaa

SEQ ID NO: 1212991 - RNA, 19 nt, Artificial Sequence
  Description of Artificial Sequence: Synthetic oligonucleotide
  Antisense strand to SEQ ID NO: 1212990
uuauaaggaauuugcccgu

SEQ ID NO: 1212992 - RNA, 19 nt, Artificial Sequence
  Description of Artificial Sequence: Synthetic oligonucleotide
  Sense strand starting at position 3258 of SEQ ID NO: 917154
cgggcaaauuccuuauaau

SEQ ID NO: 1212993 - RNA, 19 nt, Artificial Sequence
  Description of Artificial Sequence: Synthetic oligonucleotide
  Antisense strand to SEQ ID NO: 1212992
auuauaaggaauuugcccg

SEQ ID NO: 1212994 - RNA, 19 nt, Artificial Sequence
  Description of Artificial Sequence: Synthetic oligonucleotide
  Sense strand starting at position 3361 of SEQ ID NO: 917154
agcuguuaagucugaaagg

SEQ ID NO: 1212995 - RNA, 19 nt, Artificial Sequence
  Description of Artificial Sequence: Synthetic oligonucleotide
  Antisense strand to SEQ ID NO: 1212994
ccuuucagacuuaacagcu

SEQ ID NO: 1212996 - RNA, 19 nt, Artificial Sequence
  Description of Artificial Sequence: Synthetic oligonucleotide
  Sense strand starting at position 3421 of SEQ ID NO: 917154
ggacuagauuaucuguuga

SEQ ID NO: 1212997 - RNA, 19 nt, Artificial Sequence
  Description of Artificial Sequence: Synthetic oligonucleotide
  Antisense strand to SEQ ID NO: 1212996
ucaacagauaaucuagucc

SEQ ID NO: 1212998 - RNA, 19 nt, Artificial Sequence
  Description of Artificial Sequence: Synthetic oligonucleotide
  Sense strand starting at position 3423 of SEQ ID NO: 917154
acuagauuaucuguugaca

SEQ ID NO: 1212999 - RNA, 19 nt, Artificial Sequence
  Description of Artificial Sequence: Synthetic oligonucleotide
  Antisense strand to SEQ ID NO: 1212998
ugucaacagauaaucuagu

SEQ ID NO: 1213000 - RNA, 19 nt, Artificial Sequence
  Description of Artificial Sequence: Synthetic oligonucleotide
  Sense strand starting at position 3770 of SEQ ID NO: 917154
aaagaucuguuagcaggau

SEQ ID NO: 1213001 - RNA, 19 nt, Artificial Sequence
  Description of Artificial Sequence: Synthetic oligonucleotide
  Antisense strand to SEQ ID NO: 1213000
auccugcuaacagaucuuu

SEQ ID NO: 1213002 - RNA, 19 nt, Artificial Sequence
  Description of Artificial Sequence: Synthetic oligonucleotide
  Sense strand starting at position 3774 of SEQ ID NO: 917154
aucuguuagcaggaucuca

SEQ ID NO: 1213003 - RNA, 19 nt, Artificial Sequence
  Description of Artificial Sequence: Synthetic oligonucleotide
  Antisense strand to SEQ ID NO: 1213002
ugagauccugcuaacagau

SEQ ID NO: 1213004 - RNA, 19 nt, Artificial Sequence
  Description of Artificial Sequence: Synthetic oligonucleotide
  Sense strand starting at position 3782 of SEQ ID NO: 917154
gcaggaucucacuguggga

SEQ ID NO: 1213005 - RNA, 19 nt, Artificial Sequence
  Description of Artificial Sequence: Synthetic oligonucleotide
  Antisense strand to SEQ ID NO: 1213004
ucccacagugagauccugc

SEQ ID NO: 1213006 - RNA, 19 nt, Artificial Sequence
  Description of Artificial Sequence: Synthetic oligonucleotide
  Sense strand starting at position 3786 of SEQ ID NO: 917154
gaucucacugugggaaauu

SEQ ID NO: 1213007 - RNA, 19 nt, Artificial Sequence
  Description of Artificial Sequence: Synthetic oligonucleotide
  Antisense strand to SEQ ID NO: 1213006
aauuucccacagugagauc

SEQ ID NO: 1213008 - RNA, 19 nt, Artificial Sequence
  Description of Artificial Sequence: Synthetic oligonucleotide
  Sense strand starting at position 3861 of SEQ ID NO: 917155
guguuucuggcagagauaa

SEQ ID NO: 1213009 - RNA, 19 nt, Artificial Sequence
  Description of Artificial Sequence: Synthetic oligonucleotide
  Antisense strand to SEQ ID NO: 1213008
uuaucucugccagaaacac

SEQ ID NO: 1213010 - RNA, 19 nt, Artificial Sequence
  Description of Artificial Sequence: Synthetic oligonucleotide
  Sense strand starting at position 24 of SEQ ID NO: 917155
auaggaaggugguuagagu

SEQ ID NO: 1213011 - RNA, 19 nt, Artificial Sequence
  Description of Artificial Sequence: Synthetic oligonucleotide
  Antisense strand to SEQ ID NO: 1213010
acucuaaccaccuuccuau

SEQ ID NO: 1213012 - RNA, 19 nt, Artificial Sequence
  Description of Artificial Sequence: Synthetic oligonucleotide
  Sense strand starting at position 44 of SEQ ID NO: 917155
caguaaagagcucaguguu

SEQ ID NO: 1213013 - RNA, 19 nt, Artificial Sequence
  Description of Artificial Sequence: Synthetic oligonucleotide
  Antisense strand to SEQ ID NO: 1213012
aacacugagcucuuuacug

SEQ ID NO: 1213014 - RNA, 19 nt, Artificial Sequence
  Description of Artificial Sequence: Synthetic oligonucleotide
  Sense strand starting at position 57 of SEQ ID NO: 917155
aguguugucagauaaggag

SEQ ID NO: 1213015 - RNA, 19 nt, Artificial Sequence
  Description of Artificial Sequence: Synthetic oligonucleotide
  Antisense strand to SEQ ID NO: 1213014
cuccuuaucugacaacacu

SEQ ID NO: 1213016 - RNA, 19 nt, Artificial Sequence
  Description of Artificial Sequence: Synthetic oligonucleotide
  Sense strand starting at position 199 of SEQ ID NO: 917155
cagggcuuucucuguauuu

SEQ ID NO: 1213017 - RNA, 19 nt, Artificial Sequence
  Description of Artificial Sequence: Synthetic oligonucleotide
  Antisense strand to SEQ ID NO: 1213016
aaauacagagaaagcccug

SEQ ID NO: 1213018 - RNA, 19 nt, Artificial Sequence
  Description of Artificial Sequence: Synthetic oligonucleotide
  Sense strand starting at position 463 of SEQ ID NO: 917155
agccgagauccagauccuu

SEQ ID NO: 1213019 - RNA, 19 nt, Artificial Sequence
  Description of Artificial Sequence: Synthetic oligonucleotide
  Antisense strand to SEQ ID NO: 1213018
aaggaucuggaucucggcu

SEQ ID NO: 1213020 - RNA, 19 nt, Artificial Sequence
  Description of Artificial Sequence: Synthetic oligonucleotide
  Sense strand starting at position 537 of SEQ ID NO: 917155
ccaggaugccuguaacagu

SEQ ID NO: 1213021 - RNA, 19 nt, Artificial Sequence
  Description of Artificial Sequence: Synthetic oligonucleotide
  Antisense strand to SEQ ID NO: 1213020
acuguuacaggcauccugg

SEQ ID NO: 1213022 - RNA, 19 nt, Artificial Sequence
  Description of Artificial Sequence: Synthetic oligonucleotide
  Sense strand starting at position 668 of SEQ ID NO: 917155
gacccuguagcccaaagau

SEQ ID NO: 1213023 - RNA, 19 nt, Artificial Sequence
  Description of Artificial Sequence: Synthetic oligonucleotide
  Antisense strand to SEQ ID NO: 1213022
aucuuugggcuacaggguc

SEQ ID NO: 1213024 - RNA, 19 nt, Artificial Sequence
  Description of Artificial Sequence: Synthetic oligonucleotide
  Sense strand starting at position 1001 of SEQ ID NO: 917155
cuugucacacuugauugaa

SEQ ID NO: 1213025 - RNA, 19 nt, Artificial Sequence
  Description of Artificial Sequence: Synthetic oligonucleotide
  Antisense strand to SEQ ID NO: 1213024
uucaaucaagugugacaag

SEQ ID NO: 1213026 - RNA, 19 nt, Artificial Sequence
  Description of Artificial Sequence: Synthetic oligonucleotide
  Sense strand starting at position 1003 of SEQ ID NO: 917155
ugucacacuugauugaaau

SEQ ID NO: 1213027 - RNA, 19 nt, Artificial Sequence
  Description of Artificial Sequence: Synthetic oligonucleotide
  Antisense strand to SEQ ID NO: 1213026
auuucaaucaagugugaca

SEQ ID NO: 1213028 - RNA, 19 nt, Artificial Sequence
  Description of Artificial Sequence: Synthetic oligonucleotide
  Sense strand starting at position 1004 of SEQ ID NO: 917155
gucacacuugauugaaauu

SEQ ID NO: 1213029 - RNA, 19 nt, Artificial Sequence
  Description of Artificial Sequence: Synthetic oligonucleotide
  Antisense strand to SEQ ID NO: 1213028
aauuucaaucaagugugac

SEQ ID NO: 1213030 - RNA, 19 nt, Artificial Sequence
  Description of Artificial Sequence: Synthetic oligonucleotide
  Sense strand starting at position 1013 of SEQ ID NO: 917155
gauugaaauuaggugugga

SEQ ID NO: 1213031 - RNA, 19 nt, Artificial Sequence
  Description of Artificial Sequence: Synthetic oligonucleotide
  Antisense strand to SEQ ID NO: 1213030
uccacaccuaauuucaauc

SEQ ID NO: 1213032 - RNA, 19 nt, Artificial Sequence
  Description of Artificial Sequence: Synthetic oligonucleotide
  Sense strand starting at position 1016 of SEQ ID NO: 917155
ugaaauuagguguggacau

SEQ ID NO: 1213033 - RNA, 19 nt, Artificial Sequence
  Description of Artificial Sequence: Synthetic oligonucleotide
  Antisense strand to SEQ ID NO: 1213032
auguccacaccuaauuuca

SEQ ID NO: 1213034 - RNA, 19 nt, Artificial Sequence
  Description of Artificial Sequence: Synthetic oligonucleotide
  Sense strand starting at position 1029 of SEQ ID NO: 917155
ggacaugucuuccugacau

SEQ ID NO: 1213035 - RNA, 19 nt, Artificial Sequence
  Description of Artificial Sequence: Synthetic oligonucleotide
  Antisense strand to SEQ ID NO: 1213034
augucaggaagacaugucc

SEQ ID NO: 1213036 - RNA, 19 nt, Artificial Sequence
  Description of Artificial Sequence: Synthetic oligonucleotide
  Sense strand starting at position 1031 of SEQ ID NO: 917155
acaugucuuccugacaucu

SEQ ID NO: 1213037 - RNA, 19 nt, Artificial Sequence
  Description of Artificial Sequence: Synthetic oligonucleotide
  Antisense strand to SEQ ID NO: 1213036
agaugucaggaagacaugu

SEQ ID NO: 1213038 - RNA, 19 nt, Artificial Sequence
  Description of Artificial Sequence: Synthetic oligonucleotide
  Sense strand starting at position 1082 of SEQ ID NO: 917155
gccuauauaggagggaauu

SEQ ID NO: 1213039 - RNA, 19 nt, Artificial Sequence
  Description of Artificial Sequence: Synthetic oligonucleotide
  Antisense strand to SEQ ID NO: 1213038
aauucccuccuauauaggc

SEQ ID NO: 1213040 - RNA, 19 nt, Artificial Sequence
  Description of Artificial Sequence: Synthetic oligonucleotide
  Sense strand starting at position 1239 of SEQ ID NO: 917155
ccuggauauccuugcccaa

SEQ ID NO: 1213041 - RNA, 19 nt, Artificial Sequence
  Description of Artificial Sequence: Synthetic oligonucleotide
  Antisense strand to SEQ ID NO: 1213040
uugggcaaggauauccagg

SEQ ID NO: 1213042 - RNA, 19 nt, Artificial Sequence
  Description of Artificial Sequence: Synthetic oligonucleotide
  Sense strand starting at position 1400 of SEQ ID NO: 917155
aauguucugccacaggaua

SEQ ID NO: 1213043 - RNA, 19 nt, Artificial Sequence
  Description of Artificial Sequence: Synthetic oligonucleotide
  Antisense strand to SEQ ID NO: 1213042
uauccuguggcagaacauu

SEQ ID NO: 1213044 - RNA, 19 nt, Artificial Sequence
  Description of Artificial Sequence: Synthetic oligonucleotide
  Sense strand starting at position 1427 of SEQ ID NO: 917155
ggaaauaguagcuggauga

SEQ ID NO: 1213045 - RNA, 19 nt, Artificial Sequence
  Description of Artificial Sequence: Synthetic oligonucleotide
  Antisense strand to SEQ ID NO: 1213044
ucauccagcuacuauuucc

SEQ ID NO: 1213046 - RNA, 19 nt, Artificial Sequence
  Description of Artificial Sequence: Synthetic oligonucleotide
  Sense strand starting at position 1428 of SEQ ID NO: 917155
gaaauaguagcuggaugaa

SEQ ID NO: 1213047 - RNA, 19 nt, Artificial Sequence
  Description of Artificial Sequence: Synthetic oligonucleotide
  Antisense strand to SEQ ID NO: 1213046
uucauccagcuacuauuuc

SEQ ID NO: 1213048 - RNA, 19 nt, Artificial Sequence
  Description of Artificial Sequence: Synthetic oligonucleotide
  Sense strand starting at position 1552 of SEQ ID NO: 917155
auagguagauguguauuaa

SEQ ID NO: 1213049 - RNA, 19 nt, Artificial Sequence
  Description of Artificial Sequence: Synthetic oligonucleotide
  Antisense strand to SEQ ID NO: 1213048
uuaauacacaucuaccuau

SEQ ID NO: 1213050 - RNA, 19 nt, Artificial Sequence
  Description of Artificial Sequence: Synthetic oligonucleotide
  Sense strand starting at position 1553 of SEQ ID NO: 917155
uagguagauguguauuaaa

SEQ ID NO: 1213051 - RNA, 19 nt, Artificial Sequence
  Description of Artificial Sequence: Synthetic oligonucleotide
  Antisense strand to SEQ ID NO: 1213050
uuuaauacacaucuaccua

SEQ ID NO: 1213052 - RNA, 19 nt, Artificial Sequence
  Description of Artificial Sequence: Synthetic oligonucleotide
  Sense strand starting at position 1650 of SEQ ID NO: 917155
ucaguuauacuguaagacu

SEQ ID NO: 1213053 - RNA, 19 nt, Artificial Sequence
  Description of Artificial Sequence: Synthetic oligonucleotide
  Antisense strand to SEQ ID NO: 1213052
agucuuacaguauaacuga

SEQ ID NO: 1213054 - RNA, 19 nt, Artificial Sequence
  Description of Artificial Sequence: Synthetic oligonucleotide
  Sense strand starting at position 2016 of SEQ ID NO: 917155
ugcuguugaugacucacaa

SEQ ID NO: 1213055 - RNA, 19 nt, Artificial Sequence
  Description of Artificial Sequence: Synthetic oligonucleotide
  Antisense strand to SEQ ID NO: 1213054
uugugagucaucaacagca

SEQ ID NO: 1213056 - RNA, 19 nt, Artificial Sequence
  Description of Artificial Sequence: Synthetic oligonucleotide
  Sense strand starting at position 2033 of SEQ ID NO: 917155
aagugauuguuaccuuaga

SEQ ID NO: 1213057 - RNA, 19 nt, Artificial Sequence
  Description of Artificial Sequence: Synthetic oligonucleotide
  Antisense strand to SEQ ID NO: 1213056
ucuaagguaacaaucacuu

SEQ ID NO: 1213058 - RNA, 19 nt, Artificial Sequence
  Description of Artificial Sequence: Synthetic oligonucleotide
  Sense strand starting at position 2034 of SEQ ID NO: 917155
agugauuguuaccuuagau

SEQ ID NO: 1213059 - RNA, 19 nt, Artificial Sequence
  Description of Artificial Sequence: Synthetic oligonucleotide
  Antisense strand to SEQ ID NO: 1213058
aucuaagguaacaaucacu

SEQ ID NO: 1213060 - RNA, 19 nt, Artificial Sequence
  Description of Artificial Sequence: Synthetic oligonucleotide
  Sense strand starting at position 2108 of SEQ ID NO: 917155
cuuugugugggaugaauca

SEQ ID NO: 1213061 - RNA, 19 nt, Artificial Sequence
  Description of Artificial Sequence: Synthetic oligonucleotide
  Antisense strand to SEQ ID NO: 1213060
ugauucaucccacacaaag

SEQ ID NO: 1213062 - RNA, 19 nt, Artificial Sequence
  Description of Artificial Sequence: Synthetic oligonucleotide
  Sense strand starting at position 2191 of SEQ ID NO: 917155
ggucuugagguuuauucua

SEQ ID NO: 1213063 - RNA, 19 nt, Artificial Sequence
  Description of Artificial Sequence: Synthetic oligonucleotide
  Antisense strand to SEQ ID NO: 1213062
uagaauaaaccucaagacc

SEQ ID NO: 1213064 - RNA, 19 nt, Artificial Sequence
  Description of Artificial Sequence: Synthetic oligonucleotide
  Sense strand starting at position 2193 of SEQ ID NO: 917155
ucuugagguuuauucuacu

SEQ ID NO: 1213065 - RNA, 19 nt, Artificial Sequence
  Description of Artificial Sequence: Synthetic oligonucleotide
  Antisense strand to SEQ ID NO: 1213064
aguagaauaaaccucaaga

SEQ ID NO: 1213066 - RNA, 19 nt, Artificial Sequence
  Description of Artificial Sequence: Synthetic oligonucleotide
  Sense strand starting at position 2199 of SEQ ID NO: 917155
gguuuauucuacuuggaga

SEQ ID NO: 1213067 - RNA, 19 nt, Artificial Sequence
  Description of Artificial Sequence: Synthetic oligonucleotide
  Antisense strand to SEQ ID NO: 1213066
ucuccaaguagaauaaacc

SEQ ID NO: 1213068 - RNA, 19 nt, Artificial Sequence
  Description of Artificial Sequence: Synthetic oligonucleotide
  Sense strand starting at position 2201 of SEQ ID NO: 917155
uuuauucuacuuggagauu

SEQ ID NO: 1213069 - RNA, 19 nt, Artificial Sequence
  Description of Artificial Sequence: Synthetic oligonucleotide
  Antisense strand to SEQ ID NO: 1213068
aaucuccaaguagaauaaa

SEQ ID NO: 1213070 - RNA, 19 nt, Artificial Sequence
  Description of Artificial Sequence: Synthetic oligonucleotide
  Sense strand starting at position 2328 of SEQ ID NO: 917155
ccuucuagggcucauauua

SEQ ID NO: 1213071 - RNA, 19 nt, Artificial Sequence
  Description of Artificial Sequence: Synthetic oligonucleotide
  Antisense strand to SEQ ID NO: 1213070
uaauaugagcccuagaagg

SEQ ID NO: 1213072 - RNA, 19 nt, Artificial Sequence
  Description of Artificial Sequence: Synthetic oligonucleotide
  Sense strand starting at position 2336 of SEQ ID NO: 917155
ggcucauauuaugugaaua

SEQ ID NO: 1213073 - RNA, 19 nt, Artificial Sequence
  Description of Artificial Sequence: Synthetic oligonucleotide
  Antisense strand to SEQ ID NO: 1213072
uauucacauaauaugagcc

SEQ ID NO: 1213074 - RNA, 19 nt, Artificial Sequence
  Description of Artificial Sequence: Synthetic oligonucleotide
  Sense strand starting at position 2423 of SEQ ID NO: 917155
uguugcuuagauuagauaa

SEQ ID NO: 1213075 - RNA, 19 nt, Artificial Sequence
  Description of Artificial Sequence: Synthetic oligonucleotide
  Antisense strand to SEQ ID NO: 1213074
uuaucuaaucuaagcaaca

SEQ ID NO: 1213076 - RNA, 19 nt, Artificial Sequence
  Description of Artificial Sequence: Synthetic oligonucleotide
  Sense strand starting at position 2799 of SEQ ID NO: 917155
auucuuugucuguguauuu

SEQ ID NO: 1213077 - RNA, 19 nt, Artificial Sequence
  Description of Artificial Sequence: Synthetic oligonucleotide
  Antisense strand to SEQ ID NO: 1213076
aaauacacagacaaagaau

SEQ ID NO: 1213078 - RNA, 19 nt, Artificial Sequence
  Description of Artificial Sequence: Synthetic oligonucleotide
  Sense strand starting at position 2957 of SEQ ID NO: 917155
aggauucucuguuuaugac

SEQ ID NO: 1213079 - RNA, 19 nt, Artificial Sequence
  Description of Artificial Sequence: Synthetic oligonucleotide
  Antisense strand to SEQ ID NO: 1213078
gucauaaacagagaauccu

SEQ ID NO: 1213080 - RNA, 19 nt, Artificial Sequence
  Description of Artificial Sequence: Synthetic oligonucleotide
  Sense strand starting at position 2958 of SEQ ID NO: 917155
ggauucucuguuuaugacu

SEQ ID NO: 1213081 - RNA, 19 nt, Artificial Sequence
  Description of Artificial Sequence: Synthetic oligonucleotide
  Antisense strand to SEQ ID NO: 1213080
agucauaaacagagaaucc

SEQ ID NO: 1213082 - RNA, 19 nt, Artificial Sequence
  Description of Artificial Sequence: Synthetic oligonucleotide
  Sense strand starting at position 2963 of SEQ ID NO: 917155
cucuguuuaugacugaaua

SEQ ID NO: 1213083 - RNA, 19 nt, Artificial Sequence
  Description of Artificial Sequence: Synthetic oligonucleotide
  Antisense strand to SEQ ID NO: 1213082
uauucagucauaaacagag

SEQ ID NO: 1213084 - RNA, 19 nt, Artificial Sequence
  Description of Artificial Sequence: Synthetic oligonucleotide
  Sense strand starting at position 3676 of SEQ ID NO: 917155
uuuguaauagcugacuaaa

SEQ ID NO: 1213085 - RNA, 19 nt, Artificial Sequence
  Description of Artificial Sequence: Synthetic oligonucleotide
  Antisense strand to SEQ ID NO: 1213084
uuuagucagcuauuacaaa

SEQ ID NO: 1213086 - RNA, 19 nt, Artificial Sequence
  Description of Artificial Sequence: Synthetic oligonucleotide
  Sense strand starting at position 3717 of SEQ ID NO: 917155
aucugcaauuccucagaga

SEQ ID NO: 1213087 - RNA, 19 nt, Artificial Sequence
  Description of Artificial Sequence: Synthetic oligonucleotide
  Antisense strand to SEQ ID NO: 1213086
ucucugaggaauugcagau

SEQ ID NO: 1213088 - RNA, 19 nt, Artificial Sequence
  Description of Artificial Sequence: Synthetic oligonucleotide
  Sense strand starting at position 3718 of SEQ ID NO: 917156
ucugcaauuccucagagac

SEQ ID NO: 1213089 - RNA, 19 nt, Artificial Sequence
  Description of Artificial Sequence: Synthetic oligonucleotide
  Antisense strand to SEQ ID NO: 1213088
gucucugaggaauugcaga

SEQ ID NO: 1213090 - RNA, 19 nt, Artificial Sequence
  Description of Artificial Sequence: Synthetic oligonucleotide
  Sense strand starting at position 5 of SEQ ID NO: 917156
agguaucuaugaucaguua

SEQ ID NO: 1213091 - RNA, 19 nt, Artificial Sequence
  Description of Artificial Sequence: Synthetic oligonucleotide
  Antisense strand to SEQ ID NO: 1213090
uaacugaucauagauaccu

SEQ ID NO: 1213092 - RNA, 19 nt, Artificial Sequence
  Description of Artificial Sequence: Synthetic oligonucleotide
  Sense strand starting at position 6 of SEQ ID NO: 917156
gguaucuaugaucaguuaa

SEQ ID NO: 1213093 - RNA, 19 nt, Artificial Sequence
  Description of Artificial Sequence: Synthetic oligonucleotide
  Antisense strand to SEQ ID NO: 1213092
uuaacugaucauagauacc

SEQ ID NO: 1213094 - RNA, 19 nt, Artificial Sequence
  Description of Artificial Sequence: Synthetic oligonucleotide
  Sense strand starting at position 73 of SEQ ID NO: 917156
uuagucaguacugggaaga

SEQ ID NO: 1213095 - RNA, 19 nt, Artificial Sequence
  Description of Artificial Sequence: Synthetic oligonucleotide
  Antisense strand to SEQ ID NO: 1213094
ucuucccaguacugacuaa

SEQ ID NO: 1213096 - RNA, 19 nt, Artificial Sequence
  Description of Artificial Sequence: Synthetic oligonucleotide
  Sense strand starting at position 74 of SEQ ID NO: 917156
uagucaguacugggaagau

SEQ ID NO: 1213097 - RNA, 19 nt, Artificial Sequence
  Description of Artificial Sequence: Synthetic oligonucleotide
  Antisense strand to SEQ ID NO: 1213096
aucuucccaguacugacua

SEQ ID NO: 1213098 - RNA, 19 nt, Artificial Sequence
  Description of Artificial Sequence: Synthetic oligonucleotide
  Sense strand starting at position 117 of SEQ ID NO: 917156
ggaguaaucuaaucuagcc

SEQ ID NO: 1213099 - RNA, 19 nt, Artificial Sequence
  Description of Artificial Sequence: Synthetic oligonucleotide
  Antisense strand to SEQ ID NO: 1213098
ggcuagauuagauuacucc

SEQ ID NO: 1213100 - RNA, 19 nt, Artificial Sequence
  Description of Artificial Sequence: Synthetic oligonucleotide
  Sense strand starting at position 175 of SEQ ID NO: 917156
agccaagauuauccagguu

SEQ ID NO: 1213101 - RNA, 19 nt, Artificial Sequence
  Description of Artificial Sequence: Synthetic oligonucleotide
  Antisense strand to SEQ ID NO: 1213100
aaccuggauaaucuuggcu

SEQ ID NO: 1213102 - RNA, 19 nt, Artificial Sequence
  Description of Artificial Sequence: Synthetic oligonucleotide
  Sense strand starting at position 226 of SEQ ID NO: 917156
cugcucuaaccuggaggaa

SEQ ID NO: 1213103 - RNA, 19 nt, Artificial Sequence
  Description of Artificial Sequence: Synthetic oligonucleotide
  Antisense strand to SEQ ID NO: 1213102
uuccuccagguuagagcag

SEQ ID NO: 1213104 - RNA, 19 nt, Artificial Sequence
  Description of Artificial Sequence: Synthetic oligonucleotide
  Sense strand starting at position 255 of SEQ ID NO: 917156
acaguuuauuuggaagcau

SEQ ID NO: 1213105 - RNA, 19 nt, Artificial Sequence
  Description of Artificial Sequence: Synthetic oligonucleotide
  Antisense strand to SEQ ID NO: 1213104
augcuuccaaauaaacugu

SEQ ID NO: 1213106 - RNA, 19 nt, Artificial Sequence
  Description of Artificial Sequence: Synthetic oligonucleotide
  Sense strand starting at position 339 of SEQ ID NO: 917156
cuauuuccuugauagugga

SEQ ID NO: 1213107 - RNA, 19 nt, Artificial Sequence
  Description of Artificial Sequence: Synthetic oligonucleotide
  Antisense strand to SEQ ID NO: 1213106
uccacuaucaaggaaauag

SEQ ID NO: 1213108 - RNA, 19 nt, Artificial Sequence
  Description of Artificial Sequence: Synthetic oligonucleotide
  Sense strand starting at position 912 of SEQ ID NO: 917156
ucaacuuuccuguagucca

SEQ ID NO: 1213109 - RNA, 19 nt, Artificial Sequence
  Description of Artificial Sequence: Synthetic oligonucleotide
  Antisense strand to SEQ ID NO: 1213108
uggacuacaggaaaguuga

SEQ ID NO: 1213110 - RNA, 19 nt, Artificial Sequence
  Description of Artificial Sequence: Synthetic oligonucleotide
  Sense strand starting at position 919 of SEQ ID NO: 917156
uccuguaguccagauucca

SEQ ID NO: 1213111 - RNA, 19 nt, Artificial Sequence
  Description of Artificial Sequence: Synthetic oligonucleotide
  Antisense strand to SEQ ID NO: 1213110
uggaaucuggacuacagga

SEQ ID NO: 1213112 - RNA, 19 nt, Artificial Sequence
  Description of Artificial Sequence: Synthetic oligonucleotide
  Sense strand starting at position 927 of SEQ ID NO: 917156
uccagauuccaggguugua

SEQ ID NO: 1213113 - RNA, 19 nt, Artificial Sequence
  Description of Artificial Sequence: Synthetic oligonucleotide
  Antisense strand to SEQ ID NO: 1213112
uacaacccuggaaucugga

SEQ ID NO: 1213114 - RNA, 19 nt, Artificial Sequence
  Description of Artificial Sequence: Synthetic oligonucleotide
  Sense strand starting at position 930 of SEQ ID NO: 917156
agauuccaggguuguaaua

SEQ ID NO: 1213115 - RNA, 19 nt, Artificial Sequence
  Description of Artificial Sequence: Synthetic oligonucleotide
  Antisense strand to SEQ ID NO: 1213114
uauuacaacccuggaaucu

SEQ ID NO: 1213116 - RNA, 19 nt, Artificial Sequence
  Description of Artificial Sequence: Synthetic oligonucleotide
  Sense strand starting at position 1004 of SEQ ID NO: 917156
gagagcuguucuccacaag

SEQ ID NO: 1213117 - RNA, 19 nt, Artificial Sequence
  Description of Artificial Sequence: Synthetic oligonucleotide
  Antisense strand to SEQ ID NO: 1213116
cuuguggagaacagcucuc

SEQ ID NO: 1213118 - RNA, 19 nt, Artificial Sequence
  Description of Artificial Sequence: Synthetic oligonucleotide
  Sense strand starting at position 1007 of SEQ ID NO: 917156
agcuguucuccacaagcau

SEQ ID NO: 1213119 - RNA, 19 nt, Artificial Sequence
  Description of Artificial Sequence: Synthetic oligonucleotide
  Antisense strand to SEQ ID NO: 1213118
augcuuguggagaacagcu

SEQ ID NO: 1213120 - RNA, 19 nt, Artificial Sequence
  Description of Artificial Sequence: Synthetic oligonucleotide
  Sense strand starting at position 1042 of SEQ ID NO: 917156
gagucauuaccuggccaca

SEQ ID NO: 1213121 - RNA, 19 nt, Artificial Sequence
  Description of Artificial Sequence: Synthetic oligonucleotide
  Antisense strand to SEQ ID NO: 1213120
uguggccagguaaugacuc

SEQ ID NO: 1213122 - RNA, 19 nt, Artificial Sequence
  Description of Artificial Sequence: Synthetic oligonucleotide
  Sense strand starting at position 1266 of SEQ ID NO: 917156
gcuguuuagucgauuccgu

SEQ ID NO: 1213123 - RNA, 19 nt, Artificial Sequence
  Description of Artificial Sequence: Synthetic oligonucleotide
  Antisense strand to SEQ ID NO: 1213122
acggaaucgacuaaacagc

SEQ ID NO: 1213124 - RNA, 19 nt, Artificial Sequence
  Description of Artificial Sequence: Synthetic oligonucleotide
  Sense strand starting at position 1409 of SEQ ID NO: 917156
cgaucaaaguugcucugaa

SEQ ID NO: 1213125 - RNA, 19 nt, Artificial Sequence
  Description of Artificial Sequence: Synthetic oligonucleotide
  Antisense strand to SEQ ID NO: 1213124
uucagagcaacuuugaucg

SEQ ID NO: 1213126 - RNA, 19 nt, Artificial Sequence
  Description of Artificial Sequence: Synthetic oligonucleotide
  Sense strand starting at position 1410 of SEQ ID NO: 917156
gaucaaaguugcucugaau

SEQ ID NO: 1213127 - RNA, 19 nt, Artificial Sequence
  Description of Artificial Sequence: Synthetic oligonucleotide
  Antisense strand to SEQ ID NO: 1213126
auucagagcaacuuugauc

SEQ ID NO: 1213128 - RNA, 19 nt, Artificial Sequence
  Description of Artificial Sequence: Synthetic oligonucleotide
  Sense strand starting at position 1513 of SEQ ID NO: 917156
ccuccaagucgggauacua

SEQ ID NO: 1213129 - RNA, 19 nt, Artificial Sequence
  Description of Artificial Sequence: Synthetic oligonucleotide
  Antisense strand to SEQ ID NO: 1213128
uaguaucccgacuuggagg

SEQ ID NO: 1213130 - RNA, 19 nt, Artificial Sequence
  Description of Artificial Sequence: Synthetic oligonucleotide
  Sense strand starting at position 2555 of SEQ ID NO: 917156
ggcaguguugcgucuccau

SEQ ID NO: 1213131 - RNA, 19 nt, Artificial Sequence
  Description of Artificial Sequence: Synthetic oligonucleotide
  Antisense strand to SEQ ID NO: 1213130
auggagacgcaacacugcc

SEQ ID NO: 1213132 - RNA, 19 nt, Artificial Sequence
  Description of Artificial Sequence: Synthetic oligonucleotide
  Sense strand starting at position 2923 of SEQ ID NO: 917156
cugcauaggugacugacaa

SEQ ID NO: 1213133 - RNA, 19 nt, Artificial Sequence
  Description of Artificial Sequence: Synthetic oligonucleotide
  Antisense strand to SEQ ID NO: 1213132
uugucagucaccuaugcag

SEQ ID NO: 1213134 - RNA, 19 nt, Artificial Sequence
  Description of Artificial Sequence: Synthetic oligonucleotide
  Sense strand starting at position 2936 of SEQ ID NO: 917156
ugacaagccaggugaaaua

SEQ ID NO: 1213135 - RNA, 19 nt, Artificial Sequence
  Description of Artificial Sequence: Synthetic oligonucleotide
  Antisense strand to SEQ ID NO: 1213134
uauuucaccuggcuuguca

SEQ ID NO: 1213136 - RNA, 19 nt, Artificial Sequence
  Description of Artificial Sequence: Synthetic oligonucleotide
  Sense strand starting at position 2945 of SEQ ID NO: 917156
aggugaaauaaucgaacuu

SEQ ID NO: 1213137 - RNA, 19 nt, Artificial Sequence
  Description of Artificial Sequence: Synthetic oligonucleotide
  Antisense strand to SEQ ID NO: 1213136
aaguucgauuauuucaccu

SEQ ID NO: 1213138 - RNA, 19 nt, Artificial Sequence
  Description of Artificial Sequence: Synthetic oligonucleotide
  Sense strand starting at position 3009 of SEQ ID NO: 917156
augcuauagucuguuacua

SEQ ID NO: 1213139 - RNA, 19 nt, Artificial Sequence
  Description of Artificial Sequence: Synthetic oligonucleotide
  Antisense strand to SEQ ID NO: 1213138
uaguaacagacuauagcau

SEQ ID NO: 1213140 - RNA, 19 nt, Artificial Sequence
  Description of Artificial Sequence: Synthetic oligonucleotide
  Sense strand starting at position 3164 of SEQ ID NO: 917156
gaguguggacauugcuuua

SEQ ID NO: 1213141 - RNA, 19 nt, Artificial Sequence
  Description of Artificial Sequence: Synthetic oligonucleotide
  Antisense strand to SEQ ID NO: 1213140
uaaagcaauguccacacuc

SEQ ID NO: 1213142 - RNA, 19 nt, Artificial Sequence
  Description of Artificial Sequence: Synthetic oligonucleotide
  Sense strand starting at position 3167 of SEQ ID NO: 917156
uguggacauugcuuuaaug

SEQ ID NO: 1213143 - RNA, 19 nt, Artificial Sequence
  Description of Artificial Sequence: Synthetic oligonucleotide
  Antisense strand to SEQ ID NO: 1213142
cauuaaagcaauguccaca

SEQ ID NO: 1213144 - RNA, 19 nt, Artificial Sequence
  Description of Artificial Sequence: Synthetic oligonucleotide
  Sense strand starting at position 3234 of SEQ ID NO: 917156
ugagguaaauauuaagaag

SEQ ID NO: 1213145 - RNA, 19 nt, Artificial Sequence
  Description of Artificial Sequence: Synthetic oligonucleotide
  Antisense strand to SEQ ID NO: 1213144
cuucuuaauauuuaccuca

SEQ ID NO: 1213146 - RNA, 19 nt, Artificial Sequence
  Description of Artificial Sequence: Synthetic oligonucleotide
  Sense strand starting at position 3242 of SEQ ID NO: 917156
auauuaagaaguugguaag

SEQ ID NO: 1213147 - RNA, 19 nt, Artificial Sequence
  Description of Artificial Sequence: Synthetic oligonucleotide
  Antisense strand to SEQ ID NO: 1213146
cuuaccaacuucuuaauau

SEQ ID NO: 1213148 - RNA, 19 nt, Artificial Sequence
  Description of Artificial Sequence: Synthetic oligonucleotide
  Sense strand starting at position 3253 of SEQ ID NO: 917156
uugguaagcaucuggagaa

SEQ ID NO: 1213149 - RNA, 19 nt, Artificial Sequence
  Description of Artificial Sequence: Synthetic oligonucleotide
  Antisense strand to SEQ ID NO: 1213148
uucuccagaugcuuaccaa

SEQ ID NO: 1213150 - RNA, 19 nt, Artificial Sequence
  Description of Artificial Sequence: Synthetic oligonucleotide
  Sense strand starting at position 3329 of SEQ ID NO: 917156
ucuauacguuugucacaga

SEQ ID NO: 1213151 - RNA, 19 nt, Artificial Sequence
  Description of Artificial Sequence: Synthetic oligonucleotide
  Antisense strand to SEQ ID NO: 1213150
ucugugacaaacguauaga

SEQ ID NO: 1213152 - RNA, 19 nt, Artificial Sequence
  Description of Artificial Sequence: Synthetic oligonucleotide
  Sense strand starting at position 3345 of SEQ ID NO: 917156
agacuucuauuccuugaga

SEQ ID NO: 1213153 - RNA, 19 nt, Artificial Sequence
  Description of Artificial Sequence: Synthetic oligonucleotide
  Antisense strand to SEQ ID NO: 1213152
ucucaaggaauagaagucu

SEQ ID NO: 1213154 - RNA, 19 nt, Artificial Sequence
  Description of Artificial Sequence: Synthetic oligonucleotide
  Sense strand starting at position 3346 of SEQ ID NO: 917156
gacuucuauuccuugagag

SEQ ID NO: 1213155 - RNA, 19 nt, Artificial Sequence
  Description of Artificial Sequence: Synthetic oligonucleotide
  Antisense strand to SEQ ID NO: 1213154
cucucaaggaauagaaguc

SEQ ID NO: 1213156 - RNA, 19 nt, Artificial Sequence
  Description of Artificial Sequence: Synthetic oligonucleotide
  Sense strand starting at position 3347 of SEQ ID NO: 917156
acuucuauuccuugagaga

SEQ ID NO: 1213157 - RNA, 19 nt, Artificial Sequence
  Description of Artificial Sequence: Synthetic oligonucleotide
  Antisense strand to SEQ ID NO: 1213156
ucucucaaggaauagaagu

SEQ ID NO: 1213158 - RNA, 19 nt, Artificial Sequence
  Description of Artificial Sequence: Synthetic oligonucleotide
  Sense strand starting at position 3384 of SEQ ID NO: 917156
ccagauuuccugugccuuu

SEQ ID NO: 1213159 - RNA, 19 nt, Artificial Sequence
  Description of Artificial Sequence: Synthetic oligonucleotide
  Antisense strand to SEQ ID NO: 1213158
aaaggcacaggaaaucugg

SEQ ID NO: 1213160 - RNA, 19 nt, Artificial Sequence
  Description of Artificial Sequence: Synthetic oligonucleotide
  Sense strand starting at position 3387 of SEQ ID NO: 917156
gauuuccugugccuuugaa

SEQ ID NO: 1213161 - RNA, 19 nt, Artificial Sequence
  Description of Artificial Sequence: Synthetic oligonucleotide
  Antisense strand to SEQ ID NO: 1213160
uucaaaggcacaggaaauc

SEQ ID NO: 1213162 - RNA, 19 nt, Artificial Sequence
  Description of Artificial Sequence: Synthetic oligonucleotide
  Sense strand starting at position 3436 of SEQ ID NO: 917156
ucuagauugccgcaacaga

SEQ ID NO: 1213163 - RNA, 19 nt, Artificial Sequence
  Description of Artificial Sequence: Synthetic oligonucleotide
  Antisense strand to SEQ ID NO: 1213162
ucuguugcggcaaucuaga

SEQ ID NO: 1213164 - RNA, 19 nt, Artificial Sequence
  Description of Artificial Sequence: Synthetic oligonucleotide
  Sense strand starting at position 3483 of SEQ ID NO: 917156
ucugcuucgaaaggugaau

SEQ ID NO: 1213165 - RNA, 19 nt, Artificial Sequence
  Description of Artificial Sequence: Synthetic oligonucleotide
  Antisense strand to SEQ ID NO: 1213164
auucaccuuucgaagcaga

SEQ ID NO: 1213166 - RNA, 19 nt, Artificial Sequence
  Description of Artificial Sequence: Synthetic oligonucleotide
  Sense strand starting at position 3485 of SEQ ID NO: 917156
ugcuucgaaaggugaauga

SEQ ID NO: 1213167 - RNA, 19 nt, Artificial Sequence
  Description of Artificial Sequence: Synthetic oligonucleotide
  Antisense strand to SEQ ID NO: 1213166
ucauucaccuuucgaagca

SEQ ID NO: 1213168 - RNA, 19 nt, Artificial Sequence
  Description of Artificial Sequence: Synthetic oligonucleotide
  Sense strand starting at position 3969 of SEQ ID NO: 917157
aaagguguccagugacuuu

SEQ ID NO: 1213169 - RNA, 19 nt, Artificial Sequence
  Description of Artificial Sequence: Synthetic oligonucleotide
  Antisense strand to SEQ ID NO: 1213168
aaagucacuggacaccuuu

SEQ ID NO: 1213170 - RNA, 19 nt, Artificial Sequence
  Description of Artificial Sequence: Synthetic oligonucleotide
  Sense strand starting at position 470 of SEQ ID NO: 917157
ucaacuuuccuguagucca

SEQ ID NO: 1213171 - RNA, 19 nt, Artificial Sequence
  Description of Artificial Sequence: Synthetic oligonucleotide
  Antisense strand to SEQ ID NO: 1213170
uggacuacaggaaaguuga

SEQ ID NO: 1213172 - RNA, 19 nt, Artificial Sequence
  Description of Artificial Sequence: Synthetic oligonucleotide
  Sense strand starting at position 477 of SEQ ID NO: 917157
uccuguaguccagauucca

SEQ ID NO: 1213173 - RNA, 19 nt, Artificial Sequence
  Description of Artificial Sequence: Synthetic oligonucleotide
  Antisense strand to SEQ ID NO: 1213172
uggaaucuggacuacagga

SEQ ID NO: 1213174 - RNA, 19 nt, Artificial Sequence
  Description of Artificial Sequence: Synthetic oligonucleotide
  Sense strand starting at position 485 of SEQ ID NO: 917157
uccagauuccaggguugua

SEQ ID NO: 1213175 - RNA, 19 nt, Artificial Sequence
  Description of Artificial Sequence: Synthetic oligonucleotide
  Antisense strand to SEQ ID NO: 1213174
uacaacccuggaaucugga

SEQ ID NO: 1213176 - RNA, 19 nt, Artificial Sequence
  Description of Artificial Sequence: Synthetic oligonucleotide
  Sense strand starting at position 488 of SEQ ID NO: 917157
agauuccaggguuguaaua

SEQ ID NO: 1213177 - RNA, 19 nt, Artificial Sequence
  Description of Artificial Sequence: Synthetic oligonucleotide
  Antisense strand to SEQ ID NO: 1213176
uauuacaacccuggaaucu

SEQ ID NO: 1213178 - RNA, 19 nt, Artificial Sequence
  Description of Artificial Sequence: Synthetic oligonucleotide
  Sense strand starting at position 562 of SEQ ID NO: 917157
gagagcuguucuccacaag

SEQ ID NO: 1213179 - RNA, 19 nt, Artificial Sequence
  Description of Artificial Sequence: Synthetic oligonucleotide
  Antisense strand to SEQ ID NO: 1213178
cuuguggagaacagcucuc

SEQ ID NO: 1213180 - RNA, 19 nt, Artificial Sequence
  Description of Artificial Sequence: Synthetic oligonucleotide
  Sense strand starting at position 565 of SEQ ID NO: 917157
agcuguucuccacaagcau

SEQ ID NO: 1213181 - RNA, 19 nt, Artificial Sequence
  Description of Artificial Sequence: Synthetic oligonucleotide
  Antisense strand to SEQ ID NO: 1213180
augcuuguggagaacagcu

SEQ ID NO: 1213182 - RNA, 19 nt, Artificial Sequence
  Description of Artificial Sequence: Synthetic oligonucleotide
  Sense strand starting at position 600 of SEQ ID NO: 917157
gagucauuaccuggccaca

SEQ ID NO: 1213183 - RNA, 19 nt, Artificial Sequence
  Description of Artificial Sequence: Synthetic oligonucleotide
  Antisense strand to SEQ ID NO: 1213182
uguggccagguaaugacuc

SEQ ID NO: 1213184 - RNA, 19 nt, Artificial Sequence
  Description of Artificial Sequence: Synthetic oligonucleotide
  Sense strand starting at position 824 of SEQ ID NO: 917157
gcuguuuagucgauuccgu

SEQ ID NO: 1213185 - RNA, 19 nt, Artificial Sequence
  Description of Artificial Sequence: Synthetic oligonucleotide
  Antisense strand to SEQ ID NO: 1213184
acggaaucgacuaaacagc

SEQ ID NO: 1213186 - RNA, 19 nt, Artificial Sequence
  Description of Artificial Sequence: Synthetic oligonucleotide
  Sense strand starting at position 967 of SEQ ID NO: 917157
cgaucaaaguugcucugaa

SEQ ID NO: 1213187 - RNA, 19 nt, Artificial Sequence
  Description of Artificial Sequence: Synthetic oligonucleotide
  Antisense strand to SEQ ID NO: 1213186
uucagagcaacuuugaucg

SEQ ID NO: 1213188 - RNA, 19 nt, Artificial Sequence
  Description of Artificial Sequence: Synthetic oligonucleotide
  Sense strand starting at position 968 of SEQ ID NO: 917157
gaucaaaguugcucugaau

SEQ ID NO: 1213189 - RNA, 19 nt, Artificial Sequence
  Description of Artificial Sequence: Synthetic oligonucleotide
  Antisense strand to SEQ ID NO: 1213188
auucagagcaacuuugauc

SEQ ID NO: 1213190 - RNA, 19 nt, Artificial Sequence
  Description of Artificial Sequence: Synthetic oligonucleotide
  Sense strand starting at position 1071 of SEQ ID NO: 917157
ccuccaagucgggauacua

SEQ ID NO: 1213191 - RNA, 19 nt, Artificial Sequence
  Description of Artificial Sequence: Synthetic oligonucleotide
  Antisense strand to SEQ ID NO: 1213190
uaguaucccgacuuggagg

SEQ ID NO: 1213192 - RNA, 19 nt, Artificial Sequence
  Description of Artificial Sequence: Synthetic oligonucleotide
  Sense strand starting at position 2113 of SEQ ID NO: 917157
ggcaguguugcgucuccau

SEQ ID NO: 1213193 - RNA, 19 nt, Artificial Sequence
  Description of Artificial Sequence: Synthetic oligonucleotide
  Antisense strand to SEQ ID NO: 1213192
auggagacgcaacacugcc

SEQ ID NO: 1213194 - RNA, 19 nt, Artificial Sequence
  Description of Artificial Sequence: Synthetic oligonucleotide
  Sense strand starting at position 2481 of SEQ ID NO: 917157
cugcauaggugacugacaa

SEQ ID NO: 1213195 - RNA, 19 nt, Artificial Sequence
  Description of Artificial Sequence: Synthetic oligonucleotide
  Antisense strand to SEQ ID NO: 1213194
uugucagucaccuaugcag

SEQ ID NO: 1213196 - RNA, 19 nt, Artificial Sequence
  Description of Artificial Sequence: Synthetic oligonucleotide
  Sense strand starting at position 2494 of SEQ ID NO: 917157
ugacaagccaggugaaaua

SEQ ID NO: 1213197 - RNA, 19 nt, Artificial Sequence
  Description of Artificial Sequence: Synthetic oligonucleotide
  Antisense strand to SEQ ID NO: 1213196
uauuucaccuggcuuguca

SEQ ID NO: 1213198 - RNA, 19 nt, Artificial Sequence
  Description of Artificial Sequence: Synthetic oligonucleotide
  Sense strand starting at position 2503 of SEQ ID NO: 917157
aggugaaauaaucgaacuu

SEQ ID NO: 1213199 - RNA, 19 nt, Artificial Sequence
  Description of Artificial Sequence: Synthetic oligonucleotide
  Antisense strand to SEQ ID NO: 1213198
aaguucgauuauuucaccu

SEQ ID NO: 1213200 - RNA, 19 nt, Artificial Sequence
  Description of Artificial Sequence: Synthetic oligonucleotide
  Sense strand starting at position 2567 of SEQ ID NO: 917157
augcuauagucuguuacua

SEQ ID NO: 1213201 - RNA, 19 nt, Artificial Sequence
  Description of Artificial Sequence: Synthetic oligonucleotide
  Antisense strand to SEQ ID NO: 1213200
uaguaacagacuauagcau

SEQ ID NO: 1213202 - RNA, 19 nt, Artificial Sequence
  Description of Artificial Sequence: Synthetic oligonucleotide
  Sense strand starting at position 2722 of SEQ ID NO: 917157
gaguguggacauugcuuua

SEQ ID NO: 1213203 - RNA, 19 nt, Artificial Sequence
  Description of Artificial Sequence: Synthetic oligonucleotide
  Antisense strand to SEQ ID NO: 1213202
uaaagcaauguccacacuc

SEQ ID NO: 1213204 - RNA, 19 nt, Artificial Sequence
  Description of Artificial Sequence: Synthetic oligonucleotide
  Sense strand starting at position 2725 of SEQ ID NO: 917157
uguggacauugcuuuaaug

SEQ ID NO: 1213205 - RNA, 19 nt, Artificial Sequence
  Description of Artificial Sequence: Synthetic oligonucleotide
  Antisense strand to SEQ ID NO: 1213204
cauuaaagcaauguccaca

SEQ ID NO: 1213206 - RNA, 19 nt, Artificial Sequence
  Description of Artificial Sequence: Synthetic oligonucleotide
  Sense strand starting at position 2792 of SEQ ID NO: 917157
ugagguaaauauuaagaag

SEQ ID NO: 1213207 - RNA, 19 nt, Artificial Sequence
  Description of Artificial Sequence: Synthetic oligonucleotide
  Antisense strand to SEQ ID NO: 1213206
cuucuuaauauuuaccuca

SEQ ID NO: 1213208 - RNA, 19 nt, Artificial Sequence
  Description of Artificial Sequence: Synthetic oligonucleotide
  Sense strand starting at position 2800 of SEQ ID NO: 917157
auauuaagaaguugguaag

SEQ ID NO: 1213209 - RNA, 19 nt, Artificial Sequence
  Description of Artificial Sequence: Synthetic oligonucleotide
  Antisense strand to SEQ ID NO: 1213208
cuuaccaacuucuuaauau

SEQ ID NO: 1213210 - RNA, 19 nt, Artificial Sequence
  Description of Artificial Sequence: Synthetic oligonucleotide
  Sense strand starting at position 2811 of SEQ ID NO: 917157
uugguaagcaucuggagaa

SEQ ID NO: 1213211 - RNA, 19 nt, Artificial Sequence
  Description of Artificial Sequence: Synthetic oligonucleotide
  Antisense strand to SEQ ID NO: 1213210
uucuccagaugcuuaccaa

SEQ ID NO: 1213212 - RNA, 19 nt, Artificial Sequence
  Description of Artificial Sequence: Synthetic oligonucleotide
  Sense strand starting at position 2887 of SEQ ID NO: 917157
ucuauacguuugucacaga

SEQ ID NO: 1213213 - RNA, 19 nt, Artificial Sequence
  Description of Artificial Sequence: Synthetic oligonucleotide
  Antisense strand to SEQ ID NO: 1213212
ucugugacaaacguauaga

SEQ ID NO: 1213214 - RNA, 19 nt, Artificial Sequence
  Description of Artificial Sequence: Synthetic oligonucleotide
  Sense strand starting at position 2903 of SEQ ID NO: 917157
agacuucuauuccuugaga

SEQ ID NO: 1213215 - RNA, 19 nt, Artificial Sequence
  Description of Artificial Sequence: Synthetic oligonucleotide
  Antisense strand to SEQ ID NO: 1213214
ucucaaggaauagaagucu

SEQ ID NO: 1213216 - RNA, 19 nt, Artificial Sequence
  Description of Artificial Sequence: Synthetic oligonucleotide
  Sense strand starting at position 2904 of SEQ ID NO: 917157
gacuucuauuccuugagag

SEQ ID NO: 1213217 - RNA, 19 nt, Artificial Sequence
  Description of Artificial Sequence: Synthetic oligonucleotide
  Antisense strand to SEQ ID NO: 1213216
cucucaaggaauagaaguc

SEQ ID NO: 1213218 - RNA, 19 nt, Artificial Sequence
  Description of Artificial Sequence: Synthetic oligonucleotide
  Sense strand starting at position 2905 of SEQ ID NO: 917157
acuucuauuccuugagaga

SEQ ID NO: 1213219 - RNA, 19 nt, Artificial Sequence
  Description of Artificial Sequence: Synthetic oligonucleotide
  Antisense strand to SEQ ID NO: 1213218
ucucucaaggaauagaagu

SEQ ID NO: 1213220 - RNA, 19 nt, Artificial Sequence
  Description of Artificial Sequence: Synthetic oligonucleotide
  Sense strand starting at position 2942 of SEQ ID NO: 917157
ccagauuuccugugccuuu

SEQ ID NO: 1213221 - RNA, 19 nt, Artificial Sequence
  Description of Artificial Sequence: Synthetic oligonucleotide
  Antisense strand to SEQ ID NO: 1213220
aaaggcacaggaaaucugg

SEQ ID NO: 1213222 - RNA, 19 nt, Artificial Sequence
  Description of Artificial Sequence: Synthetic oligonucleotide
  Sense strand starting at position 2945 of SEQ ID NO: 917157
gauuuccugugccuuugaa

SEQ ID NO: 1213223 - RNA, 19 nt, Artificial Sequence
  Description of Artificial Sequence: Synthetic oligonucleotide
  Antisense strand to SEQ ID NO: 1213222
uucaaaggcacaggaaauc

SEQ ID NO: 1213224 - RNA, 19 nt, Artificial Sequence
  Description of Artificial Sequence: Synthetic oligonucleotide
  Sense strand starting at position 2994 of SEQ ID NO: 917157
ucuagauugccgcaacaga

SEQ ID NO: 1213225 - RNA, 19 nt, Artificial Sequence
  Description of Artificial Sequence: Synthetic oligonucleotide
  Antisense strand to SEQ ID NO: 1213224
ucuguugcggcaaucuaga

SEQ ID NO: 1213226 - RNA, 19 nt, Artificial Sequence
  Description of Artificial Sequence: Synthetic oligonucleotide
  Sense strand starting at position 3041 of SEQ ID NO: 917157
ucugcuucgaaaggugaau

SEQ ID NO: 1213227 - RNA, 19 nt, Artificial Sequence
  Description of Artificial Sequence: Synthetic oligonucleotide
  Antisense strand to SEQ ID NO: 1213226
auucaccuuucgaagcaga

SEQ ID NO: 1213228 - RNA, 19 nt, Artificial Sequence
  Description of Artificial Sequence: Synthetic oligonucleotide
  Sense strand starting at position 3043 of SEQ ID NO: 917157
ugcuucgaaaggugaauga

SEQ ID NO: 1213229 - RNA, 19 nt, Artificial Sequence
  Description of Artificial Sequence: Synthetic oligonucleotide
  Antisense strand to SEQ ID NO: 1213228
ucauucaccuuucgaagca

SEQ ID NO: 1213230 - RNA, 19 nt, Artificial Sequence
  Description of Artificial Sequence: Synthetic oligonucleotide
  Sense strand starting at position 3527 of SEQ ID NO: 917157
aaagguguccagugacuuu

SEQ ID NO: 1213231 - RNA, 19 nt, Artificial Sequence
  Description of Artificial Sequence: Synthetic oligonucleotide
  Antisense strand to SEQ ID NO: 1213230
aaagucacuggacaccuuu

SEQ ID NO: 1213232 - RNA, 19 nt, Artificial Sequence
  Description of Artificial Sequence: Synthetic oligonucleotide
  Sense strand starting at position 3726 of SEQ ID NO: 917157
aagggaagugguuaguuua

SEQ ID NO: 1213233 - RNA, 19 nt, Artificial Sequence
  Description of Artificial Sequence: Synthetic oligonucleotide
  Antisense strand to SEQ ID NO: 1213232
uaaacuaaccacuucccuu

SEQ ID NO: 1213234 - RNA, 19 nt, Artificial Sequence
  Description of Artificial Sequence: Synthetic oligonucleotide
  Sense strand starting at position 3729 of SEQ ID NO: 917157
ggaagugguuaguuuauga

SEQ ID NO: 1213235 - RNA, 19 nt, Artificial Sequence
  Description of Artificial Sequence: Synthetic oligonucleotide
  Antisense strand to SEQ ID NO: 1213234
ucauaaacuaaccacuucc

SEQ ID NO: 1213236 - RNA, 19 nt, Artificial Sequence
  Description of Artificial Sequence: Synthetic oligonucleotide
  Sense strand starting at position 3768 of SEQ ID NO: 917157
agaauucuacauugucguu

SEQ ID NO: 1213237 - RNA, 19 nt, Artificial Sequence
  Description of Artificial Sequence: Synthetic oligonucleotide
  Antisense strand to SEQ ID NO: 1213236
aacgacaauguagaauucu

SEQ ID NO: 1213238 - RNA, 19 nt, Artificial Sequence
  Description of Artificial Sequence: Synthetic oligonucleotide
  Sense strand starting at position 3773 of SEQ ID NO: 917157
ucuacauugucguuacaag

SEQ ID NO: 1213239 - RNA, 19 nt, Artificial Sequence
  Description of Artificial Sequence: Synthetic oligonucleotide
  Antisense strand to SEQ ID NO: 1213238
cuuguaacgacaauguaga

SEQ ID NO: 1213240 - RNA, 19 nt, Artificial Sequence
  Description of Artificial Sequence: Synthetic oligonucleotide
  Sense strand starting at position 3816 of SEQ ID NO: 917157
gagugagucccaugaacug

SEQ ID NO: 1213241 - RNA, 19 nt, Artificial Sequence
  Description of Artificial Sequence: Synthetic oligonucleotide
  Antisense strand to SEQ ID NO: 1213240
caguucaugggacucacuc

SEQ ID NO: 1213242 - RNA, 19 nt, Artificial Sequence
  Description of Artificial Sequence: Synthetic oligonucleotide
  Sense strand starting at position 3831 of SEQ ID NO: 917157
acugauaucuaugugugca

SEQ ID NO: 1213243 - RNA, 19 nt, Artificial Sequence
  Description of Artificial Sequence: Synthetic oligonucleotide
  Antisense strand to SEQ ID NO: 1213242
ugcacacauagauaucagu

SEQ ID NO: 1213244 - RNA, 19 nt, Artificial Sequence
  Description of Artificial Sequence: Synthetic oligonucleotide
  Sense strand starting at position 3836 of SEQ ID NO: 917157
uaucuaugugugcauguaa

SEQ ID NO: 1213245 - RNA, 19 nt, Artificial Sequence
  Description of Artificial Sequence: Synthetic oligonucleotide
  Antisense strand to SEQ ID NO: 1213244
uuacaugcacacauagaua

SEQ ID NO: 1213246 - RNA, 19 nt, Artificial Sequence
  Description of Artificial Sequence: Synthetic oligonucleotide
  Sense strand starting at position 3866 of SEQ ID NO: 917157
uguauaacuugugcaauac

SEQ ID NO: 1213247 - RNA, 19 nt, Artificial Sequence
  Description of Artificial Sequence: Synthetic oligonucleotide
  Antisense strand to SEQ ID NO: 1213246
guauugcacaaguuauaca

SEQ ID NO: 1213248 - RNA, 19 nt, Artificial Sequence
  Description of Artificial Sequence: Synthetic oligonucleotide
  Sense strand starting at position 3867 of SEQ ID NO: 917157
guauaacuugugcaauacu

SEQ ID NO: 1213249 - RNA, 19 nt, Artificial Sequence
  Description of Artificial Sequence: Synthetic oligonucleotide
  Antisense strand to SEQ ID NO: 1213248
aguauugcacaaguuauac

SEQ ID NO: 1213250 - RNA, 19 nt, Artificial Sequence
  Description of Artificial Sequence: Synthetic oligonucleotide
  Sense strand starting at position 3867 of SEQ ID NO: 917156
guauaacuugugcaauacu

SEQ ID NO: 1213251 - RNA, 19 nt, Artificial Sequence
  Description of Artificial Sequence: Synthetic oligonucleotide
  Antisense strand to SEQ ID NO: 1213250
aguauugcacaaguuauac

SEQ ID NO: 1213252 - RNA, 19 nt, Artificial Sequence
  Description of Artificial Sequence: Synthetic oligonucleotide
  Sense strand starting at position 3969 of SEQ ID NO: 917158
aaagguguccagugacuuu

SEQ ID NO: 1213253 - RNA, 19 nt, Artificial Sequence
  Description of Artificial Sequence: Synthetic oligonucleotide
  Antisense strand to SEQ ID NO: 1213252
aaagucacuggacaccuuu

SEQ ID NO: 1213254 - RNA, 19 nt, Artificial Sequence
  Description of Artificial Sequence: Synthetic oligonucleotide
  Sense strand starting at position 106 of SEQ ID NO: 917158
ggauguuuauacuuccaau

SEQ ID NO: 1213255 - RNA, 19 nt, Artificial Sequence
  Description of Artificial Sequence: Synthetic oligonucleotide
  Antisense strand to SEQ ID NO: 1213254
auuggaaguauaaacaucc

SEQ ID NO: 1213256 - RNA, 19 nt, Artificial Sequence
  Description of Artificial Sequence: Synthetic oligonucleotide
  Sense strand starting at position 611 of SEQ ID NO: 917158
auauuucuguggcagagga

SEQ ID NO: 1213257 - RNA, 19 nt, Artificial Sequence
  Description of Artificial Sequence: Synthetic oligonucleotide
  Antisense strand to SEQ ID NO: 1213256
uccucugccacagaaauau

SEQ ID NO: 1213258 - RNA, 19 nt, Artificial Sequence
  Description of Artificial Sequence: Synthetic oligonucleotide
  Sense strand starting at position 619 of SEQ ID NO: 917158
guggcagaggaguaaacua

SEQ ID NO: 1213259 - RNA, 19 nt, Artificial Sequence
  Description of Artificial Sequence: Synthetic oligonucleotide
  Antisense strand to SEQ ID NO: 1213258
uaguuuacuccucugccac

SEQ ID NO: 1213260 - RNA, 19 nt, Artificial Sequence
  Description of Artificial Sequence: Synthetic oligonucleotide
  Sense strand starting at position 696 of SEQ ID NO: 917158
aucuuauuagccgaacuga

SEQ ID NO: 1213261 - RNA, 19 nt, Artificial Sequence
  Description of Artificial Sequence: Synthetic oligonucleotide
  Antisense strand to SEQ ID NO: 1213260
ucaguucggcuaauaagau

SEQ ID NO: 1213262 - RNA, 19 nt, Artificial Sequence
  Description of Artificial Sequence: Synthetic oligonucleotide
  Sense strand starting at position 725 of SEQ ID NO: 917158
ccauuaguacccgauaaac

SEQ ID NO: 1213263 - RNA, 19 nt, Artificial Sequence
  Description of Artificial Sequence: Synthetic oligonucleotide
  Antisense strand to SEQ ID NO: 1213262
guuuaucggguacuaaugg

SEQ ID NO: 1213264 - RNA, 19 nt, Artificial Sequence
  Description of Artificial Sequence: Synthetic oligonucleotide
  Sense strand starting at position 781 of SEQ ID NO: 917158
acuuauuacggcugggaau

SEQ ID NO: 1213265 - RNA, 19 nt, Artificial Sequence
  Description of Artificial Sequence: Synthetic oligonucleotide
  Antisense strand to SEQ ID NO: 1213264
auucccagccguaauaagu

SEQ ID NO: 1213266 - RNA, 19 nt, Artificial Sequence
  Description of Artificial Sequence: Synthetic oligonucleotide
  Sense strand starting at position 782 of SEQ ID NO: 917158
cuuauuacggcugggaauu

SEQ ID NO: 1213267 - RNA, 19 nt, Artificial Sequence
  Description of Artificial Sequence: Synthetic oligonucleotide
  Antisense strand to SEQ ID NO: 1213266
aauucccagccguaauaag

SEQ ID NO: 1213268 - RNA, 19 nt, Artificial Sequence
  Description of Artificial Sequence: Synthetic oligonucleotide
  Sense strand starting at position 783 of SEQ ID NO: 917158
uuauuacggcugggaauua

SEQ ID NO: 1213269 - RNA, 19 nt, Artificial Sequence
  Description of Artificial Sequence: Synthetic oligonucleotide
  Antisense strand to SEQ ID NO: 1213268
uaauucccagccguaauaa

SEQ ID NO: 1213270 - RNA, 19 nt, Artificial Sequence
  Description of Artificial Sequence: Synthetic oligonucleotide
  Sense strand starting at position 795 of SEQ ID NO: 917158
ggaauuauaaagugucaug

SEQ ID NO: 1213271 - RNA, 19 nt, Artificial Sequence
  Description of Artificial Sequence: Synthetic oligonucleotide
  Antisense strand to SEQ ID NO: 1213270
caugacacuuuauaauucc

SEQ ID NO: 1213272 - RNA, 19 nt, Artificial Sequence
  Description of Artificial Sequence: Synthetic oligonucleotide
  Sense strand starting at position 806 of SEQ ID NO: 917158
gugucauguuaaucaauaa

SEQ ID NO: 1213273 - RNA, 19 nt, Artificial Sequence
  Description of Artificial Sequence: Synthetic oligonucleotide
  Antisense strand to SEQ ID NO: 1213272
uuauugauuaacaugacac

SEQ ID NO: 1213274 - RNA, 19 nt, Artificial Sequence
  Description of Artificial Sequence: Synthetic oligonucleotide
  Sense strand starting at position 1029 of SEQ ID NO: 917158
cuugguaucugaccuacaa

SEQ ID NO: 1213275 - RNA, 19 nt, Artificial Sequence
  Description of Artificial Sequence: Synthetic oligonucleotide
  Antisense strand to SEQ ID NO: 1213274
uuguaggucagauaccaag

SEQ ID NO: 1213276 - RNA, 19 nt, Artificial Sequence
  Description of Artificial Sequence: Synthetic oligonucleotide
  Sense strand starting at position 1173 of SEQ ID NO: 917158
aagagagucagagguaucu

SEQ ID NO: 1213277 - RNA, 19 nt, Artificial Sequence
  Description of Artificial Sequence: Synthetic oligonucleotide
  Antisense strand to SEQ ID NO: 1213276
agauaccucugacucucuu

SEQ ID NO: 1213278 - RNA, 19 nt, Artificial Sequence
  Description of Artificial Sequence: Synthetic oligonucleotide
  Sense strand starting at position 1182 of SEQ ID NO: 917158
agagguaucuuagcaguag

SEQ ID NO: 1213279 - RNA, 19 nt, Artificial Sequence
  Description of Artificial Sequence: Synthetic oligonucleotide
  Antisense strand to SEQ ID NO: 1213278
cuacugcuaagauaccucu

SEQ ID NO: 1213280 - RNA, 19 nt, Artificial Sequence
  Description of Artificial Sequence: Synthetic oligonucleotide
  Sense strand starting at position 1449 of SEQ ID NO: 917158
cgguaaagcagucgaaaua

SEQ ID NO: 1213281 - RNA, 19 nt, Artificial Sequence
  Description of Artificial Sequence: Synthetic oligonucleotide
  Antisense strand to SEQ ID NO: 1213280
uauuucgacugcuuuaccg

SEQ ID NO: 1213282 - RNA, 19 nt, Artificial Sequence
  Description of Artificial Sequence: Synthetic oligonucleotide
  Sense strand starting at position 1475 of SEQ ID NO: 917158
gcgucacgugcgguuaauu

SEQ ID NO: 1213283 - RNA, 19 nt, Artificial Sequence
  Description of Artificial Sequence: Synthetic oligonucleotide
  Antisense strand to SEQ ID NO: 1213282
aauuaaccgcacgugacgc

SEQ ID NO: 1213284 - RNA, 19 nt, Artificial Sequence
  Description of Artificial Sequence: Synthetic oligonucleotide
  Sense strand starting at position 1484 of SEQ ID NO: 917158
gcgguuaauuuggaaauca

SEQ ID NO: 1213285 - RNA, 19 nt, Artificial Sequence
  Description of Artificial Sequence: Synthetic oligonucleotide
  Antisense strand to SEQ ID NO: 1213284
ugauuuccaaauuaaccgc

SEQ ID NO: 1213286 - RNA, 19 nt, Artificial Sequence
  Description of Artificial Sequence: Synthetic oligonucleotide
  Sense strand starting at position 1563 of SEQ ID NO: 917158
uccugugagaaguagcuaa

SEQ ID NO: 1213287 - RNA, 19 nt, Artificial Sequence
  Description of Artificial Sequence: Synthetic oligonucleotide
  Antisense strand to SEQ ID NO: 1213286
uuagcuacuucucacagga

SEQ ID NO: 1213288 - RNA, 19 nt, Artificial Sequence
  Description of Artificial Sequence: Synthetic oligonucleotide
  Sense strand starting at position 2113 of SEQ ID NO: 917158
cuguaaaucgcuugagacc

SEQ ID NO: 1213289 - RNA, 19 nt, Artificial Sequence
  Description of Artificial Sequence: Synthetic oligonucleotide
  Antisense strand to SEQ ID NO: 1213288
ggucucaagcgauuuacag

SEQ ID NO: 1213290 - RNA, 19 nt, Artificial Sequence
  Description of Artificial Sequence: Synthetic oligonucleotide
  Sense strand starting at position 2114 of SEQ ID NO: 917158
uguaaaucgcuugagaccu

SEQ ID NO: 1213291 - RNA, 19 nt, Artificial Sequence
  Description of Artificial Sequence: Synthetic oligonucleotide
  Antisense strand to SEQ ID NO: 1213290
aggucucaagcgauuuaca

SEQ ID NO: 1213292 - RNA, 19 nt, Artificial Sequence
  Description of Artificial Sequence: Synthetic oligonucleotide
  Sense strand starting at position 2120 of SEQ ID NO: 917158
ucgcuugagaccuguauuu

SEQ ID NO: 1213293 - RNA, 19 nt, Artificial Sequence
  Description of Artificial Sequence: Synthetic oligonucleotide
  Antisense strand to SEQ ID NO: 1213292
aaauacaggucucaagcga

SEQ ID NO: 1213294 - RNA, 19 nt, Artificial Sequence
  Description of Artificial Sequence: Synthetic oligonucleotide
  Sense strand starting at position 2215 of SEQ ID NO: 917158
acugcaucgaguugagaau

SEQ ID NO: 1213295 - RNA, 19 nt, Artificial Sequence
  Description of Artificial Sequence: Synthetic oligonucleotide
  Antisense strand to SEQ ID NO: 1213294
auucucaacucgaugcagu

SEQ ID NO: 1213296 - RNA, 19 nt, Artificial Sequence
  Description of Artificial Sequence: Synthetic oligonucleotide
  Sense strand starting at position 2216 of SEQ ID NO: 917158
cugcaucgaguugagaauu

SEQ ID NO: 1213297 - RNA, 19 nt, Artificial Sequence
  Description of Artificial Sequence: Synthetic oligonucleotide
  Antisense strand to SEQ ID NO: 1213296
aauucucaacucgaugcag

SEQ ID NO: 1213298 - RNA, 19 nt, Artificial Sequence
  Description of Artificial Sequence: Synthetic oligonucleotide
  Sense strand starting at position 2330 of SEQ ID NO: 917158
gauguucugucaucagaga

SEQ ID NO: 1213299 - RNA, 19 nt, Artificial Sequence
  Description of Artificial Sequence: Synthetic oligonucleotide
  Antisense strand to SEQ ID NO: 1213298
ucucugaugacagaacauc

SEQ ID NO: 1213300 - RNA, 19 nt, Artificial Sequence
  Description of Artificial Sequence: Synthetic oligonucleotide
  Sense strand starting at position 2575 of SEQ ID NO: 917158
agcacuguccaguaggauu

SEQ ID NO: 1213301 - RNA, 19 nt, Artificial Sequence
  Description of Artificial Sequence: Synthetic oligonucleotide
  Antisense strand to SEQ ID NO: 1213300
aauccuacuggacagugcu

SEQ ID NO: 1213302 - RNA, 19 nt, Artificial Sequence
  Description of Artificial Sequence: Synthetic oligonucleotide
  Sense strand starting at position 2661 of SEQ ID NO: 917158
cugaaauguggccaguaca

SEQ ID NO: 1213303 - RNA, 19 nt, Artificial Sequence
  Description of Artificial Sequence: Synthetic oligonucleotide
  Antisense strand to SEQ ID NO: 1213302
uguacuggccacauuucag

SEQ ID NO: 1213304 - RNA, 19 nt, Artificial Sequence
  Description of Artificial Sequence: Synthetic oligonucleotide
  Sense strand starting at position 2800 of SEQ ID NO: 917158
uccuauuaggcauagguua

SEQ ID NO: 1213305 - RNA, 19 nt, Artificial Sequence
  Description of Artificial Sequence: Synthetic oligonucleotide
  Antisense strand to SEQ ID NO: 1213304
uaaccuaugccuaauagga

SEQ ID NO: 1213306 - RNA, 19 nt, Artificial Sequence
  Description of Artificial Sequence: Synthetic oligonucleotide
  Sense strand starting at position 2877 of SEQ ID NO: 917158
gccacauucuggcuaauuu

SEQ ID NO: 1213307 - RNA, 19 nt, Artificial Sequence
  Description of Artificial Sequence: Synthetic oligonucleotide
  Antisense strand to SEQ ID NO: 1213306
aaauuagccagaauguggc

SEQ ID NO: 1213308 - RNA, 19 nt, Artificial Sequence
  Description of Artificial Sequence: Synthetic oligonucleotide
  Sense strand starting at position 2922 of SEQ ID NO: 917158
uuuauuucuuuggcuugua

SEQ ID NO: 1213309 - RNA, 19 nt, Artificial Sequence
  Description of Artificial Sequence: Synthetic oligonucleotide
  Antisense strand to SEQ ID NO: 1213308
uacaagccaaagaaauaaa

SEQ ID NO: 1213310 - RNA, 19 nt, Artificial Sequence
  Description of Artificial Sequence: Synthetic oligonucleotide
  Sense strand starting at position 2949 of SEQ ID NO: 917158
ucuaguucgccuguucuga

SEQ ID NO: 1213311 - RNA, 19 nt, Artificial Sequence
  Description of Artificial Sequence: Synthetic oligonucleotide
  Antisense strand to SEQ ID NO: 1213310
ucagaacaggcgaacuaga

SEQ ID NO: 1213312 - RNA, 19 nt, Artificial Sequence
  Description of Artificial Sequence: Synthetic oligonucleotide
  Sense strand starting at position 2968 of SEQ ID NO: 917158
ggguaaagcucuucaggug

SEQ ID NO: 1213313 - RNA, 19 nt, Artificial Sequence
  Description of Artificial Sequence: Synthetic oligonucleotide
  Antisense strand to SEQ ID NO: 1213312
caccugaagagcuuuaccc

SEQ ID NO: 1213314 - RNA, 19 nt, Artificial Sequence
  Description of Artificial Sequence: Synthetic oligonucleotide
  Sense strand starting at position 2969 of SEQ ID NO: 917158
gguaaagcucuucagguga

SEQ ID NO: 1213315 - RNA, 19 nt, Artificial Sequence
  Description of Artificial Sequence: Synthetic oligonucleotide
  Antisense strand to SEQ ID NO: 1213314
ucaccugaagagcuuuacc

SEQ ID NO: 1213316 - RNA, 19 nt, Artificial Sequence
  Description of Artificial Sequence: Synthetic oligonucleotide
  Sense strand starting at position 3015 of SEQ ID NO: 917158
ugcaccuuuccugaagugu

SEQ ID NO: 1213317 - RNA, 19 nt, Artificial Sequence
  Description of Artificial Sequence: Synthetic oligonucleotide
  Antisense strand to SEQ ID NO: 1213316
acacuucaggaaaggugca

SEQ ID NO: 1213318 - RNA, 19 nt, Artificial Sequence
  Description of Artificial Sequence: Synthetic oligonucleotide
  Sense strand starting at position 3029 of SEQ ID NO: 917158
aguguagacuuuguugaca

SEQ ID NO: 1213319 - RNA, 19 nt, Artificial Sequence
  Description of Artificial Sequence: Synthetic oligonucleotide
  Antisense strand to SEQ ID NO: 1213318
ugucaacaaagucuacacu

SEQ ID NO: 1213320 - RNA, 19 nt, Artificial Sequence
  Description of Artificial Sequence: Synthetic oligonucleotide
  Sense strand starting at position 3058 of SEQ ID NO: 917158
ggcaauuaacacuaagguu

SEQ ID NO: 1213321 - RNA, 19 nt, Artificial Sequence
  Description of Artificial Sequence: Synthetic oligonucleotide
  Antisense strand to SEQ ID NO: 1213320
aaccuuaguguuaauugcc

SEQ ID NO: 1213322 - RNA, 19 nt, Artificial Sequence
  Description of Artificial Sequence: Synthetic oligonucleotide
  Sense strand starting at position 3275 of SEQ ID NO: 917158
gucauuggccauuagggaa

SEQ ID NO: 1213323 - RNA, 19 nt, Artificial Sequence
  Description of Artificial Sequence: Synthetic oligonucleotide
  Antisense strand to SEQ ID NO: 1213322
uucccuaauggccaaugac

SEQ ID NO: 1213324 - RNA, 19 nt, Artificial Sequence
  Description of Artificial Sequence: Synthetic oligonucleotide
  Sense strand starting at position 3568 of SEQ ID NO: 917158
gaaugucaugguggcuuua

SEQ ID NO: 1213325 - RNA, 19 nt, Artificial Sequence
  Description of Artificial Sequence: Synthetic oligonucleotide
  Antisense strand to SEQ ID NO: 1213324
uaaagccaccaugacauuc

SEQ ID NO: 1213326 - RNA, 19 nt, Artificial Sequence
  Description of Artificial Sequence: Synthetic oligonucleotide
  Sense strand starting at position 3925 of SEQ ID NO: 917158
gccaaacaguccuuaguga

SEQ ID NO: 1213327 - RNA, 19 nt, Artificial Sequence
  Description of Artificial Sequence: Synthetic oligonucleotide
  Antisense strand to SEQ ID NO: 1213326
ucacuaaggacuguuuggc

SEQ ID NO: 1213328 - RNA, 19 nt, Artificial Sequence
  Description of Artificial Sequence: Synthetic oligonucleotide
  Sense strand starting at position 3926 of SEQ ID NO: 917158
ccaaacaguccuuagugaa

SEQ ID NO: 1213329 - RNA, 19 nt, Artificial Sequence
  Description of Artificial Sequence: Synthetic oligonucleotide
  Antisense strand to SEQ ID NO: 1213328
uucacuaaggacuguuugg

SEQ ID NO: 1213330 - RNA, 19 nt, Artificial Sequence
  Description of Artificial Sequence: Synthetic oligonucleotide
  Sense strand starting at position 3933 of SEQ ID NO: 917158
guccuuagugaaugaauag

SEQ ID NO: 1213331 - RNA, 19 nt, Artificial Sequence
  Description of Artificial Sequence: Synthetic oligonucleotide
  Antisense strand to SEQ ID NO: 1213330
cuauucauucacuaaggac

SEQ ID NO: 1213332 - RNA, 19 nt, Artificial Sequence
  Description of Artificial Sequence: Synthetic oligonucleotide
  Sense strand starting at position 3962 of SEQ ID NO: 917158
ggaguauauccaugccaug

SEQ ID NO: 1213333 - RNA, 19 nt, Artificial Sequence
  Description of Artificial Sequence: Synthetic oligonucleotide
  Antisense strand to SEQ ID NO: 1213332
cauggcauggauauacucc

SEQ ID NO: 1213334 - RNA, 19 nt, Artificial Sequence
  Description of Artificial Sequence: Synthetic oligonucleotide
  Sense strand starting at position 3962 of SEQ ID NO: 917159
ggaguauauccaugccaug

SEQ ID NO: 1213335 - RNA, 19 nt, Artificial Sequence
  Description of Artificial Sequence: Synthetic oligonucleotide
  Antisense strand to SEQ ID NO: 1213334
cauggcauggauauacucc

SEQ ID NO: 1213336 - RNA, 19 nt, Artificial Sequence
  Description of Artificial Sequence: Synthetic oligonucleotide
  Sense strand starting at position 82 of SEQ ID NO: 917159
ggguucuucuggagggaaa

SEQ ID NO: 1213337 - RNA, 19 nt, Artificial Sequence
  Description of Artificial Sequence: Synthetic oligonucleotide
  Antisense strand to SEQ ID NO: 1213336
uuucccuccagaagaaccc

SEQ ID NO: 1213338 - RNA, 19 nt, Artificial Sequence
  Description of Artificial Sequence: Synthetic oligonucleotide
  Sense strand starting at position 105 of SEQ ID NO: 917159
cacauaaguggucagaggu

SEQ ID NO: 1213339 - RNA, 19 nt, Artificial Sequence
  Description of Artificial Sequence: Synthetic oligonucleotide
  Antisense strand to SEQ ID NO: 1213338
accucugaccacuuaugug

SEQ ID NO: 1213340 - RNA, 19 nt, Artificial Sequence
  Description of Artificial Sequence: Synthetic oligonucleotide
  Sense strand starting at position 179 of SEQ ID NO: 917159
ugucacuuaccacgagaga

SEQ ID NO: 1213341 - RNA, 19 nt, Artificial Sequence
  Description of Artificial Sequence: Synthetic oligonucleotide
  Antisense strand to SEQ ID NO: 1213340
ucucucgugguaagugaca

SEQ ID NO: 1213342 - RNA, 19 nt, Artificial Sequence
  Description of Artificial Sequence: Synthetic oligonucleotide
  Sense strand starting at position 397 of SEQ ID NO: 917159
uuacaucucacguagggua

SEQ ID NO: 1213343 - RNA, 19 nt, Artificial Sequence
  Description of Artificial Sequence: Synthetic oligonucleotide
  Antisense strand to SEQ ID NO: 1213342
uacccuacgugagauguaa

SEQ ID NO: 1213344 - RNA, 19 nt, Artificial Sequence
  Description of Artificial Sequence: Synthetic oligonucleotide
  Sense strand starting at position 399 of SEQ ID NO: 917159
acaucucacguaggguaaa

SEQ ID NO: 1213345 - RNA, 19 nt, Artificial Sequence
  Description of Artificial Sequence: Synthetic oligonucleotide
  Antisense strand to SEQ ID NO: 1213344
uuuacccuacgugagaugu

SEQ ID NO: 1213346 - RNA, 19 nt, Artificial Sequence
  Description of Artificial Sequence: Synthetic oligonucleotide
  Sense strand starting at position 467 of SEQ ID NO: 917159
gcaacuuaugaagguaauu

SEQ ID NO: 1213347 - RNA, 19 nt, Artificial Sequence
  Description of Artificial Sequence: Synthetic oligonucleotide
  Antisense strand to SEQ ID NO: 1213346
aauuaccuucauaaguugc

SEQ ID NO: 1213348 - RNA, 19 nt, Artificial Sequence
  Description of Artificial Sequence: Synthetic oligonucleotide
  Sense strand starting at position 515 of SEQ ID NO: 917159
ucgugaaacauacaaguga

SEQ ID NO: 1213349 - RNA, 19 nt, Artificial Sequence
  Description of Artificial Sequence: Synthetic oligonucleotide
  Antisense strand to SEQ ID NO: 1213348
ucacuuguauguuucacga

SEQ ID NO: 1213350 - RNA, 19 nt, Artificial Sequence
  Description of Artificial Sequence: Synthetic oligonucleotide
  Sense strand starting at position 530 of SEQ ID NO: 917159
gugaaaugcaagugaaaca

SEQ ID NO: 1213351 - RNA, 19 nt, Artificial Sequence
  Description of Artificial Sequence: Synthetic oligonucleotide
  Antisense strand to SEQ ID NO: 1213350
uguuucacuugcauuucac

SEQ ID NO: 1213352 - RNA, 19 nt, Artificial Sequence
  Description of Artificial Sequence: Synthetic oligonucleotide
  Sense strand starting at position 917 of SEQ ID NO: 917159
gaggaaugccaacgggaua

SEQ ID NO: 1213353 - RNA, 19 nt, Artificial Sequence
  Description of Artificial Sequence: Synthetic oligonucleotide
  Antisense strand to SEQ ID NO: 1213352
uaucccguuggcauuccuc

SEQ ID NO: 1213354 - RNA, 19 nt, Artificial Sequence
  Description of Artificial Sequence: Synthetic oligonucleotide
  Sense strand starting at position 922 of SEQ ID NO: 917159
augccaacgggauaguuau

SEQ ID NO: 1213355 - RNA, 19 nt, Artificial Sequence
  Description of Artificial Sequence: Synthetic oligonucleotide
  Antisense strand to SEQ ID NO: 1213354
auaacuaucccguuggcau

SEQ ID NO: 1213356 - RNA, 19 nt, Artificial Sequence
  Description of Artificial Sequence: Synthetic oligonucleotide
  Sense strand starting at position 1088 of SEQ ID NO: 917159
aacauuuggccacgucagu

SEQ ID NO: 1213357 - RNA, 19 nt, Artificial Sequence
  Description of Artificial Sequence: Synthetic oligonucleotide
  Antisense strand to SEQ ID NO: 1213356
acugacguggccaaauguu

SEQ ID NO: 1213358 - RNA, 19 nt, Artificial Sequence
  Description of Artificial Sequence: Synthetic oligonucleotide
  Sense strand starting at position 1227 of SEQ ID NO: 917159
cugauucucgaagacacuu

SEQ ID NO: 1213359 - RNA, 19 nt, Artificial Sequence
  Description of Artificial Sequence: Synthetic oligonucleotide
  Antisense strand to SEQ ID NO: 1213358
aagugucuucgagaaucag

SEQ ID NO: 1213360 - RNA, 19 nt, Artificial Sequence
  Description of Artificial Sequence: Synthetic oligonucleotide
  Sense strand starting at position 1316 of SEQ ID NO: 917159
aaguauugauuugagacaa

SEQ ID NO: 1213361 - RNA, 19 nt, Artificial Sequence
  Description of Artificial Sequence: Synthetic oligonucleotide
  Antisense strand to SEQ ID NO: 1213360
uugucucaaaucaauacuu

SEQ ID NO: 1213362 - RNA, 19 nt, Artificial Sequence
  Description of Artificial Sequence: Synthetic oligonucleotide
  Sense strand starting at position 2249 of SEQ ID NO: 917159
cccagaauguagucaacau

SEQ ID NO: 1213363 - RNA, 19 nt, Artificial Sequence
  Description of Artificial Sequence: Synthetic oligonucleotide
  Antisense strand to SEQ ID NO: 1213362
auguugacuacauucuggg

SEQ ID NO: 1213364 - RNA, 19 nt, Artificial Sequence
  Description of Artificial Sequence: Synthetic oligonucleotide
  Sense strand starting at position 2422 of SEQ ID NO: 917159
uguaauaagucagugggaa

SEQ ID NO: 1213365 - RNA, 19 nt, Artificial Sequence
  Description of Artificial Sequence: Synthetic oligonucleotide
  Antisense strand to SEQ ID NO: 1213364
uucccacugacuuauuaca

SEQ ID NO: 1213366 - RNA, 19 nt, Artificial Sequence
  Description of Artificial Sequence: Synthetic oligonucleotide
  Sense strand starting at position 2423 of SEQ ID NO: 917159
guaauaagucagugggaag

SEQ ID NO: 1213367 - RNA, 19 nt, Artificial Sequence
  Description of Artificial Sequence: Synthetic oligonucleotide
  Antisense strand to SEQ ID NO: 1213366
cuucccacugacuuauuac

SEQ ID NO: 1213368 - RNA, 19 nt, Artificial Sequence
  Description of Artificial Sequence: Synthetic oligonucleotide
  Sense strand starting at position 2655 of SEQ ID NO: 917159
uugguauacucucuaggau

SEQ ID NO: 1213369 - RNA, 19 nt, Artificial Sequence
  Description of Artificial Sequence: Synthetic oligonucleotide
  Antisense strand to SEQ ID NO: 1213368
auccuagagaguauaccaa

SEQ ID NO: 1213370 - RNA, 19 nt, Artificial Sequence
  Description of Artificial Sequence: Synthetic oligonucleotide
  Sense strand starting at position 2658 of SEQ ID NO: 917159
guauacucucuaggaugaa

SEQ ID NO: 1213371 - RNA, 19 nt, Artificial Sequence
  Description of Artificial Sequence: Synthetic oligonucleotide
  Antisense strand to SEQ ID NO: 1213370
uucauccuagagaguauac

SEQ ID NO: 1213372 - RNA, 19 nt, Artificial Sequence
  Description of Artificial Sequence: Synthetic oligonucleotide
  Sense strand starting at position 2701 of SEQ ID NO: 917159
aaagguguucgugcuguua

SEQ ID NO: 1213373 - RNA, 19 nt, Artificial Sequence
  Description of Artificial Sequence: Synthetic oligonucleotide
  Antisense strand to SEQ ID NO: 1213372
uaacagcacgaacaccuuu

SEQ ID NO: 1213374 - RNA, 19 nt, Artificial Sequence
  Description of Artificial Sequence: Synthetic oligonucleotide
  Sense strand starting at position 2704 of SEQ ID NO: 917159
gguguucgugcuguuaaac

SEQ ID NO: 1213375 - RNA, 19 nt, Artificial Sequence
  Description of Artificial Sequence: Synthetic oligonucleotide
  Antisense strand to SEQ ID NO: 1213374
guuuaacagcacgaacacc

SEQ ID NO: 1213376 - RNA, 19 nt, Artificial Sequence
  Description of Artificial Sequence: Synthetic oligonucleotide
  Sense strand starting at position 2848 of SEQ ID NO: 917159
cugaguaaauaggucauga

SEQ ID NO: 1213377 - RNA, 19 nt, Artificial Sequence
  Description of Artificial Sequence: Synthetic oligonucleotide
  Antisense strand to SEQ ID NO: 1213376
ucaugaccuauuuacucag

SEQ ID NO: 1213378 - RNA, 19 nt, Artificial Sequence
  Description of Artificial Sequence: Synthetic oligonucleotide
  Sense strand starting at position 2940 of SEQ ID NO: 917159
caagauauaguauguggga

SEQ ID NO: 1213379 - RNA, 19 nt, Artificial Sequence
  Description of Artificial Sequence: Synthetic oligonucleotide
  Antisense strand to SEQ ID NO: 1213378
ucccacauacuauaucuug

SEQ ID NO: 1213380 - RNA, 19 nt, Artificial Sequence
  Description of Artificial Sequence: Synthetic oligonucleotide
  Sense strand starting at position 2971 of SEQ ID NO: 917159
aggaucguguuuaucguau

SEQ ID NO: 1213381 - RNA, 19 nt, Artificial Sequence
  Description of Artificial Sequence: Synthetic oligonucleotide
  Antisense strand to SEQ ID NO: 1213380
auacgauaaacacgauccu

SEQ ID NO: 1213382 - RNA, 19 nt, Artificial Sequence
  Description of Artificial Sequence: Synthetic oligonucleotide
  Sense strand starting at position 2983 of SEQ ID NO: 917159
aucguaugccugcauuuga

SEQ ID NO: 1213383 - RNA, 19 nt, Artificial Sequence
  Description of Artificial Sequence: Synthetic oligonucleotide
  Antisense strand to SEQ ID NO: 1213382
ucaaaugcaggcauacgau

SEQ ID NO: 1213384 - RNA, 19 nt, Artificial Sequence
  Description of Artificial Sequence: Synthetic oligonucleotide
  Sense strand starting at position 3010 of SEQ ID NO: 917159
cgaauuuaaugauagguag

SEQ ID NO: 1213385 - RNA, 19 nt, Artificial Sequence
  Description of Artificial Sequence: Synthetic oligonucleotide
  Antisense strand to SEQ ID NO: 1213384
cuaccuaucauuaaauucg

SEQ ID NO: 1213386 - RNA, 19 nt, Artificial Sequence
  Description of Artificial Sequence: Synthetic oligonucleotide
  Sense strand starting at position 3128 of SEQ ID NO: 917159
agagguacuuccuuggaua

SEQ ID NO: 1213387 - RNA, 19 nt, Artificial Sequence
  Description of Artificial Sequence: Synthetic oligonucleotide
  Antisense strand to SEQ ID NO: 1213386
uauccaaggaaguaccucu

SEQ ID NO: 1213388 - RNA, 19 nt, Artificial Sequence
  Description of Artificial Sequence: Synthetic oligonucleotide
  Sense strand starting at position 3129 of SEQ ID NO: 917159
gagguacuuccuuggauau

SEQ ID NO: 1213389 - RNA, 19 nt, Artificial Sequence
  Description of Artificial Sequence: Synthetic oligonucleotide
  Antisense strand to SEQ ID NO: 1213388
auauccaaggaaguaccuc

SEQ ID NO: 1213390 - RNA, 19 nt, Artificial Sequence
  Description of Artificial Sequence: Synthetic oligonucleotide
  Sense strand starting at position 3130 of SEQ ID NO: 917159
agguacuuccuuggauauc

SEQ ID NO: 1213391 - RNA, 19 nt, Artificial Sequence
  Description of Artificial Sequence: Synthetic oligonucleotide
  Antisense strand to SEQ ID NO: 1213390
gauauccaaggaaguaccu

SEQ ID NO: 1213392 - RNA, 19 nt, Artificial Sequence
  Description of Artificial Sequence: Synthetic oligonucleotide
  Sense strand starting at position 3167 of SEQ ID NO: 917159
ucagucaaugugcauauau

SEQ ID NO: 1213393 - RNA, 19 nt, Artificial Sequence
  Description of Artificial Sequence: Synthetic oligonucleotide
  Antisense strand to SEQ ID NO: 1213392
auauaugcacauugacuga

SEQ ID NO: 1213394 - RNA, 19 nt, Artificial Sequence
  Description of Artificial Sequence: Synthetic oligonucleotide
  Sense strand starting at position 3169 of SEQ ID NO: 917159
agucaaugugcauauauua

SEQ ID NO: 1213395 - RNA, 19 nt, Artificial Sequence
  Description of Artificial Sequence: Synthetic oligonucleotide
  Antisense strand to SEQ ID NO: 1213394
uaauauaugcacauugacu

SEQ ID NO: 1213396 - RNA, 19 nt, Artificial Sequence
  Description of Artificial Sequence: Synthetic oligonucleotide
  Sense strand starting at position 3249 of SEQ ID NO: 917159
ugaauuaccugagccuuga

SEQ ID NO: 1213397 - RNA, 19 nt, Artificial Sequence
  Description of Artificial Sequence: Synthetic oligonucleotide
  Antisense strand to SEQ ID NO: 1213396
ucaaggcucagguaauuca

SEQ ID NO: 1213398 - RNA, 19 nt, Artificial Sequence
  Description of Artificial Sequence: Synthetic oligonucleotide
  Sense strand starting at position 3345 of SEQ ID NO: 917159
ccaaauggcaccggagaua

SEQ ID NO: 1213399 - RNA, 19 nt, Artificial Sequence
  Description of Artificial Sequence: Synthetic oligonucleotide
  Antisense strand to SEQ ID NO: 1213398
uaucuccggugccauuugg

SEQ ID NO: 1213400 - RNA, 19 nt, Artificial Sequence
  Description of Artificial Sequence: Synthetic oligonucleotide
  Sense strand starting at position 3394 of SEQ ID NO: 917159
ggaguuauaacgcaaucuu

SEQ ID NO: 1213401 - RNA, 19 nt, Artificial Sequence
  Description of Artificial Sequence: Synthetic oligonucleotide
  Antisense strand to SEQ ID NO: 1213400
aagauugcguuauaacucc

SEQ ID NO: 1213402 - RNA, 19 nt, Artificial Sequence
  Description of Artificial Sequence: Synthetic oligonucleotide
  Sense strand starting at position 3471 of SEQ ID NO: 917159
auaugagaacuguggugau

SEQ ID NO: 1213403 - RNA, 19 nt, Artificial Sequence
  Description of Artificial Sequence: Synthetic oligonucleotide
  Antisense strand to SEQ ID NO: 1213402
aucaccacaguucucauau

SEQ ID NO: 1213404 - RNA, 19 nt, Artificial Sequence
  Description of Artificial Sequence: Synthetic oligonucleotide
  Sense strand starting at position 3501 of SEQ ID NO: 917159
uucugucuccgccugguaa

SEQ ID NO: 1213405 - RNA, 19 nt, Artificial Sequence
  Description of Artificial Sequence: Synthetic oligonucleotide
  Antisense strand to SEQ ID NO: 1213404
uuaccaggcggagacagaa

SEQ ID NO: 1213406 - RNA, 19 nt, Artificial Sequence
  Description of Artificial Sequence: Synthetic oligonucleotide
  Sense strand starting at position 3769 of SEQ ID NO: 917159
guaaguaaucugccgugua

SEQ ID NO: 1213407 - RNA, 19 nt, Artificial Sequence
  Description of Artificial Sequence: Synthetic oligonucleotide
  Antisense strand to SEQ ID NO: 1213406
uacacggcagauuacuuac

SEQ ID NO: 1213408 - RNA, 19 nt, Artificial Sequence
  Description of Artificial Sequence: Synthetic oligonucleotide
  Sense strand starting at position 3805 of SEQ ID NO: 917159
auacauauaugacugggua

SEQ ID NO: 1213409 - RNA, 19 nt, Artificial Sequence
  Description of Artificial Sequence: Synthetic oligonucleotide
  Antisense strand to SEQ ID NO: 1213408
uacccagucauauauguau

SEQ ID NO: 1213410 - RNA, 19 nt, Artificial Sequence
  Description of Artificial Sequence: Synthetic oligonucleotide
  Sense strand starting at position 3806 of SEQ ID NO: 917159
uacauauaugacuggguaa

SEQ ID NO: 1213411 - RNA, 19 nt, Artificial Sequence
  Description of Artificial Sequence: Synthetic oligonucleotide
  Antisense strand to SEQ ID NO: 1213410
uuacccagucauauaugua

SEQ ID NO: 1213412 - RNA, 19 nt, Artificial Sequence
  Description of Artificial Sequence: Synthetic oligonucleotide
  Sense strand starting at position 3808 of SEQ ID NO: 917159
cauauaugacuggguaaua

SEQ ID NO: 1213413 - RNA, 19 nt, Artificial Sequence
  Description of Artificial Sequence: Synthetic oligonucleotide
  Antisense strand to SEQ ID NO: 1213412
uauuacccagucauauaug

SEQ ID NO: 1213414 - RNA, 19 nt, Artificial Sequence
  Description of Artificial Sequence: Synthetic oligonucleotide
  Sense strand starting at position 3809 of SEQ ID NO: 917159
auauaugacuggguaauau

SEQ ID NO: 1213415 - RNA, 19 nt, Artificial Sequence
  Description of Artificial Sequence: Synthetic oligonucleotide
  Antisense strand to SEQ ID NO: 1213414
auauuacccagucauauau

SEQ ID NO: 1213416 - RNA, 19 nt, Artificial Sequence
  Description of Artificial Sequence: Synthetic oligonucleotide
  Sense strand starting at position 3809 of SEQ ID NO: 917160
auauaugacuggguaauau

SEQ ID NO: 1213417 - RNA, 19 nt, Artificial Sequence
  Description of Artificial Sequence: Synthetic oligonucleotide
  Antisense strand to SEQ ID NO: 1213416
auauuacccagucauauau

SEQ ID NO: 1213418 - RNA, 19 nt, Artificial Sequence
  Description of Artificial Sequence: Synthetic oligonucleotide
  Sense strand starting at position 20 of SEQ ID NO: 917160
gccaauacacaguauuagu

SEQ ID NO: 1213419 - RNA, 19 nt, Artificial Sequence
  Description of Artificial Sequence: Synthetic oligonucleotide
  Antisense strand to SEQ ID NO: 1213418
acuaauacuguguauuggc

SEQ ID NO: 1213420 - RNA, 19 nt, Artificial Sequence
  Description of Artificial Sequence: Synthetic oligonucleotide
  Sense strand starting at position 143 of SEQ ID NO: 917160
augcaaaggcgcuagaauu

SEQ ID NO: 1213421 - RNA, 19 nt, Artificial Sequence
  Description of Artificial Sequence: Synthetic oligonucleotide
  Antisense strand to SEQ ID NO: 1213420
aauucuagcgccuuugcau

SEQ ID NO: 1213422 - RNA, 19 nt, Artificial Sequence
  Description of Artificial Sequence: Synthetic oligonucleotide
  Sense strand starting at position 170 of SEQ ID NO: 917160
caugucaguuuggucaaau

SEQ ID NO: 1213423 - RNA, 19 nt, Artificial Sequence
  Description of Artificial Sequence: Synthetic oligonucleotide
  Antisense strand to SEQ ID NO: 1213422
auuugaccaaacugacaug

SEQ ID NO: 1213424 - RNA, 19 nt, Artificial Sequence
  Description of Artificial Sequence: Synthetic oligonucleotide
  Sense strand starting at position 171 of SEQ ID NO: 917160
augucaguuuggucaaaug

SEQ ID NO: 1213425 - RNA, 19 nt, Artificial Sequence
  Description of Artificial Sequence: Synthetic oligonucleotide
  Antisense strand to SEQ ID NO: 1213424
cauuugaccaaacugacau

SEQ ID NO: 1213426 - RNA, 19 nt, Artificial Sequence
  Description of Artificial Sequence: Synthetic oligonucleotide
  Sense strand starting at position 193 of SEQ ID NO: 917160
uguaaugucuaaucucaug

SEQ ID NO: 1213427 - RNA, 19 nt, Artificial Sequence
  Description of Artificial Sequence: Synthetic oligonucleotide
  Antisense strand to SEQ ID NO: 1213426
caugagauuagacauuaca

SEQ ID NO: 1213428 - RNA, 19 nt, Artificial Sequence
  Description of Artificial Sequence: Synthetic oligonucleotide
  Sense strand starting at position 199 of SEQ ID NO: 917160
gucuaaucucaugggauug

SEQ ID NO: 1213429 - RNA, 19 nt, Artificial Sequence
  Description of Artificial Sequence: Synthetic oligonucleotide
  Antisense strand to SEQ ID NO: 1213428
caaucccaugagauuagac

SEQ ID NO: 1213430 - RNA, 19 nt, Artificial Sequence
  Description of Artificial Sequence: Synthetic oligonucleotide
  Sense strand starting at position 284 of SEQ ID NO: 917160
agaaauauuguauggugag

SEQ ID NO: 1213431 - RNA, 19 nt, Artificial Sequence
  Description of Artificial Sequence: Synthetic oligonucleotide
  Antisense strand to SEQ ID NO: 1213430
cucaccauacaauauuucu

SEQ ID NO: 1213432 - RNA, 19 nt, Artificial Sequence
  Description of Artificial Sequence: Synthetic oligonucleotide
  Sense strand starting at position 290 of SEQ ID NO: 917160
auuguauggugaguuaaca

SEQ ID NO: 1213433 - RNA, 19 nt, Artificial Sequence
  Description of Artificial Sequence: Synthetic oligonucleotide
  Antisense strand to SEQ ID NO: 1213432
uguuaacucaccauacaau

SEQ ID NO: 1213434 - RNA, 19 nt, Artificial Sequence
  Description of Artificial Sequence: Synthetic oligonucleotide
  Sense strand starting at position 372 of SEQ ID NO: 917160
acaacagagucagcaauau

SEQ ID NO: 1213435 - RNA, 19 nt, Artificial Sequence
  Description of Artificial Sequence: Synthetic oligonucleotide
  Antisense strand to SEQ ID NO: 1213434
auauugcugacucuguugu

SEQ ID NO: 1213436 - RNA, 19 nt, Artificial Sequence
  Description of Artificial Sequence: Synthetic oligonucleotide
  Sense strand starting at position 398 of SEQ ID NO: 917160
cgcugauuucuccaguguc

SEQ ID NO: 1213437 - RNA, 19 nt, Artificial Sequence
  Description of Artificial Sequence: Synthetic oligonucleotide
  Antisense strand to SEQ ID NO: 1213436
gacacuggagaaaucagcg

SEQ ID NO: 1213438 - RNA, 19 nt, Artificial Sequence
  Description of Artificial Sequence: Synthetic oligonucleotide
  Sense strand starting at position 749 of SEQ ID NO: 917160
gcuaauguagucugaacau

SEQ ID NO: 1213439 - RNA, 19 nt, Artificial Sequence
  Description of Artificial Sequence: Synthetic oligonucleotide
  Antisense strand to SEQ ID NO: 1213438
auguucagacuacauuagc

SEQ ID NO: 1213440 - RNA, 19 nt, Artificial Sequence
  Description of Artificial Sequence: Synthetic oligonucleotide
  Sense strand starting at position 1194 of SEQ ID NO: 917160
acgagauagucccuauguc

SEQ ID NO: 1213441 - RNA, 19 nt, Artificial Sequence
  Description of Artificial Sequence: Synthetic oligonucleotide
  Antisense strand to SEQ ID NO: 1213440
gacauagggacuaucucgu

SEQ ID NO: 1213442 - RNA, 19 nt, Artificial Sequence
  Description of Artificial Sequence: Synthetic oligonucleotide
  Sense strand starting at position 1195 of SEQ ID NO: 917160
cgagauagucccuauguca

SEQ ID NO: 1213443 - RNA, 19 nt, Artificial Sequence
  Description of Artificial Sequence: Synthetic oligonucleotide
  Antisense strand to SEQ ID NO: 1213442
ugacauagggacuaucucg

SEQ ID NO: 1213444 - RNA, 19 nt, Artificial Sequence
  Description of Artificial Sequence: Synthetic oligonucleotide
  Sense strand starting at position 1441 of SEQ ID NO: 917160
cuucuagaccgauggauga

SEQ ID NO: 1213445 - RNA, 19 nt, Artificial Sequence
  Description of Artificial Sequence: Synthetic oligonucleotide
  Antisense strand to SEQ ID NO: 1213444
ucauccaucggucuagaag

SEQ ID NO: 1213446 - RNA, 19 nt, Artificial Sequence
  Description of Artificial Sequence: Synthetic oligonucleotide
  Sense strand starting at position 1485 of SEQ ID NO: 917160
cccagaagguuaccauaau

SEQ ID NO: 1213447 - RNA, 19 nt, Artificial Sequence
  Description of Artificial Sequence: Synthetic oligonucleotide
  Antisense strand to SEQ ID NO: 1213446
auuaugguaaccuucuggg

SEQ ID NO: 1213448 - RNA, 19 nt, Artificial Sequence
  Description of Artificial Sequence: Synthetic oligonucleotide
  Sense strand starting at position 1568 of SEQ ID NO: 917160
augaaucagcuuugaaauc

SEQ ID NO: 1213449 - RNA, 19 nt, Artificial Sequence
  Description of Artificial Sequence: Synthetic oligonucleotide
  Antisense strand to SEQ ID NO: 1213448
gauuucaaagcugauucau

SEQ ID NO: 1213450 - RNA, 19 nt, Artificial Sequence
  Description of Artificial Sequence: Synthetic oligonucleotide
  Sense strand starting at position 1666 of SEQ ID NO: 917160
gauuucucguggguuugga

SEQ ID NO: 1213451 - RNA, 19 nt, Artificial Sequence
  Description of Artificial Sequence: Synthetic oligonucleotide
  Antisense strand to SEQ ID NO: 1213450
uccaaacccacgagaaauc

SEQ ID NO: 1213452 - RNA, 19 nt, Artificial Sequence
  Description of Artificial Sequence: Synthetic oligonucleotide
  Sense strand starting at position 2828 of SEQ ID NO: 917160
gggugaaauucguuucaau

SEQ ID NO: 1213453 - RNA, 19 nt, Artificial Sequence
  Description of Artificial Sequence: Synthetic oligonucleotide
  Antisense strand to SEQ ID NO: 1213452
auugaaacgaauuucaccc

SEQ ID NO: 1213454 - RNA, 19 nt, Artificial Sequence
  Description of Artificial Sequence: Synthetic oligonucleotide
  Sense strand starting at position 2941 of SEQ ID NO: 917160
agucguuugcauuagaaac

SEQ ID NO: 1213455 - RNA, 19 nt, Artificial Sequence
  Description of Artificial Sequence: Synthetic oligonucleotide
  Antisense strand to SEQ ID NO: 1213454
guuucuaaugcaaacgacu

SEQ ID NO: 1213456 - RNA, 19 nt, Artificial Sequence
  Description of Artificial Sequence: Synthetic oligonucleotide
  Sense strand starting at position 2993 of SEQ ID NO: 917160
aggccacuaucaucgauaa

SEQ ID NO: 1213457 - RNA, 19 nt, Artificial Sequence
  Description of Artificial Sequence: Synthetic oligonucleotide
  Antisense strand to SEQ ID NO: 1213456
uuaucgaugauaguggccu

SEQ ID NO: 1213458 - RNA, 19 nt, Artificial Sequence
  Description of Artificial Sequence: Synthetic oligonucleotide
  Sense strand starting at position 2994 of SEQ ID NO: 917160
ggccacuaucaucgauaaa

SEQ ID NO: 1213459 - RNA, 19 nt, Artificial Sequence
  Description of Artificial Sequence: Synthetic oligonucleotide
  Antisense strand to SEQ ID NO: 1213458
uuuaucgaugauaguggcc

SEQ ID NO: 1213460 - RNA, 19 nt, Artificial Sequence
  Description of Artificial Sequence: Synthetic oligonucleotide
  Sense strand starting at position 3018 of SEQ ID NO: 917160
guaugauauuuguaaacag

SEQ ID NO: 1213461 - RNA, 19 nt, Artificial Sequence
  Description of Artificial Sequence: Synthetic oligonucleotide
  Antisense strand to SEQ ID NO: 1213460
cuguuuacaaauaucauac

SEQ ID NO: 1213462 - RNA, 19 nt, Artificial Sequence
  Description of Artificial Sequence: Synthetic oligonucleotide
  Sense strand starting at position 3136 of SEQ ID NO: 917160
aucaaugaccaguguccaa

SEQ ID NO: 1213463 - RNA, 19 nt, Artificial Sequence
  Description of Artificial Sequence: Synthetic oligonucleotide
  Antisense strand to SEQ ID NO: 1213462
uuggacacuggucauugau

SEQ ID NO: 1213464 - RNA, 19 nt, Artificial Sequence
  Description of Artificial Sequence: Synthetic oligonucleotide
  Sense strand starting at position 3219 of SEQ ID NO: 917160
ggaaguauugaguacagua

SEQ ID NO: 1213465 - RNA, 19 nt, Artificial Sequence
  Description of Artificial Sequence: Synthetic oligonucleotide
  Antisense strand to SEQ ID NO: 1213464
uacuguacucaauacuucc

SEQ ID NO: 1213466 - RNA, 19 nt, Artificial Sequence
  Description of Artificial Sequence: Synthetic oligonucleotide
  Sense strand starting at position 3245 of SEQ ID NO: 917160
cugcgauacuaccuauaag

SEQ ID NO: 1213467 - RNA, 19 nt, Artificial Sequence
  Description of Artificial Sequence: Synthetic oligonucleotide
  Antisense strand to SEQ ID NO: 1213466
cuuauagguaguaucgcag

SEQ ID NO: 1213468 - RNA, 19 nt, Artificial Sequence
  Description of Artificial Sequence: Synthetic oligonucleotide
  Sense strand starting at position 3267 of SEQ ID NO: 917160
accaguuucuagcuaugau

SEQ ID NO: 1213469 - RNA, 19 nt, Artificial Sequence
  Description of Artificial Sequence: Synthetic oligonucleotide
  Antisense strand to SEQ ID NO: 1213468
aucauagcuagaaacuggu

SEQ ID NO: 1213470 - RNA, 19 nt, Artificial Sequence
  Description of Artificial Sequence: Synthetic oligonucleotide
  Sense strand starting at position 3270 of SEQ ID NO: 917160
aguuucuagcuaugauuac

SEQ ID NO: 1213471 - RNA, 19 nt, Artificial Sequence
  Description of Artificial Sequence: Synthetic oligonucleotide
  Antisense strand to SEQ ID NO: 1213470
guaaucauagcuagaaacu

SEQ ID NO: 1213472 - RNA, 19 nt, Artificial Sequence
  Description of Artificial Sequence: Synthetic oligonucleotide
  Sense strand starting at position 3307 of SEQ ID NO: 917160
ugggaacuaguuuguuaau

SEQ ID NO: 1213473 - RNA, 19 nt, Artificial Sequence
  Description of Artificial Sequence: Synthetic oligonucleotide
  Antisense strand to SEQ ID NO: 1213472
auuaacaaacuaguuccca

SEQ ID NO: 1213474 - RNA, 19 nt, Artificial Sequence
  Description of Artificial Sequence: Synthetic oligonucleotide
  Sense strand starting at position 3308 of SEQ ID NO: 917160
gggaacuaguuuguuaaua

SEQ ID NO: 1213475 - RNA, 19 nt, Artificial Sequence
  Description of Artificial Sequence: Synthetic oligonucleotide
  Antisense strand to SEQ ID NO: 1213474
uauuaacaaacuaguuccc

SEQ ID NO: 1213476 - RNA, 19 nt, Artificial Sequence
  Description of Artificial Sequence: Synthetic oligonucleotide
  Sense strand starting at position 3309 of SEQ ID NO: 917160
ggaacuaguuuguuaauaa

SEQ ID NO: 1213477 - RNA, 19 nt, Artificial Sequence
  Description of Artificial Sequence: Synthetic oligonucleotide
  Antisense strand to SEQ ID NO: 1213476
uuauuaacaaacuaguucc

SEQ ID NO: 1213478 - RNA, 19 nt, Artificial Sequence
  Description of Artificial Sequence: Synthetic oligonucleotide
  Sense strand starting at position 3357 of SEQ ID NO: 917160
gaguccugguaucuugaua

SEQ ID NO: 1213479 - RNA, 19 nt, Artificial Sequence
  Description of Artificial Sequence: Synthetic oligonucleotide
  Antisense strand to SEQ ID NO: 1213478
uaucaagauaccaggacuc

SEQ ID NO: 1213480 - RNA, 19 nt, Artificial Sequence
  Description of Artificial Sequence: Synthetic oligonucleotide
  Sense strand starting at position 3471 of SEQ ID NO: 917160
gaauaugaacuuugcaguu

SEQ ID NO: 1213481 - RNA, 19 nt, Artificial Sequence
  Description of Artificial Sequence: Synthetic oligonucleotide
  Antisense strand to SEQ ID NO: 1213480
aacugcaaaguucauauuc

SEQ ID NO: 1213482 - RNA, 19 nt, Artificial Sequence
  Description of Artificial Sequence: Synthetic oligonucleotide
  Sense strand starting at position 3519 of SEQ ID NO: 917160
ccaccuuuccugugauauu

SEQ ID NO: 1213483 - RNA, 19 nt, Artificial Sequence
  Description of Artificial Sequence: Synthetic oligonucleotide
  Antisense strand to SEQ ID NO: 1213482
aauaucacaggaaaggugg

SEQ ID NO: 1213484 - RNA, 19 nt, Artificial Sequence
  Description of Artificial Sequence: Synthetic oligonucleotide
  Sense strand starting at position 3627 of SEQ ID NO: 917160
gugucaugccuugauaaug

SEQ ID NO: 1213485 - RNA, 19 nt, Artificial Sequence
  Description of Artificial Sequence: Synthetic oligonucleotide
  Antisense strand to SEQ ID NO: 1213484
cauuaucaaggcaugacac

SEQ ID NO: 1213486 - RNA, 19 nt, Artificial Sequence
  Description of Artificial Sequence: Synthetic oligonucleotide
  Sense strand starting at position 3859 of SEQ ID NO: 917160
uuacuauacuggguuugaa

SEQ ID NO: 1213487 - RNA, 19 nt, Artificial Sequence
  Description of Artificial Sequence: Synthetic oligonucleotide
  Antisense strand to SEQ ID NO: 1213486
uucaaacccaguauaguaa

SEQ ID NO: 1213488 - RNA, 19 nt, Artificial Sequence
  Description of Artificial Sequence: Synthetic oligonucleotide
  Sense strand starting at position 3879 of SEQ ID NO: 917160
ccugcauugucauuuacua

SEQ ID NO: 1213489 - RNA, 19 nt, Artificial Sequence
  Description of Artificial Sequence: Synthetic oligonucleotide
  Antisense strand to SEQ ID NO: 1213488
uaguaaaugacaaugcagg

SEQ ID NO: 1213490 - RNA, 19 nt, Artificial Sequence
  Description of Artificial Sequence: Synthetic oligonucleotide
  Sense strand starting at position 3892 of SEQ ID NO: 917160
uuacuaauguguucuugga

SEQ ID NO: 1213491 - RNA, 19 nt, Artificial Sequence
  Description of Artificial Sequence: Synthetic oligonucleotide
  Antisense strand to SEQ ID NO: 1213490
uccaagaacacauuaguaa

SEQ ID NO: 1213492 - RNA, 19 nt, Artificial Sequence
  Description of Artificial Sequence: Synthetic oligonucleotide
  Sense strand starting at position 3902 of SEQ ID NO: 917160
guucuuggagccuagaauu

SEQ ID NO: 1213493 - RNA, 19 nt, Artificial Sequence
  Description of Artificial Sequence: Synthetic oligonucleotide
  Antisense strand to SEQ ID NO: 1213492
aauucuaggcuccaagaac

SEQ ID NO: 1213494 - RNA, 19 nt, Artificial Sequence
  Description of Artificial Sequence: Synthetic oligonucleotide
  Sense strand starting at position 3970 of SEQ ID NO: 917160
ggcauauuauuuguuucca

SEQ ID NO: 1213495 - RNA, 19 nt, Artificial Sequence
  Description of Artificial Sequence: Synthetic oligonucleotide
  Antisense strand to SEQ ID NO: 1213494
uggaaacaaauaauaugcc

SEQ ID NO: 1213496 - RNA, 19 nt, Artificial Sequence
  Description of Artificial Sequence: Synthetic oligonucleotide
  Sense strand starting at position 3971 of SEQ ID NO: 917161
gcauauuauuuguuuccau

SEQ ID NO: 1213497 - RNA, 19 nt, Artificial Sequence
  Description of Artificial Sequence: Synthetic oligonucleotide
  Antisense strand to SEQ ID NO: 1213496
auggaaacaaauaauaugc

SEQ ID NO: 1213498 - RNA, 19 nt, Artificial Sequence
  Description of Artificial Sequence: Synthetic oligonucleotide
  Sense strand starting at position 14 of SEQ ID NO: 917161
aguuguaauuggcuauaaa

SEQ ID NO: 1213499 - RNA, 19 nt, Artificial Sequence
  Description of Artificial Sequence: Synthetic oligonucleotide
  Antisense strand to SEQ ID NO: 1213498
uuuauagccaauuacaacu

SEQ ID NO: 1213500 - RNA, 19 nt, Artificial Sequence
  Description of Artificial Sequence: Synthetic oligonucleotide
  Sense strand starting at position 15 of SEQ ID NO: 917161
guuguaauuggcuauaaac

SEQ ID NO: 1213501 - RNA, 19 nt, Artificial Sequence
  Description of Artificial Sequence: Synthetic oligonucleotide
  Antisense strand to SEQ ID NO: 1213500
guuuauagccaauuacaac

SEQ ID NO: 1213502 - RNA, 19 nt, Artificial Sequence
  Description of Artificial Sequence: Synthetic oligonucleotide
  Sense strand starting at position 17 of SEQ ID NO: 917161
uguaauuggcuauaaacuu

SEQ ID NO: 1213503 - RNA, 19 nt, Artificial Sequence
  Description of Artificial Sequence: Synthetic oligonucleotide
  Antisense strand to SEQ ID NO: 1213502
aaguuuauagccaauuaca

SEQ ID NO: 1213504 - RNA, 19 nt, Artificial Sequence
  Description of Artificial Sequence: Synthetic oligonucleotide
  Sense strand starting at position 544 of SEQ ID NO: 917161
gcucgcuguaccuugaauu

SEQ ID NO: 1213505 - RNA, 19 nt, Artificial Sequence
  Description of Artificial Sequence: Synthetic oligonucleotide
  Antisense strand to SEQ ID NO: 1213504
aauucaagguacagcgagc

SEQ ID NO: 1213506 - RNA, 19 nt, Artificial Sequence
  Description of Artificial Sequence: Synthetic oligonucleotide
  Sense strand starting at position 620 of SEQ ID NO: 917161
ggucacuucucuucuuaga

SEQ ID NO: 1213507 - RNA, 19 nt, Artificial Sequence
  Description of Artificial Sequence: Synthetic oligonucleotide
  Antisense strand to SEQ ID NO: 1213506
ucuaagaagagaagugacc

SEQ ID NO: 1213508 - RNA, 19 nt, Artificial Sequence
  Description of Artificial Sequence: Synthetic oligonucleotide
  Sense strand starting at position 630 of SEQ ID NO: 917161
cuucuuagauggcucagau

SEQ ID NO: 1213509 - RNA, 19 nt, Artificial Sequence
  Description of Artificial Sequence: Synthetic oligonucleotide
  Antisense strand to SEQ ID NO: 1213508
aucugagccaucuaagaag

SEQ ID NO: 1213510 - RNA, 19 nt, Artificial Sequence
  Description of Artificial Sequence: Synthetic oligonucleotide
  Sense strand starting at position 844 of SEQ ID NO: 917161
ugaggagcucuuggaaaga

SEQ ID NO: 1213511 - RNA, 19 nt, Artificial Sequence
  Description of Artificial Sequence: Synthetic oligonucleotide
  Antisense strand to SEQ ID NO: 1213510
ucuuuccaagagcuccuca

SEQ ID NO: 1213512 - RNA, 19 nt, Artificial Sequence
  Description of Artificial Sequence: Synthetic oligonucleotide
  Sense strand starting at position 906 of SEQ ID NO: 917161
ggcucaguaggucagagaa

SEQ ID NO: 1213513 - RNA, 19 nt, Artificial Sequence
  Description of Artificial Sequence: Synthetic oligonucleotide
  Antisense strand to SEQ ID NO: 1213512
uucucugaccuacugagcc

SEQ ID NO: 1213514 - RNA, 19 nt, Artificial Sequence
  Description of Artificial Sequence: Synthetic oligonucleotide
  Sense strand starting at position 1942 of SEQ ID NO: 917161
gugauuaacgaguguuuac

SEQ ID NO: 1213515 - RNA, 19 nt, Artificial Sequence
  Description of Artificial Sequence: Synthetic oligonucleotide
  Antisense strand to SEQ ID NO: 1213514
guaaacacucguuaaucac

SEQ ID NO: 1213516 - RNA, 19 nt, Artificial Sequence
  Description of Artificial Sequence: Synthetic oligonucleotide
  Sense strand starting at position 1951 of SEQ ID NO: 917161
gaguguuuacaagacucua

SEQ ID NO: 1213517 - RNA, 19 nt, Artificial Sequence
  Description of Artificial Sequence: Synthetic oligonucleotide
  Antisense strand to SEQ ID NO: 1213516
uagagucuuguaaacacuc

SEQ ID NO: 1213518 - RNA, 19 nt, Artificial Sequence
  Description of Artificial Sequence: Synthetic oligonucleotide
  Sense strand starting at position 2224 of SEQ ID NO: 917161
aaaggcuaucuugguagga

SEQ ID NO: 1213519 - RNA, 19 nt, Artificial Sequence
  Description of Artificial Sequence: Synthetic oligonucleotide
  Antisense strand to SEQ ID NO: 1213518
uccuaccaagauagccuuu

SEQ ID NO: 1213520 - RNA, 19 nt, Artificial Sequence
  Description of Artificial Sequence: Synthetic oligonucleotide
  Sense strand starting at position 2225 of SEQ ID NO: 917161
aaggcuaucuugguaggaa

SEQ ID NO: 1213521 - RNA, 19 nt, Artificial Sequence
  Description of Artificial Sequence: Synthetic oligonucleotide
  Antisense strand to SEQ ID NO: 1213520
uuccuaccaagauagccuu

SEQ ID NO: 1213522 - RNA, 19 nt, Artificial Sequence
  Description of Artificial Sequence: Synthetic oligonucleotide
  Sense strand starting at position 2228 of SEQ ID NO: 917161
gcuaucuugguaggaaucu

SEQ ID NO: 1213523 - RNA, 19 nt, Artificial Sequence
  Description of Artificial Sequence: Synthetic oligonucleotide
  Antisense strand to SEQ ID NO: 1213522
agauuccuaccaagauagc

SEQ ID NO: 1213524 - RNA, 19 nt, Artificial Sequence
  Description of Artificial Sequence: Synthetic oligonucleotide
  Sense strand starting at position 2234 of SEQ ID NO: 917161
uugguaggaaucugagcuu

SEQ ID NO: 1213525 - RNA, 19 nt, Artificial Sequence
  Description of Artificial Sequence: Synthetic oligonucleotide
  Antisense strand to SEQ ID NO: 1213524
aagcucagauuccuaccaa

SEQ ID NO: 1213526 - RNA, 19 nt, Artificial Sequence
  Description of Artificial Sequence: Synthetic oligonucleotide
  Sense strand starting at position 2237 of SEQ ID NO: 917161
guaggaaucugagcuugga

SEQ ID NO: 1213527 - RNA, 19 nt, Artificial Sequence
  Description of Artificial Sequence: Synthetic oligonucleotide
  Antisense strand to SEQ ID NO: 1213526
uccaagcucagauuccuac

SEQ ID NO: 1213528 - RNA, 19 nt, Artificial Sequence
  Description of Artificial Sequence: Synthetic oligonucleotide
  Sense strand starting at position 2241 of SEQ ID NO: 917161
gaaucugagcuuggagaca

SEQ ID NO: 1213529 - RNA, 19 nt, Artificial Sequence
  Description of Artificial Sequence: Synthetic oligonucleotide
  Antisense strand to SEQ ID NO: 1213528
ugucuccaagcucagauuc

SEQ ID NO: 1213530 - RNA, 19 nt, Artificial Sequence
  Description of Artificial Sequence: Synthetic oligonucleotide
  Sense strand starting at position 2335 of SEQ ID NO: 917161
agagaaccauugcuuugau

SEQ ID NO: 1213531 - RNA, 19 nt, Artificial Sequence
  Description of Artificial Sequence: Synthetic oligonucleotide
  Antisense strand to SEQ ID NO: 1213530
aucaaagcaaugguucucu

SEQ ID NO: 1213532 - RNA, 19 nt, Artificial Sequence
  Description of Artificial Sequence: Synthetic oligonucleotide
  Sense strand starting at position 2338 of SEQ ID NO: 917161
gaaccauugcuuugaugag

SEQ ID NO: 1213533 - RNA, 19 nt, Artificial Sequence
  Description of Artificial Sequence: Synthetic oligonucleotide
  Antisense strand to SEQ ID NO: 1213532
cucaucaaagcaaugguuc

SEQ ID NO: 1213534 - RNA, 19 nt, Artificial Sequence
  Description of Artificial Sequence: Synthetic oligonucleotide
  Sense strand starting at position 2347 of SEQ ID NO: 917161
cuuugaugagaacguuucu

SEQ ID NO: 1213535 - RNA, 19 nt, Artificial Sequence
  Description of Artificial Sequence: Synthetic oligonucleotide
  Antisense strand to SEQ ID NO: 1213534
agaaacguucucaucaaag

SEQ ID NO: 1213536 - RNA, 19 nt, Artificial Sequence
  Description of Artificial Sequence: Synthetic oligonucleotide
  Sense strand starting at position 2352 of SEQ ID NO: 917161
augagaacguuucugacca

SEQ ID NO: 1213537 - RNA, 19 nt, Artificial Sequence
  Description of Artificial Sequence: Synthetic oligonucleotide
  Antisense strand to SEQ ID NO: 1213536
uggucagaaacguucucau

SEQ ID NO: 1213538 - RNA, 19 nt, Artificial Sequence
  Description of Artificial Sequence: Synthetic oligonucleotide
  Sense strand starting at position 2356 of SEQ ID NO: 917161
gaacguuucugaccaaccu

SEQ ID NO: 1213539 - RNA, 19 nt, Artificial Sequence
  Description of Artificial Sequence: Synthetic oligonucleotide
  Antisense strand to SEQ ID NO: 1213538
agguuggucagaaacguuc

SEQ ID NO: 1213540 - RNA, 19 nt, Artificial Sequence
  Description of Artificial Sequence: Synthetic oligonucleotide
  Sense strand starting at position 2395 of SEQ ID NO: 917161
cccuaagagaugggccauu

SEQ ID NO: 1213541 - RNA, 19 nt, Artificial Sequence
  Description of Artificial Sequence: Synthetic oligonucleotide
  Antisense strand to SEQ ID NO: 1213540
aauggcccaucucuuaggg

SEQ ID NO: 1213542 - RNA, 19 nt, Artificial Sequence
  Description of Artificial Sequence: Synthetic oligonucleotide
  Sense strand starting at position 2478 of SEQ ID NO: 917161
uuucuugcccaaggaaauu

SEQ ID NO: 1213543 - RNA, 19 nt, Artificial Sequence
  Description of Artificial Sequence: Synthetic oligonucleotide
  Antisense strand to SEQ ID NO: 1213542
aauuuccuugggcaagaaa

SEQ ID NO: 1213544 - RNA, 19 nt, Artificial Sequence
  Description of Artificial Sequence: Synthetic oligonucleotide
  Sense strand starting at position 2585 of SEQ ID NO: 917161
agcgauuuauuguuaaacg

SEQ ID NO: 1213545 - RNA, 19 nt, Artificial Sequence
  Description of Artificial Sequence: Synthetic oligonucleotide
  Antisense strand to SEQ ID NO: 1213544
cguuuaacaauaaaucgcu

SEQ ID NO: 1213546 - RNA, 19 nt, Artificial Sequence
  Description of Artificial Sequence: Synthetic oligonucleotide
  Sense strand starting at position 2594 of SEQ ID NO: 917161
uuguuaaacguuuacauuc

SEQ ID NO: 1213547 - RNA, 19 nt, Artificial Sequence
  Description of Artificial Sequence: Synthetic oligonucleotide
  Antisense strand to SEQ ID NO: 1213546
gaauguaaacguuuaacaa

SEQ ID NO: 1213548 - RNA, 19 nt, Artificial Sequence
  Description of Artificial Sequence: Synthetic oligonucleotide
  Sense strand starting at position 2638 of SEQ ID NO: 917161
aaguaaugggcauguggua

SEQ ID NO: 1213549 - RNA, 19 nt, Artificial Sequence
  Description of Artificial Sequence: Synthetic oligonucleotide
  Antisense strand to SEQ ID NO: 1213548
uaccacaugcccauuacuu

SEQ ID NO: 1213550 - RNA, 19 nt, Artificial Sequence
  Description of Artificial Sequence: Synthetic oligonucleotide
  Sense strand starting at position 2645 of SEQ ID NO: 917161
gggcaugugguagaaguua

SEQ ID NO: 1213551 - RNA, 19 nt, Artificial Sequence
  Description of Artificial Sequence: Synthetic oligonucleotide
  Antisense strand to SEQ ID NO: 1213550
uaacuucuaccacaugccc

SEQ ID NO: 1213552 - RNA, 19 nt, Artificial Sequence
  Description of Artificial Sequence: Synthetic oligonucleotide
  Sense strand starting at position 2669 of SEQ ID NO: 917161
gugguuauuggcgugcaua

SEQ ID NO: 1213553 - RNA, 19 nt, Artificial Sequence
  Description of Artificial Sequence: Synthetic oligonucleotide
  Antisense strand to SEQ ID NO: 1213552
uaugcacgccaauaaccac

SEQ ID NO: 1213554 - RNA, 19 nt, Artificial Sequence
  Description of Artificial Sequence: Synthetic oligonucleotide
  Sense strand starting at position 2835 of SEQ ID NO: 917161
cuagguauuuaugugucuu

SEQ ID NO: 1213555 - RNA, 19 nt, Artificial Sequence
  Description of Artificial Sequence: Synthetic oligonucleotide
  Antisense strand to SEQ ID NO: 1213554
aagacacauaaauaccuag

SEQ ID NO: 1213556 - RNA, 19 nt, Artificial Sequence
  Description of Artificial Sequence: Synthetic oligonucleotide
  Sense strand starting at position 2839 of SEQ ID NO: 917161
guauuuaugugucuuacau

SEQ ID NO: 1213557 - RNA, 19 nt, Artificial Sequence
  Description of Artificial Sequence: Synthetic oligonucleotide
  Antisense strand to SEQ ID NO: 1213556
auguaagacacauaaauac

SEQ ID NO: 1213558 - RNA, 19 nt, Artificial Sequence
  Description of Artificial Sequence: Synthetic oligonucleotide
  Sense strand starting at position 2894 of SEQ ID NO: 917161
agggaaacguucuccgaag

SEQ ID NO: 1213559 - RNA, 19 nt, Artificial Sequence
  Description of Artificial Sequence: Synthetic oligonucleotide
  Antisense strand to SEQ ID NO: 1213558
cuucggagaacguuucccu

SEQ ID NO: 1213560 - RNA, 19 nt, Artificial Sequence
  Description of Artificial Sequence: Synthetic oligonucleotide
  Sense strand starting at position 2895 of SEQ ID NO: 917161
gggaaacguucuccgaaga

SEQ ID NO: 1213561 - RNA, 19 nt, Artificial Sequence
  Description of Artificial Sequence: Synthetic oligonucleotide
  Antisense strand to SEQ ID NO: 1213560
ucuucggagaacguuuccc

SEQ ID NO: 1213562 - RNA, 19 nt, Artificial Sequence
  Description of Artificial Sequence: Synthetic oligonucleotide
  Sense strand starting at position 2896 of SEQ ID NO: 917161
ggaaacguucuccgaagaa

SEQ ID NO: 1213563 - RNA, 19 nt, Artificial Sequence
  Description of Artificial Sequence: Synthetic oligonucleotide
  Antisense strand to SEQ ID NO: 1213562
uucuucggagaacguuucc

SEQ ID NO: 1213564 - RNA, 19 nt, Artificial Sequence
  Description of Artificial Sequence: Synthetic oligonucleotide
  Sense strand starting at position 2945 of SEQ ID NO: 917161
gcaacucagggccauuauu

SEQ ID NO: 1213565 - RNA, 19 nt, Artificial Sequence
  Description of Artificial Sequence: Synthetic oligonucleotide
  Antisense strand to SEQ ID NO: 1213564
aauaauggcccugaguugc

SEQ ID NO: 1213566 - RNA, 19 nt, Artificial Sequence
  Description of Artificial Sequence: Synthetic oligonucleotide
  Sense strand starting at position 2958 of SEQ ID NO: 917161
auuauuaacgacugcuaau

SEQ ID NO: 1213567 - RNA, 19 nt, Artificial Sequence
  Description of Artificial Sequence: Synthetic oligonucleotide
  Antisense strand to SEQ ID NO: 1213566
auuagcagucguuaauaau

SEQ ID NO: 1213568 - RNA, 19 nt, Artificial Sequence
  Description of Artificial Sequence: Synthetic oligonucleotide
  Sense strand starting at position 2999 of SEQ ID NO: 917161
gaucucucuugguuuggga

SEQ ID NO: 1213569 - RNA, 19 nt, Artificial Sequence
  Description of Artificial Sequence: Synthetic oligonucleotide
  Antisense strand to SEQ ID NO: 1213568
ucccaaaccaagagagauc

SEQ ID NO: 1213570 - RNA, 19 nt, Artificial Sequence
  Description of Artificial Sequence: Synthetic oligonucleotide
  Sense strand starting at position 3394 of SEQ ID NO: 917161
cugucauuucuagggugcu

SEQ ID NO: 1213571 - RNA, 19 nt, Artificial Sequence
  Description of Artificial Sequence: Synthetic oligonucleotide
  Antisense strand to SEQ ID NO: 1213570
agcacccuagaaaugacag

SEQ ID NO: 1213572 - RNA, 19 nt, Artificial Sequence
  Description of Artificial Sequence: Synthetic oligonucleotide
  Sense strand starting at position 3533 of SEQ ID NO: 917161
ccugaaagcgaucagaacu

SEQ ID NO: 1213573 - RNA, 19 nt, Artificial Sequence
  Description of Artificial Sequence: Synthetic oligonucleotide
  Antisense strand to SEQ ID NO: 1213572
aguucugaucgcuuucagg

SEQ ID NO: 1213574 - RNA, 19 nt, Artificial Sequence
  Description of Artificial Sequence: Synthetic oligonucleotide
  Sense strand starting at position 3598 of SEQ ID NO: 917161
cguguuuguaaggaagaag

SEQ ID NO: 1213575 - RNA, 19 nt, Artificial Sequence
  Description of Artificial Sequence: Synthetic oligonucleotide
  Antisense strand to SEQ ID NO: 1213574
cuucuuccuuacaaacacg

SEQ ID NO: 1213576 - RNA, 19 nt, Artificial Sequence
  Description of Artificial Sequence: Synthetic oligonucleotide
  Sense strand starting at position 3897 of SEQ ID NO: 917162
ccuccucuuccuggagaca

SEQ ID NO: 1213577 - RNA, 19 nt, Artificial Sequence
  Description of Artificial Sequence: Synthetic oligonucleotide
  Antisense strand to SEQ ID NO: 1213576
ugucuccaggaagaggagg

SEQ ID NO: 1213578 - RNA, 19 nt, Artificial Sequence
  Description of Artificial Sequence: Synthetic oligonucleotide
  Sense strand starting at position 48 of SEQ ID NO: 917162
uguauaugaagcugaagaa

SEQ ID NO: 1213579 - RNA, 19 nt, Artificial Sequence
  Description of Artificial Sequence: Synthetic oligonucleotide
  Antisense strand to SEQ ID NO: 1213578
uucuucagcuucauauaca

SEQ ID NO: 1213580 - RNA, 19 nt, Artificial Sequence
  Description of Artificial Sequence: Synthetic oligonucleotide
  Sense strand starting at position 87 of SEQ ID NO: 917162
uuauaaauggcauauuggu

SEQ ID NO: 1213581 - RNA, 19 nt, Artificial Sequence
  Description of Artificial Sequence: Synthetic oligonucleotide
  Antisense strand to SEQ ID NO: 1213580
accaauaugccauuuauaa

SEQ ID NO: 1213582 - RNA, 19 nt, Artificial Sequence
  Description of Artificial Sequence: Synthetic oligonucleotide
  Sense strand starting at position 100 of SEQ ID NO: 917162
auuggucguuauccaggaa

SEQ ID NO: 1213583 - RNA, 19 nt, Artificial Sequence
  Description of Artificial Sequence: Synthetic oligonucleotide
  Antisense strand to SEQ ID NO: 1213582
uuccuggauaacgaccaau

SEQ ID NO: 1213584 - RNA, 19 nt, Artificial Sequence
  Description of Artificial Sequence: Synthetic oligonucleotide
  Sense strand starting at position 101 of SEQ ID NO: 917162
uuggucguuauccaggaaa

SEQ ID NO: 1213585 - RNA, 19 nt, Artificial Sequence
  Description of Artificial Sequence: Synthetic oligonucleotide
  Antisense strand to SEQ ID NO: 1213584
uuuccuggauaacgaccaa

SEQ ID NO: 1213586 - RNA, 19 nt, Artificial Sequence
  Description of Artificial Sequence: Synthetic oligonucleotide
  Sense strand starting at position 123 of SEQ ID NO: 917162
ggaguuguccugucugugu

SEQ ID NO: 1213587 - RNA, 19 nt, Artificial Sequence
  Description of Artificial Sequence: Synthetic oligonucleotide
  Antisense strand to SEQ ID NO: 1213586
acacagacaggacaacucc

SEQ ID NO: 1213588 - RNA, 19 nt, Artificial Sequence
  Description of Artificial Sequence: Synthetic oligonucleotide
  Sense strand starting at position 252 of SEQ ID NO: 917162
auaagucaguaugcugaaa

SEQ ID NO: 1213589 - RNA, 19 nt, Artificial Sequence
  Description of Artificial Sequence: Synthetic oligonucleotide
  Antisense strand to SEQ ID NO: 1213588
uuucagcauacugacuuau

SEQ ID NO: 1213590 - RNA, 19 nt, Artificial Sequence
  Description of Artificial Sequence: Synthetic oligonucleotide
  Sense strand starting at position 277 of SEQ ID NO: 917162
guuguaacccgagaccaau

SEQ ID NO: 1213591 - RNA, 19 nt, Artificial Sequence
  Description of Artificial Sequence: Synthetic oligonucleotide
  Antisense strand to SEQ ID NO: 1213590
auuggucucggguuacaac

SEQ ID NO: 1213592 - RNA, 19 nt, Artificial Sequence
  Description of Artificial Sequence: Synthetic oligonucleotide
  Sense strand starting at position 300 of SEQ ID NO: 917162
ucuauagaugcugagguaa

SEQ ID NO: 1213593 - RNA, 19 nt, Artificial Sequence
  Description of Artificial Sequence: Synthetic oligonucleotide
  Antisense strand to SEQ ID NO: 1213592
uuaccucagcaucuauaga

SEQ ID NO: 1213594 - RNA, 19 nt, Artificial Sequence
  Description of Artificial Sequence: Synthetic oligonucleotide
  Sense strand starting at position 322 of SEQ ID NO: 917162
gcugcaauuguaggacuaa

SEQ ID NO: 1213595 - RNA, 19 nt, Artificial Sequence
  Description of Artificial Sequence: Synthetic oligonucleotide
  Antisense strand to SEQ ID NO: 1213594
uuaguccuacaauugcagc

SEQ ID NO: 1213596 - RNA, 19 nt, Artificial Sequence
  Description of Artificial Sequence: Synthetic oligonucleotide
  Sense strand starting at position 414 of SEQ ID NO: 917162
cucgaagagcgacagauau

SEQ ID NO: 1213597 - RNA, 19 nt, Artificial Sequence
  Description of Artificial Sequence: Synthetic oligonucleotide
  Antisense strand to SEQ ID NO: 1213596
auaucugucgcucuucgag

SEQ ID NO: 1213598 - RNA, 19 nt, Artificial Sequence
  Description of Artificial Sequence: Synthetic oligonucleotide
  Sense strand starting at position 630 of SEQ ID NO: 917162
uuaagauuagcgcacuuua

SEQ ID NO: 1213599 - RNA, 19 nt, Artificial Sequence
  Description of Artificial Sequence: Synthetic oligonucleotide
  Antisense strand to SEQ ID NO: 1213598
uaaagugcgcuaaucuuaa

SEQ ID NO: 1213600 - RNA, 19 nt, Artificial Sequence
  Description of Artificial Sequence: Synthetic oligonucleotide
  Sense strand starting at position 640 of SEQ ID NO: 917162
cgcacuuuacuggauaucu

SEQ ID NO: 1213601 - RNA, 19 nt, Artificial Sequence
  Description of Artificial Sequence: Synthetic oligonucleotide
  Antisense strand to SEQ ID NO: 1213600
agauauccaguaaagugcg

SEQ ID NO: 1213602 - RNA, 19 nt, Artificial Sequence
  Description of Artificial Sequence: Synthetic oligonucleotide
  Sense strand starting at position 651 of SEQ ID NO: 917162
ggauaucuguuauuccuga

SEQ ID NO: 1213603 - RNA, 19 nt, Artificial Sequence
  Description of Artificial Sequence: Synthetic oligonucleotide
  Antisense strand to SEQ ID NO: 1213602
ucaggaauaacagauaucc

SEQ ID NO: 1213604 - RNA, 19 nt, Artificial Sequence
  Description of Artificial Sequence: Synthetic oligonucleotide
  Sense strand starting at position 1000 of SEQ ID NO: 917162
uaaugucagcaugaaguau

SEQ ID NO: 1213605 - RNA, 19 nt, Artificial Sequence
  Description of Artificial Sequence: Synthetic oligonucleotide
  Antisense strand to SEQ ID NO: 1213604
auacuucaugcugacauua

SEQ ID NO: 1213606 - RNA, 19 nt, Artificial Sequence
  Description of Artificial Sequence: Synthetic oligonucleotide
  Sense strand starting at position 1056 of SEQ ID NO: 917162
uacugaggucuugguaaag

SEQ ID NO: 1213607 - RNA, 19 nt, Artificial Sequence
  Description of Artificial Sequence: Synthetic oligonucleotide
  Antisense strand to SEQ ID NO: 1213606
cuuuaccaagaccucagua

SEQ ID NO: 1213608 - RNA, 19 nt, Artificial Sequence
  Description of Artificial Sequence: Synthetic oligonucleotide
  Sense strand starting at position 1279 of SEQ ID NO: 917162
cagaaagugcuauguaaac

SEQ ID NO: 1213609 - RNA, 19 nt, Artificial Sequence
  Description of Artificial Sequence: Synthetic oligonucleotide
  Antisense strand to SEQ ID NO: 1213608
guuuacauagcacuuucug

SEQ ID NO: 1213610 - RNA, 19 nt, Artificial Sequence
  Description of Artificial Sequence: Synthetic oligonucleotide
  Sense strand starting at position 1300 of SEQ ID NO: 917162
ucuuuaaagcaguauugaa

SEQ ID NO: 1213611 - RNA, 19 nt, Artificial Sequence
  Description of Artificial Sequence: Synthetic oligonucleotide
  Antisense strand to SEQ ID NO: 1213610
uucaauacugcuuuaaaga

SEQ ID NO: 1213612 - RNA, 19 nt, Artificial Sequence
  Description of Artificial Sequence: Synthetic oligonucleotide
  Sense strand starting at position 1379 of SEQ ID NO: 917162
ccacucuuagaccgugaga

SEQ ID NO: 1213613 - RNA, 19 nt, Artificial Sequence
  Description of Artificial Sequence: Synthetic oligonucleotide
  Antisense strand to SEQ ID NO: 1213612
ucucacggucuaagagugg

SEQ ID NO: 1213614 - RNA, 19 nt, Artificial Sequence
  Description of Artificial Sequence: Synthetic oligonucleotide
  Sense strand starting at position 1381 of SEQ ID NO: 917162
acucuuagaccgugagaag

SEQ ID NO: 1213615 - RNA, 19 nt, Artificial Sequence
  Description of Artificial Sequence: Synthetic oligonucleotide
  Antisense strand to SEQ ID NO: 1213614
cuucucacggucuaagagu

SEQ ID NO: 1213616 - RNA, 19 nt, Artificial Sequence
  Description of Artificial Sequence: Synthetic oligonucleotide
  Sense strand starting at position 1382 of SEQ ID NO: 917162
cucuuagaccgugagaagu

SEQ ID NO: 1213617 - RNA, 19 nt, Artificial Sequence
  Description of Artificial Sequence: Synthetic oligonucleotide
  Antisense strand to SEQ ID NO: 1213616
acuucucacggucuaagag

SEQ ID NO: 1213618 - RNA, 19 nt, Artificial Sequence
  Description of Artificial Sequence: Synthetic oligonucleotide
  Sense strand starting at position 1395 of SEQ ID NO: 917162
agaaguaacuaguuggucu

SEQ ID NO: 1213619 - RNA, 19 nt, Artificial Sequence
  Description of Artificial Sequence: Synthetic oligonucleotide
  Antisense strand to SEQ ID NO: 1213618
agaccaacuaguuacuucu

SEQ ID NO: 1213620 - RNA, 19 nt, Artificial Sequence
  Description of Artificial Sequence: Synthetic oligonucleotide
  Sense strand starting at position 1399 of SEQ ID NO: 917162
guaacuaguuggucuggga

SEQ ID NO: 1213621 - RNA, 19 nt, Artificial Sequence
  Description of Artificial Sequence: Synthetic oligonucleotide
  Antisense strand to SEQ ID NO: 1213620
ucccagaccaacuaguuac

SEQ ID NO: 1213622 - RNA, 19 nt, Artificial Sequence
  Description of Artificial Sequence: Synthetic oligonucleotide
  Sense strand starting at position 2479 of SEQ ID NO: 917162
accauuucguaagacgaaa

SEQ ID NO: 1213623 - RNA, 19 nt, Artificial Sequence
  Description of Artificial Sequence: Synthetic oligonucleotide
  Antisense strand to SEQ ID NO: 1213622
uuucgucuuacgaaauggu

SEQ ID NO: 1213624 - RNA, 19 nt, Artificial Sequence
  Description of Artificial Sequence: Synthetic oligonucleotide
  Sense strand starting at position 2572 of SEQ ID NO: 917162
gaguguguccauuagauuc

SEQ ID NO: 1213625 - RNA, 19 nt, Artificial Sequence
  Description of Artificial Sequence: Synthetic oligonucleotide
  Antisense strand to SEQ ID NO: 1213624
gaaucuaauggacacacuc

SEQ ID NO: 1213626 - RNA, 19 nt, Artificial Sequence
  Description of Artificial Sequence: Synthetic oligonucleotide
  Sense strand starting at position 2588 of SEQ ID NO: 917162
uucugaaacuaguuugaau

SEQ ID NO: 1213627 - RNA, 19 nt, Artificial Sequence
  Description of Artificial Sequence: Synthetic oligonucleotide
  Antisense strand to SEQ ID NO: 1213626
auucaaacuaguuucagaa

SEQ ID NO: 1213628 - RNA, 19 nt, Artificial Sequence
  Description of Artificial Sequence: Synthetic oligonucleotide
  Sense strand starting at position 2590 of SEQ ID NO: 917162
cugaaacuaguuugaauac

SEQ ID NO: 1213629 - RNA, 19 nt, Artificial Sequence
  Description of Artificial Sequence: Synthetic oligonucleotide
  Antisense strand to SEQ ID NO: 1213628
guauucaaacuaguuucag

SEQ ID NO: 1213630 - RNA, 19 nt, Artificial Sequence
  Description of Artificial Sequence: Synthetic oligonucleotide
  Sense strand starting at position 2603 of SEQ ID NO: 917162
gaauacugacagugcagaa

SEQ ID NO: 1213631 - RNA, 19 nt, Artificial Sequence
  Description of Artificial Sequence: Synthetic oligonucleotide
  Antisense strand to SEQ ID NO: 1213630
uucugcacugucaguauuc

SEQ ID NO: 1213632 - RNA, 19 nt, Artificial Sequence
  Description of Artificial Sequence: Synthetic oligonucleotide
  Sense strand starting at position 2664 of SEQ ID NO: 917162
cccuuuaaucuaggaaguu

SEQ ID NO: 1213633 - RNA, 19 nt, Artificial Sequence
  Description of Artificial Sequence: Synthetic oligonucleotide
  Antisense strand to SEQ ID NO: 1213632
aacuuccuagauuaaaggg

SEQ ID NO: 1213634 - RNA, 19 nt, Artificial Sequence
  Description of Artificial Sequence: Synthetic oligonucleotide
  Sense strand starting at position 2717 of SEQ ID NO: 917162
ggcuuccaugucugauuaa

SEQ ID NO: 1213635 - RNA, 19 nt, Artificial Sequence
  Description of Artificial Sequence: Synthetic oligonucleotide
  Antisense strand to SEQ ID NO: 1213634
uuaaucagacauggaagcc

SEQ ID NO: 1213636 - RNA, 19 nt, Artificial Sequence
  Description of Artificial Sequence: Synthetic oligonucleotide
  Sense strand starting at position 2776 of SEQ ID NO: 917162
ugccauuuauaaccguuau

SEQ ID NO: 1213637 - RNA, 19 nt, Artificial Sequence
  Description of Artificial Sequence: Synthetic oligonucleotide
  Antisense strand to SEQ ID NO: 1213636
auaacgguuauaaauggca

SEQ ID NO: 1213638 - RNA, 19 nt, Artificial Sequence
  Description of Artificial Sequence: Synthetic oligonucleotide
  Sense strand starting at position 3278 of SEQ ID NO: 917162
aagcuaaagcccgagacuu

SEQ ID NO: 1213639 - RNA, 19 nt, Artificial Sequence
  Description of Artificial Sequence: Synthetic oligonucleotide
  Antisense strand to SEQ ID NO: 1213638
aagucucgggcuuuagcuu

SEQ ID NO: 1213640 - RNA, 19 nt, Artificial Sequence
  Description of Artificial Sequence: Synthetic oligonucleotide
  Sense strand starting at position 3289 of SEQ ID NO: 917162
cgagacuuccgagaucaca

SEQ ID NO: 1213641 - RNA, 19 nt, Artificial Sequence
  Description of Artificial Sequence: Synthetic oligonucleotide
  Antisense strand to SEQ ID NO: 1213640
ugugaucucggaagucucg

SEQ ID NO: 1213642 - RNA, 19 nt, Artificial Sequence
  Description of Artificial Sequence: Synthetic oligonucleotide
  Sense strand starting at position 3410 of SEQ ID NO: 917162
aaauguguaucuuuaagga

SEQ ID NO: 1213643 - RNA, 19 nt, Artificial Sequence
  Description of Artificial Sequence: Synthetic oligonucleotide
  Antisense strand to SEQ ID NO: 1213642
uccuuaaagauacacauuu

SEQ ID NO: 1213644 - RNA, 19 nt, Artificial Sequence
  Description of Artificial Sequence: Synthetic oligonucleotide
  Sense strand starting at position 3420 of SEQ ID NO: 917162
cuuuaaggauagucgcaau

SEQ ID NO: 1213645 - RNA, 19 nt, Artificial Sequence
  Description of Artificial Sequence: Synthetic oligonucleotide
  Antisense strand to SEQ ID NO: 1213644
auugcgacuauccuuaaag

SEQ ID NO: 1213646 - RNA, 19 nt, Artificial Sequence
  Description of Artificial Sequence: Synthetic oligonucleotide
  Sense strand starting at position 3431 of SEQ ID NO: 917162
gucgcaauauccucuauuu

SEQ ID NO: 1213647 - RNA, 19 nt, Artificial Sequence
  Description of Artificial Sequence: Synthetic oligonucleotide
  Antisense strand to SEQ ID NO: 1213646
aaauagaggauauugcgac

SEQ ID NO: 1213648 - RNA, 19 nt, Artificial Sequence
  Description of Artificial Sequence: Synthetic oligonucleotide
  Sense strand starting at position 3573 of SEQ ID NO: 917162
gguuauaauguguaaguuu

SEQ ID NO: 1213649 - RNA, 19 nt, Artificial Sequence
  Description of Artificial Sequence: Synthetic oligonucleotide
  Antisense strand to SEQ ID NO: 1213648
aaacuuacacauuauaacc

SEQ ID NO: 1213650 - RNA, 19 nt, Artificial Sequence
  Description of Artificial Sequence: Synthetic oligonucleotide
  Sense strand starting at position 3832 of SEQ ID NO: 917162
ucuuuaugccaucauagga

SEQ ID NO: 1213651 - RNA, 19 nt, Artificial Sequence
  Description of Artificial Sequence: Synthetic oligonucleotide
  Antisense strand to SEQ ID NO: 1213650
uccuaugauggcauaaaga

SEQ ID NO: 1213652 - RNA, 19 nt, Artificial Sequence
  Description of Artificial Sequence: Synthetic oligonucleotide
  Sense strand starting at position 3863 of SEQ ID NO: 917162
cuccuaugucaugguuaag

SEQ ID NO: 1213653 - RNA, 19 nt, Artificial Sequence
  Description of Artificial Sequence: Synthetic oligonucleotide
  Antisense strand to SEQ ID NO: 1213652
cuuaaccaugacauaggag

SEQ ID NO: 1213654 - RNA, 19 nt, Artificial Sequence
  Description of Artificial Sequence: Synthetic oligonucleotide
  Sense strand starting at position 3866 of SEQ ID NO: 917162
cuaugucaugguuaagagu

SEQ ID NO: 1213655 - RNA, 19 nt, Artificial Sequence
  Description of Artificial Sequence: Synthetic oligonucleotide
  Antisense strand to SEQ ID NO: 1213654
acucuuaaccaugacauag

SEQ ID NO: 1213656 - RNA, 19 nt, Artificial Sequence
  Description of Artificial Sequence: Synthetic oligonucleotide
  Sense strand starting at position 3874 of SEQ ID NO: 917163
ugguuaagaguccaggauu

SEQ ID NO: 1213657 - RNA, 19 nt, Artificial Sequence
  Description of Artificial Sequence: Synthetic oligonucleotide
  Antisense strand to SEQ ID NO: 1213656
aauccuggacucuuaacca

SEQ ID NO: 1213658 - RNA, 19 nt, Artificial Sequence
  Description of Artificial Sequence: Synthetic oligonucleotide
  Sense strand starting at position 97 of SEQ ID NO: 917163
gguugaaagucagagagca

SEQ ID NO: 1213659 - RNA, 19 nt, Artificial Sequence
  Description of Artificial Sequence: Synthetic oligonucleotide
  Antisense strand to SEQ ID NO: 1213658
ugcucucugacuuucaacc

SEQ ID NO: 1213660 - RNA, 19 nt, Artificial Sequence
  Description of Artificial Sequence: Synthetic oligonucleotide
  Sense strand starting at position 222 of SEQ ID NO: 917163
aucgcuuaaauccgagaga

SEQ ID NO: 1213661 - RNA, 19 nt, Artificial Sequence
  Description of Artificial Sequence: Synthetic oligonucleotide
  Antisense strand to SEQ ID NO: 1213660
ucucucggauuuaagcgau

SEQ ID NO: 1213662 - RNA, 19 nt, Artificial Sequence
  Description of Artificial Sequence: Synthetic oligonucleotide
  Sense strand starting at position 296 of SEQ ID NO: 917163
gugaaacucuggcucauua

SEQ ID NO: 1213663 - RNA, 19 nt, Artificial Sequence
  Description of Artificial Sequence: Synthetic oligonucleotide
  Antisense strand to SEQ ID NO: 1213662
uaaugagccagaguuucac

SEQ ID NO: 1213664 - RNA, 19 nt, Artificial Sequence
  Description of Artificial Sequence: Synthetic oligonucleotide
  Sense strand starting at position 808 of SEQ ID NO: 917163
cagugcugguaaucucaau

SEQ ID NO: 1213665 - RNA, 19 nt, Artificial Sequence
  Description of Artificial Sequence: Synthetic oligonucleotide
  Antisense strand to SEQ ID NO: 1213664
auugagauuaccagcacug

SEQ ID NO: 1213666 - RNA, 19 nt, Artificial Sequence
  Description of Artificial Sequence: Synthetic oligonucleotide
  Sense strand starting at position 819 of SEQ ID NO: 917163
aucucaauucugugccuga

SEQ ID NO: 1213667 - RNA, 19 nt, Artificial Sequence
  Description of Artificial Sequence: Synthetic oligonucleotide
  Antisense strand to SEQ ID NO: 1213666
ucaggcacagaauugagau

SEQ ID NO: 1213668 - RNA, 19 nt, Artificial Sequence
  Description of Artificial Sequence: Synthetic oligonucleotide
  Sense strand starting at position 902 of SEQ ID NO: 917163
ucguuuauacuguauaaug

SEQ ID NO: 1213669 - RNA, 19 nt, Artificial Sequence
  Description of Artificial Sequence: Synthetic oligonucleotide
  Antisense strand to SEQ ID NO: 1213668
cauuauacaguauaaacga

SEQ ID NO: 1213670 - RNA, 19 nt, Artificial Sequence
  Description of Artificial Sequence: Synthetic oligonucleotide
  Sense strand starting at position 910 of SEQ ID NO: 917163
acuguauaauguguucguu

SEQ ID NO: 1213671 - RNA, 19 nt, Artificial Sequence
  Description of Artificial Sequence: Synthetic oligonucleotide
  Antisense strand to SEQ ID NO: 1213670
aacgaacacauuauacagu

SEQ ID NO: 1213672 - RNA, 19 nt, Artificial Sequence
  Description of Artificial Sequence: Synthetic oligonucleotide
  Sense strand starting at position 911 of SEQ ID NO: 917163
cuguauaauguguucguuu

SEQ ID NO: 1213673 - RNA, 19 nt, Artificial Sequence
  Description of Artificial Sequence: Synthetic oligonucleotide
  Antisense strand to SEQ ID NO: 1213672
aaacgaacacauuauacag

SEQ ID NO: 1213674 - RNA, 19 nt, Artificial Sequence
  Description of Artificial Sequence: Synthetic oligonucleotide
  Sense strand starting at position 912 of SEQ ID NO: 917163
uguauaauguguucguuua

SEQ ID NO: 1213675 - RNA, 19 nt, Artificial Sequence
  Description of Artificial Sequence: Synthetic oligonucleotide
  Antisense strand to SEQ ID NO: 1213674
uaaacgaacacauuauaca

SEQ ID NO: 1213676 - RNA, 19 nt, Artificial Sequence
  Description of Artificial Sequence: Synthetic oligonucleotide
  Sense strand starting at position 913 of SEQ ID NO: 917163
guauaauguguucguuuau

SEQ ID NO: 1213677 - RNA, 19 nt, Artificial Sequence
  Description of Artificial Sequence: Synthetic oligonucleotide
  Antisense strand to SEQ ID NO: 1213676
auaaacgaacacauuauac

SEQ ID NO: 1213678 - RNA, 19 nt, Artificial Sequence
  Description of Artificial Sequence: Synthetic oligonucleotide
  Sense strand starting at position 1018 of SEQ ID NO: 917163
uccacauguugauagacau

SEQ ID NO: 1213679 - RNA, 19 nt, Artificial Sequence
  Description of Artificial Sequence: Synthetic oligonucleotide
  Antisense strand to SEQ ID NO: 1213678
augucuaucaacaugugga

SEQ ID NO: 1213680 - RNA, 19 nt, Artificial Sequence
  Description of Artificial Sequence: Synthetic oligonucleotide
  Sense strand starting at position 1342 of SEQ ID NO: 917163
ugucucucuucucuggaga

SEQ ID NO: 1213681 - RNA, 19 nt, Artificial Sequence
  Description of Artificial Sequence: Synthetic oligonucleotide
  Antisense strand to SEQ ID NO: 1213680
ucuccagagaagagagaca

SEQ ID NO: 1213682 - RNA, 19 nt, Artificial Sequence
  Description of Artificial Sequence: Synthetic oligonucleotide
  Sense strand starting at position 1343 of SEQ ID NO: 917163
gucucucuucucuggagaa

SEQ ID NO: 1213683 - RNA, 19 nt, Artificial Sequence
  Description of Artificial Sequence: Synthetic oligonucleotide
  Antisense strand to SEQ ID NO: 1213682
uucuccagagaagagagac

SEQ ID NO: 1213684 - RNA, 19 nt, Artificial Sequence
  Description of Artificial Sequence: Synthetic oligonucleotide
  Sense strand starting at position 1415 of SEQ ID NO: 917163
aguugcaucucuucuugua

SEQ ID NO: 1213685 - RNA, 19 nt, Artificial Sequence
  Description of Artificial Sequence: Synthetic oligonucleotide
  Antisense strand to SEQ ID NO: 1213684
uacaagaagagaugcaacu

SEQ ID NO: 1213686 - RNA, 19 nt, Artificial Sequence
  Description of Artificial Sequence: Synthetic oligonucleotide
  Sense strand starting at position 1417 of SEQ ID NO: 917163
uugcaucucuucuuguauu

SEQ ID NO: 1213687 - RNA, 19 nt, Artificial Sequence
  Description of Artificial Sequence: Synthetic oligonucleotide
  Antisense strand to SEQ ID NO: 1213686
aauacaagaagagaugcaa

SEQ ID NO: 1213688 - RNA, 19 nt, Artificial Sequence
  Description of Artificial Sequence: Synthetic oligonucleotide
  Sense strand starting at position 1427 of SEQ ID NO: 917163
ucuuguauucuagacauua

SEQ ID NO: 1213689 - RNA, 19 nt, Artificial Sequence
  Description of Artificial Sequence: Synthetic oligonucleotide
  Antisense strand to SEQ ID NO: 1213688
uaaugucuagaauacaaga

SEQ ID NO: 1213690 - RNA, 19 nt, Artificial Sequence
  Description of Artificial Sequence: Synthetic oligonucleotide
  Sense strand starting at position 2326 of SEQ ID NO: 917163
uuugauuguugugugaaug

SEQ ID NO: 1213691 - RNA, 19 nt, Artificial Sequence
  Description of Artificial Sequence: Synthetic oligonucleotide
  Antisense strand to SEQ ID NO: 1213690
cauucacacaacaaucaaa

SEQ ID NO: 1213692 - RNA, 19 nt, Artificial Sequence
  Description of Artificial Sequence: Synthetic oligonucleotide
  Sense strand starting at position 2327 of SEQ ID NO: 917163
uugauuguugugugaauga

SEQ ID NO: 1213693 - RNA, 19 nt, Artificial Sequence
  Description of Artificial Sequence: Synthetic oligonucleotide
  Antisense strand to SEQ ID NO: 1213692
ucauucacacaacaaucaa

SEQ ID NO: 1213694 - RNA, 19 nt, Artificial Sequence
  Description of Artificial Sequence: Synthetic oligonucleotide
  Sense strand starting at position 2376 of SEQ ID NO: 917163
cccauacauucucagggau

SEQ ID NO: 1213695 - RNA, 19 nt, Artificial Sequence
  Description of Artificial Sequence: Synthetic oligonucleotide
  Antisense strand to SEQ ID NO: 1213694
aucccugagaauguauggg

SEQ ID NO: 1213696 - RNA, 19 nt, Artificial Sequence
  Description of Artificial Sequence: Synthetic oligonucleotide
  Sense strand starting at position 2379 of SEQ ID NO: 917163
auacauucucagggauauu

SEQ ID NO: 1213697 - RNA, 19 nt, Artificial Sequence
  Description of Artificial Sequence: Synthetic oligonucleotide
  Antisense strand to SEQ ID NO: 1213696
aauaucccugagaauguau

SEQ ID NO: 1213698 - RNA, 19 nt, Artificial Sequence
  Description of Artificial Sequence: Synthetic oligonucleotide
  Sense strand starting at position 2389 of SEQ ID NO: 917163
agggauauuacuggcauaa

SEQ ID NO: 1213699 - RNA, 19 nt, Artificial Sequence
  Description of Artificial Sequence: Synthetic oligonucleotide
  Antisense strand to SEQ ID NO: 1213698
uuaugccaguaauaucccu

SEQ ID NO: 1213700 - RNA, 19 nt, Artificial Sequence
  Description of Artificial Sequence: Synthetic oligonucleotide
  Sense strand starting at position 2391 of SEQ ID NO: 917163
ggauauuacuggcauaaua

SEQ ID NO: 1213701 - RNA, 19 nt, Artificial Sequence
  Description of Artificial Sequence: Synthetic oligonucleotide
  Antisense strand to SEQ ID NO: 1213700
uauuaugccaguaauaucc

SEQ ID NO: 1213702 - RNA, 19 nt, Artificial Sequence
  Description of Artificial Sequence: Synthetic oligonucleotide
  Sense strand starting at position 2431 of SEQ ID NO: 917163
aaaguuguuggaugacagu

SEQ ID NO: 1213703 - RNA, 19 nt, Artificial Sequence
  Description of Artificial Sequence: Synthetic oligonucleotide
  Antisense strand to SEQ ID NO: 1213702
acugucauccaacaacuuu

SEQ ID NO: 1213704 - RNA, 19 nt, Artificial Sequence
  Description of Artificial Sequence: Synthetic oligonucleotide
  Sense strand starting at position 2488 of SEQ ID NO: 917163
ucccgauucccagaaguua

SEQ ID NO: 1213705 - RNA, 19 nt, Artificial Sequence
  Description of Artificial Sequence: Synthetic oligonucleotide
  Antisense strand to SEQ ID NO: 1213704
uaacuucugggaaucggga

SEQ ID NO: 1213706 - RNA, 19 nt, Artificial Sequence
  Description of Artificial Sequence: Synthetic oligonucleotide
  Sense strand starting at position 2500 of SEQ ID NO: 917163
gaaguuaucuucuucguuu

SEQ ID NO: 1213707 - RNA, 19 nt, Artificial Sequence
  Description of Artificial Sequence: Synthetic oligonucleotide
  Antisense strand to SEQ ID NO: 1213706
aaacgaagaagauaacuuc

SEQ ID NO: 1213708 - RNA, 19 nt, Artificial Sequence
  Description of Artificial Sequence: Synthetic oligonucleotide
  Sense strand starting at position 2587 of SEQ ID NO: 917163
gccaucagucuguaugcuu

SEQ ID NO: 1213709 - RNA, 19 nt, Artificial Sequence
  Description of Artificial Sequence: Synthetic oligonucleotide
  Antisense strand to SEQ ID NO: 1213708
aagcauacagacugauggc

SEQ ID NO: 1213710 - RNA, 19 nt, Artificial Sequence
  Description of Artificial Sequence: Synthetic oligonucleotide
  Sense strand starting at position 2592 of SEQ ID NO: 917163
cagucuguaugcuuugaaa

SEQ ID NO: 1213711 - RNA, 19 nt, Artificial Sequence
  Description of Artificial Sequence: Synthetic oligonucleotide
  Antisense strand to SEQ ID NO: 1213710
uuucaaagcauacagacug

SEQ ID NO: 1213712 - RNA, 19 nt, Artificial Sequence
  Description of Artificial Sequence: Synthetic oligonucleotide
  Sense strand starting at position 2594 of SEQ ID NO: 917163
gucuguaugcuuugaaaga

SEQ ID NO: 1213713 - RNA, 19 nt, Artificial Sequence
  Description of Artificial Sequence: Synthetic oligonucleotide
  Antisense strand to SEQ ID NO: 1213712
ucuuucaaagcauacagac

SEQ ID NO: 1213714 - RNA, 19 nt, Artificial Sequence
  Description of Artificial Sequence: Synthetic oligonucleotide
  Sense strand starting at position 2900 of SEQ ID NO: 917163
gcaggagaaucccauagaa

SEQ ID NO: 1213715 - RNA, 19 nt, Artificial Sequence
  Description of Artificial Sequence: Synthetic oligonucleotide
  Antisense strand to SEQ ID NO: 1213714
uucuaugggauucuccugc

SEQ ID NO: 1213716 - RNA, 19 nt, Artificial Sequence
  Description of Artificial Sequence: Synthetic oligonucleotide
  Sense strand starting at position 3193 of SEQ ID NO: 917163
cucugagucugacuacuca

SEQ ID NO: 1213717 - RNA, 19 nt, Artificial Sequence
  Description of Artificial Sequence: Synthetic oligonucleotide
  Antisense strand to SEQ ID NO: 1213716
ugaguagucagacucagag

SEQ ID NO: 1213718 - RNA, 19 nt, Artificial Sequence
  Description of Artificial Sequence: Synthetic oligonucleotide
  Sense strand starting at position 3197 of SEQ ID NO: 917163
gagucugacuacucauaag

SEQ ID NO: 1213719 - RNA, 19 nt, Artificial Sequence
  Description of Artificial Sequence: Synthetic oligonucleotide
  Antisense strand to SEQ ID NO: 1213718
cuuaugaguagucagacuc

SEQ ID NO: 1213720 - RNA, 19 nt, Artificial Sequence
  Description of Artificial Sequence: Synthetic oligonucleotide
  Sense strand starting at position 3200 of SEQ ID NO: 917163
ucugacuacucauaagagu

SEQ ID NO: 1213721 - RNA, 19 nt, Artificial Sequence
  Description of Artificial Sequence: Synthetic oligonucleotide
  Antisense strand to SEQ ID NO: 1213720
acucuuaugaguagucaga

SEQ ID NO: 1213722 - RNA, 19 nt, Artificial Sequence
  Description of Artificial Sequence: Synthetic oligonucleotide
  Sense strand starting at position 3206 of SEQ ID NO: 917163
uacucauaagaguggaauc

SEQ ID NO: 1213723 - RNA, 19 nt, Artificial Sequence
  Description of Artificial Sequence: Synthetic oligonucleotide
  Antisense strand to SEQ ID NO: 1213722
gauuccacucuuaugagua

SEQ ID NO: 1213724 - RNA, 19 nt, Artificial Sequence
  Description of Artificial Sequence: Synthetic oligonucleotide
  Sense strand starting at position 3230 of SEQ ID NO: 917163
guauuugucuugugacuga

SEQ ID NO: 1213725 - RNA, 19 nt, Artificial Sequence
  Description of Artificial Sequence: Synthetic oligonucleotide
  Antisense strand to SEQ ID NO: 1213724
ucagucacaagacaaauac

SEQ ID NO: 1213726 - RNA, 19 nt, Artificial Sequence
  Description of Artificial Sequence: Synthetic oligonucleotide
  Sense strand starting at position 3234 of SEQ ID NO: 917163
uugucuugugacugacuua

SEQ ID NO: 1213727 - RNA, 19 nt, Artificial Sequence
  Description of Artificial Sequence: Synthetic oligonucleotide
  Antisense strand to SEQ ID NO: 1213726
uaagucagucacaagacaa

SEQ ID NO: 1213728 - RNA, 19 nt, Artificial Sequence
  Description of Artificial Sequence: Synthetic oligonucleotide
  Sense strand starting at position 3291 of SEQ ID NO: 917163
guagcacauuguggaauuu

SEQ ID NO: 1213729 - RNA, 19 nt, Artificial Sequence
  Description of Artificial Sequence: Synthetic oligonucleotide
  Antisense strand to SEQ ID NO: 1213728
aaauuccacaaugugcuac

SEQ ID NO: 1213730 - RNA, 19 nt, Artificial Sequence
  Description of Artificial Sequence: Synthetic oligonucleotide
  Sense strand starting at position 3416 of SEQ ID NO: 917163
ugugaauaaugcuuugaca

SEQ ID NO: 1213731 - RNA, 19 nt, Artificial Sequence
  Description of Artificial Sequence: Synthetic oligonucleotide
  Antisense strand to SEQ ID NO: 1213730
ugucaaagcauuauucaca

SEQ ID NO: 1213732 - RNA, 19 nt, Artificial Sequence
  Description of Artificial Sequence: Synthetic oligonucleotide
  Sense strand starting at position 3418 of SEQ ID NO: 917163
ugaauaaugcuuugacauu

SEQ ID NO: 1213733 - RNA, 19 nt, Artificial Sequence
  Description of Artificial Sequence: Synthetic oligonucleotide
  Antisense strand to SEQ ID NO: 1213732
aaugucaaagcauuauuca

SEQ ID NO: 1213734 - RNA, 19 nt, Artificial Sequence
  Description of Artificial Sequence: Synthetic oligonucleotide
  Sense strand starting at position 3674 of SEQ ID NO: 917163
uugcuauauuguguuuaca

SEQ ID NO: 1213735 - RNA, 19 nt, Artificial Sequence
  Description of Artificial Sequence: Synthetic oligonucleotide
  Antisense strand to SEQ ID NO: 1213734
uguaaacacaauauagcaa

SEQ ID NO: 1213736 - RNA, 19 nt, Artificial Sequence
  Description of Artificial Sequence: Synthetic oligonucleotide
  Sense strand starting at position 3676 of SEQ ID NO: 917163
gcuauauuguguuuacauu

SEQ ID NO: 1213737 - RNA, 19 nt, Artificial Sequence
  Description of Artificial Sequence: Synthetic oligonucleotide
  Antisense strand to SEQ ID NO: 1213736
aauguaaacacaauauagc

SEQ ID NO: 1213738 - RNA, 19 nt, Artificial Sequence
  Description of Artificial Sequence: Synthetic oligonucleotide
  Sense strand starting at position 3676 of SEQ ID NO: 917164
gcuauauuguguuuacauu

SEQ ID NO: 1213739 - RNA, 19 nt, Artificial Sequence
  Description of Artificial Sequence: Synthetic oligonucleotide
  Antisense strand to SEQ ID NO: 1213738
aauguaaacacaauauagc

SEQ ID NO: 1213740 - RNA, 19 nt, Artificial Sequence
  Description of Artificial Sequence: Synthetic oligonucleotide
  Sense strand starting at position 65 of SEQ ID NO: 917164
uguaaacaguaaguugaua

SEQ ID NO: 1213741 - RNA, 19 nt, Artificial Sequence
  Description of Artificial Sequence: Synthetic oligonucleotide
  Antisense strand to SEQ ID NO: 1213740
uaucaacuuacuguuuaca

SEQ ID NO: 1213742 - RNA, 19 nt, Artificial Sequence
  Description of Artificial Sequence: Synthetic oligonucleotide
  Sense strand starting at position 122 of SEQ ID NO: 917164
uuucucuuagacugugaau

SEQ ID NO: 1213743 - RNA, 19 nt, Artificial Sequence
  Description of Artificial Sequence: Synthetic oligonucleotide
  Antisense strand to SEQ ID NO: 1213742
auucacagucuaagagaaa

SEQ ID NO: 1213744 - RNA, 19 nt, Artificial Sequence
  Description of Artificial Sequence: Synthetic oligonucleotide
  Sense strand starting at position 124 of SEQ ID NO: 917164
ucucuuagacugugaauua

SEQ ID NO: 1213745 - RNA, 19 nt, Artificial Sequence
  Description of Artificial Sequence: Synthetic oligonucleotide
  Antisense strand to SEQ ID NO: 1213744
uaauucacagucuaagaga

SEQ ID NO: 1213746 - RNA, 19 nt, Artificial Sequence
  Description of Artificial Sequence: Synthetic oligonucleotide
  Sense strand starting at position 325 of SEQ ID NO: 917164
uagucagucccagguauuu

SEQ ID NO: 1213747 - RNA, 19 nt, Artificial Sequence
  Description of Artificial Sequence: Synthetic oligonucleotide
  Antisense strand to SEQ ID NO: 1213746
aaauaccugggacugacua

SEQ ID NO: 1213748 - RNA, 19 nt, Artificial Sequence
  Description of Artificial Sequence: Synthetic oligonucleotide
  Sense strand starting at position 555 of SEQ ID NO: 917164
ggaaauguccuguaacugu

SEQ ID NO: 1213749 - RNA, 19 nt, Artificial Sequence
  Description of Artificial Sequence: Synthetic oligonucleotide
  Antisense strand to SEQ ID NO: 1213748
acaguuacaggacauuucc

SEQ ID NO: 1213750 - RNA, 19 nt, Artificial Sequence
  Description of Artificial Sequence: Synthetic oligonucleotide
  Sense strand starting at position 672 of SEQ ID NO: 917164
acagauauggcuuacuuua

SEQ ID NO: 1213751 - RNA, 19 nt, Artificial Sequence
  Description of Artificial Sequence: Synthetic oligonucleotide
  Antisense strand to SEQ ID NO: 1213750
uaaaguaagccauaucugu

SEQ ID NO: 1213752 - RNA, 19 nt, Artificial Sequence
  Description of Artificial Sequence: Synthetic oligonucleotide
  Sense strand starting at position 674 of SEQ ID NO: 917164
agauauggcuuacuuuaca

SEQ ID NO: 1213753 - RNA, 19 nt, Artificial Sequence
  Description of Artificial Sequence: Synthetic oligonucleotide
  Antisense strand to SEQ ID NO: 1213752
uguaaaguaagccauaucu

SEQ ID NO: 1213754 - RNA, 19 nt, Artificial Sequence
  Description of Artificial Sequence: Synthetic oligonucleotide
  Sense strand starting at position 742 of SEQ ID NO: 917164
acuugaccuuaccuggaua

SEQ ID NO: 1213755 - RNA, 19 nt, Artificial Sequence
  Description of Artificial Sequence: Synthetic oligonucleotide
  Antisense strand to SEQ ID NO: 1213754
uauccagguaaggucaagu

SEQ ID NO: 1213756 - RNA, 19 nt, Artificial Sequence
  Description of Artificial Sequence: Synthetic oligonucleotide
  Sense strand starting at position 858 of SEQ ID NO: 917164
gcuacaagucaauauuagu

SEQ ID NO: 1213757 - RNA, 19 nt, Artificial Sequence
  Description of Artificial Sequence: Synthetic oligonucleotide
  Antisense strand to SEQ ID NO: 1213756
acuaauauugacuuguagc

SEQ ID NO: 1213758 - RNA, 19 nt, Artificial Sequence
  Description of Artificial Sequence: Synthetic oligonucleotide
  Sense strand starting at position 882 of SEQ ID NO: 917164
caucgauaacggcaaauaa

SEQ ID NO: 1213759 - RNA, 19 nt, Artificial Sequence
  Description of Artificial Sequence: Synthetic oligonucleotide
  Antisense strand to SEQ ID NO: 1213758
uuauuugccguuaucgaug

SEQ ID NO: 1213760 - RNA, 19 nt, Artificial Sequence
  Description of Artificial Sequence: Synthetic oligonucleotide
  Sense strand starting at position 916 of SEQ ID NO: 917164
ugaagaguuuacuuccaaa

SEQ ID NO: 1213761 - RNA, 19 nt, Artificial Sequence
  Description of Artificial Sequence: Synthetic oligonucleotide
  Antisense strand to SEQ ID NO: 1213760
uuuggaaguaaacucuuca

SEQ ID NO: 1213762 - RNA, 19 nt, Artificial Sequence
  Description of Artificial Sequence: Synthetic oligonucleotide
  Sense strand starting at position 1118 of SEQ ID NO: 917164
cuagccaagcuuuaagaaa

SEQ ID NO: 1213763 - RNA, 19 nt, Artificial Sequence
  Description of Artificial Sequence: Synthetic oligonucleotide
  Antisense strand to SEQ ID NO: 1213762
uuucuuaaagcuuggcuag

SEQ ID NO: 1213764 - RNA, 19 nt, Artificial Sequence
  Description of Artificial Sequence: Synthetic oligonucleotide
  Sense strand starting at position 1153 of SEQ ID NO: 917164
aggcacuagacucgaaagu

SEQ ID NO: 1213765 - RNA, 19 nt, Artificial Sequence
  Description of Artificial Sequence: Synthetic oligonucleotide
  Antisense strand to SEQ ID NO: 1213764
acuuucgagucuagugccu

SEQ ID NO: 1213766 - RNA, 19 nt, Artificial Sequence
  Description of Artificial Sequence: Synthetic oligonucleotide
  Sense strand starting at position 1154 of SEQ ID NO: 917164
ggcacuagacucgaaaguu

SEQ ID NO: 1213767 - RNA, 19 nt, Artificial Sequence
  Description of Artificial Sequence: Synthetic oligonucleotide
  Antisense strand to SEQ ID NO: 1213766
aacuuucgagucuagugcc

SEQ ID NO: 1213768 - RNA, 19 nt, Artificial Sequence
  Description of Artificial Sequence: Synthetic oligonucleotide
  Sense strand starting at position 1162 of SEQ ID NO: 917164
acucgaaaguucuaauuua

SEQ ID NO: 1213769 - RNA, 19 nt, Artificial Sequence
  Description of Artificial Sequence: Synthetic oligonucleotide
  Antisense strand to SEQ ID NO: 1213768
uaaauuagaacuuucgagu

SEQ ID NO: 1213770 - RNA, 19 nt, Artificial Sequence
  Description of Artificial Sequence: Synthetic oligonucleotide
  Sense strand starting at position 1178 of SEQ ID NO: 917164
uuaccagaacuggguuaga

SEQ ID NO: 1213771 - RNA, 19 nt, Artificial Sequence
  Description of Artificial Sequence: Synthetic oligonucleotide
  Antisense strand to SEQ ID NO: 1213770
ucuaacccaguucugguaa

SEQ ID NO: 1213772 - RNA, 19 nt, Artificial Sequence
  Description of Artificial Sequence: Synthetic oligonucleotide
  Sense strand starting at position 2117 of SEQ ID NO: 917164
gcaggacuagguugacaaa

SEQ ID NO: 1213773 - RNA, 19 nt, Artificial Sequence
  Description of Artificial Sequence: Synthetic oligonucleotide
  Antisense strand to SEQ ID NO: 1213772
uuugucaaccuaguccugc

SEQ ID NO: 1213774 - RNA, 19 nt, Artificial Sequence
  Description of Artificial Sequence: Synthetic oligonucleotide
  Sense strand starting at position 2164 of SEQ ID NO: 917164
cucacaguccuuggaggaa

SEQ ID NO: 1213775 - RNA, 19 nt, Artificial Sequence
  Description of Artificial Sequence: Synthetic oligonucleotide
  Antisense strand to SEQ ID NO: 1213774
uuccuccaaggacugugag

SEQ ID NO: 1213776 - RNA, 19 nt, Artificial Sequence
  Description of Artificial Sequence: Synthetic oligonucleotide
  Sense strand starting at position 2573 of SEQ ID NO: 917164
gcauuuguuacagacguuu

SEQ ID NO: 1213777 - RNA, 19 nt, Artificial Sequence
  Description of Artificial Sequence: Synthetic oligonucleotide
  Antisense strand to SEQ ID NO: 1213776
aaacgucuguaacaaaugc

SEQ ID NO: 1213778 - RNA, 19 nt, Artificial Sequence
  Description of Artificial Sequence: Synthetic oligonucleotide
  Sense strand starting at position 2592 of SEQ ID NO: 917164
uguguuugugugguuaagu

SEQ ID NO: 1213779 - RNA, 19 nt, Artificial Sequence
  Description of Artificial Sequence: Synthetic oligonucleotide
  Antisense strand to SEQ ID NO: 1213778
acuuaaccacacaaacaca

SEQ ID NO: 1213780 - RNA, 19 nt, Artificial Sequence
  Description of Artificial Sequence: Synthetic oligonucleotide
  Sense strand starting at position 2605 of SEQ ID NO: 917164
uuaagugugccgccauaau

SEQ ID NO: 1213781 - RNA, 19 nt, Artificial Sequence
  Description of Artificial Sequence: Synthetic oligonucleotide
  Antisense strand to SEQ ID NO: 1213780
auuauggcggcacacuuaa

SEQ ID NO: 1213782 - RNA, 19 nt, Artificial Sequence
  Description of Artificial Sequence: Synthetic oligonucleotide
  Sense strand starting at position 2694 of SEQ ID NO: 917164
gaaacaagucagggcuaga

SEQ ID NO: 1213783 - RNA, 19 nt, Artificial Sequence
  Description of Artificial Sequence: Synthetic oligonucleotide
  Antisense strand to SEQ ID NO: 1213782
ucuagcccugacuuguuuc

SEQ ID NO: 1213784 - RNA, 19 nt, Artificial Sequence
  Description of Artificial Sequence: Synthetic oligonucleotide
  Sense strand starting at position 2795 of SEQ ID NO: 917164
gccugaucacugcaguaag

SEQ ID NO: 1213785 - RNA, 19 nt, Artificial Sequence
  Description of Artificial Sequence: Synthetic oligonucleotide
  Antisense strand to SEQ ID NO: 1213784
cuuacugcagugaucaggc

SEQ ID NO: 1213786 - RNA, 19 nt, Artificial Sequence
  Description of Artificial Sequence: Synthetic oligonucleotide
  Sense strand starting at position 2975 of SEQ ID NO: 917164
uaugguagcgucuugcuaa

SEQ ID NO: 1213787 - RNA, 19 nt, Artificial Sequence
  Description of Artificial Sequence: Synthetic oligonucleotide
  Antisense strand to SEQ ID NO: 1213786
uuagcaagacgcuaccaua

SEQ ID NO: 1213788 - RNA, 19 nt, Artificial Sequence
  Description of Artificial Sequence: Synthetic oligonucleotide
  Sense strand starting at position 2983 of SEQ ID NO: 917164
cgucuugcuaaugaggaau

SEQ ID NO: 1213789 - RNA, 19 nt, Artificial Sequence
  Description of Artificial Sequence: Synthetic oligonucleotide
  Antisense strand to SEQ ID NO: 1213788
auuccucauuagcaagacg

SEQ ID NO: 1213790 - RNA, 19 nt, Artificial Sequence
  Description of Artificial Sequence: Synthetic oligonucleotide
  Sense strand starting at position 3050 of SEQ ID NO: 917164
uuaguuuaacauuguccau

SEQ ID NO: 1213791 - RNA, 19 nt, Artificial Sequence
  Description of Artificial Sequence: Synthetic oligonucleotide
  Antisense strand to SEQ ID NO: 1213790
auggacaauguuaaacuaa

SEQ ID NO: 1213792 - RNA, 19 nt, Artificial Sequence
  Description of Artificial Sequence: Synthetic oligonucleotide
  Sense strand starting at position 3052 of SEQ ID NO: 917164
aguuuaacauuguccauca

SEQ ID NO: 1213793 - RNA, 19 nt, Artificial Sequence
  Description of Artificial Sequence: Synthetic oligonucleotide
  Antisense strand to SEQ ID NO: 1213792
ugauggacaauguuaaacu

SEQ ID NO: 1213794 - RNA, 19 nt, Artificial Sequence
  Description of Artificial Sequence: Synthetic oligonucleotide
  Sense strand starting at position 3080 of SEQ ID NO: 917164
agauauaacuugcuguuua

SEQ ID NO: 1213795 - RNA, 19 nt, Artificial Sequence
  Description of Artificial Sequence: Synthetic oligonucleotide
  Antisense strand to SEQ ID NO: 1213794
uaaacagcaaguuauaucu

SEQ ID NO: 1213796 - RNA, 19 nt, Artificial Sequence
  Description of Artificial Sequence: Synthetic oligonucleotide
  Sense strand starting at position 3096 of SEQ ID NO: 917164
uuaaauacgucugucauua

SEQ ID NO: 1213797 - RNA, 19 nt, Artificial Sequence
  Description of Artificial Sequence: Synthetic oligonucleotide
  Antisense strand to SEQ ID NO: 1213796
uaaugacagacguauuuaa

SEQ ID NO: 1213798 - RNA, 19 nt, Artificial Sequence
  Description of Artificial Sequence: Synthetic oligonucleotide
  Sense strand starting at position 3106 of SEQ ID NO: 917164
cugucauuauuguugauua

SEQ ID NO: 1213799 - RNA, 19 nt, Artificial Sequence
  Description of Artificial Sequence: Synthetic oligonucleotide
  Antisense strand to SEQ ID NO: 1213798
uaaucaacaauaaugacag

SEQ ID NO: 1213800 - RNA, 19 nt, Artificial Sequence
  Description of Artificial Sequence: Synthetic oligonucleotide
  Sense strand starting at position 3159 of SEQ ID NO: 917164
agggauuucuauuaaguga

SEQ ID NO: 1213801 - RNA, 19 nt, Artificial Sequence
  Description of Artificial Sequence: Synthetic oligonucleotide
  Antisense strand to SEQ ID NO: 1213800
ucacuuaauagaaaucccu

SEQ ID NO: 1213802 - RNA, 19 nt, Artificial Sequence
  Description of Artificial Sequence: Synthetic oligonucleotide
  Sense strand starting at position 3190 of SEQ ID NO: 917164
gcguuaauaagugacucaa

SEQ ID NO: 1213803 - RNA, 19 nt, Artificial Sequence
  Description of Artificial Sequence: Synthetic oligonucleotide
  Antisense strand to SEQ ID NO: 1213802
uugagucacuuauuaacgc

SEQ ID NO: 1213804 - RNA, 19 nt, Artificial Sequence
  Description of Artificial Sequence: Synthetic oligonucleotide
  Sense strand starting at position 3394 of SEQ ID NO: 917164
ccuugaaguaagugaaaug

SEQ ID NO: 1213805 - RNA, 19 nt, Artificial Sequence
  Description of Artificial Sequence: Synthetic oligonucleotide
  Antisense strand to SEQ ID NO: 1213804
cauuucacuuacuucaagg

SEQ ID NO: 1213806 - RNA, 19 nt, Artificial Sequence
  Description of Artificial Sequence: Synthetic oligonucleotide
  Sense strand starting at position 3426 of SEQ ID NO: 917164
gguagugguugggugacau

SEQ ID NO: 1213807 - RNA, 19 nt, Artificial Sequence
  Description of Artificial Sequence: Synthetic oligonucleotide
  Antisense strand to SEQ ID NO: 1213806
augucacccaaccacuacc

SEQ ID NO: 1213808 - RNA, 19 nt, Artificial Sequence
  Description of Artificial Sequence: Synthetic oligonucleotide
  Sense strand starting at position 3453 of SEQ ID NO: 917164
uauuaaugccauugaguug

SEQ ID NO: 1213809 - RNA, 19 nt, Artificial Sequence
  Description of Artificial Sequence: Synthetic oligonucleotide
  Antisense strand to SEQ ID NO: 1213808
caacucaauggcauuaaua

SEQ ID NO: 1213810 - RNA, 19 nt, Artificial Sequence
  Description of Artificial Sequence: Synthetic oligonucleotide
  Sense strand starting at position 3519 of SEQ ID NO: 917164
uuuauaagugggcauggua

SEQ ID NO: 1213811 - RNA, 19 nt, Artificial Sequence
  Description of Artificial Sequence: Synthetic oligonucleotide
  Antisense strand to SEQ ID NO: 1213810
uaccaugcccacuuauaaa

SEQ ID NO: 1213812 - RNA, 19 nt, Artificial Sequence
  Description of Artificial Sequence: Synthetic oligonucleotide
  Sense strand starting at position 3791 of SEQ ID NO: 917164
agaacaguucuuugccaac

SEQ ID NO: 1213813 - RNA, 19 nt, Artificial Sequence
  Description of Artificial Sequence: Synthetic oligonucleotide
  Antisense strand to SEQ ID NO: 1213812
guuggcaaagaacuguucu

SEQ ID NO: 1213814 - RNA, 19 nt, Artificial Sequence
  Description of Artificial Sequence: Synthetic oligonucleotide
  Sense strand starting at position 3839 of SEQ ID NO: 917164
gaguacugaugauuaauua

SEQ ID NO: 1213815 - RNA, 19 nt, Artificial Sequence
  Description of Artificial Sequence: Synthetic oligonucleotide
  Antisense strand to SEQ ID NO: 1213814
uaauuaaucaucaguacuc

SEQ ID NO: 1213816 - RNA, 19 nt, Artificial Sequence
  Description of Artificial Sequence: Synthetic oligonucleotide
  Sense strand starting at position 3877 of SEQ ID NO: 917164
uggucaugugaagaaggua

SEQ ID NO: 1213817 - RNA, 19 nt, Artificial Sequence
  Description of Artificial Sequence: Synthetic oligonucleotide
  Antisense strand to SEQ ID NO: 1213816
uaccuucuucacaugacca

SEQ ID NO: 1213818 - RNA, 19 nt, Artificial Sequence
  Description of Artificial Sequence: Synthetic oligonucleotide
  Sense strand starting at position 3891 of SEQ ID NO: 917165
agguaaagugccugugaga

SEQ ID NO: 1213819 - RNA, 19 nt, Artificial Sequence
  Description of Artificial Sequence: Synthetic oligonucleotide
  Antisense strand to SEQ ID NO: 1213818
ucucacaggcacuuuaccu

SEQ ID NO: 1213820 - RNA, 19 nt, Artificial Sequence
  Description of Artificial Sequence: Synthetic oligonucleotide
  Sense strand starting at position 31 of SEQ ID NO: 917165
ucccauuugcguuaucauu

SEQ ID NO: 1213821 - RNA, 19 nt, Artificial Sequence
  Description of Artificial Sequence: Synthetic oligonucleotide
  Antisense strand to SEQ ID NO: 1213820
aaugauaacgcaaauggga

SEQ ID NO: 1213822 - RNA, 19 nt, Artificial Sequence
  Description of Artificial Sequence: Synthetic oligonucleotide
  Sense strand starting at position 39 of SEQ ID NO: 917165
gcguuaucauuuccacucu

SEQ ID NO: 1213823 - RNA, 19 nt, Artificial Sequence
  Description of Artificial Sequence: Synthetic oligonucleotide
  Antisense strand to SEQ ID NO: 1213822
agaguggaaaugauaacgc

SEQ ID NO: 1213824 - RNA, 19 nt, Artificial Sequence
  Description of Artificial Sequence: Synthetic oligonucleotide
  Sense strand starting at position 70 of SEQ ID NO: 917165
gugggugguauauacaauu

SEQ ID NO: 1213825 - RNA, 19 nt, Artificial Sequence
  Description of Artificial Sequence: Synthetic oligonucleotide
  Antisense strand to SEQ ID NO: 1213824
aauuguauauaccacccac

SEQ ID NO: 1213826 - RNA, 19 nt, Artificial Sequence
  Description of Artificial Sequence: Synthetic oligonucleotide
  Sense strand starting at position 397 of SEQ ID NO: 917165
agccuaagccuguaaggau

SEQ ID NO: 1213827 - RNA, 19 nt, Artificial Sequence
  Description of Artificial Sequence: Synthetic oligonucleotide
  Antisense strand to SEQ ID NO: 1213826
auccuuacaggcuuaggcu

SEQ ID NO: 1213828 - RNA, 19 nt, Artificial Sequence
  Description of Artificial Sequence: Synthetic oligonucleotide
  Sense strand starting at position 424 of SEQ ID NO: 917165
ugguuaucccuagagagug

SEQ ID NO: 1213829 - RNA, 19 nt, Artificial Sequence
  Description of Artificial Sequence: Synthetic oligonucleotide
  Antisense strand to SEQ ID NO: 1213828
cacucucuagggauaacca

SEQ ID NO: 1213830 - RNA, 19 nt, Artificial Sequence
  Description of Artificial Sequence: Synthetic oligonucleotide
  Sense strand starting at position 534 of SEQ ID NO: 917165
uaaagauauuucuguggag

SEQ ID NO: 1213831 - RNA, 19 nt, Artificial Sequence
  Description of Artificial Sequence: Synthetic oligonucleotide
  Antisense strand to SEQ ID NO: 1213830
cuccacagaaauaucuuua

SEQ ID NO: 1213832 - RNA, 19 nt, Artificial Sequence
  Description of Artificial Sequence: Synthetic oligonucleotide
  Sense strand starting at position 677 of SEQ ID NO: 917165
uguaaacaguaaguugaua

SEQ ID NO: 1213833 - RNA, 19 nt, Artificial Sequence
  Description of Artificial Sequence: Synthetic oligonucleotide
  Antisense strand to SEQ ID NO: 1213832
uaucaacuuacuguuuaca

SEQ ID NO: 1213834 - RNA, 19 nt, Artificial Sequence
  Description of Artificial Sequence: Synthetic oligonucleotide
  Sense strand starting at position 734 of SEQ ID NO: 917165
uuucucuuagacugugaau

SEQ ID NO: 1213835 - RNA, 19 nt, Artificial Sequence
  Description of Artificial Sequence: Synthetic oligonucleotide
  Antisense strand to SEQ ID NO: 1213834
auucacagucuaagagaaa

SEQ ID NO: 1213836 - RNA, 19 nt, Artificial Sequence
  Description of Artificial Sequence: Synthetic oligonucleotide
  Sense strand starting at position 736 of SEQ ID NO: 917165
ucucuuagacugugaauua

SEQ ID NO: 1213837 - RNA, 19 nt, Artificial Sequence
  Description of Artificial Sequence: Synthetic oligonucleotide
  Antisense strand to SEQ ID NO: 1213836
uaauucacagucuaagaga

SEQ ID NO: 1213838 - RNA, 19 nt, Artificial Sequence
  Description of Artificial Sequence: Synthetic oligonucleotide
  Sense strand starting at position 937 of SEQ ID NO: 917165
uagucagucccagguauuu

SEQ ID NO: 1213839 - RNA, 19 nt, Artificial Sequence
  Description of Artificial Sequence: Synthetic oligonucleotide
  Antisense strand to SEQ ID NO: 1213838
aaauaccugggacugacua

SEQ ID NO: 1213840 - RNA, 19 nt, Artificial Sequence
  Description of Artificial Sequence: Synthetic oligonucleotide
  Sense strand starting at position 1167 of SEQ ID NO: 917165
ggaaauguccuguaacugu

SEQ ID NO: 1213841 - RNA, 19 nt, Artificial Sequence
  Description of Artificial Sequence: Synthetic oligonucleotide
  Antisense strand to SEQ ID NO: 1213840
acaguuacaggacauuucc

SEQ ID NO: 1213842 - RNA, 19 nt, Artificial Sequence
  Description of Artificial Sequence: Synthetic oligonucleotide
  Sense strand starting at position 1284 of SEQ ID NO: 917165
acagauauggcuuacuuua

SEQ ID NO: 1213843 - RNA, 19 nt, Artificial Sequence
  Description of Artificial Sequence: Synthetic oligonucleotide
  Antisense strand to SEQ ID NO: 1213842
uaaaguaagccauaucugu

SEQ ID NO: 1213844 - RNA, 19 nt, Artificial Sequence
  Description of Artificial Sequence: Synthetic oligonucleotide
  Sense strand starting at position 1286 of SEQ ID NO: 917165
agauauggcuuacuuuaca

SEQ ID NO: 1213845 - RNA, 19 nt, Artificial Sequence
  Description of Artificial Sequence: Synthetic oligonucleotide
  Antisense strand to SEQ ID NO: 1213844
uguaaaguaagccauaucu

SEQ ID NO: 1213846 - RNA, 19 nt, Artificial Sequence
  Description of Artificial Sequence: Synthetic oligonucleotide
  Sense strand starting at position 1311 of SEQ ID NO: 917165
uuggacagaucugauacaa

SEQ ID NO: 1213847 - RNA, 19 nt, Artificial Sequence
  Description of Artificial Sequence: Synthetic oligonucleotide
  Antisense strand to SEQ ID NO: 1213846
uuguaucagaucuguccaa

SEQ ID NO: 1213848 - RNA, 19 nt, Artificial Sequence
  Description of Artificial Sequence: Synthetic oligonucleotide
  Sense strand starting at position 1354 of SEQ ID NO: 917165
acuugaccuuaccuggaua

SEQ ID NO: 1213849 - RNA, 19 nt, Artificial Sequence
  Description of Artificial Sequence: Synthetic oligonucleotide
  Antisense strand to SEQ ID NO: 1213848
uauccagguaaggucaagu

SEQ ID NO: 1213850 - RNA, 19 nt, Artificial Sequence
  Description of Artificial Sequence: Synthetic oligonucleotide
  Sense strand starting at position 1470 of SEQ ID NO: 917165
gcuacaagucaauauuagu

SEQ ID NO: 1213851 - RNA, 19 nt, Artificial Sequence
  Description of Artificial Sequence: Synthetic oligonucleotide
  Antisense strand to SEQ ID NO: 1213850
acuaauauugacuuguagc

SEQ ID NO: 1213852 - RNA, 19 nt, Artificial Sequence
  Description of Artificial Sequence: Synthetic oligonucleotide
  Sense strand starting at position 1494 of SEQ ID NO: 917165
caucgauaacggcaaauaa

SEQ ID NO: 1213853 - RNA, 19 nt, Artificial Sequence
  Description of Artificial Sequence: Synthetic oligonucleotide
  Antisense strand to SEQ ID NO: 1213852
uuauuugccguuaucgaug

SEQ ID NO: 1213854 - RNA, 19 nt, Artificial Sequence
  Description of Artificial Sequence: Synthetic oligonucleotide
  Sense strand starting at position 1528 of SEQ ID NO: 917165
ugaagaguuuacuuccaaa

SEQ ID NO: 1213855 - RNA, 19 nt, Artificial Sequence
  Description of Artificial Sequence: Synthetic oligonucleotide
  Antisense strand to SEQ ID NO: 1213854
uuuggaaguaaacucuuca

SEQ ID NO: 1213856 - RNA, 19 nt, Artificial Sequence
  Description of Artificial Sequence: Synthetic oligonucleotide
  Sense strand starting at position 1730 of SEQ ID NO: 917165
cuagccaagcuuuaagaaa

SEQ ID NO: 1213857 - RNA, 19 nt, Artificial Sequence
  Description of Artificial Sequence: Synthetic oligonucleotide
  Antisense strand to SEQ ID NO: 1213856
uuucuuaaagcuuggcuag

SEQ ID NO: 1213858 - RNA, 19 nt, Artificial Sequence
  Description of Artificial Sequence: Synthetic oligonucleotide
  Sense strand starting at position 1765 of SEQ ID NO: 917165
aggcacuagacucgaaagu

SEQ ID NO: 1213859 - RNA, 19 nt, Artificial Sequence
  Description of Artificial Sequence: Synthetic oligonucleotide
  Antisense strand to SEQ ID NO: 1213858
acuuucgagucuagugccu

SEQ ID NO: 1213860 - RNA, 19 nt, Artificial Sequence
  Description of Artificial Sequence: Synthetic oligonucleotide
  Sense strand starting at position 1766 of SEQ ID NO: 917165
ggcacuagacucgaaaguu

SEQ ID NO: 1213861 - RNA, 19 nt, Artificial Sequence
  Description of Artificial Sequence: Synthetic oligonucleotide
  Antisense strand to SEQ ID NO: 1213860
aacuuucgagucuagugcc

SEQ ID NO: 1213862 - RNA, 19 nt, Artificial Sequence
  Description of Artificial Sequence: Synthetic oligonucleotide
  Sense strand starting at position 1774 of SEQ ID NO: 917165
acucgaaaguucuaauuua

SEQ ID NO: 1213863 - RNA, 19 nt, Artificial Sequence
  Description of Artificial Sequence: Synthetic oligonucleotide
  Antisense strand to SEQ ID NO: 1213862
uaaauuagaacuuucgagu

SEQ ID NO: 1213864 - RNA, 19 nt, Artificial Sequence
  Description of Artificial Sequence: Synthetic oligonucleotide
  Sense strand starting at position 1790 of SEQ ID NO: 917165
uuaccagaacuggguuaga

SEQ ID NO: 1213865 - RNA, 19 nt, Artificial Sequence
  Description of Artificial Sequence: Synthetic oligonucleotide
  Antisense strand to SEQ ID NO: 1213864
ucuaacccaguucugguaa

SEQ ID NO: 1213866 - RNA, 19 nt, Artificial Sequence
  Description of Artificial Sequence: Synthetic oligonucleotide
  Sense strand starting at position 2729 of SEQ ID NO: 917165
gcaggacuagguugacaaa

SEQ ID NO: 1213867 - RNA, 19 nt, Artificial Sequence
  Description of Artificial Sequence: Synthetic oligonucleotide
  Antisense strand to SEQ ID NO: 1213866
uuugucaaccuaguccugc

SEQ ID NO: 1213868 - RNA, 19 nt, Artificial Sequence
  Description of Artificial Sequence: Synthetic oligonucleotide
  Sense strand starting at position 2776 of SEQ ID NO: 917165
cucacaguccuuggaggaa

SEQ ID NO: 1213869 - RNA, 19 nt, Artificial Sequence
  Description of Artificial Sequence: Synthetic oligonucleotide
  Antisense strand to SEQ ID NO: 1213868
uuccuccaaggacugugag

SEQ ID NO: 1213870 - RNA, 19 nt, Artificial Sequence
  Description of Artificial Sequence: Synthetic oligonucleotide
  Sense strand starting at position 3185 of SEQ ID NO: 917165
gcauuuguuacagacguuu

SEQ ID NO: 1213871 - RNA, 19 nt, Artificial Sequence
  Description of Artificial Sequence: Synthetic oligonucleotide
  Antisense strand to SEQ ID NO: 1213870
aaacgucuguaacaaaugc

SEQ ID NO: 1213872 - RNA, 19 nt, Artificial Sequence
  Description of Artificial Sequence: Synthetic oligonucleotide
  Sense strand starting at position 3204 of SEQ ID NO: 917165
uguguuugugugguuaagu

SEQ ID NO: 1213873 - RNA, 19 nt, Artificial Sequence
  Description of Artificial Sequence: Synthetic oligonucleotide
  Antisense strand to SEQ ID NO: 1213872
acuuaaccacacaaacaca

SEQ ID NO: 1213874 - RNA, 19 nt, Artificial Sequence
  Description of Artificial Sequence: Synthetic oligonucleotide
  Sense strand starting at position 3217 of SEQ ID NO: 917165
uuaagugugccgccauaau

SEQ ID NO: 1213875 - RNA, 19 nt, Artificial Sequence
  Description of Artificial Sequence: Synthetic oligonucleotide
  Antisense strand to SEQ ID NO: 1213874
auuauggcggcacacuuaa

SEQ ID NO: 1213876 - RNA, 19 nt, Artificial Sequence
  Description of Artificial Sequence: Synthetic oligonucleotide
  Sense strand starting at position 3306 of SEQ ID NO: 917165
gaaacaagucagggcuaga

SEQ ID NO: 1213877 - RNA, 19 nt, Artificial Sequence
  Description of Artificial Sequence: Synthetic oligonucleotide
  Antisense strand to SEQ ID NO: 1213876
ucuagcccugacuuguuuc

SEQ ID NO: 1213878 - RNA, 19 nt, Artificial Sequence
  Description of Artificial Sequence: Synthetic oligonucleotide
  Sense strand starting at position 3407 of SEQ ID NO: 917165
gccugaucacugcaguaag

SEQ ID NO: 1213879 - RNA, 19 nt, Artificial Sequence
  Description of Artificial Sequence: Synthetic oligonucleotide
  Antisense strand to SEQ ID NO: 1213878
cuuacugcagugaucaggc

SEQ ID NO: 1213880 - RNA, 19 nt, Artificial Sequence
  Description of Artificial Sequence: Synthetic oligonucleotide
  Sense strand starting at position 3587 of SEQ ID NO: 917165
uaugguagcgucuugcuaa

SEQ ID NO: 1213881 - RNA, 19 nt, Artificial Sequence
  Description of Artificial Sequence: Synthetic oligonucleotide
  Antisense strand to SEQ ID NO: 1213880
uuagcaagacgcuaccaua

SEQ ID NO: 1213882 - RNA, 19 nt, Artificial Sequence
  Description of Artificial Sequence: Synthetic oligonucleotide
  Sense strand starting at position 3595 of SEQ ID NO: 917165
cgucuugcuaaugaggaau

SEQ ID NO: 1213883 - RNA, 19 nt, Artificial Sequence
  Description of Artificial Sequence: Synthetic oligonucleotide
  Antisense strand to SEQ ID NO: 1213882
auuccucauuagcaagacg

SEQ ID NO: 1213884 - RNA, 19 nt, Artificial Sequence
  Description of Artificial Sequence: Synthetic oligonucleotide
  Sense strand starting at position 3662 of SEQ ID NO: 917165
uuaguuuaacauuguccau

SEQ ID NO: 1213885 - RNA, 19 nt, Artificial Sequence
  Description of Artificial Sequence: Synthetic oligonucleotide
  Antisense strand to SEQ ID NO: 1213884
auggacaauguuaaacuaa

SEQ ID NO: 1213886 - RNA, 19 nt, Artificial Sequence
  Description of Artificial Sequence: Synthetic oligonucleotide
  Sense strand starting at position 3664 of SEQ ID NO: 917165
aguuuaacauuguccauca

SEQ ID NO: 1213887 - RNA, 19 nt, Artificial Sequence
  Description of Artificial Sequence: Synthetic oligonucleotide
  Antisense strand to SEQ ID NO: 1213886
ugauggacaauguuaaacu

SEQ ID NO: 1213888 - RNA, 19 nt, Artificial Sequence
  Description of Artificial Sequence: Synthetic oligonucleotide
  Sense strand starting at position 3692 of SEQ ID NO: 917165
agauauaacuugcuguuua

SEQ ID NO: 1213889 - RNA, 19 nt, Artificial Sequence
  Description of Artificial Sequence: Synthetic oligonucleotide
  Antisense strand to SEQ ID NO: 1213888
uaaacagcaaguuauaucu

SEQ ID NO: 1213890 - RNA, 19 nt, Artificial Sequence
  Description of Artificial Sequence: Synthetic oligonucleotide
  Sense strand starting at position 3708 of SEQ ID NO: 917165
uuaaauacgucugucauua

SEQ ID NO: 1213891 - RNA, 19 nt, Artificial Sequence
  Description of Artificial Sequence: Synthetic oligonucleotide
  Antisense strand to SEQ ID NO: 1213890
uaaugacagacguauuuaa

SEQ ID NO: 1213892 - RNA, 19 nt, Artificial Sequence
  Description of Artificial Sequence: Synthetic oligonucleotide
  Sense strand starting at position 3718 of SEQ ID NO: 917165
cugucauuauuguugauua

SEQ ID NO: 1213893 - RNA, 19 nt, Artificial Sequence
  Description of Artificial Sequence: Synthetic oligonucleotide
  Antisense strand to SEQ ID NO: 1213892
uaaucaacaauaaugacag

SEQ ID NO: 1213894 - RNA, 19 nt, Artificial Sequence
  Description of Artificial Sequence: Synthetic oligonucleotide
  Sense strand starting at position 3771 of SEQ ID NO: 917165
agggauuucuauuaaguga

SEQ ID NO: 1213895 - RNA, 19 nt, Artificial Sequence
  Description of Artificial Sequence: Synthetic oligonucleotide
  Antisense strand to SEQ ID NO: 1213894
ucacuuaauagaaaucccu

SEQ ID NO: 1213896 - RNA, 19 nt, Artificial Sequence
  Description of Artificial Sequence: Synthetic oligonucleotide
  Sense strand starting at position 3801 of SEQ ID NO: 917165
agcguuaauaagugacuca

SEQ ID NO: 1213897 - RNA, 19 nt, Artificial Sequence
  Description of Artificial Sequence: Synthetic oligonucleotide
  Antisense strand to SEQ ID NO: 1213896
ugagucacuuauuaacgcu

SEQ ID NO: 1213898 - RNA, 19 nt, Artificial Sequence
  Description of Artificial Sequence: Synthetic oligonucleotide
  Sense strand starting at position 3802 of SEQ ID NO: 917164
gcguuaauaagugacucaa

SEQ ID NO: 1213899 - RNA, 19 nt, Artificial Sequence
  Description of Artificial Sequence: Synthetic oligonucleotide
  Antisense strand to SEQ ID NO: 1213898
uugagucacuuauuaacgc

SEQ ID NO: 1213900 - RNA, 19 nt, Artificial Sequence
  Description of Artificial Sequence: Synthetic oligonucleotide
  Sense strand starting at position 3891 of SEQ ID NO: 917164
agguaaagugccugugaga

SEQ ID NO: 1213901 - RNA, 19 nt, Artificial Sequence
  Description of Artificial Sequence: Synthetic oligonucleotide
  Antisense strand to SEQ ID NO: 1213900
ucucacaggcacuuuaccu

SEQ ID NO: 1213902 - RNA, 19 nt, Artificial Sequence
  Description of Artificial Sequence: Synthetic oligonucleotide
  Sense strand starting at position 3891 of SEQ ID NO: 917166
agguaaagugccugugaga

SEQ ID NO: 1213903 - RNA, 19 nt, Artificial Sequence
  Description of Artificial Sequence: Synthetic oligonucleotide
  Antisense strand to SEQ ID NO: 1213902
ucucacaggcacuuuaccu

SEQ ID NO: 1213904 - RNA, 19 nt, Artificial Sequence
  Description of Artificial Sequence: Synthetic oligonucleotide
  Sense strand starting at position 58 of SEQ ID NO: 917166
uaggaaaguccauguuauu

SEQ ID NO: 1213905 - RNA, 19 nt, Artificial Sequence
  Description of Artificial Sequence: Synthetic oligonucleotide
  Antisense strand to SEQ ID NO: 1213904
aauaacauggacuuuccua

SEQ ID NO: 1213906 - RNA, 19 nt, Artificial Sequence
  Description of Artificial Sequence: Synthetic oligonucleotide
  Sense strand starting at position 172 of SEQ ID NO: 917166
gcacucauuguagacuaau

SEQ ID NO: 1213907 - RNA, 19 nt, Artificial Sequence
  Description of Artificial Sequence: Synthetic oligonucleotide
  Antisense strand to SEQ ID NO: 1213906
auuagucuacaaugagugc

SEQ ID NO: 1213908 - RNA, 19 nt, Artificial Sequence
  Description of Artificial Sequence: Synthetic oligonucleotide
  Sense strand starting at position 184 of SEQ ID NO: 917166
gacuaaugaugugcauacu

SEQ ID NO: 1213909 - RNA, 19 nt, Artificial Sequence
  Description of Artificial Sequence: Synthetic oligonucleotide
  Antisense strand to SEQ ID NO: 1213908
aguaugcacaucauuaguc

SEQ ID NO: 1213910 - RNA, 19 nt, Artificial Sequence
  Description of Artificial Sequence: Synthetic oligonucleotide
  Sense strand starting at position 187 of SEQ ID NO: 917166
uaaugaugugcauacuuga

SEQ ID NO: 1213911 - RNA, 19 nt, Artificial Sequence
  Description of Artificial Sequence: Synthetic oligonucleotide
  Antisense strand to SEQ ID NO: 1213910
ucaaguaugcacaucauua

SEQ ID NO: 1213912 - RNA, 19 nt, Artificial Sequence
  Description of Artificial Sequence: Synthetic oligonucleotide
  Sense strand starting at position 401 of SEQ ID NO: 917166
agcagaggcagauaguaau

SEQ ID NO: 1213913 - RNA, 19 nt, Artificial Sequence
  Description of Artificial Sequence: Synthetic oligonucleotide
  Antisense strand to SEQ ID NO: 1213912
auuacuaucugccucugcu

SEQ ID NO: 1213914 - RNA, 19 nt, Artificial Sequence
  Description of Artificial Sequence: Synthetic oligonucleotide
  Sense strand starting at position 407 of SEQ ID NO: 917166
ggcagauaguaauucucau

SEQ ID NO: 1213915 - RNA, 19 nt, Artificial Sequence
  Description of Artificial Sequence: Synthetic oligonucleotide
  Antisense strand to SEQ ID NO: 1213914
augagaauuacuaucugcc

SEQ ID NO: 1213916 - RNA, 19 nt, Artificial Sequence
  Description of Artificial Sequence: Synthetic oligonucleotide
  Sense strand starting at position 443 of SEQ ID NO: 917166
ugacaauuguuucccugaa

SEQ ID NO: 1213917 - RNA, 19 nt, Artificial Sequence
  Description of Artificial Sequence: Synthetic oligonucleotide
  Antisense strand to SEQ ID NO: 1213916
uucagggaaacaauuguca

SEQ ID NO: 1213918 - RNA, 19 nt, Artificial Sequence
  Description of Artificial Sequence: Synthetic oligonucleotide
  Sense strand starting at position 444 of SEQ ID NO: 917166
gacaauuguuucccugaag

SEQ ID NO: 1213919 - RNA, 19 nt, Artificial Sequence
  Description of Artificial Sequence: Synthetic oligonucleotide
  Antisense strand to SEQ ID NO: 1213918
cuucagggaaacaauuguc

SEQ ID NO: 1213920 - RNA, 19 nt, Artificial Sequence
  Description of Artificial Sequence: Synthetic oligonucleotide
  Sense strand starting at position 509 of SEQ ID NO: 917166
uugagauacguacacuugu

SEQ ID NO: 1213921 - RNA, 19 nt, Artificial Sequence
  Description of Artificial Sequence: Synthetic oligonucleotide
  Antisense strand to SEQ ID NO: 1213920
acaaguguacguaucucaa

SEQ ID NO: 1213922 - RNA, 19 nt, Artificial Sequence
  Description of Artificial Sequence: Synthetic oligonucleotide
  Sense strand starting at position 536 of SEQ ID NO: 917166
uucuaauaugcacaacgau

SEQ ID NO: 1213923 - RNA, 19 nt, Artificial Sequence
  Description of Artificial Sequence: Synthetic oligonucleotide
  Antisense strand to SEQ ID NO: 1213922
aucguugugcauauuagaa

SEQ ID NO: 1213924 - RNA, 19 nt, Artificial Sequence
  Description of Artificial Sequence: Synthetic oligonucleotide
  Sense strand starting at position 700 of SEQ ID NO: 917166
auaucuaggcugugacaaa

SEQ ID NO: 1213925 - RNA, 19 nt, Artificial Sequence
  Description of Artificial Sequence: Synthetic oligonucleotide
  Antisense strand to SEQ ID NO: 1213924
uuugucacagccuagauau

SEQ ID NO: 1213926 - RNA, 19 nt, Artificial Sequence
  Description of Artificial Sequence: Synthetic oligonucleotide
  Sense strand starting at position 763 of SEQ ID NO: 917166
cuucguuaucaggaaucua

SEQ ID NO: 1213927 - RNA, 19 nt, Artificial Sequence
  Description of Artificial Sequence: Synthetic oligonucleotide
  Antisense strand to SEQ ID NO: 1213926
uagauuccugauaacgaag

SEQ ID NO: 1213928 - RNA, 19 nt, Artificial Sequence
  Description of Artificial Sequence: Synthetic oligonucleotide
  Sense strand starting at position 922 of SEQ ID NO: 917166
cuagcaauggcauauuaca

SEQ ID NO: 1213929 - RNA, 19 nt, Artificial Sequence
  Description of Artificial Sequence: Synthetic oligonucleotide
  Antisense strand to SEQ ID NO: 1213928
uguaauaugccauugcuag

SEQ ID NO: 1213930 - RNA, 19 nt, Artificial Sequence
  Description of Artificial Sequence: Synthetic oligonucleotide
  Sense strand starting at position 999 of SEQ ID NO: 917166
accuguguggguuauauau

SEQ ID NO: 1213931 - RNA, 19 nt, Artificial Sequence
  Description of Artificial Sequence: Synthetic oligonucleotide
  Antisense strand to SEQ ID NO: 1213930
auauauaacccacacaggu

SEQ ID NO: 1213932 - RNA, 19 nt, Artificial Sequence
  Description of Artificial Sequence: Synthetic oligonucleotide
  Sense strand starting at position 1006 of SEQ ID NO: 917166
uggguuauauaugugaaug

SEQ ID NO: 1213933 - RNA, 19 nt, Artificial Sequence
  Description of Artificial Sequence: Synthetic oligonucleotide
  Antisense strand to SEQ ID NO: 1213932
cauucacauauauaaccca

SEQ ID NO: 1213934 - RNA, 19 nt, Artificial Sequence
  Description of Artificial Sequence: Synthetic oligonucleotide
  Sense strand starting at position 1191 of SEQ ID NO: 917166
aguuuaaaucaaugagagc

SEQ ID NO: 1213935 - RNA, 19 nt, Artificial Sequence
  Description of Artificial Sequence: Synthetic oligonucleotide
  Antisense strand to SEQ ID NO: 1213934
gcucucauugauuuaaacu

SEQ ID NO: 1213936 - RNA, 19 nt, Artificial Sequence
  Description of Artificial Sequence: Synthetic oligonucleotide
  Sense strand starting at position 1310 of SEQ ID NO: 917166
uggagucacacuggguauu

SEQ ID NO: 1213937 - RNA, 19 nt, Artificial Sequence
  Description of Artificial Sequence: Synthetic oligonucleotide
  Antisense strand to SEQ ID NO: 1213936
aauacccagugugacucca

SEQ ID NO: 1213938 - RNA, 19 nt, Artificial Sequence
  Description of Artificial Sequence: Synthetic oligonucleotide
  Sense strand starting at position 2086 of SEQ ID NO: 917166
uagccugaagcuuaacgaa

SEQ ID NO: 1213939 - RNA, 19 nt, Artificial Sequence
  Description of Artificial Sequence: Synthetic oligonucleotide
  Antisense strand to SEQ ID NO: 1213938
uucguuaagcuucaggcua

SEQ ID NO: 1213940 - RNA, 19 nt, Artificial Sequence
  Description of Artificial Sequence: Synthetic oligonucleotide
  Sense strand starting at position 2102 of SEQ ID NO: 917166
gaaccaugcgacuaccaga

SEQ ID NO: 1213941 - RNA, 19 nt, Artificial Sequence
  Description of Artificial Sequence: Synthetic oligonucleotide
  Antisense strand to SEQ ID NO: 1213940
ucugguagucgcaugguuc

SEQ ID NO: 1213942 - RNA, 19 nt, Artificial Sequence
  Description of Artificial Sequence: Synthetic oligonucleotide
  Sense strand starting at position 2107 of SEQ ID NO: 917166
augcgacuaccagauauua

SEQ ID NO: 1213943 - RNA, 19 nt, Artificial Sequence
  Description of Artificial Sequence: Synthetic oligonucleotide
  Antisense strand to SEQ ID NO: 1213942
uaauaucugguagucgcau

SEQ ID NO: 1213944 - RNA, 19 nt, Artificial Sequence
  Description of Artificial Sequence: Synthetic oligonucleotide
  Sense strand starting at position 2253 of SEQ ID NO: 917166
aacacuguauuugagggau

SEQ ID NO: 1213945 - RNA, 19 nt, Artificial Sequence
  Description of Artificial Sequence: Synthetic oligonucleotide
  Antisense strand to SEQ ID NO: 1213944
aucccucaaauacaguguu

SEQ ID NO: 1213946 - RNA, 19 nt, Artificial Sequence
  Description of Artificial Sequence: Synthetic oligonucleotide
  Sense strand starting at position 2255 of SEQ ID NO: 917166
cacuguauuugagggauuu

SEQ ID NO: 1213947 - RNA, 19 nt, Artificial Sequence
  Description of Artificial Sequence: Synthetic oligonucleotide
  Antisense strand to SEQ ID NO: 1213946
aaaucccucaaauacagug

SEQ ID NO: 1213948 - RNA, 19 nt, Artificial Sequence
  Description of Artificial Sequence: Synthetic oligonucleotide
  Sense strand starting at position 2271 of SEQ ID NO: 917166
uuuauccaugcucaggaau

SEQ ID NO: 1213949 - RNA, 19 nt, Artificial Sequence
  Description of Artificial Sequence: Synthetic oligonucleotide
  Antisense strand to SEQ ID NO: 1213948
auuccugagcauggauaaa

SEQ ID NO: 1213950 - RNA, 19 nt, Artificial Sequence
  Description of Artificial Sequence: Synthetic oligonucleotide
  Sense strand starting at position 2274 of SEQ ID NO: 917166
auccaugcucaggaaugua

SEQ ID NO: 1213951 - RNA, 19 nt, Artificial Sequence
  Description of Artificial Sequence: Synthetic oligonucleotide
  Antisense strand to SEQ ID NO: 1213950
uacauuccugagcauggau

SEQ ID NO: 1213952 - RNA, 19 nt, Artificial Sequence
  Description of Artificial Sequence: Synthetic oligonucleotide
  Sense strand starting at position 2482 of SEQ ID NO: 917166
gggcguauccuacaaucag

SEQ ID NO: 1213953 - RNA, 19 nt, Artificial Sequence
  Description of Artificial Sequence: Synthetic oligonucleotide
  Antisense strand to SEQ ID NO: 1213952
cugauuguaggauacgccc

SEQ ID NO: 1213954 - RNA, 19 nt, Artificial Sequence
  Description of Artificial Sequence: Synthetic oligonucleotide
  Sense strand starting at position 2644 of SEQ ID NO: 917166
gguugucaagauuauuauu

SEQ ID NO: 1213955 - RNA, 19 nt, Artificial Sequence
  Description of Artificial Sequence: Synthetic oligonucleotide
  Antisense strand to SEQ ID NO: 1213954
aauaauaaucuugacaacc

SEQ ID NO: 1213956 - RNA, 19 nt, Artificial Sequence
  Description of Artificial Sequence: Synthetic oligonucleotide
  Sense strand starting at position 2674 of SEQ ID NO: 917166
ccagccugauggguauaaa

SEQ ID NO: 1213957 - RNA, 19 nt, Artificial Sequence
  Description of Artificial Sequence: Synthetic oligonucleotide
  Antisense strand to SEQ ID NO: 1213956
uuuauacccaucaggcugg

SEQ ID NO: 1213958 - RNA, 19 nt, Artificial Sequence
  Description of Artificial Sequence: Synthetic oligonucleotide
  Sense strand starting at position 2677 of SEQ ID NO: 917166
gccugauggguauaaaggu

SEQ ID NO: 1213959 - RNA, 19 nt, Artificial Sequence
  Description of Artificial Sequence: Synthetic oligonucleotide
  Antisense strand to SEQ ID NO: 1213958
accuuuauacccaucaggc

SEQ ID NO: 1213960 - RNA, 19 nt, Artificial Sequence
  Description of Artificial Sequence: Synthetic oligonucleotide
  Sense strand starting at position 2683 of SEQ ID NO: 917166
uggguauaaaggugucaca

SEQ ID NO: 1213961 - RNA, 19 nt, Artificial Sequence
  Description of Artificial Sequence: Synthetic oligonucleotide
  Antisense strand to SEQ ID NO: 1213960
ugugacaccuuuauaccca

SEQ ID NO: 1213962 - RNA, 19 nt, Artificial Sequence
  Description of Artificial Sequence: Synthetic oligonucleotide
  Sense strand starting at position 2985 of SEQ ID NO: 917166
caccaagcgauuugugguu

SEQ ID NO: 1213963 - RNA, 19 nt, Artificial Sequence
  Description of Artificial Sequence: Synthetic oligonucleotide
  Antisense strand to SEQ ID NO: 1213962
aaccacaaaucgcuuggug

SEQ ID NO: 1213964 - RNA, 19 nt, Artificial Sequence
  Description of Artificial Sequence: Synthetic oligonucleotide
  Sense strand starting at position 2990 of SEQ ID NO: 917166
agcgauuugugguuugaga

SEQ ID NO: 1213965 - RNA, 19 nt, Artificial Sequence
  Description of Artificial Sequence: Synthetic oligonucleotide
  Antisense strand to SEQ ID NO: 1213964
ucucaaaccacaaaucgcu

SEQ ID NO: 1213966 - RNA, 19 nt, Artificial Sequence
  Description of Artificial Sequence: Synthetic oligonucleotide
  Sense strand starting at position 2992 of SEQ ID NO: 917166
cgauuugugguuugagauc

SEQ ID NO: 1213967 - RNA, 19 nt, Artificial Sequence
  Description of Artificial Sequence: Synthetic oligonucleotide
  Antisense strand to SEQ ID NO: 1213966
gaucucaaaccacaaaucg

SEQ ID NO: 1213968 - RNA, 19 nt, Artificial Sequence
  Description of Artificial Sequence: Synthetic oligonucleotide
  Sense strand starting at position 3135 of SEQ ID NO: 917166
uugagacacuggcucuaua

SEQ ID NO: 1213969 - RNA, 19 nt, Artificial Sequence
  Description of Artificial Sequence: Synthetic oligonucleotide
  Antisense strand to SEQ ID NO: 1213968
uauagagccagugucucaa

SEQ ID NO: 1213970 - RNA, 19 nt, Artificial Sequence
  Description of Artificial Sequence: Synthetic oligonucleotide
  Sense strand starting at position 3304 of SEQ ID NO: 917166
cugagaucuugucucgaaa

SEQ ID NO: 1213971 - RNA, 19 nt, Artificial Sequence
  Description of Artificial Sequence: Synthetic oligonucleotide
  Antisense strand to SEQ ID NO: 1213970
uuucgagacaagaucucag

SEQ ID NO: 1213972 - RNA, 19 nt, Artificial Sequence
  Description of Artificial Sequence: Synthetic oligonucleotide
  Sense strand starting at position 3563 of SEQ ID NO: 917166
cauacauguugggcaucaa

SEQ ID NO: 1213973 - RNA, 19 nt, Artificial Sequence
  Description of Artificial Sequence: Synthetic oligonucleotide
  Antisense strand to SEQ ID NO: 1213972
uugaugcccaacauguaug

SEQ ID NO: 1213974 - RNA, 19 nt, Artificial Sequence
  Description of Artificial Sequence: Synthetic oligonucleotide
  Sense strand starting at position 3564 of SEQ ID NO: 917166
auacauguugggcaucaau

SEQ ID NO: 1213975 - RNA, 19 nt, Artificial Sequence
  Description of Artificial Sequence: Synthetic oligonucleotide
  Antisense strand to SEQ ID NO: 1213974
auugaugcccaacauguau

SEQ ID NO: 1213976 - RNA, 19 nt, Artificial Sequence
  Description of Artificial Sequence: Synthetic oligonucleotide
  Sense strand starting at position 3567 of SEQ ID NO: 917166
cauguugggcaucaauauu

SEQ ID NO: 1213977 - RNA, 19 nt, Artificial Sequence
  Description of Artificial Sequence: Synthetic oligonucleotide
  Antisense strand to SEQ ID NO: 1213976
aauauugaugcccaacaug

SEQ ID NO: 1213978 - RNA, 19 nt, Artificial Sequence
  Description of Artificial Sequence: Synthetic oligonucleotide
  Sense strand starting at position 3688 of SEQ ID NO: 917166
ucucaaaucuuauugguga

SEQ ID NO: 1213979 - RNA, 19 nt, Artificial Sequence
  Description of Artificial Sequence: Synthetic oligonucleotide
  Antisense strand to SEQ ID NO: 1213978
ucaccaauaagauuugaga

SEQ ID NO: 1213980 - RNA, 19 nt, Artificial Sequence
  Description of Artificial Sequence: Synthetic oligonucleotide
  Sense strand starting at position 3693 of SEQ ID NO: 917166
aaucuuauuggugaguguu

SEQ ID NO: 1213981 - RNA, 19 nt, Artificial Sequence
  Description of Artificial Sequence: Synthetic oligonucleotide
  Antisense strand to SEQ ID NO: 1213980
aacacucaccaauaagauu

SEQ ID NO: 1213982 - RNA, 19 nt, Artificial Sequence
  Description of Artificial Sequence: Synthetic oligonucleotide
  Sense strand starting at position 3769 of SEQ ID NO: 917167
gcucuuggcuauuucuuau

SEQ ID NO: 1213983 - RNA, 19 nt, Artificial Sequence
  Description of Artificial Sequence: Synthetic oligonucleotide
  Antisense strand to SEQ ID NO: 1213982
auaagaaauagccaagagc

SEQ ID NO: 1213984 - RNA, 19 nt, Artificial Sequence
  Description of Artificial Sequence: Synthetic oligonucleotide
  Sense strand starting at position 1 of SEQ ID NO: 917167
uaaaguguuguacaacagu

SEQ ID NO: 1213985 - RNA, 19 nt, Artificial Sequence
  Description of Artificial Sequence: Synthetic oligonucleotide
  Antisense strand to SEQ ID NO: 1213984
acuguuguacaacacuuua

SEQ ID NO: 1213986 - RNA, 19 nt, Artificial Sequence
  Description of Artificial Sequence: Synthetic oligonucleotide
  Sense strand starting at position 223 of SEQ ID NO: 917167
ugcagacauguaggagaaa

SEQ ID NO: 1213987 - RNA, 19 nt, Artificial Sequence
  Description of Artificial Sequence: Synthetic oligonucleotide
  Antisense strand to SEQ ID NO: 1213986
uuucuccuacaugucugca

SEQ ID NO: 1213988 - RNA, 19 nt, Artificial Sequence
  Description of Artificial Sequence: Synthetic oligonucleotide
  Sense strand starting at position 375 of SEQ ID NO: 917167
gaguguucagaggacagua

SEQ ID NO: 1213989 - RNA, 19 nt, Artificial Sequence
  Description of Artificial Sequence: Synthetic oligonucleotide
  Antisense strand to SEQ ID NO: 1213988
uacuguccucugaacacuc

SEQ ID NO: 1213990 - RNA, 19 nt, Artificial Sequence
  Description of Artificial Sequence: Synthetic oligonucleotide
  Sense strand starting at position 803 of SEQ ID NO: 917167
gggccuagaacuugagcaa

SEQ ID NO: 1213991 - RNA, 19 nt, Artificial Sequence
  Description of Artificial Sequence: Synthetic oligonucleotide
  Antisense strand to SEQ ID NO: 1213990
uugcucaaguucuaggccc

SEQ ID NO: 1213992 - RNA, 19 nt, Artificial Sequence
  Description of Artificial Sequence: Synthetic oligonucleotide
  Sense strand starting at position 804 of SEQ ID NO: 917167
ggccuagaacuugagcaau

SEQ ID NO: 1213993 - RNA, 19 nt, Artificial Sequence
  Description of Artificial Sequence: Synthetic oligonucleotide
  Antisense strand to SEQ ID NO: 1213992
auugcucaaguucuaggcc

SEQ ID NO: 1213994 - RNA, 19 nt, Artificial Sequence
  Description of Artificial Sequence: Synthetic oligonucleotide
  Sense strand starting at position 806 of SEQ ID NO: 917167
ccuagaacuugagcaauca

SEQ ID NO: 1213995 - RNA, 19 nt, Artificial Sequence
  Description of Artificial Sequence: Synthetic oligonucleotide
  Antisense strand to SEQ ID NO: 1213994
ugauugcucaaguucuagg

SEQ ID NO: 1213996 - RNA, 19 nt, Artificial Sequence
  Description of Artificial Sequence: Synthetic oligonucleotide
  Sense strand starting at position 844 of SEQ ID NO: 917167
ggcuguugucuugaaacuc

SEQ ID NO: 1213997 - RNA, 19 nt, Artificial Sequence
  Description of Artificial Sequence: Synthetic oligonucleotide
  Antisense strand to SEQ ID NO: 1213996
gaguuucaagacaacagcc

SEQ ID NO: 1213998 - RNA, 19 nt, Artificial Sequence
  Description of Artificial Sequence: Synthetic oligonucleotide
  Sense strand starting at position 871 of SEQ ID NO: 917167
cagaguucugugugaauau

SEQ ID NO: 1213999 - RNA, 19 nt, Artificial Sequence
  Description of Artificial Sequence: Synthetic oligonucleotide
  Antisense strand to SEQ ID NO: 1213998
auauucacacagaacucug

SEQ ID NO: 1214000 - RNA, 19 nt, Artificial Sequence
  Description of Artificial Sequence: Synthetic oligonucleotide
  Sense strand starting at position 1019 of SEQ ID NO: 917167
gcucucacggcccaagauu

SEQ ID NO: 1214001 - RNA, 19 nt, Artificial Sequence
  Description of Artificial Sequence: Synthetic oligonucleotide
  Antisense strand to SEQ ID NO: 1214000
aaucuugggccgugagagc

SEQ ID NO: 1214002 - RNA, 19 nt, Artificial Sequence
  Description of Artificial Sequence: Synthetic oligonucleotide
  Sense strand starting at position 1095 of SEQ ID NO: 917167
ggaggaaguguuuguagug

SEQ ID NO: 1214003 - RNA, 19 nt, Artificial Sequence
  Description of Artificial Sequence: Synthetic oligonucleotide
  Antisense strand to SEQ ID NO: 1214002
cacuacaaacacuuccucc

SEQ ID NO: 1214004 - RNA, 19 nt, Artificial Sequence
  Description of Artificial Sequence: Synthetic oligonucleotide
  Sense strand starting at position 1102 of SEQ ID NO: 917167
guguuuguaguguugccua

SEQ ID NO: 1214005 - RNA, 19 nt, Artificial Sequence
  Description of Artificial Sequence: Synthetic oligonucleotide
  Antisense strand to SEQ ID NO: 1214004
uaggcaacacuacaaacac

SEQ ID NO: 1214006 - RNA, 19 nt, Artificial Sequence
  Description of Artificial Sequence: Synthetic oligonucleotide
  Sense strand starting at position 1121 of SEQ ID NO: 917167
ggcagacaaguuuguagaa

SEQ ID NO: 1214007 - RNA, 19 nt, Artificial Sequence
  Description of Artificial Sequence: Synthetic oligonucleotide
  Antisense strand to SEQ ID NO: 1214006
uucuacaaacuugucugcc

SEQ ID NO: 1214008 - RNA, 19 nt, Artificial Sequence
  Description of Artificial Sequence: Synthetic oligonucleotide
  Sense strand starting at position 1133 of SEQ ID NO: 917167
uguagaagcucuuuaaagg

SEQ ID NO: 1214009 - RNA, 19 nt, Artificial Sequence
  Description of Artificial Sequence: Synthetic oligonucleotide
  Antisense strand to SEQ ID NO: 1214008
ccuuuaaagagcuucuaca

SEQ ID NO: 1214010 - RNA, 19 nt, Artificial Sequence
  Description of Artificial Sequence: Synthetic oligonucleotide
  Sense strand starting at position 1267 of SEQ ID NO: 917167
acggauuuggcuugcaaug

SEQ ID NO: 1214011 - RNA, 19 nt, Artificial Sequence
  Description of Artificial Sequence: Synthetic oligonucleotide
  Antisense strand to SEQ ID NO: 1214010
cauugcaagccaaauccgu

SEQ ID NO: 1214012 - RNA, 19 nt, Artificial Sequence
  Description of Artificial Sequence: Synthetic oligonucleotide
  Sense strand starting at position 2351 of SEQ ID NO: 917167
uccugacuaccuuguagaa

SEQ ID NO: 1214013 - RNA, 19 nt, Artificial Sequence
  Description of Artificial Sequence: Synthetic oligonucleotide
  Antisense strand to SEQ ID NO: 1214012
uucuacaagguagucagga

SEQ ID NO: 1214014 - RNA, 19 nt, Artificial Sequence
  Description of Artificial Sequence: Synthetic oligonucleotide
  Sense strand starting at position 2388 of SEQ ID NO: 917167
uuugcaugcccugaaagga

SEQ ID NO: 1214015 - RNA, 19 nt, Artificial Sequence
  Description of Artificial Sequence: Synthetic oligonucleotide
  Antisense strand to SEQ ID NO: 1214014
uccuuucagggcaugcaaa

SEQ ID NO: 1214016 - RNA, 19 nt, Artificial Sequence
  Description of Artificial Sequence: Synthetic oligonucleotide
  Sense strand starting at position 2470 of SEQ ID NO: 917167
gggugacucuguuugacuu

SEQ ID NO: 1214017 - RNA, 19 nt, Artificial Sequence
  Description of Artificial Sequence: Synthetic oligonucleotide
  Antisense strand to SEQ ID NO: 1214016
aagucaaacagagucaccc

SEQ ID NO: 1214018 - RNA, 19 nt, Artificial Sequence
  Description of Artificial Sequence: Synthetic oligonucleotide
  Sense strand starting at position 2478 of SEQ ID NO: 917167
cuguuugacuugucaagga

SEQ ID NO: 1214019 - RNA, 19 nt, Artificial Sequence
  Description of Artificial Sequence: Synthetic oligonucleotide
  Antisense strand to SEQ ID NO: 1214018
uccuugacaagucaaacag

SEQ ID NO: 1214020 - RNA, 19 nt, Artificial Sequence
  Description of Artificial Sequence: Synthetic oligonucleotide
  Sense strand starting at position 2482 of SEQ ID NO: 917167
uugacuugucaaggaggga

SEQ ID NO: 1214021 - RNA, 19 nt, Artificial Sequence
  Description of Artificial Sequence: Synthetic oligonucleotide
  Antisense strand to SEQ ID NO: 1214020
ucccuccuugacaagucaa

SEQ ID NO: 1214022 - RNA, 19 nt, Artificial Sequence
  Description of Artificial Sequence: Synthetic oligonucleotide
  Sense strand starting at position 2505 of SEQ ID NO: 917167
ugcagauucugggcuggaa

SEQ ID NO: 1214023 - RNA, 19 nt, Artificial Sequence
  Description of Artificial Sequence: Synthetic oligonucleotide
  Antisense strand to SEQ ID NO: 1214022
uuccagcccagaaucugca

SEQ ID NO: 1214024 - RNA, 19 nt, Artificial Sequence
  Description of Artificial Sequence: Synthetic oligonucleotide
  Sense strand starting at position 2606 of SEQ ID NO: 917167
gccuaaagucaagauagca

SEQ ID NO: 1214025 - RNA, 19 nt, Artificial Sequence
  Description of Artificial Sequence: Synthetic oligonucleotide
  Antisense strand to SEQ ID NO: 1214024
ugcuaucuugacuuuaggc

SEQ ID NO: 1214026 - RNA, 19 nt, Artificial Sequence
  Description of Artificial Sequence: Synthetic oligonucleotide
  Sense strand starting at position 2734 of SEQ ID NO: 917167
aggucuagaggcuauucua

SEQ ID NO: 1214027 - RNA, 19 nt, Artificial Sequence
  Description of Artificial Sequence: Synthetic oligonucleotide
  Antisense strand to SEQ ID NO: 1214026
uagaauagccucuagaccu

SEQ ID NO: 1214028 - RNA, 19 nt, Artificial Sequence
  Description of Artificial Sequence: Synthetic oligonucleotide
  Sense strand starting at position 2737 of SEQ ID NO: 917167
ucuagaggcuauucuauga

SEQ ID NO: 1214029 - RNA, 19 nt, Artificial Sequence
  Description of Artificial Sequence: Synthetic oligonucleotide
  Antisense strand to SEQ ID NO: 1214028
ucauagaauagccucuaga

SEQ ID NO: 1214030 - RNA, 19 nt, Artificial Sequence
  Description of Artificial Sequence: Synthetic oligonucleotide
  Sense strand starting at position 2741 of SEQ ID NO: 917167
gaggcuauucuaugaaagg

SEQ ID NO: 1214031 - RNA, 19 nt, Artificial Sequence
  Description of Artificial Sequence: Synthetic oligonucleotide
  Antisense strand to SEQ ID NO: 1214030
ccuuucauagaauagccuc

SEQ ID NO: 1214032 - RNA, 19 nt, Artificial Sequence
  Description of Artificial Sequence: Synthetic oligonucleotide
  Sense strand starting at position 2819 of SEQ ID NO: 917167
aucucucacgccuaauuga

SEQ ID NO: 1214033 - RNA, 19 nt, Artificial Sequence
  Description of Artificial Sequence: Synthetic oligonucleotide
  Antisense strand to SEQ ID NO: 1214032
ucaauuaggcgugagagau

SEQ ID NO: 1214034 - RNA, 19 nt, Artificial Sequence
  Description of Artificial Sequence: Synthetic oligonucleotide
  Sense strand starting at position 2822 of SEQ ID NO: 917167
ucucacgccuaauugaaau

SEQ ID NO: 1214035 - RNA, 19 nt, Artificial Sequence
  Description of Artificial Sequence: Synthetic oligonucleotide
  Antisense strand to SEQ ID NO: 1214034
auuucaauuaggcgugaga

SEQ ID NO: 1214036 - RNA, 19 nt, Artificial Sequence
  Description of Artificial Sequence: Synthetic oligonucleotide
  Sense strand starting at position 2921 of SEQ ID NO: 917167
gccacaaaucugggcauaa

SEQ ID NO: 1214037 - RNA, 19 nt, Artificial Sequence
  Description of Artificial Sequence: Synthetic oligonucleotide
  Antisense strand to SEQ ID NO: 1214036
uuaugcccagauuuguggc

SEQ ID NO: 1214038 - RNA, 19 nt, Artificial Sequence
  Description of Artificial Sequence: Synthetic oligonucleotide
  Sense strand starting at position 2922 of SEQ ID NO: 917167
ccacaaaucugggcauaaa

SEQ ID NO: 1214039 - RNA, 19 nt, Artificial Sequence
  Description of Artificial Sequence: Synthetic oligonucleotide
  Antisense strand to SEQ ID NO: 1214038
uuuaugcccagauuugugg

SEQ ID NO: 1214040 - RNA, 19 nt, Artificial Sequence
  Description of Artificial Sequence: Synthetic oligonucleotide
  Sense strand starting at position 2956 of SEQ ID NO: 917167
acggguuauuauuugucca

SEQ ID NO: 1214041 - RNA, 19 nt, Artificial Sequence
  Description of Artificial Sequence: Synthetic oligonucleotide
  Antisense strand to SEQ ID NO: 1214040
uggacaaauaauaacccgu

SEQ ID NO: 1214042 - RNA, 19 nt, Artificial Sequence
  Description of Artificial Sequence: Synthetic oligonucleotide
  Sense strand starting at position 2959 of SEQ ID NO: 917167
gguuauuauuuguccacuu

SEQ ID NO: 1214043 - RNA, 19 nt, Artificial Sequence
  Description of Artificial Sequence: Synthetic oligonucleotide
  Antisense strand to SEQ ID NO: 1214042
aaguggacaaauaauaacc

SEQ ID NO: 1214044 - RNA, 19 nt, Artificial Sequence
  Description of Artificial Sequence: Synthetic oligonucleotide
  Sense strand starting at position 3055 of SEQ ID NO: 917167
aucagucugcugugauaaa

SEQ ID NO: 1214045 - RNA, 19 nt, Artificial Sequence
  Description of Artificial Sequence: Synthetic oligonucleotide
  Antisense strand to SEQ ID NO: 1214044
uuuaucacagcagacugau

SEQ ID NO: 1214046 - RNA, 19 nt, Artificial Sequence
  Description of Artificial Sequence: Synthetic oligonucleotide
  Sense strand starting at position 3175 of SEQ ID NO: 917167
augggugcccagugaaauu

SEQ ID NO: 1214047 - RNA, 19 nt, Artificial Sequence
  Description of Artificial Sequence: Synthetic oligonucleotide
  Antisense strand to SEQ ID NO: 1214046
aauuucacugggcacccau

SEQ ID NO: 1214048 - RNA, 19 nt, Artificial Sequence
  Description of Artificial Sequence: Synthetic oligonucleotide
  Sense strand starting at position 3304 of SEQ ID NO: 917167
guuccugucuauuucuaga

SEQ ID NO: 1214049 - RNA, 19 nt, Artificial Sequence
  Description of Artificial Sequence: Synthetic oligonucleotide
  Antisense strand to SEQ ID NO: 1214048
ucuagaaauagacaggaac

SEQ ID NO: 1214050 - RNA, 19 nt, Artificial Sequence
  Description of Artificial Sequence: Synthetic oligonucleotide
  Sense strand starting at position 3320 of SEQ ID NO: 917167
agagauaauguuuagccca

SEQ ID NO: 1214051 - RNA, 19 nt, Artificial Sequence
  Description of Artificial Sequence: Synthetic oligonucleotide
  Antisense strand to SEQ ID NO: 1214050
ugggcuaaacauuaucucu

SEQ ID NO: 1214052 - RNA, 19 nt, Artificial Sequence
  Description of Artificial Sequence: Synthetic oligonucleotide
  Sense strand starting at position 3464 of SEQ ID NO: 917167
caaugucuacccgaauguu

SEQ ID NO: 1214053 - RNA, 19 nt, Artificial Sequence
  Description of Artificial Sequence: Synthetic oligonucleotide
  Antisense strand to SEQ ID NO: 1214052
aacauucggguagacauug

SEQ ID NO: 1214054 - RNA, 19 nt, Artificial Sequence
  Description of Artificial Sequence: Synthetic oligonucleotide
  Sense strand starting at position 3484 of SEQ ID NO: 917167
uaaucugugcucugagaac

SEQ ID NO: 1214055 - RNA, 19 nt, Artificial Sequence
  Description of Artificial Sequence: Synthetic oligonucleotide
  Antisense strand to SEQ ID NO: 1214054
guucucagagcacagauua

SEQ ID NO: 1214056 - RNA, 19 nt, Artificial Sequence
  Description of Artificial Sequence: Synthetic oligonucleotide
  Sense strand starting at position 3579 of SEQ ID NO: 917167
uggcuuucgugaaugggua

SEQ ID NO: 1214057 - RNA, 19 nt, Artificial Sequence
  Description of Artificial Sequence: Synthetic oligonucleotide
  Antisense strand to SEQ ID NO: 1214056
uacccauucacgaaagcca

SEQ ID NO: 1214058 - RNA, 19 nt, Artificial Sequence
  Description of Artificial Sequence: Synthetic oligonucleotide
  Sense strand starting at position 3604 of SEQ ID NO: 917167
ugacaaugcagacaugguu

SEQ ID NO: 1214059 - RNA, 19 nt, Artificial Sequence
  Description of Artificial Sequence: Synthetic oligonucleotide
  Antisense strand to SEQ ID NO: 1214058
aaccaugucugcauuguca

SEQ ID NO: 1214060 - RNA, 19 nt, Artificial Sequence
  Description of Artificial Sequence: Synthetic oligonucleotide
  Sense strand starting at position 3913 of SEQ ID NO: 917167
gcaaaucagucaccuuuga

SEQ ID NO: 1214061 - RNA, 19 nt, Artificial Sequence
  Description of Artificial Sequence: Synthetic oligonucleotide
  Antisense strand to SEQ ID NO: 1214060
ucaaaggugacugauuugc

SEQ ID NO: 1214062 - RNA, 19 nt, Artificial Sequence
  Description of Artificial Sequence: Synthetic oligonucleotide
  Sense strand starting at position 3917 of SEQ ID NO: 917166
aucagucaccuuugagcaa

SEQ ID NO: 1214063 - RNA, 19 nt, Artificial Sequence
  Description of Artificial Sequence: Synthetic oligonucleotide
  Antisense strand to SEQ ID NO: 1214062
uugcucaaaggugacugau

SEQ ID NO: 1214064 - RNA, 19 nt, Artificial Sequence
  Description of Artificial Sequence: Synthetic oligonucleotide
  Sense strand starting at position 3769 of SEQ ID NO: 917168
gcucuuggcuauuucuuau

SEQ ID NO: 1214065 - RNA, 19 nt, Artificial Sequence
  Description of Artificial Sequence: Synthetic oligonucleotide
  Antisense strand to SEQ ID NO: 1214064
auaagaaauagccaagagc

SEQ ID NO: 1214066 - RNA, 19 nt, Artificial Sequence
  Description of Artificial Sequence: Synthetic oligonucleotide
  Sense strand starting at position 137 of SEQ ID NO: 917168
ucuuuaugcuaaucgaaac

SEQ ID NO: 1214067 - RNA, 19 nt, Artificial Sequence
  Description of Artificial Sequence: Synthetic oligonucleotide
  Antisense strand to SEQ ID NO: 1214066
guuucgauuagcauaaaga

SEQ ID NO: 1214068 - RNA, 19 nt, Artificial Sequence
  Description of Artificial Sequence: Synthetic oligonucleotide
  Sense strand starting at position 205 of SEQ ID NO: 917168
aggcacuuaccugguuuaa

SEQ ID NO: 1214069 - RNA, 19 nt, Artificial Sequence
  Description of Artificial Sequence: Synthetic oligonucleotide
  Antisense strand to SEQ ID NO: 1214068
uuaaaccagguaagugccu

SEQ ID NO: 1214070 - RNA, 19 nt, Artificial Sequence
  Description of Artificial Sequence: Synthetic oligonucleotide
  Sense strand starting at position 207 of SEQ ID NO: 917168
gcacuuaccugguuuaaac

SEQ ID NO: 1214071 - RNA, 19 nt, Artificial Sequence
  Description of Artificial Sequence: Synthetic oligonucleotide
  Antisense strand to SEQ ID NO: 1214070
guuuaaaccagguaagugc

SEQ ID NO: 1214072 - RNA, 19 nt, Artificial Sequence
  Description of Artificial Sequence: Synthetic oligonucleotide
  Sense strand starting at position 341 of SEQ ID NO: 917168
gggagcacguacuuaauau

SEQ ID NO: 1214073 - RNA, 19 nt, Artificial Sequence
  Description of Artificial Sequence: Synthetic oligonucleotide
  Antisense strand to SEQ ID NO: 1214072
auauuaaguacgugcuccc

SEQ ID NO: 1214074 - RNA, 19 nt, Artificial Sequence
  Description of Artificial Sequence: Synthetic oligonucleotide
  Sense strand starting at position 342 of SEQ ID NO: 917168
ggagcacguacuuaauauc

SEQ ID NO: 1214075 - RNA, 19 nt, Artificial Sequence
  Description of Artificial Sequence: Synthetic oligonucleotide
  Antisense strand to SEQ ID NO: 1214074
gauauuaaguacgugcucc

SEQ ID NO: 1214076 - RNA, 19 nt, Artificial Sequence
  Description of Artificial Sequence: Synthetic oligonucleotide
  Sense strand starting at position 417 of SEQ ID NO: 917168
uaaaucaaaucguuuggau

SEQ ID NO: 1214077 - RNA, 19 nt, Artificial Sequence
  Description of Artificial Sequence: Synthetic oligonucleotide
  Antisense strand to SEQ ID NO: 1214076
auccaaacgauuugauuua

SEQ ID NO: 1214078 - RNA, 19 nt, Artificial Sequence
  Description of Artificial Sequence: Synthetic oligonucleotide
  Sense strand starting at position 584 of SEQ ID NO: 917168
agaauacacuaucuagguu

SEQ ID NO: 1214079 - RNA, 19 nt, Artificial Sequence
  Description of Artificial Sequence: Synthetic oligonucleotide
  Antisense strand to SEQ ID NO: 1214078
aaccuagauaguguauucu

SEQ ID NO: 1214080 - RNA, 19 nt, Artificial Sequence
  Description of Artificial Sequence: Synthetic oligonucleotide
  Sense strand starting at position 638 of SEQ ID NO: 917168
ccagcaaaccuaugaggua

SEQ ID NO: 1214081 - RNA, 19 nt, Artificial Sequence
  Description of Artificial Sequence: Synthetic oligonucleotide
  Antisense strand to SEQ ID NO: 1214080
uaccucauagguuugcugg

SEQ ID NO: 1214082 - RNA, 19 nt, Artificial Sequence
  Description of Artificial Sequence: Synthetic oligonucleotide
  Sense strand starting at position 701 of SEQ ID NO: 917168
cagagauucugaguaacuu

SEQ ID NO: 1214083 - RNA, 19 nt, Artificial Sequence
  Description of Artificial Sequence: Synthetic oligonucleotide
  Antisense strand to SEQ ID NO: 1214082
aaguuacucagaaucucug

SEQ ID NO: 1214084 - RNA, 19 nt, Artificial Sequence
  Description of Artificial Sequence: Synthetic oligonucleotide
  Sense strand starting at position 709 of SEQ ID NO: 917168
cugaguaacuuucccaaga

SEQ ID NO: 1214085 - RNA, 19 nt, Artificial Sequence
  Description of Artificial Sequence: Synthetic oligonucleotide
  Antisense strand to SEQ ID NO: 1214084
ucuugggaaaguuacucag

SEQ ID NO: 1214086 - RNA, 19 nt, Artificial Sequence
  Description of Artificial Sequence: Synthetic oligonucleotide
  Sense strand starting at position 710 of SEQ ID NO: 917168
ugaguaacuuucccaagau

SEQ ID NO: 1214087 - RNA, 19 nt, Artificial Sequence
  Description of Artificial Sequence: Synthetic oligonucleotide
  Antisense strand to SEQ ID NO: 1214086
aucuugggaaaguuacuca

SEQ ID NO: 1214088 - RNA, 19 nt, Artificial Sequence
  Description of Artificial Sequence: Synthetic oligonucleotide
  Sense strand starting at position 746 of SEQ ID NO: 917168
ccagauuugacccgcagca

SEQ ID NO: 1214089 - RNA, 19 nt, Artificial Sequence
  Description of Artificial Sequence: Synthetic oligonucleotide
  Antisense strand to SEQ ID NO: 1214088
ugcugcgggucaaaucugg

SEQ ID NO: 1214090 - RNA, 19 nt, Artificial Sequence
  Description of Artificial Sequence: Synthetic oligonucleotide
  Sense strand starting at position 833 of SEQ ID NO: 917168
uuuagcuguugauuacuua

SEQ ID NO: 1214091 - RNA, 19 nt, Artificial Sequence
  Description of Artificial Sequence: Synthetic oligonucleotide
  Antisense strand to SEQ ID NO: 1214090
uaaguaaucaacagcuaaa

SEQ ID NO: 1214092 - RNA, 19 nt, Artificial Sequence
  Description of Artificial Sequence: Synthetic oligonucleotide
  Sense strand starting at position 834 of SEQ ID NO: 917168
uuagcuguugauuacuuau

SEQ ID NO: 1214093 - RNA, 19 nt, Artificial Sequence
  Description of Artificial Sequence: Synthetic oligonucleotide
  Antisense strand to SEQ ID NO: 1214092
auaaguaaucaacagcuaa

SEQ ID NO: 1214094 - RNA, 19 nt, Artificial Sequence
  Description of Artificial Sequence: Synthetic oligonucleotide
  Sense strand starting at position 841 of SEQ ID NO: 917168
uugauuacuuaugcuagua

SEQ ID NO: 1214095 - RNA, 19 nt, Artificial Sequence
  Description of Artificial Sequence: Synthetic oligonucleotide
  Antisense strand to SEQ ID NO: 1214094
uacuagcauaaguaaucaa

SEQ ID NO: 1214096 - RNA, 19 nt, Artificial Sequence
  Description of Artificial Sequence: Synthetic oligonucleotide
  Sense strand starting at position 1102 of SEQ ID NO: 917168
gacaaucuucccggucuaa

SEQ ID NO: 1214097 - RNA, 19 nt, Artificial Sequence
  Description of Artificial Sequence: Synthetic oligonucleotide
  Antisense strand to SEQ ID NO: 1214096
uuagaccgggaagauuguc

SEQ ID NO: 1214098 - RNA, 19 nt, Artificial Sequence
  Description of Artificial Sequence: Synthetic oligonucleotide
  Sense strand starting at position 1229 of SEQ ID NO: 917168
cgaguuggucgcccaguaa

SEQ ID NO: 1214099 - RNA, 19 nt, Artificial Sequence
  Description of Artificial Sequence: Synthetic oligonucleotide
  Antisense strand to SEQ ID NO: 1214098
uuacugggcgaccaacucg

SEQ ID NO: 1214100 - RNA, 19 nt, Artificial Sequence
  Description of Artificial Sequence: Synthetic oligonucleotide
  Sense strand starting at position 1277 of SEQ ID NO: 917168
aacgacagugcaugauaua

SEQ ID NO: 1214101 - RNA, 19 nt, Artificial Sequence
  Description of Artificial Sequence: Synthetic oligonucleotide
  Antisense strand to SEQ ID NO: 1214100
uauaucaugcacugucguu

SEQ ID NO: 1214102 - RNA, 19 nt, Artificial Sequence
  Description of Artificial Sequence: Synthetic oligonucleotide
  Sense strand starting at position 1278 of SEQ ID NO: 917168
acgacagugcaugauauaa

SEQ ID NO: 1214103 - RNA, 19 nt, Artificial Sequence
  Description of Artificial Sequence: Synthetic oligonucleotide
  Antisense strand to SEQ ID NO: 1214102
uuauaucaugcacugucgu

SEQ ID NO: 1214104 - RNA, 19 nt, Artificial Sequence
  Description of Artificial Sequence: Synthetic oligonucleotide
  Sense strand starting at position 2037 of SEQ ID NO: 917168
ucuggcucccaggagaauu

SEQ ID NO: 1214105 - RNA, 19 nt, Artificial Sequence
  Description of Artificial Sequence: Synthetic oligonucleotide
  Antisense strand to SEQ ID NO: 1214104
aauucuccugggagccaga

SEQ ID NO: 1214106 - RNA, 19 nt, Artificial Sequence
  Description of Artificial Sequence: Synthetic oligonucleotide
  Sense strand starting at position 2192 of SEQ ID NO: 917168
gucaacaaacguugaguga

SEQ ID NO: 1214107 - RNA, 19 nt, Artificial Sequence
  Description of Artificial Sequence: Synthetic oligonucleotide
  Antisense strand to SEQ ID NO: 1214106
ucacucaacguuuguugac

SEQ ID NO: 1214108 - RNA, 19 nt, Artificial Sequence
  Description of Artificial Sequence: Synthetic oligonucleotide
  Sense strand starting at position 2193 of SEQ ID NO: 917168
ucaacaaacguugagugaa

SEQ ID NO: 1214109 - RNA, 19 nt, Artificial Sequence
  Description of Artificial Sequence: Synthetic oligonucleotide
  Antisense strand to SEQ ID NO: 1214108
uucacucaacguuuguuga

SEQ ID NO: 1214110 - RNA, 19 nt, Artificial Sequence
  Description of Artificial Sequence: Synthetic oligonucleotide
  Sense strand starting at position 2201 of SEQ ID NO: 917168
cguugagugaacgagaaug

SEQ ID NO: 1214111 - RNA, 19 nt, Artificial Sequence
  Description of Artificial Sequence: Synthetic oligonucleotide
  Antisense strand to SEQ ID NO: 1214110
cauucucguucacucaacg

SEQ ID NO: 1214112 - RNA, 19 nt, Artificial Sequence
  Description of Artificial Sequence: Synthetic oligonucleotide
  Sense strand starting at position 2206 of SEQ ID NO: 917168
agugaacgagaauguguau

SEQ ID NO: 1214113 - RNA, 19 nt, Artificial Sequence
  Description of Artificial Sequence: Synthetic oligonucleotide
  Antisense strand to SEQ ID NO: 1214112
auacacauucucguucacu

SEQ ID NO: 1214114 - RNA, 19 nt, Artificial Sequence
  Description of Artificial Sequence: Synthetic oligonucleotide
  Sense strand starting at position 2267 of SEQ ID NO: 917168
gggacaauagugcggaaau

SEQ ID NO: 1214115 - RNA, 19 nt, Artificial Sequence
  Description of Artificial Sequence: Synthetic oligonucleotide
  Antisense strand to SEQ ID NO: 1214114
auuuccgcacuauuguccc

SEQ ID NO: 1214116 - RNA, 19 nt, Artificial Sequence
  Description of Artificial Sequence: Synthetic oligonucleotide
  Sense strand starting at position 2279 of SEQ ID NO: 917168
cggaaauggcucgucguca

SEQ ID NO: 1214117 - RNA, 19 nt, Artificial Sequence
  Description of Artificial Sequence: Synthetic oligonucleotide
  Antisense strand to SEQ ID NO: 1214116
ugacgacgagccauuuccg

SEQ ID NO: 1214118 - RNA, 19 nt, Artificial Sequence
  Description of Artificial Sequence: Synthetic oligonucleotide
  Sense strand starting at position 2310 of SEQ ID NO: 917168
cagucauaacagugguuaa

SEQ ID NO: 1214119 - RNA, 19 nt, Artificial Sequence
  Description of Artificial Sequence: Synthetic oligonucleotide
  Antisense strand to SEQ ID NO: 1214118
uuaaccacuguuaugacug

SEQ ID NO: 1214120 - RNA, 19 nt, Artificial Sequence
  Description of Artificial Sequence: Synthetic oligonucleotide
  Sense strand starting at position 2320 of SEQ ID NO: 917168
agugguuaacacugacaau

SEQ ID NO: 1214121 - RNA, 19 nt, Artificial Sequence
  Description of Artificial Sequence: Synthetic oligonucleotide
  Antisense strand to SEQ ID NO: 1214120
auugucaguguuaaccacu

SEQ ID NO: 1214122 - RNA, 19 nt, Artificial Sequence
  Description of Artificial Sequence: Synthetic oligonucleotide
  Sense strand starting at position 2373 of SEQ ID NO: 917168
ggaaaugacucguccucac

SEQ ID NO: 1214123 - RNA, 19 nt, Artificial Sequence
  Description of Artificial Sequence: Synthetic oligonucleotide
  Antisense strand to SEQ ID NO: 1214122
gugaggacgagucauuucc

SEQ ID NO: 1214124 - RNA, 19 nt, Artificial Sequence
  Description of Artificial Sequence: Synthetic oligonucleotide
  Sense strand starting at position 2403 of SEQ ID NO: 917168
cagugauaacagugguuaa

SEQ ID NO: 1214125 - RNA, 19 nt, Artificial Sequence
  Description of Artificial Sequence: Synthetic oligonucleotide
  Antisense strand to SEQ ID NO: 1214124
uuaaccacuguuaucacug

SEQ ID NO: 1214126 - RNA, 19 nt, Artificial Sequence
  Description of Artificial Sequence: Synthetic oligonucleotide
  Sense strand starting at position 2404 of SEQ ID NO: 917168
agugauaacagugguuaac

SEQ ID NO: 1214127 - RNA, 19 nt, Artificial Sequence
  Description of Artificial Sequence: Synthetic oligonucleotide
  Antisense strand to SEQ ID NO: 1214126
guuaaccacuguuaucacu

SEQ ID NO: 1214128 - RNA, 19 nt, Artificial Sequence
  Description of Artificial Sequence: Synthetic oligonucleotide
  Sense strand starting at position 2413 of SEQ ID NO: 917168
agugguuaacaccgacaau

SEQ ID NO: 1214129 - RNA, 19 nt, Artificial Sequence
  Description of Artificial Sequence: Synthetic oligonucleotide
  Antisense strand to SEQ ID NO: 1214128
auugucgguguuaaccacu

SEQ ID NO: 1214130 - RNA, 19 nt, Artificial Sequence
  Description of Artificial Sequence: Synthetic oligonucleotide
  Sense strand starting at position 2414 of SEQ ID NO: 917168
gugguuaacaccgacaaua

SEQ ID NO: 1214131 - RNA, 19 nt, Artificial Sequence
  Description of Artificial Sequence: Synthetic oligonucleotide
  Antisense strand to SEQ ID NO: 1214130
uauugucgguguuaaccac

SEQ ID NO: 1214132 - RNA, 19 nt, Artificial Sequence
  Description of Artificial Sequence: Synthetic oligonucleotide
  Sense strand starting at position 2656 of SEQ ID NO: 917168
gacuuaagucuauacguag

SEQ ID NO: 1214133 - RNA, 19 nt, Artificial Sequence
  Description of Artificial Sequence: Synthetic oligonucleotide
  Antisense strand to SEQ ID NO: 1214132
cuacguauagacuuaaguc

SEQ ID NO: 1214134 - RNA, 19 nt, Artificial Sequence
  Description of Artificial Sequence: Synthetic oligonucleotide
  Sense strand starting at position 2782 of SEQ ID NO: 917168
gcaucauaauguuuguaag

SEQ ID NO: 1214135 - RNA, 19 nt, Artificial Sequence
  Description of Artificial Sequence: Synthetic oligonucleotide
  Antisense strand to SEQ ID NO: 1214134
cuuacaaacauuaugaugc

SEQ ID NO: 1214136 - RNA, 19 nt, Artificial Sequence
  Description of Artificial Sequence: Synthetic oligonucleotide
  Sense strand starting at position 2793 of SEQ ID NO: 917168
uuuguaagccuaugggaau

SEQ ID NO: 1214137 - RNA, 19 nt, Artificial Sequence
  Description of Artificial Sequence: Synthetic oligonucleotide
  Antisense strand to SEQ ID NO: 1214136
auucccauaggcuuacaaa

SEQ ID NO: 1214138 - RNA, 19 nt, Artificial Sequence
  Description of Artificial Sequence: Synthetic oligonucleotide
  Sense strand starting at position 2905 of SEQ ID NO: 917168
aggucucuugauuacauau

SEQ ID NO: 1214139 - RNA, 19 nt, Artificial Sequence
  Description of Artificial Sequence: Synthetic oligonucleotide
  Antisense strand to SEQ ID NO: 1214138
auauguaaucaagagaccu

SEQ ID NO: 1214140 - RNA, 19 nt, Artificial Sequence
  Description of Artificial Sequence: Synthetic oligonucleotide
  Sense strand starting at position 3063 of SEQ ID NO: 917168
cguauacuauggccaaauu

SEQ ID NO: 1214141 - RNA, 19 nt, Artificial Sequence
  Description of Artificial Sequence: Synthetic oligonucleotide
  Antisense strand to SEQ ID NO: 1214140
aauuuggccauaguauacg

SEQ ID NO: 1214142 - RNA, 19 nt, Artificial Sequence
  Description of Artificial Sequence: Synthetic oligonucleotide
  Sense strand starting at position 3696 of SEQ ID NO: 917168
gaccuuguucaguggugga

SEQ ID NO: 1214143 - RNA, 19 nt, Artificial Sequence
  Description of Artificial Sequence: Synthetic oligonucleotide
  Antisense strand to SEQ ID NO: 1214142
uccaccacugaacaagguc

SEQ ID NO: 1214144 - RNA, 19 nt, Artificial Sequence
  Description of Artificial Sequence: Synthetic oligonucleotide
  Sense strand starting at position 3761 of SEQ ID NO: 917169
gggagcuuucaugguaaga

SEQ ID NO: 1214145 - RNA, 19 nt, Artificial Sequence
  Description of Artificial Sequence: Synthetic oligonucleotide
  Antisense strand to SEQ ID NO: 1214144
ucuuaccaugaaagcuccc

SEQ ID NO: 1214146 - RNA, 19 nt, Artificial Sequence
  Description of Artificial Sequence: Synthetic oligonucleotide
  Sense strand starting at position 198 of SEQ ID NO: 917169
gggaaagugggaugcauaa

SEQ ID NO: 1214147 - RNA, 19 nt, Artificial Sequence
  Description of Artificial Sequence: Synthetic oligonucleotide
  Antisense strand to SEQ ID NO: 1214146
uuaugcaucccacuuuccc

SEQ ID NO: 1214148 - RNA, 19 nt, Artificial Sequence
  Description of Artificial Sequence: Synthetic oligonucleotide
  Sense strand starting at position 219 of SEQ ID NO: 917169
cuagguggguccucccaua

SEQ ID NO: 1214149 - RNA, 19 nt, Artificial Sequence
  Description of Artificial Sequence: Synthetic oligonucleotide
  Antisense strand to SEQ ID NO: 1214148
uaugggaggacccaccuag

SEQ ID NO: 1214150 - RNA, 19 nt, Artificial Sequence
  Description of Artificial Sequence: Synthetic oligonucleotide
  Sense strand starting at position 950 of SEQ ID NO: 917169
acacuuaguguuugaacca

SEQ ID NO: 1214151 - RNA, 19 nt, Artificial Sequence
  Description of Artificial Sequence: Synthetic oligonucleotide
  Antisense strand to SEQ ID NO: 1214150
ugguucaaacacuaagugu

SEQ ID NO: 1214152 - RNA, 19 nt, Artificial Sequence
  Description of Artificial Sequence: Synthetic oligonucleotide
  Sense strand starting at position 985 of SEQ ID NO: 917169
gucauagggcuuugagaau

SEQ ID NO: 1214153 - RNA, 19 nt, Artificial Sequence
  Description of Artificial Sequence: Synthetic oligonucleotide
  Antisense strand to SEQ ID NO: 1214152
auucucaaagcccuaugac

SEQ ID NO: 1214154 - RNA, 19 nt, Artificial Sequence
  Description of Artificial Sequence: Synthetic oligonucleotide
  Sense strand starting at position 1229 of SEQ ID NO: 917169
ucugcaugagcccagaauu

SEQ ID NO: 1214155 - RNA, 19 nt, Artificial Sequence
  Description of Artificial Sequence: Synthetic oligonucleotide
  Antisense strand to SEQ ID NO: 1214154
aauucugggcucaugcaga

SEQ ID NO: 1214156 - RNA, 19 nt, Artificial Sequence
  Description of Artificial Sequence: Synthetic oligonucleotide
  Sense strand starting at position 1360 of SEQ ID NO: 917169
uugagaaguuaugcauuaa

SEQ ID NO: 1214157 - RNA, 19 nt, Artificial Sequence
  Description of Artificial Sequence: Synthetic oligonucleotide
  Antisense strand to SEQ ID NO: 1214156
uuaaugcauaacuucucaa

SEQ ID NO: 1214158 - RNA, 19 nt, Artificial Sequence
  Description of Artificial Sequence: Synthetic oligonucleotide
  Sense strand starting at position 1364 of SEQ ID NO: 917169
gaaguuaugcauuaaagug

SEQ ID NO: 1214159 - RNA, 19 nt, Artificial Sequence
  Description of Artificial Sequence: Synthetic oligonucleotide
  Antisense strand to SEQ ID NO: 1214158
cacuuuaaugcauaacuuc

SEQ ID NO: 1214160 - RNA, 19 nt, Artificial Sequence
  Description of Artificial Sequence: Synthetic oligonucleotide
  Sense strand starting at position 1397 of SEQ ID NO: 917169
aguuaauggguuuguuauu

SEQ ID NO: 1214161 - RNA, 19 nt, Artificial Sequence
  Description of Artificial Sequence: Synthetic oligonucleotide
  Antisense strand to SEQ ID NO: 1214160
aauaacaaacccauuaacu

SEQ ID NO: 1214162 - RNA, 19 nt, Artificial Sequence
  Description of Artificial Sequence: Synthetic oligonucleotide
  Sense strand starting at position 1398 of SEQ ID NO: 917169
guuaauggguuuguuauua

SEQ ID NO: 1214163 - RNA, 19 nt, Artificial Sequence
  Description of Artificial Sequence: Synthetic oligonucleotide
  Antisense strand to SEQ ID NO: 1214162
uaauaacaaacccauuaac

SEQ ID NO: 1214164 - RNA, 19 nt, Artificial Sequence
  Description of Artificial Sequence: Synthetic oligonucleotide
  Sense strand starting at position 1438 of SEQ ID NO: 917169
ugguuuaauuccucaugca

SEQ ID NO: 1214165 - RNA, 19 nt, Artificial Sequence
  Description of Artificial Sequence: Synthetic oligonucleotide
  Antisense strand to SEQ ID NO: 1214164
ugcaugaggaauuaaacca

SEQ ID NO: 1214166 - RNA, 19 nt, Artificial Sequence
  Description of Artificial Sequence: Synthetic oligonucleotide
  Sense strand starting at position 1439 of SEQ ID NO: 917169
gguuuaauuccucaugcac

SEQ ID NO: 1214167 - RNA, 19 nt, Artificial Sequence
  Description of Artificial Sequence: Synthetic oligonucleotide
  Antisense strand to SEQ ID NO: 1214166
gugcaugaggaauuaaacc

SEQ ID NO: 1214168 - RNA, 19 nt, Artificial Sequence
  Description of Artificial Sequence: Synthetic oligonucleotide
  Sense strand starting at position 1542 of SEQ ID NO: 917169
ugggaaccgcuguguuaaa

SEQ ID NO: 1214169 - RNA, 19 nt, Artificial Sequence
  Description of Artificial Sequence: Synthetic oligonucleotide
  Antisense strand to SEQ ID NO: 1214168
uuuaacacagcgguuccca

SEQ ID NO: 1214170 - RNA, 19 nt, Artificial Sequence
  Description of Artificial Sequence: Synthetic oligonucleotide
  Sense strand starting at position 1607 of SEQ ID NO: 917169
gcgcguucacguuugccau

SEQ ID NO: 1214171 - RNA, 19 nt, Artificial Sequence
  Description of Artificial Sequence: Synthetic oligonucleotide
  Antisense strand to SEQ ID NO: 1214170
auggcaaacgugaacgcgc

SEQ ID NO: 1214172 - RNA, 19 nt, Artificial Sequence
  Description of Artificial Sequence: Synthetic oligonucleotide
  Sense strand starting at position 1667 of SEQ ID NO: 917169
gguaauucgaccuaaggug

SEQ ID NO: 1214173 - RNA, 19 nt, Artificial Sequence
  Description of Artificial Sequence: Synthetic oligonucleotide
  Antisense strand to SEQ ID NO: 1214172
caccuuaggucgaauuacc

SEQ ID NO: 1214174 - RNA, 19 nt, Artificial Sequence
  Description of Artificial Sequence: Synthetic oligonucleotide
  Sense strand starting at position 2155 of SEQ ID NO: 917169
cggcgagucccgaggucaa

SEQ ID NO: 1214175 - RNA, 19 nt, Artificial Sequence
  Description of Artificial Sequence: Synthetic oligonucleotide
  Antisense strand to SEQ ID NO: 1214174
uugaccucgggacucgccg

SEQ ID NO: 1214176 - RNA, 19 nt, Artificial Sequence
  Description of Artificial Sequence: Synthetic oligonucleotide
  Sense strand starting at position 2347 of SEQ ID NO: 917169
agccaacauuucuagggau

SEQ ID NO: 1214177 - RNA, 19 nt, Artificial Sequence
  Description of Artificial Sequence: Synthetic oligonucleotide
  Antisense strand to SEQ ID NO: 1214176
aucccuagaaauguuggcu

SEQ ID NO: 1214178 - RNA, 19 nt, Artificial Sequence
  Description of Artificial Sequence: Synthetic oligonucleotide
  Sense strand starting at position 2359 of SEQ ID NO: 917169
uagggauuucuucgcagcu

SEQ ID NO: 1214179 - RNA, 19 nt, Artificial Sequence
  Description of Artificial Sequence: Synthetic oligonucleotide
  Antisense strand to SEQ ID NO: 1214178
agcugcgaagaaaucccua

SEQ ID NO: 1214180 - RNA, 19 nt, Artificial Sequence
  Description of Artificial Sequence: Synthetic oligonucleotide
  Sense strand starting at position 2360 of SEQ ID NO: 917169
agggauuucuucgcagcuu

SEQ ID NO: 1214181 - RNA, 19 nt, Artificial Sequence
  Description of Artificial Sequence: Synthetic oligonucleotide
  Antisense strand to SEQ ID NO: 1214180
aagcugcgaagaaaucccu

SEQ ID NO: 1214182 - RNA, 19 nt, Artificial Sequence
  Description of Artificial Sequence: Synthetic oligonucleotide
  Sense strand starting at position 2422 of SEQ ID NO: 917169
ugcauaucuugguuagcaa

SEQ ID NO: 1214183 - RNA, 19 nt, Artificial Sequence
  Description of Artificial Sequence: Synthetic oligonucleotide
  Antisense strand to SEQ ID NO: 1214182
uugcuaaccaagauaugca

SEQ ID NO: 1214184 - RNA, 19 nt, Artificial Sequence
  Description of Artificial Sequence: Synthetic oligonucleotide
  Sense strand starting at position 2423 of SEQ ID NO: 917169
gcauaucuugguuagcaau

SEQ ID NO: 1214185 - RNA, 19 nt, Artificial Sequence
  Description of Artificial Sequence: Synthetic oligonucleotide
  Antisense strand to SEQ ID NO: 1214184
auugcuaaccaagauaugc

SEQ ID NO: 1214186 - RNA, 19 nt, Artificial Sequence
  Description of Artificial Sequence: Synthetic oligonucleotide
  Sense strand starting at position 2425 of SEQ ID NO: 917169
auaucuugguuagcaauua

SEQ ID NO: 1214187 - RNA, 19 nt, Artificial Sequence
  Description of Artificial Sequence: Synthetic oligonucleotide
  Antisense strand to SEQ ID NO: 1214186
uaauugcuaaccaagauau

SEQ ID NO: 1214188 - RNA, 19 nt, Artificial Sequence
  Description of Artificial Sequence: Synthetic oligonucleotide
  Sense strand starting at position 2437 of SEQ ID NO: 917169
gcaauuaaucuagaguggu

SEQ ID NO: 1214189 - RNA, 19 nt, Artificial Sequence
  Description of Artificial Sequence: Synthetic oligonucleotide
  Antisense strand to SEQ ID NO: 1214188
accacucuagauuaauugc

SEQ ID NO: 1214190 - RNA, 19 nt, Artificial Sequence
  Description of Artificial Sequence: Synthetic oligonucleotide
  Sense strand starting at position 2440 of SEQ ID NO: 917169
auuaaucuagaguggucaa

SEQ ID NO: 1214191 - RNA, 19 nt, Artificial Sequence
  Description of Artificial Sequence: Synthetic oligonucleotide
  Antisense strand to SEQ ID NO: 1214190
uugaccacucuagauuaau

SEQ ID NO: 1214192 - RNA, 19 nt, Artificial Sequence
  Description of Artificial Sequence: Synthetic oligonucleotide
  Sense strand starting at position 2443 of SEQ ID NO: 917169
aaucuagaguggucaaagu

SEQ ID NO: 1214193 - RNA, 19 nt, Artificial Sequence
  Description of Artificial Sequence: Synthetic oligonucleotide
  Antisense strand to SEQ ID NO: 1214192
acuuugaccacucuagauu

SEQ ID NO: 1214194 - RNA, 19 nt, Artificial Sequence
  Description of Artificial Sequence: Synthetic oligonucleotide
  Sense strand starting at position 2469 of SEQ ID NO: 917169
ggcugcauccuggaacaca

SEQ ID NO: 1214195 - RNA, 19 nt, Artificial Sequence
  Description of Artificial Sequence: Synthetic oligonucleotide
  Antisense strand to SEQ ID NO: 1214194
uguguuccaggaugcagcc

SEQ ID NO: 1214196 - RNA, 19 nt, Artificial Sequence
  Description of Artificial Sequence: Synthetic oligonucleotide
  Sense strand starting at position 2571 of SEQ ID NO: 917169
cguucugcagcggugagaa

SEQ ID NO: 1214197 - RNA, 19 nt, Artificial Sequence
  Description of Artificial Sequence: Synthetic oligonucleotide
  Antisense strand to SEQ ID NO: 1214196
uucucaccgcugcagaacg

SEQ ID NO: 1214198 - RNA, 19 nt, Artificial Sequence
  Description of Artificial Sequence: Synthetic oligonucleotide
  Sense strand starting at position 2780 of SEQ ID NO: 917169
cugaaaccguuucucagaa

SEQ ID NO: 1214199 - RNA, 19 nt, Artificial Sequence
  Description of Artificial Sequence: Synthetic oligonucleotide
  Antisense strand to SEQ ID NO: 1214198
uucugagaaacgguuucag

SEQ ID NO: 1214200 - RNA, 19 nt, Artificial Sequence
  Description of Artificial Sequence: Synthetic oligonucleotide
  Sense strand starting at position 2929 of SEQ ID NO: 917169
uucugcugagccuaagaau

SEQ ID NO: 1214201 - RNA, 19 nt, Artificial Sequence
  Description of Artificial Sequence: Synthetic oligonucleotide
  Antisense strand to SEQ ID NO: 1214200
auucuuaggcucagcagaa

SEQ ID NO: 1214202 - RNA, 19 nt, Artificial Sequence
  Description of Artificial Sequence: Synthetic oligonucleotide
  Sense strand starting at position 2938 of SEQ ID NO: 917169
gccuaagaauuauuguuau

SEQ ID NO: 1214203 - RNA, 19 nt, Artificial Sequence
  Description of Artificial Sequence: Synthetic oligonucleotide
  Antisense strand to SEQ ID NO: 1214202
auaacaauaauucuuaggc

SEQ ID NO: 1214204 - RNA, 19 nt, Artificial Sequence
  Description of Artificial Sequence: Synthetic oligonucleotide
  Sense strand starting at position 2951 of SEQ ID NO: 917169
uguuauauucgauaccaac

SEQ ID NO: 1214205 - RNA, 19 nt, Artificial Sequence
  Description of Artificial Sequence: Synthetic oligonucleotide
  Antisense strand to SEQ ID NO: 1214204
guugguaucgaauauaaca

SEQ ID NO: 1214206 - RNA, 19 nt, Artificial Sequence
  Description of Artificial Sequence: Synthetic oligonucleotide
  Sense strand starting at position 3584 of SEQ ID NO: 917169
gcuggagugcaguaauuac

SEQ ID NO: 1214207 - RNA, 19 nt, Artificial Sequence
  Description of Artificial Sequence: Synthetic oligonucleotide
  Antisense strand to SEQ ID NO: 1214206
guaauuacugcacuccagc

SEQ ID NO: 1214208 - RNA, 19 nt, Artificial Sequence
  Description of Artificial Sequence: Synthetic oligonucleotide
  Sense strand starting at position 3653 of SEQ ID NO: 917169
acucaagucugauucugga

SEQ ID NO: 1214209 - RNA, 19 nt, Artificial Sequence
  Description of Artificial Sequence: Synthetic oligonucleotide
  Antisense strand to SEQ ID NO: 1214208
uccagaaucagacuugagu

SEQ ID NO: 1214210 - RNA, 19 nt, Artificial Sequence
  Description of Artificial Sequence: Synthetic oligonucleotide
  Sense strand starting at position 3783 of SEQ ID NO: 917169
cuccuaguuccagaguuga

SEQ ID NO: 1214211 - RNA, 19 nt, Artificial Sequence
  Description of Artificial Sequence: Synthetic oligonucleotide
  Antisense strand to SEQ ID NO: 1214210
ucaacucuggaacuaggag

SEQ ID NO: 1214212 - RNA, 19 nt, Artificial Sequence
  Description of Artificial Sequence: Synthetic oligonucleotide
  Sense strand starting at position 3861 of SEQ ID NO: 917169
ggguauaaauaccucauca

SEQ ID NO: 1214213 - RNA, 19 nt, Artificial Sequence
  Description of Artificial Sequence: Synthetic oligonucleotide
  Antisense strand to SEQ ID NO: 1214212
ugaugagguauuuauaccc

SEQ ID NO: 1214214 - RNA, 19 nt, Artificial Sequence
  Description of Artificial Sequence: Synthetic oligonucleotide
  Sense strand starting at position 3879 of SEQ ID NO: 917169
accucauaggcuuguuaua

SEQ ID NO: 1214215 - RNA, 19 nt, Artificial Sequence
  Description of Artificial Sequence: Synthetic oligonucleotide
  Antisense strand to SEQ ID NO: 1214214
uauaacaagccuaugaggu

SEQ ID NO: 1214216 - RNA, 19 nt, Artificial Sequence
  Description of Artificial Sequence: Synthetic oligonucleotide
  Sense strand starting at position 3881 of SEQ ID NO: 917169
cucauaggcuuguuauaau

SEQ ID NO: 1214217 - RNA, 19 nt, Artificial Sequence
  Description of Artificial Sequence: Synthetic oligonucleotide
  Antisense strand to SEQ ID NO: 1214216
auuauaacaagccuaugag

SEQ ID NO: 1214218 - RNA, 19 nt, Artificial Sequence
  Description of Artificial Sequence: Synthetic oligonucleotide
  Sense strand starting at position 3898 of SEQ ID NO: 917169
augauagacugaguuuaca

SEQ ID NO: 1214219 - RNA, 19 nt, Artificial Sequence
  Description of Artificial Sequence: Synthetic oligonucleotide
  Antisense strand to SEQ ID NO: 1214218
uguaaacucagucuaucau

SEQ ID NO: 1214220 - RNA, 19 nt, Artificial Sequence
  Description of Artificial Sequence: Synthetic oligonucleotide
  Sense strand starting at position 3952 of SEQ ID NO: 917169
gcaaguucucaguaguguu

SEQ ID NO: 1214221 - RNA, 19 nt, Artificial Sequence
  Description of Artificial Sequence: Synthetic oligonucleotide
  Antisense strand to SEQ ID NO: 1214220
aacacuacugagaacuugc

SEQ ID NO: 1214222 - RNA, 19 nt, Artificial Sequence
  Description of Artificial Sequence: Synthetic oligonucleotide
  Sense strand starting at position 3965 of SEQ ID NO: 917169
aguguuaacuauuccucau

SEQ ID NO: 1214223 - RNA, 19 nt, Artificial Sequence
  Description of Artificial Sequence: Synthetic oligonucleotide
  Antisense strand to SEQ ID NO: 1214222
augaggaauaguuaacacu

SEQ ID NO: 1214224 - RNA, 19 nt, Artificial Sequence
  Description of Artificial Sequence: Synthetic oligonucleotide
  Sense strand starting at position 3983 of SEQ ID NO: 917170
uuauuauugucauugcauc

SEQ ID NO: 1214225 - RNA, 19 nt, Artificial Sequence
  Description of Artificial Sequence: Synthetic oligonucleotide
  Antisense strand to SEQ ID NO: 1214224
gaugcaaugacaauaauaa

SEQ ID NO: 1214226 - RNA, 19 nt, Artificial Sequence
  Description of Artificial Sequence: Synthetic oligonucleotide
  Sense strand starting at position 28 of SEQ ID NO: 917170
acugcauguggcuaaugau

SEQ ID NO: 1214227 - RNA, 19 nt, Artificial Sequence
  Description of Artificial Sequence: Synthetic oligonucleotide
  Antisense strand to SEQ ID NO: 1214226
aucauuagccacaugcagu

SEQ ID NO: 1214228 - RNA, 19 nt, Artificial Sequence
  Description of Artificial Sequence: Synthetic oligonucleotide
  Sense strand starting at position 136 of SEQ ID NO: 917170
guuuaugacccaugacaau

SEQ ID NO: 1214229 - RNA, 19 nt, Artificial Sequence
  Description of Artificial Sequence: Synthetic oligonucleotide
  Antisense strand to SEQ ID NO: 1214228
auugucaugggucauaaac

SEQ ID NO: 1214230 - RNA, 19 nt, Artificial Sequence
  Description of Artificial Sequence: Synthetic oligonucleotide
  Sense strand starting at position 204 of SEQ ID NO: 917170
ugcuauuaaguccaagcau

SEQ ID NO: 1214231 - RNA, 19 nt, Artificial Sequence
  Description of Artificial Sequence: Synthetic oligonucleotide
  Antisense strand to SEQ ID NO: 1214230
augcuuggacuuaauagca

SEQ ID NO: 1214232 - RNA, 19 nt, Artificial Sequence
  Description of Artificial Sequence: Synthetic oligonucleotide
  Sense strand starting at position 285 of SEQ ID NO: 917170
uuuauuauccaggguauaa

SEQ ID NO: 1214233 - RNA, 19 nt, Artificial Sequence
  Description of Artificial Sequence: Synthetic oligonucleotide
  Antisense strand to SEQ ID NO: 1214232
uuauacccuggauaauaaa

SEQ ID NO: 1214234 - RNA, 19 nt, Artificial Sequence
  Description of Artificial Sequence: Synthetic oligonucleotide
  Sense strand starting at position 359 of SEQ ID NO: 917170
auccacuuccgguaccaua

SEQ ID NO: 1214235 - RNA, 19 nt, Artificial Sequence
  Description of Artificial Sequence: Synthetic oligonucleotide
  Antisense strand to SEQ ID NO: 1214234
uaugguaccggaaguggau

SEQ ID NO: 1214236 - RNA, 19 nt, Artificial Sequence
  Description of Artificial Sequence: Synthetic oligonucleotide
  Sense strand starting at position 443 of SEQ ID NO: 917170
augugaagagaacguuuaa

SEQ ID NO: 1214237 - RNA, 19 nt, Artificial Sequence
  Description of Artificial Sequence: Synthetic oligonucleotide
  Antisense strand to SEQ ID NO: 1214236
uuaaacguucucuucacau

SEQ ID NO: 1214238 - RNA, 19 nt, Artificial Sequence
  Description of Artificial Sequence: Synthetic oligonucleotide
  Sense strand starting at position 987 of SEQ ID NO: 917170
gaagcaguagugcauaaua

SEQ ID NO: 1214239 - RNA, 19 nt, Artificial Sequence
  Description of Artificial Sequence: Synthetic oligonucleotide
  Antisense strand to SEQ ID NO: 1214238
uauuaugcacuacugcuuc

SEQ ID NO: 1214240 - RNA, 19 nt, Artificial Sequence
  Description of Artificial Sequence: Synthetic oligonucleotide
  Sense strand starting at position 989 of SEQ ID NO: 917170
agcaguagugcauaauauc

SEQ ID NO: 1214241 - RNA, 19 nt, Artificial Sequence
  Description of Artificial Sequence: Synthetic oligonucleotide
  Antisense strand to SEQ ID NO: 1214240
gauauuaugcacuacugcu

SEQ ID NO: 1214242 - RNA, 19 nt, Artificial Sequence
  Description of Artificial Sequence: Synthetic oligonucleotide
  Sense strand starting at position 1006 of SEQ ID NO: 917170
uccuaaugguaaguggauu

SEQ ID NO: 1214243 - RNA, 19 nt, Artificial Sequence
  Description of Artificial Sequence: Synthetic oligonucleotide
  Antisense strand to SEQ ID NO: 1214242
aauccacuuaccauuagga

SEQ ID NO: 1214244 - RNA, 19 nt, Artificial Sequence
  Description of Artificial Sequence: Synthetic oligonucleotide
  Sense strand starting at position 1007 of SEQ ID NO: 917170
ccuaaugguaaguggauua

SEQ ID NO: 1214245 - RNA, 19 nt, Artificial Sequence
  Description of Artificial Sequence: Synthetic oligonucleotide
  Antisense strand to SEQ ID NO: 1214244
uaauccacuuaccauuagg

SEQ ID NO: 1214246 - RNA, 19 nt, Artificial Sequence
  Description of Artificial Sequence: Synthetic oligonucleotide
  Sense strand starting at position 1103 of SEQ ID NO: 917170
auugcuuugcaauagguga

SEQ ID NO: 1214247 - RNA, 19 nt, Artificial Sequence
  Description of Artificial Sequence: Synthetic oligonucleotide
  Antisense strand to SEQ ID NO: 1214246
ucaccuauugcaaagcaau

SEQ ID NO: 1214248 - RNA, 19 nt, Artificial Sequence
  Description of Artificial Sequence: Synthetic oligonucleotide
  Sense strand starting at position 1172 of SEQ ID NO: 917170
augugcgauaaaugaaacu

SEQ ID NO: 1214249 - RNA, 19 nt, Artificial Sequence
  Description of Artificial Sequence: Synthetic oligonucleotide
  Antisense strand to SEQ ID NO: 1214248
aguuucauuuaucgcacau

SEQ ID NO: 1214250 - RNA, 19 nt, Artificial Sequence
  Description of Artificial Sequence: Synthetic oligonucleotide
  Sense strand starting at position 1250 of SEQ ID NO: 917170
ucauuaaggcgguaaacga

SEQ ID NO: 1214251 - RNA, 19 nt, Artificial Sequence
  Description of Artificial Sequence: Synthetic oligonucleotide
  Antisense strand to SEQ ID NO: 1214250
ucguuuaccgccuuaauga

SEQ ID NO: 1214252 - RNA, 19 nt, Artificial Sequence
  Description of Artificial Sequence: Synthetic oligonucleotide
  Sense strand starting at position 1582 of SEQ ID NO: 917170
gagagauauccugggcaga

SEQ ID NO: 1214253 - RNA, 19 nt, Artificial Sequence
  Description of Artificial Sequence: Synthetic oligonucleotide
  Antisense strand to SEQ ID NO: 1214252
ucugcccaggauaucucuc

SEQ ID NO: 1214254 - RNA, 19 nt, Artificial Sequence
  Description of Artificial Sequence: Synthetic oligonucleotide
  Sense strand starting at position 1583 of SEQ ID NO: 917170
agagauauccugggcagag

SEQ ID NO: 1214255 - RNA, 19 nt, Artificial Sequence
  Description of Artificial Sequence: Synthetic oligonucleotide
  Antisense strand to SEQ ID NO: 1214254
cucugcccaggauaucucu

SEQ ID NO: 1214256 - RNA, 19 nt, Artificial Sequence
  Description of Artificial Sequence: Synthetic oligonucleotide
  Sense strand starting at position 2043 of SEQ ID NO: 917170
gcuuuaaauggguacgacu

SEQ ID NO: 1214257 - RNA, 19 nt, Artificial Sequence
  Description of Artificial Sequence: Synthetic oligonucleotide
  Antisense strand to SEQ ID NO: 1214256
agucguacccauuuaaagc

SEQ ID NO: 1214258 - RNA, 19 nt, Artificial Sequence
  Description of Artificial Sequence: Synthetic oligonucleotide
  Sense strand starting at position 2167 of SEQ ID NO: 917170
uuguacagauuauugacaa

SEQ ID NO: 1214259 - RNA, 19 nt, Artificial Sequence
  Description of Artificial Sequence: Synthetic oligonucleotide
  Antisense strand to SEQ ID NO: 1214258
uugucaauaaucuguacaa

SEQ ID NO: 1214260 - RNA, 19 nt, Artificial Sequence
  Description of Artificial Sequence: Synthetic oligonucleotide
  Sense strand starting at position 2180 of SEQ ID NO: 917170
ugacaacugcgcuaaauca

SEQ ID NO: 1214261 - RNA, 19 nt, Artificial Sequence
  Description of Artificial Sequence: Synthetic oligonucleotide
  Antisense strand to SEQ ID NO: 1214260
ugauuuagcgcaguuguca

SEQ ID NO: 1214262 - RNA, 19 nt, Artificial Sequence
  Description of Artificial Sequence: Synthetic oligonucleotide
  Sense strand starting at position 2242 of SEQ ID NO: 917170
cuggguagucuggguagaa

SEQ ID NO: 1214263 - RNA, 19 nt, Artificial Sequence
  Description of Artificial Sequence: Synthetic oligonucleotide
  Antisense strand to SEQ ID NO: 1214262
uucuacccagacuacccag

SEQ ID NO: 1214264 - RNA, 19 nt, Artificial Sequence
  Description of Artificial Sequence: Synthetic oligonucleotide
  Sense strand starting at position 2243 of SEQ ID NO: 917170
uggguagucuggguagaau

SEQ ID NO: 1214265 - RNA, 19 nt, Artificial Sequence
  Description of Artificial Sequence: Synthetic oligonucleotide
  Antisense strand to SEQ ID NO: 1214264
auucuacccagacuaccca

SEQ ID NO: 1214266 - RNA, 19 nt, Artificial Sequence
  Description of Artificial Sequence: Synthetic oligonucleotide
  Sense strand starting at position 2244 of SEQ ID NO: 917170
ggguagucuggguagaaug

SEQ ID NO: 1214267 - RNA, 19 nt, Artificial Sequence
  Description of Artificial Sequence: Synthetic oligonucleotide
  Antisense strand to SEQ ID NO: 1214266
cauucuacccagacuaccc

SEQ ID NO: 1214268 - RNA, 19 nt, Artificial Sequence
  Description of Artificial Sequence: Synthetic oligonucleotide
  Sense strand starting at position 2255 of SEQ ID NO: 917170
guagaauguguggagugua

SEQ ID NO: 1214269 - RNA, 19 nt, Artificial Sequence
  Description of Artificial Sequence: Synthetic oligonucleotide
  Antisense strand to SEQ ID NO: 1214268
uacacuccacacauucuac

SEQ ID NO: 1214270 - RNA, 19 nt, Artificial Sequence
  Description of Artificial Sequence: Synthetic oligonucleotide
  Sense strand starting at position 2268 of SEQ ID NO: 917170
aguguaugauuuccauguu

SEQ ID NO: 1214271 - RNA, 19 nt, Artificial Sequence
  Description of Artificial Sequence: Synthetic oligonucleotide
  Antisense strand to SEQ ID NO: 1214270
aacauggaaaucauacacu

SEQ ID NO: 1214272 - RNA, 19 nt, Artificial Sequence
  Description of Artificial Sequence: Synthetic oligonucleotide
  Sense strand starting at position 2271 of SEQ ID NO: 917170
guaugauuuccauguuggc

SEQ ID NO: 1214273 - RNA, 19 nt, Artificial Sequence
  Description of Artificial Sequence: Synthetic oligonucleotide
  Antisense strand to SEQ ID NO: 1214272
gccaacauggaaaucauac

SEQ ID NO: 1214274 - RNA, 19 nt, Artificial Sequence
  Description of Artificial Sequence: Synthetic oligonucleotide
  Sense strand starting at position 2396 of SEQ ID NO: 917170
caaagauguguguaucuca

SEQ ID NO: 1214275 - RNA, 19 nt, Artificial Sequence
  Description of Artificial Sequence: Synthetic oligonucleotide
  Antisense strand to SEQ ID NO: 1214274
ugagauacacacaucuuug

SEQ ID NO: 1214276 - RNA, 19 nt, Artificial Sequence
  Description of Artificial Sequence: Synthetic oligonucleotide
  Sense strand starting at position 2643 of SEQ ID NO: 917170
ggcacaugccaguaaucag

SEQ ID NO: 1214277 - RNA, 19 nt, Artificial Sequence
  Description of Artificial Sequence: Synthetic oligonucleotide
  Antisense strand to SEQ ID NO: 1214276
cugauuacuggcaugugcc

SEQ ID NO: 1214278 - RNA, 19 nt, Artificial Sequence
  Description of Artificial Sequence: Synthetic oligonucleotide
  Sense strand starting at position 2652 of SEQ ID NO: 917170
caguaaucagccugagagg

SEQ ID NO: 1214279 - RNA, 19 nt, Artificial Sequence
  Description of Artificial Sequence: Synthetic oligonucleotide
  Antisense strand to SEQ ID NO: 1214278
ccucucaggcugauuacug

SEQ ID NO: 1214280 - RNA, 19 nt, Artificial Sequence
  Description of Artificial Sequence: Synthetic oligonucleotide
  Sense strand starting at position 2784 of SEQ ID NO: 917170
aauaauuugugguacagac

SEQ ID NO: 1214281 - RNA, 19 nt, Artificial Sequence
  Description of Artificial Sequence: Synthetic oligonucleotide
  Antisense strand to SEQ ID NO: 1214280
gucuguaccacaaauuauu

SEQ ID NO: 1214282 - RNA, 19 nt, Artificial Sequence
  Description of Artificial Sequence: Synthetic oligonucleotide
  Sense strand starting at position 2792 of SEQ ID NO: 917170
gugguacagacauguaauu

SEQ ID NO: 1214283 - RNA, 19 nt, Artificial Sequence
  Description of Artificial Sequence: Synthetic oligonucleotide
  Antisense strand to SEQ ID NO: 1214282
aauuacaugucuguaccac

SEQ ID NO: 1214284 - RNA, 19 nt, Artificial Sequence
  Description of Artificial Sequence: Synthetic oligonucleotide
  Sense strand starting at position 3036 of SEQ ID NO: 917170
uugaccauugucuggguaa

SEQ ID NO: 1214285 - RNA, 19 nt, Artificial Sequence
  Description of Artificial Sequence: Synthetic oligonucleotide
  Antisense strand to SEQ ID NO: 1214284
uuacccagacaauggucaa

SEQ ID NO: 1214286 - RNA, 19 nt, Artificial Sequence
  Description of Artificial Sequence: Synthetic oligonucleotide
  Sense strand starting at position 3038 of SEQ ID NO: 917170
gaccauugucuggguaaag

SEQ ID NO: 1214287 - RNA, 19 nt, Artificial Sequence
  Description of Artificial Sequence: Synthetic oligonucleotide
  Antisense strand to SEQ ID NO: 1214286
cuuuacccagacaaugguc

SEQ ID NO: 1214288 - RNA, 19 nt, Artificial Sequence
  Description of Artificial Sequence: Synthetic oligonucleotide
  Sense strand starting at position 3074 of SEQ ID NO: 917170
ggcuuuauagcacaaauca

SEQ ID NO: 1214289 - RNA, 19 nt, Artificial Sequence
  Description of Artificial Sequence: Synthetic oligonucleotide
  Antisense strand to SEQ ID NO: 1214288
ugauuugugcuauaaagcc

SEQ ID NO: 1214290 - RNA, 19 nt, Artificial Sequence
  Description of Artificial Sequence: Synthetic oligonucleotide
  Sense strand starting at position 3555 of SEQ ID NO: 917170
gcaaucaggugguuaacau

SEQ ID NO: 1214291 - RNA, 19 nt, Artificial Sequence
  Description of Artificial Sequence: Synthetic oligonucleotide
  Antisense strand to SEQ ID NO: 1214290
auguuaaccaccugauugc

SEQ ID NO: 1214292 - RNA, 19 nt, Artificial Sequence
  Description of Artificial Sequence: Synthetic oligonucleotide
  Sense strand starting at position 3591 of SEQ ID NO: 917170
cuuagauauccugacugug

SEQ ID NO: 1214293 - RNA, 19 nt, Artificial Sequence
  Description of Artificial Sequence: Synthetic oligonucleotide
  Antisense strand to SEQ ID NO: 1214292
cacagucaggauaucuaag

SEQ ID NO: 1214294 - RNA, 19 nt, Artificial Sequence
  Description of Artificial Sequence: Synthetic oligonucleotide
  Sense strand starting at position 3593 of SEQ ID NO: 917170
uagauauccugacuguguc

SEQ ID NO: 1214295 - RNA, 19 nt, Artificial Sequence
  Description of Artificial Sequence: Synthetic oligonucleotide
  Antisense strand to SEQ ID NO: 1214294
gacacagucaggauaucua

SEQ ID NO: 1214296 - RNA, 19 nt, Artificial Sequence
  Description of Artificial Sequence: Synthetic oligonucleotide
  Sense strand starting at position 3711 of SEQ ID NO: 917170
auugcuuaaguaugaacaa

SEQ ID NO: 1214297 - RNA, 19 nt, Artificial Sequence
  Description of Artificial Sequence: Synthetic oligonucleotide
  Antisense strand to SEQ ID NO: 1214296
uuguucauacuuaagcaau

SEQ ID NO: 1214298 - RNA, 19 nt, Artificial Sequence
  Description of Artificial Sequence: Synthetic oligonucleotide
  Sense strand starting at position 3740 of SEQ ID NO: 917170
ugacauaagcuuuggaugu

SEQ ID NO: 1214299 - RNA, 19 nt, Artificial Sequence
  Description of Artificial Sequence: Synthetic oligonucleotide
  Antisense strand to SEQ ID NO: 1214298
acauccaaagcuuauguca

SEQ ID NO: 1214300 - RNA, 19 nt, Artificial Sequence
  Description of Artificial Sequence: Synthetic oligonucleotide
  Sense strand starting at position 3781 of SEQ ID NO: 917170
guuacaugccaacagaaau

SEQ ID NO: 1214301 - RNA, 19 nt, Artificial Sequence
  Description of Artificial Sequence: Synthetic oligonucleotide
  Antisense strand to SEQ ID NO: 1214300
auuucuguuggcauguaac

SEQ ID NO: 1214302 - RNA, 19 nt, Artificial Sequence
  Description of Artificial Sequence: Synthetic oligonucleotide
  Sense strand starting at position 3848 of SEQ ID NO: 917170
ucaagugagaugugggaua

SEQ ID NO: 1214303 - RNA, 19 nt, Artificial Sequence
  Description of Artificial Sequence: Synthetic oligonucleotide
  Antisense strand to SEQ ID NO: 1214302
uaucccacaucucacuuga

SEQ ID NO: 1214304 - RNA, 19 nt, Artificial Sequence
  Description of Artificial Sequence: Synthetic oligonucleotide
  Sense strand starting at position 3850 of SEQ ID NO: 917171
aagugagaugugggauauu

SEQ ID NO: 1214305 - RNA, 19 nt, Artificial Sequence
  Description of Artificial Sequence: Synthetic oligonucleotide
  Antisense strand to SEQ ID NO: 1214304
aauaucccacaucucacuu

SEQ ID NO: 1214306 - RNA, 19 nt, Artificial Sequence
  Description of Artificial Sequence: Synthetic oligonucleotide
  Sense strand starting at position 108 of SEQ ID NO: 917171
gaagcaguuucuuuagacu

SEQ ID NO: 1214307 - RNA, 19 nt, Artificial Sequence
  Description of Artificial Sequence: Synthetic oligonucleotide
  Antisense strand to SEQ ID NO: 1214306
agucuaaagaaacugcuuc

SEQ ID NO: 1214308 - RNA, 19 nt, Artificial Sequence
  Description of Artificial Sequence: Synthetic oligonucleotide
  Sense strand starting at position 122 of SEQ ID NO: 917171
agacuauagccuugaaaug

SEQ ID NO: 1214309 - RNA, 19 nt, Artificial Sequence
  Description of Artificial Sequence: Synthetic oligonucleotide
  Antisense strand to SEQ ID NO: 1214308
cauuucaaggcuauagucu

SEQ ID NO: 1214310 - RNA, 19 nt, Artificial Sequence
  Description of Artificial Sequence: Synthetic oligonucleotide
  Sense strand starting at position 123 of SEQ ID NO: 917171
gacuauagccuugaaaugu

SEQ ID NO: 1214311 - RNA, 19 nt, Artificial Sequence
  Description of Artificial Sequence: Synthetic oligonucleotide
  Antisense strand to SEQ ID NO: 1214310
acauuucaaggcuauaguc

SEQ ID NO: 1214312 - RNA, 19 nt, Artificial Sequence
  Description of Artificial Sequence: Synthetic oligonucleotide
  Sense strand starting at position 159 of SEQ ID NO: 917171
agaaguaaucaguaauguu

SEQ ID NO: 1214313 - RNA, 19 nt, Artificial Sequence
  Description of Artificial Sequence: Synthetic oligonucleotide
  Antisense strand to SEQ ID NO: 1214312
aacauuacugauuacuucu

SEQ ID NO: 1214314 - RNA, 19 nt, Artificial Sequence
  Description of Artificial Sequence: Synthetic oligonucleotide
  Sense strand starting at position 166 of SEQ ID NO: 917171
aucaguaauguugaacgaa

SEQ ID NO: 1214315 - RNA, 19 nt, Artificial Sequence
  Description of Artificial Sequence: Synthetic oligonucleotide
  Antisense strand to SEQ ID NO: 1214314
uucguucaacauuacugau

SEQ ID NO: 1214316 - RNA, 19 nt, Artificial Sequence
  Description of Artificial Sequence: Synthetic oligonucleotide
  Sense strand starting at position 169 of SEQ ID NO: 917171
aguaauguugaacgaauga

SEQ ID NO: 1214317 - RNA, 19 nt, Artificial Sequence
  Description of Artificial Sequence: Synthetic oligonucleotide
  Antisense strand to SEQ ID NO: 1214316
ucauucguucaacauuacu

SEQ ID NO: 1214318 - RNA, 19 nt, Artificial Sequence
  Description of Artificial Sequence: Synthetic oligonucleotide
  Sense strand starting at position 219 of SEQ ID NO: 917171
accaguuacuaguuauaug

SEQ ID NO: 1214319 - RNA, 19 nt, Artificial Sequence
  Description of Artificial Sequence: Synthetic oligonucleotide
  Antisense strand to SEQ ID NO: 1214318
cauauaacuaguaacuggu

SEQ ID NO: 1214320 - RNA, 19 nt, Artificial Sequence
  Description of Artificial Sequence: Synthetic oligonucleotide
  Sense strand starting at position 308 of SEQ ID NO: 917171
gugguucacgccuuguaau

SEQ ID NO: 1214321 - RNA, 19 nt, Artificial Sequence
  Description of Artificial Sequence: Synthetic oligonucleotide
  Antisense strand to SEQ ID NO: 1214320
auuacaaggcgugaaccac

SEQ ID NO: 1214322 - RNA, 19 nt, Artificial Sequence
  Description of Artificial Sequence: Synthetic oligonucleotide
  Sense strand starting at position 940 of SEQ ID NO: 917171
ggaaucaaauuguuaucga

SEQ ID NO: 1214323 - RNA, 19 nt, Artificial Sequence
  Description of Artificial Sequence: Synthetic oligonucleotide
  Antisense strand to SEQ ID NO: 1214322
ucgauaacaauuugauucc

SEQ ID NO: 1214324 - RNA, 19 nt, Artificial Sequence
  Description of Artificial Sequence: Synthetic oligonucleotide
  Sense strand starting at position 943 of SEQ ID NO: 917171
aucaaauuguuaucgacag

SEQ ID NO: 1214325 - RNA, 19 nt, Artificial Sequence
  Description of Artificial Sequence: Synthetic oligonucleotide
  Antisense strand to SEQ ID NO: 1214324
cugucgauaacaauuugau

SEQ ID NO: 1214326 - RNA, 19 nt, Artificial Sequence
  Description of Artificial Sequence: Synthetic oligonucleotide
  Sense strand starting at position 947 of SEQ ID NO: 917171
aauuguuaucgacagcuua

SEQ ID NO: 1214327 - RNA, 19 nt, Artificial Sequence
  Description of Artificial Sequence: Synthetic oligonucleotide
  Antisense strand to SEQ ID NO: 1214326
uaagcugucgauaacaauu

SEQ ID NO: 1214328 - RNA, 19 nt, Artificial Sequence
  Description of Artificial Sequence: Synthetic oligonucleotide
  Sense strand starting at position 1008 of SEQ ID NO: 917171
ugacauauguucuucuuua

SEQ ID NO: 1214329 - RNA, 19 nt, Artificial Sequence
  Description of Artificial Sequence: Synthetic oligonucleotide
  Antisense strand to SEQ ID NO: 1214328
uaaagaagaacauauguca

SEQ ID NO: 1214330 - RNA, 19 nt, Artificial Sequence
  Description of Artificial Sequence: Synthetic oligonucleotide
  Sense strand starting at position 1070 of SEQ ID NO: 917171
agaagagauggcuggguau

SEQ ID NO: 1214331 - RNA, 19 nt, Artificial Sequence
  Description of Artificial Sequence: Synthetic oligonucleotide
  Antisense strand to SEQ ID NO: 1214330
auacccagccaucucuucu

SEQ ID NO: 1214332 - RNA, 19 nt, Artificial Sequence
  Description of Artificial Sequence: Synthetic oligonucleotide
  Sense strand starting at position 1072 of SEQ ID NO: 917171
aagagauggcuggguaugu

SEQ ID NO: 1214333 - RNA, 19 nt, Artificial Sequence
  Description of Artificial Sequence: Synthetic oligonucleotide
  Antisense strand to SEQ ID NO: 1214332
acauacccagccaucucuu

SEQ ID NO: 1214334 - RNA, 19 nt, Artificial Sequence
  Description of Artificial Sequence: Synthetic oligonucleotide
  Sense strand starting at position 1118 of SEQ ID NO: 917171
ucaggagguacuugugaga

SEQ ID NO: 1214335 - RNA, 19 nt, Artificial Sequence
  Description of Artificial Sequence: Synthetic oligonucleotide
  Antisense strand to SEQ ID NO: 1214334
ucucacaaguaccuccuga

SEQ ID NO: 1214336 - RNA, 19 nt, Artificial Sequence
  Description of Artificial Sequence: Synthetic oligonucleotide
  Sense strand starting at position 1137 of SEQ ID NO: 917171
gcaugcugucaguuuaucu

SEQ ID NO: 1214337 - RNA, 19 nt, Artificial Sequence
  Description of Artificial Sequence: Synthetic oligonucleotide
  Antisense strand to SEQ ID NO: 1214336
agauaaacugacagcaugc

SEQ ID NO: 1214338 - RNA, 19 nt, Artificial Sequence
  Description of Artificial Sequence: Synthetic oligonucleotide
  Sense strand starting at position 1144 of SEQ ID NO: 917171
gucaguuuaucuucuaaag

SEQ ID NO: 1214339 - RNA, 19 nt, Artificial Sequence
  Description of Artificial Sequence: Synthetic oligonucleotide
  Antisense strand to SEQ ID NO: 1214338
cuuuagaagauaaacugac

SEQ ID NO: 1214340 - RNA, 19 nt, Artificial Sequence
  Description of Artificial Sequence: Synthetic oligonucleotide
  Sense strand starting at position 1246 of SEQ ID NO: 917171
uaguucuuucgcgcugcaa

SEQ ID NO: 1214341 - RNA, 19 nt, Artificial Sequence
  Description of Artificial Sequence: Synthetic oligonucleotide
  Antisense strand to SEQ ID NO: 1214340
uugcagcgcgaaagaacua

SEQ ID NO: 1214342 - RNA, 19 nt, Artificial Sequence
  Description of Artificial Sequence: Synthetic oligonucleotide
  Sense strand starting at position 1247 of SEQ ID NO: 917171
aguucuuucgcgcugcaaa

SEQ ID NO: 1214343 - RNA, 19 nt, Artificial Sequence
  Description of Artificial Sequence: Synthetic oligonucleotide
  Antisense strand to SEQ ID NO: 1214342
uuugcagcgcgaaagaacu

SEQ ID NO: 1214344 - RNA, 19 nt, Artificial Sequence
  Description of Artificial Sequence: Synthetic oligonucleotide
  Sense strand starting at position 1249 of SEQ ID NO: 917171
uucuuucgcgcugcaaauu

SEQ ID NO: 1214345 - RNA, 19 nt, Artificial Sequence
  Description of Artificial Sequence: Synthetic oligonucleotide
  Antisense strand to SEQ ID NO: 1214344
aauuugcagcgcgaaagaa

SEQ ID NO: 1214346 - RNA, 19 nt, Artificial Sequence
  Description of Artificial Sequence: Synthetic oligonucleotide
  Sense strand starting at position 1444 of SEQ ID NO: 917171
ggguguuuggaggacacuu

SEQ ID NO: 1214347 - RNA, 19 nt, Artificial Sequence
  Description of Artificial Sequence: Synthetic oligonucleotide
  Antisense strand to SEQ ID NO: 1214346
aaguguccuccaaacaccc

SEQ ID NO: 1214348 - RNA, 19 nt, Artificial Sequence
  Description of Artificial Sequence: Synthetic oligonucleotide
  Sense strand starting at position 2316 of SEQ ID NO: 917171
ucugguaggcauuggagaa

SEQ ID NO: 1214349 - RNA, 19 nt, Artificial Sequence
  Description of Artificial Sequence: Synthetic oligonucleotide
  Antisense strand to SEQ ID NO: 1214348
uucuccaaugccuaccaga

SEQ ID NO: 1214350 - RNA, 19 nt, Artificial Sequence
  Description of Artificial Sequence: Synthetic oligonucleotide
  Sense strand starting at position 2317 of SEQ ID NO: 917171
cugguaggcauuggagaau

SEQ ID NO: 1214351 - RNA, 19 nt, Artificial Sequence
  Description of Artificial Sequence: Synthetic oligonucleotide
  Antisense strand to SEQ ID NO: 1214350
auucuccaaugccuaccag

SEQ ID NO: 1214352 - RNA, 19 nt, Artificial Sequence
  Description of Artificial Sequence: Synthetic oligonucleotide
  Sense strand starting at position 2343 of SEQ ID NO: 917171
gugugucugaaacagacaa

SEQ ID NO: 1214353 - RNA, 19 nt, Artificial Sequence
  Description of Artificial Sequence: Synthetic oligonucleotide
  Antisense strand to SEQ ID NO: 1214352
uugucuguuucagacacac

SEQ ID NO: 1214354 - RNA, 19 nt, Artificial Sequence
  Description of Artificial Sequence: Synthetic oligonucleotide
  Sense strand starting at position 2372 of SEQ ID NO: 917171
agauguuauuagguuguga

SEQ ID NO: 1214355 - RNA, 19 nt, Artificial Sequence
  Description of Artificial Sequence: Synthetic oligonucleotide
  Antisense strand to SEQ ID NO: 1214354
ucacaaccuaauaacaucu

SEQ ID NO: 1214356 - RNA, 19 nt, Artificial Sequence
  Description of Artificial Sequence: Synthetic oligonucleotide
  Sense strand starting at position 2407 of SEQ ID NO: 917171
gaaguaguacagugaaaga

SEQ ID NO: 1214357 - RNA, 19 nt, Artificial Sequence
  Description of Artificial Sequence: Synthetic oligonucleotide
  Antisense strand to SEQ ID NO: 1214356
ucuuucacuguacuacuuc

SEQ ID NO: 1214358 - RNA, 19 nt, Artificial Sequence
  Description of Artificial Sequence: Synthetic oligonucleotide
  Sense strand starting at position 2529 of SEQ ID NO: 917171
ggcagaagaaaguguguaa

SEQ ID NO: 1214359 - RNA, 19 nt, Artificial Sequence
  Description of Artificial Sequence: Synthetic oligonucleotide
  Antisense strand to SEQ ID NO: 1214358
uuacacacuuucuucugcc

SEQ ID NO: 1214360 - RNA, 19 nt, Artificial Sequence
  Description of Artificial Sequence: Synthetic oligonucleotide
  Sense strand starting at position 2533 of SEQ ID NO: 917171
gaagaaaguguguaagugu

SEQ ID NO: 1214361 - RNA, 19 nt, Artificial Sequence
  Description of Artificial Sequence: Synthetic oligonucleotide
  Antisense strand to SEQ ID NO: 1214360
acacuuacacacuuucuuc

SEQ ID NO: 1214362 - RNA, 19 nt, Artificial Sequence
  Description of Artificial Sequence: Synthetic oligonucleotide
  Sense strand starting at position 2570 of SEQ ID NO: 917171
ugaacuuggcccugacaca

SEQ ID NO: 1214363 - RNA, 19 nt, Artificial Sequence
  Description of Artificial Sequence: Synthetic oligonucleotide
  Antisense strand to SEQ ID NO: 1214362
ugugucagggccaaguuca

SEQ ID NO: 1214364 - RNA, 19 nt, Artificial Sequence
  Description of Artificial Sequence: Synthetic oligonucleotide
  Sense strand starting at position 2606 of SEQ ID NO: 917171
guagcuguaaaguaaugga

SEQ ID NO: 1214365 - RNA, 19 nt, Artificial Sequence
  Description of Artificial Sequence: Synthetic oligonucleotide
  Antisense strand to SEQ ID NO: 1214364
uccauuacuuuacagcuac

SEQ ID NO: 1214366 - RNA, 19 nt, Artificial Sequence
  Description of Artificial Sequence: Synthetic oligonucleotide
  Sense strand starting at position 2745 of SEQ ID NO: 917171
ugaauuauuugucagaaac

SEQ ID NO: 1214367 - RNA, 19 nt, Artificial Sequence
  Description of Artificial Sequence: Synthetic oligonucleotide
  Antisense strand to SEQ ID NO: 1214366
guuucugacaaauaauuca

SEQ ID NO: 1214368 - RNA, 19 nt, Artificial Sequence
  Description of Artificial Sequence: Synthetic oligonucleotide
  Sense strand starting at position 2956 of SEQ ID NO: 917171
cagcaauaucuagguauga

SEQ ID NO: 1214369 - RNA, 19 nt, Artificial Sequence
  Description of Artificial Sequence: Synthetic oligonucleotide
  Antisense strand to SEQ ID NO: 1214368
ucauaccuagauauugcug

SEQ ID NO: 1214370 - RNA, 19 nt, Artificial Sequence
  Description of Artificial Sequence: Synthetic oligonucleotide
  Sense strand starting at position 2957 of SEQ ID NO: 917171
agcaauaucuagguaugaa

SEQ ID NO: 1214371 - RNA, 19 nt, Artificial Sequence
  Description of Artificial Sequence: Synthetic oligonucleotide
  Antisense strand to SEQ ID NO: 1214370
uucauaccuagauauugcu

SEQ ID NO: 1214372 - RNA, 19 nt, Artificial Sequence
  Description of Artificial Sequence: Synthetic oligonucleotide
  Sense strand starting at position 3161 of SEQ ID NO: 917171
uuaccuaagguguauauau

SEQ ID NO: 1214373 - RNA, 19 nt, Artificial Sequence
  Description of Artificial Sequence: Synthetic oligonucleotide
  Antisense strand to SEQ ID NO: 1214372
auauauacaccuuagguaa

SEQ ID NO: 1214374 - RNA, 19 nt, Artificial Sequence
  Description of Artificial Sequence: Synthetic oligonucleotide
  Sense strand starting at position 3168 of SEQ ID NO: 917171
agguguauauauccaaaug

SEQ ID NO: 1214375 - RNA, 19 nt, Artificial Sequence
  Description of Artificial Sequence: Synthetic oligonucleotide
  Antisense strand to SEQ ID NO: 1214374
cauuuggauauauacaccu

SEQ ID NO: 1214376 - RNA, 19 nt, Artificial Sequence
  Description of Artificial Sequence: Synthetic oligonucleotide
  Sense strand starting at position 3301 of SEQ ID NO: 917171
guaugaccucuuuauguga

SEQ ID NO: 1214377 - RNA, 19 nt, Artificial Sequence
  Description of Artificial Sequence: Synthetic oligonucleotide
  Antisense strand to SEQ ID NO: 1214376
ucacauaaagaggucauac

SEQ ID NO: 1214378 - RNA, 19 nt, Artificial Sequence
  Description of Artificial Sequence: Synthetic oligonucleotide
  Sense strand starting at position 3304 of SEQ ID NO: 917171
ugaccucuuuaugugaaau

SEQ ID NO: 1214379 - RNA, 19 nt, Artificial Sequence
  Description of Artificial Sequence: Synthetic oligonucleotide
  Antisense strand to SEQ ID NO: 1214378
auuucacauaaagagguca

SEQ ID NO: 1214380 - RNA, 19 nt, Artificial Sequence
  Description of Artificial Sequence: Synthetic oligonucleotide
  Sense strand starting at position 3360 of SEQ ID NO: 917171
ugagugguucugggaagag

SEQ ID NO: 1214381 - RNA, 19 nt, Artificial Sequence
  Description of Artificial Sequence: Synthetic oligonucleotide
  Antisense strand to SEQ ID NO: 1214380
cucuucccagaaccacuca

SEQ ID NO: 1214382 - RNA, 19 nt, Artificial Sequence
  Description of Artificial Sequence: Synthetic oligonucleotide
  Sense strand starting at position 3630 of SEQ ID NO: 917171
ucucgaguucaggaguuaa

SEQ ID NO: 1214383 - RNA, 19 nt, Artificial Sequence
  Description of Artificial Sequence: Synthetic oligonucleotide
  Antisense strand to SEQ ID NO: 1214382
uuaacuccugaacucgaga

SEQ ID NO: 1214384 - RNA, 19 nt, Artificial Sequence
  Description of Artificial Sequence: Synthetic oligonucleotide
  Sense strand starting at position 3838 of SEQ ID NO: 917171
ggagcaaggcccuaucuua

SEQ ID NO: 1214385 - RNA, 19 nt, Artificial Sequence
  Description of Artificial Sequence: Synthetic oligonucleotide
  Antisense strand to SEQ ID NO: 1214384
uaagauagggccuugcucc

SEQ ID NO: 1214386 - RNA, 19 nt, Artificial Sequence
  Description of Artificial Sequence: Synthetic oligonucleotide
  Sense strand starting at position 3838 of SEQ ID NO: 917172
ggagcaaggcccuaucuua

SEQ ID NO: 1214387 - RNA, 19 nt, Artificial Sequence
  Description of Artificial Sequence: Synthetic oligonucleotide
  Antisense strand to SEQ ID NO: 1214386
uaagauagggccuugcucc

SEQ ID NO: 1214388 - RNA, 19 nt, Artificial Sequence
  Description of Artificial Sequence: Synthetic oligonucleotide
  Sense strand starting at position 10 of SEQ ID NO: 917172
augauaauaucugugaggu

SEQ ID NO: 1214389 - RNA, 19 nt, Artificial Sequence
  Description of Artificial Sequence: Synthetic oligonucleotide
  Antisense strand to SEQ ID NO: 1214388
accucacagauauuaucau

SEQ ID NO: 1214390 - RNA, 19 nt, Artificial Sequence
  Description of Artificial Sequence: Synthetic oligonucleotide
  Sense strand starting at position 11 of SEQ ID NO: 917172
ugauaauaucugugagguc

SEQ ID NO: 1214391 - RNA, 19 nt, Artificial Sequence
  Description of Artificial Sequence: Synthetic oligonucleotide
  Antisense strand to SEQ ID NO: 1214390
gaccucacagauauuauca

SEQ ID NO: 1214392 - RNA, 19 nt, Artificial Sequence
  Description of Artificial Sequence: Synthetic oligonucleotide
  Sense strand starting at position 27 of SEQ ID NO: 917172
gucagcugugaucagaagu

SEQ ID NO: 1214393 - RNA, 19 nt, Artificial Sequence
  Description of Artificial Sequence: Synthetic oligonucleotide
  Antisense strand to SEQ ID NO: 1214392
acuucugaucacagcugac

SEQ ID NO: 1214394 - RNA, 19 nt, Artificial Sequence
  Description of Artificial Sequence: Synthetic oligonucleotide
  Sense strand starting at position 102 of SEQ ID NO: 917172
gacaguggccgggaaugua

SEQ ID NO: 1214395 - RNA, 19 nt, Artificial Sequence
  Description of Artificial Sequence: Synthetic oligonucleotide
  Antisense strand to SEQ ID NO: 1214394
uacauucccggccacuguc

SEQ ID NO: 1214396 - RNA, 19 nt, Artificial Sequence
  Description of Artificial Sequence: Synthetic oligonucleotide
  Sense strand starting at position 112 of SEQ ID NO: 917172
gggaauguaauugagcuuu

SEQ ID NO: 1214397 - RNA, 19 nt, Artificial Sequence
  Description of Artificial Sequence: Synthetic oligonucleotide
  Antisense strand to SEQ ID NO: 1214396
aaagcucaauuacauuccc

SEQ ID NO: 1214398 - RNA, 19 nt, Artificial Sequence
  Description of Artificial Sequence: Synthetic oligonucleotide
  Sense strand starting at position 114 of SEQ ID NO: 917172
gaauguaauugagcuuuag

SEQ ID NO: 1214399 - RNA, 19 nt, Artificial Sequence
  Description of Artificial Sequence: Synthetic oligonucleotide
  Antisense strand to SEQ ID NO: 1214398
cuaaagcucaauuacauuc

SEQ ID NO: 1214400 - RNA, 19 nt, Artificial Sequence
  Description of Artificial Sequence: Synthetic oligonucleotide
  Sense strand starting at position 171 of SEQ ID NO: 917172
cauuaaugcguuugauuuc

SEQ ID NO: 1214401 - RNA, 19 nt, Artificial Sequence
  Description of Artificial Sequence: Synthetic oligonucleotide
  Antisense strand to SEQ ID NO: 1214400
gaaaucaaacgcauuaaug

SEQ ID NO: 1214402 - RNA, 19 nt, Artificial Sequence
  Description of Artificial Sequence: Synthetic oligonucleotide
  Sense strand starting at position 180 of SEQ ID NO: 917172
guuugauuucccgggugag

SEQ ID NO: 1214403 - RNA, 19 nt, Artificial Sequence
  Description of Artificial Sequence: Synthetic oligonucleotide
  Antisense strand to SEQ ID NO: 1214402
cucacccgggaaaucaaac

SEQ ID NO: 1214404 - RNA, 19 nt, Artificial Sequence
  Description of Artificial Sequence: Synthetic oligonucleotide
  Sense strand starting at position 232 of SEQ ID NO: 917172
ucuacaguccuggauguuu

SEQ ID NO: 1214405 - RNA, 19 nt, Artificial Sequence
  Description of Artificial Sequence: Synthetic oligonucleotide
  Antisense strand to SEQ ID NO: 1214404
aaacauccaggacuguaga

SEQ ID NO: 1214406 - RNA, 19 nt, Artificial Sequence
  Description of Artificial Sequence: Synthetic oligonucleotide
  Sense strand starting at position 237 of SEQ ID NO: 917172
aguccuggauguuuggaaa

SEQ ID NO: 1214407 - RNA, 19 nt, Artificial Sequence
  Description of Artificial Sequence: Synthetic oligonucleotide
  Antisense strand to SEQ ID NO: 1214406
uuuccaaacauccaggacu

SEQ ID NO: 1214408 - RNA, 19 nt, Artificial Sequence
  Description of Artificial Sequence: Synthetic oligonucleotide
  Sense strand starting at position 273 of SEQ ID NO: 917172
gcuuucuuugcuuugcuaa

SEQ ID NO: 1214409 - RNA, 19 nt, Artificial Sequence
  Description of Artificial Sequence: Synthetic oligonucleotide
  Antisense strand to SEQ ID NO: 1214408
uuagcaaagcaaagaaagc

SEQ ID NO: 1214410 - RNA, 19 nt, Artificial Sequence
  Description of Artificial Sequence: Synthetic oligonucleotide
  Sense strand starting at position 338 of SEQ ID NO: 917172
ugaagaacuuucucugauu

SEQ ID NO: 1214411 - RNA, 19 nt, Artificial Sequence
  Description of Artificial Sequence: Synthetic oligonucleotide
  Antisense strand to SEQ ID NO: 1214410
aaucagagaaaguucuuca

SEQ ID NO: 1214412 - RNA, 19 nt, Artificial Sequence
  Description of Artificial Sequence: Synthetic oligonucleotide
  Sense strand starting at position 410 of SEQ ID NO: 917172
ggucaauauuucuagacca

SEQ ID NO: 1214413 - RNA, 19 nt, Artificial Sequence
  Description of Artificial Sequence: Synthetic oligonucleotide
  Antisense strand to SEQ ID NO: 1214412
uggucuagaaauauugacc

SEQ ID NO: 1214414 - RNA, 19 nt, Artificial Sequence
  Description of Artificial Sequence: Synthetic oligonucleotide
  Sense strand starting at position 444 of SEQ ID NO: 917172
aagccuguucuuuggaaag

SEQ ID NO: 1214415 - RNA, 19 nt, Artificial Sequence
  Description of Artificial Sequence: Synthetic oligonucleotide
  Antisense strand to SEQ ID NO: 1214414
cuuuccaaagaacaggcuu

SEQ ID NO: 1214416 - RNA, 19 nt, Artificial Sequence
  Description of Artificial Sequence: Synthetic oligonucleotide
  Sense strand starting at position 478 of SEQ ID NO: 917172
accaaagaguguuuaaaua

SEQ ID NO: 1214417 - RNA, 19 nt, Artificial Sequence
  Description of Artificial Sequence: Synthetic oligonucleotide
  Antisense strand to SEQ ID NO: 1214416
uauuuaaacacucuuuggu

SEQ ID NO: 1214418 - RNA, 19 nt, Artificial Sequence
  Description of Artificial Sequence: Synthetic oligonucleotide
  Sense strand starting at position 490 of SEQ ID NO: 917172
uuaaauaacuggcuaugaa

SEQ ID NO: 1214419 - RNA, 19 nt, Artificial Sequence
  Description of Artificial Sequence: Synthetic oligonucleotide
  Antisense strand to SEQ ID NO: 1214418
uucauagccaguuauuuaa

SEQ ID NO: 1214420 - RNA, 19 nt, Artificial Sequence
  Description of Artificial Sequence: Synthetic oligonucleotide
  Sense strand starting at position 528 of SEQ ID NO: 917172
ggagguacaaucugaaguu

SEQ ID NO: 1214421 - RNA, 19 nt, Artificial Sequence
  Description of Artificial Sequence: Synthetic oligonucleotide
  Antisense strand to SEQ ID NO: 1214420
aacuucagauuguaccucc

SEQ ID NO: 1214422 - RNA, 19 nt, Artificial Sequence
  Description of Artificial Sequence: Synthetic oligonucleotide
  Sense strand starting at position 542 of SEQ ID NO: 917172
aaguuaauugcugauguaa

SEQ ID NO: 1214423 - RNA, 19 nt, Artificial Sequence
  Description of Artificial Sequence: Synthetic oligonucleotide
  Antisense strand to SEQ ID NO: 1214422
uuacaucagcaauuaacuu

SEQ ID NO: 1214424 - RNA, 19 nt, Artificial Sequence
  Description of Artificial Sequence: Synthetic oligonucleotide
  Sense strand starting at position 553 of SEQ ID NO: 917172
ugauguaaucauuaguccu

SEQ ID NO: 1214425 - RNA, 19 nt, Artificial Sequence
  Description of Artificial Sequence: Synthetic oligonucleotide
  Antisense strand to SEQ ID NO: 1214424
aggacuaaugauuacauca

SEQ ID NO: 1214426 - RNA, 19 nt, Artificial Sequence
  Description of Artificial Sequence: Synthetic oligonucleotide
  Sense strand starting at position 590 of SEQ ID NO: 917172
agcugccuccagggagaua

SEQ ID NO: 1214427 - RNA, 19 nt, Artificial Sequence
  Description of Artificial Sequence: Synthetic oligonucleotide
  Antisense strand to SEQ ID NO: 1214426
uaucucccuggaggcagcu

SEQ ID NO: 1214428 - RNA, 19 nt, Artificial Sequence
  Description of Artificial Sequence: Synthetic oligonucleotide
  Sense strand starting at position 630 of SEQ ID NO: 917172
uguguauaucaccaguucu

SEQ ID NO: 1214429 - RNA, 19 nt, Artificial Sequence
  Description of Artificial Sequence: Synthetic oligonucleotide
  Antisense strand to SEQ ID NO: 1214428
agaacuggugauauacaca

SEQ ID NO: 1214430 - RNA, 19 nt, Artificial Sequence
  Description of Artificial Sequence: Synthetic oligonucleotide
  Sense strand starting at position 698 of SEQ ID NO: 917172
gaguaucauucuuccagga

SEQ ID NO: 1214431 - RNA, 19 nt, Artificial Sequence
  Description of Artificial Sequence: Synthetic oligonucleotide
  Antisense strand to SEQ ID NO: 1214430
uccuggaagaaugauacuc

SEQ ID NO: 1214432 - RNA, 19 nt, Artificial Sequence
  Description of Artificial Sequence: Synthetic oligonucleotide
  Sense strand starting at position 815 of SEQ ID NO: 917172
uuaagcauuugagggagaa

SEQ ID NO: 1214433 - RNA, 19 nt, Artificial Sequence
  Description of Artificial Sequence: Synthetic oligonucleotide
  Antisense strand to SEQ ID NO: 1214432
uucucccucaaaugcuuaa

SEQ ID NO: 1214434 - RNA, 19 nt, Artificial Sequence
  Description of Artificial Sequence: Synthetic oligonucleotide
  Sense strand starting at position 1113 of SEQ ID NO: 917172
cucaaauaugaaugugguu

SEQ ID NO: 1214435 - RNA, 19 nt, Artificial Sequence
  Description of Artificial Sequence: Synthetic oligonucleotide
  Antisense strand to SEQ ID NO: 1214434
aaccacauucauauuugag

SEQ ID NO: 1214436 - RNA, 19 nt, Artificial Sequence
  Description of Artificial Sequence: Synthetic oligonucleotide
  Sense strand starting at position 1328 of SEQ ID NO: 917172
gagaaauacgcccaaagcu

SEQ ID NO: 1214437 - RNA, 19 nt, Artificial Sequence
  Description of Artificial Sequence: Synthetic oligonucleotide
  Antisense strand to SEQ ID NO: 1214436
agcuuugggcguauuucuc

SEQ ID NO: 1214438 - RNA, 19 nt, Artificial Sequence
  Description of Artificial Sequence: Synthetic oligonucleotide
  Sense strand starting at position 3445 of SEQ ID NO: 917172
acgagacaaccuuaguauu

SEQ ID NO: 1214439 - RNA, 19 nt, Artificial Sequence
  Description of Artificial Sequence: Synthetic oligonucleotide
  Antisense strand to SEQ ID NO: 1214438
aauacuaagguugucucgu

SEQ ID NO: 1214440 - RNA, 19 nt, Artificial Sequence
  Description of Artificial Sequence: Synthetic oligonucleotide
  Sense strand starting at position 3447 of SEQ ID NO: 917172
gagacaaccuuaguauugu

SEQ ID NO: 1214441 - RNA, 19 nt, Artificial Sequence
  Description of Artificial Sequence: Synthetic oligonucleotide
  Antisense strand to SEQ ID NO: 1214440
acaauacuaagguugucuc

SEQ ID NO: 1214442 - RNA, 19 nt, Artificial Sequence
  Description of Artificial Sequence: Synthetic oligonucleotide
  Sense strand starting at position 3453 of SEQ ID NO: 917172
accuuaguauuguuugaau

SEQ ID NO: 1214443 - RNA, 19 nt, Artificial Sequence
  Description of Artificial Sequence: Synthetic oligonucleotide
  Antisense strand to SEQ ID NO: 1214442
auucaaacaauacuaaggu

SEQ ID NO: 1214444 - RNA, 19 nt, Artificial Sequence
  Description of Artificial Sequence: Synthetic oligonucleotide
  Sense strand starting at position 3455 of SEQ ID NO: 917172
cuuaguauuguuugaauug

SEQ ID NO: 1214445 - RNA, 19 nt, Artificial Sequence
  Description of Artificial Sequence: Synthetic oligonucleotide
  Antisense strand to SEQ ID NO: 1214444
caauucaaacaauacuaag

SEQ ID NO: 1214446 - RNA, 19 nt, Artificial Sequence
  Description of Artificial Sequence: Synthetic oligonucleotide
  Sense strand starting at position 3473 of SEQ ID NO: 917172
gaagcauugcgagggaaca

SEQ ID NO: 1214447 - RNA, 19 nt, Artificial Sequence
  Description of Artificial Sequence: Synthetic oligonucleotide
  Antisense strand to SEQ ID NO: 1214446
uguucccucgcaaugcuuc

SEQ ID NO: 1214448 - RNA, 19 nt, Artificial Sequence
  Description of Artificial Sequence: Synthetic oligonucleotide
  Sense strand starting at position 3475 of SEQ ID NO: 917172
agcauugcgagggaacaau

SEQ ID NO: 1214449 - RNA, 19 nt, Artificial Sequence
  Description of Artificial Sequence: Synthetic oligonucleotide
  Antisense strand to SEQ ID NO: 1214448
auuguucccucgcaaugcu

SEQ ID NO: 1214450 - RNA, 19 nt, Artificial Sequence
  Description of Artificial Sequence: Synthetic oligonucleotide
  Sense strand starting at position 3694 of SEQ ID NO: 917172
uuuacugagcuuuauguaa

SEQ ID NO: 1214451 - RNA, 19 nt, Artificial Sequence
  Description of Artificial Sequence: Synthetic oligonucleotide
  Antisense strand to SEQ ID NO: 1214450
uuacauaaagcucaguaaa

SEQ ID NO: 1214452 - RNA, 19 nt, Artificial Sequence
  Description of Artificial Sequence: Synthetic oligonucleotide
  Sense strand starting at position 3705 of SEQ ID NO: 917172
uuauguaaccauggcuaaa

SEQ ID NO: 1214453 - RNA, 19 nt, Artificial Sequence
  Description of Artificial Sequence: Synthetic oligonucleotide
  Antisense strand to SEQ ID NO: 1214452
uuuagccaugguuacauaa

SEQ ID NO: 1214454 - RNA, 19 nt, Artificial Sequence
  Description of Artificial Sequence: Synthetic oligonucleotide
  Sense strand starting at position 3728 of SEQ ID NO: 917172
agagguuugguaggugaau

SEQ ID NO: 1214455 - RNA, 19 nt, Artificial Sequence
  Description of Artificial Sequence: Synthetic oligonucleotide
  Antisense strand to SEQ ID NO: 1214454
auucaccuaccaaaccucu

SEQ ID NO: 1214456 - RNA, 19 nt, Artificial Sequence
  Description of Artificial Sequence: Synthetic oligonucleotide
  Sense strand starting at position 3729 of SEQ ID NO: 917172
gagguuugguaggugaauu

SEQ ID NO: 1214457 - RNA, 19 nt, Artificial Sequence
  Description of Artificial Sequence: Synthetic oligonucleotide
  Antisense strand to SEQ ID NO: 1214456
aauucaccuaccaaaccuc

SEQ ID NO: 1214458 - RNA, 19 nt, Artificial Sequence
  Description of Artificial Sequence: Synthetic oligonucleotide
  Sense strand starting at position 3730 of SEQ ID NO: 917172
agguuugguaggugaauuc

SEQ ID NO: 1214459 - RNA, 19 nt, Artificial Sequence
  Description of Artificial Sequence: Synthetic oligonucleotide
  Antisense strand to SEQ ID NO: 1214458
gaauucaccuaccaaaccu

SEQ ID NO: 1214460 - RNA, 19 nt, Artificial Sequence
  Description of Artificial Sequence: Synthetic oligonucleotide
  Sense strand starting at position 3741 of SEQ ID NO: 917172
gugaauucggugcaggacu

SEQ ID NO: 1214461 - RNA, 19 nt, Artificial Sequence
  Description of Artificial Sequence: Synthetic oligonucleotide
  Antisense strand to SEQ ID NO: 1214460
aguccugcaccgaauucac

SEQ ID NO: 1214462 - RNA, 19 nt, Artificial Sequence
  Description of Artificial Sequence: Synthetic oligonucleotide
  Sense strand starting at position 3752 of SEQ ID NO: 917172
gcaggacucaaauguuuag

SEQ ID NO: 1214463 - RNA, 19 nt, Artificial Sequence
  Description of Artificial Sequence: Synthetic oligonucleotide
  Antisense strand to SEQ ID NO: 1214462
cuaaacauuugaguccugc

SEQ ID NO: 1214464 - RNA, 19 nt, Artificial Sequence
  Description of Artificial Sequence: Synthetic oligonucleotide
  Sense strand starting at position 3755 of SEQ ID NO: 917172
ggacucaaauguuuagaca

SEQ ID NO: 1214465 - RNA, 19 nt, Artificial Sequence
  Description of Artificial Sequence: Synthetic oligonucleotide
  Antisense strand to SEQ ID NO: 1214464
ugucuaaacauuugagucc

SEQ ID NO: 1214466 - RNA, 19 nt, Artificial Sequence
  Description of Artificial Sequence: Synthetic oligonucleotide
  Sense strand starting at position 3874 of SEQ ID NO: 917173
ggauuccuccugggaacga

SEQ ID NO: 1214467 - RNA, 19 nt, Artificial Sequence
  Description of Artificial Sequence: Synthetic oligonucleotide
  Antisense strand to SEQ ID NO: 1214466
ucguucccaggaggaaucc

SEQ ID NO: 1214468 - RNA, 19 nt, Artificial Sequence
  Description of Artificial Sequence: Synthetic oligonucleotide
  Sense strand starting at position 86 of SEQ ID NO: 917173
ggaguagcuccucaucacu

SEQ ID NO: 1214469 - RNA, 19 nt, Artificial Sequence
  Description of Artificial Sequence: Synthetic oligonucleotide
  Antisense strand to SEQ ID NO: 1214468
agugaugaggagcuacucc

SEQ ID NO: 1214470 - RNA, 19 nt, Artificial Sequence
  Description of Artificial Sequence: Synthetic oligonucleotide
  Sense strand starting at position 172 of SEQ ID NO: 917173
ugaaaucaugaacacguuu

SEQ ID NO: 1214471 - RNA, 19 nt, Artificial Sequence
  Description of Artificial Sequence: Synthetic oligonucleotide
  Antisense strand to SEQ ID NO: 1214470
aaacguguucaugauuuca

SEQ ID NO: 1214472 - RNA, 19 nt, Artificial Sequence
  Description of Artificial Sequence: Synthetic oligonucleotide
  Sense strand starting at position 203 of SEQ ID NO: 917173
uguguacugcucuggcaca

SEQ ID NO: 1214473 - RNA, 19 nt, Artificial Sequence
  Description of Artificial Sequence: Synthetic oligonucleotide
  Antisense strand to SEQ ID NO: 1214472
ugugccagagcaguacaca

SEQ ID NO: 1214474 - RNA, 19 nt, Artificial Sequence
  Description of Artificial Sequence: Synthetic oligonucleotide
  Sense strand starting at position 241 of SEQ ID NO: 917173
gggucguucccaggaggaa

SEQ ID NO: 1214475 - RNA, 19 nt, Artificial Sequence
  Description of Artificial Sequence: Synthetic oligonucleotide
  Antisense strand to SEQ ID NO: 1214474
uuccuccugggaacgaccc

SEQ ID NO: 1214476 - RNA, 19 nt, Artificial Sequence
  Description of Artificial Sequence: Synthetic oligonucleotide
  Sense strand starting at position 242 of SEQ ID NO: 917173
ggucguucccaggaggaau

SEQ ID NO: 1214477 - RNA, 19 nt, Artificial Sequence
  Description of Artificial Sequence: Synthetic oligonucleotide
  Antisense strand to SEQ ID NO: 1214476
auuccuccugggaacgacc

SEQ ID NO: 1214478 - RNA, 19 nt, Artificial Sequence
  Description of Artificial Sequence: Synthetic oligonucleotide
  Sense strand starting at position 413 of SEQ ID NO: 917173
uuuagccaugguuacauaa

SEQ ID NO: 1214479 - RNA, 19 nt, Artificial Sequence
  Description of Artificial Sequence: Synthetic oligonucleotide
  Antisense strand to SEQ ID NO: 1214478
uuauguaaccauggcuaaa

SEQ ID NO: 1214480 - RNA, 19 nt, Artificial Sequence
  Description of Artificial Sequence: Synthetic oligonucleotide
  Sense strand starting at position 443 of SEQ ID NO: 917173
aguggcuccuacucuuuaa

SEQ ID NO: 1214481 - RNA, 19 nt, Artificial Sequence
  Description of Artificial Sequence: Synthetic oligonucleotide
  Antisense strand to SEQ ID NO: 1214480
uuaaagaguaggagccacu

SEQ ID NO: 1214482 - RNA, 19 nt, Artificial Sequence
  Description of Artificial Sequence: Synthetic oligonucleotide
  Sense strand starting at position 639 of SEQ ID NO: 917173
ugccauuguucccucgcaa

SEQ ID NO: 1214483 - RNA, 19 nt, Artificial Sequence
  Description of Artificial Sequence: Synthetic oligonucleotide
  Antisense strand to SEQ ID NO: 1214482
uugcgagggaacaauggca

SEQ ID NO: 1214484 - RNA, 19 nt, Artificial Sequence
  Description of Artificial Sequence: Synthetic oligonucleotide
  Sense strand starting at position 640 of SEQ ID NO: 917173
gccauuguucccucgcaau

SEQ ID NO: 1214485 - RNA, 19 nt, Artificial Sequence
  Description of Artificial Sequence: Synthetic oligonucleotide
  Antisense strand to SEQ ID NO: 1214484
auugcgagggaacaauggc

SEQ ID NO: 1214486 - RNA, 19 nt, Artificial Sequence
  Description of Artificial Sequence: Synthetic oligonucleotide
  Sense strand starting at position 674 of SEQ ID NO: 917173
auacuaagguugucucguu

SEQ ID NO: 1214487 - RNA, 19 nt, Artificial Sequence
  Description of Artificial Sequence: Synthetic oligonucleotide
  Antisense strand to SEQ ID NO: 1214486
aacgagacaaccuuaguau

SEQ ID NO: 1214488 - RNA, 19 nt, Artificial Sequence
  Description of Artificial Sequence: Synthetic oligonucleotide
  Sense strand starting at position 746 of SEQ ID NO: 917173
acccucaguccgugacaga

SEQ ID NO: 1214489 - RNA, 19 nt, Artificial Sequence
  Description of Artificial Sequence: Synthetic oligonucleotide
  Antisense strand to SEQ ID NO: 1214488
ucugucacggacugagggu

SEQ ID NO: 1214490 - RNA, 19 nt, Artificial Sequence
  Description of Artificial Sequence: Synthetic oligonucleotide
  Sense strand starting at position 1005 of SEQ ID NO: 917173
agagcaagcuuucucagaa

SEQ ID NO: 1214491 - RNA, 19 nt, Artificial Sequence
  Description of Artificial Sequence: Synthetic oligonucleotide
  Antisense strand to SEQ ID NO: 1214490
uucugagaaagcuugcucu

SEQ ID NO: 1214492 - RNA, 19 nt, Artificial Sequence
  Description of Artificial Sequence: Synthetic oligonucleotide
  Sense strand starting at position 1275 of SEQ ID NO: 917173
gagaguuacaccgaagggu

SEQ ID NO: 1214493 - RNA, 19 nt, Artificial Sequence
  Description of Artificial Sequence: Synthetic oligonucleotide
  Antisense strand to SEQ ID NO: 1214492
acccuucgguguaacucuc

SEQ ID NO: 1214494 - RNA, 19 nt, Artificial Sequence
  Description of Artificial Sequence: Synthetic oligonucleotide
  Sense strand starting at position 1445 of SEQ ID NO: 917173
cgaguuuagcgcaggauga

SEQ ID NO: 1214495 - RNA, 19 nt, Artificial Sequence
  Description of Artificial Sequence: Synthetic oligonucleotide
  Antisense strand to SEQ ID NO: 1214494
ucauccugcgcuaaacucg

SEQ ID NO: 1214496 - RNA, 19 nt, Artificial Sequence
  Description of Artificial Sequence: Synthetic oligonucleotide
  Sense strand starting at position 2524 of SEQ ID NO: 917173
gaccgagccuccuuuguua

SEQ ID NO: 1214497 - RNA, 19 nt, Artificial Sequence
  Description of Artificial Sequence: Synthetic oligonucleotide
  Antisense strand to SEQ ID NO: 1214496
uaacaaaggaggcucgguc

SEQ ID NO: 1214498 - RNA, 19 nt, Artificial Sequence
  Description of Artificial Sequence: Synthetic oligonucleotide
  Sense strand starting at position 2849 of SEQ ID NO: 917173
ggcccuuugccuggaaaca

SEQ ID NO: 1214499 - RNA, 19 nt, Artificial Sequence
  Description of Artificial Sequence: Synthetic oligonucleotide
  Antisense strand to SEQ ID NO: 1214498
uguuuccaggcaaagggcc

SEQ ID NO: 1214500 - RNA, 19 nt, Artificial Sequence
  Description of Artificial Sequence: Synthetic oligonucleotide
  Sense strand starting at position 2860 of SEQ ID NO: 917173
uggaaacagcuguaucuga

SEQ ID NO: 1214501 - RNA, 19 nt, Artificial Sequence
  Description of Artificial Sequence: Synthetic oligonucleotide
  Antisense strand to SEQ ID NO: 1214500
ucagauacagcuguuucca

SEQ ID NO: 1214502 - RNA, 19 nt, Artificial Sequence
  Description of Artificial Sequence: Synthetic oligonucleotide
  Sense strand starting at position 3041 of SEQ ID NO: 917173
acuccaugucauuguucca

SEQ ID NO: 1214503 - RNA, 19 nt, Artificial Sequence
  Description of Artificial Sequence: Synthetic oligonucleotide
  Antisense strand to SEQ ID NO: 1214502
uggaacaaugacauggagu

SEQ ID NO: 1214504 - RNA, 19 nt, Artificial Sequence
  Description of Artificial Sequence: Synthetic oligonucleotide
  Sense strand starting at position 3096 of SEQ ID NO: 917173
uuaugugcuugcccagaaa

SEQ ID NO: 1214505 - RNA, 19 nt, Artificial Sequence
  Description of Artificial Sequence: Synthetic oligonucleotide
  Antisense strand to SEQ ID NO: 1214504
uuucugggcaagcacauaa

SEQ ID NO: 1214506 - RNA, 19 nt, Artificial Sequence
  Description of Artificial Sequence: Synthetic oligonucleotide
  Sense strand starting at position 3099 of SEQ ID NO: 917173
ugugcuugcccagaaagga

SEQ ID NO: 1214507 - RNA, 19 nt, Artificial Sequence
  Description of Artificial Sequence: Synthetic oligonucleotide
  Antisense strand to SEQ ID NO: 1214506
uccuuucugggcaagcaca

SEQ ID NO: 1214508 - RNA, 19 nt, Artificial Sequence
  Description of Artificial Sequence: Synthetic oligonucleotide
  Sense strand starting at position 3109 of SEQ ID NO: 917173
cagaaaggaucugggagau

SEQ ID NO: 1214509 - RNA, 19 nt, Artificial Sequence
  Description of Artificial Sequence: Synthetic oligonucleotide
  Antisense strand to SEQ ID NO: 1214508
aucucccagauccuuucug

SEQ ID NO: 1214510 - RNA, 19 nt, Artificial Sequence
  Description of Artificial Sequence: Synthetic oligonucleotide
  Sense strand starting at position 3121 of SEQ ID NO: 917173
gggagaucgguuugcagga

SEQ ID NO: 1214511 - RNA, 19 nt, Artificial Sequence
  Description of Artificial Sequence: Synthetic oligonucleotide
  Antisense strand to SEQ ID NO: 1214510
uccugcaaaccgaucuccc

SEQ ID NO: 1214512 - RNA, 19 nt, Artificial Sequence
  Description of Artificial Sequence: Synthetic oligonucleotide
  Sense strand starting at position 3137 of SEQ ID NO: 917173
ggagguuugcaggagucga

SEQ ID NO: 1214513 - RNA, 19 nt, Artificial Sequence
  Description of Artificial Sequence: Synthetic oligonucleotide
  Antisense strand to SEQ ID NO: 1214512
ucgacuccugcaaaccucc

SEQ ID NO: 1214514 - RNA, 19 nt, Artificial Sequence
  Description of Artificial Sequence: Synthetic oligonucleotide
  Sense strand starting at position 3180 of SEQ ID NO: 917173
gacugacuguuguuuccuu

SEQ ID NO: 1214515 - RNA, 19 nt, Artificial Sequence
  Description of Artificial Sequence: Synthetic oligonucleotide
  Antisense strand to SEQ ID NO: 1214514
aaggaaacaacagucaguc

SEQ ID NO: 1214516 - RNA, 19 nt, Artificial Sequence
  Description of Artificial Sequence: Synthetic oligonucleotide
  Sense strand starting at position 3481 of SEQ ID NO: 917173
gccagagagaacuggugau

SEQ ID NO: 1214517 - RNA, 19 nt, Artificial Sequence
  Description of Artificial Sequence: Synthetic oligonucleotide
  Antisense strand to SEQ ID NO: 1214516
aucaccaguucucucuggc

SEQ ID NO: 1214518 - RNA, 19 nt, Artificial Sequence
  Description of Artificial Sequence: Synthetic oligonucleotide
  Sense strand starting at position 3511 of SEQ ID NO: 917173
ucuccuaauugagagcuua

SEQ ID NO: 1214519 - RNA, 19 nt, Artificial Sequence
  Description of Artificial Sequence: Synthetic oligonucleotide
  Antisense strand to SEQ ID NO: 1214518
uaagcucucaauuaggaga

SEQ ID NO: 1214520 - RNA, 19 nt, Artificial Sequence
  Description of Artificial Sequence: Synthetic oligonucleotide
  Sense strand starting at position 3521 of SEQ ID NO: 917173
gagagcuuaucucccugga

SEQ ID NO: 1214521 - RNA, 19 nt, Artificial Sequence
  Description of Artificial Sequence: Synthetic oligonucleotide
  Antisense strand to SEQ ID NO: 1214520
uccagggagauaagcucuc

SEQ ID NO: 1214522 - RNA, 19 nt, Artificial Sequence
  Description of Artificial Sequence: Synthetic oligonucleotide
  Sense strand starting at position 3525 of SEQ ID NO: 917173
gcuuaucucccuggaggca

SEQ ID NO: 1214523 - RNA, 19 nt, Artificial Sequence
  Description of Artificial Sequence: Synthetic oligonucleotide
  Antisense strand to SEQ ID NO: 1214522
ugccuccagggagauaagc

SEQ ID NO: 1214524 - RNA, 19 nt, Artificial Sequence
  Description of Artificial Sequence: Synthetic oligonucleotide
  Sense strand starting at position 3735 of SEQ ID NO: 917173
gaacgcuuccaaggugaga

SEQ ID NO: 1214525 - RNA, 19 nt, Artificial Sequence
  Description of Artificial Sequence: Synthetic oligonucleotide
  Antisense strand to SEQ ID NO: 1214524
ucucaccuuggaagcguuc

SEQ ID NO: 1214526 - RNA, 19 nt, Artificial Sequence
  Description of Artificial Sequence: Synthetic oligonucleotide
  Sense strand starting at position 3752 of SEQ ID NO: 917173
gauggugaagccugaugau

SEQ ID NO: 1214527 - RNA, 19 nt, Artificial Sequence
  Description of Artificial Sequence: Synthetic oligonucleotide
  Antisense strand to SEQ ID NO: 1214526
aucaucaggcuucaccauc

SEQ ID NO: 1214528 - RNA, 19 nt, Artificial Sequence
  Description of Artificial Sequence: Synthetic oligonucleotide
  Sense strand starting at position 3764 of SEQ ID NO: 917173
ugaugaugguaagguaaau

SEQ ID NO: 1214529 - RNA, 19 nt, Artificial Sequence
  Description of Artificial Sequence: Synthetic oligonucleotide
  Antisense strand to SEQ ID NO: 1214528
auuuaccuuaccaucauca

SEQ ID NO: 1214530 - RNA, 19 nt, Artificial Sequence
  Description of Artificial Sequence: Synthetic oligonucleotide
  Sense strand starting at position 3773 of SEQ ID NO: 917173
uaagguaaaucagagaaag

SEQ ID NO: 1214531 - RNA, 19 nt, Artificial Sequence
  Description of Artificial Sequence: Synthetic oligonucleotide
  Antisense strand to SEQ ID NO: 1214530
cuuucucugauuuaccuua

SEQ ID NO: 1214532 - RNA, 19 nt, Artificial Sequence
  Description of Artificial Sequence: Synthetic oligonucleotide
  Sense strand starting at position 3806 of SEQ ID NO: 917173
auaggagcuguuugcauuu

SEQ ID NO: 1214533 - RNA, 19 nt, Artificial Sequence
  Description of Artificial Sequence: Synthetic oligonucleotide
  Antisense strand to SEQ ID NO: 1214532
aaaugcaaacagcuccuau

SEQ ID NO: 1214534 - RNA, 19 nt, Artificial Sequence
  Description of Artificial Sequence: Synthetic oligonucleotide
  Sense strand starting at position 3834 of SEQ ID NO: 917173
gauggauaauguuagcaaa

SEQ ID NO: 1214535 - RNA, 19 nt, Artificial Sequence
  Description of Artificial Sequence: Synthetic oligonucleotide
  Antisense strand to SEQ ID NO: 1214534
uuugcuaacauuauccauc

SEQ ID NO: 1214536 - RNA, 19 nt, Artificial Sequence
  Description of Artificial Sequence: Synthetic oligonucleotide
  Sense strand starting at position 3932 of SEQ ID NO: 917173
ccuguucucacccgggaaa

SEQ ID NO: 1214537 - RNA, 19 nt, Artificial Sequence
  Description of Artificial Sequence: Synthetic oligonucleotide
  Antisense strand to SEQ ID NO: 1214536
uuucccgggugagaacagg

SEQ ID NO: 1214538 - RNA, 19 nt, Artificial Sequence
  Description of Artificial Sequence: Synthetic oligonucleotide
  Sense strand starting at position 3933 of SEQ ID NO: 917173
cuguucucacccgggaaau

SEQ ID NO: 1214539 - RNA, 19 nt, Artificial Sequence
  Description of Artificial Sequence: Synthetic oligonucleotide
  Antisense strand to SEQ ID NO: 1214538
auuucccgggugagaacag

SEQ ID NO: 1214540 - RNA, 19 nt, Artificial Sequence
  Description of Artificial Sequence: Synthetic oligonucleotide
  Sense strand starting at position 3934 of SEQ ID NO: 917173
uguucucacccgggaaauc

SEQ ID NO: 1214541 - RNA, 19 nt, Artificial Sequence
  Description of Artificial Sequence: Synthetic oligonucleotide
  Antisense strand to SEQ ID NO: 1214540
gauuucccgggugagaaca

SEQ ID NO: 1214542 - RNA, 19 nt, Artificial Sequence
  Description of Artificial Sequence: Synthetic oligonucleotide
  Sense strand starting at position 3935 of SEQ ID NO: 917173
guucucacccgggaaauca

SEQ ID NO: 1214543 - RNA, 19 nt, Artificial Sequence
  Description of Artificial Sequence: Synthetic oligonucleotide
  Antisense strand to SEQ ID NO: 1214542
ugauuucccgggugagaac

SEQ ID NO: 1214544 - RNA, 19 nt, Artificial Sequence
  Description of Artificial Sequence: Synthetic oligonucleotide
  Sense strand starting at position 3961 of SEQ ID NO: 917173
uaauguugaguuggagaug

SEQ ID NO: 1214545 - RNA, 19 nt, Artificial Sequence
  Description of Artificial Sequence: Synthetic oligonucleotide
  Antisense strand to SEQ ID NO: 1214544
caucuccaacucaacauua

SEQ ID NO: 1214546 - RNA, 19 nt, Artificial Sequence
  Description of Artificial Sequence: Synthetic oligonucleotide
  Sense strand starting at position 3964 of SEQ ID NO: 917174
uguugaguuggagaugauu

SEQ ID NO: 1214547 - RNA, 19 nt, Artificial Sequence
  Description of Artificial Sequence: Synthetic oligonucleotide
  Antisense strand to SEQ ID NO: 1214546
aaucaucuccaacucaaca

SEQ ID NO: 1214548 - RNA, 19 nt, Artificial Sequence
  Description of Artificial Sequence: Synthetic oligonucleotide
  Sense strand starting at position 359 of SEQ ID NO: 917174
gucugaacuaaagaacguu

SEQ ID NO: 1214549 - RNA, 19 nt, Artificial Sequence
  Description of Artificial Sequence: Synthetic oligonucleotide
  Antisense strand to SEQ ID NO: 1214548
aacguucuuuaguucagac

SEQ ID NO: 1214550 - RNA, 19 nt, Artificial Sequence
  Description of Artificial Sequence: Synthetic oligonucleotide
  Sense strand starting at position 458 of SEQ ID NO: 917174
aucauauaaucugugaaug

SEQ ID NO: 1214551 - RNA, 19 nt, Artificial Sequence
  Description of Artificial Sequence: Synthetic oligonucleotide
  Antisense strand to SEQ ID NO: 1214550
cauucacagauuauaugau

SEQ ID NO: 1214552 - RNA, 19 nt, Artificial Sequence
  Description of Artificial Sequence: Synthetic oligonucleotide
  Sense strand starting at position 459 of SEQ ID NO: 917174
ucauauaaucugugaauga

SEQ ID NO: 1214553 - RNA, 19 nt, Artificial Sequence
  Description of Artificial Sequence: Synthetic oligonucleotide
  Antisense strand to SEQ ID NO: 1214552
ucauucacagauuauauga

SEQ ID NO: 1214554 - RNA, 19 nt, Artificial Sequence
  Description of Artificial Sequence: Synthetic oligonucleotide
  Sense strand starting at position 466 of SEQ ID NO: 917174
aucugugaaugacugcaua

SEQ ID NO: 1214555 - RNA, 19 nt, Artificial Sequence
  Description of Artificial Sequence: Synthetic oligonucleotide
  Antisense strand to SEQ ID NO: 1214554
uaugcagucauucacagau

SEQ ID NO: 1214556 - RNA, 19 nt, Artificial Sequence
  Description of Artificial Sequence: Synthetic oligonucleotide
  Sense strand starting at position 577 of SEQ ID NO: 917174
acaguauugguagauguga

SEQ ID NO: 1214557 - RNA, 19 nt, Artificial Sequence
  Description of Artificial Sequence: Synthetic oligonucleotide
  Antisense strand to SEQ ID NO: 1214556
ucacaucuaccaauacugu

SEQ ID NO: 1214558 - RNA, 19 nt, Artificial Sequence
  Description of Artificial Sequence: Synthetic oligonucleotide
  Sense strand starting at position 579 of SEQ ID NO: 917174
aguauugguagaugugaca

SEQ ID NO: 1214559 - RNA, 19 nt, Artificial Sequence
  Description of Artificial Sequence: Synthetic oligonucleotide
  Antisense strand to SEQ ID NO: 1214558
ugucacaucuaccaauacu

SEQ ID NO: 1214560 - RNA, 19 nt, Artificial Sequence
  Description of Artificial Sequence: Synthetic oligonucleotide
  Sense strand starting at position 645 of SEQ ID NO: 917174
ggccuaauguaauugaaag

SEQ ID NO: 1214561 - RNA, 19 nt, Artificial Sequence
  Description of Artificial Sequence: Synthetic oligonucleotide
  Antisense strand to SEQ ID NO: 1214560
cuuucaauuacauuaggcc

SEQ ID NO: 1214562 - RNA, 19 nt, Artificial Sequence
  Description of Artificial Sequence: Synthetic oligonucleotide
  Sense strand starting at position 646 of SEQ ID NO: 917174
gccuaauguaauugaaagg

SEQ ID NO: 1214563 - RNA, 19 nt, Artificial Sequence
  Description of Artificial Sequence: Synthetic oligonucleotide
  Antisense strand to SEQ ID NO: 1214562
ccuuucaauuacauuaggc

SEQ ID NO: 1214564 - RNA, 19 nt, Artificial Sequence
  Description of Artificial Sequence: Synthetic oligonucleotide
  Sense strand starting at position 657 of SEQ ID NO: 917174
uugaaaggguccuuauaag

SEQ ID NO: 1214565 - RNA, 19 nt, Artificial Sequence
  Description of Artificial Sequence: Synthetic oligonucleotide
  Antisense strand to SEQ ID NO: 1214564
cuuauaaggacccuuucaa

SEQ ID NO: 1214566 - RNA, 19 nt, Artificial Sequence
  Description of Artificial Sequence: Synthetic oligonucleotide
  Sense strand starting at position 730 of SEQ ID NO: 917174
cuggaaugaugugcuuuga

SEQ ID NO: 1214567 - RNA, 19 nt, Artificial Sequence
  Description of Artificial Sequence: Synthetic oligonucleotide
  Antisense strand to SEQ ID NO: 1214566
ucaaagcacaucauuccag

SEQ ID NO: 1214568 - RNA, 19 nt, Artificial Sequence
  Description of Artificial Sequence: Synthetic oligonucleotide
  Sense strand starting at position 840 of SEQ ID NO: 917174
ccguaagacuaguuuagga

SEQ ID NO: 1214569 - RNA, 19 nt, Artificial Sequence
  Description of Artificial Sequence: Synthetic oligonucleotide
  Antisense strand to SEQ ID NO: 1214568
uccuaaacuagucuuacgg

SEQ ID NO: 1214570 - RNA, 19 nt, Artificial Sequence
  Description of Artificial Sequence: Synthetic oligonucleotide
  Sense strand starting at position 1014 of SEQ ID NO: 917174
cucgaaaugcacuaaauca

SEQ ID NO: 1214571 - RNA, 19 nt, Artificial Sequence
  Description of Artificial Sequence: Synthetic oligonucleotide
  Antisense strand to SEQ ID NO: 1214570
ugauuuagugcauuucgag

SEQ ID NO: 1214572 - RNA, 19 nt, Artificial Sequence
  Description of Artificial Sequence: Synthetic oligonucleotide
  Sense strand starting at position 1088 of SEQ ID NO: 917174
ccaggaauccucgaaagca

SEQ ID NO: 1214573 - RNA, 19 nt, Artificial Sequence
  Description of Artificial Sequence: Synthetic oligonucleotide
  Antisense strand to SEQ ID NO: 1214572
ugcuuucgaggauuccugg

SEQ ID NO: 1214574 - RNA, 19 nt, Artificial Sequence
  Description of Artificial Sequence: Synthetic oligonucleotide
  Sense strand starting at position 1096 of SEQ ID NO: 917174
ccucgaaagcaagaucagu

SEQ ID NO: 1214575 - RNA, 19 nt, Artificial Sequence
  Description of Artificial Sequence: Synthetic oligonucleotide
  Antisense strand to SEQ ID NO: 1214574
acugaucuugcuuucgagg

SEQ ID NO: 1214576 - RNA, 19 nt, Artificial Sequence
  Description of Artificial Sequence: Synthetic oligonucleotide
  Sense strand starting at position 1201 of SEQ ID NO: 917174
uuuguauggacuuggguaa

SEQ ID NO: 1214577 - RNA, 19 nt, Artificial Sequence
  Description of Artificial Sequence: Synthetic oligonucleotide
  Antisense strand to SEQ ID NO: 1214576
uuacccaaguccauacaaa

SEQ ID NO: 1214578 - RNA, 19 nt, Artificial Sequence
  Description of Artificial Sequence: Synthetic oligonucleotide
  Sense strand starting at position 1250 of SEQ ID NO: 917174
acuccuauucugggaagug

SEQ ID NO: 1214579 - RNA, 19 nt, Artificial Sequence
  Description of Artificial Sequence: Synthetic oligonucleotide
  Antisense strand to SEQ ID NO: 1214578
cacuucccagaauaggagu

SEQ ID NO: 1214580 - RNA, 19 nt, Artificial Sequence
  Description of Artificial Sequence: Synthetic oligonucleotide
  Sense strand starting at position 1455 of SEQ ID NO: 917174
ugcggugcuaucucugcaa

SEQ ID NO: 1214581 - RNA, 19 nt, Artificial Sequence
  Description of Artificial Sequence: Synthetic oligonucleotide
  Antisense strand to SEQ ID NO: 1214580
uugcagagauagcaccgca

SEQ ID NO: 1214582 - RNA, 19 nt, Artificial Sequence
  Description of Artificial Sequence: Synthetic oligonucleotide
  Sense strand starting at position 1459 of SEQ ID NO: 917174
gugcuaucucugcaaauuu

SEQ ID NO: 1214583 - RNA, 19 nt, Artificial Sequence
  Description of Artificial Sequence: Synthetic oligonucleotide
  Antisense strand to SEQ ID NO: 1214582
aaauuugcagagauagcac

SEQ ID NO: 1214584 - RNA, 19 nt, Artificial Sequence
  Description of Artificial Sequence: Synthetic oligonucleotide
  Sense strand starting at position 1510 of SEQ ID NO: 917174
cguguuccuggcuucgaau

SEQ ID NO: 1214585 - RNA, 19 nt, Artificial Sequence
  Description of Artificial Sequence: Synthetic oligonucleotide
  Antisense strand to SEQ ID NO: 1214584
auucgaagccaggaacacg

SEQ ID NO: 1214586 - RNA, 19 nt, Artificial Sequence
  Description of Artificial Sequence: Synthetic oligonucleotide
  Sense strand starting at position 1527 of SEQ ID NO: 917174
auaacugucgccuaaucaa

SEQ ID NO: 1214587 - RNA, 19 nt, Artificial Sequence
  Description of Artificial Sequence: Synthetic oligonucleotide
  Antisense strand to SEQ ID NO: 1214586
uugauuaggcgacaguuau

SEQ ID NO: 1214588 - RNA, 19 nt, Artificial Sequence
  Description of Artificial Sequence: Synthetic oligonucleotide
  Sense strand starting at position 1791 of SEQ ID NO: 917174
ccugguuggugaccugaaa

SEQ ID NO: 1214589 - RNA, 19 nt, Artificial Sequence
  Description of Artificial Sequence: Synthetic oligonucleotide
  Antisense strand to SEQ ID NO: 1214588
uuucaggucaccaaccagg

SEQ ID NO: 1214590 - RNA, 19 nt, Artificial Sequence
  Description of Artificial Sequence: Synthetic oligonucleotide
  Sense strand starting at position 1883 of SEQ ID NO: 917174
ggaacucacaucggacuua

SEQ ID NO: 1214591 - RNA, 19 nt, Artificial Sequence
  Description of Artificial Sequence: Synthetic oligonucleotide
  Antisense strand to SEQ ID NO: 1214590
uaaguccgaugugaguucc

SEQ ID NO: 1214592 - RNA, 19 nt, Artificial Sequence
  Description of Artificial Sequence: Synthetic oligonucleotide
  Sense strand starting at position 2060 of SEQ ID NO: 917174
aucuuuaugugacucauau

SEQ ID NO: 1214593 - RNA, 19 nt, Artificial Sequence
  Description of Artificial Sequence: Synthetic oligonucleotide
  Antisense strand to SEQ ID NO: 1214592
auaugagucacauaaagau

SEQ ID NO: 1214594 - RNA, 19 nt, Artificial Sequence
  Description of Artificial Sequence: Synthetic oligonucleotide
  Sense strand starting at position 2145 of SEQ ID NO: 917174
gccaaagauuugggagaua

SEQ ID NO: 1214595 - RNA, 19 nt, Artificial Sequence
  Description of Artificial Sequence: Synthetic oligonucleotide
  Antisense strand to SEQ ID NO: 1214594
uaucucccaaaucuuuggc

SEQ ID NO: 1214596 - RNA, 19 nt, Artificial Sequence
  Description of Artificial Sequence: Synthetic oligonucleotide
  Sense strand starting at position 2158 of SEQ ID NO: 917174
gagauacuuugagaagaga

SEQ ID NO: 1214597 - RNA, 19 nt, Artificial Sequence
  Description of Artificial Sequence: Synthetic oligonucleotide
  Antisense strand to SEQ ID NO: 1214596
ucucuucucaaaguaucuc

SEQ ID NO: 1214598 - RNA, 19 nt, Artificial Sequence
  Description of Artificial Sequence: Synthetic oligonucleotide
  Sense strand starting at position 2333 of SEQ ID NO: 917174
gaguuuguccugcaaggga

SEQ ID NO: 1214599 - RNA, 19 nt, Artificial Sequence
  Description of Artificial Sequence: Synthetic oligonucleotide
  Antisense strand to SEQ ID NO: 1214598
ucccuugcaggacaaacuc

SEQ ID NO: 1214600 - RNA, 19 nt, Artificial Sequence
  Description of Artificial Sequence: Synthetic oligonucleotide
  Sense strand starting at position 2466 of SEQ ID NO: 917174
cggaauaccuucccaucuu

SEQ ID NO: 1214601 - RNA, 19 nt, Artificial Sequence
  Description of Artificial Sequence: Synthetic oligonucleotide
  Antisense strand to SEQ ID NO: 1214600
aagaugggaagguauuccg

SEQ ID NO: 1214602 - RNA, 19 nt, Artificial Sequence
  Description of Artificial Sequence: Synthetic oligonucleotide
  Sense strand starting at position 2652 of SEQ ID NO: 917174
guucgcauuguacauauuu

SEQ ID NO: 1214603 - RNA, 19 nt, Artificial Sequence
  Description of Artificial Sequence: Synthetic oligonucleotide
  Antisense strand to SEQ ID NO: 1214602
aaauauguacaaugcgaac

SEQ ID NO: 1214604 - RNA, 19 nt, Artificial Sequence
  Description of Artificial Sequence: Synthetic oligonucleotide
  Sense strand starting at position 2671 of SEQ ID NO: 917174
gcuuuaucucggcuuguau

SEQ ID NO: 1214605 - RNA, 19 nt, Artificial Sequence
  Description of Artificial Sequence: Synthetic oligonucleotide
  Antisense strand to SEQ ID NO: 1214604
auacaagccgagauaaagc

SEQ ID NO: 1214606 - RNA, 19 nt, Artificial Sequence
  Description of Artificial Sequence: Synthetic oligonucleotide
  Sense strand starting at position 2682 of SEQ ID NO: 917174
gcuuguauuaaggaugaua

SEQ ID NO: 1214607 - RNA, 19 nt, Artificial Sequence
  Description of Artificial Sequence: Synthetic oligonucleotide
  Antisense strand to SEQ ID NO: 1214606
uaucauccuuaauacaagc

SEQ ID NO: 1214608 - RNA, 19 nt, Artificial Sequence
  Description of Artificial Sequence: Synthetic oligonucleotide
  Sense strand starting at position 2684 of SEQ ID NO: 917174
uuguauuaaggaugauacu

SEQ ID NO: 1214609 - RNA, 19 nt, Artificial Sequence
  Description of Artificial Sequence: Synthetic oligonucleotide
  Antisense strand to SEQ ID NO: 1214608
aguaucauccuuaauacaa

SEQ ID NO: 1214610 - RNA, 19 nt, Artificial Sequence
  Description of Artificial Sequence: Synthetic oligonucleotide
  Sense strand starting at position 2980 of SEQ ID NO: 917174
aggacuguguuccucaaug

SEQ ID NO: 1214611 - RNA, 19 nt, Artificial Sequence
  Description of Artificial Sequence: Synthetic oligonucleotide
  Antisense strand to SEQ ID NO: 1214610
cauugaggaacacaguccu

SEQ ID NO: 1214612 - RNA, 19 nt, Artificial Sequence
  Description of Artificial Sequence: Synthetic oligonucleotide
  Sense strand starting at position 2982 of SEQ ID NO: 917174
gacuguguuccucaaugaa

SEQ ID NO: 1214613 - RNA, 19 nt, Artificial Sequence
  Description of Artificial Sequence: Synthetic oligonucleotide
  Antisense strand to SEQ ID NO: 1214612
uucauugaggaacacaguc

SEQ ID NO: 1214614 - RNA, 19 nt, Artificial Sequence
  Description of Artificial Sequence: Synthetic oligonucleotide
  Sense strand starting at position 2986 of SEQ ID NO: 917174
guguuccucaaugaagguu

SEQ ID NO: 1214615 - RNA, 19 nt, Artificial Sequence
  Description of Artificial Sequence: Synthetic oligonucleotide
  Antisense strand to SEQ ID NO: 1214614
aaccuucauugaggaacac

SEQ ID NO: 1214616 - RNA, 19 nt, Artificial Sequence
  Description of Artificial Sequence: Synthetic oligonucleotide
  Sense strand starting at position 3279 of SEQ ID NO: 917174
cucugacucuagccugaaa

SEQ ID NO: 1214617 - RNA, 19 nt, Artificial Sequence
  Description of Artificial Sequence: Synthetic oligonucleotide
  Antisense strand to SEQ ID NO: 1214616
uuucaggcuagagucagag

SEQ ID NO: 1214618 - RNA, 19 nt, Artificial Sequence
  Description of Artificial Sequence: Synthetic oligonucleotide
  Sense strand starting at position 3500 of SEQ ID NO: 917174
ugagauugcagacaugcau

SEQ ID NO: 1214619 - RNA, 19 nt, Artificial Sequence
  Description of Artificial Sequence: Synthetic oligonucleotide
  Antisense strand to SEQ ID NO: 1214618
augcaugucugcaaucuca

SEQ ID NO: 1214620 - RNA, 19 nt, Artificial Sequence
  Description of Artificial Sequence: Synthetic oligonucleotide
  Sense strand starting at position 3947 of SEQ ID NO: 917174
guuauuggacgugauuaaa

SEQ ID NO: 1214621 - RNA, 19 nt, Artificial Sequence
  Description of Artificial Sequence: Synthetic oligonucleotide
  Antisense strand to SEQ ID NO: 1214620
uuuaaucacguccaauaac

SEQ ID NO: 1214622 - RNA, 19 nt, Artificial Sequence
  Description of Artificial Sequence: Synthetic oligonucleotide
  Sense strand starting at position 3950 of SEQ ID NO: 917174
auuggacgugauuaaaugu

SEQ ID NO: 1214623 - RNA, 19 nt, Artificial Sequence
  Description of Artificial Sequence: Synthetic oligonucleotide
  Antisense strand to SEQ ID NO: 1214622
acauuuaaucacguccaau

SEQ ID NO: 1214624 - RNA, 19 nt, Artificial Sequence
  Description of Artificial Sequence: Synthetic oligonucleotide
  Sense strand starting at position 3966 of SEQ ID NO: 917174
uguacuaauuagcuuggga

SEQ ID NO: 1214625 - RNA, 19 nt, Artificial Sequence
  Description of Artificial Sequence: Synthetic oligonucleotide
  Antisense strand to SEQ ID NO: 1214624
ucccaagcuaauuaguaca

SEQ ID NO: 1214626 - RNA, 19 nt, Artificial Sequence
  Description of Artificial Sequence: Synthetic oligonucleotide
  Sense strand starting at position 3969 of SEQ ID NO: 917174
acuaauuagcuugggagga

SEQ ID NO: 1214627 - RNA, 19 nt, Artificial Sequence
  Description of Artificial Sequence: Synthetic oligonucleotide
  Antisense strand to SEQ ID NO: 1214626
uccucccaagcuaauuagu

SEQ ID NO: 1214628 - RNA, 19 nt, Artificial Sequence
  Description of Artificial Sequence: Synthetic oligonucleotide
  Sense strand starting at position 3969 of SEQ ID NO: 917175
acuaauuagcuugggagga

SEQ ID NO: 1214629 - RNA, 19 nt, Artificial Sequence
  Description of Artificial Sequence: Synthetic oligonucleotide
  Antisense strand to SEQ ID NO: 1214628
uccucccaagcuaauuagu

SEQ ID NO: 1214630 - RNA, 19 nt, Artificial Sequence
  Description of Artificial Sequence: Synthetic oligonucleotide
  Sense strand starting at position 75 of SEQ ID NO: 917175
accagugaugcccaaucuu

SEQ ID NO: 1214631 - RNA, 19 nt, Artificial Sequence
  Description of Artificial Sequence: Synthetic oligonucleotide
  Antisense strand to SEQ ID NO: 1214630
aagauugggcaucacuggu

SEQ ID NO: 1214632 - RNA, 19 nt, Artificial Sequence
  Description of Artificial Sequence: Synthetic oligonucleotide
  Sense strand starting at position 101 of SEQ ID NO: 917175
gucucagacuuauugaauc

SEQ ID NO: 1214633 - RNA, 19 nt, Artificial Sequence
  Description of Artificial Sequence: Synthetic oligonucleotide
  Antisense strand to SEQ ID NO: 1214632
gauucaauaagucugagac

SEQ ID NO: 1214634 - RNA, 19 nt, Artificial Sequence
  Description of Artificial Sequence: Synthetic oligonucleotide
  Sense strand starting at position 334 of SEQ ID NO: 917175
aggacaaccucuguaaggu

SEQ ID NO: 1214635 - RNA, 19 nt, Artificial Sequence
  Description of Artificial Sequence: Synthetic oligonucleotide
  Antisense strand to SEQ ID NO: 1214634
accuuacagagguuguccu

SEQ ID NO: 1214636 - RNA, 19 nt, Artificial Sequence
  Description of Artificial Sequence: Synthetic oligonucleotide
  Sense strand starting at position 340 of SEQ ID NO: 917175
accucuguaaggugaaaga

SEQ ID NO: 1214637 - RNA, 19 nt, Artificial Sequence
  Description of Artificial Sequence: Synthetic oligonucleotide
  Antisense strand to SEQ ID NO: 1214636
ucuuucaccuuacagaggu

SEQ ID NO: 1214638 - RNA, 19 nt, Artificial Sequence
  Description of Artificial Sequence: Synthetic oligonucleotide
  Sense strand starting at position 687 of SEQ ID NO: 917175
aggcaauuccuuugacagu

SEQ ID NO: 1214639 - RNA, 19 nt, Artificial Sequence
  Description of Artificial Sequence: Synthetic oligonucleotide
  Antisense strand to SEQ ID NO: 1214638
acugucaaaggaauugccu

SEQ ID NO: 1214640 - RNA, 19 nt, Artificial Sequence
  Description of Artificial Sequence: Synthetic oligonucleotide
  Sense strand starting at position 693 of SEQ ID NO: 917175
uuccuuugacaguaaguaa

SEQ ID NO: 1214641 - RNA, 19 nt, Artificial Sequence
  Description of Artificial Sequence: Synthetic oligonucleotide
  Antisense strand to SEQ ID NO: 1214640
uuacuuacugucaaaggaa

SEQ ID NO: 1214642 - RNA, 19 nt, Artificial Sequence
  Description of Artificial Sequence: Synthetic oligonucleotide
  Sense strand starting at position 750 of SEQ ID NO: 917175
agacuaagagucuggcaau

SEQ ID NO: 1214643 - RNA, 19 nt, Artificial Sequence
  Description of Artificial Sequence: Synthetic oligonucleotide
  Antisense strand to SEQ ID NO: 1214642
auugccagacucuuagucu

SEQ ID NO: 1214644 - RNA, 19 nt, Artificial Sequence
  Description of Artificial Sequence: Synthetic oligonucleotide
  Sense strand starting at position 756 of SEQ ID NO: 917175
agagucuggcaauguaacu

SEQ ID NO: 1214645 - RNA, 19 nt, Artificial Sequence
  Description of Artificial Sequence: Synthetic oligonucleotide
  Antisense strand to SEQ ID NO: 1214644
aguuacauugccagacucu

SEQ ID NO: 1214646 - RNA, 19 nt, Artificial Sequence
  Description of Artificial Sequence: Synthetic oligonucleotide
  Sense strand starting at position 831 of SEQ ID NO: 917175
caaaguguuaggugaguau

SEQ ID NO: 1214647 - RNA, 19 nt, Artificial Sequence
  Description of Artificial Sequence: Synthetic oligonucleotide
  Antisense strand to SEQ ID NO: 1214646
auacucaccuaacacuuug

SEQ ID NO: 1214648 - RNA, 19 nt, Artificial Sequence
  Description of Artificial Sequence: Synthetic oligonucleotide
  Sense strand starting at position 851 of SEQ ID NO: 917175
gcagcaauccauuagauaa

SEQ ID NO: 1214649 - RNA, 19 nt, Artificial Sequence
  Description of Artificial Sequence: Synthetic oligonucleotide
  Antisense strand to SEQ ID NO: 1214648
uuaucuaauggauugcugc

SEQ ID NO: 1214650 - RNA, 19 nt, Artificial Sequence
  Description of Artificial Sequence: Synthetic oligonucleotide
  Sense strand starting at position 891 of SEQ ID NO: 917175
augaaauaccucugaaguc

SEQ ID NO: 1214651 - RNA, 19 nt, Artificial Sequence
  Description of Artificial Sequence: Synthetic oligonucleotide
  Antisense strand to SEQ ID NO: 1214650
gacuucagagguauuucau

SEQ ID NO: 1214652 - RNA, 19 nt, Artificial Sequence
  Description of Artificial Sequence: Synthetic oligonucleotide
  Sense strand starting at position 944 of SEQ ID NO: 917175
guuggaaguuucccaagaa

SEQ ID NO: 1214653 - RNA, 19 nt, Artificial Sequence
  Description of Artificial Sequence: Synthetic oligonucleotide
  Antisense strand to SEQ ID NO: 1214652
uucuugggaaacuuccaac

SEQ ID NO: 1214654 - RNA, 19 nt, Artificial Sequence
  Description of Artificial Sequence: Synthetic oligonucleotide
  Sense strand starting at position 1024 of SEQ ID NO: 917175
cucuauuaggugcagaaua

SEQ ID NO: 1214655 - RNA, 19 nt, Artificial Sequence
  Description of Artificial Sequence: Synthetic oligonucleotide
  Antisense strand to SEQ ID NO: 1214654
uauucugcaccuaauagag

SEQ ID NO: 1214656 - RNA, 19 nt, Artificial Sequence
  Description of Artificial Sequence: Synthetic oligonucleotide
  Sense strand starting at position 1026 of SEQ ID NO: 917175
cuauuaggugcagaauagu

SEQ ID NO: 1214657 - RNA, 19 nt, Artificial Sequence
  Description of Artificial Sequence: Synthetic oligonucleotide
  Antisense strand to SEQ ID NO: 1214656
acuauucugcaccuaauag

SEQ ID NO: 1214658 - RNA, 19 nt, Artificial Sequence
  Description of Artificial Sequence: Synthetic oligonucleotide
  Sense strand starting at position 1029 of SEQ ID NO: 917175
uuaggugcagaauaguaau

SEQ ID NO: 1214659 - RNA, 19 nt, Artificial Sequence
  Description of Artificial Sequence: Synthetic oligonucleotide
  Antisense strand to SEQ ID NO: 1214658
auuacuauucugcaccuaa

SEQ ID NO: 1214660 - RNA, 19 nt, Artificial Sequence
  Description of Artificial Sequence: Synthetic oligonucleotide
  Sense strand starting at position 1074 of SEQ ID NO: 917175
uggaguuaucauugauaac

SEQ ID NO: 1214661 - RNA, 19 nt, Artificial Sequence
  Description of Artificial Sequence: Synthetic oligonucleotide
  Antisense strand to SEQ ID NO: 1214660
guuaucaaugauaacucca

SEQ ID NO: 1214662 - RNA, 19 nt, Artificial Sequence
  Description of Artificial Sequence: Synthetic oligonucleotide
  Sense strand starting at position 1177 of SEQ ID NO: 917175
gcauuuauuucucacacgu

SEQ ID NO: 1214663 - RNA, 19 nt, Artificial Sequence
  Description of Artificial Sequence: Synthetic oligonucleotide
  Antisense strand to SEQ ID NO: 1214662
acgugugagaaauaaaugc

SEQ ID NO: 1214664 - RNA, 19 nt, Artificial Sequence
  Description of Artificial Sequence: Synthetic oligonucleotide
  Sense strand starting at position 1179 of SEQ ID NO: 917175
auuuauuucucacacguuu

SEQ ID NO: 1214665 - RNA, 19 nt, Artificial Sequence
  Description of Artificial Sequence: Synthetic oligonucleotide
  Antisense strand to SEQ ID NO: 1214664
aaacgugugagaaauaaau

SEQ ID NO: 1214666 - RNA, 19 nt, Artificial Sequence
  Description of Artificial Sequence: Synthetic oligonucleotide
  Sense strand starting at position 1216 of SEQ ID NO: 917175
gauguuucugcauaucuga

SEQ ID NO: 1214667 - RNA, 19 nt, Artificial Sequence
  Description of Artificial Sequence: Synthetic oligonucleotide
  Antisense strand to SEQ ID NO: 1214666
ucagauaugcagaaacauc

SEQ ID NO: 1214668 - RNA, 19 nt, Artificial Sequence
  Description of Artificial Sequence: Synthetic oligonucleotide
  Sense strand starting at position 1288 of SEQ ID NO: 917175
uggguuaggcccuggauaa

SEQ ID NO: 1214669 - RNA, 19 nt, Artificial Sequence
  Description of Artificial Sequence: Synthetic oligonucleotide
  Antisense strand to SEQ ID NO: 1214668
uuauccagggccuaaccca

SEQ ID NO: 1214670 - RNA, 19 nt, Artificial Sequence
  Description of Artificial Sequence: Synthetic oligonucleotide
  Sense strand starting at position 1289 of SEQ ID NO: 917175
ggguuaggcccuggauaaa

SEQ ID NO: 1214671 - RNA, 19 nt, Artificial Sequence
  Description of Artificial Sequence: Synthetic oligonucleotide
  Antisense strand to SEQ ID NO: 1214670
uuuauccagggccuaaccc

SEQ ID NO: 1214672 - RNA, 19 nt, Artificial Sequence
  Description of Artificial Sequence: Synthetic oligonucleotide
  Sense strand starting at position 1302 of SEQ ID NO: 917175
gauaaauaaugugaagaag

SEQ ID NO: 1214673 - RNA, 19 nt, Artificial Sequence
  Description of Artificial Sequence: Synthetic oligonucleotide
  Antisense strand to SEQ ID NO: 1214672
cuucuucacauuauuuauc

SEQ ID NO: 1214674 - RNA, 19 nt, Artificial Sequence
  Description of Artificial Sequence: Synthetic oligonucleotide
  Sense strand starting at position 1453 of SEQ ID NO: 917175
ucuguuuaccucuacagca

SEQ ID NO: 1214675 - RNA, 19 nt, Artificial Sequence
  Description of Artificial Sequence: Synthetic oligonucleotide
  Antisense strand to SEQ ID NO: 1214674
ugcuguagagguaaacaga

SEQ ID NO: 1214676 - RNA, 19 nt, Artificial Sequence
  Description of Artificial Sequence: Synthetic oligonucleotide
  Sense strand starting at position 1631 of SEQ ID NO: 917175
ccguaauuccagcacacuu

SEQ ID NO: 1214677 - RNA, 19 nt, Artificial Sequence
  Description of Artificial Sequence: Synthetic oligonucleotide
  Antisense strand to SEQ ID NO: 1214676
aagugugcuggaauuacgg

SEQ ID NO: 1214678 - RNA, 19 nt, Artificial Sequence
  Description of Artificial Sequence: Synthetic oligonucleotide
  Sense strand starting at position 1713 of SEQ ID NO: 917175
gccucuacucuacagugaa

SEQ ID NO: 1214679 - RNA, 19 nt, Artificial Sequence
  Description of Artificial Sequence: Synthetic oligonucleotide
  Antisense strand to SEQ ID NO: 1214678
uucacuguagaguagaggc

SEQ ID NO: 1214680 - RNA, 19 nt, Artificial Sequence
  Description of Artificial Sequence: Synthetic oligonucleotide
  Sense strand starting at position 1728 of SEQ ID NO: 917175
ugaacucaacuuuguguca

SEQ ID NO: 1214681 - RNA, 19 nt, Artificial Sequence
  Description of Artificial Sequence: Synthetic oligonucleotide
  Antisense strand to SEQ ID NO: 1214680
ugacacaaaguugaguuca

SEQ ID NO: 1214682 - RNA, 19 nt, Artificial Sequence
  Description of Artificial Sequence: Synthetic oligonucleotide
  Sense strand starting at position 1731 of SEQ ID NO: 917175
acucaacuuugugucaaua

SEQ ID NO: 1214683 - RNA, 19 nt, Artificial Sequence
  Description of Artificial Sequence: Synthetic oligonucleotide
  Antisense strand to SEQ ID NO: 1214682
uauugacacaaaguugagu

SEQ ID NO: 1214684 - RNA, 19 nt, Artificial Sequence
  Description of Artificial Sequence: Synthetic oligonucleotide
  Sense strand starting at position 1742 of SEQ ID NO: 917175
ugucaauacuuaguacagu

SEQ ID NO: 1214685 - RNA, 19 nt, Artificial Sequence
  Description of Artificial Sequence: Synthetic oligonucleotide
  Antisense strand to SEQ ID NO: 1214684
acuguacuaaguauugaca

SEQ ID NO: 1214686 - RNA, 19 nt, Artificial Sequence
  Description of Artificial Sequence: Synthetic oligonucleotide
  Sense strand starting at position 1785 of SEQ ID NO: 917175
gucaaauggaaucggauau

SEQ ID NO: 1214687 - RNA, 19 nt, Artificial Sequence
  Description of Artificial Sequence: Synthetic oligonucleotide
  Antisense strand to SEQ ID NO: 1214686
auauccgauuccauuugac

SEQ ID NO: 1214688 - RNA, 19 nt, Artificial Sequence
  Description of Artificial Sequence: Synthetic oligonucleotide
  Sense strand starting at position 2635 of SEQ ID NO: 917175
cagggauucugggauuuaa

SEQ ID NO: 1214689 - RNA, 19 nt, Artificial Sequence
  Description of Artificial Sequence: Synthetic oligonucleotide
  Antisense strand to SEQ ID NO: 1214688
uuaaaucccagaaucccug

SEQ ID NO: 1214690 - RNA, 19 nt, Artificial Sequence
  Description of Artificial Sequence: Synthetic oligonucleotide
  Sense strand starting at position 2647 of SEQ ID NO: 917175
gauuuaauuucuugagggc

SEQ ID NO: 1214691 - RNA, 19 nt, Artificial Sequence
  Description of Artificial Sequence: Synthetic oligonucleotide
  Antisense strand to SEQ ID NO: 1214690
gcccucaagaaauuaaauc

SEQ ID NO: 1214692 - RNA, 19 nt, Artificial Sequence
  Description of Artificial Sequence: Synthetic oligonucleotide
  Sense strand starting at position 3102 of SEQ ID NO: 917175
gaaagcucaguuuaauagu

SEQ ID NO: 1214693 - RNA, 19 nt, Artificial Sequence
  Description of Artificial Sequence: Synthetic oligonucleotide
  Antisense strand to SEQ ID NO: 1214692
acuauuaaacugagcuuuc

SEQ ID NO: 1214694 - RNA, 19 nt, Artificial Sequence
  Description of Artificial Sequence: Synthetic oligonucleotide
  Sense strand starting at position 3327 of SEQ ID NO: 917175
gcucuccuaguuuaucaua

SEQ ID NO: 1214695 - RNA, 19 nt, Artificial Sequence
  Description of Artificial Sequence: Synthetic oligonucleotide
  Antisense strand to SEQ ID NO: 1214694
uaugauaaacuaggagagc

SEQ ID NO: 1214696 - RNA, 19 nt, Artificial Sequence
  Description of Artificial Sequence: Synthetic oligonucleotide
  Sense strand starting at position 3434 of SEQ ID NO: 917175
guagcaaauucccuggaca

SEQ ID NO: 1214697 - RNA, 19 nt, Artificial Sequence
  Description of Artificial Sequence: Synthetic oligonucleotide
  Antisense strand to SEQ ID NO: 1214696
uguccagggaauuugcuac

SEQ ID NO: 1214698 - RNA, 19 nt, Artificial Sequence
  Description of Artificial Sequence: Synthetic oligonucleotide
  Sense strand starting at position 3436 of SEQ ID NO: 917175
agcaaauucccuggacaaa

SEQ ID NO: 1214699 - RNA, 19 nt, Artificial Sequence
  Description of Artificial Sequence: Synthetic oligonucleotide
  Antisense strand to SEQ ID NO: 1214698
uuuguccagggaauuugcu

SEQ ID NO: 1214700 - RNA, 19 nt, Artificial Sequence
  Description of Artificial Sequence: Synthetic oligonucleotide
  Sense strand starting at position 3454 of SEQ ID NO: 917175
agagacauccucugucuug

SEQ ID NO: 1214701 - RNA, 19 nt, Artificial Sequence
  Description of Artificial Sequence: Synthetic oligonucleotide
  Antisense strand to SEQ ID NO: 1214700
caagacagaggaugucucu

SEQ ID NO: 1214702 - RNA, 19 nt, Artificial Sequence
  Description of Artificial Sequence: Synthetic oligonucleotide
  Sense strand starting at position 3515 of SEQ ID NO: 917175
auauguuagcuuuagguuu

SEQ ID NO: 1214703 - RNA, 19 nt, Artificial Sequence
  Description of Artificial Sequence: Synthetic oligonucleotide
  Antisense strand to SEQ ID NO: 1214702
aaaccuaaagcuaacauau

SEQ ID NO: 1214704 - RNA, 19 nt, Artificial Sequence
  Description of Artificial Sequence: Synthetic oligonucleotide
  Sense strand starting at position 3602 of SEQ ID NO: 917175
uuaugaaucuauguugacu

SEQ ID NO: 1214705 - RNA, 19 nt, Artificial Sequence
  Description of Artificial Sequence: Synthetic oligonucleotide
  Antisense strand to SEQ ID NO: 1214704
agucaacauagauucauaa

SEQ ID NO: 1214706 - RNA, 19 nt, Artificial Sequence
  Description of Artificial Sequence: Synthetic oligonucleotide
  Sense strand starting at position 3652 of SEQ ID NO: 917175
augaucauuuaaggaagaa

SEQ ID NO: 1214707 - RNA, 19 nt, Artificial Sequence
  Description of Artificial Sequence: Synthetic oligonucleotide
  Antisense strand to SEQ ID NO: 1214706
uucuuccuuaaaugaucau

SEQ ID NO: 1214708 - RNA, 19 nt, Artificial Sequence
  Description of Artificial Sequence: Synthetic oligonucleotide
  Sense strand starting at position 3798 of SEQ ID NO: 917174
accagucuggcuggugaaa

SEQ ID NO: 1214709 - RNA, 19 nt, Artificial Sequence
  Description of Artificial Sequence: Synthetic oligonucleotide
  Antisense strand to SEQ ID NO: 1214708
uuucaccagccagacuggu

SEQ ID NO: 1214710 - RNA, 19 nt, Artificial Sequence
  Description of Artificial Sequence: Synthetic oligonucleotide
  Sense strand starting at position 3969 of SEQ ID NO: 917176
acuaauuagcuugggagga

SEQ ID NO: 1214711 - RNA, 19 nt, Artificial Sequence
  Description of Artificial Sequence: Synthetic oligonucleotide
  Antisense strand to SEQ ID NO: 1214710
uccucccaagcuaauuagu

SEQ ID NO: 1214712 - RNA, 19 nt, Artificial Sequence
  Description of Artificial Sequence: Synthetic oligonucleotide
  Sense strand starting at position 42 of SEQ ID NO: 917176
uuugaagagaugugcuaaa

SEQ ID NO: 1214713 - RNA, 19 nt, Artificial Sequence
  Description of Artificial Sequence: Synthetic oligonucleotide
  Antisense strand to SEQ ID NO: 1214712
uuuagcacaucucuucaaa

SEQ ID NO: 1214714 - RNA, 19 nt, Artificial Sequence
  Description of Artificial Sequence: Synthetic oligonucleotide
  Sense strand starting at position 91 of SEQ ID NO: 917176
uauccaagaguuuggguua

SEQ ID NO: 1214715 - RNA, 19 nt, Artificial Sequence
  Description of Artificial Sequence: Synthetic oligonucleotide
  Antisense strand to SEQ ID NO: 1214714
uaacccaaacucuuggaua

SEQ ID NO: 1214716 - RNA, 19 nt, Artificial Sequence
  Description of Artificial Sequence: Synthetic oligonucleotide
  Sense strand starting at position 96 of SEQ ID NO: 917176
aagaguuuggguuacucua

SEQ ID NO: 1214717 - RNA, 19 nt, Artificial Sequence
  Description of Artificial Sequence: Synthetic oligonucleotide
  Antisense strand to SEQ ID NO: 1214716
uagaguaacccaaacucuu

SEQ ID NO: 1214718 - RNA, 19 nt, Artificial Sequence
  Description of Artificial Sequence: Synthetic oligonucleotide
  Sense strand starting at position 197 of SEQ ID NO: 917176
cgccaaggccaugauuaga

SEQ ID NO: 1214719 - RNA, 19 nt, Artificial Sequence
  Description of Artificial Sequence: Synthetic oligonucleotide
  Antisense strand to SEQ ID NO: 1214718
ucuaaucauggccuuggcg

SEQ ID NO: 1214720 - RNA, 19 nt, Artificial Sequence
  Description of Artificial Sequence: Synthetic oligonucleotide
  Sense strand starting at position 382 of SEQ ID NO: 917176
gugcauggaguugaaauga

SEQ ID NO: 1214721 - RNA, 19 nt, Artificial Sequence
  Description of Artificial Sequence: Synthetic oligonucleotide
  Antisense strand to SEQ ID NO: 1214720
ucauuucaacuccaugcac

SEQ ID NO: 1214722 - RNA, 19 nt, Artificial Sequence
  Description of Artificial Sequence: Synthetic oligonucleotide
  Sense strand starting at position 440 of SEQ ID NO: 917176
uugaucuugggccaauuau

SEQ ID NO: 1214723 - RNA, 19 nt, Artificial Sequence
  Description of Artificial Sequence: Synthetic oligonucleotide
  Antisense strand to SEQ ID NO: 1214722
auaauuggcccaagaucaa

SEQ ID NO: 1214724 - RNA, 19 nt, Artificial Sequence
  Description of Artificial Sequence: Synthetic oligonucleotide
  Sense strand starting at position 540 of SEQ ID NO: 917176
agauaacauuucuaaguga

SEQ ID NO: 1214725 - RNA, 19 nt, Artificial Sequence
  Description of Artificial Sequence: Synthetic oligonucleotide
  Antisense strand to SEQ ID NO: 1214724
ucacuuagaaauguuaucu

SEQ ID NO: 1214726 - RNA, 19 nt, Artificial Sequence
  Description of Artificial Sequence: Synthetic oligonucleotide
  Sense strand starting at position 870 of SEQ ID NO: 917176
uagaauuuguugcucgaca

SEQ ID NO: 1214727 - RNA, 19 nt, Artificial Sequence
  Description of Artificial Sequence: Synthetic oligonucleotide
  Antisense strand to SEQ ID NO: 1214726
ugucgagcaacaaauucua

SEQ ID NO: 1214728 - RNA, 19 nt, Artificial Sequence
  Description of Artificial Sequence: Synthetic oligonucleotide
  Sense strand starting at position 871 of SEQ ID NO: 917176
agaauuuguugcucgacau

SEQ ID NO: 1214729 - RNA, 19 nt, Artificial Sequence
  Description of Artificial Sequence: Synthetic oligonucleotide
  Antisense strand to SEQ ID NO: 1214728
augucgagcaacaaauucu

SEQ ID NO: 1214730 - RNA, 19 nt, Artificial Sequence
  Description of Artificial Sequence: Synthetic oligonucleotide
  Sense strand starting at position 872 of SEQ ID NO: 917176
gaauuuguugcucgacauu

SEQ ID NO: 1214731 - RNA, 19 nt, Artificial Sequence
  Description of Artificial Sequence: Synthetic oligonucleotide
  Antisense strand to SEQ ID NO: 1214730
aaugucgagcaacaaauuc

SEQ ID NO: 1214732 - RNA, 19 nt, Artificial Sequence
  Description of Artificial Sequence: Synthetic oligonucleotide
  Sense strand starting at position 882 of SEQ ID NO: 917176
cucgacauucgacaaucau

SEQ ID NO: 1214733 - RNA, 19 nt, Artificial Sequence
  Description of Artificial Sequence: Synthetic oligonucleotide
  Antisense strand to SEQ ID NO: 1214732
augauugucgaaugucgag

SEQ ID NO: 1214734 - RNA, 19 nt, Artificial Sequence
  Description of Artificial Sequence: Synthetic oligonucleotide
  Sense strand starting at position 1108 of SEQ ID NO: 917176
aggagagggaucugucuca

SEQ ID NO: 1214735 - RNA, 19 nt, Artificial Sequence
  Description of Artificial Sequence: Synthetic oligonucleotide
  Antisense strand to SEQ ID NO: 1214734
ugagacagaucccucuccu

SEQ ID NO: 1214736 - RNA, 19 nt, Artificial Sequence
  Description of Artificial Sequence: Synthetic oligonucleotide
  Sense strand starting at position 1301 of SEQ ID NO: 917176
ucauuuguguucuucuaga

SEQ ID NO: 1214737 - RNA, 19 nt, Artificial Sequence
  Description of Artificial Sequence: Synthetic oligonucleotide
  Antisense strand to SEQ ID NO: 1214736
ucuagaagaacacaaauga

SEQ ID NO: 1214738 - RNA, 19 nt, Artificial Sequence
  Description of Artificial Sequence: Synthetic oligonucleotide
  Sense strand starting at position 1315 of SEQ ID NO: 917176
cuagauaguuuauccuaag

SEQ ID NO: 1214739 - RNA, 19 nt, Artificial Sequence
  Description of Artificial Sequence: Synthetic oligonucleotide
  Antisense strand to SEQ ID NO: 1214738
cuuaggauaaacuaucuag

SEQ ID NO: 1214740 - RNA, 19 nt, Artificial Sequence
  Description of Artificial Sequence: Synthetic oligonucleotide
  Sense strand starting at position 1597 of SEQ ID NO: 917176
ucuccauagucacuggaua

SEQ ID NO: 1214741 - RNA, 19 nt, Artificial Sequence
  Description of Artificial Sequence: Synthetic oligonucleotide
  Antisense strand to SEQ ID NO: 1214740
uauccagugacuauggaga

SEQ ID NO: 1214742 - RNA, 19 nt, Artificial Sequence
  Description of Artificial Sequence: Synthetic oligonucleotide
  Sense strand starting at position 1598 of SEQ ID NO: 917176
cuccauagucacuggauau

SEQ ID NO: 1214743 - RNA, 19 nt, Artificial Sequence
  Description of Artificial Sequence: Synthetic oligonucleotide
  Antisense strand to SEQ ID NO: 1214742
auauccagugacuauggag

SEQ ID NO: 1214744 - RNA, 19 nt, Artificial Sequence
  Description of Artificial Sequence: Synthetic oligonucleotide
  Sense strand starting at position 1669 of SEQ ID NO: 917176
agacccugucuuuagugau

SEQ ID NO: 1214745 - RNA, 19 nt, Artificial Sequence
  Description of Artificial Sequence: Synthetic oligonucleotide
  Antisense strand to SEQ ID NO: 1214744
aucacuaaagacagggucu

SEQ ID NO: 1214746 - RNA, 19 nt, Artificial Sequence
  Description of Artificial Sequence: Synthetic oligonucleotide
  Sense strand starting at position 1873 of SEQ ID NO: 917176
agacaugcugcucacagaa

SEQ ID NO: 1214747 - RNA, 19 nt, Artificial Sequence
  Description of Artificial Sequence: Synthetic oligonucleotide
  Antisense strand to SEQ ID NO: 1214746
uucugugagcagcaugucu

SEQ ID NO: 1214748 - RNA, 19 nt, Artificial Sequence
  Description of Artificial Sequence: Synthetic oligonucleotide
  Sense strand starting at position 1956 of SEQ ID NO: 917176
acaaauuucucugaagaga

SEQ ID NO: 1214749 - RNA, 19 nt, Artificial Sequence
  Description of Artificial Sequence: Synthetic oligonucleotide
  Antisense strand to SEQ ID NO: 1214748
ucucuucagagaaauuugu

SEQ ID NO: 1214750 - RNA, 19 nt, Artificial Sequence
  Description of Artificial Sequence: Synthetic oligonucleotide
  Sense strand starting at position 1980 of SEQ ID NO: 917176
ccagaucauugauugcaua

SEQ ID NO: 1214751 - RNA, 19 nt, Artificial Sequence
  Description of Artificial Sequence: Synthetic oligonucleotide
  Antisense strand to SEQ ID NO: 1214750
uaugcaaucaaugaucugg

SEQ ID NO: 1214752 - RNA, 19 nt, Artificial Sequence
  Description of Artificial Sequence: Synthetic oligonucleotide
  Sense strand starting at position 2031 of SEQ ID NO: 917176
cggcauguucccucuuguu

SEQ ID NO: 1214753 - RNA, 19 nt, Artificial Sequence
  Description of Artificial Sequence: Synthetic oligonucleotide
  Antisense strand to SEQ ID NO: 1214752
aacaagagggaacaugccg

SEQ ID NO: 1214754 - RNA, 19 nt, Artificial Sequence
  Description of Artificial Sequence: Synthetic oligonucleotide
  Sense strand starting at position 2092 of SEQ ID NO: 917176
agagaaauauuauuggcuu

SEQ ID NO: 1214755 - RNA, 19 nt, Artificial Sequence
  Description of Artificial Sequence: Synthetic oligonucleotide
  Antisense strand to SEQ ID NO: 1214754
aagccaauaauauuucucu

SEQ ID NO: 1214756 - RNA, 19 nt, Artificial Sequence
  Description of Artificial Sequence: Synthetic oligonucleotide
  Sense strand starting at position 2098 of SEQ ID NO: 917176
auauuauuggcuuaguuag

SEQ ID NO: 1214757 - RNA, 19 nt, Artificial Sequence
  Description of Artificial Sequence: Synthetic oligonucleotide
  Antisense strand to SEQ ID NO: 1214756
cuaacuaagccaauaauau

SEQ ID NO: 1214758 - RNA, 19 nt, Artificial Sequence
  Description of Artificial Sequence: Synthetic oligonucleotide
  Sense strand starting at position 2120 of SEQ ID NO: 917176
guugcuugauaauuaaaca

SEQ ID NO: 1214759 - RNA, 19 nt, Artificial Sequence
  Description of Artificial Sequence: Synthetic oligonucleotide
  Antisense strand to SEQ ID NO: 1214758
uguuuaauuaucaagcaac

SEQ ID NO: 1214760 - RNA, 19 nt, Artificial Sequence
  Description of Artificial Sequence: Synthetic oligonucleotide
  Sense strand starting at position 2229 of SEQ ID NO: 917176
guaguaauacaguaggauc

SEQ ID NO: 1214761 - RNA, 19 nt, Artificial Sequence
  Description of Artificial Sequence: Synthetic oligonucleotide
  Antisense strand to SEQ ID NO: 1214760
gauccuacuguauuacuac

SEQ ID NO: 1214762 - RNA, 19 nt, Artificial Sequence
  Description of Artificial Sequence: Synthetic oligonucleotide
  Sense strand starting at position 2253 of SEQ ID NO: 917176
ugguuuauugcagaacaau

SEQ ID NO: 1214763 - RNA, 19 nt, Artificial Sequence
  Description of Artificial Sequence: Synthetic oligonucleotide
  Antisense strand to SEQ ID NO: 1214762
auuguucugcaauaaacca

SEQ ID NO: 1214764 - RNA, 19 nt, Artificial Sequence
  Description of Artificial Sequence: Synthetic oligonucleotide
  Sense strand starting at position 2262 of SEQ ID NO: 917176
gcagaacaauagcuauaga

SEQ ID NO: 1214765 - RNA, 19 nt, Artificial Sequence
  Description of Artificial Sequence: Synthetic oligonucleotide
  Antisense strand to SEQ ID NO: 1214764
ucuauagcuauuguucugc

SEQ ID NO: 1214766 - RNA, 19 nt, Artificial Sequence
  Description of Artificial Sequence: Synthetic oligonucleotide
  Sense strand starting at position 2315 of SEQ ID NO: 917176
gagaucuaccgugaaguac

SEQ ID NO: 1214767 - RNA, 19 nt, Artificial Sequence
  Description of Artificial Sequence: Synthetic oligonucleotide
  Antisense strand to SEQ ID NO: 1214766
guacuucacgguagaucuc

SEQ ID NO: 1214768 - RNA, 19 nt, Artificial Sequence
  Description of Artificial Sequence: Synthetic oligonucleotide
  Sense strand starting at position 2324 of SEQ ID NO: 917176
cgugaaguacuauaaaugu

SEQ ID NO: 1214769 - RNA, 19 nt, Artificial Sequence
  Description of Artificial Sequence: Synthetic oligonucleotide
  Antisense strand to SEQ ID NO: 1214768
acauuuauaguacuucacg

SEQ ID NO: 1214770 - RNA, 19 nt, Artificial Sequence
  Description of Artificial Sequence: Synthetic oligonucleotide
  Sense strand starting at position 2437 of SEQ ID NO: 917176
gcaguuuguaaggaugauu

SEQ ID NO: 1214771 - RNA, 19 nt, Artificial Sequence
  Description of Artificial Sequence: Synthetic oligonucleotide
  Antisense strand to SEQ ID NO: 1214770
aaucauccuuacaaacugc

SEQ ID NO: 1214772 - RNA, 19 nt, Artificial Sequence
  Description of Artificial Sequence: Synthetic oligonucleotide
  Sense strand starting at position 2475 of SEQ ID NO: 917176
agauguuuccuugaccaua

SEQ ID NO: 1214773 - RNA, 19 nt, Artificial Sequence
  Description of Artificial Sequence: Synthetic oligonucleotide
  Antisense strand to SEQ ID NO: 1214772
uauggucaaggaaacaucu

SEQ ID NO: 1214774 - RNA, 19 nt, Artificial Sequence
  Description of Artificial Sequence: Synthetic oligonucleotide
  Sense strand starting at position 2556 of SEQ ID NO: 917176
gacaucagguuacuuugaa

SEQ ID NO: 1214775 - RNA, 19 nt, Artificial Sequence
  Description of Artificial Sequence: Synthetic oligonucleotide
  Antisense strand to SEQ ID NO: 1214774
uucaaaguaaccugauguc

SEQ ID NO: 1214776 - RNA, 19 nt, Artificial Sequence
  Description of Artificial Sequence: Synthetic oligonucleotide
  Sense strand starting at position 2557 of SEQ ID NO: 917176
acaucagguuacuuugaau

SEQ ID NO: 1214777 - RNA, 19 nt, Artificial Sequence
  Description of Artificial Sequence: Synthetic oligonucleotide
  Antisense strand to SEQ ID NO: 1214776
auucaaaguaaccugaugu

SEQ ID NO: 1214778 - RNA, 19 nt, Artificial Sequence
  Description of Artificial Sequence: Synthetic oligonucleotide
  Sense strand starting at position 2741 of SEQ ID NO: 917176
uugaauguucuugaaguca

SEQ ID NO: 1214779 - RNA, 19 nt, Artificial Sequence
  Description of Artificial Sequence: Synthetic oligonucleotide
  Antisense strand to SEQ ID NO: 1214778
ugacuucaagaacauucaa

SEQ ID NO: 1214780 - RNA, 19 nt, Artificial Sequence
  Description of Artificial Sequence: Synthetic oligonucleotide
  Sense strand starting at position 2752 of SEQ ID NO: 917176
ugaagucagaauuggcaaa

SEQ ID NO: 1214781 - RNA, 19 nt, Artificial Sequence
  Description of Artificial Sequence: Synthetic oligonucleotide
  Antisense strand to SEQ ID NO: 1214780
uuugccaauucugacuuca

SEQ ID NO: 1214782 - RNA, 19 nt, Artificial Sequence
  Description of Artificial Sequence: Synthetic oligonucleotide
  Sense strand starting at position 3236 of SEQ ID NO: 917176
ccacuuguuguauaagaaa

SEQ ID NO: 1214783 - RNA, 19 nt, Artificial Sequence
  Description of Artificial Sequence: Synthetic oligonucleotide
  Antisense strand to SEQ ID NO: 1214782
uuucuuauacaacaagugg

SEQ ID NO: 1214784 - RNA, 19 nt, Artificial Sequence
  Description of Artificial Sequence: Synthetic oligonucleotide
  Sense strand starting at position 3327 of SEQ ID NO: 917176
aaucaaugagacugguuau

SEQ ID NO: 1214785 - RNA, 19 nt, Artificial Sequence
  Description of Artificial Sequence: Synthetic oligonucleotide
  Antisense strand to SEQ ID NO: 1214784
auaaccagucucauugauu

SEQ ID NO: 1214786 - RNA, 19 nt, Artificial Sequence
  Description of Artificial Sequence: Synthetic oligonucleotide
  Sense strand starting at position 3330 of SEQ ID NO: 917176
caaugagacugguuaucca

SEQ ID NO: 1214787 - RNA, 19 nt, Artificial Sequence
  Description of Artificial Sequence: Synthetic oligonucleotide
  Antisense strand to SEQ ID NO: 1214786
uggauaaccagucucauug

SEQ ID NO: 1214788 - RNA, 19 nt, Artificial Sequence
  Description of Artificial Sequence: Synthetic oligonucleotide
  Sense strand starting at position 3926 of SEQ ID NO: 917176
acuaguuuagcugaaugua

SEQ ID NO: 1214789 - RNA, 19 nt, Artificial Sequence
  Description of Artificial Sequence: Synthetic oligonucleotide
  Antisense strand to SEQ ID NO: 1214788
uacauucagcuaaacuagu

SEQ ID NO: 1214790 - RNA, 19 nt, Artificial Sequence
  Description of Artificial Sequence: Synthetic oligonucleotide
  Sense strand starting at position 3960 of SEQ ID NO: 917176
ggaugcgucauuguuguuu

SEQ ID NO: 1214791 - RNA, 19 nt, Artificial Sequence
  Description of Artificial Sequence: Synthetic oligonucleotide
  Antisense strand to SEQ ID NO: 1214790
aaacaacaaugacgcaucc

SEQ ID NO: 1214792 - RNA, 19 nt, Artificial Sequence
  Description of Artificial Sequence: Synthetic oligonucleotide
  Sense strand starting at position 3960 of SEQ ID NO: 917177
ggaugcgucauuguuguuu

SEQ ID NO: 1214793 - RNA, 19 nt, Artificial Sequence
  Description of Artificial Sequence: Synthetic oligonucleotide
  Antisense strand to SEQ ID NO: 1214792
aaacaacaaugacgcaucc

SEQ ID NO: 1214794 - RNA, 19 nt, Artificial Sequence
  Description of Artificial Sequence: Synthetic oligonucleotide
  Sense strand starting at position 15 of SEQ ID NO: 917177
gccagauaacugcacaauc

SEQ ID NO: 1214795 - RNA, 19 nt, Artificial Sequence
  Description of Artificial Sequence: Synthetic oligonucleotide
  Antisense strand to SEQ ID NO: 1214794
gauugugcaguuaucuggc

SEQ ID NO: 1214796 - RNA, 19 nt, Artificial Sequence
  Description of Artificial Sequence: Synthetic oligonucleotide
  Sense strand starting at position 55 of SEQ ID NO: 917177
guauuaggugcaugcauaa

SEQ ID NO: 1214797 - RNA, 19 nt, Artificial Sequence
  Description of Artificial Sequence: Synthetic oligonucleotide
  Antisense strand to SEQ ID NO: 1214796
uuaugcaugcaccuaauac

SEQ ID NO: 1214798 - RNA, 19 nt, Artificial Sequence
  Description of Artificial Sequence: Synthetic oligonucleotide
  Sense strand starting at position 288 of SEQ ID NO: 917177
ggagauccaccaugauagu

SEQ ID NO: 1214799 - RNA, 19 nt, Artificial Sequence
  Description of Artificial Sequence: Synthetic oligonucleotide
  Antisense strand to SEQ ID NO: 1214798
acuaucaugguggaucucc

SEQ ID NO: 1214800 - RNA, 19 nt, Artificial Sequence
  Description of Artificial Sequence: Synthetic oligonucleotide
  Sense strand starting at position 335 of SEQ ID NO: 917177
gcgagacccuauccuauua

SEQ ID NO: 1214801 - RNA, 19 nt, Artificial Sequence
  Description of Artificial Sequence: Synthetic oligonucleotide
  Antisense strand to SEQ ID NO: 1214800
uaauaggauagggucucgc

SEQ ID NO: 1214802 - RNA, 19 nt, Artificial Sequence
  Description of Artificial Sequence: Synthetic oligonucleotide
  Sense strand starting at position 880 of SEQ ID NO: 917177
acuccacugcucuggagaa

SEQ ID NO: 1214803 - RNA, 19 nt, Artificial Sequence
  Description of Artificial Sequence: Synthetic oligonucleotide
  Antisense strand to SEQ ID NO: 1214802
uucuccagagcaguggagu

SEQ ID NO: 1214804 - RNA, 19 nt, Artificial Sequence
  Description of Artificial Sequence: Synthetic oligonucleotide
  Sense strand starting at position 1078 of SEQ ID NO: 917177
guuuauagauugcugcuaa

SEQ ID NO: 1214805 - RNA, 19 nt, Artificial Sequence
  Description of Artificial Sequence: Synthetic oligonucleotide
  Antisense strand to SEQ ID NO: 1214804
uuagcagcaaucuauaaac

SEQ ID NO: 1214806 - RNA, 19 nt, Artificial Sequence
  Description of Artificial Sequence: Synthetic oligonucleotide
  Sense strand starting at position 1203 of SEQ ID NO: 917177
aaaucaguuugggcagaau

SEQ ID NO: 1214807 - RNA, 19 nt, Artificial Sequence
  Description of Artificial Sequence: Synthetic oligonucleotide
  Antisense strand to SEQ ID NO: 1214806
auucugcccaaacugauuu

SEQ ID NO: 1214808 - RNA, 19 nt, Artificial Sequence
  Description of Artificial Sequence: Synthetic oligonucleotide
  Sense strand starting at position 1306 of SEQ ID NO: 917177
gaauuaggacugcguguau

SEQ ID NO: 1214809 - RNA, 19 nt, Artificial Sequence
  Description of Artificial Sequence: Synthetic oligonucleotide
  Antisense strand to SEQ ID NO: 1214808
auacacgcaguccuaauuc

SEQ ID NO: 1214810 - RNA, 19 nt, Artificial Sequence
  Description of Artificial Sequence: Synthetic oligonucleotide
  Sense strand starting at position 1319 of SEQ ID NO: 917177
guguauguucgccuaacac

SEQ ID NO: 1214811 - RNA, 19 nt, Artificial Sequence
  Description of Artificial Sequence: Synthetic oligonucleotide
  Antisense strand to SEQ ID NO: 1214810
guguuaggcgaacauacac

SEQ ID NO: 1214812 - RNA, 19 nt, Artificial Sequence
  Description of Artificial Sequence: Synthetic oligonucleotide
  Sense strand starting at position 1403 of SEQ ID NO: 917177
uccugucuccgucacuaaa

SEQ ID NO: 1214813 - RNA, 19 nt, Artificial Sequence
  Description of Artificial Sequence: Synthetic oligonucleotide
  Antisense strand to SEQ ID NO: 1214812
uuuagugacggagacagga

SEQ ID NO: 1214814 - RNA, 19 nt, Artificial Sequence
  Description of Artificial Sequence: Synthetic oligonucleotide
  Sense strand starting at position 1425 of SEQ ID NO: 917177
cugugaccuuagguaaacu

SEQ ID NO: 1214815 - RNA, 19 nt, Artificial Sequence
  Description of Artificial Sequence: Synthetic oligonucleotide
  Antisense strand to SEQ ID NO: 1214814
aguuuaccuaaggucacag

SEQ ID NO: 1214816 - RNA, 19 nt, Artificial Sequence
  Description of Artificial Sequence: Synthetic oligonucleotide
  Sense strand starting at position 1434 of SEQ ID NO: 917177
uagguaaacugcuuagucu

SEQ ID NO: 1214817 - RNA, 19 nt, Artificial Sequence
  Description of Artificial Sequence: Synthetic oligonucleotide
  Antisense strand to SEQ ID NO: 1214816
agacuaagcaguuuaccua

SEQ ID NO: 1214818 - RNA, 19 nt, Artificial Sequence
  Description of Artificial Sequence: Synthetic oligonucleotide
  Sense strand starting at position 1443 of SEQ ID NO: 917177
ugcuuagucucaguauucu

SEQ ID NO: 1214819 - RNA, 19 nt, Artificial Sequence
  Description of Artificial Sequence: Synthetic oligonucleotide
  Antisense strand to SEQ ID NO: 1214818
agaauacugagacuaagca

SEQ ID NO: 1214820 - RNA, 19 nt, Artificial Sequence
  Description of Artificial Sequence: Synthetic oligonucleotide
  Sense strand starting at position 2204 of SEQ ID NO: 917177
cgugaaguccgugucuaua

SEQ ID NO: 1214821 - RNA, 19 nt, Artificial Sequence
  Description of Artificial Sequence: Synthetic oligonucleotide
  Antisense strand to SEQ ID NO: 1214820
uauagacacggacuucacg

SEQ ID NO: 1214822 - RNA, 19 nt, Artificial Sequence
  Description of Artificial Sequence: Synthetic oligonucleotide
  Sense strand starting at position 2258 of SEQ ID NO: 917177
gcuaaagcacccuagagaa

SEQ ID NO: 1214823 - RNA, 19 nt, Artificial Sequence
  Description of Artificial Sequence: Synthetic oligonucleotide
  Antisense strand to SEQ ID NO: 1214822
uucucuagggugcuuuagc

SEQ ID NO: 1214824 - RNA, 19 nt, Artificial Sequence
  Description of Artificial Sequence: Synthetic oligonucleotide
  Sense strand starting at position 2270 of SEQ ID NO: 917177
uagagaaacugucagagaa

SEQ ID NO: 1214825 - RNA, 19 nt, Artificial Sequence
  Description of Artificial Sequence: Synthetic oligonucleotide
  Antisense strand to SEQ ID NO: 1214824
uucucugacaguuucucua

SEQ ID NO: 1214826 - RNA, 19 nt, Artificial Sequence
  Description of Artificial Sequence: Synthetic oligonucleotide
  Sense strand starting at position 2272 of SEQ ID NO: 917177
gagaaacugucagagaaug

SEQ ID NO: 1214827 - RNA, 19 nt, Artificial Sequence
  Description of Artificial Sequence: Synthetic oligonucleotide
  Antisense strand to SEQ ID NO: 1214826
cauucucugacaguuucuc

SEQ ID NO: 1214828 - RNA, 19 nt, Artificial Sequence
  Description of Artificial Sequence: Synthetic oligonucleotide
  Sense strand starting at position 2296 of SEQ ID NO: 917177
uuugcuaauucgucucuga

SEQ ID NO: 1214829 - RNA, 19 nt, Artificial Sequence
  Description of Artificial Sequence: Synthetic oligonucleotide
  Antisense strand to SEQ ID NO: 1214828
ucagagacgaauuagcaaa

SEQ ID NO: 1214830 - RNA, 19 nt, Artificial Sequence
  Description of Artificial Sequence: Synthetic oligonucleotide
  Sense strand starting at position 2299 of SEQ ID NO: 917177
gcuaauucgucucugaaag

SEQ ID NO: 1214831 - RNA, 19 nt, Artificial Sequence
  Description of Artificial Sequence: Synthetic oligonucleotide
  Antisense strand to SEQ ID NO: 1214830
cuuucagagacgaauuagc

SEQ ID NO: 1214832 - RNA, 19 nt, Artificial Sequence
  Description of Artificial Sequence: Synthetic oligonucleotide
  Sense strand starting at position 2300 of SEQ ID NO: 917177
cuaauucgucucugaaaga

SEQ ID NO: 1214833 - RNA, 19 nt, Artificial Sequence
  Description of Artificial Sequence: Synthetic oligonucleotide
  Antisense strand to SEQ ID NO: 1214832
ucuuucagagacgaauuag

SEQ ID NO: 1214834 - RNA, 19 nt, Artificial Sequence
  Description of Artificial Sequence: Synthetic oligonucleotide
  Sense strand starting at position 2390 of SEQ ID NO: 917177
guucaucugcgcuacggaa

SEQ ID NO: 1214835 - RNA, 19 nt, Artificial Sequence
  Description of Artificial Sequence: Synthetic oligonucleotide
  Antisense strand to SEQ ID NO: 1214834
uuccguagcgcagaugaac

SEQ ID NO: 1214836 - RNA, 19 nt, Artificial Sequence
  Description of Artificial Sequence: Synthetic oligonucleotide
  Sense strand starting at position 2406 of SEQ ID NO: 917177
gaaggacacgucugaauuc

SEQ ID NO: 1214837 - RNA, 19 nt, Artificial Sequence
  Description of Artificial Sequence: Synthetic oligonucleotide
  Antisense strand to SEQ ID NO: 1214836
gaauucagacguguccuuc

SEQ ID NO: 1214838 - RNA, 19 nt, Artificial Sequence
  Description of Artificial Sequence: Synthetic oligonucleotide
  Sense strand starting at position 2418 of SEQ ID NO: 917177
ugaauuccuccacggagca

SEQ ID NO: 1214839 - RNA, 19 nt, Artificial Sequence
  Description of Artificial Sequence: Synthetic oligonucleotide
  Antisense strand to SEQ ID NO: 1214838
ugcuccguggaggaauuca

SEQ ID NO: 1214840 - RNA, 19 nt, Artificial Sequence
  Description of Artificial Sequence: Synthetic oligonucleotide
  Sense strand starting at position 2441 of SEQ ID NO: 917177
cugcacucgguuuauguau

SEQ ID NO: 1214841 - RNA, 19 nt, Artificial Sequence
  Description of Artificial Sequence: Synthetic oligonucleotide
  Antisense strand to SEQ ID NO: 1214840
auacauaaaccgagugcag

SEQ ID NO: 1214842 - RNA, 19 nt, Artificial Sequence
  Description of Artificial Sequence: Synthetic oligonucleotide
  Sense strand starting at position 2534 of SEQ ID NO: 917177
ucacacauugccugacagu

SEQ ID NO: 1214843 - RNA, 19 nt, Artificial Sequence
  Description of Artificial Sequence: Synthetic oligonucleotide
  Antisense strand to SEQ ID NO: 1214842
acugucaggcaauguguga

SEQ ID NO: 1214844 - RNA, 19 nt, Artificial Sequence
  Description of Artificial Sequence: Synthetic oligonucleotide
  Sense strand starting at position 2550 of SEQ ID NO: 917177
aguggugugcguccacaca

SEQ ID NO: 1214845 - RNA, 19 nt, Artificial Sequence
  Description of Artificial Sequence: Synthetic oligonucleotide
  Antisense strand to SEQ ID NO: 1214844
uguguggacgcacaccacu

SEQ ID NO: 1214846 - RNA, 19 nt, Artificial Sequence
  Description of Artificial Sequence: Synthetic oligonucleotide
  Sense strand starting at position 2654 of SEQ ID NO: 917177
aaggaagucuuccuuuguu

SEQ ID NO: 1214847 - RNA, 19 nt, Artificial Sequence
  Description of Artificial Sequence: Synthetic oligonucleotide
  Antisense strand to SEQ ID NO: 1214846
aacaaaggaagacuuccuu

SEQ ID NO: 1214848 - RNA, 19 nt, Artificial Sequence
  Description of Artificial Sequence: Synthetic oligonucleotide
  Sense strand starting at position 2851 of SEQ ID NO: 917177
ggcuaagucacauggauug

SEQ ID NO: 1214849 - RNA, 19 nt, Artificial Sequence
  Description of Artificial Sequence: Synthetic oligonucleotide
  Antisense strand to SEQ ID NO: 1214848
caauccaugugacuuagcc

SEQ ID NO: 1214850 - RNA, 19 nt, Artificial Sequence
  Description of Artificial Sequence: Synthetic oligonucleotide
  Sense strand starting at position 2856 of SEQ ID NO: 917177
agucacauggauugauuau

SEQ ID NO: 1214851 - RNA, 19 nt, Artificial Sequence
  Description of Artificial Sequence: Synthetic oligonucleotide
  Antisense strand to SEQ ID NO: 1214850
auaaucaauccaugugacu

SEQ ID NO: 1214852 - RNA, 19 nt, Artificial Sequence
  Description of Artificial Sequence: Synthetic oligonucleotide
  Sense strand starting at position 2870 of SEQ ID NO: 917177
auuauauucccauauccgu

SEQ ID NO: 1214853 - RNA, 19 nt, Artificial Sequence
  Description of Artificial Sequence: Synthetic oligonucleotide
  Antisense strand to SEQ ID NO: 1214852
acggauaugggaauauaau

SEQ ID NO: 1214854 - RNA, 19 nt, Artificial Sequence
  Description of Artificial Sequence: Synthetic oligonucleotide
  Sense strand starting at position 2876 of SEQ ID NO: 917177
uucccauauccguaaugga

SEQ ID NO: 1214855 - RNA, 19 nt, Artificial Sequence
  Description of Artificial Sequence: Synthetic oligonucleotide
  Antisense strand to SEQ ID NO: 1214854
uccauuacggauaugggaa

SEQ ID NO: 1214856 - RNA, 19 nt, Artificial Sequence
  Description of Artificial Sequence: Synthetic oligonucleotide
  Sense strand starting at position 2893 of SEQ ID NO: 917177
gaguguuucggacaugcaa

SEQ ID NO: 1214857 - RNA, 19 nt, Artificial Sequence
  Description of Artificial Sequence: Synthetic oligonucleotide
  Antisense strand to SEQ ID NO: 1214856
uugcauguccgaaacacuc

SEQ ID NO: 1214858 - RNA, 19 nt, Artificial Sequence
  Description of Artificial Sequence: Synthetic oligonucleotide
  Sense strand starting at position 3005 of SEQ ID NO: 917177
gcgccugcucuggcugaga

SEQ ID NO: 1214859 - RNA, 19 nt, Artificial Sequence
  Description of Artificial Sequence: Synthetic oligonucleotide
  Antisense strand to SEQ ID NO: 1214858
ucucagccagagcaggcgc

SEQ ID NO: 1214860 - RNA, 19 nt, Artificial Sequence
  Description of Artificial Sequence: Synthetic oligonucleotide
  Sense strand starting at position 3007 of SEQ ID NO: 917177
gccugcucuggcugagaau

SEQ ID NO: 1214861 - RNA, 19 nt, Artificial Sequence
  Description of Artificial Sequence: Synthetic oligonucleotide
  Antisense strand to SEQ ID NO: 1214860
auucucagccagagcaggc

SEQ ID NO: 1214862 - RNA, 19 nt, Artificial Sequence
  Description of Artificial Sequence: Synthetic oligonucleotide
  Sense strand starting at position 3008 of SEQ ID NO: 917177
ccugcucuggcugagaaua

SEQ ID NO: 1214863 - RNA, 19 nt, Artificial Sequence
  Description of Artificial Sequence: Synthetic oligonucleotide
  Antisense strand to SEQ ID NO: 1214862
uauucucagccagagcagg

SEQ ID NO: 1214864 - RNA, 19 nt, Artificial Sequence
  Description of Artificial Sequence: Synthetic oligonucleotide
  Sense strand starting at position 3055 of SEQ ID NO: 917177
ggagcaguuucuguaguca

SEQ ID NO: 1214865 - RNA, 19 nt, Artificial Sequence
  Description of Artificial Sequence: Synthetic oligonucleotide
  Antisense strand to SEQ ID NO: 1214864
ugacuacagaaacugcucc

SEQ ID NO: 1214866 - RNA, 19 nt, Artificial Sequence
  Description of Artificial Sequence: Synthetic oligonucleotide
  Sense strand starting at position 3058 of SEQ ID NO: 917177
gcaguuucuguagucaguu

SEQ ID NO: 1214867 - RNA, 19 nt, Artificial Sequence
  Description of Artificial Sequence: Synthetic oligonucleotide
  Antisense strand to SEQ ID NO: 1214866
aacugacuacagaaacugc

SEQ ID NO: 1214868 - RNA, 19 nt, Artificial Sequence
  Description of Artificial Sequence: Synthetic oligonucleotide
  Sense strand starting at position 3059 of SEQ ID NO: 917177
caguuucuguagucaguua

SEQ ID NO: 1214869 - RNA, 19 nt, Artificial Sequence
  Description of Artificial Sequence: Synthetic oligonucleotide
  Antisense strand to SEQ ID NO: 1214868
uaacugacuacagaaacug

SEQ ID NO: 1214870 - RNA, 19 nt, Artificial Sequence
  Description of Artificial Sequence: Synthetic oligonucleotide
  Sense strand starting at position 3212 of SEQ ID NO: 917177
uugggaagcugaguaguaa

SEQ ID NO: 1214871 - RNA, 19 nt, Artificial Sequence
  Description of Artificial Sequence: Synthetic oligonucleotide
  Antisense strand to SEQ ID NO: 1214870
uuacuacucagcuucccaa

SEQ ID NO: 1214872 - RNA, 19 nt, Artificial Sequence
  Description of Artificial Sequence: Synthetic oligonucleotide
  Sense strand starting at position 3213 of SEQ ID NO: 917178
ugggaagcugaguaguaaa

SEQ ID NO: 1214873 - RNA, 19 nt, Artificial Sequence
  Description of Artificial Sequence: Synthetic oligonucleotide
  Antisense strand to SEQ ID NO: 1214872
uuuacuacucagcuuccca

SEQ ID NO: 1214874 - RNA, 19 nt, Artificial Sequence
  Description of Artificial Sequence: Synthetic oligonucleotide
  Sense strand starting at position 93 of SEQ ID NO: 917178
uaagaaugcucuuuaugug

SEQ ID NO: 1214875 - RNA, 19 nt, Artificial Sequence
  Description of Artificial Sequence: Synthetic oligonucleotide
  Antisense strand to SEQ ID NO: 1214874
cacauaaagagcauucuua

SEQ ID NO: 1214876 - RNA, 19 nt, Artificial Sequence
  Description of Artificial Sequence: Synthetic oligonucleotide
  Sense strand starting at position 94 of SEQ ID NO: 917178
aagaaugcucuuuauguga

SEQ ID NO: 1214877 - RNA, 19 nt, Artificial Sequence
  Description of Artificial Sequence: Synthetic oligonucleotide
  Antisense strand to SEQ ID NO: 1214876
ucacauaaagagcauucuu

SEQ ID NO: 1214878 - RNA, 19 nt, Artificial Sequence
  Description of Artificial Sequence: Synthetic oligonucleotide
  Sense strand starting at position 190 of SEQ ID NO: 917178
ugaauacuguccuucugaa

SEQ ID NO: 1214879 - RNA, 19 nt, Artificial Sequence
  Description of Artificial Sequence: Synthetic oligonucleotide
  Antisense strand to SEQ ID NO: 1214878
uucagaaggacaguauuca

SEQ ID NO: 1214880 - RNA, 19 nt, Artificial Sequence
  Description of Artificial Sequence: Synthetic oligonucleotide
  Sense strand starting at position 266 of SEQ ID NO: 917178
uggacaaugucuccaccaa

SEQ ID NO: 1214881 - RNA, 19 nt, Artificial Sequence
  Description of Artificial Sequence: Synthetic oligonucleotide
  Antisense strand to SEQ ID NO: 1214880
uugguggagacauugucca

SEQ ID NO: 1214882 - RNA, 19 nt, Artificial Sequence
  Description of Artificial Sequence: Synthetic oligonucleotide
  Sense strand starting at position 385 of SEQ ID NO: 917178
gaggcuacacuuugggaua

SEQ ID NO: 1214883 - RNA, 19 nt, Artificial Sequence
  Description of Artificial Sequence: Synthetic oligonucleotide
  Antisense strand to SEQ ID NO: 1214882
uaucccaaaguguagccuc

SEQ ID NO: 1214884 - RNA, 19 nt, Artificial Sequence
  Description of Artificial Sequence: Synthetic oligonucleotide
  Sense strand starting at position 767 of SEQ ID NO: 917178
acauguaaucugggacuuc

SEQ ID NO: 1214885 - RNA, 19 nt, Artificial Sequence
  Description of Artificial Sequence: Synthetic oligonucleotide
  Antisense strand to SEQ ID NO: 1214884
gaagucccagauuacaugu

SEQ ID NO: 1214886 - RNA, 19 nt, Artificial Sequence
  Description of Artificial Sequence: Synthetic oligonucleotide
  Sense strand starting at position 821 of SEQ ID NO: 917178
uggcgaauucugcaggaaa

SEQ ID NO: 1214887 - RNA, 19 nt, Artificial Sequence
  Description of Artificial Sequence: Synthetic oligonucleotide
  Antisense strand to SEQ ID NO: 1214886
uuuccugcagaauucgcca

SEQ ID NO: 1214888 - RNA, 19 nt, Artificial Sequence
  Description of Artificial Sequence: Synthetic oligonucleotide
  Sense strand starting at position 823 of SEQ ID NO: 917178
gcgaauucugcaggaaacc

SEQ ID NO: 1214889 - RNA, 19 nt, Artificial Sequence
  Description of Artificial Sequence: Synthetic oligonucleotide
  Antisense strand to SEQ ID NO: 1214888
gguuuccugcagaauucgc

SEQ ID NO: 1214890 - RNA, 19 nt, Artificial Sequence
  Description of Artificial Sequence: Synthetic oligonucleotide
  Sense strand starting at position 1046 of SEQ ID NO: 917178
caaugagguguuuaucuuc

SEQ ID NO: 1214891 - RNA, 19 nt, Artificial Sequence
  Description of Artificial Sequence: Synthetic oligonucleotide
  Antisense strand to SEQ ID NO: 1214890
gaagauaaacaccucauug

SEQ ID NO: 1214892 - RNA, 19 nt, Artificial Sequence
  Description of Artificial Sequence: Synthetic oligonucleotide
  Sense strand starting at position 1057 of SEQ ID NO: 917178
uuaucuucucuguacggua

SEQ ID NO: 1214893 - RNA, 19 nt, Artificial Sequence
  Description of Artificial Sequence: Synthetic oligonucleotide
  Antisense strand to SEQ ID NO: 1214892
uaccguacagagaagauaa

SEQ ID NO: 1214894 - RNA, 19 nt, Artificial Sequence
  Description of Artificial Sequence: Synthetic oligonucleotide
  Sense strand starting at position 1163 of SEQ ID NO: 917178
ucaggaaguuaucugguuu

SEQ ID NO: 1214895 - RNA, 19 nt, Artificial Sequence
  Description of Artificial Sequence: Synthetic oligonucleotide
  Antisense strand to SEQ ID NO: 1214894
aaaccagauaacuuccuga

SEQ ID NO: 1214896 - RNA, 19 nt, Artificial Sequence
  Description of Artificial Sequence: Synthetic oligonucleotide
  Sense strand starting at position 1176 of SEQ ID NO: 917178
ugguuuaaugucucggugu

SEQ ID NO: 1214897 - RNA, 19 nt, Artificial Sequence
  Description of Artificial Sequence: Synthetic oligonucleotide
  Antisense strand to SEQ ID NO: 1214896
acaccgagacauuaaacca

SEQ ID NO: 1214898 - RNA, 19 nt, Artificial Sequence
  Description of Artificial Sequence: Synthetic oligonucleotide
  Sense strand starting at position 1265 of SEQ ID NO: 917178
uggugaaccuucuugaaca

SEQ ID NO: 1214899 - RNA, 19 nt, Artificial Sequence
  Description of Artificial Sequence: Synthetic oligonucleotide
  Antisense strand to SEQ ID NO: 1214898
uguucaagaagguucacca

SEQ ID NO: 1214900 - RNA, 19 nt, Artificial Sequence
  Description of Artificial Sequence: Synthetic oligonucleotide
  Sense strand starting at position 1289 of SEQ ID NO: 917178
uaaagaggucuucgaggcu

SEQ ID NO: 1214901 - RNA, 19 nt, Artificial Sequence
  Description of Artificial Sequence: Synthetic oligonucleotide
  Antisense strand to SEQ ID NO: 1214900
agccucgaagaccucuuua

SEQ ID NO: 1214902 - RNA, 19 nt, Artificial Sequence
  Description of Artificial Sequence: Synthetic oligonucleotide
  Sense strand starting at position 1390 of SEQ ID NO: 917178
ugaagaaucguguagaguu

SEQ ID NO: 1214903 - RNA, 19 nt, Artificial Sequence
  Description of Artificial Sequence: Synthetic oligonucleotide
  Antisense strand to SEQ ID NO: 1214902
aacucuacacgauucuuca

SEQ ID NO: 1214904 - RNA, 19 nt, Artificial Sequence
  Description of Artificial Sequence: Synthetic oligonucleotide
  Sense strand starting at position 1482 of SEQ ID NO: 917178
gguggugaugcccagauaa

SEQ ID NO: 1214905 - RNA, 19 nt, Artificial Sequence
  Description of Artificial Sequence: Synthetic oligonucleotide
  Antisense strand to SEQ ID NO: 1214904
uuaucugggcaucaccacc

SEQ ID NO: 1214906 - RNA, 19 nt, Artificial Sequence
  Description of Artificial Sequence: Synthetic oligonucleotide
  Sense strand starting at position 1484 of SEQ ID NO: 917178
uggugaugcccagauaaac

SEQ ID NO: 1214907 - RNA, 19 nt, Artificial Sequence
  Description of Artificial Sequence: Synthetic oligonucleotide
  Antisense strand to SEQ ID NO: 1214906
guuuaucugggcaucacca

SEQ ID NO: 1214908 - RNA, 19 nt, Artificial Sequence
  Description of Artificial Sequence: Synthetic oligonucleotide
  Sense strand starting at position 1862 of SEQ ID NO: 917178
gaugucgugggcugagaaa

SEQ ID NO: 1214909 - RNA, 19 nt, Artificial Sequence
  Description of Artificial Sequence: Synthetic oligonucleotide
  Antisense strand to SEQ ID NO: 1214908
uuucucagcccacgacauc

SEQ ID NO: 1214910 - RNA, 19 nt, Artificial Sequence
  Description of Artificial Sequence: Synthetic oligonucleotide
  Sense strand starting at position 2028 of SEQ ID NO: 917178
gucugagaccucuguuagg

SEQ ID NO: 1214911 - RNA, 19 nt, Artificial Sequence
  Description of Artificial Sequence: Synthetic oligonucleotide
  Antisense strand to SEQ ID NO: 1214910
ccuaacagaggucucagac

SEQ ID NO: 1214912 - RNA, 19 nt, Artificial Sequence
  Description of Artificial Sequence: Synthetic oligonucleotide
  Sense strand starting at position 2085 of SEQ ID NO: 917178
agucuuguaagguagcuau

SEQ ID NO: 1214913 - RNA, 19 nt, Artificial Sequence
  Description of Artificial Sequence: Synthetic oligonucleotide
  Antisense strand to SEQ ID NO: 1214912
auagcuaccuuacaagacu

SEQ ID NO: 1214914 - RNA, 19 nt, Artificial Sequence
  Description of Artificial Sequence: Synthetic oligonucleotide
  Sense strand starting at position 2316 of SEQ ID NO: 917178
ucaugucucccuggguuaa

SEQ ID NO: 1214915 - RNA, 19 nt, Artificial Sequence
  Description of Artificial Sequence: Synthetic oligonucleotide
  Antisense strand to SEQ ID NO: 1214914
uuaacccagggagacauga

SEQ ID NO: 1214916 - RNA, 19 nt, Artificial Sequence
  Description of Artificial Sequence: Synthetic oligonucleotide
  Sense strand starting at position 2317 of SEQ ID NO: 917178
caugucucccuggguuaau

SEQ ID NO: 1214917 - RNA, 19 nt, Artificial Sequence
  Description of Artificial Sequence: Synthetic oligonucleotide
  Antisense strand to SEQ ID NO: 1214916
auuaacccagggagacaug

SEQ ID NO: 1214918 - RNA, 19 nt, Artificial Sequence
  Description of Artificial Sequence: Synthetic oligonucleotide
  Sense strand starting at position 2387 of SEQ ID NO: 917178
cuucuuuaaugaguuuagu

SEQ ID NO: 1214919 - RNA, 19 nt, Artificial Sequence
  Description of Artificial Sequence: Synthetic oligonucleotide
  Antisense strand to SEQ ID NO: 1214918
acuaaacucauuaaagaag

SEQ ID NO: 1214920 - RNA, 19 nt, Artificial Sequence
  Description of Artificial Sequence: Synthetic oligonucleotide
  Sense strand starting at position 2390 of SEQ ID NO: 917178
cuuuaaugaguuuagucaa

SEQ ID NO: 1214921 - RNA, 19 nt, Artificial Sequence
  Description of Artificial Sequence: Synthetic oligonucleotide
  Antisense strand to SEQ ID NO: 1214920
uugacuaaacucauuaaag

SEQ ID NO: 1214922 - RNA, 19 nt, Artificial Sequence
  Description of Artificial Sequence: Synthetic oligonucleotide
  Sense strand starting at position 2397 of SEQ ID NO: 917178
gaguuuagucaacaagagu

SEQ ID NO: 1214923 - RNA, 19 nt, Artificial Sequence
  Description of Artificial Sequence: Synthetic oligonucleotide
  Antisense strand to SEQ ID NO: 1214922
acucuuguugacuaaacuc

SEQ ID NO: 1214924 - RNA, 19 nt, Artificial Sequence
  Description of Artificial Sequence: Synthetic oligonucleotide
  Sense strand starting at position 2815 of SEQ ID NO: 917178
gaaagcagguauucucacu

SEQ ID NO: 1214925 - RNA, 19 nt, Artificial Sequence
  Description of Artificial Sequence: Synthetic oligonucleotide
  Antisense strand to SEQ ID NO: 1214924
agugagaauaccugcuuuc

SEQ ID NO: 1214926 - RNA, 19 nt, Artificial Sequence
  Description of Artificial Sequence: Synthetic oligonucleotide
  Sense strand starting at position 2901 of SEQ ID NO: 917178
gcugguuugagacauagac

SEQ ID NO: 1214927 - RNA, 19 nt, Artificial Sequence
  Description of Artificial Sequence: Synthetic oligonucleotide
  Antisense strand to SEQ ID NO: 1214926
gucuaugucucaaaccagc

SEQ ID NO: 1214928 - RNA, 19 nt, Artificial Sequence
  Description of Artificial Sequence: Synthetic oligonucleotide
  Sense strand starting at position 2984 of SEQ ID NO: 917178
guggguagcgcaguauauu

SEQ ID NO: 1214929 - RNA, 19 nt, Artificial Sequence
  Description of Artificial Sequence: Synthetic oligonucleotide
  Antisense strand to SEQ ID NO: 1214928
aauauacugcgcuacccac

SEQ ID NO: 1214930 - RNA, 19 nt, Artificial Sequence
  Description of Artificial Sequence: Synthetic oligonucleotide
  Sense strand starting at position 3077 of SEQ ID NO: 917178
uuauguaagcuguagauca

SEQ ID NO: 1214931 - RNA, 19 nt, Artificial Sequence
  Description of Artificial Sequence: Synthetic oligonucleotide
  Antisense strand to SEQ ID NO: 1214930
ugaucuacagcuuacauaa

SEQ ID NO: 1214932 - RNA, 19 nt, Artificial Sequence
  Description of Artificial Sequence: Synthetic oligonucleotide
  Sense strand starting at position 3119 of SEQ ID NO: 917178
cucuuuguucuagaaugca

SEQ ID NO: 1214933 - RNA, 19 nt, Artificial Sequence
  Description of Artificial Sequence: Synthetic oligonucleotide
  Antisense strand to SEQ ID NO: 1214932
ugcauucuagaacaaagag

SEQ ID NO: 1214934 - RNA, 19 nt, Artificial Sequence
  Description of Artificial Sequence: Synthetic oligonucleotide
  Sense strand starting at position 3129 of SEQ ID NO: 917178
uagaaugcaggcugaaaga

SEQ ID NO: 1214935 - RNA, 19 nt, Artificial Sequence
  Description of Artificial Sequence: Synthetic oligonucleotide
  Antisense strand to SEQ ID NO: 1214934
ucuuucagccugcauucua

SEQ ID NO: 1214936 - RNA, 19 nt, Artificial Sequence
  Description of Artificial Sequence: Synthetic oligonucleotide
  Sense strand starting at position 3184 of SEQ ID NO: 917178
aggaguggcaaauguuaca

SEQ ID NO: 1214937 - RNA, 19 nt, Artificial Sequence
  Description of Artificial Sequence: Synthetic oligonucleotide
  Antisense strand to SEQ ID NO: 1214936
uguaacauuugccacuccu

SEQ ID NO: 1214938 - RNA, 19 nt, Artificial Sequence
  Description of Artificial Sequence: Synthetic oligonucleotide
  Sense strand starting at position 3197 of SEQ ID NO: 917178
guuacauuccacugggcaa

SEQ ID NO: 1214939 - RNA, 19 nt, Artificial Sequence
  Description of Artificial Sequence: Synthetic oligonucleotide
  Antisense strand to SEQ ID NO: 1214938
uugcccaguggaauguaac

SEQ ID NO: 1214940 - RNA, 19 nt, Artificial Sequence
  Description of Artificial Sequence: Synthetic oligonucleotide
  Sense strand starting at position 3314 of SEQ ID NO: 917178
uuaugauuguacuucucau

SEQ ID NO: 1214941 - RNA, 19 nt, Artificial Sequence
  Description of Artificial Sequence: Synthetic oligonucleotide
  Antisense strand to SEQ ID NO: 1214940
augagaaguacaaucauaa

SEQ ID NO: 1214942 - RNA, 19 nt, Artificial Sequence
  Description of Artificial Sequence: Synthetic oligonucleotide
  Sense strand starting at position 3365 of SEQ ID NO: 917178
uuagaugaauugcccaaga

SEQ ID NO: 1214943 - RNA, 19 nt, Artificial Sequence
  Description of Artificial Sequence: Synthetic oligonucleotide
  Antisense strand to SEQ ID NO: 1214942
ucuugggcaauucaucuaa

SEQ ID NO: 1214944 - RNA, 19 nt, Artificial Sequence
  Description of Artificial Sequence: Synthetic oligonucleotide
  Sense strand starting at position 3395 of SEQ ID NO: 917178
acaagugucagaggccaau

SEQ ID NO: 1214945 - RNA, 19 nt, Artificial Sequence
  Description of Artificial Sequence: Synthetic oligonucleotide
  Antisense strand to SEQ ID NO: 1214944
auuggccucugacacuugu

SEQ ID NO: 1214946 - RNA, 19 nt, Artificial Sequence
  Description of Artificial Sequence: Synthetic oligonucleotide
  Sense strand starting at position 3633 of SEQ ID NO: 917178
aauaaucucuaugugagag

SEQ ID NO: 1214947 - RNA, 19 nt, Artificial Sequence
  Description of Artificial Sequence: Synthetic oligonucleotide
  Antisense strand to SEQ ID NO: 1214946
cucucacauagagauuauu

SEQ ID NO: 1214948 - RNA, 19 nt, Artificial Sequence
  Description of Artificial Sequence: Synthetic oligonucleotide
  Sense strand starting at position 3817 of SEQ ID NO: 917178
gaaggucaaguguaacuua

SEQ ID NO: 1214949 - RNA, 19 nt, Artificial Sequence
  Description of Artificial Sequence: Synthetic oligonucleotide
  Antisense strand to SEQ ID NO: 1214948
uaaguuacacuugaccuuc

SEQ ID NO: 1214950 - RNA, 19 nt, Artificial Sequence
  Description of Artificial Sequence: Synthetic oligonucleotide
  Sense strand starting at position 3820 of SEQ ID NO: 917178
ggucaaguguaacuuauaa

SEQ ID NO: 1214951 - RNA, 19 nt, Artificial Sequence
  Description of Artificial Sequence: Synthetic oligonucleotide
  Antisense strand to SEQ ID NO: 1214950
uuauaaguuacacuugacc

SEQ ID NO: 1214952 - RNA, 19 nt, Artificial Sequence
  Description of Artificial Sequence: Synthetic oligonucleotide
  Sense strand starting at position 3872 of SEQ ID NO: 917179
uugugagcaucuccagaau

SEQ ID NO: 1214953 - RNA, 19 nt, Artificial Sequence
  Description of Artificial Sequence: Synthetic oligonucleotide
  Antisense strand to SEQ ID NO: 1214952
auucuggagaugcucacaa

SEQ ID NO: 1214954 - RNA, 19 nt, Artificial Sequence
  Description of Artificial Sequence: Synthetic oligonucleotide
  Sense strand starting at position 217 of SEQ ID NO: 917179
cacugcguugugcaugaau

SEQ ID NO: 1214955 - RNA, 19 nt, Artificial Sequence
  Description of Artificial Sequence: Synthetic oligonucleotide
  Antisense strand to SEQ ID NO: 1214954
auucaugcacaacgcagug

SEQ ID NO: 1214956 - RNA, 19 nt, Artificial Sequence
  Description of Artificial Sequence: Synthetic oligonucleotide
  Sense strand starting at position 219 of SEQ ID NO: 917179
cugcguugugcaugaaucu

SEQ ID NO: 1214957 - RNA, 19 nt, Artificial Sequence
  Description of Artificial Sequence: Synthetic oligonucleotide
  Antisense strand to SEQ ID NO: 1214956
agauucaugcacaacgcag

SEQ ID NO: 1214958 - RNA, 19 nt, Artificial Sequence
  Description of Artificial Sequence: Synthetic oligonucleotide
  Sense strand starting at position 240 of SEQ ID NO: 917179
aaagcacuguccuaaguga

SEQ ID NO: 1214959 - RNA, 19 nt, Artificial Sequence
  Description of Artificial Sequence: Synthetic oligonucleotide
  Antisense strand to SEQ ID NO: 1214958
ucacuuaggacagugcuuu

SEQ ID NO: 1214960 - RNA, 19 nt, Artificial Sequence
  Description of Artificial Sequence: Synthetic oligonucleotide
  Sense strand starting at position 279 of SEQ ID NO: 917179
ugaaauacaugacugcauu

SEQ ID NO: 1214961 - RNA, 19 nt, Artificial Sequence
  Description of Artificial Sequence: Synthetic oligonucleotide
  Antisense strand to SEQ ID NO: 1214960
aaugcagucauguauuuca

SEQ ID NO: 1214962 - RNA, 19 nt, Artificial Sequence
  Description of Artificial Sequence: Synthetic oligonucleotide
  Sense strand starting at position 293 of SEQ ID NO: 917179
gcauuuagauaagguucua

SEQ ID NO: 1214963 - RNA, 19 nt, Artificial Sequence
  Description of Artificial Sequence: Synthetic oligonucleotide
  Antisense strand to SEQ ID NO: 1214962
uagaaccuuaucuaaaugc

SEQ ID NO: 1214964 - RNA, 19 nt, Artificial Sequence
  Description of Artificial Sequence: Synthetic oligonucleotide
  Sense strand starting at position 298 of SEQ ID NO: 917179
uagauaagguucuagaaau

SEQ ID NO: 1214965 - RNA, 19 nt, Artificial Sequence
  Description of Artificial Sequence: Synthetic oligonucleotide
  Antisense strand to SEQ ID NO: 1214964
auuucuagaaccuuaucua

SEQ ID NO: 1214966 - RNA, 19 nt, Artificial Sequence
  Description of Artificial Sequence: Synthetic oligonucleotide
  Sense strand starting at position 500 of SEQ ID NO: 917179
uccugaagugcacauuaua

SEQ ID NO: 1214967 - RNA, 19 nt, Artificial Sequence
  Description of Artificial Sequence: Synthetic oligonucleotide
  Antisense strand to SEQ ID NO: 1214966
uauaaugugcacuucagga

SEQ ID NO: 1214968 - RNA, 19 nt, Artificial Sequence
  Description of Artificial Sequence: Synthetic oligonucleotide
  Sense strand starting at position 508 of SEQ ID NO: 917179
ugcacauuauauguagacu

SEQ ID NO: 1214969 - RNA, 19 nt, Artificial Sequence
  Description of Artificial Sequence: Synthetic oligonucleotide
  Antisense strand to SEQ ID NO: 1214968
agucuacauauaaugugca

SEQ ID NO: 1214970 - RNA, 19 nt, Artificial Sequence
  Description of Artificial Sequence: Synthetic oligonucleotide
  Sense strand starting at position 528 of SEQ ID NO: 917179
uaucucaaagcugguaaga

SEQ ID NO: 1214971 - RNA, 19 nt, Artificial Sequence
  Description of Artificial Sequence: Synthetic oligonucleotide
  Antisense strand to SEQ ID NO: 1214970
ucuuaccagcuuugagaua

SEQ ID NO: 1214972 - RNA, 19 nt, Artificial Sequence
  Description of Artificial Sequence: Synthetic oligonucleotide
  Sense strand starting at position 530 of SEQ ID NO: 917179
ucucaaagcugguaagaaa

SEQ ID NO: 1214973 - RNA, 19 nt, Artificial Sequence
  Description of Artificial Sequence: Synthetic oligonucleotide
  Antisense strand to SEQ ID NO: 1214972
uuucuuaccagcuuugaga

SEQ ID NO: 1214974 - RNA, 19 nt, Artificial Sequence
  Description of Artificial Sequence: Synthetic oligonucleotide
  Sense strand starting at position 628 of SEQ ID NO: 917179
gaguauaggugauugaagu

SEQ ID NO: 1214975 - RNA, 19 nt, Artificial Sequence
  Description of Artificial Sequence: Synthetic oligonucleotide
  Antisense strand to SEQ ID NO: 1214974
acuucaaucaccuauacuc

SEQ ID NO: 1214976 - RNA, 19 nt, Artificial Sequence
  Description of Artificial Sequence: Synthetic oligonucleotide
  Sense strand starting at position 629 of SEQ ID NO: 917179
aguauaggugauugaaguc

SEQ ID NO: 1214977 - RNA, 19 nt, Artificial Sequence
  Description of Artificial Sequence: Synthetic oligonucleotide
  Antisense strand to SEQ ID NO: 1214976
gacuucaaucaccuauacu

SEQ ID NO: 1214978 - RNA, 19 nt, Artificial Sequence
  Description of Artificial Sequence: Synthetic oligonucleotide
  Sense strand starting at position 744 of SEQ ID NO: 917179
augacacaucgugaccuaa

SEQ ID NO: 1214979 - RNA, 19 nt, Artificial Sequence
  Description of Artificial Sequence: Synthetic oligonucleotide
  Antisense strand to SEQ ID NO: 1214978
uuaggucacgaugugucau

SEQ ID NO: 1214980 - RNA, 19 nt, Artificial Sequence
  Description of Artificial Sequence: Synthetic oligonucleotide
  Sense strand starting at position 770 of SEQ ID NO: 917179
auauuagacuacugaauga

SEQ ID NO: 1214981 - RNA, 19 nt, Artificial Sequence
  Description of Artificial Sequence: Synthetic oligonucleotide
  Antisense strand to SEQ ID NO: 1214980
ucauucaguagucuaauau

SEQ ID NO: 1214982 - RNA, 19 nt, Artificial Sequence
  Description of Artificial Sequence: Synthetic oligonucleotide
  Sense strand starting at position 774 of SEQ ID NO: 917179
uagacuacugaaugaaugu

SEQ ID NO: 1214983 - RNA, 19 nt, Artificial Sequence
  Description of Artificial Sequence: Synthetic oligonucleotide
  Antisense strand to SEQ ID NO: 1214982
acauucauucaguagucua

SEQ ID NO: 1214984 - RNA, 19 nt, Artificial Sequence
  Description of Artificial Sequence: Synthetic oligonucleotide
  Sense strand starting at position 781 of SEQ ID NO: 917179
cugaaugaauguuacuuua

SEQ ID NO: 1214985 - RNA, 19 nt, Artificial Sequence
  Description of Artificial Sequence: Synthetic oligonucleotide
  Antisense strand to SEQ ID NO: 1214984
uaaaguaacauucauucag

SEQ ID NO: 1214986 - RNA, 19 nt, Artificial Sequence
  Description of Artificial Sequence: Synthetic oligonucleotide
  Sense strand starting at position 909 of SEQ ID NO: 917179
gcuaccaaaucuguuugaa

SEQ ID NO: 1214987 - RNA, 19 nt, Artificial Sequence
  Description of Artificial Sequence: Synthetic oligonucleotide
  Antisense strand to SEQ ID NO: 1214986
uucaaacagauuugguagc

SEQ ID NO: 1214988 - RNA, 19 nt, Artificial Sequence
  Description of Artificial Sequence: Synthetic oligonucleotide
  Sense strand starting at position 1063 of SEQ ID NO: 917179
cucuuauuacuguggcaag

SEQ ID NO: 1214989 - RNA, 19 nt, Artificial Sequence
  Description of Artificial Sequence: Synthetic oligonucleotide
  Antisense strand to SEQ ID NO: 1214988
cuugccacaguaauaagag

SEQ ID NO: 1214990 - RNA, 19 nt, Artificial Sequence
  Description of Artificial Sequence: Synthetic oligonucleotide
  Sense strand starting at position 1075 of SEQ ID NO: 917179
uggcaagugacacagucau

SEQ ID NO: 1214991 - RNA, 19 nt, Artificial Sequence
  Description of Artificial Sequence: Synthetic oligonucleotide
  Antisense strand to SEQ ID NO: 1214990
augacugugucacuugcca

SEQ ID NO: 1214992 - RNA, 19 nt, Artificial Sequence
  Description of Artificial Sequence: Synthetic oligonucleotide
  Sense strand starting at position 1179 of SEQ ID NO: 917179
uccguaaugggauaacuuu

SEQ ID NO: 1214993 - RNA, 19 nt, Artificial Sequence
  Description of Artificial Sequence: Synthetic oligonucleotide
  Antisense strand to SEQ ID NO: 1214992
aaaguuaucccauuacgga

SEQ ID NO: 1214994 - RNA, 19 nt, Artificial Sequence
  Description of Artificial Sequence: Synthetic oligonucleotide
  Sense strand starting at position 1194 of SEQ ID NO: 917179
cuuuaaauaugguucuaag

SEQ ID NO: 1214995 - RNA, 19 nt, Artificial Sequence
  Description of Artificial Sequence: Synthetic oligonucleotide
  Antisense strand to SEQ ID NO: 1214994
cuuagaaccauauuuaaag

SEQ ID NO: 1214996 - RNA, 19 nt, Artificial Sequence
  Description of Artificial Sequence: Synthetic oligonucleotide
  Sense strand starting at position 1197 of SEQ ID NO: 917179
uaaauaugguucuaagcag

SEQ ID NO: 1214997 - RNA, 19 nt, Artificial Sequence
  Description of Artificial Sequence: Synthetic oligonucleotide
  Antisense strand to SEQ ID NO: 1214996
cugcuuagaaccauauuua

SEQ ID NO: 1214998 - RNA, 19 nt, Artificial Sequence
  Description of Artificial Sequence: Synthetic oligonucleotide
  Sense strand starting at position 2061 of SEQ ID NO: 917179
gggaaucccuccugaggga

SEQ ID NO: 1214999 - RNA, 19 nt, Artificial Sequence
  Description of Artificial Sequence: Synthetic oligonucleotide
  Antisense strand to SEQ ID NO: 1214998
ucccucaggagggauuccc

SEQ ID NO: 1215000 - RNA, 19 nt, Artificial Sequence
  Description of Artificial Sequence: Synthetic oligonucleotide
  Sense strand starting at position 3448 of SEQ ID NO: 917179
gguacaugcgucugacaga

SEQ ID NO: 1215001 - RNA, 19 nt, Artificial Sequence
  Description of Artificial Sequence: Synthetic oligonucleotide
  Antisense strand to SEQ ID NO: 1215000
ucugucagacgcauguacc

SEQ ID NO: 1215002 - RNA, 19 nt, Artificial Sequence
  Description of Artificial Sequence: Synthetic oligonucleotide
  Sense strand starting at position 3455 of SEQ ID NO: 917179
gcgucugacagauguuguu

SEQ ID NO: 1215003 - RNA, 19 nt, Artificial Sequence
  Description of Artificial Sequence: Synthetic oligonucleotide
  Antisense strand to SEQ ID NO: 1215002
aacaacaucugucagacgc

SEQ ID NO: 1215004 - RNA, 19 nt, Artificial Sequence
  Description of Artificial Sequence: Synthetic oligonucleotide
  Sense strand starting at position 3508 of SEQ ID NO: 917179
gauggacacuuguaaagau

SEQ ID NO: 1215005 - RNA, 19 nt, Artificial Sequence
  Description of Artificial Sequence: Synthetic oligonucleotide
  Antisense strand to SEQ ID NO: 1215004
aucuuuacaaguguccauc

SEQ ID NO: 1215006 - RNA, 19 nt, Artificial Sequence
  Description of Artificial Sequence: Synthetic oligonucleotide
  Sense strand starting at position 3634 of SEQ ID NO: 917179
uuaccaagacguggugaau

SEQ ID NO: 1215007 - RNA, 19 nt, Artificial Sequence
  Description of Artificial Sequence: Synthetic oligonucleotide
  Antisense strand to SEQ ID NO: 1215006
auucaccacgucuugguaa

SEQ ID NO: 1215008 - RNA, 19 nt, Artificial Sequence
  Description of Artificial Sequence: Synthetic oligonucleotide
  Sense strand starting at position 3688 of SEQ ID NO: 917179
gaaugauucccaggcuugu

SEQ ID NO: 1215009 - RNA, 19 nt, Artificial Sequence
  Description of Artificial Sequence: Synthetic oligonucleotide
  Antisense strand to SEQ ID NO: 1215008
acaagccugggaaucauuc

SEQ ID NO: 1215010 - RNA, 19 nt, Artificial Sequence
  Description of Artificial Sequence: Synthetic oligonucleotide
  Sense strand starting at position 3699 of SEQ ID NO: 917179
aggcuuguaaucugggaaa

SEQ ID NO: 1215011 - RNA, 19 nt, Artificial Sequence
  Description of Artificial Sequence: Synthetic oligonucleotide
  Antisense strand to SEQ ID NO: 1215010
uuucccagauuacaagccu

SEQ ID NO: 1215012 - RNA, 19 nt, Artificial Sequence
  Description of Artificial Sequence: Synthetic oligonucleotide
  Sense strand starting at position 3779 of SEQ ID NO: 917179
ucuguugacaacuggguaa

SEQ ID NO: 1215013 - RNA, 19 nt, Artificial Sequence
  Description of Artificial Sequence: Synthetic oligonucleotide
  Antisense strand to SEQ ID NO: 1215012
uuacccaguugucaacaga

SEQ ID NO: 1215014 - RNA, 19 nt, Artificial Sequence
  Description of Artificial Sequence: Synthetic oligonucleotide
  Sense strand starting at position 3782 of SEQ ID NO: 917179
guugacaacuggguaaaga

SEQ ID NO: 1215015 - RNA, 19 nt, Artificial Sequence
  Description of Artificial Sequence: Synthetic oligonucleotide
  Antisense strand to SEQ ID NO: 1215014
ucuuuacccaguugucaac

SEQ ID NO: 1215016 - RNA, 19 nt, Artificial Sequence
  Description of Artificial Sequence: Synthetic oligonucleotide
  Sense strand starting at position 3791 of SEQ ID NO: 917179
uggguaaagauacguacuu

SEQ ID NO: 1215017 - RNA, 19 nt, Artificial Sequence
  Description of Artificial Sequence: Synthetic oligonucleotide
  Antisense strand to SEQ ID NO: 1215016
aaguacguaucuuuaccca

SEQ ID NO: 1215018 - RNA, 19 nt, Artificial Sequence
  Description of Artificial Sequence: Synthetic oligonucleotide
  Sense strand starting at position 3793 of SEQ ID NO: 917179
gguaaagauacguacuuga

SEQ ID NO: 1215019 - RNA, 19 nt, Artificial Sequence
  Description of Artificial Sequence: Synthetic oligonucleotide
  Antisense strand to SEQ ID NO: 1215018
ucaaguacguaucuuuacc

SEQ ID NO: 1215020 - RNA, 19 nt, Artificial Sequence
  Description of Artificial Sequence: Synthetic oligonucleotide
  Sense strand starting at position 3796 of SEQ ID NO: 917179
aaagauacguacuugauag

SEQ ID NO: 1215021 - RNA, 19 nt, Artificial Sequence
  Description of Artificial Sequence: Synthetic oligonucleotide
  Antisense strand to SEQ ID NO: 1215020
cuaucaaguacguaucuuu

SEQ ID NO: 1215022 - RNA, 19 nt, Artificial Sequence
  Description of Artificial Sequence: Synthetic oligonucleotide
  Sense strand starting at position 3839 of SEQ ID NO: 917179
ccagcaguugcuugguuaa

SEQ ID NO: 1215023 - RNA, 19 nt, Artificial Sequence
  Description of Artificial Sequence: Synthetic oligonucleotide
  Antisense strand to SEQ ID NO: 1215022
uuaaccaagcaacugcugg

SEQ ID NO: 1215024 - RNA, 19 nt, Artificial Sequence
  Description of Artificial Sequence: Synthetic oligonucleotide
  Sense strand starting at position 3841 of SEQ ID NO: 917179
agcaguugcuugguuaauu

SEQ ID NO: 1215025 - RNA, 19 nt, Artificial Sequence
  Description of Artificial Sequence: Synthetic oligonucleotide
  Antisense strand to SEQ ID NO: 1215024
aauuaaccaagcaacugcu

SEQ ID NO: 1215026 - RNA, 19 nt, Artificial Sequence
  Description of Artificial Sequence: Synthetic oligonucleotide
  Sense strand starting at position 3842 of SEQ ID NO: 917179
gcaguugcuugguuaauug

SEQ ID NO: 1215027 - RNA, 19 nt, Artificial Sequence
  Description of Artificial Sequence: Synthetic oligonucleotide
  Antisense strand to SEQ ID NO: 1215026
caauuaaccaagcaacugc

SEQ ID NO: 1215028 - RNA, 19 nt, Artificial Sequence
  Description of Artificial Sequence: Synthetic oligonucleotide
  Sense strand starting at position 3846 of SEQ ID NO: 917179
uugcuugguuaauugagaa

SEQ ID NO: 1215029 - RNA, 19 nt, Artificial Sequence
  Description of Artificial Sequence: Synthetic oligonucleotide
  Antisense strand to SEQ ID NO: 1215028
uucucaauuaaccaagcaa

SEQ ID NO: 1215030 - RNA, 19 nt, Artificial Sequence
  Description of Artificial Sequence: Synthetic oligonucleotide
  Sense strand starting at position 3883 of SEQ ID NO: 917179
ucacgaagaaauggaugua

SEQ ID NO: 1215031 - RNA, 19 nt, Artificial Sequence
  Description of Artificial Sequence: Synthetic oligonucleotide
  Antisense strand to SEQ ID NO: 1215030
uacauccauuucuucguga

SEQ ID NO: 1215032 - RNA, 19 nt, Artificial Sequence
  Description of Artificial Sequence: Synthetic oligonucleotide
  Sense strand starting at position 3886 of SEQ ID NO: 917180
cgaagaaauggauguaugu

SEQ ID NO: 1215033 - RNA, 19 nt, Artificial Sequence
  Description of Artificial Sequence: Synthetic oligonucleotide
  Antisense strand to SEQ ID NO: 1215032
acauacauccauuucuucg

SEQ ID NO: 1215034 - RNA, 19 nt, Artificial Sequence
  Description of Artificial Sequence: Synthetic oligonucleotide
  Sense strand starting at position 2136 of SEQ ID NO: 917180
gguacaugcgucugacaga

SEQ ID NO: 1215035 - RNA, 19 nt, Artificial Sequence
  Description of Artificial Sequence: Synthetic oligonucleotide
  Antisense strand to SEQ ID NO: 1215034
ucugucagacgcauguacc

SEQ ID NO: 1215036 - RNA, 19 nt, Artificial Sequence
  Description of Artificial Sequence: Synthetic oligonucleotide
  Sense strand starting at position 2322 of SEQ ID NO: 917180
uuaccaagacguggugaau

SEQ ID NO: 1215037 - RNA, 19 nt, Artificial Sequence
  Description of Artificial Sequence: Synthetic oligonucleotide
  Antisense strand to SEQ ID NO: 1215036
auucaccacgucuugguaa

SEQ ID NO: 1215038 - RNA, 19 nt, Artificial Sequence
  Description of Artificial Sequence: Synthetic oligonucleotide
  Sense strand starting at position 2376 of SEQ ID NO: 917180
gaaugauucccaggcuugu

SEQ ID NO: 1215039 - RNA, 19 nt, Artificial Sequence
  Description of Artificial Sequence: Synthetic oligonucleotide
  Antisense strand to SEQ ID NO: 1215038
acaagccugggaaucauuc

SEQ ID NO: 1215040 - RNA, 19 nt, Artificial Sequence
  Description of Artificial Sequence: Synthetic oligonucleotide
  Sense strand starting at position 2387 of SEQ ID NO: 917180
aggcuuguaaucugggaaa

SEQ ID NO: 1215041 - RNA, 19 nt, Artificial Sequence
  Description of Artificial Sequence: Synthetic oligonucleotide
  Antisense strand to SEQ ID NO: 1215040
uuucccagauuacaagccu

SEQ ID NO: 1215042 - RNA, 19 nt, Artificial Sequence
  Description of Artificial Sequence: Synthetic oligonucleotide
  Sense strand starting at position 2467 of SEQ ID NO: 917180
ucuguugacaacuggguaa

SEQ ID NO: 1215043 - RNA, 19 nt, Artificial Sequence
  Description of Artificial Sequence: Synthetic oligonucleotide
  Antisense strand to SEQ ID NO: 1215042
uuacccaguugucaacaga

SEQ ID NO: 1215044 - RNA, 19 nt, Artificial Sequence
  Description of Artificial Sequence: Synthetic oligonucleotide
  Sense strand starting at position 2470 of SEQ ID NO: 917180
guugacaacuggguaaaga

SEQ ID NO: 1215045 - RNA, 19 nt, Artificial Sequence
  Description of Artificial Sequence: Synthetic oligonucleotide
  Antisense strand to SEQ ID NO: 1215044
ucuuuacccaguugucaac

SEQ ID NO: 1215046 - RNA, 19 nt, Artificial Sequence
  Description of Artificial Sequence: Synthetic oligonucleotide
  Sense strand starting at position 2479 of SEQ ID NO: 917180
uggguaaagauacguacuu

SEQ ID NO: 1215047 - RNA, 19 nt, Artificial Sequence
  Description of Artificial Sequence: Synthetic oligonucleotide
  Antisense strand to SEQ ID NO: 1215046
aaguacguaucuuuaccca

SEQ ID NO: 1215048 - RNA, 19 nt, Artificial Sequence
  Description of Artificial Sequence: Synthetic oligonucleotide
  Sense strand starting at position 2481 of SEQ ID NO: 917180
gguaaagauacguacuuga

SEQ ID NO: 1215049 - RNA, 19 nt, Artificial Sequence
  Description of Artificial Sequence: Synthetic oligonucleotide
  Antisense strand to SEQ ID NO: 1215048
ucaaguacguaucuuuacc

SEQ ID NO: 1215050 - RNA, 19 nt, Artificial Sequence
  Description of Artificial Sequence: Synthetic oligonucleotide
  Sense strand starting at position 2484 of SEQ ID NO: 917180
aaagauacguacuugauag

SEQ ID NO: 1215051 - RNA, 19 nt, Artificial Sequence
  Description of Artificial Sequence: Synthetic oligonucleotide
  Antisense strand to SEQ ID NO: 1215050
cuaucaaguacguaucuuu

SEQ ID NO: 1215052 - RNA, 19 nt, Artificial Sequence
  Description of Artificial Sequence: Synthetic oligonucleotide
  Sense strand starting at position 2534 of SEQ ID NO: 917180
uugcuugguuaauugagaa

SEQ ID NO: 1215053 - RNA, 19 nt, Artificial Sequence
  Description of Artificial Sequence: Synthetic oligonucleotide
  Antisense strand to SEQ ID NO: 1215052
uucucaauuaaccaagcaa

SEQ ID NO: 1215054 - RNA, 19 nt, Artificial Sequence
  Description of Artificial Sequence: Synthetic oligonucleotide
  Sense strand starting at position 2571 of SEQ ID NO: 917180
ucacgaagaaauggaugua

SEQ ID NO: 1215055 - RNA, 19 nt, Artificial Sequence
  Description of Artificial Sequence: Synthetic oligonucleotide
  Antisense strand to SEQ ID NO: 1215054
uacauccauuucuucguga

SEQ ID NO: 1215056 - RNA, 19 nt, Artificial Sequence
  Description of Artificial Sequence: Synthetic oligonucleotide
  Sense strand starting at position 2574 of SEQ ID NO: 917180
cgaagaaauggauguaugu

SEQ ID NO: 1215057 - RNA, 19 nt, Artificial Sequence
  Description of Artificial Sequence: Synthetic oligonucleotide
  Antisense strand to SEQ ID NO: 1215056
acauacauccauuucuucg

SEQ ID NO: 1215058 - RNA, 19 nt, Artificial Sequence
  Description of Artificial Sequence: Synthetic oligonucleotide
  Sense strand starting at position 2721 of SEQ ID NO: 917180
ggccuaaucuuagcagacu

SEQ ID NO: 1215059 - RNA, 19 nt, Artificial Sequence
  Description of Artificial Sequence: Synthetic oligonucleotide
  Antisense strand to SEQ ID NO: 1215058
agucugcuaagauuaggcc

SEQ ID NO: 1215060 - RNA, 19 nt, Artificial Sequence
  Description of Artificial Sequence: Synthetic oligonucleotide
  Sense strand starting at position 2797 of SEQ ID NO: 917180
ccaauuugauacgauuauc

SEQ ID NO: 1215061 - RNA, 19 nt, Artificial Sequence
  Description of Artificial Sequence: Synthetic oligonucleotide
  Antisense strand to SEQ ID NO: 1215060
gauaaucguaucaaauugg

SEQ ID NO: 1215062 - RNA, 19 nt, Artificial Sequence
  Description of Artificial Sequence: Synthetic oligonucleotide
  Sense strand starting at position 2803 of SEQ ID NO: 917180
ugauacgauuaucuuuaga

SEQ ID NO: 1215063 - RNA, 19 nt, Artificial Sequence
  Description of Artificial Sequence: Synthetic oligonucleotide
  Antisense strand to SEQ ID NO: 1215062
ucuaaagauaaucguauca

SEQ ID NO: 1215064 - RNA, 19 nt, Artificial Sequence
  Description of Artificial Sequence: Synthetic oligonucleotide
  Sense strand starting at position 3088 of SEQ ID NO: 917180
gcugaaagucgucaucaua

SEQ ID NO: 1215065 - RNA, 19 nt, Artificial Sequence
  Description of Artificial Sequence: Synthetic oligonucleotide
  Antisense strand to SEQ ID NO: 1215064
uaugaugacgacuuucagc

SEQ ID NO: 1215066 - RNA, 19 nt, Artificial Sequence
  Description of Artificial Sequence: Synthetic oligonucleotide
  Sense strand starting at position 3091 of SEQ ID NO: 917180
gaaagucgucaucauaccu

SEQ ID NO: 1215067 - RNA, 19 nt, Artificial Sequence
  Description of Artificial Sequence: Synthetic oligonucleotide
  Antisense strand to SEQ ID NO: 1215066
agguaugaugacgacuuuc

SEQ ID NO: 1215068 - RNA, 19 nt, Artificial Sequence
  Description of Artificial Sequence: Synthetic oligonucleotide
  Sense strand starting at position 3098 of SEQ ID NO: 917180
gucaucauaccuugggcau

SEQ ID NO: 1215069 - RNA, 19 nt, Artificial Sequence
  Description of Artificial Sequence: Synthetic oligonucleotide
  Antisense strand to SEQ ID NO: 1215068
augcccaagguaugaugac

SEQ ID NO: 1215070 - RNA, 19 nt, Artificial Sequence
  Description of Artificial Sequence: Synthetic oligonucleotide
  Sense strand starting at position 3111 of SEQ ID NO: 917180
gggcaucagcucguguauu

SEQ ID NO: 1215071 - RNA, 19 nt, Artificial Sequence
  Description of Artificial Sequence: Synthetic oligonucleotide
  Antisense strand to SEQ ID NO: 1215070
aauacacgagcugaugccc

SEQ ID NO: 1215072 - RNA, 19 nt, Artificial Sequence
  Description of Artificial Sequence: Synthetic oligonucleotide
  Sense strand starting at position 3198 of SEQ ID NO: 917180
ucuacucuauguguguaaa

SEQ ID NO: 1215073 - RNA, 19 nt, Artificial Sequence
  Description of Artificial Sequence: Synthetic oligonucleotide
  Antisense strand to SEQ ID NO: 1215072
uuuacacacauagaguaga

SEQ ID NO: 1215074 - RNA, 19 nt, Artificial Sequence
  Description of Artificial Sequence: Synthetic oligonucleotide
  Sense strand starting at position 3199 of SEQ ID NO: 917180
cuacucuauguguguaaac

SEQ ID NO: 1215075 - RNA, 19 nt, Artificial Sequence
  Description of Artificial Sequence: Synthetic oligonucleotide
  Antisense strand to SEQ ID NO: 1215074
guuuacacacauagaguag

SEQ ID NO: 1215076 - RNA, 19 nt, Artificial Sequence
  Description of Artificial Sequence: Synthetic oligonucleotide
  Sense strand starting at position 3206 of SEQ ID NO: 917180
auguguguaaacugaaguu

SEQ ID NO: 1215077 - RNA, 19 nt, Artificial Sequence
  Description of Artificial Sequence: Synthetic oligonucleotide
  Antisense strand to SEQ ID NO: 1215076
aacuucaguuuacacacau

SEQ ID NO: 1215078 - RNA, 19 nt, Artificial Sequence
  Description of Artificial Sequence: Synthetic oligonucleotide
  Sense strand starting at position 3258 of SEQ ID NO: 917180
ugagacuccuucguaguca

SEQ ID NO: 1215079 - RNA, 19 nt, Artificial Sequence
  Description of Artificial Sequence: Synthetic oligonucleotide
  Antisense strand to SEQ ID NO: 1215078
ugacuacgaaggagucuca

SEQ ID NO: 1215080 - RNA, 19 nt, Artificial Sequence
  Description of Artificial Sequence: Synthetic oligonucleotide
  Sense strand starting at position 3358 of SEQ ID NO: 917180
cuucuauggagaugugcau

SEQ ID NO: 1215081 - RNA, 19 nt, Artificial Sequence
  Description of Artificial Sequence: Synthetic oligonucleotide
  Antisense strand to SEQ ID NO: 1215080
augcacaucuccauagaag

SEQ ID NO: 1215082 - RNA, 19 nt, Artificial Sequence
  Description of Artificial Sequence: Synthetic oligonucleotide
  Sense strand starting at position 3532 of SEQ ID NO: 917180
gugccucuucgauacagaa

SEQ ID NO: 1215083 - RNA, 19 nt, Artificial Sequence
  Description of Artificial Sequence: Synthetic oligonucleotide
  Antisense strand to SEQ ID NO: 1215082
uucuguaucgaagaggcac

SEQ ID NO: 1215084 - RNA, 19 nt, Artificial Sequence
  Description of Artificial Sequence: Synthetic oligonucleotide
  Sense strand starting at position 3534 of SEQ ID NO: 917180
gccucuucgauacagaaug

SEQ ID NO: 1215085 - RNA, 19 nt, Artificial Sequence
  Description of Artificial Sequence: Synthetic oligonucleotide
  Antisense strand to SEQ ID NO: 1215084
cauucuguaucgaagaggc

SEQ ID NO: 1215086 - RNA, 19 nt, Artificial Sequence
  Description of Artificial Sequence: Synthetic oligonucleotide
  Sense strand starting at position 3550 of SEQ ID NO: 917180
auggcaaccgguuauacau

SEQ ID NO: 1215087 - RNA, 19 nt, Artificial Sequence
  Description of Artificial Sequence: Synthetic oligonucleotide
  Antisense strand to SEQ ID NO: 1215086
auguauaaccgguugccau

SEQ ID NO: 1215088 - RNA, 19 nt, Artificial Sequence
  Description of Artificial Sequence: Synthetic oligonucleotide
  Sense strand starting at position 3556 of SEQ ID NO: 917180
accgguuauacaugguaac

SEQ ID NO: 1215089 - RNA, 19 nt, Artificial Sequence
  Description of Artificial Sequence: Synthetic oligonucleotide
  Antisense strand to SEQ ID NO: 1215088
guuaccauguauaaccggu

SEQ ID NO: 1215090 - RNA, 19 nt, Artificial Sequence
  Description of Artificial Sequence: Synthetic oligonucleotide
  Sense strand starting at position 3557 of SEQ ID NO: 917180
ccgguuauacaugguaaca

SEQ ID NO: 1215091 - RNA, 19 nt, Artificial Sequence
  Description of Artificial Sequence: Synthetic oligonucleotide
  Antisense strand to SEQ ID NO: 1215090
uguuaccauguauaaccgg

SEQ ID NO: 1215092 - RNA, 19 nt, Artificial Sequence
  Description of Artificial Sequence: Synthetic oligonucleotide
  Sense strand starting at position 3575 of SEQ ID NO: 917180
acauguuugauuuguugua

SEQ ID NO: 1215093 - RNA, 19 nt, Artificial Sequence
  Description of Artificial Sequence: Synthetic oligonucleotide
  Antisense strand to SEQ ID NO: 1215092
uacaacaaaucaaacaugu

SEQ ID NO: 1215094 - RNA, 19 nt, Artificial Sequence
  Description of Artificial Sequence: Synthetic oligonucleotide
  Sense strand starting at position 3576 of SEQ ID NO: 917180
cauguuugauuuguuguau

SEQ ID NO: 1215095 - RNA, 19 nt, Artificial Sequence
  Description of Artificial Sequence: Synthetic oligonucleotide
  Antisense strand to SEQ ID NO: 1215094
auacaacaaaucaaacaug

SEQ ID NO: 1215096 - RNA, 19 nt, Artificial Sequence
  Description of Artificial Sequence: Synthetic oligonucleotide
  Sense strand starting at position 3580 of SEQ ID NO: 917180
uuugauuuguuguauagga

SEQ ID NO: 1215097 - RNA, 19 nt, Artificial Sequence
  Description of Artificial Sequence: Synthetic oligonucleotide
  Antisense strand to SEQ ID NO: 1215096
uccuauacaacaaaucaaa

SEQ ID NO: 1215098 - RNA, 19 nt, Artificial Sequence
  Description of Artificial Sequence: Synthetic oligonucleotide
  Sense strand starting at position 3588 of SEQ ID NO: 917180
guuguauaggaacauaagu

SEQ ID NO: 1215099 - RNA, 19 nt, Artificial Sequence
  Description of Artificial Sequence: Synthetic oligonucleotide
  Antisense strand to SEQ ID NO: 1215098
acuuauguuccuauacaac

SEQ ID NO: 1215100 - RNA, 19 nt, Artificial Sequence
  Description of Artificial Sequence: Synthetic oligonucleotide
  Sense strand starting at position 3615 of SEQ ID NO: 917180
cacuguaucucuuugggaa

SEQ ID NO: 1215101 - RNA, 19 nt, Artificial Sequence
  Description of Artificial Sequence: Synthetic oligonucleotide
  Antisense strand to SEQ ID NO: 1215100
uucccaaagagauacagug

SEQ ID NO: 1215102 - RNA, 19 nt, Artificial Sequence
  Description of Artificial Sequence: Synthetic oligonucleotide
  Sense strand starting at position 3616 of SEQ ID NO: 917180
acuguaucucuuugggaau

SEQ ID NO: 1215103 - RNA, 19 nt, Artificial Sequence
  Description of Artificial Sequence: Synthetic oligonucleotide
  Antisense strand to SEQ ID NO: 1215102
auucccaaagagauacagu

SEQ ID NO: 1215104 - RNA, 19 nt, Artificial Sequence
  Description of Artificial Sequence: Synthetic oligonucleotide
  Sense strand starting at position 3654 of SEQ ID NO: 917180
ucaucaaagcuaggaaguu

SEQ ID NO: 1215105 - RNA, 19 nt, Artificial Sequence
  Description of Artificial Sequence: Synthetic oligonucleotide
  Antisense strand to SEQ ID NO: 1215104
aacuuccuagcuuugauga

SEQ ID NO: 1215106 - RNA, 19 nt, Artificial Sequence
  Description of Artificial Sequence: Synthetic oligonucleotide
  Sense strand starting at position 3725 of SEQ ID NO: 917180
uuggauguaucuccgaagu

SEQ ID NO: 1215107 - RNA, 19 nt, Artificial Sequence
  Description of Artificial Sequence: Synthetic oligonucleotide
  Antisense strand to SEQ ID NO: 1215106
acuucggagauacauccaa

SEQ ID NO: 1215108 - RNA, 19 nt, Artificial Sequence
  Description of Artificial Sequence: Synthetic oligonucleotide
  Sense strand starting at position 3813 of SEQ ID NO: 917180
gguugaugguuuccuuuac

SEQ ID NO: 1215109 - RNA, 19 nt, Artificial Sequence
  Description of Artificial Sequence: Synthetic oligonucleotide
  Antisense strand to SEQ ID NO: 1215108
guaaaggaaaccaucaacc

SEQ ID NO: 1215110 - RNA, 19 nt, Artificial Sequence
  Description of Artificial Sequence: Synthetic oligonucleotide
  Sense strand starting at position 3817 of SEQ ID NO: 917180
gaugguuuccuuuacuuug

SEQ ID NO: 1215111 - RNA, 19 nt, Artificial Sequence
  Description of Artificial Sequence: Synthetic oligonucleotide
  Antisense strand to SEQ ID NO: 1215110
caaaguaaaggaaaccauc

SEQ ID NO: 1215112 - RNA, 19 nt, Artificial Sequence
  Description of Artificial Sequence: Synthetic oligonucleotide
  Sense strand starting at position 3912 of SEQ ID NO: 917181
uuacuaauucugggaccau

SEQ ID NO: 1215113 - RNA, 19 nt, Artificial Sequence
  Description of Artificial Sequence: Synthetic oligonucleotide
  Antisense strand to SEQ ID NO: 1215112
auggucccagaauuaguaa

SEQ ID NO: 1215114 - RNA, 19 nt, Artificial Sequence
  Description of Artificial Sequence: Synthetic oligonucleotide
  Sense strand starting at position 98 of SEQ ID NO: 917181
gcuaccaaaucuguuugaa

SEQ ID NO: 1215115 - RNA, 19 nt, Artificial Sequence
  Description of Artificial Sequence: Synthetic oligonucleotide
  Antisense strand to SEQ ID NO: 1215114
uucaaacagauuugguagc

SEQ ID NO: 1215116 - RNA, 19 nt, Artificial Sequence
  Description of Artificial Sequence: Synthetic oligonucleotide
  Sense strand starting at position 252 of SEQ ID NO: 917181
cucuuauuacuguggcaag

SEQ ID NO: 1215117 - RNA, 19 nt, Artificial Sequence
  Description of Artificial Sequence: Synthetic oligonucleotide
  Antisense strand to SEQ ID NO: 1215116
cuugccacaguaauaagag

SEQ ID NO: 1215118 - RNA, 19 nt, Artificial Sequence
  Description of Artificial Sequence: Synthetic oligonucleotide
  Sense strand starting at position 264 of SEQ ID NO: 917181
uggcaagugacacagucau

SEQ ID NO: 1215119 - RNA, 19 nt, Artificial Sequence
  Description of Artificial Sequence: Synthetic oligonucleotide
  Antisense strand to SEQ ID NO: 1215118
augacugugucacuugcca

SEQ ID NO: 1215120 - RNA, 19 nt, Artificial Sequence
  Description of Artificial Sequence: Synthetic oligonucleotide
  Sense strand starting at position 368 of SEQ ID NO: 917181
uccguaaugggauaacuuu

SEQ ID NO: 1215121 - RNA, 19 nt, Artificial Sequence
  Description of Artificial Sequence: Synthetic oligonucleotide
  Antisense strand to SEQ ID NO: 1215120
aaaguuaucccauuacgga

SEQ ID NO: 1215122 - RNA, 19 nt, Artificial Sequence
  Description of Artificial Sequence: Synthetic oligonucleotide
  Sense strand starting at position 383 of SEQ ID NO: 917181
cuuuaaauaugguucuaag

SEQ ID NO: 1215123 - RNA, 19 nt, Artificial Sequence
  Description of Artificial Sequence: Synthetic oligonucleotide
  Antisense strand to SEQ ID NO: 1215122
cuuagaaccauauuuaaag

SEQ ID NO: 1215124 - RNA, 19 nt, Artificial Sequence
  Description of Artificial Sequence: Synthetic oligonucleotide
  Sense strand starting at position 1250 of SEQ ID NO: 917181
gggaaucccuccugaggga

SEQ ID NO: 1215125 - RNA, 19 nt, Artificial Sequence
  Description of Artificial Sequence: Synthetic oligonucleotide
  Antisense strand to SEQ ID NO: 1215124
ucccucaggagggauuccc

SEQ ID NO: 1215126 - RNA, 19 nt, Artificial Sequence
  Description of Artificial Sequence: Synthetic oligonucleotide
  Sense strand starting at position 2637 of SEQ ID NO: 917181
gguacaugcgucugacaga

SEQ ID NO: 1215127 - RNA, 19 nt, Artificial Sequence
  Description of Artificial Sequence: Synthetic oligonucleotide
  Antisense strand to SEQ ID NO: 1215126
ucugucagacgcauguacc

SEQ ID NO: 1215128 - RNA, 19 nt, Artificial Sequence
  Description of Artificial Sequence: Synthetic oligonucleotide
  Sense strand starting at position 2697 of SEQ ID NO: 917181
gauggacacuuguaaagau

SEQ ID NO: 1215129 - RNA, 19 nt, Artificial Sequence
  Description of Artificial Sequence: Synthetic oligonucleotide
  Antisense strand to SEQ ID NO: 1215128
aucuuuacaaguguccauc

SEQ ID NO: 1215130 - RNA, 19 nt, Artificial Sequence
  Description of Artificial Sequence: Synthetic oligonucleotide
  Sense strand starting at position 2823 of SEQ ID NO: 917181
uuaccaagacguggugaau

SEQ ID NO: 1215131 - RNA, 19 nt, Artificial Sequence
  Description of Artificial Sequence: Synthetic oligonucleotide
  Antisense strand to SEQ ID NO: 1215130
auucaccacgucuugguaa

SEQ ID NO: 1215132 - RNA, 19 nt, Artificial Sequence
  Description of Artificial Sequence: Synthetic oligonucleotide
  Sense strand starting at position 2877 of SEQ ID NO: 917181
gaaugauucccaggcuugu

SEQ ID NO: 1215133 - RNA, 19 nt, Artificial Sequence
  Description of Artificial Sequence: Synthetic oligonucleotide
  Antisense strand to SEQ ID NO: 1215132
acaagccugggaaucauuc

SEQ ID NO: 1215134 - RNA, 19 nt, Artificial Sequence
  Description of Artificial Sequence: Synthetic oligonucleotide
  Sense strand starting at position 2888 of SEQ ID NO: 917181
aggcuuguaaucugggaaa

SEQ ID NO: 1215135 - RNA, 19 nt, Artificial Sequence
  Description of Artificial Sequence: Synthetic oligonucleotide
  Antisense strand to SEQ ID NO: 1215134
uuucccagauuacaagccu

SEQ ID NO: 1215136 - RNA, 19 nt, Artificial Sequence
  Description of Artificial Sequence: Synthetic oligonucleotide
  Sense strand starting at position 2968 of SEQ ID NO: 917181
ucuguugacaacuggguaa

SEQ ID NO: 1215137 - RNA, 19 nt, Artificial Sequence
  Description of Artificial Sequence: Synthetic oligonucleotide
  Antisense strand to SEQ ID NO: 1215136
uuacccaguugucaacaga

SEQ ID NO: 1215138 - RNA, 19 nt, Artificial Sequence
  Description of Artificial Sequence: Synthetic oligonucleotide
  Sense strand starting at position 2971 of SEQ ID NO: 917181
guugacaacuggguaaaga

SEQ ID NO: 1215139 - RNA, 19 nt, Artificial Sequence
  Description of Artificial Sequence: Synthetic oligonucleotide
  Antisense strand to SEQ ID NO: 1215138
ucuuuacccaguugucaac

SEQ ID NO: 1215140 - RNA, 19 nt, Artificial Sequence
  Description of Artificial Sequence: Synthetic oligonucleotide
  Sense strand starting at position 2980 of SEQ ID NO: 917181
uggguaaagauacguacuu

SEQ ID NO: 1215141 - RNA, 19 nt, Artificial Sequence
  Description of Artificial Sequence: Synthetic oligonucleotide
  Antisense strand to SEQ ID NO: 1215140
aaguacguaucuuuaccca

SEQ ID NO: 1215142 - RNA, 19 nt, Artificial Sequence
  Description of Artificial Sequence: Synthetic oligonucleotide
  Sense strand starting at position 2982 of SEQ ID NO: 917181
gguaaagauacguacuuga

SEQ ID NO: 1215143 - RNA, 19 nt, Artificial Sequence
  Description of Artificial Sequence: Synthetic oligonucleotide
  Antisense strand to SEQ ID NO: 1215142
ucaaguacguaucuuuacc

SEQ ID NO: 1215144 - RNA, 19 nt, Artificial Sequence
  Description of Artificial Sequence: Synthetic oligonucleotide
  Sense strand starting at position 2985 of SEQ ID NO: 917181
aaagauacguacuugauag

SEQ ID NO: 1215145 - RNA, 19 nt, Artificial Sequence
  Description of Artificial Sequence: Synthetic oligonucleotide
  Antisense strand to SEQ ID NO: 1215144
cuaucaaguacguaucuuu

SEQ ID NO: 1215146 - RNA, 19 nt, Artificial Sequence
  Description of Artificial Sequence: Synthetic oligonucleotide
  Sense strand starting at position 3028 of SEQ ID NO: 917181
ccagcaguugcuugguuaa

SEQ ID NO: 1215147 - RNA, 19 nt, Artificial Sequence
  Description of Artificial Sequence: Synthetic oligonucleotide
  Antisense strand to SEQ ID NO: 1215146
uuaaccaagcaacugcugg

SEQ ID NO: 1215148 - RNA, 19 nt, Artificial Sequence
  Description of Artificial Sequence: Synthetic oligonucleotide
  Sense strand starting at position 3030 of SEQ ID NO: 917181
agcaguugcuugguuaauu

SEQ ID NO: 1215149 - RNA, 19 nt, Artificial Sequence
  Description of Artificial Sequence: Synthetic oligonucleotide
  Antisense strand to SEQ ID NO: 1215148
aauuaaccaagcaacugcu

SEQ ID NO: 1215150 - RNA, 19 nt, Artificial Sequence
  Description of Artificial Sequence: Synthetic oligonucleotide
  Sense strand starting at position 3031 of SEQ ID NO: 917181
gcaguugcuugguuaauug

SEQ ID NO: 1215151 - RNA, 19 nt, Artificial Sequence
  Description of Artificial Sequence: Synthetic oligonucleotide
  Antisense strand to SEQ ID NO: 1215150
caauuaaccaagcaacugc

SEQ ID NO: 1215152 - RNA, 19 nt, Artificial Sequence
  Description of Artificial Sequence: Synthetic oligonucleotide
  Sense strand starting at position 3035 of SEQ ID NO: 917181
uugcuugguuaauugagaa

SEQ ID NO: 1215153 - RNA, 19 nt, Artificial Sequence
  Description of Artificial Sequence: Synthetic oligonucleotide
  Antisense strand to SEQ ID NO: 1215152
uucucaauuaaccaagcaa

SEQ ID NO: 1215154 - RNA, 19 nt, Artificial Sequence
  Description of Artificial Sequence: Synthetic oligonucleotide
  Sense strand starting at position 3072 of SEQ ID NO: 917181
ucacgaagaaauggaugua

SEQ ID NO: 1215155 - RNA, 19 nt, Artificial Sequence
  Description of Artificial Sequence: Synthetic oligonucleotide
  Antisense strand to SEQ ID NO: 1215154
uacauccauuucuucguga

SEQ ID NO: 1215156 - RNA, 19 nt, Artificial Sequence
  Description of Artificial Sequence: Synthetic oligonucleotide
  Sense strand starting at position 3075 of SEQ ID NO: 917181
cgaagaaauggauguaugu

SEQ ID NO: 1215157 - RNA, 19 nt, Artificial Sequence
  Description of Artificial Sequence: Synthetic oligonucleotide
  Antisense strand to SEQ ID NO: 1215156
acauacauccauuucuucg

SEQ ID NO: 1215158 - RNA, 19 nt, Artificial Sequence
  Description of Artificial Sequence: Synthetic oligonucleotide
  Sense strand starting at position 3222 of SEQ ID NO: 917181
ggccuaaucuuagcagacu

SEQ ID NO: 1215159 - RNA, 19 nt, Artificial Sequence
  Description of Artificial Sequence: Synthetic oligonucleotide
  Antisense strand to SEQ ID NO: 1215158
agucugcuaagauuaggcc

SEQ ID NO: 1215160 - RNA, 19 nt, Artificial Sequence
  Description of Artificial Sequence: Synthetic oligonucleotide
  Sense strand starting at position 3298 of SEQ ID NO: 917181
ccaauuugauacgauuauc

SEQ ID NO: 1215161 - RNA, 19 nt, Artificial Sequence
  Description of Artificial Sequence: Synthetic oligonucleotide
  Antisense strand to SEQ ID NO: 1215160
gauaaucguaucaaauugg

SEQ ID NO: 1215162 - RNA, 19 nt, Artificial Sequence
  Description of Artificial Sequence: Synthetic oligonucleotide
  Sense strand starting at position 3304 of SEQ ID NO: 917181
ugauacgauuaucuuuaga

SEQ ID NO: 1215163 - RNA, 19 nt, Artificial Sequence
  Description of Artificial Sequence: Synthetic oligonucleotide
  Antisense strand to SEQ ID NO: 1215162
ucuaaagauaaucguauca

SEQ ID NO: 1215164 - RNA, 19 nt, Artificial Sequence
  Description of Artificial Sequence: Synthetic oligonucleotide
  Sense strand starting at position 3588 of SEQ ID NO: 917181
ugcugaaagucgucaucau

SEQ ID NO: 1215165 - RNA, 19 nt, Artificial Sequence
  Description of Artificial Sequence: Synthetic oligonucleotide
  Antisense strand to SEQ ID NO: 1215164
augaugacgacuuucagca

SEQ ID NO: 1215166 - RNA, 19 nt, Artificial Sequence
  Description of Artificial Sequence: Synthetic oligonucleotide
  Sense strand starting at position 3589 of SEQ ID NO: 917181
gcugaaagucgucaucaua

SEQ ID NO: 1215167 - RNA, 19 nt, Artificial Sequence
  Description of Artificial Sequence: Synthetic oligonucleotide
  Antisense strand to SEQ ID NO: 1215166
uaugaugacgacuuucagc

SEQ ID NO: 1215168 - RNA, 19 nt, Artificial Sequence
  Description of Artificial Sequence: Synthetic oligonucleotide
  Sense strand starting at position 3592 of SEQ ID NO: 917181
gaaagucgucaucauaccu

SEQ ID NO: 1215169 - RNA, 19 nt, Artificial Sequence
  Description of Artificial Sequence: Synthetic oligonucleotide
  Antisense strand to SEQ ID NO: 1215168
agguaugaugacgacuuuc

SEQ ID NO: 1215170 - RNA, 19 nt, Artificial Sequence
  Description of Artificial Sequence: Synthetic oligonucleotide
  Sense strand starting at position 3599 of SEQ ID NO: 917181
gucaucauaccuugggcau

SEQ ID NO: 1215171 - RNA, 19 nt, Artificial Sequence
  Description of Artificial Sequence: Synthetic oligonucleotide
  Antisense strand to SEQ ID NO: 1215170
augcccaagguaugaugac

SEQ ID NO: 1215172 - RNA, 19 nt, Artificial Sequence
  Description of Artificial Sequence: Synthetic oligonucleotide
  Sense strand starting at position 3612 of SEQ ID NO: 917181
gggcaucagcucguguauu

SEQ ID NO: 1215173 - RNA, 19 nt, Artificial Sequence
  Description of Artificial Sequence: Synthetic oligonucleotide
  Antisense strand to SEQ ID NO: 1215172
aauacacgagcugaugccc

SEQ ID NO: 1215174 - RNA, 19 nt, Artificial Sequence
  Description of Artificial Sequence: Synthetic oligonucleotide
  Sense strand starting at position 3677 of SEQ ID NO: 917181
aagugagacugauaagcga

SEQ ID NO: 1215175 - RNA, 19 nt, Artificial Sequence
  Description of Artificial Sequence: Synthetic oligonucleotide
  Antisense strand to SEQ ID NO: 1215174
ucgcuuaucagucucacuu

SEQ ID NO: 1215176 - RNA, 19 nt, Artificial Sequence
  Description of Artificial Sequence: Synthetic oligonucleotide
  Sense strand starting at position 3697 of SEQ ID NO: 917181
cuucuacucuaugugugua

SEQ ID NO: 1215177 - RNA, 19 nt, Artificial Sequence
  Description of Artificial Sequence: Synthetic oligonucleotide
  Antisense strand to SEQ ID NO: 1215176
uacacacauagaguagaag

SEQ ID NO: 1215178 - RNA, 19 nt, Artificial Sequence
  Description of Artificial Sequence: Synthetic oligonucleotide
  Sense strand starting at position 3699 of SEQ ID NO: 917181
ucuacucuauguguguaaa

SEQ ID NO: 1215179 - RNA, 19 nt, Artificial Sequence
  Description of Artificial Sequence: Synthetic oligonucleotide
  Antisense strand to SEQ ID NO: 1215178
uuuacacacauagaguaga

SEQ ID NO: 1215180 - RNA, 19 nt, Artificial Sequence
  Description of Artificial Sequence: Synthetic oligonucleotide
  Sense strand starting at position 3700 of SEQ ID NO: 917181
cuacucuauguguguaaac

SEQ ID NO: 1215181 - RNA, 19 nt, Artificial Sequence
  Description of Artificial Sequence: Synthetic oligonucleotide
  Antisense strand to SEQ ID NO: 1215180
guuuacacacauagaguag

SEQ ID NO: 1215182 - RNA, 19 nt, Artificial Sequence
  Description of Artificial Sequence: Synthetic oligonucleotide
  Sense strand starting at position 3707 of SEQ ID NO: 917181
auguguguaaacugaaguu

SEQ ID NO: 1215183 - RNA, 19 nt, Artificial Sequence
  Description of Artificial Sequence: Synthetic oligonucleotide
  Antisense strand to SEQ ID NO: 1215182
aacuucaguuuacacacau

SEQ ID NO: 1215184 - RNA, 19 nt, Artificial Sequence
  Description of Artificial Sequence: Synthetic oligonucleotide
  Sense strand starting at position 3758 of SEQ ID NO: 917181
cugagacuccuucguaguc

SEQ ID NO: 1215185 - RNA, 19 nt, Artificial Sequence
  Description of Artificial Sequence: Synthetic oligonucleotide
  Antisense strand to SEQ ID NO: 1215184
gacuacgaaggagucucag

SEQ ID NO: 1215186 - RNA, 19 nt, Artificial Sequence
  Description of Artificial Sequence: Synthetic oligonucleotide
  Sense strand starting at position 3759 of SEQ ID NO: 917181
ugagacuccuucguaguca

SEQ ID NO: 1215187 - RNA, 19 nt, Artificial Sequence
  Description of Artificial Sequence: Synthetic oligonucleotide
  Antisense strand to SEQ ID NO: 1215186
ugacuacgaaggagucuca

SEQ ID NO: 1215188 - RNA, 19 nt, Artificial Sequence
  Description of Artificial Sequence: Synthetic oligonucleotide
  Sense strand starting at position 3854 of SEQ ID NO: 917181
auggacuucuauggagaug

SEQ ID NO: 1215189 - RNA, 19 nt, Artificial Sequence
  Description of Artificial Sequence: Synthetic oligonucleotide
  Antisense strand to SEQ ID NO: 1215188
caucuccauagaaguccau

SEQ ID NO: 1215190 - RNA, 19 nt, Artificial Sequence
  Description of Artificial Sequence: Synthetic oligonucleotide
  Sense strand starting at position 3859 of SEQ ID NO: 917181
cuucuauggagaugugcau

SEQ ID NO: 1215191 - RNA, 19 nt, Artificial Sequence
  Description of Artificial Sequence: Synthetic oligonucleotide
  Antisense strand to SEQ ID NO: 1215190
augcacaucuccauagaag

SEQ ID NO: 1215192 - RNA, 19 nt, Artificial Sequence
  Description of Artificial Sequence: Synthetic oligonucleotide
  Sense strand starting at position 3937 of SEQ ID NO: 917182
ccuccuaauucugauggau

SEQ ID NO: 1215193 - RNA, 19 nt, Artificial Sequence
  Description of Artificial Sequence: Synthetic oligonucleotide
  Antisense strand to SEQ ID NO: 1215192
auccaucagaauuaggagg

SEQ ID NO: 1215194 - RNA, 19 nt, Artificial Sequence
  Description of Artificial Sequence: Synthetic oligonucleotide
  Sense strand starting at position 11 of SEQ ID NO: 917182
augacacaucgugaccuaa

SEQ ID NO: 1215195 - RNA, 19 nt, Artificial Sequence
  Description of Artificial Sequence: Synthetic oligonucleotide
  Antisense strand to SEQ ID NO: 1215194
uuaggucacgaugugucau

SEQ ID NO: 1215196 - RNA, 19 nt, Artificial Sequence
  Description of Artificial Sequence: Synthetic oligonucleotide
  Sense strand starting at position 37 of SEQ ID NO: 917182
auauuagacuacugaauga

SEQ ID NO: 1215197 - RNA, 19 nt, Artificial Sequence
  Description of Artificial Sequence: Synthetic oligonucleotide
  Antisense strand to SEQ ID NO: 1215196
ucauucaguagucuaauau

SEQ ID NO: 1215198 - RNA, 19 nt, Artificial Sequence
  Description of Artificial Sequence: Synthetic oligonucleotide
  Sense strand starting at position 41 of SEQ ID NO: 917182
uagacuacugaaugaaugu

SEQ ID NO: 1215199 - RNA, 19 nt, Artificial Sequence
  Description of Artificial Sequence: Synthetic oligonucleotide
  Antisense strand to SEQ ID NO: 1215198
acauucauucaguagucua

SEQ ID NO: 1215200 - RNA, 19 nt, Artificial Sequence
  Description of Artificial Sequence: Synthetic oligonucleotide
  Sense strand starting at position 176 of SEQ ID NO: 917182
gcuaccaaaucuguuugaa

SEQ ID NO: 1215201 - RNA, 19 nt, Artificial Sequence
  Description of Artificial Sequence: Synthetic oligonucleotide
  Antisense strand to SEQ ID NO: 1215200
uucaaacagauuugguagc

SEQ ID NO: 1215202 - RNA, 19 nt, Artificial Sequence
  Description of Artificial Sequence: Synthetic oligonucleotide
  Sense strand starting at position 330 of SEQ ID NO: 917182
cucuuauuacuguggcaag

SEQ ID NO: 1215203 - RNA, 19 nt, Artificial Sequence
  Description of Artificial Sequence: Synthetic oligonucleotide
  Antisense strand to SEQ ID NO: 1215202
cuugccacaguaauaagag

SEQ ID NO: 1215204 - RNA, 19 nt, Artificial Sequence
  Description of Artificial Sequence: Synthetic oligonucleotide
  Sense strand starting at position 342 of SEQ ID NO: 917182
uggcaagugacacagucau

SEQ ID NO: 1215205 - RNA, 19 nt, Artificial Sequence
  Description of Artificial Sequence: Synthetic oligonucleotide
  Antisense strand to SEQ ID NO: 1215204
augacugugucacuugcca

SEQ ID NO: 1215206 - RNA, 19 nt, Artificial Sequence
  Description of Artificial Sequence: Synthetic oligonucleotide
  Sense strand starting at position 446 of SEQ ID NO: 917182
uccguaaugggauaacuuu

SEQ ID NO: 1215207 - RNA, 19 nt, Artificial Sequence
  Description of Artificial Sequence: Synthetic oligonucleotide
  Antisense strand to SEQ ID NO: 1215206
aaaguuaucccauuacgga

SEQ ID NO: 1215208 - RNA, 19 nt, Artificial Sequence
  Description of Artificial Sequence: Synthetic oligonucleotide
  Sense strand starting at position 461 of SEQ ID NO: 917182
cuuuaaauaugguucuaag

SEQ ID NO: 1215209 - RNA, 19 nt, Artificial Sequence
  Description of Artificial Sequence: Synthetic oligonucleotide
  Antisense strand to SEQ ID NO: 1215208
cuuagaaccauauuuaaag

SEQ ID NO: 1215210 - RNA, 19 nt, Artificial Sequence
  Description of Artificial Sequence: Synthetic oligonucleotide
  Sense strand starting at position 2715 of SEQ ID NO: 917182
gguacaugcgucugacaga

SEQ ID NO: 1215211 - RNA, 19 nt, Artificial Sequence
  Description of Artificial Sequence: Synthetic oligonucleotide
  Antisense strand to SEQ ID NO: 1215210
ucugucagacgcauguacc

SEQ ID NO: 1215212 - RNA, 19 nt, Artificial Sequence
  Description of Artificial Sequence: Synthetic oligonucleotide
  Sense strand starting at position 2775 of SEQ ID NO: 917182
gauggacacuuguaaagau

SEQ ID NO: 1215213 - RNA, 19 nt, Artificial Sequence
  Description of Artificial Sequence: Synthetic oligonucleotide
  Antisense strand to SEQ ID NO: 1215212
aucuuuacaaguguccauc

SEQ ID NO: 1215214 - RNA, 19 nt, Artificial Sequence
  Description of Artificial Sequence: Synthetic oligonucleotide
  Sense strand starting at position 2901 of SEQ ID NO: 917182
uuaccaagacguggugaau

SEQ ID NO: 1215215 - RNA, 19 nt, Artificial Sequence
  Description of Artificial Sequence: Synthetic oligonucleotide
  Antisense strand to SEQ ID NO: 1215214
auucaccacgucuugguaa

SEQ ID NO: 1215216 - RNA, 19 nt, Artificial Sequence
  Description of Artificial Sequence: Synthetic oligonucleotide
  Sense strand starting at position 2955 of SEQ ID NO: 917182
gaaugauucccaggcuugu

SEQ ID NO: 1215217 - RNA, 19 nt, Artificial Sequence
  Description of Artificial Sequence: Synthetic oligonucleotide
  Antisense strand to SEQ ID NO: 1215216
acaagccugggaaucauuc

SEQ ID NO: 1215218 - RNA, 19 nt, Artificial Sequence
  Description of Artificial Sequence: Synthetic oligonucleotide
  Sense strand starting at position 2966 of SEQ ID NO: 917182
aggcuuguaaucugggaaa

SEQ ID NO: 1215219 - RNA, 19 nt, Artificial Sequence
  Description of Artificial Sequence: Synthetic oligonucleotide
  Antisense strand to SEQ ID NO: 1215218
uuucccagauuacaagccu

SEQ ID NO: 1215220 - RNA, 19 nt, Artificial Sequence
  Description of Artificial Sequence: Synthetic oligonucleotide
  Sense strand starting at position 3046 of SEQ ID NO: 917182
ucuguugacaacuggguaa

SEQ ID NO: 1215221 - RNA, 19 nt, Artificial Sequence
  Description of Artificial Sequence: Synthetic oligonucleotide
  Antisense strand to SEQ ID NO: 1215220
uuacccaguugucaacaga

SEQ ID NO: 1215222 - RNA, 19 nt, Artificial Sequence
  Description of Artificial Sequence: Synthetic oligonucleotide
  Sense strand starting at position 3049 of SEQ ID NO: 917182
guugacaacuggguaaaga

SEQ ID NO: 1215223 - RNA, 19 nt, Artificial Sequence
  Description of Artificial Sequence: Synthetic oligonucleotide
  Antisense strand to SEQ ID NO: 1215222
ucuuuacccaguugucaac

SEQ ID NO: 1215224 - RNA, 19 nt, Artificial Sequence
  Description of Artificial Sequence: Synthetic oligonucleotide
  Sense strand starting at position 3058 of SEQ ID NO: 917182
uggguaaagauacguacuu

SEQ ID NO: 1215225 - RNA, 19 nt, Artificial Sequence
  Description of Artificial Sequence: Synthetic oligonucleotide
  Antisense strand to SEQ ID NO: 1215224
aaguacguaucuuuaccca

SEQ ID NO: 1215226 - RNA, 19 nt, Artificial Sequence
  Description of Artificial Sequence: Synthetic oligonucleotide
  Sense strand starting at position 3060 of SEQ ID NO: 917182
gguaaagauacguacuuga

SEQ ID NO: 1215227 - RNA, 19 nt, Artificial Sequence
  Description of Artificial Sequence: Synthetic oligonucleotide
  Antisense strand to SEQ ID NO: 1215226
ucaaguacguaucuuuacc

SEQ ID NO: 1215228 - RNA, 19 nt, Artificial Sequence
  Description of Artificial Sequence: Synthetic oligonucleotide
  Sense strand starting at position 3063 of SEQ ID NO: 917182
aaagauacguacuugauag

SEQ ID NO: 1215229 - RNA, 19 nt, Artificial Sequence
  Description of Artificial Sequence: Synthetic oligonucleotide
  Antisense strand to SEQ ID NO: 1215228
cuaucaaguacguaucuuu

SEQ ID NO: 1215230 - RNA, 19 nt, Artificial Sequence
  Description of Artificial Sequence: Synthetic oligonucleotide
  Sense strand starting at position 3106 of SEQ ID NO: 917182
ccagcaguugcuugguuaa

SEQ ID NO: 1215231 - RNA, 19 nt, Artificial Sequence
  Description of Artificial Sequence: Synthetic oligonucleotide
  Antisense strand to SEQ ID NO: 1215230
uuaaccaagcaacugcugg

SEQ ID NO: 1215232 - RNA, 19 nt, Artificial Sequence
  Description of Artificial Sequence: Synthetic oligonucleotide
  Sense strand starting at position 3108 of SEQ ID NO: 917182
agcaguugcuugguuaauu

SEQ ID NO: 1215233 - RNA, 19 nt, Artificial Sequence
  Description of Artificial Sequence: Synthetic oligonucleotide
  Antisense strand to SEQ ID NO: 1215232
aauuaaccaagcaacugcu

SEQ ID NO: 1215234 - RNA, 19 nt, Artificial Sequence
  Description of Artificial Sequence: Synthetic oligonucleotide
  Sense strand starting at position 3109 of SEQ ID NO: 917182
gcaguugcuugguuaauug

SEQ ID NO: 1215235 - RNA, 19 nt, Artificial Sequence
  Description of Artificial Sequence: Synthetic oligonucleotide
  Antisense strand to SEQ ID NO: 1215234
caauuaaccaagcaacugc

SEQ ID NO: 1215236 - RNA, 19 nt, Artificial Sequence
  Description of Artificial Sequence: Synthetic oligonucleotide
  Sense strand starting at position 3113 of SEQ ID NO: 917182
uugcuugguuaauugagaa

SEQ ID NO: 1215237 - RNA, 19 nt, Artificial Sequence
  Description of Artificial Sequence: Synthetic oligonucleotide
  Antisense strand to SEQ ID NO: 1215236
uucucaauuaaccaagcaa

SEQ ID NO: 1215238 - RNA, 19 nt, Artificial Sequence
  Description of Artificial Sequence: Synthetic oligonucleotide
  Sense strand starting at position 3150 of SEQ ID NO: 917182
ucacgaagaaauggaugua

SEQ ID NO: 1215239 - RNA, 19 nt, Artificial Sequence
  Description of Artificial Sequence: Synthetic oligonucleotide
  Antisense strand to SEQ ID NO: 1215238
uacauccauuucuucguga

SEQ ID NO: 1215240 - RNA, 19 nt, Artificial Sequence
  Description of Artificial Sequence: Synthetic oligonucleotide
  Sense strand starting at position 3153 of SEQ ID NO: 917182
cgaagaaauggauguaugu

SEQ ID NO: 1215241 - RNA, 19 nt, Artificial Sequence
  Description of Artificial Sequence: Synthetic oligonucleotide
  Antisense strand to SEQ ID NO: 1215240
acauacauccauuucuucg

SEQ ID NO: 1215242 - RNA, 19 nt, Artificial Sequence
  Description of Artificial Sequence: Synthetic oligonucleotide
  Sense strand starting at position 3300 of SEQ ID NO: 917182
ggccuaaucuuagcagacu

SEQ ID NO: 1215243 - RNA, 19 nt, Artificial Sequence
  Description of Artificial Sequence: Synthetic oligonucleotide
  Antisense strand to SEQ ID NO: 1215242
agucugcuaagauuaggcc

SEQ ID NO: 1215244 - RNA, 19 nt, Artificial Sequence
  Description of Artificial Sequence: Synthetic oligonucleotide
  Sense strand starting at position 3376 of SEQ ID NO: 917182
ccaauuugauacgauuauc

SEQ ID NO: 1215245 - RNA, 19 nt, Artificial Sequence
  Description of Artificial Sequence: Synthetic oligonucleotide
  Antisense strand to SEQ ID NO: 1215244
gauaaucguaucaaauugg

SEQ ID NO: 1215246 - RNA, 19 nt, Artificial Sequence
  Description of Artificial Sequence: Synthetic oligonucleotide
  Sense strand starting at position 3382 of SEQ ID NO: 917182
ugauacgauuaucuuuaga

SEQ ID NO: 1215247 - RNA, 19 nt, Artificial Sequence
  Description of Artificial Sequence: Synthetic oligonucleotide
  Antisense strand to SEQ ID NO: 1215246
ucuaaagauaaucguauca

SEQ ID NO: 1215248 - RNA, 19 nt, Artificial Sequence
  Description of Artificial Sequence: Synthetic oligonucleotide
  Sense strand starting at position 3666 of SEQ ID NO: 917182
ugcugaaagucgucaucau

SEQ ID NO: 1215249 - RNA, 19 nt, Artificial Sequence
  Description of Artificial Sequence: Synthetic oligonucleotide
  Antisense strand to SEQ ID NO: 1215248
augaugacgacuuucagca

SEQ ID NO: 1215250 - RNA, 19 nt, Artificial Sequence
  Description of Artificial Sequence: Synthetic oligonucleotide
  Sense strand starting at position 3667 of SEQ ID NO: 917182
gcugaaagucgucaucaua

SEQ ID NO: 1215251 - RNA, 19 nt, Artificial Sequence
  Description of Artificial Sequence: Synthetic oligonucleotide
  Antisense strand to SEQ ID NO: 1215250
uaugaugacgacuuucagc

SEQ ID NO: 1215252 - RNA, 19 nt, Artificial Sequence
  Description of Artificial Sequence: Synthetic oligonucleotide
  Sense strand starting at position 3670 of SEQ ID NO: 917182
gaaagucgucaucauaccu

SEQ ID NO: 1215253 - RNA, 19 nt, Artificial Sequence
  Description of Artificial Sequence: Synthetic oligonucleotide
  Antisense strand to SEQ ID NO: 1215252
agguaugaugacgacuuuc

SEQ ID NO: 1215254 - RNA, 19 nt, Artificial Sequence
  Description of Artificial Sequence: Synthetic oligonucleotide
  Sense strand starting at position 3677 of SEQ ID NO: 917182
gucaucauaccuugggcau

SEQ ID NO: 1215255 - RNA, 19 nt, Artificial Sequence
  Description of Artificial Sequence: Synthetic oligonucleotide
  Antisense strand to SEQ ID NO: 1215254
augcccaagguaugaugac

SEQ ID NO: 1215256 - RNA, 19 nt, Artificial Sequence
  Description of Artificial Sequence: Synthetic oligonucleotide
  Sense strand starting at position 3690 of SEQ ID NO: 917182
gggcaucagcucguguauu

SEQ ID NO: 1215257 - RNA, 19 nt, Artificial Sequence
  Description of Artificial Sequence: Synthetic oligonucleotide
  Antisense strand to SEQ ID NO: 1215256
aauacacgagcugaugccc

SEQ ID NO: 1215258 - RNA, 19 nt, Artificial Sequence
  Description of Artificial Sequence: Synthetic oligonucleotide
  Sense strand starting at position 3775 of SEQ ID NO: 917182
cuucuacucuaugugugua

SEQ ID NO: 1215259 - RNA, 19 nt, Artificial Sequence
  Description of Artificial Sequence: Synthetic oligonucleotide
  Antisense strand to SEQ ID NO: 1215258
uacacacauagaguagaag

SEQ ID NO: 1215260 - RNA, 19 nt, Artificial Sequence
  Description of Artificial Sequence: Synthetic oligonucleotide
  Sense strand starting at position 3777 of SEQ ID NO: 917182
ucuacucuauguguguaaa

SEQ ID NO: 1215261 - RNA, 19 nt, Artificial Sequence
  Description of Artificial Sequence: Synthetic oligonucleotide
  Antisense strand to SEQ ID NO: 1215260
uuuacacacauagaguaga

SEQ ID NO: 1215262 - RNA, 19 nt, Artificial Sequence
  Description of Artificial Sequence: Synthetic oligonucleotide
  Sense strand starting at position 3778 of SEQ ID NO: 917182
cuacucuauguguguaaac

SEQ ID NO: 1215263 - RNA, 19 nt, Artificial Sequence
  Description of Artificial Sequence: Synthetic oligonucleotide
  Antisense strand to SEQ ID NO: 1215262
guuuacacacauagaguag

SEQ ID NO: 1215264 - RNA, 19 nt, Artificial Sequence
  Description of Artificial Sequence: Synthetic oligonucleotide
  Sense strand starting at position 3785 of SEQ ID NO: 917182
auguguguaaacugaaguu

SEQ ID NO: 1215265 - RNA, 19 nt, Artificial Sequence
  Description of Artificial Sequence: Synthetic oligonucleotide
  Antisense strand to SEQ ID NO: 1215264
aacuucaguuuacacacau

SEQ ID NO: 1215266 - RNA, 19 nt, Artificial Sequence
  Description of Artificial Sequence: Synthetic oligonucleotide
  Sense strand starting at position 3836 of SEQ ID NO: 917182
cugagacuccuucguaguc

SEQ ID NO: 1215267 - RNA, 19 nt, Artificial Sequence
  Description of Artificial Sequence: Synthetic oligonucleotide
  Antisense strand to SEQ ID NO: 1215266
gacuacgaaggagucucag

SEQ ID NO: 1215268 - RNA, 19 nt, Artificial Sequence
  Description of Artificial Sequence: Synthetic oligonucleotide
  Sense strand starting at position 3837 of SEQ ID NO: 917182
ugagacuccuucguaguca

SEQ ID NO: 1215269 - RNA, 19 nt, Artificial Sequence
  Description of Artificial Sequence: Synthetic oligonucleotide
  Antisense strand to SEQ ID NO: 1215268
ugacuacgaaggagucuca

SEQ ID NO: 1215270 - RNA, 19 nt, Artificial Sequence
  Description of Artificial Sequence: Synthetic oligonucleotide
  Sense strand starting at position 3932 of SEQ ID NO: 917182
auggacuucuauggagaug

SEQ ID NO: 1215271 - RNA, 19 nt, Artificial Sequence
  Description of Artificial Sequence: Synthetic oligonucleotide
  Antisense strand to SEQ ID NO: 1215270
caucuccauagaaguccau

SEQ ID NO: 1215272 - RNA, 19 nt, Artificial Sequence
  Description of Artificial Sequence: Synthetic oligonucleotide
  Sense strand starting at position 3937 of SEQ ID NO: 917183
cuucuauggagaugugcau

SEQ ID NO: 1215273 - RNA, 19 nt, Artificial Sequence
  Description of Artificial Sequence: Synthetic oligonucleotide
  Antisense strand to SEQ ID NO: 1215272
augcacaucuccauagaag

SEQ ID NO: 1215274 - RNA, 19 nt, Artificial Sequence
  Description of Artificial Sequence: Synthetic oligonucleotide
  Sense strand starting at position 1991 of SEQ ID NO: 917183
cucuccaugcuggguuaaa

SEQ ID NO: 1215275 - RNA, 19 nt, Artificial Sequence
  Description of Artificial Sequence: Synthetic oligonucleotide
  Antisense strand to SEQ ID NO: 1215274
uuuaacccagcauggagag

SEQ ID NO: 1215276 - RNA, 19 nt, Artificial Sequence
  Description of Artificial Sequence: Synthetic oligonucleotide
  Sense strand starting at position 2140 of SEQ ID NO: 917183
ugguuaagucuuuacuaca

SEQ ID NO: 1215277 - RNA, 19 nt, Artificial Sequence
  Description of Artificial Sequence: Synthetic oligonucleotide
  Antisense strand to SEQ ID NO: 1215276
uguaguaaagacuuaacca

SEQ ID NO: 1215278 - RNA, 19 nt, Artificial Sequence
  Description of Artificial Sequence: Synthetic oligonucleotide
  Sense strand starting at position 2214 of SEQ ID NO: 917183
gccauuaauuuguuugguu

SEQ ID NO: 1215279 - RNA, 19 nt, Artificial Sequence
  Description of Artificial Sequence: Synthetic oligonucleotide
  Antisense strand to SEQ ID NO: 1215278
aaccaaacaaauuaauggc

SEQ ID NO: 1215280 - RNA, 19 nt, Artificial Sequence
  Description of Artificial Sequence: Synthetic oligonucleotide
  Sense strand starting at position 2271 of SEQ ID NO: 917183
ugacccuguugacaugaau

SEQ ID NO: 1215281 - RNA, 19 nt, Artificial Sequence
  Description of Artificial Sequence: Synthetic oligonucleotide
  Antisense strand to SEQ ID NO: 1215280
auucaugucaacaggguca

SEQ ID NO: 1215282 - RNA, 19 nt, Artificial Sequence
  Description of Artificial Sequence: Synthetic oligonucleotide
  Sense strand starting at position 2408 of SEQ ID NO: 917183
aguauucuauguccagcaa

SEQ ID NO: 1215283 - RNA, 19 nt, Artificial Sequence
  Description of Artificial Sequence: Synthetic oligonucleotide
  Antisense strand to SEQ ID NO: 1215282
uugcuggacauagaauacu

SEQ ID NO: 1215284 - RNA, 19 nt, Artificial Sequence
  Description of Artificial Sequence: Synthetic oligonucleotide
  Sense strand starting at position 2409 of SEQ ID NO: 917183
guauucuauguccagcaaa

SEQ ID NO: 1215285 - RNA, 19 nt, Artificial Sequence
  Description of Artificial Sequence: Synthetic oligonucleotide
  Antisense strand to SEQ ID NO: 1215284
uuugcuggacauagaauac

SEQ ID NO: 1215286 - RNA, 19 nt, Artificial Sequence
  Description of Artificial Sequence: Synthetic oligonucleotide
  Sense strand starting at position 2481 of SEQ ID NO: 917183
agacuuugcugccagcaga

SEQ ID NO: 1215287 - RNA, 19 nt, Artificial Sequence
  Description of Artificial Sequence: Synthetic oligonucleotide
  Antisense strand to SEQ ID NO: 1215286
ucugcuggcagcaaagucu

SEQ ID NO: 1215288 - RNA, 19 nt, Artificial Sequence
  Description of Artificial Sequence: Synthetic oligonucleotide
  Sense strand starting at position 2977 of SEQ ID NO: 917183
uuuagagucuaaguuacau

SEQ ID NO: 1215289 - RNA, 19 nt, Artificial Sequence
  Description of Artificial Sequence: Synthetic oligonucleotide
  Antisense strand to SEQ ID NO: 1215288
auguaacuuagacucuaaa

SEQ ID NO: 1215290 - RNA, 19 nt, Artificial Sequence
  Description of Artificial Sequence: Synthetic oligonucleotide
  Sense strand starting at position 3016 of SEQ ID NO: 917183
cauuaaugcugccugaugu

SEQ ID NO: 1215291 - RNA, 19 nt, Artificial Sequence
  Description of Artificial Sequence: Synthetic oligonucleotide
  Antisense strand to SEQ ID NO: 1215290
acaucaggcagcauuaaug

SEQ ID NO: 1215292 - RNA, 19 nt, Artificial Sequence
  Description of Artificial Sequence: Synthetic oligonucleotide
  Sense strand starting at position 3053 of SEQ ID NO: 917183
aggaauuauugagauaguu

SEQ ID NO: 1215293 - RNA, 19 nt, Artificial Sequence
  Description of Artificial Sequence: Synthetic oligonucleotide
  Antisense strand to SEQ ID NO: 1215292
aacuaucucaauaauuccu

SEQ ID NO: 1215294 - RNA, 19 nt, Artificial Sequence
  Description of Artificial Sequence: Synthetic oligonucleotide
  Sense strand starting at position 3142 of SEQ ID NO: 917183
guagaaugaugaugcuaau

SEQ ID NO: 1215295 - RNA, 19 nt, Artificial Sequence
  Description of Artificial Sequence: Synthetic oligonucleotide
  Antisense strand to SEQ ID NO: 1215294
auuagcaucaucauucuac

SEQ ID NO: 1215296 - RNA, 19 nt, Artificial Sequence
  Description of Artificial Sequence: Synthetic oligonucleotide
  Sense strand starting at position 3145 of SEQ ID NO: 917183
gaaugaugaugcuaauaga

SEQ ID NO: 1215297 - RNA, 19 nt, Artificial Sequence
  Description of Artificial Sequence: Synthetic oligonucleotide
  Antisense strand to SEQ ID NO: 1215296
ucuauuagcaucaucauuc

SEQ ID NO: 1215298 - RNA, 19 nt, Artificial Sequence
  Description of Artificial Sequence: Synthetic oligonucleotide
  Sense strand starting at position 3148 of SEQ ID NO: 917183
ugaugaugcuaauagacua

SEQ ID NO: 1215299 - RNA, 19 nt, Artificial Sequence
  Description of Artificial Sequence: Synthetic oligonucleotide
  Antisense strand to SEQ ID NO: 1215298
uagucuauuagcaucauca

SEQ ID NO: 1215300 - RNA, 19 nt, Artificial Sequence
  Description of Artificial Sequence: Synthetic oligonucleotide
  Sense strand starting at position 3474 of SEQ ID NO: 917183
cgaauuauguaccgccuau

SEQ ID NO: 1215301 - RNA, 19 nt, Artificial Sequence
  Description of Artificial Sequence: Synthetic oligonucleotide
  Antisense strand to SEQ ID NO: 1215300
auaggcgguacauaauucg

SEQ ID NO: 1215302 - RNA, 19 nt, Artificial Sequence
  Description of Artificial Sequence: Synthetic oligonucleotide
  Sense strand starting at position 3478 of SEQ ID NO: 917183
uuauguaccgccuauaaca

SEQ ID NO: 1215303 - RNA, 19 nt, Artificial Sequence
  Description of Artificial Sequence: Synthetic oligonucleotide
  Antisense strand to SEQ ID NO: 1215302
uguuauaggcgguacauaa

SEQ ID NO: 1215304 - RNA, 19 nt, Artificial Sequence
  Description of Artificial Sequence: Synthetic oligonucleotide
  Sense strand starting at position 3509 of SEQ ID NO: 917183
agcaguauuggcugguuga

SEQ ID NO: 1215305 - RNA, 19 nt, Artificial Sequence
  Description of Artificial Sequence: Synthetic oligonucleotide
  Antisense strand to SEQ ID NO: 1215304
ucaaccagccaauacugcu

SEQ ID NO: 1215306 - RNA, 19 nt, Artificial Sequence
  Description of Artificial Sequence: Synthetic oligonucleotide
  Sense strand starting at position 3510 of SEQ ID NO: 917183
gcaguauuggcugguugaa

SEQ ID NO: 1215307 - RNA, 19 nt, Artificial Sequence
  Description of Artificial Sequence: Synthetic oligonucleotide
  Antisense strand to SEQ ID NO: 1215306
uucaaccagccaauacugc

SEQ ID NO: 1215308 - RNA, 19 nt, Artificial Sequence
  Description of Artificial Sequence: Synthetic oligonucleotide
  Sense strand starting at position 3512 of SEQ ID NO: 917183
aguauuggcugguugaaag

SEQ ID NO: 1215309 - RNA, 19 nt, Artificial Sequence
  Description of Artificial Sequence: Synthetic oligonucleotide
  Antisense strand to SEQ ID NO: 1215308
cuuucaaccagccaauacu

SEQ ID NO: 1215310 - RNA, 19 nt, Artificial Sequence
  Description of Artificial Sequence: Synthetic oligonucleotide
  Sense strand starting at position 3613 of SEQ ID NO: 917183
agcaaaugacauugccaga

SEQ ID NO: 1215311 - RNA, 19 nt, Artificial Sequence
  Description of Artificial Sequence: Synthetic oligonucleotide
  Antisense strand to SEQ ID NO: 1215310
ucuggcaaugucauuugcu

SEQ ID NO: 1215312 - RNA, 19 nt, Artificial Sequence
  Description of Artificial Sequence: Synthetic oligonucleotide
  Sense strand starting at position 3696 of SEQ ID NO: 917183
auggguaugcgccaaacaa

SEQ ID NO: 1215313 - RNA, 19 nt, Artificial Sequence
  Description of Artificial Sequence: Synthetic oligonucleotide
  Antisense strand to SEQ ID NO: 1215312
uuguuuggcgcauacccau

SEQ ID NO: 1215314 - RNA, 19 nt, Artificial Sequence
  Description of Artificial Sequence: Synthetic oligonucleotide
  Sense strand starting at position 3756 of SEQ ID NO: 917183
agagauauuuagugacuuc

SEQ ID NO: 1215315 - RNA, 19 nt, Artificial Sequence
  Description of Artificial Sequence: Synthetic oligonucleotide
  Antisense strand to SEQ ID NO: 1215314
gaagucacuaaauaucucu

SEQ ID NO: 1215316 - RNA, 19 nt, Artificial Sequence
  Description of Artificial Sequence: Synthetic oligonucleotide
  Sense strand starting at position 3859 of SEQ ID NO: 917183
ggaucaaauugacauguau

SEQ ID NO: 1215317 - RNA, 19 nt, Artificial Sequence
  Description of Artificial Sequence: Synthetic oligonucleotide
  Antisense strand to SEQ ID NO: 1215316
auacaugucaauuugaucc

SEQ ID NO: 1215318 - RNA, 19 nt, Artificial Sequence
  Description of Artificial Sequence: Synthetic oligonucleotide
  Sense strand starting at position 3947 of SEQ ID NO: 917184
accacauccugggacauaa

SEQ ID NO: 1215319 - RNA, 19 nt, Artificial Sequence
  Description of Artificial Sequence: Synthetic oligonucleotide
  Antisense strand to SEQ ID NO: 1215318
uuaugucccaggauguggu

SEQ ID NO: 1215320 - RNA, 19 nt, Artificial Sequence
  Description of Artificial Sequence: Synthetic oligonucleotide
  Sense strand starting at position 762 of SEQ ID NO: 917184
gaaguccuuccuggagaug

SEQ ID NO: 1215321 - RNA, 19 nt, Artificial Sequence
  Description of Artificial Sequence: Synthetic oligonucleotide
  Antisense strand to SEQ ID NO: 1215320
caucuccaggaaggacuuc

SEQ ID NO: 1215322 - RNA, 19 nt, Artificial Sequence
  Description of Artificial Sequence: Synthetic oligonucleotide
  Sense strand starting at position 765 of SEQ ID NO: 917184
guccuuccuggagaugagu

SEQ ID NO: 1215323 - RNA, 19 nt, Artificial Sequence
  Description of Artificial Sequence: Synthetic oligonucleotide
  Antisense strand to SEQ ID NO: 1215322
acucaucuccaggaaggac

SEQ ID NO: 1215324 - RNA, 19 nt, Artificial Sequence
  Description of Artificial Sequence: Synthetic oligonucleotide
  Sense strand starting at position 860 of SEQ ID NO: 917184
gcgugaucuccagccgcuu

SEQ ID NO: 1215325 - RNA, 19 nt, Artificial Sequence
  Description of Artificial Sequence: Synthetic oligonucleotide
  Antisense strand to SEQ ID NO: 1215324
aagcggcuggagaucacgc

SEQ ID NO: 1215326 - RNA, 19 nt, Artificial Sequence
  Description of Artificial Sequence: Synthetic oligonucleotide
  Sense strand starting at position 884 of SEQ ID NO: 917184
ugguguagaccguaugcaa

SEQ ID NO: 1215327 - RNA, 19 nt, Artificial Sequence
  Description of Artificial Sequence: Synthetic oligonucleotide
  Antisense strand to SEQ ID NO: 1215326
uugcauacggucuacacca

SEQ ID NO: 1215328 - RNA, 19 nt, Artificial Sequence
  Description of Artificial Sequence: Synthetic oligonucleotide
  Sense strand starting at position 1503 of SEQ ID NO: 917184
ggaagcagacguggagauu

SEQ ID NO: 1215329 - RNA, 19 nt, Artificial Sequence
  Description of Artificial Sequence: Synthetic oligonucleotide
  Antisense strand to SEQ ID NO: 1215328
aaucuccacgucugcuucc

SEQ ID NO: 1215330 - RNA, 19 nt, Artificial Sequence
  Description of Artificial Sequence: Synthetic oligonucleotide
  Sense strand starting at position 1978 of SEQ ID NO: 917184
uggcaaguacauugaucaa

SEQ ID NO: 1215331 - RNA, 19 nt, Artificial Sequence
  Description of Artificial Sequence: Synthetic oligonucleotide
  Antisense strand to SEQ ID NO: 1215330
uugaucaauguacuugcca

SEQ ID NO: 1215332 - RNA, 19 nt, Artificial Sequence
  Description of Artificial Sequence: Synthetic oligonucleotide
  Sense strand starting at position 2085 of SEQ ID NO: 917184
ggaggagcuccggaaacuu

SEQ ID NO: 1215333 - RNA, 19 nt, Artificial Sequence
  Description of Artificial Sequence: Synthetic oligonucleotide
  Antisense strand to SEQ ID NO: 1215332
aaguuuccggagcuccucc

SEQ ID NO: 1215334 - RNA, 19 nt, Artificial Sequence
  Description of Artificial Sequence: Synthetic oligonucleotide
  Sense strand starting at position 2337 of SEQ ID NO: 917184
uacuacuaccguuagauug

SEQ ID NO: 1215335 - RNA, 19 nt, Artificial Sequence
  Description of Artificial Sequence: Synthetic oligonucleotide
  Antisense strand to SEQ ID NO: 1215334
caaucuaacgguaguagua

SEQ ID NO: 1215336 - RNA, 19 nt, Artificial Sequence
  Description of Artificial Sequence: Synthetic oligonucleotide
  Sense strand starting at position 2593 of SEQ ID NO: 917184
ugcaucugauuguuuauuu

SEQ ID NO: 1215337 - RNA, 19 nt, Artificial Sequence
  Description of Artificial Sequence: Synthetic oligonucleotide
  Antisense strand to SEQ ID NO: 1215336
aaauaaacaaucagaugca

SEQ ID NO: 1215338 - RNA, 19 nt, Artificial Sequence
  Description of Artificial Sequence: Synthetic oligonucleotide
  Sense strand starting at position 2674 of SEQ ID NO: 917184
agaagaaagucaguccgaa

SEQ ID NO: 1215339 - RNA, 19 nt, Artificial Sequence
  Description of Artificial Sequence: Synthetic oligonucleotide
  Antisense strand to SEQ ID NO: 1215338
uucggacugacuuucuucu

SEQ ID NO: 1215340 - RNA, 19 nt, Artificial Sequence
  Description of Artificial Sequence: Synthetic oligonucleotide
  Sense strand starting at position 2687 of SEQ ID NO: 917184
uccgaaaucgcuuaagaau

SEQ ID NO: 1215341 - RNA, 19 nt, Artificial Sequence
  Description of Artificial Sequence: Synthetic oligonucleotide
  Antisense strand to SEQ ID NO: 1215340
auucuuaagcgauuucgga

SEQ ID NO: 1215342 - RNA, 19 nt, Artificial Sequence
  Description of Artificial Sequence: Synthetic oligonucleotide
  Sense strand starting at position 2706 of SEQ ID NO: 917184
aauggaaagcucuguauuc

SEQ ID NO: 1215343 - RNA, 19 nt, Artificial Sequence
  Description of Artificial Sequence: Synthetic oligonucleotide
  Antisense strand to SEQ ID NO: 1215342
gaauacagagcuuuccauu

SEQ ID NO: 1215344 - RNA, 19 nt, Artificial Sequence
  Description of Artificial Sequence: Synthetic oligonucleotide
  Sense strand starting at position 2735 of SEQ ID NO: 917184
uuccuaauagguuguggaa

SEQ ID NO: 1215345 - RNA, 19 nt, Artificial Sequence
  Description of Artificial Sequence: Synthetic oligonucleotide
  Antisense strand to SEQ ID NO: 1215344
uuccacaaccuauuaggaa

SEQ ID NO: 1215346 - RNA, 19 nt, Artificial Sequence
  Description of Artificial Sequence: Synthetic oligonucleotide
  Sense strand starting at position 2754 of SEQ ID NO: 917184
agaaaugcuugccuugaug

SEQ ID NO: 1215347 - RNA, 19 nt, Artificial Sequence
  Description of Artificial Sequence: Synthetic oligonucleotide
  Antisense strand to SEQ ID NO: 1215346
caucaaggcaagcauuucu

SEQ ID NO: 1215348 - RNA, 19 nt, Artificial Sequence
  Description of Artificial Sequence: Synthetic oligonucleotide
  Sense strand starting at position 2763 of SEQ ID NO: 917184
ugccuugauguggaugauu

SEQ ID NO: 1215349 - RNA, 19 nt, Artificial Sequence
  Description of Artificial Sequence: Synthetic oligonucleotide
  Antisense strand to SEQ ID NO: 1215348
aaucauccacaucaaggca

SEQ ID NO: 1215350 - RNA, 19 nt, Artificial Sequence
  Description of Artificial Sequence: Synthetic oligonucleotide
  Sense strand starting at position 2772 of SEQ ID NO: 917184
guggaugauuuagaauaac

SEQ ID NO: 1215351 - RNA, 19 nt, Artificial Sequence
  Description of Artificial Sequence: Synthetic oligonucleotide
  Antisense strand to SEQ ID NO: 1215350
guuauucuaaaucauccac

SEQ ID NO: 1215352 - RNA, 19 nt, Artificial Sequence
  Description of Artificial Sequence: Synthetic oligonucleotide
  Sense strand starting at position 2824 of SEQ ID NO: 917184
cuguuaaaccuagagcuau

SEQ ID NO: 1215353 - RNA, 19 nt, Artificial Sequence
  Description of Artificial Sequence: Synthetic oligonucleotide
  Antisense strand to SEQ ID NO: 1215352
auagcucuagguuuaacag

SEQ ID NO: 1215354 - RNA, 19 nt, Artificial Sequence
  Description of Artificial Sequence: Synthetic oligonucleotide
  Sense strand starting at position 2921 of SEQ ID NO: 917184
ugucuuacacaguaaccaa

SEQ ID NO: 1215355 - RNA, 19 nt, Artificial Sequence
  Description of Artificial Sequence: Synthetic oligonucleotide
  Antisense strand to SEQ ID NO: 1215354
uugguuacuguguaagaca

SEQ ID NO: 1215356 - RNA, 19 nt, Artificial Sequence
  Description of Artificial Sequence: Synthetic oligonucleotide
  Sense strand starting at position 3115 of SEQ ID NO: 917184
cucacuaguugacuuguaa

SEQ ID NO: 1215357 - RNA, 19 nt, Artificial Sequence
  Description of Artificial Sequence: Synthetic oligonucleotide
  Antisense strand to SEQ ID NO: 1215356
uuacaagucaacuagugag

SEQ ID NO: 1215358 - RNA, 19 nt, Artificial Sequence
  Description of Artificial Sequence: Synthetic oligonucleotide
  Sense strand starting at position 3127 of SEQ ID NO: 917184
cuuguaaagacuuggguag

SEQ ID NO: 1215359 - RNA, 19 nt, Artificial Sequence
  Description of Artificial Sequence: Synthetic oligonucleotide
  Antisense strand to SEQ ID NO: 1215358
cuacccaagucuuuacaag

SEQ ID NO: 1215360 - RNA, 19 nt, Artificial Sequence
  Description of Artificial Sequence: Synthetic oligonucleotide
  Sense strand starting at position 3157 of SEQ ID NO: 917184
acaacaugaggcugaguuu

SEQ ID NO: 1215361 - RNA, 19 nt, Artificial Sequence
  Description of Artificial Sequence: Synthetic oligonucleotide
  Antisense strand to SEQ ID NO: 1215360
aaacucagccucauguugu

SEQ ID NO: 1215362 - RNA, 19 nt, Artificial Sequence
  Description of Artificial Sequence: Synthetic oligonucleotide
  Sense strand starting at position 3158 of SEQ ID NO: 917184
caacaugaggcugaguuua

SEQ ID NO: 1215363 - RNA, 19 nt, Artificial Sequence
  Description of Artificial Sequence: Synthetic oligonucleotide
  Antisense strand to SEQ ID NO: 1215362
uaaacucagccucauguug

SEQ ID NO: 1215364 - RNA, 19 nt, Artificial Sequence
  Description of Artificial Sequence: Synthetic oligonucleotide
  Sense strand starting at position 3160 of SEQ ID NO: 917184
acaugaggcugaguuuaga

SEQ ID NO: 1215365 - RNA, 19 nt, Artificial Sequence
  Description of Artificial Sequence: Synthetic oligonucleotide
  Antisense strand to SEQ ID NO: 1215364
ucuaaacucagccucaugu

SEQ ID NO: 1215366 - RNA, 19 nt, Artificial Sequence
  Description of Artificial Sequence: Synthetic oligonucleotide
  Sense strand starting at position 3168 of SEQ ID NO: 917184
cugaguuuagacugacucu

SEQ ID NO: 1215367 - RNA, 19 nt, Artificial Sequence
  Description of Artificial Sequence: Synthetic oligonucleotide
  Antisense strand to SEQ ID NO: 1215366
agagucagucuaaacucag

SEQ ID NO: 1215368 - RNA, 19 nt, Artificial Sequence
  Description of Artificial Sequence: Synthetic oligonucleotide
  Sense strand starting at position 3171 of SEQ ID NO: 917184
aguuuagacugacucuauu

SEQ ID NO: 1215369 - RNA, 19 nt, Artificial Sequence
  Description of Artificial Sequence: Synthetic oligonucleotide
  Antisense strand to SEQ ID NO: 1215368
aauagagucagucuaaacu

SEQ ID NO: 1215370 - RNA, 19 nt, Artificial Sequence
  Description of Artificial Sequence: Synthetic oligonucleotide
  Sense strand starting at position 3273 of SEQ ID NO: 917184
ucauuugaauaugggucaa

SEQ ID NO: 1215371 - RNA, 19 nt, Artificial Sequence
  Description of Artificial Sequence: Synthetic oligonucleotide
  Antisense strand to SEQ ID NO: 1215370
uugacccauauucaaauga

SEQ ID NO: 1215372 - RNA, 19 nt, Artificial Sequence
  Description of Artificial Sequence: Synthetic oligonucleotide
  Sense strand starting at position 3302 of SEQ ID NO: 917184
ugcucaugucuccaaguau

SEQ ID NO: 1215373 - RNA, 19 nt, Artificial Sequence
  Description of Artificial Sequence: Synthetic oligonucleotide
  Antisense strand to SEQ ID NO: 1215372
auacuuggagacaugagca

SEQ ID NO: 1215374 - RNA, 19 nt, Artificial Sequence
  Description of Artificial Sequence: Synthetic oligonucleotide
  Sense strand starting at position 3323 of SEQ ID NO: 917184
ucaauuaguuagccuuuga

SEQ ID NO: 1215375 - RNA, 19 nt, Artificial Sequence
  Description of Artificial Sequence: Synthetic oligonucleotide
  Antisense strand to SEQ ID NO: 1215374
ucaaaggcuaacuaauuga

SEQ ID NO: 1215376 - RNA, 19 nt, Artificial Sequence
  Description of Artificial Sequence: Synthetic oligonucleotide
  Sense strand starting at position 3468 of SEQ ID NO: 917184
cauucugguguugaaauga

SEQ ID NO: 1215377 - RNA, 19 nt, Artificial Sequence
  Description of Artificial Sequence: Synthetic oligonucleotide
  Antisense strand to SEQ ID NO: 1215376
ucauuucaacaccagaaug

SEQ ID NO: 1215378 - RNA, 19 nt, Artificial Sequence
  Description of Artificial Sequence: Synthetic oligonucleotide
  Sense strand starting at position 3511 of SEQ ID NO: 917184
gccuuugaacucugugaau

SEQ ID NO: 1215379 - RNA, 19 nt, Artificial Sequence
  Description of Artificial Sequence: Synthetic oligonucleotide
  Antisense strand to SEQ ID NO: 1215378
auucacagaguucaaaggc

SEQ ID NO: 1215380 - RNA, 19 nt, Artificial Sequence
  Description of Artificial Sequence: Synthetic oligonucleotide
  Sense strand starting at position 3546 of SEQ ID NO: 917184
gcaggaacugucuaccgaa

SEQ ID NO: 1215381 - RNA, 19 nt, Artificial Sequence
  Description of Artificial Sequence: Synthetic oligonucleotide
  Antisense strand to SEQ ID NO: 1215380
uucgguagacaguuccugc

SEQ ID NO: 1215382 - RNA, 19 nt, Artificial Sequence
  Description of Artificial Sequence: Synthetic oligonucleotide
  Sense strand starting at position 3586 of SEQ ID NO: 917184
gacuaauuaguguaugauu

SEQ ID NO: 1215383 - RNA, 19 nt, Artificial Sequence
  Description of Artificial Sequence: Synthetic oligonucleotide
  Antisense strand to SEQ ID NO: 1215382
aaucauacacuaauuaguc

SEQ ID NO: 1215384 - RNA, 19 nt, Artificial Sequence
  Description of Artificial Sequence: Synthetic oligonucleotide
  Sense strand starting at position 3628 of SEQ ID NO: 917184
caguuaaaucaggaggcuu

SEQ ID NO: 1215385 - RNA, 19 nt, Artificial Sequence
  Description of Artificial Sequence: Synthetic oligonucleotide
  Antisense strand to SEQ ID NO: 1215384
aagccuccugauuuaacug

SEQ ID NO: 1215386 - RNA, 19 nt, Artificial Sequence
  Description of Artificial Sequence: Synthetic oligonucleotide
  Sense strand starting at position 3639 of SEQ ID NO: 917184
ggaggcuuuccugggagau

SEQ ID NO: 1215387 - RNA, 19 nt, Artificial Sequence
  Description of Artificial Sequence: Synthetic oligonucleotide
  Antisense strand to SEQ ID NO: 1215386
aucucccaggaaagccucc

SEQ ID NO: 1215388 - RNA, 19 nt, Artificial Sequence
  Description of Artificial Sequence: Synthetic oligonucleotide
  Sense strand starting at position 3640 of SEQ ID NO: 917184
gaggcuuuccugggagaua

SEQ ID NO: 1215389 - RNA, 19 nt, Artificial Sequence
  Description of Artificial Sequence: Synthetic oligonucleotide
  Antisense strand to SEQ ID NO: 1215388
uaucucccaggaaagccuc

SEQ ID NO: 1215390 - RNA, 19 nt, Artificial Sequence
  Description of Artificial Sequence: Synthetic oligonucleotide
  Sense strand starting at position 3691 of SEQ ID NO: 917184
ccaugaacuucugcaagga

SEQ ID NO: 1215391 - RNA, 19 nt, Artificial Sequence
  Description of Artificial Sequence: Synthetic oligonucleotide
  Antisense strand to SEQ ID NO: 1215390
uccuugcagaaguucaugg

SEQ ID NO: 1215392 - RNA, 19 nt, Artificial Sequence
  Description of Artificial Sequence: Synthetic oligonucleotide
  Sense strand starting at position 3737 of SEQ ID NO: 917184
cugguuaaccaauguauug

SEQ ID NO: 1215393 - RNA, 19 nt, Artificial Sequence
  Description of Artificial Sequence: Synthetic oligonucleotide
  Antisense strand to SEQ ID NO: 1215392
caauacauugguuaaccag

SEQ ID NO: 1215394 - RNA, 19 nt, Artificial Sequence
  Description of Artificial Sequence: Synthetic oligonucleotide
  Sense strand starting at position 3969 of SEQ ID NO: 917184
uuucgaauucuaugccuaa

SEQ ID NO: 1215395 - RNA, 19 nt, Artificial Sequence
  Description of Artificial Sequence: Synthetic oligonucleotide
  Antisense strand to SEQ ID NO: 1215394
uuaggcauagaauucgaaa

SEQ ID NO: 1215396 - RNA, 19 nt, Artificial Sequence
  Description of Artificial Sequence: Synthetic oligonucleotide
  Sense strand starting at position 3970 of SEQ ID NO: 917184
uucgaauucuaugccuaac

SEQ ID NO: 1215397 - RNA, 19 nt, Artificial Sequence
  Description of Artificial Sequence: Synthetic oligonucleotide
  Antisense strand to SEQ ID NO: 1215396
guuaggcauagaauucgaa

SEQ ID NO: 1215398 - RNA, 19 nt, Artificial Sequence
  Description of Artificial Sequence: Synthetic oligonucleotide
  Sense strand starting at position 3972 of SEQ ID NO: 917184
cgaauucuaugccuaacuu

SEQ ID NO: 1215399 - RNA, 19 nt, Artificial Sequence
  Description of Artificial Sequence: Synthetic oligonucleotide
  Antisense strand to SEQ ID NO: 1215398
aaguuaggcauagaauucg

SEQ ID NO: 1215400 - RNA, 19 nt, Artificial Sequence
  Description of Artificial Sequence: Synthetic oligonucleotide
  Sense strand starting at position 3972 of SEQ ID NO: 917185
cgaauucuaugccuaacuu

SEQ ID NO: 1215401 - RNA, 19 nt, Artificial Sequence
  Description of Artificial Sequence: Synthetic oligonucleotide
  Antisense strand to SEQ ID NO: 1215400
aaguuaggcauagaauucg

SEQ ID NO: 1215402 - RNA, 19 nt, Artificial Sequence
  Description of Artificial Sequence: Synthetic oligonucleotide
  Sense strand starting at position 46 of SEQ ID NO: 917185
gguagucacaggcaucuuu

SEQ ID NO: 1215403 - RNA, 19 nt, Artificial Sequence
  Description of Artificial Sequence: Synthetic oligonucleotide
  Antisense strand to SEQ ID NO: 1215402
aaagaugccugugacuacc

SEQ ID NO: 1215404 - RNA, 19 nt, Artificial Sequence
  Description of Artificial Sequence: Synthetic oligonucleotide
  Sense strand starting at position 57 of SEQ ID NO: 917185
gcaucuuuauaaucaguga

SEQ ID NO: 1215405 - RNA, 19 nt, Artificial Sequence
  Description of Artificial Sequence: Synthetic oligonucleotide
  Antisense strand to SEQ ID NO: 1215404
ucacugauuauaaagaugc

SEQ ID NO: 1215406 - RNA, 19 nt, Artificial Sequence
  Description of Artificial Sequence: Synthetic oligonucleotide
  Sense strand starting at position 60 of SEQ ID NO: 917185
ucuuuauaaucagugaagg

SEQ ID NO: 1215407 - RNA, 19 nt, Artificial Sequence
  Description of Artificial Sequence: Synthetic oligonucleotide
  Antisense strand to SEQ ID NO: 1215406
ccuucacugauuauaaaga

SEQ ID NO: 1215408 - RNA, 19 nt, Artificial Sequence
  Description of Artificial Sequence: Synthetic oligonucleotide
  Sense strand starting at position 61 of SEQ ID NO: 917185
cuuuauaaucagugaaggu

SEQ ID NO: 1215409 - RNA, 19 nt, Artificial Sequence
  Description of Artificial Sequence: Synthetic oligonucleotide
  Antisense strand to SEQ ID NO: 1215408
accuucacugauuauaaag

SEQ ID NO: 1215410 - RNA, 19 nt, Artificial Sequence
  Description of Artificial Sequence: Synthetic oligonucleotide
  Sense strand starting at position 285 of SEQ ID NO: 917185
gucugucagccugaugaga

SEQ ID NO: 1215411 - RNA, 19 nt, Artificial Sequence
  Description of Artificial Sequence: Synthetic oligonucleotide
  Antisense strand to SEQ ID NO: 1215410
ucucaucaggcugacagac

SEQ ID NO: 1215412 - RNA, 19 nt, Artificial Sequence
  Description of Artificial Sequence: Synthetic oligonucleotide
  Sense strand starting at position 308 of SEQ ID NO: 917185
ugaaauaaugaaugugcuu

SEQ ID NO: 1215413 - RNA, 19 nt, Artificial Sequence
  Description of Artificial Sequence: Synthetic oligonucleotide
  Antisense strand to SEQ ID NO: 1215412
aagcacauucauuauuuca

SEQ ID NO: 1215414 - RNA, 19 nt, Artificial Sequence
  Description of Artificial Sequence: Synthetic oligonucleotide
  Sense strand starting at position 390 of SEQ ID NO: 917185
uauaucuuggcaugucaga

SEQ ID NO: 1215415 - RNA, 19 nt, Artificial Sequence
  Description of Artificial Sequence: Synthetic oligonucleotide
  Antisense strand to SEQ ID NO: 1215414
ucugacaugccaagauaua

SEQ ID NO: 1215416 - RNA, 19 nt, Artificial Sequence
  Description of Artificial Sequence: Synthetic oligonucleotide
  Sense strand starting at position 639 of SEQ ID NO: 917185
agaauuaaacguugacaga

SEQ ID NO: 1215417 - RNA, 19 nt, Artificial Sequence
  Description of Artificial Sequence: Synthetic oligonucleotide
  Antisense strand to SEQ ID NO: 1215416
ucugucaacguuuaauucu

SEQ ID NO: 1215418 - RNA, 19 nt, Artificial Sequence
  Description of Artificial Sequence: Synthetic oligonucleotide
  Sense strand starting at position 873 of SEQ ID NO: 917185
uugaacuguaagugugaau

SEQ ID NO: 1215419 - RNA, 19 nt, Artificial Sequence
  Description of Artificial Sequence: Synthetic oligonucleotide
  Antisense strand to SEQ ID NO: 1215418
auucacacuuacaguucaa

SEQ ID NO: 1215420 - RNA, 19 nt, Artificial Sequence
  Description of Artificial Sequence: Synthetic oligonucleotide
  Sense strand starting at position 1254 of SEQ ID NO: 917185
acauguaugguuuagcacu

SEQ ID NO: 1215421 - RNA, 19 nt, Artificial Sequence
  Description of Artificial Sequence: Synthetic oligonucleotide
  Antisense strand to SEQ ID NO: 1215420
agugcuaaaccauacaugu

SEQ ID NO: 1215422 - RNA, 19 nt, Artificial Sequence
  Description of Artificial Sequence: Synthetic oligonucleotide
  Sense strand starting at position 1373 of SEQ ID NO: 917185
agucauacaguugguaaau

SEQ ID NO: 1215423 - RNA, 19 nt, Artificial Sequence
  Description of Artificial Sequence: Synthetic oligonucleotide
  Antisense strand to SEQ ID NO: 1215422
auuuaccaacuguaugacu

SEQ ID NO: 1215424 - RNA, 19 nt, Artificial Sequence
  Description of Artificial Sequence: Synthetic oligonucleotide
  Sense strand starting at position 1374 of SEQ ID NO: 917185
gucauacaguugguaaaua

SEQ ID NO: 1215425 - RNA, 19 nt, Artificial Sequence
  Description of Artificial Sequence: Synthetic oligonucleotide
  Antisense strand to SEQ ID NO: 1215424
uauuuaccaacuguaugac

SEQ ID NO: 1215426 - RNA, 19 nt, Artificial Sequence
  Description of Artificial Sequence: Synthetic oligonucleotide
  Sense strand starting at position 1505 of SEQ ID NO: 917185
aguucuacacagugcuaaa

SEQ ID NO: 1215427 - RNA, 19 nt, Artificial Sequence
  Description of Artificial Sequence: Synthetic oligonucleotide
  Antisense strand to SEQ ID NO: 1215426
uuuagcacuguguagaacu

SEQ ID NO: 1215428 - RNA, 19 nt, Artificial Sequence
  Description of Artificial Sequence: Synthetic oligonucleotide
  Sense strand starting at position 1599 of SEQ ID NO: 917185
cugccugcuguggauuaaa

SEQ ID NO: 1215429 - RNA, 19 nt, Artificial Sequence
  Description of Artificial Sequence: Synthetic oligonucleotide
  Antisense strand to SEQ ID NO: 1215428
uuuaauccacagcaggcag

SEQ ID NO: 1215430 - RNA, 19 nt, Artificial Sequence
  Description of Artificial Sequence: Synthetic oligonucleotide
  Sense strand starting at position 1602 of SEQ ID NO: 917185
ccugcuguggauuaaagau

SEQ ID NO: 1215431 - RNA, 19 nt, Artificial Sequence
  Description of Artificial Sequence: Synthetic oligonucleotide
  Antisense strand to SEQ ID NO: 1215430
aucuuuaauccacagcagg

SEQ ID NO: 1215432 - RNA, 19 nt, Artificial Sequence
  Description of Artificial Sequence: Synthetic oligonucleotide
  Sense strand starting at position 1681 of SEQ ID NO: 917185
augagugauccuuggcuag

SEQ ID NO: 1215433 - RNA, 19 nt, Artificial Sequence
  Description of Artificial Sequence: Synthetic oligonucleotide
  Antisense strand to SEQ ID NO: 1215432
cuagccaaggaucacucau

SEQ ID NO: 1215434 - RNA, 19 nt, Artificial Sequence
  Description of Artificial Sequence: Synthetic oligonucleotide
  Sense strand starting at position 1697 of SEQ ID NO: 917185
uagguucuccuuugacuga

SEQ ID NO: 1215435 - RNA, 19 nt, Artificial Sequence
  Description of Artificial Sequence: Synthetic oligonucleotide
  Antisense strand to SEQ ID NO: 1215434
ucagucaaaggagaaccua

SEQ ID NO: 1215436 - RNA, 19 nt, Artificial Sequence
  Description of Artificial Sequence: Synthetic oligonucleotide
  Sense strand starting at position 1701 of SEQ ID NO: 917185
uucuccuuugacugacaga

SEQ ID NO: 1215437 - RNA, 19 nt, Artificial Sequence
  Description of Artificial Sequence: Synthetic oligonucleotide
  Antisense strand to SEQ ID NO: 1215436
ucugucagucaaaggagaa

SEQ ID NO: 1215438 - RNA, 19 nt, Artificial Sequence
  Description of Artificial Sequence: Synthetic oligonucleotide
  Sense strand starting at position 1785 of SEQ ID NO: 917185
uccugucuccaggaacauu

SEQ ID NO: 1215439 - RNA, 19 nt, Artificial Sequence
  Description of Artificial Sequence: Synthetic oligonucleotide
  Antisense strand to SEQ ID NO: 1215438
aauguuccuggagacagga

SEQ ID NO: 1215440 - RNA, 19 nt, Artificial Sequence
  Description of Artificial Sequence: Synthetic oligonucleotide
  Sense strand starting at position 2112 of SEQ ID NO: 917185
ugauaaacuugcucacugu

SEQ ID NO: 1215441 - RNA, 19 nt, Artificial Sequence
  Description of Artificial Sequence: Synthetic oligonucleotide
  Antisense strand to SEQ ID NO: 1215440
acagugagcaaguuuauca

SEQ ID NO: 1215442 - RNA, 19 nt, Artificial Sequence
  Description of Artificial Sequence: Synthetic oligonucleotide
  Sense strand starting at position 2130 of SEQ ID NO: 917185
uuauguauguauccaauga

SEQ ID NO: 1215443 - RNA, 19 nt, Artificial Sequence
  Description of Artificial Sequence: Synthetic oligonucleotide
  Antisense strand to SEQ ID NO: 1215442
ucauuggauacauacauaa

SEQ ID NO: 1215444 - RNA, 19 nt, Artificial Sequence
  Description of Artificial Sequence: Synthetic oligonucleotide
  Sense strand starting at position 2134 of SEQ ID NO: 917185
guauguauccaaugacuac

SEQ ID NO: 1215445 - RNA, 19 nt, Artificial Sequence
  Description of Artificial Sequence: Synthetic oligonucleotide
  Antisense strand to SEQ ID NO: 1215444
guagucauuggauacauac

SEQ ID NO: 1215446 - RNA, 19 nt, Artificial Sequence
  Description of Artificial Sequence: Synthetic oligonucleotide
  Sense strand starting at position 2357 of SEQ ID NO: 917185
uguggauacucugcauaua

SEQ ID NO: 1215447 - RNA, 19 nt, Artificial Sequence
  Description of Artificial Sequence: Synthetic oligonucleotide
  Antisense strand to SEQ ID NO: 1215446
uauaugcagaguauccaca

SEQ ID NO: 1215448 - RNA, 19 nt, Artificial Sequence
  Description of Artificial Sequence: Synthetic oligonucleotide
  Sense strand starting at position 2478 of SEQ ID NO: 917185
acauucuagacuggaguga

SEQ ID NO: 1215449 - RNA, 19 nt, Artificial Sequence
  Description of Artificial Sequence: Synthetic oligonucleotide
  Antisense strand to SEQ ID NO: 1215448
ucacuccagucuagaaugu

SEQ ID NO: 1215450 - RNA, 19 nt, Artificial Sequence
  Description of Artificial Sequence: Synthetic oligonucleotide
  Sense strand starting at position 2482 of SEQ ID NO: 917185
ucuagacuggagugauaca

SEQ ID NO: 1215451 - RNA, 19 nt, Artificial Sequence
  Description of Artificial Sequence: Synthetic oligonucleotide
  Antisense strand to SEQ ID NO: 1215450
uguaucacuccagucuaga

SEQ ID NO: 1215452 - RNA, 19 nt, Artificial Sequence
  Description of Artificial Sequence: Synthetic oligonucleotide
  Sense strand starting at position 2641 of SEQ ID NO: 917185
uggauaauguaagucuuua

SEQ ID NO: 1215453 - RNA, 19 nt, Artificial Sequence
  Description of Artificial Sequence: Synthetic oligonucleotide
  Antisense strand to SEQ ID NO: 1215452
uaaagacuuacauuaucca

SEQ ID NO: 1215454 - RNA, 19 nt, Artificial Sequence
  Description of Artificial Sequence: Synthetic oligonucleotide
  Sense strand starting at position 2694 of SEQ ID NO: 917185
ugagcaauugcugacauac

SEQ ID NO: 1215455 - RNA, 19 nt, Artificial Sequence
  Description of Artificial Sequence: Synthetic oligonucleotide
  Antisense strand to SEQ ID NO: 1215454
guaugucagcaauugcuca

SEQ ID NO: 1215456 - RNA, 19 nt, Artificial Sequence
  Description of Artificial Sequence: Synthetic oligonucleotide
  Sense strand starting at position 2823 of SEQ ID NO: 917185
ccugaugauucucugagca

SEQ ID NO: 1215457 - RNA, 19 nt, Artificial Sequence
  Description of Artificial Sequence: Synthetic oligonucleotide
  Antisense strand to SEQ ID NO: 1215456
ugcucagagaaucaucagg

SEQ ID NO: 1215458 - RNA, 19 nt, Artificial Sequence
  Description of Artificial Sequence: Synthetic oligonucleotide
  Sense strand starting at position 2935 of SEQ ID NO: 917185
agcucaucucuagagacuu

SEQ ID NO: 1215459 - RNA, 19 nt, Artificial Sequence
  Description of Artificial Sequence: Synthetic oligonucleotide
  Antisense strand to SEQ ID NO: 1215458
aagucucuagagaugagcu

SEQ ID NO: 1215460 - RNA, 19 nt, Artificial Sequence
  Description of Artificial Sequence: Synthetic oligonucleotide
  Sense strand starting at position 2943 of SEQ ID NO: 917185
ucuagagacuucccacagu

SEQ ID NO: 1215461 - RNA, 19 nt, Artificial Sequence
  Description of Artificial Sequence: Synthetic oligonucleotide
  Antisense strand to SEQ ID NO: 1215460
acugugggaagucucuaga

SEQ ID NO: 1215462 - RNA, 19 nt, Artificial Sequence
  Description of Artificial Sequence: Synthetic oligonucleotide
  Sense strand starting at position 3095 of SEQ ID NO: 917185
ggccuuacucagggagacu

SEQ ID NO: 1215463 - RNA, 19 nt, Artificial Sequence
  Description of Artificial Sequence: Synthetic oligonucleotide
  Antisense strand to SEQ ID NO: 1215462
agucucccugaguaaggcc

SEQ ID NO: 1215464 - RNA, 19 nt, Artificial Sequence
  Description of Artificial Sequence: Synthetic oligonucleotide
  Sense strand starting at position 3137 of SEQ ID NO: 917185
aaacguggaggucauuaau

SEQ ID NO: 1215465 - RNA, 19 nt, Artificial Sequence
  Description of Artificial Sequence: Synthetic oligonucleotide
  Antisense strand to SEQ ID NO: 1215464
auuaaugaccuccacguuu

SEQ ID NO: 1215466 - RNA, 19 nt, Artificial Sequence
  Description of Artificial Sequence: Synthetic oligonucleotide
  Sense strand starting at position 3140 of SEQ ID NO: 917185
cguggaggucauuaaugga

SEQ ID NO: 1215467 - RNA, 19 nt, Artificial Sequence
  Description of Artificial Sequence: Synthetic oligonucleotide
  Antisense strand to SEQ ID NO: 1215466
uccauuaaugaccuccacg

SEQ ID NO: 1215468 - RNA, 19 nt, Artificial Sequence
  Description of Artificial Sequence: Synthetic oligonucleotide
  Sense strand starting at position 3171 of SEQ ID NO: 917185
acaugacugccauagccau

SEQ ID NO: 1215469 - RNA, 19 nt, Artificial Sequence
  Description of Artificial Sequence: Synthetic oligonucleotide
  Antisense strand to SEQ ID NO: 1215468
auggcuauggcagucaugu

SEQ ID NO: 1215470 - RNA, 19 nt, Artificial Sequence
  Description of Artificial Sequence: Synthetic oligonucleotide
  Sense strand starting at position 3401 of SEQ ID NO: 917185
guuggacagcacugacaua

SEQ ID NO: 1215471 - RNA, 19 nt, Artificial Sequence
  Description of Artificial Sequence: Synthetic oligonucleotide
  Antisense strand to SEQ ID NO: 1215470
uaugucagugcuguccaac

SEQ ID NO: 1215472 - RNA, 19 nt, Artificial Sequence
  Description of Artificial Sequence: Synthetic oligonucleotide
  Sense strand starting at position 3435 of SEQ ID NO: 917185
ugcagaaaguccuccuauu

SEQ ID NO: 1215473 - RNA, 19 nt, Artificial Sequence
  Description of Artificial Sequence: Synthetic oligonucleotide
  Antisense strand to SEQ ID NO: 1215472
aauaggaggacuuucugca

SEQ ID NO: 1215474 - RNA, 19 nt, Artificial Sequence
  Description of Artificial Sequence: Synthetic oligonucleotide
  Sense strand starting at position 3469 of SEQ ID NO: 917185
ggaaccaauccggagucuu

SEQ ID NO: 1215475 - RNA, 19 nt, Artificial Sequence
  Description of Artificial Sequence: Synthetic oligonucleotide
  Antisense strand to SEQ ID NO: 1215474
aagacuccggauugguucc

SEQ ID NO: 1215476 - RNA, 19 nt, Artificial Sequence
  Description of Artificial Sequence: Synthetic oligonucleotide
  Sense strand starting at position 3563 of SEQ ID NO: 917185
cuauauaguugaucuagag

SEQ ID NO: 1215477 - RNA, 19 nt, Artificial Sequence
  Description of Artificial Sequence: Synthetic oligonucleotide
  Antisense strand to SEQ ID NO: 1215476
cucuagaucaacuauauag

SEQ ID NO: 1215478 - RNA, 19 nt, Artificial Sequence
  Description of Artificial Sequence: Synthetic oligonucleotide
  Sense strand starting at position 3614 of SEQ ID NO: 917185
guugcuggaccuugaaacu

SEQ ID NO: 1215479 - RNA, 19 nt, Artificial Sequence
  Description of Artificial Sequence: Synthetic oligonucleotide
  Antisense strand to SEQ ID NO: 1215478
aguuucaagguccagcaac

SEQ ID NO: 1215480 - RNA, 19 nt, Artificial Sequence
  Description of Artificial Sequence: Synthetic oligonucleotide
  Sense strand starting at position 3935 of SEQ ID NO: 917186
agguguuugcuugagaaug

SEQ ID NO: 1215481 - RNA, 19 nt, Artificial Sequence
  Description of Artificial Sequence: Synthetic oligonucleotide
  Antisense strand to SEQ ID NO: 1215480
cauucucaagcaaacaccu

SEQ ID NO: 1215482 - RNA, 19 nt, Artificial Sequence
  Description of Artificial Sequence: Synthetic oligonucleotide
  Sense strand starting at position 41 of SEQ ID NO: 917186
uauaucuuggcaugucaga

SEQ ID NO: 1215483 - RNA, 19 nt, Artificial Sequence
  Description of Artificial Sequence: Synthetic oligonucleotide
  Antisense strand to SEQ ID NO: 1215482
ucugacaugccaagauaua

SEQ ID NO: 1215484 - RNA, 19 nt, Artificial Sequence
  Description of Artificial Sequence: Synthetic oligonucleotide
  Sense strand starting at position 290 of SEQ ID NO: 917186
agaauuaaacguugacaga

SEQ ID NO: 1215485 - RNA, 19 nt, Artificial Sequence
  Description of Artificial Sequence: Synthetic oligonucleotide
  Antisense strand to SEQ ID NO: 1215484
ucugucaacguuuaauucu

SEQ ID NO: 1215486 - RNA, 19 nt, Artificial Sequence
  Description of Artificial Sequence: Synthetic oligonucleotide
  Sense strand starting at position 524 of SEQ ID NO: 917186
uugaacuguaagugugaau

SEQ ID NO: 1215487 - RNA, 19 nt, Artificial Sequence
  Description of Artificial Sequence: Synthetic oligonucleotide
  Antisense strand to SEQ ID NO: 1215486
auucacacuuacaguucaa

SEQ ID NO: 1215488 - RNA, 19 nt, Artificial Sequence
  Description of Artificial Sequence: Synthetic oligonucleotide
  Sense strand starting at position 905 of SEQ ID NO: 917186
acauguaugguuuagcacu

SEQ ID NO: 1215489 - RNA, 19 nt, Artificial Sequence
  Description of Artificial Sequence: Synthetic oligonucleotide
  Antisense strand to SEQ ID NO: 1215488
agugcuaaaccauacaugu

SEQ ID NO: 1215490 - RNA, 19 nt, Artificial Sequence
  Description of Artificial Sequence: Synthetic oligonucleotide
  Sense strand starting at position 1024 of SEQ ID NO: 917186
agucauacaguugguaaau

SEQ ID NO: 1215491 - RNA, 19 nt, Artificial Sequence
  Description of Artificial Sequence: Synthetic oligonucleotide
  Antisense strand to SEQ ID NO: 1215490
auuuaccaacuguaugacu

SEQ ID NO: 1215492 - RNA, 19 nt, Artificial Sequence
  Description of Artificial Sequence: Synthetic oligonucleotide
  Sense strand starting at position 1025 of SEQ ID NO: 917186
gucauacaguugguaaaua

SEQ ID NO: 1215493 - RNA, 19 nt, Artificial Sequence
  Description of Artificial Sequence: Synthetic oligonucleotide
  Antisense strand to SEQ ID NO: 1215492
uauuuaccaacuguaugac

SEQ ID NO: 1215494 - RNA, 19 nt, Artificial Sequence
  Description of Artificial Sequence: Synthetic oligonucleotide
  Sense strand starting at position 1156 of SEQ ID NO: 917186
aguucuacacagugcuaaa

SEQ ID NO: 1215495 - RNA, 19 nt, Artificial Sequence
  Description of Artificial Sequence: Synthetic oligonucleotide
  Antisense strand to SEQ ID NO: 1215494
uuuagcacuguguagaacu

SEQ ID NO: 1215496 - RNA, 19 nt, Artificial Sequence
  Description of Artificial Sequence: Synthetic oligonucleotide
  Sense strand starting at position 1250 of SEQ ID NO: 917186
cugccugcuguggauuaaa

SEQ ID NO: 1215497 - RNA, 19 nt, Artificial Sequence
  Description of Artificial Sequence: Synthetic oligonucleotide
  Antisense strand to SEQ ID NO: 1215496
uuuaauccacagcaggcag

SEQ ID NO: 1215498 - RNA, 19 nt, Artificial Sequence
  Description of Artificial Sequence: Synthetic oligonucleotide
  Sense strand starting at position 1253 of SEQ ID NO: 917186
ccugcuguggauuaaagau

SEQ ID NO: 1215499 - RNA, 19 nt, Artificial Sequence
  Description of Artificial Sequence: Synthetic oligonucleotide
  Antisense strand to SEQ ID NO: 1215498
aucuuuaauccacagcagg

SEQ ID NO: 1215500 - RNA, 19 nt, Artificial Sequence
  Description of Artificial Sequence: Synthetic oligonucleotide
  Sense strand starting at position 1332 of SEQ ID NO: 917186
augagugauccuuggcuag

SEQ ID NO: 1215501 - RNA, 19 nt, Artificial Sequence
  Description of Artificial Sequence: Synthetic oligonucleotide
  Antisense strand to SEQ ID NO: 1215500
cuagccaaggaucacucau

SEQ ID NO: 1215502 - RNA, 19 nt, Artificial Sequence
  Description of Artificial Sequence: Synthetic oligonucleotide
  Sense strand starting at position 1348 of SEQ ID NO: 917186
uagguucuccuuugacuga

SEQ ID NO: 1215503 - RNA, 19 nt, Artificial Sequence
  Description of Artificial Sequence: Synthetic oligonucleotide
  Antisense strand to SEQ ID NO: 1215502
ucagucaaaggagaaccua

SEQ ID NO: 1215504 - RNA, 19 nt, Artificial Sequence
  Description of Artificial Sequence: Synthetic oligonucleotide
  Sense strand starting at position 1352 of SEQ ID NO: 917186
uucuccuuugacugacaga

SEQ ID NO: 1215505 - RNA, 19 nt, Artificial Sequence
  Description of Artificial Sequence: Synthetic oligonucleotide
  Antisense strand to SEQ ID NO: 1215504
ucugucagucaaaggagaa

SEQ ID NO: 1215506 - RNA, 19 nt, Artificial Sequence
  Description of Artificial Sequence: Synthetic oligonucleotide
  Sense strand starting at position 1436 of SEQ ID NO: 917186
uccugucuccaggaacauu

SEQ ID NO: 1215507 - RNA, 19 nt, Artificial Sequence
  Description of Artificial Sequence: Synthetic oligonucleotide
  Antisense strand to SEQ ID NO: 1215506
aauguuccuggagacagga

SEQ ID NO: 1215508 - RNA, 19 nt, Artificial Sequence
  Description of Artificial Sequence: Synthetic oligonucleotide
  Sense strand starting at position 1763 of SEQ ID NO: 917186
ugauaaacuugcucacugu

SEQ ID NO: 1215509 - RNA, 19 nt, Artificial Sequence
  Description of Artificial Sequence: Synthetic oligonucleotide
  Antisense strand to SEQ ID NO: 1215508
acagugagcaaguuuauca

SEQ ID NO: 1215510 - RNA, 19 nt, Artificial Sequence
  Description of Artificial Sequence: Synthetic oligonucleotide
  Sense strand starting at position 1781 of SEQ ID NO: 917186
uuauguauguauccaauga

SEQ ID NO: 1215511 - RNA, 19 nt, Artificial Sequence
  Description of Artificial Sequence: Synthetic oligonucleotide
  Antisense strand to SEQ ID NO: 1215510
ucauuggauacauacauaa

SEQ ID NO: 1215512 - RNA, 19 nt, Artificial Sequence
  Description of Artificial Sequence: Synthetic oligonucleotide
  Sense strand starting at position 1785 of SEQ ID NO: 917186
guauguauccaaugacuac

SEQ ID NO: 1215513 - RNA, 19 nt, Artificial Sequence
  Description of Artificial Sequence: Synthetic oligonucleotide
  Antisense strand to SEQ ID NO: 1215512
guagucauuggauacauac

SEQ ID NO: 1215514 - RNA, 19 nt, Artificial Sequence
  Description of Artificial Sequence: Synthetic oligonucleotide
  Sense strand starting at position 2008 of SEQ ID NO: 917186
uguggauacucugcauaua

SEQ ID NO: 1215515 - RNA, 19 nt, Artificial Sequence
  Description of Artificial Sequence: Synthetic oligonucleotide
  Antisense strand to SEQ ID NO: 1215514
uauaugcagaguauccaca

SEQ ID NO: 1215516 - RNA, 19 nt, Artificial Sequence
  Description of Artificial Sequence: Synthetic oligonucleotide
  Sense strand starting at position 2129 of SEQ ID NO: 917186
acauucuagacuggaguga

SEQ ID NO: 1215517 - RNA, 19 nt, Artificial Sequence
  Description of Artificial Sequence: Synthetic oligonucleotide
  Antisense strand to SEQ ID NO: 1215516
ucacuccagucuagaaugu

SEQ ID NO: 1215518 - RNA, 19 nt, Artificial Sequence
  Description of Artificial Sequence: Synthetic oligonucleotide
  Sense strand starting at position 2133 of SEQ ID NO: 917186
ucuagacuggagugauaca

SEQ ID NO: 1215519 - RNA, 19 nt, Artificial Sequence
  Description of Artificial Sequence: Synthetic oligonucleotide
  Antisense strand to SEQ ID NO: 1215518
uguaucacuccagucuaga

SEQ ID NO: 1215520 - RNA, 19 nt, Artificial Sequence
  Description of Artificial Sequence: Synthetic oligonucleotide
  Sense strand starting at position 2292 of SEQ ID NO: 917186
uggauaauguaagucuuua

SEQ ID NO: 1215521 - RNA, 19 nt, Artificial Sequence
  Description of Artificial Sequence: Synthetic oligonucleotide
  Antisense strand to SEQ ID NO: 1215520
uaaagacuuacauuaucca

SEQ ID NO: 1215522 - RNA, 19 nt, Artificial Sequence
  Description of Artificial Sequence: Synthetic oligonucleotide
  Sense strand starting at position 2345 of SEQ ID NO: 917186
ugagcaauugcugacauac

SEQ ID NO: 1215523 - RNA, 19 nt, Artificial Sequence
  Description of Artificial Sequence: Synthetic oligonucleotide
  Antisense strand to SEQ ID NO: 1215522
guaugucagcaauugcuca

SEQ ID NO: 1215524 - RNA, 19 nt, Artificial Sequence
  Description of Artificial Sequence: Synthetic oligonucleotide
  Sense strand starting at position 2474 of SEQ ID NO: 917186
ccugaugauucucugagca

SEQ ID NO: 1215525 - RNA, 19 nt, Artificial Sequence
  Description of Artificial Sequence: Synthetic oligonucleotide
  Antisense strand to SEQ ID NO: 1215524
ugcucagagaaucaucagg

SEQ ID NO: 1215526 - RNA, 19 nt, Artificial Sequence
  Description of Artificial Sequence: Synthetic oligonucleotide
  Sense strand starting at position 2586 of SEQ ID NO: 917186
agcucaucucuagagacuu

SEQ ID NO: 1215527 - RNA, 19 nt, Artificial Sequence
  Description of Artificial Sequence: Synthetic oligonucleotide
  Antisense strand to SEQ ID NO: 1215526
aagucucuagagaugagcu

SEQ ID NO: 1215528 - RNA, 19 nt, Artificial Sequence
  Description of Artificial Sequence: Synthetic oligonucleotide
  Sense strand starting at position 2594 of SEQ ID NO: 917186
ucuagagacuucccacagu

SEQ ID NO: 1215529 - RNA, 19 nt, Artificial Sequence
  Description of Artificial Sequence: Synthetic oligonucleotide
  Antisense strand to SEQ ID NO: 1215528
acugugggaagucucuaga

SEQ ID NO: 1215530 - RNA, 19 nt, Artificial Sequence
  Description of Artificial Sequence: Synthetic oligonucleotide
  Sense strand starting at position 2746 of SEQ ID NO: 917186
ggccuuacucagggagacu

SEQ ID NO: 1215531 - RNA, 19 nt, Artificial Sequence
  Description of Artificial Sequence: Synthetic oligonucleotide
  Antisense strand to SEQ ID NO: 1215530
agucucccugaguaaggcc

SEQ ID NO: 1215532 - RNA, 19 nt, Artificial Sequence
  Description of Artificial Sequence: Synthetic oligonucleotide
  Sense strand starting at position 2788 of SEQ ID NO: 917186
aaacguggaggucauuaau

SEQ ID NO: 1215533 - RNA, 19 nt, Artificial Sequence
  Description of Artificial Sequence: Synthetic oligonucleotide
  Antisense strand to SEQ ID NO: 1215532
auuaaugaccuccacguuu

SEQ ID NO: 1215534 - RNA, 19 nt, Artificial Sequence
  Description of Artificial Sequence: Synthetic oligonucleotide
  Sense strand starting at position 2791 of SEQ ID NO: 917186
cguggaggucauuaaugga

SEQ ID NO: 1215535 - RNA, 19 nt, Artificial Sequence
  Description of Artificial Sequence: Synthetic oligonucleotide
  Antisense strand to SEQ ID NO: 1215534
uccauuaaugaccuccacg

SEQ ID NO: 1215536 - RNA, 19 nt, Artificial Sequence
  Description of Artificial Sequence: Synthetic oligonucleotide
  Sense strand starting at position 2822 of SEQ ID NO: 917186
acaugacugccauagccau

SEQ ID NO: 1215537 - RNA, 19 nt, Artificial Sequence
  Description of Artificial Sequence: Synthetic oligonucleotide
  Antisense strand to SEQ ID NO: 1215536
auggcuauggcagucaugu

SEQ ID NO: 1215538 - RNA, 19 nt, Artificial Sequence
  Description of Artificial Sequence: Synthetic oligonucleotide
  Sense strand starting at position 3052 of SEQ ID NO: 917186
guuggacagcacugacaua

SEQ ID NO: 1215539 - RNA, 19 nt, Artificial Sequence
  Description of Artificial Sequence: Synthetic oligonucleotide
  Antisense strand to SEQ ID NO: 1215538
uaugucagugcuguccaac

SEQ ID NO: 1215540 - RNA, 19 nt, Artificial Sequence
  Description of Artificial Sequence: Synthetic oligonucleotide
  Sense strand starting at position 3086 of SEQ ID NO: 917186
ugcagaaaguccuccuauu

SEQ ID NO: 1215541 - RNA, 19 nt, Artificial Sequence
  Description of Artificial Sequence: Synthetic oligonucleotide
  Antisense strand to SEQ ID NO: 1215540
aauaggaggacuuucugca

SEQ ID NO: 1215542 - RNA, 19 nt, Artificial Sequence
  Description of Artificial Sequence: Synthetic oligonucleotide
  Sense strand starting at position 3120 of SEQ ID NO: 917186
ggaaccaauccggagucuu

SEQ ID NO: 1215543 - RNA, 19 nt, Artificial Sequence
  Description of Artificial Sequence: Synthetic oligonucleotide
  Antisense strand to SEQ ID NO: 1215542
aagacuccggauugguucc

SEQ ID NO: 1215544 - RNA, 19 nt, Artificial Sequence
  Description of Artificial Sequence: Synthetic oligonucleotide
  Sense strand starting at position 3214 of SEQ ID NO: 917186
cuauauaguugaucuagag

SEQ ID NO: 1215545 - RNA, 19 nt, Artificial Sequence
  Description of Artificial Sequence: Synthetic oligonucleotide
  Antisense strand to SEQ ID NO: 1215544
cucuagaucaacuauauag

SEQ ID NO: 1215546 - RNA, 19 nt, Artificial Sequence
  Description of Artificial Sequence: Synthetic oligonucleotide
  Sense strand starting at position 3265 of SEQ ID NO: 917186
guugcuggaccuugaaacu

SEQ ID NO: 1215547 - RNA, 19 nt, Artificial Sequence
  Description of Artificial Sequence: Synthetic oligonucleotide
  Antisense strand to SEQ ID NO: 1215546
aguuucaagguccagcaac

SEQ ID NO: 1215548 - RNA, 19 nt, Artificial Sequence
  Description of Artificial Sequence: Synthetic oligonucleotide
  Sense strand starting at position 3586 of SEQ ID NO: 917186
agguguuugcuugagaaug

SEQ ID NO: 1215549 - RNA, 19 nt, Artificial Sequence
  Description of Artificial Sequence: Synthetic oligonucleotide
  Antisense strand to SEQ ID NO: 1215548
cauucucaagcaaacaccu

SEQ ID NO: 1215550 - RNA, 19 nt, Artificial Sequence
  Description of Artificial Sequence: Synthetic oligonucleotide
  Sense strand starting at position 3677 of SEQ ID NO: 917186
acuuuauuagguugccaga

SEQ ID NO: 1215551 - RNA, 19 nt, Artificial Sequence
  Description of Artificial Sequence: Synthetic oligonucleotide
  Antisense strand to SEQ ID NO: 1215550
ucuggcaaccuaauaaagu

SEQ ID NO: 1215552 - RNA, 19 nt, Artificial Sequence
  Description of Artificial Sequence: Synthetic oligonucleotide
  Sense strand starting at position 3788 of SEQ ID NO: 917186
gguuaugguccagagacug

SEQ ID NO: 1215553 - RNA, 19 nt, Artificial Sequence
  Description of Artificial Sequence: Synthetic oligonucleotide
  Antisense strand to SEQ ID NO: 1215552
cagucucuggaccauaacc

SEQ ID NO: 1215554 - RNA, 19 nt, Artificial Sequence
  Description of Artificial Sequence: Synthetic oligonucleotide
  Sense strand starting at position 3794 of SEQ ID NO: 917186
gguccagagacugguguau

SEQ ID NO: 1215555 - RNA, 19 nt, Artificial Sequence
  Description of Artificial Sequence: Synthetic oligonucleotide
  Antisense strand to SEQ ID NO: 1215554
auacaccagucucuggacc

SEQ ID NO: 1215556 - RNA, 19 nt, Artificial Sequence
  Description of Artificial Sequence: Synthetic oligonucleotide
  Sense strand starting at position 3864 of SEQ ID NO: 917186
ggcauucuuccugaaacuc

SEQ ID NO: 1215557 - RNA, 19 nt, Artificial Sequence
  Description of Artificial Sequence: Synthetic oligonucleotide
  Antisense strand to SEQ ID NO: 1215556
gaguuucaggaagaaugcc

SEQ ID NO: 1215558 - RNA, 19 nt, Artificial Sequence
  Description of Artificial Sequence: Synthetic oligonucleotide
  Sense strand starting at position 3888 of SEQ ID NO: 917186
acuagacaaugagaaauca

SEQ ID NO: 1215559 - RNA, 19 nt, Artificial Sequence
  Description of Artificial Sequence: Synthetic oligonucleotide
  Antisense strand to SEQ ID NO: 1215558
ugauuucucauugucuagu

SEQ ID NO: 1215560 - RNA, 19 nt, Artificial Sequence
  Description of Artificial Sequence: Synthetic oligonucleotide
  Sense strand starting at position 3953 of SEQ ID NO: 917185
uuaauaauagcuuggagag

SEQ ID NO: 1215561 - RNA, 19 nt, Artificial Sequence
  Description of Artificial Sequence: Synthetic oligonucleotide
  Antisense strand to SEQ ID NO: 1215560
cucuccaagcuauuauuaa

SEQ ID NO: 1215562 - RNA, 19 nt, Artificial Sequence
  Description of Artificial Sequence: Synthetic oligonucleotide
  Sense strand starting at position 3935 of SEQ ID NO: 917187
agguguuugcuugagaaug

SEQ ID NO: 1215563 - RNA, 19 nt, Artificial Sequence
  Description of Artificial Sequence: Synthetic oligonucleotide
  Antisense strand to SEQ ID NO: 1215562
cauucucaagcaaacaccu

SEQ ID NO: 1215564 - RNA, 19 nt, Artificial Sequence
  Description of Artificial Sequence: Synthetic oligonucleotide
  Sense strand starting at position 301 of SEQ ID NO: 917187
ucccuuaauggugauaucu

SEQ ID NO: 1215565 - RNA, 19 nt, Artificial Sequence
  Description of Artificial Sequence: Synthetic oligonucleotide
  Antisense strand to SEQ ID NO: 1215564
agauaucaccauuaaggga

SEQ ID NO: 1215566 - RNA, 19 nt, Artificial Sequence
  Description of Artificial Sequence: Synthetic oligonucleotide
  Sense strand starting at position 310 of SEQ ID NO: 917187
ggugauaucuaaucaaacu

SEQ ID NO: 1215567 - RNA, 19 nt, Artificial Sequence
  Description of Artificial Sequence: Synthetic oligonucleotide
  Antisense strand to SEQ ID NO: 1215566
aguuugauuagauaucacc

SEQ ID NO: 1215568 - RNA, 19 nt, Artificial Sequence
  Description of Artificial Sequence: Synthetic oligonucleotide
  Sense strand starting at position 435 of SEQ ID NO: 917187
gaguuaagauuuggacaag

SEQ ID NO: 1215569 - RNA, 19 nt, Artificial Sequence
  Description of Artificial Sequence: Synthetic oligonucleotide
  Antisense strand to SEQ ID NO: 1215568
cuuguccaaaucuuaacuc

SEQ ID NO: 1215570 - RNA, 19 nt, Artificial Sequence
  Description of Artificial Sequence: Synthetic oligonucleotide
  Sense strand starting at position 524 of SEQ ID NO: 917187
ccuguucuagcuuagauau

SEQ ID NO: 1215571 - RNA, 19 nt, Artificial Sequence
  Description of Artificial Sequence: Synthetic oligonucleotide
  Antisense strand to SEQ ID NO: 1215570
auaucuaagcuagaacagg

SEQ ID NO: 1215572 - RNA, 19 nt, Artificial Sequence
  Description of Artificial Sequence: Synthetic oligonucleotide
  Sense strand starting at position 535 of SEQ ID NO: 917187
uuagauaucgccuagagac

SEQ ID NO: 1215573 - RNA, 19 nt, Artificial Sequence
  Description of Artificial Sequence: Synthetic oligonucleotide
  Antisense strand to SEQ ID NO: 1215572
gucucuaggcgauaucuaa

SEQ ID NO: 1215574 - RNA, 19 nt, Artificial Sequence
  Description of Artificial Sequence: Synthetic oligonucleotide
  Sense strand starting at position 537 of SEQ ID NO: 917187
agauaucgccuagagacga

SEQ ID NO: 1215575 - RNA, 19 nt, Artificial Sequence
  Description of Artificial Sequence: Synthetic oligonucleotide
  Antisense strand to SEQ ID NO: 1215574
ucgucucuaggcgauaucu

SEQ ID NO: 1215576 - RNA, 19 nt, Artificial Sequence
  Description of Artificial Sequence: Synthetic oligonucleotide
  Sense strand starting at position 721 of SEQ ID NO: 917187
ggguuccauuaacuagaaa

SEQ ID NO: 1215577 - RNA, 19 nt, Artificial Sequence
  Description of Artificial Sequence: Synthetic oligonucleotide
  Antisense strand to SEQ ID NO: 1215576
uuucuaguuaauggaaccc

SEQ ID NO: 1215578 - RNA, 19 nt, Artificial Sequence
  Description of Artificial Sequence: Synthetic oligonucleotide
  Sense strand starting at position 857 of SEQ ID NO: 917187
ccauauguacacugaggaa

SEQ ID NO: 1215579 - RNA, 19 nt, Artificial Sequence
  Description of Artificial Sequence: Synthetic oligonucleotide
  Antisense strand to SEQ ID NO: 1215578
uuccucaguguacauaugg

SEQ ID NO: 1215580 - RNA, 19 nt, Artificial Sequence
  Description of Artificial Sequence: Synthetic oligonucleotide
  Sense strand starting at position 979 of SEQ ID NO: 917187
uuuccugaugaauguauua

SEQ ID NO: 1215581 - RNA, 19 nt, Artificial Sequence
  Description of Artificial Sequence: Synthetic oligonucleotide
  Antisense strand to SEQ ID NO: 1215580
uaauacauucaucaggaaa

SEQ ID NO: 1215582 - RNA, 19 nt, Artificial Sequence
  Description of Artificial Sequence: Synthetic oligonucleotide
  Sense strand starting at position 1034 of SEQ ID NO: 917187
auguaugguccugagacau

SEQ ID NO: 1215583 - RNA, 19 nt, Artificial Sequence
  Description of Artificial Sequence: Synthetic oligonucleotide
  Antisense strand to SEQ ID NO: 1215582
augucucaggaccauacau

SEQ ID NO: 1215584 - RNA, 19 nt, Artificial Sequence
  Description of Artificial Sequence: Synthetic oligonucleotide
  Sense strand starting at position 1094 of SEQ ID NO: 917187
aguacuacccagcaggaau

SEQ ID NO: 1215585 - RNA, 19 nt, Artificial Sequence
  Description of Artificial Sequence: Synthetic oligonucleotide
  Antisense strand to SEQ ID NO: 1215584
auuccugcuggguaguacu

SEQ ID NO: 1215586 - RNA, 19 nt, Artificial Sequence
  Description of Artificial Sequence: Synthetic oligonucleotide
  Sense strand starting at position 1123 of SEQ ID NO: 917187
acagaucaccagugacauu

SEQ ID NO: 1215587 - RNA, 19 nt, Artificial Sequence
  Description of Artificial Sequence: Synthetic oligonucleotide
  Antisense strand to SEQ ID NO: 1215586
aaugucacuggugaucugu

SEQ ID NO: 1215588 - RNA, 19 nt, Artificial Sequence
  Description of Artificial Sequence: Synthetic oligonucleotide
  Sense strand starting at position 1134 of SEQ ID NO: 917187
gugacauuccagugaccug

SEQ ID NO: 1215589 - RNA, 19 nt, Artificial Sequence
  Description of Artificial Sequence: Synthetic oligonucleotide
  Antisense strand to SEQ ID NO: 1215588
caggucacuggaaugucac

SEQ ID NO: 1215590 - RNA, 19 nt, Artificial Sequence
  Description of Artificial Sequence: Synthetic oligonucleotide
  Sense strand starting at position 1137 of SEQ ID NO: 917187
acauuccagugaccugaua

SEQ ID NO: 1215591 - RNA, 19 nt, Artificial Sequence
  Description of Artificial Sequence: Synthetic oligonucleotide
  Antisense strand to SEQ ID NO: 1215590
uaucaggucacuggaaugu

SEQ ID NO: 1215592 - RNA, 19 nt, Artificial Sequence
  Description of Artificial Sequence: Synthetic oligonucleotide
  Sense strand starting at position 1268 of SEQ ID NO: 917187
gacagucauuggccacaga

SEQ ID NO: 1215593 - RNA, 19 nt, Artificial Sequence
  Description of Artificial Sequence: Synthetic oligonucleotide
  Antisense strand to SEQ ID NO: 1215592
ucuguggccaaugacuguc

SEQ ID NO: 1215594 - RNA, 19 nt, Artificial Sequence
  Description of Artificial Sequence: Synthetic oligonucleotide
  Sense strand starting at position 1289 of SEQ ID NO: 917187
cugagaaacuccucacagu

SEQ ID NO: 1215595 - RNA, 19 nt, Artificial Sequence
  Description of Artificial Sequence: Synthetic oligonucleotide
  Antisense strand to SEQ ID NO: 1215594
acugugaggaguuucucag

SEQ ID NO: 1215596 - RNA, 19 nt, Artificial Sequence
  Description of Artificial Sequence: Synthetic oligonucleotide
  Sense strand starting at position 1356 of SEQ ID NO: 917187
cuggaauucuacccaguuc

SEQ ID NO: 1215597 - RNA, 19 nt, Artificial Sequence
  Description of Artificial Sequence: Synthetic oligonucleotide
  Antisense strand to SEQ ID NO: 1215596
gaacuggguagaauuccag

SEQ ID NO: 1215598 - RNA, 19 nt, Artificial Sequence
  Description of Artificial Sequence: Synthetic oligonucleotide
  Sense strand starting at position 1585 of SEQ ID NO: 917187
uagauucuugagggugcaa

SEQ ID NO: 1215599 - RNA, 19 nt, Artificial Sequence
  Description of Artificial Sequence: Synthetic oligonucleotide
  Antisense strand to SEQ ID NO: 1215598
uugcacccucaagaaucua

SEQ ID NO: 1215600 - RNA, 19 nt, Artificial Sequence
  Description of Artificial Sequence: Synthetic oligonucleotide
  Sense strand starting at position 1656 of SEQ ID NO: 917187
gaguucuaacauggacaca

SEQ ID NO: 1215601 - RNA, 19 nt, Artificial Sequence
  Description of Artificial Sequence: Synthetic oligonucleotide
  Antisense strand to SEQ ID NO: 1215600
uguguccauguuagaacuc

SEQ ID NO: 1215602 - RNA, 19 nt, Artificial Sequence
  Description of Artificial Sequence: Synthetic oligonucleotide
  Sense strand starting at position 1743 of SEQ ID NO: 917187
augggaaucgguuggauga

SEQ ID NO: 1215603 - RNA, 19 nt, Artificial Sequence
  Description of Artificial Sequence: Synthetic oligonucleotide
  Antisense strand to SEQ ID NO: 1215602
ucauccaaccgauucccau

SEQ ID NO: 1215604 - RNA, 19 nt, Artificial Sequence
  Description of Artificial Sequence: Synthetic oligonucleotide
  Sense strand starting at position 1759 of SEQ ID NO: 917187
ugaguuuaaggauggcuaa

SEQ ID NO: 1215605 - RNA, 19 nt, Artificial Sequence
  Description of Artificial Sequence: Synthetic oligonucleotide
  Antisense strand to SEQ ID NO: 1215604
uuagccauccuuaaacuca

SEQ ID NO: 1215606 - RNA, 19 nt, Artificial Sequence
  Description of Artificial Sequence: Synthetic oligonucleotide
  Sense strand starting at position 1880 of SEQ ID NO: 917187
ugucuuaggcuacaucaaa

SEQ ID NO: 1215607 - RNA, 19 nt, Artificial Sequence
  Description of Artificial Sequence: Synthetic oligonucleotide
  Antisense strand to SEQ ID NO: 1215606
uuugauguagccuaagaca

SEQ ID NO: 1215608 - RNA, 19 nt, Artificial Sequence
  Description of Artificial Sequence: Synthetic oligonucleotide
  Sense strand starting at position 2019 of SEQ ID NO: 917187
uccagugacucaucugaaa

SEQ ID NO: 1215609 - RNA, 19 nt, Artificial Sequence
  Description of Artificial Sequence: Synthetic oligonucleotide
  Antisense strand to SEQ ID NO: 1215608
uuucagaugagucacugga

SEQ ID NO: 1215610 - RNA, 19 nt, Artificial Sequence
  Description of Artificial Sequence: Synthetic oligonucleotide
  Sense strand starting at position 2067 of SEQ ID NO: 917187
uggugacuaccagguaauc

SEQ ID NO: 1215611 - RNA, 19 nt, Artificial Sequence
  Description of Artificial Sequence: Synthetic oligonucleotide
  Antisense strand to SEQ ID NO: 1215610
gauuaccugguagucacca

SEQ ID NO: 1215612 - RNA, 19 nt, Artificial Sequence
  Description of Artificial Sequence: Synthetic oligonucleotide
  Sense strand starting at position 2112 of SEQ ID NO: 917187
aagguaggauguuuauuga

SEQ ID NO: 1215613 - RNA, 19 nt, Artificial Sequence
  Description of Artificial Sequence: Synthetic oligonucleotide
  Antisense strand to SEQ ID NO: 1215612
ucaauaaacauccuaccuu

SEQ ID NO: 1215614 - RNA, 19 nt, Artificial Sequence
  Description of Artificial Sequence: Synthetic oligonucleotide
  Sense strand starting at position 2345 of SEQ ID NO: 917187
gaaagcugagaaugcuuua

SEQ ID NO: 1215615 - RNA, 19 nt, Artificial Sequence
  Description of Artificial Sequence: Synthetic oligonucleotide
  Antisense strand to SEQ ID NO: 1215614
uaaagcauucucagcuuuc

SEQ ID NO: 1215616 - RNA, 19 nt, Artificial Sequence
  Description of Artificial Sequence: Synthetic oligonucleotide
  Sense strand starting at position 2348 of SEQ ID NO: 917187
agcugagaaugcuuuaauu

SEQ ID NO: 1215617 - RNA, 19 nt, Artificial Sequence
  Description of Artificial Sequence: Synthetic oligonucleotide
  Antisense strand to SEQ ID NO: 1215616
aauuaaagcauucucagcu

SEQ ID NO: 1215618 - RNA, 19 nt, Artificial Sequence
  Description of Artificial Sequence: Synthetic oligonucleotide
  Sense strand starting at position 2358 of SEQ ID NO: 917187
gcuuuaauuugcuugcaug

SEQ ID NO: 1215619 - RNA, 19 nt, Artificial Sequence
  Description of Artificial Sequence: Synthetic oligonucleotide
  Antisense strand to SEQ ID NO: 1215618
caugcaagcaaauuaaagc

SEQ ID NO: 1215620 - RNA, 19 nt, Artificial Sequence
  Description of Artificial Sequence: Synthetic oligonucleotide
  Sense strand starting at position 2439 of SEQ ID NO: 917187
gccaguagccucuaaggaa

SEQ ID NO: 1215621 - RNA, 19 nt, Artificial Sequence
  Description of Artificial Sequence: Synthetic oligonucleotide
  Antisense strand to SEQ ID NO: 1215620
uuccuuagaggcuacuggc

SEQ ID NO: 1215622 - RNA, 19 nt, Artificial Sequence
  Description of Artificial Sequence: Synthetic oligonucleotide
  Sense strand starting at position 2514 of SEQ ID NO: 917187
guaagaaagggaugccuua

SEQ ID NO: 1215623 - RNA, 19 nt, Artificial Sequence
  Description of Artificial Sequence: Synthetic oligonucleotide
  Antisense strand to SEQ ID NO: 1215622
uaaggcaucccuuucuuac

SEQ ID NO: 1215624 - RNA, 19 nt, Artificial Sequence
  Description of Artificial Sequence: Synthetic oligonucleotide
  Sense strand starting at position 2532 of SEQ ID NO: 917187
acugguuggcuggagaaca

SEQ ID NO: 1215625 - RNA, 19 nt, Artificial Sequence
  Description of Artificial Sequence: Synthetic oligonucleotide
  Antisense strand to SEQ ID NO: 1215624
uguucuccagccaaccagu

SEQ ID NO: 1215626 - RNA, 19 nt, Artificial Sequence
  Description of Artificial Sequence: Synthetic oligonucleotide
  Sense strand starting at position 2612 of SEQ ID NO: 917187
acguaaaggcuacauagau

SEQ ID NO: 1215627 - RNA, 19 nt, Artificial Sequence
  Description of Artificial Sequence: Synthetic oligonucleotide
  Antisense strand to SEQ ID NO: 1215626
aucuauguagccuuuacgu

SEQ ID NO: 1215628 - RNA, 19 nt, Artificial Sequence
  Description of Artificial Sequence: Synthetic oligonucleotide
  Sense strand starting at position 2686 of SEQ ID NO: 917187
uugagacucugaucuuauc

SEQ ID NO: 1215629 - RNA, 19 nt, Artificial Sequence
  Description of Artificial Sequence: Synthetic oligonucleotide
  Antisense strand to SEQ ID NO: 1215628
gauaagaucagagucucaa

SEQ ID NO: 1215630 - RNA, 19 nt, Artificial Sequence
  Description of Artificial Sequence: Synthetic oligonucleotide
  Sense strand starting at position 2757 of SEQ ID NO: 917187
ucaggaauaccuugcuuua

SEQ ID NO: 1215631 - RNA, 19 nt, Artificial Sequence
  Description of Artificial Sequence: Synthetic oligonucleotide
  Antisense strand to SEQ ID NO: 1215630
uaaagcaagguauuccuga

SEQ ID NO: 1215632 - RNA, 19 nt, Artificial Sequence
  Description of Artificial Sequence: Synthetic oligonucleotide
  Sense strand starting at position 2759 of SEQ ID NO: 917187
aggaauaccuugcuuuaaa

SEQ ID NO: 1215633 - RNA, 19 nt, Artificial Sequence
  Description of Artificial Sequence: Synthetic oligonucleotide
  Antisense strand to SEQ ID NO: 1215632
uuuaaagcaagguauuccu

SEQ ID NO: 1215634 - RNA, 19 nt, Artificial Sequence
  Description of Artificial Sequence: Synthetic oligonucleotide
  Sense strand starting at position 2799 of SEQ ID NO: 917187
gccuguaaguauuuaguaa

SEQ ID NO: 1215635 - RNA, 19 nt, Artificial Sequence
  Description of Artificial Sequence: Synthetic oligonucleotide
  Antisense strand to SEQ ID NO: 1215634
uuacuaaauacuuacaggc

SEQ ID NO: 1215636 - RNA, 19 nt, Artificial Sequence
  Description of Artificial Sequence: Synthetic oligonucleotide
  Sense strand starting at position 2985 of SEQ ID NO: 917187
ucuauaagauuggcagcau

SEQ ID NO: 1215637 - RNA, 19 nt, Artificial Sequence
  Description of Artificial Sequence: Synthetic oligonucleotide
  Antisense strand to SEQ ID NO: 1215636
augcugccaaucuuauaga

SEQ ID NO: 1215638 - RNA, 19 nt, Artificial Sequence
  Description of Artificial Sequence: Synthetic oligonucleotide
  Sense strand starting at position 3224 of SEQ ID NO: 917187
uaguuagucaaggaaguga

SEQ ID NO: 1215639 - RNA, 19 nt, Artificial Sequence
  Description of Artificial Sequence: Synthetic oligonucleotide
  Antisense strand to SEQ ID NO: 1215638
ucacuuccuugacuaacua

SEQ ID NO: 1215640 - RNA, 19 nt, Artificial Sequence
  Description of Artificial Sequence: Synthetic oligonucleotide
  Sense strand starting at position 3788 of SEQ ID NO: 917187
gagguaucacaacagccau

SEQ ID NO: 1215641 - RNA, 19 nt, Artificial Sequence
  Description of Artificial Sequence: Synthetic oligonucleotide
  Antisense strand to SEQ ID NO: 1215640
auggcuguugugauaccuc

SEQ ID NO: 1215642 - RNA, 19 nt, Artificial Sequence
  Description of Artificial Sequence: Synthetic oligonucleotide
  Sense strand starting at position 3893 of SEQ ID NO: 917187
agaaguuagccuggugaag

SEQ ID NO: 1215643 - RNA, 19 nt, Artificial Sequence
  Description of Artificial Sequence: Synthetic oligonucleotide
  Antisense strand to SEQ ID NO: 1215642
cuucaccaggcuaacuucu

SEQ ID NO: 1215644 - RNA, 19 nt, Artificial Sequence
  Description of Artificial Sequence: Synthetic oligonucleotide
  Sense strand starting at position 3893 of SEQ ID NO: 917188
agaaguuagccuggugaag

SEQ ID NO: 1215645 - RNA, 19 nt, Artificial Sequence
  Description of Artificial Sequence: Synthetic oligonucleotide
  Antisense strand to SEQ ID NO: 1215644
cuucaccaggcuaacuucu

SEQ ID NO: 1215646 - RNA, 19 nt, Artificial Sequence
  Description of Artificial Sequence: Synthetic oligonucleotide
  Sense strand starting at position 86 of SEQ ID NO: 917188
ccauacucagagugaaauc

SEQ ID NO: 1215647 - RNA, 19 nt, Artificial Sequence
  Description of Artificial Sequence: Synthetic oligonucleotide
  Antisense strand to SEQ ID NO: 1215646
gauuucacucugaguaugg

SEQ ID NO: 1215648 - RNA, 19 nt, Artificial Sequence
  Description of Artificial Sequence: Synthetic oligonucleotide
  Sense strand starting at position 263 of SEQ ID NO: 917188
gguuuacacuuucugcaca

SEQ ID NO: 1215649 - RNA, 19 nt, Artificial Sequence
  Description of Artificial Sequence: Synthetic oligonucleotide
  Antisense strand to SEQ ID NO: 1215648
ugugcagaaaguguaaacc

SEQ ID NO: 1215650 - RNA, 19 nt, Artificial Sequence
  Description of Artificial Sequence: Synthetic oligonucleotide
  Sense strand starting at position 479 of SEQ ID NO: 917188
cugauuguucucgguggga

SEQ ID NO: 1215651 - RNA, 19 nt, Artificial Sequence
  Description of Artificial Sequence: Synthetic oligonucleotide
  Antisense strand to SEQ ID NO: 1215650
ucccaccgagaacaaucag

SEQ ID NO: 1215652 - RNA, 19 nt, Artificial Sequence
  Description of Artificial Sequence: Synthetic oligonucleotide
  Sense strand starting at position 482 of SEQ ID NO: 917188
auuguucucggugggauuu

SEQ ID NO: 1215653 - RNA, 19 nt, Artificial Sequence
  Description of Artificial Sequence: Synthetic oligonucleotide
  Antisense strand to SEQ ID NO: 1215652
aaaucccaccgagaacaau

SEQ ID NO: 1215654 - RNA, 19 nt, Artificial Sequence
  Description of Artificial Sequence: Synthetic oligonucleotide
  Sense strand starting at position 674 of SEQ ID NO: 917188
gguggacuggcaugaaaua

SEQ ID NO: 1215655 - RNA, 19 nt, Artificial Sequence
  Description of Artificial Sequence: Synthetic oligonucleotide
  Antisense strand to SEQ ID NO: 1215654
uauuucaugccaguccacc

SEQ ID NO: 1215656 - RNA, 19 nt, Artificial Sequence
  Description of Artificial Sequence: Synthetic oligonucleotide
  Sense strand starting at position 980 of SEQ ID NO: 917188
gccgguuugaaugaaaccu

SEQ ID NO: 1215657 - RNA, 19 nt, Artificial Sequence
  Description of Artificial Sequence: Synthetic oligonucleotide
  Antisense strand to SEQ ID NO: 1215656
agguuucauucaaaccggc

SEQ ID NO: 1215658 - RNA, 19 nt, Artificial Sequence
  Description of Artificial Sequence: Synthetic oligonucleotide
  Sense strand starting at position 1032 of SEQ ID NO: 917188
ugccaaauccaggagcaau

SEQ ID NO: 1215659 - RNA, 19 nt, Artificial Sequence
  Description of Artificial Sequence: Synthetic oligonucleotide
  Antisense strand to SEQ ID NO: 1215658
auugcuccuggauuuggca

SEQ ID NO: 1215660 - RNA, 19 nt, Artificial Sequence
  Description of Artificial Sequence: Synthetic oligonucleotide
  Sense strand starting at position 1193 of SEQ ID NO: 917188
cucgcugucccugaaggaa

SEQ ID NO: 1215661 - RNA, 19 nt, Artificial Sequence
  Description of Artificial Sequence: Synthetic oligonucleotide
  Antisense strand to SEQ ID NO: 1215660
uuccuucagggacagcgag

SEQ ID NO: 1215662 - RNA, 19 nt, Artificial Sequence
  Description of Artificial Sequence: Synthetic oligonucleotide
  Sense strand starting at position 2236 of SEQ ID NO: 917188
acaaguagucuuugggaga

SEQ ID NO: 1215663 - RNA, 19 nt, Artificial Sequence
  Description of Artificial Sequence: Synthetic oligonucleotide
  Antisense strand to SEQ ID NO: 1215662
ucucccaaagacuacuugu

SEQ ID NO: 1215664 - RNA, 19 nt, Artificial Sequence
  Description of Artificial Sequence: Synthetic oligonucleotide
  Sense strand starting at position 2327 of SEQ ID NO: 917188
aggugauauggccgagaga

SEQ ID NO: 1215665 - RNA, 19 nt, Artificial Sequence
  Description of Artificial Sequence: Synthetic oligonucleotide
  Antisense strand to SEQ ID NO: 1215664
ucucucggccauaucaccu

SEQ ID NO: 1215666 - RNA, 19 nt, Artificial Sequence
  Description of Artificial Sequence: Synthetic oligonucleotide
  Sense strand starting at position 2328 of SEQ ID NO: 917188
ggugauauggccgagagau

SEQ ID NO: 1215667 - RNA, 19 nt, Artificial Sequence
  Description of Artificial Sequence: Synthetic oligonucleotide
  Antisense strand to SEQ ID NO: 1215666
aucucucggccauaucacc

SEQ ID NO: 1215668 - RNA, 19 nt, Artificial Sequence
  Description of Artificial Sequence: Synthetic oligonucleotide
  Sense strand starting at position 2488 of SEQ ID NO: 917188
ugccucuucggaugaccaa

SEQ ID NO: 1215669 - RNA, 19 nt, Artificial Sequence
  Description of Artificial Sequence: Synthetic oligonucleotide
  Antisense strand to SEQ ID NO: 1215668
uuggucauccgaagaggca

SEQ ID NO: 1215670 - RNA, 19 nt, Artificial Sequence
  Description of Artificial Sequence: Synthetic oligonucleotide
  Sense strand starting at position 2550 of SEQ ID NO: 917188
gcuggaucuguucauggau

SEQ ID NO: 1215671 - RNA, 19 nt, Artificial Sequence
  Description of Artificial Sequence: Synthetic oligonucleotide
  Antisense strand to SEQ ID NO: 1215670
auccaugaacagauccagc

SEQ ID NO: 1215672 - RNA, 19 nt, Artificial Sequence
  Description of Artificial Sequence: Synthetic oligonucleotide
  Sense strand starting at position 2601 of SEQ ID NO: 917188
ugagucacucuuggaauag

SEQ ID NO: 1215673 - RNA, 19 nt, Artificial Sequence
  Description of Artificial Sequence: Synthetic oligonucleotide
  Antisense strand to SEQ ID NO: 1215672
cuauuccaagagugacuca

SEQ ID NO: 1215674 - RNA, 19 nt, Artificial Sequence
  Description of Artificial Sequence: Synthetic oligonucleotide
  Sense strand starting at position 2618 of SEQ ID NO: 917188
agugaccucugcuuagagu

SEQ ID NO: 1215675 - RNA, 19 nt, Artificial Sequence
  Description of Artificial Sequence: Synthetic oligonucleotide
  Antisense strand to SEQ ID NO: 1215674
acucuaagcagaggucacu

SEQ ID NO: 1215676 - RNA, 19 nt, Artificial Sequence
  Description of Artificial Sequence: Synthetic oligonucleotide
  Sense strand starting at position 2632 of SEQ ID NO: 917188
agagucaaauauguuccaa

SEQ ID NO: 1215677 - RNA, 19 nt, Artificial Sequence
  Description of Artificial Sequence: Synthetic oligonucleotide
  Antisense strand to SEQ ID NO: 1215676
uuggaacauauuugacucu

SEQ ID NO: 1215678 - RNA, 19 nt, Artificial Sequence
  Description of Artificial Sequence: Synthetic oligonucleotide
  Sense strand starting at position 2634 of SEQ ID NO: 917188
agucaaauauguuccaaag

SEQ ID NO: 1215679 - RNA, 19 nt, Artificial Sequence
  Description of Artificial Sequence: Synthetic oligonucleotide
  Antisense strand to SEQ ID NO: 1215678
cuuuggaacauauuugacu

SEQ ID NO: 1215680 - RNA, 19 nt, Artificial Sequence
  Description of Artificial Sequence: Synthetic oligonucleotide
  Sense strand starting at position 2856 of SEQ ID NO: 917188
aucuuagacuggcucagua

SEQ ID NO: 1215681 - RNA, 19 nt, Artificial Sequence
  Description of Artificial Sequence: Synthetic oligonucleotide
  Antisense strand to SEQ ID NO: 1215680
uacugagccagucuaagau

SEQ ID NO: 1215682 - RNA, 19 nt, Artificial Sequence
  Description of Artificial Sequence: Synthetic oligonucleotide
  Sense strand starting at position 3047 of SEQ ID NO: 917188
ccaguuauguguuugacua

SEQ ID NO: 1215683 - RNA, 19 nt, Artificial Sequence
  Description of Artificial Sequence: Synthetic oligonucleotide
  Antisense strand to SEQ ID NO: 1215682
uagucaaacacauaacugg

SEQ ID NO: 1215684 - RNA, 19 nt, Artificial Sequence
  Description of Artificial Sequence: Synthetic oligonucleotide
  Sense strand starting at position 3051 of SEQ ID NO: 917188
uuauguguuugacuacuua

SEQ ID NO: 1215685 - RNA, 19 nt, Artificial Sequence
  Description of Artificial Sequence: Synthetic oligonucleotide
  Antisense strand to SEQ ID NO: 1215684
uaaguagucaaacacauaa

SEQ ID NO: 1215686 - RNA, 19 nt, Artificial Sequence
  Description of Artificial Sequence: Synthetic oligonucleotide
  Sense strand starting at position 3055 of SEQ ID NO: 917188
guguuugacuacuuauuau

SEQ ID NO: 1215687 - RNA, 19 nt, Artificial Sequence
  Description of Artificial Sequence: Synthetic oligonucleotide
  Antisense strand to SEQ ID NO: 1215686
auaauaaguagucaaacac

SEQ ID NO: 1215688 - RNA, 19 nt, Artificial Sequence
  Description of Artificial Sequence: Synthetic oligonucleotide
  Sense strand starting at position 3095 of SEQ ID NO: 917188
acuuuccaaguaugaugua

SEQ ID NO: 1215689 - RNA, 19 nt, Artificial Sequence
  Description of Artificial Sequence: Synthetic oligonucleotide
  Antisense strand to SEQ ID NO: 1215688
uacaucauacuuggaaagu

SEQ ID NO: 1215690 - RNA, 19 nt, Artificial Sequence
  Description of Artificial Sequence: Synthetic oligonucleotide
  Sense strand starting at position 3175 of SEQ ID NO: 917188
ccacaagugaugcgauauu

SEQ ID NO: 1215691 - RNA, 19 nt, Artificial Sequence
  Description of Artificial Sequence: Synthetic oligonucleotide
  Antisense strand to SEQ ID NO: 1215690
aauaucgcaucacuugugg

SEQ ID NO: 1215692 - RNA, 19 nt, Artificial Sequence
  Description of Artificial Sequence: Synthetic oligonucleotide
  Sense strand starting at position 3455 of SEQ ID NO: 917188
gauauucuacuagggucau

SEQ ID NO: 1215693 - RNA, 19 nt, Artificial Sequence
  Description of Artificial Sequence: Synthetic oligonucleotide
  Antisense strand to SEQ ID NO: 1215692
augacccuaguagaauauc

SEQ ID NO: 1215694 - RNA, 19 nt, Artificial Sequence
  Description of Artificial Sequence: Synthetic oligonucleotide
  Sense strand starting at position 3475 of SEQ ID NO: 917188
ucuuaagagcuuuaaguaa

SEQ ID NO: 1215695 - RNA, 19 nt, Artificial Sequence
  Description of Artificial Sequence: Synthetic oligonucleotide
  Antisense strand to SEQ ID NO: 1215694
uuacuuaaagcucuuaaga

SEQ ID NO: 1215696 - RNA, 19 nt, Artificial Sequence
  Description of Artificial Sequence: Synthetic oligonucleotide
  Sense strand starting at position 3553 of SEQ ID NO: 917188
agagaaucaccuugguguu

SEQ ID NO: 1215697 - RNA, 19 nt, Artificial Sequence
  Description of Artificial Sequence: Synthetic oligonucleotide
  Antisense strand to SEQ ID NO: 1215696
aacaccaaggugauucucu

SEQ ID NO: 1215698 - RNA, 19 nt, Artificial Sequence
  Description of Artificial Sequence: Synthetic oligonucleotide
  Sense strand starting at position 3554 of SEQ ID NO: 917188
gagaaucaccuugguguuu

SEQ ID NO: 1215699 - RNA, 19 nt, Artificial Sequence
  Description of Artificial Sequence: Synthetic oligonucleotide
  Antisense strand to SEQ ID NO: 1215698
aaacaccaaggugauucuc

SEQ ID NO: 1215700 - RNA, 19 nt, Artificial Sequence
  Description of Artificial Sequence: Synthetic oligonucleotide
  Sense strand starting at position 3572 of SEQ ID NO: 917188
ugacucucucaguagcaaa

SEQ ID NO: 1215701 - RNA, 19 nt, Artificial Sequence
  Description of Artificial Sequence: Synthetic oligonucleotide
  Antisense strand to SEQ ID NO: 1215700
uuugcuacugagagaguca

SEQ ID NO: 1215702 - RNA, 19 nt, Artificial Sequence
  Description of Artificial Sequence: Synthetic oligonucleotide
  Sense strand starting at position 3591 of SEQ ID NO: 917188
gugcucucacuagaaauag

SEQ ID NO: 1215703 - RNA, 19 nt, Artificial Sequence
  Description of Artificial Sequence: Synthetic oligonucleotide
  Antisense strand to SEQ ID NO: 1215702
cuauuucuagugagagcac

SEQ ID NO: 1215704 - RNA, 19 nt, Artificial Sequence
  Description of Artificial Sequence: Synthetic oligonucleotide
  Sense strand starting at position 3599 of SEQ ID NO: 917188
acuagaaauaguugggcau

SEQ ID NO: 1215705 - RNA, 19 nt, Artificial Sequence
  Description of Artificial Sequence: Synthetic oligonucleotide
  Antisense strand to SEQ ID NO: 1215704
augcccaacuauuucuagu

SEQ ID NO: 1215706 - RNA, 19 nt, Artificial Sequence
  Description of Artificial Sequence: Synthetic oligonucleotide
  Sense strand starting at position 3602 of SEQ ID NO: 917188
agaaauaguugggcaucau

SEQ ID NO: 1215707 - RNA, 19 nt, Artificial Sequence
  Description of Artificial Sequence: Synthetic oligonucleotide
  Antisense strand to SEQ ID NO: 1215706
augaugcccaacuauuucu

SEQ ID NO: 1215708 - RNA, 19 nt, Artificial Sequence
  Description of Artificial Sequence: Synthetic oligonucleotide
  Sense strand starting at position 3603 of SEQ ID NO: 917188
gaaauaguugggcaucauu

SEQ ID NO: 1215709 - RNA, 19 nt, Artificial Sequence
  Description of Artificial Sequence: Synthetic oligonucleotide
  Antisense strand to SEQ ID NO: 1215708
aaugaugcccaacuauuuc

SEQ ID NO: 1215710 - RNA, 19 nt, Artificial Sequence
  Description of Artificial Sequence: Synthetic oligonucleotide
  Sense strand starting at position 3612 of SEQ ID NO: 917188
gggcaucauuagcucuuua

SEQ ID NO: 1215711 - RNA, 19 nt, Artificial Sequence
  Description of Artificial Sequence: Synthetic oligonucleotide
  Antisense strand to SEQ ID NO: 1215710
uaaagagcuaaugaugccc

SEQ ID NO: 1215712 - RNA, 19 nt, Artificial Sequence
  Description of Artificial Sequence: Synthetic oligonucleotide
  Sense strand starting at position 3616 of SEQ ID NO: 917188
aucauuagcucuuuaagga

SEQ ID NO: 1215713 - RNA, 19 nt, Artificial Sequence
  Description of Artificial Sequence: Synthetic oligonucleotide
  Antisense strand to SEQ ID NO: 1215712
uccuuaaagagcuaaugau

SEQ ID NO: 1215714 - RNA, 19 nt, Artificial Sequence
  Description of Artificial Sequence: Synthetic oligonucleotide
  Sense strand starting at position 3617 of SEQ ID NO: 917188
ucauuagcucuuuaaggaa

SEQ ID NO: 1215715 - RNA, 19 nt, Artificial Sequence
  Description of Artificial Sequence: Synthetic oligonucleotide
  Antisense strand to SEQ ID NO: 1215714
uuccuuaaagagcuaauga

SEQ ID NO: 1215716 - RNA, 19 nt, Artificial Sequence
  Description of Artificial Sequence: Synthetic oligonucleotide
  Sense strand starting at position 3643 of SEQ ID NO: 917188
ggcaacugauaauuaagua

SEQ ID NO: 1215717 - RNA, 19 nt, Artificial Sequence
  Description of Artificial Sequence: Synthetic oligonucleotide
  Antisense strand to SEQ ID NO: 1215716
uacuuaauuaucaguugcc

SEQ ID NO: 1215718 - RNA, 19 nt, Artificial Sequence
  Description of Artificial Sequence: Synthetic oligonucleotide
  Sense strand starting at position 3681 of SEQ ID NO: 917188
auacauuggcccuacagua

SEQ ID NO: 1215719 - RNA, 19 nt, Artificial Sequence
  Description of Artificial Sequence: Synthetic oligonucleotide
  Antisense strand to SEQ ID NO: 1215718
uacuguagggccaauguau

SEQ ID NO: 1215720 - RNA, 19 nt, Artificial Sequence
  Description of Artificial Sequence: Synthetic oligonucleotide
  Sense strand starting at position 3691 of SEQ ID NO: 917188
ccuacaguauggucauauc

SEQ ID NO: 1215721 - RNA, 19 nt, Artificial Sequence
  Description of Artificial Sequence: Synthetic oligonucleotide
  Antisense strand to SEQ ID NO: 1215720
gauaugaccauacuguagg

SEQ ID NO: 1215722 - RNA, 19 nt, Artificial Sequence
  Description of Artificial Sequence: Synthetic oligonucleotide
  Sense strand starting at position 3932 of SEQ ID NO: 917188
ucugaaaguauuggagauc

SEQ ID NO: 1215723 - RNA, 19 nt, Artificial Sequence
  Description of Artificial Sequence: Synthetic oligonucleotide
  Antisense strand to SEQ ID NO: 1215722
gaucuccaauacuuucaga

SEQ ID NO: 1215724 - RNA, 19 nt, Artificial Sequence
  Description of Artificial Sequence: Synthetic oligonucleotide
  Sense strand starting at position 3968 of SEQ ID NO: 917189
agcaaaugcuauuuaagcu

SEQ ID NO: 1215725 - RNA, 19 nt, Artificial Sequence
  Description of Artificial Sequence: Synthetic oligonucleotide
  Antisense strand to SEQ ID NO: 1215724
agcuuaaauagcauuugcu

SEQ ID NO: 1215726 - RNA, 19 nt, Artificial Sequence
  Description of Artificial Sequence: Synthetic oligonucleotide
  Sense strand starting at position 241 of SEQ ID NO: 917189
uuuauucccgaagggcaua

SEQ ID NO: 1215727 - RNA, 19 nt, Artificial Sequence
  Description of Artificial Sequence: Synthetic oligonucleotide
  Antisense strand to SEQ ID NO: 1215726
uaugcccuucgggaauaaa

SEQ ID NO: 1215728 - RNA, 19 nt, Artificial Sequence
  Description of Artificial Sequence: Synthetic oligonucleotide
  Sense strand starting at position 539 of SEQ ID NO: 917189
guuacaaccuggucauaag

SEQ ID NO: 1215729 - RNA, 19 nt, Artificial Sequence
  Description of Artificial Sequence: Synthetic oligonucleotide
  Antisense strand to SEQ ID NO: 1215728
cuuaugaccagguuguaac

SEQ ID NO: 1215730 - RNA, 19 nt, Artificial Sequence
  Description of Artificial Sequence: Synthetic oligonucleotide
  Sense strand starting at position 549 of SEQ ID NO: 917189
ggucauaagcuuuaaugag

SEQ ID NO: 1215731 - RNA, 19 nt, Artificial Sequence
  Description of Artificial Sequence: Synthetic oligonucleotide
  Antisense strand to SEQ ID NO: 1215730
cucauuaaagcuuaugacc

SEQ ID NO: 1215732 - RNA, 19 nt, Artificial Sequence
  Description of Artificial Sequence: Synthetic oligonucleotide
  Sense strand starting at position 1054 of SEQ ID NO: 917189
uggcccacgccauauuuau

SEQ ID NO: 1215733 - RNA, 19 nt, Artificial Sequence
  Description of Artificial Sequence: Synthetic oligonucleotide
  Antisense strand to SEQ ID NO: 1215732
auaaauauggcgugggcca

SEQ ID NO: 1215734 - RNA, 19 nt, Artificial Sequence
  Description of Artificial Sequence: Synthetic oligonucleotide
  Sense strand starting at position 1119 of SEQ ID NO: 917189
gcacaucagccuuauugaa

SEQ ID NO: 1215735 - RNA, 19 nt, Artificial Sequence
  Description of Artificial Sequence: Synthetic oligonucleotide
  Antisense strand to SEQ ID NO: 1215734
uucaauaaggcugaugugc

SEQ ID NO: 1215736 - RNA, 19 nt, Artificial Sequence
  Description of Artificial Sequence: Synthetic oligonucleotide
  Sense strand starting at position 1126 of SEQ ID NO: 917189
agccuuauugaauaugcuu

SEQ ID NO: 1215737 - RNA, 19 nt, Artificial Sequence
  Description of Artificial Sequence: Synthetic oligonucleotide
  Antisense strand to SEQ ID NO: 1215736
aagcauauucaauaaggcu

SEQ ID NO: 1215738 - RNA, 19 nt, Artificial Sequence
  Description of Artificial Sequence: Synthetic oligonucleotide
  Sense strand starting at position 1183 of SEQ ID NO: 917189
aucuaagagucucugucaa

SEQ ID NO: 1215739 - RNA, 19 nt, Artificial Sequence
  Description of Artificial Sequence: Synthetic oligonucleotide
  Antisense strand to SEQ ID NO: 1215738
uugacagagacucuuagau

SEQ ID NO: 1215740 - RNA, 19 nt, Artificial Sequence
  Description of Artificial Sequence: Synthetic oligonucleotide
  Sense strand starting at position 1185 of SEQ ID NO: 917189
cuaagagucucugucaaga

SEQ ID NO: 1215741 - RNA, 19 nt, Artificial Sequence
  Description of Artificial Sequence: Synthetic oligonucleotide
  Antisense strand to SEQ ID NO: 1215740
ucuugacagagacucuuag

SEQ ID NO: 1215742 - RNA, 19 nt, Artificial Sequence
  Description of Artificial Sequence: Synthetic oligonucleotide
  Sense strand starting at position 1289 of SEQ ID NO: 917189
gcagguccgguggaagaau

SEQ ID NO: 1215743 - RNA, 19 nt, Artificial Sequence
  Description of Artificial Sequence: Synthetic oligonucleotide
  Antisense strand to SEQ ID NO: 1215742
auucuuccaccggaccugc

SEQ ID NO: 1215744 - RNA, 19 nt, Artificial Sequence
  Description of Artificial Sequence: Synthetic oligonucleotide
  Sense strand starting at position 1407 of SEQ ID NO: 917189
ugcugagagccacagacau

SEQ ID NO: 1215745 - RNA, 19 nt, Artificial Sequence
  Description of Artificial Sequence: Synthetic oligonucleotide
  Antisense strand to SEQ ID NO: 1215744
augucuguggcucucagca

SEQ ID NO: 1215746 - RNA, 19 nt, Artificial Sequence
  Description of Artificial Sequence: Synthetic oligonucleotide
  Sense strand starting at position 1567 of SEQ ID NO: 917189
ggcucauggcuuuauaauu

SEQ ID NO: 1215747 - RNA, 19 nt, Artificial Sequence
  Description of Artificial Sequence: Synthetic oligonucleotide
  Antisense strand to SEQ ID NO: 1215746
aauuauaaagccaugagcc

SEQ ID NO: 1215748 - RNA, 19 nt, Artificial Sequence
  Description of Artificial Sequence: Synthetic oligonucleotide
  Sense strand starting at position 1573 of SEQ ID NO: 917189
uggcuuuauaauugggaga

SEQ ID NO: 1215749 - RNA, 19 nt, Artificial Sequence
  Description of Artificial Sequence: Synthetic oligonucleotide
  Antisense strand to SEQ ID NO: 1215748
ucucccaauuauaaagcca

SEQ ID NO: 1215750 - RNA, 19 nt, Artificial Sequence
  Description of Artificial Sequence: Synthetic oligonucleotide
  Sense strand starting at position 1574 of SEQ ID NO: 917189
ggcuuuauaauugggagag

SEQ ID NO: 1215751 - RNA, 19 nt, Artificial Sequence
  Description of Artificial Sequence: Synthetic oligonucleotide
  Antisense strand to SEQ ID NO: 1215750
cucucccaauuauaaagcc

SEQ ID NO: 1215752 - RNA, 19 nt, Artificial Sequence
  Description of Artificial Sequence: Synthetic oligonucleotide
  Sense strand starting at position 1872 of SEQ ID NO: 917189
ccguuaagucaggcuuugu

SEQ ID NO: 1215753 - RNA, 19 nt, Artificial Sequence
  Description of Artificial Sequence: Synthetic oligonucleotide
  Antisense strand to SEQ ID NO: 1215752
acaaagccugacuuaacgg

SEQ ID NO: 1215754 - RNA, 19 nt, Artificial Sequence
  Description of Artificial Sequence: Synthetic oligonucleotide
  Sense strand starting at position 1880 of SEQ ID NO: 917189
ucaggcuuugucuaauuga

SEQ ID NO: 1215755 - RNA, 19 nt, Artificial Sequence
  Description of Artificial Sequence: Synthetic oligonucleotide
  Antisense strand to SEQ ID NO: 1215754
ucaauuagacaaagccuga

SEQ ID NO: 1215756 - RNA, 19 nt, Artificial Sequence
  Description of Artificial Sequence: Synthetic oligonucleotide
  Sense strand starting at position 1927 of SEQ ID NO: 917189
acuuauuaugcugguauuu

SEQ ID NO: 1215757 - RNA, 19 nt, Artificial Sequence
  Description of Artificial Sequence: Synthetic oligonucleotide
  Antisense strand to SEQ ID NO: 1215756
aaauaccagcauaauaagu

SEQ ID NO: 1215758 - RNA, 19 nt, Artificial Sequence
  Description of Artificial Sequence: Synthetic oligonucleotide
  Sense strand starting at position 1975 of SEQ ID NO: 917189
ugacuuuaauugccuugaa

SEQ ID NO: 1215759 - RNA, 19 nt, Artificial Sequence
  Description of Artificial Sequence: Synthetic oligonucleotide
  Antisense strand to SEQ ID NO: 1215758
uucaaggcaauuaaaguca

SEQ ID NO: 1215760 - RNA, 19 nt, Artificial Sequence
  Description of Artificial Sequence: Synthetic oligonucleotide
  Sense strand starting at position 2222 of SEQ ID NO: 917189
ccaaacuugugaccucaga

SEQ ID NO: 1215761 - RNA, 19 nt, Artificial Sequence
  Description of Artificial Sequence: Synthetic oligonucleotide
  Antisense strand to SEQ ID NO: 1215760
ucugaggucacaaguuugg

SEQ ID NO: 1215762 - RNA, 19 nt, Artificial Sequence
  Description of Artificial Sequence: Synthetic oligonucleotide
  Sense strand starting at position 2261 of SEQ ID NO: 917189
ugcagugagcucuucguca

SEQ ID NO: 1215763 - RNA, 19 nt, Artificial Sequence
  Description of Artificial Sequence: Synthetic oligonucleotide
  Antisense strand to SEQ ID NO: 1215762
ugacgaagagcucacugca

SEQ ID NO: 1215764 - RNA, 19 nt, Artificial Sequence
  Description of Artificial Sequence: Synthetic oligonucleotide
  Sense strand starting at position 2266 of SEQ ID NO: 917189
ugagcucuucgucaaagac

SEQ ID NO: 1215765 - RNA, 19 nt, Artificial Sequence
  Description of Artificial Sequence: Synthetic oligonucleotide
  Antisense strand to SEQ ID NO: 1215764
gucuuugacgaagagcuca

SEQ ID NO: 1215766 - RNA, 19 nt, Artificial Sequence
  Description of Artificial Sequence: Synthetic oligonucleotide
  Sense strand starting at position 2417 of SEQ ID NO: 917189
aaggaauugcuuuguucca

SEQ ID NO: 1215767 - RNA, 19 nt, Artificial Sequence
  Description of Artificial Sequence: Synthetic oligonucleotide
  Antisense strand to SEQ ID NO: 1215766
uggaacaaagcaauuccuu

SEQ ID NO: 1215768 - RNA, 19 nt, Artificial Sequence
  Description of Artificial Sequence: Synthetic oligonucleotide
  Sense strand starting at position 2551 of SEQ ID NO: 917189
gucauuaucugauuguaug

SEQ ID NO: 1215769 - RNA, 19 nt, Artificial Sequence
  Description of Artificial Sequence: Synthetic oligonucleotide
  Antisense strand to SEQ ID NO: 1215768
cauacaaucagauaaugac

SEQ ID NO: 1215770 - RNA, 19 nt, Artificial Sequence
  Description of Artificial Sequence: Synthetic oligonucleotide
  Sense strand starting at position 2626 of SEQ ID NO: 917189
uaaagugaagcaugacuga

SEQ ID NO: 1215771 - RNA, 19 nt, Artificial Sequence
  Description of Artificial Sequence: Synthetic oligonucleotide
  Antisense strand to SEQ ID NO: 1215770
ucagucaugcuucacuuua

SEQ ID NO: 1215772 - RNA, 19 nt, Artificial Sequence
  Description of Artificial Sequence: Synthetic oligonucleotide
  Sense strand starting at position 2672 of SEQ ID NO: 917189
ggugcuucuggagaauggu

SEQ ID NO: 1215773 - RNA, 19 nt, Artificial Sequence
  Description of Artificial Sequence: Synthetic oligonucleotide
  Antisense strand to SEQ ID NO: 1215772
accauucuccagaagcacc

SEQ ID NO: 1215774 - RNA, 19 nt, Artificial Sequence
  Description of Artificial Sequence: Synthetic oligonucleotide
  Sense strand starting at position 2748 of SEQ ID NO: 917189
caggacugucuugguaacu

SEQ ID NO: 1215775 - RNA, 19 nt, Artificial Sequence
  Description of Artificial Sequence: Synthetic oligonucleotide
  Antisense strand to SEQ ID NO: 1215774
aguuaccaagacaguccug

SEQ ID NO: 1215776 - RNA, 19 nt, Artificial Sequence
  Description of Artificial Sequence: Synthetic oligonucleotide
  Sense strand starting at position 2785 of SEQ ID NO: 917189
gacuuagugccacaaggau

SEQ ID NO: 1215777 - RNA, 19 nt, Artificial Sequence
  Description of Artificial Sequence: Synthetic oligonucleotide
  Antisense strand to SEQ ID NO: 1215776
auccuuguggcacuaaguc

SEQ ID NO: 1215778 - RNA, 19 nt, Artificial Sequence
  Description of Artificial Sequence: Synthetic oligonucleotide
  Sense strand starting at position 2803 of SEQ ID NO: 917189
ugcgaaacggcuucagcua

SEQ ID NO: 1215779 - RNA, 19 nt, Artificial Sequence
  Description of Artificial Sequence: Synthetic oligonucleotide
  Antisense strand to SEQ ID NO: 1215778
uagcugaagccguuucgca

SEQ ID NO: 1215780 - RNA, 19 nt, Artificial Sequence
  Description of Artificial Sequence: Synthetic oligonucleotide
  Sense strand starting at position 2848 of SEQ ID NO: 917189
agacacauauuguuauguu

SEQ ID NO: 1215781 - RNA, 19 nt, Artificial Sequence
  Description of Artificial Sequence: Synthetic oligonucleotide
  Antisense strand to SEQ ID NO: 1215780
aacauaacaauaugugucu

SEQ ID NO: 1215782 - RNA, 19 nt, Artificial Sequence
  Description of Artificial Sequence: Synthetic oligonucleotide
  Sense strand starting at position 2944 of SEQ ID NO: 917189
aguuguugugacuaauuaa

SEQ ID NO: 1215783 - RNA, 19 nt, Artificial Sequence
  Description of Artificial Sequence: Synthetic oligonucleotide
  Antisense strand to SEQ ID NO: 1215782
uuaauuagucacaacaacu

SEQ ID NO: 1215784 - RNA, 19 nt, Artificial Sequence
  Description of Artificial Sequence: Synthetic oligonucleotide
  Sense strand starting at position 2947 of SEQ ID NO: 917189
uguugugacuaauuaaaug

SEQ ID NO: 1215785 - RNA, 19 nt, Artificial Sequence
  Description of Artificial Sequence: Synthetic oligonucleotide
  Antisense strand to SEQ ID NO: 1215784
cauuuaauuagucacaaca

SEQ ID NO: 1215786 - RNA, 19 nt, Artificial Sequence
  Description of Artificial Sequence: Synthetic oligonucleotide
  Sense strand starting at position 2971 of SEQ ID NO: 917189
ucuuaugucugacucuaca

SEQ ID NO: 1215787 - RNA, 19 nt, Artificial Sequence
  Description of Artificial Sequence: Synthetic oligonucleotide
  Antisense strand to SEQ ID NO: 1215786
uguagagucagacauaaga

SEQ ID NO: 1215788 - RNA, 19 nt, Artificial Sequence
  Description of Artificial Sequence: Synthetic oligonucleotide
  Sense strand starting at position 3090 of SEQ ID NO: 917189
cucagccagaguugagaau

SEQ ID NO: 1215789 - RNA, 19 nt, Artificial Sequence
  Description of Artificial Sequence: Synthetic oligonucleotide
  Antisense strand to SEQ ID NO: 1215788
auucucaacucuggcugag

SEQ ID NO: 1215790 - RNA, 19 nt, Artificial Sequence
  Description of Artificial Sequence: Synthetic oligonucleotide
  Sense strand starting at position 3099 of SEQ ID NO: 917189
aguugagaaucacugaauc

SEQ ID NO: 1215791 - RNA, 19 nt, Artificial Sequence
  Description of Artificial Sequence: Synthetic oligonucleotide
  Antisense strand to SEQ ID NO: 1215790
gauucagugauucucaacu

SEQ ID NO: 1215792 - RNA, 19 nt, Artificial Sequence
  Description of Artificial Sequence: Synthetic oligonucleotide
  Sense strand starting at position 3330 of SEQ ID NO: 917189
uggagacucuaggcuagaa

SEQ ID NO: 1215793 - RNA, 19 nt, Artificial Sequence
  Description of Artificial Sequence: Synthetic oligonucleotide
  Antisense strand to SEQ ID NO: 1215792
uucuagccuagagucucca

SEQ ID NO: 1215794 - RNA, 19 nt, Artificial Sequence
  Description of Artificial Sequence: Synthetic oligonucleotide
  Sense strand starting at position 3383 of SEQ ID NO: 917189
gucaauccuuggcuugaaa

SEQ ID NO: 1215795 - RNA, 19 nt, Artificial Sequence
  Description of Artificial Sequence: Synthetic oligonucleotide
  Antisense strand to SEQ ID NO: 1215794
uuucaagccaaggauugac

SEQ ID NO: 1215796 - RNA, 19 nt, Artificial Sequence
  Description of Artificial Sequence: Synthetic oligonucleotide
  Sense strand starting at position 3481 of SEQ ID NO: 917189
aggacacuuauuggaugua

SEQ ID NO: 1215797 - RNA, 19 nt, Artificial Sequence
  Description of Artificial Sequence: Synthetic oligonucleotide
  Antisense strand to SEQ ID NO: 1215796
uacauccaauaaguguccu

SEQ ID NO: 1215798 - RNA, 19 nt, Artificial Sequence
  Description of Artificial Sequence: Synthetic oligonucleotide
  Sense strand starting at position 3484 of SEQ ID NO: 917189
acacuuauuggauguagag

SEQ ID NO: 1215799 - RNA, 19 nt, Artificial Sequence
  Description of Artificial Sequence: Synthetic oligonucleotide
  Antisense strand to SEQ ID NO: 1215798
cucuacauccaauaagugu

SEQ ID NO: 1215800 - RNA, 19 nt, Artificial Sequence
  Description of Artificial Sequence: Synthetic oligonucleotide
  Sense strand starting at position 3599 of SEQ ID NO: 917189
gguucugagacauggacau

SEQ ID NO: 1215801 - RNA, 19 nt, Artificial Sequence
  Description of Artificial Sequence: Synthetic oligonucleotide
  Antisense strand to SEQ ID NO: 1215800
auguccaugucucagaacc

SEQ ID NO: 1215802 - RNA, 19 nt, Artificial Sequence
  Description of Artificial Sequence: Synthetic oligonucleotide
  Sense strand starting at position 3864 of SEQ ID NO: 917189
uggagucaauaauucuuau

SEQ ID NO: 1215803 - RNA, 19 nt, Artificial Sequence
  Description of Artificial Sequence: Synthetic oligonucleotide
  Antisense strand to SEQ ID NO: 1215802
auaagaauuauugacucca

SEQ ID NO: 1215804 - RNA, 19 nt, Artificial Sequence
  Description of Artificial Sequence: Synthetic oligonucleotide
  Sense strand starting at position 3939 of SEQ ID NO: 917189
cuagauaacucagcuaguc

SEQ ID NO: 1215805 - RNA, 19 nt, Artificial Sequence
  Description of Artificial Sequence: Synthetic oligonucleotide
  Antisense strand to SEQ ID NO: 1215804
gacuagcugaguuaucuag

SEQ ID NO: 1215806 - RNA, 19 nt, Artificial Sequence
  Description of Artificial Sequence: Synthetic oligonucleotide
  Sense strand starting at position 3939 of SEQ ID NO: 917190
cuagauaacucagcuaguc

SEQ ID NO: 1215807 - RNA, 19 nt, Artificial Sequence
  Description of Artificial Sequence: Synthetic oligonucleotide
  Antisense strand to SEQ ID NO: 1215806
gacuagcugaguuaucuag

SEQ ID NO: 1215808 - RNA, 19 nt, Artificial Sequence
  Description of Artificial Sequence: Synthetic oligonucleotide
  Sense strand starting at position 22 of SEQ ID NO: 917190
aggucaaucuaaucaaggu

SEQ ID NO: 1215809 - RNA, 19 nt, Artificial Sequence
  Description of Artificial Sequence: Synthetic oligonucleotide
  Antisense strand to SEQ ID NO: 1215808
accuugauuagauugaccu

SEQ ID NO: 1215810 - RNA, 19 nt, Artificial Sequence
  Description of Artificial Sequence: Synthetic oligonucleotide
  Sense strand starting at position 89 of SEQ ID NO: 917190
ggcuuaccacaucaugcaa

SEQ ID NO: 1215811 - RNA, 19 nt, Artificial Sequence
  Description of Artificial Sequence: Synthetic oligonucleotide
  Antisense strand to SEQ ID NO: 1215810
uugcaugaugugguaagcc

SEQ ID NO: 1215812 - RNA, 19 nt, Artificial Sequence
  Description of Artificial Sequence: Synthetic oligonucleotide
  Sense strand starting at position 362 of SEQ ID NO: 917190
uguccuuagggucaacuua

SEQ ID NO: 1215813 - RNA, 19 nt, Artificial Sequence
  Description of Artificial Sequence: Synthetic oligonucleotide
  Antisense strand to SEQ ID NO: 1215812
uaaguugacccuaaggaca

SEQ ID NO: 1215814 - RNA, 19 nt, Artificial Sequence
  Description of Artificial Sequence: Synthetic oligonucleotide
  Sense strand starting at position 395 of SEQ ID NO: 917190
gccaaucauguugaucgaa

SEQ ID NO: 1215815 - RNA, 19 nt, Artificial Sequence
  Description of Artificial Sequence: Synthetic oligonucleotide
  Antisense strand to SEQ ID NO: 1215814
uucgaucaacaugauuggc

SEQ ID NO: 1215816 - RNA, 19 nt, Artificial Sequence
  Description of Artificial Sequence: Synthetic oligonucleotide
  Sense strand starting at position 397 of SEQ ID NO: 917190
caaucauguugaucgaaua

SEQ ID NO: 1215817 - RNA, 19 nt, Artificial Sequence
  Description of Artificial Sequence: Synthetic oligonucleotide
  Antisense strand to SEQ ID NO: 1215816
uauucgaucaacaugauug

SEQ ID NO: 1215818 - RNA, 19 nt, Artificial Sequence
  Description of Artificial Sequence: Synthetic oligonucleotide
  Sense strand starting at position 409 of SEQ ID NO: 917190
ucgaauaaacuacguaagu

SEQ ID NO: 1215819 - RNA, 19 nt, Artificial Sequence
  Description of Artificial Sequence: Synthetic oligonucleotide
  Antisense strand to SEQ ID NO: 1215818
acuuacguaguuuauucga

SEQ ID NO: 1215820 - RNA, 19 nt, Artificial Sequence
  Description of Artificial Sequence: Synthetic oligonucleotide
  Sense strand starting at position 410 of SEQ ID NO: 917190
cgaauaaacuacguaaguu

SEQ ID NO: 1215821 - RNA, 19 nt, Artificial Sequence
  Description of Artificial Sequence: Synthetic oligonucleotide
  Antisense strand to SEQ ID NO: 1215820
aacuuacguaguuuauucg

SEQ ID NO: 1215822 - RNA, 19 nt, Artificial Sequence
  Description of Artificial Sequence: Synthetic oligonucleotide
  Sense strand starting at position 442 of SEQ ID NO: 917190
cacucuguuucgguauaca

SEQ ID NO: 1215823 - RNA, 19 nt, Artificial Sequence
  Description of Artificial Sequence: Synthetic oligonucleotide
  Antisense strand to SEQ ID NO: 1215822
uguauaccgaaacagagug

SEQ ID NO: 1215824 - RNA, 19 nt, Artificial Sequence
  Description of Artificial Sequence: Synthetic oligonucleotide
  Sense strand starting at position 937 of SEQ ID NO: 917190
gugccuuagccaggacaau

SEQ ID NO: 1215825 - RNA, 19 nt, Artificial Sequence
  Description of Artificial Sequence: Synthetic oligonucleotide
  Antisense strand to SEQ ID NO: 1215824
auuguccuggcuaaggcac

SEQ ID NO: 1215826 - RNA, 19 nt, Artificial Sequence
  Description of Artificial Sequence: Synthetic oligonucleotide
  Sense strand starting at position 986 of SEQ ID NO: 917190
ccacuaagggucugugcau

SEQ ID NO: 1215827 - RNA, 19 nt, Artificial Sequence
  Description of Artificial Sequence: Synthetic oligonucleotide
  Antisense strand to SEQ ID NO: 1215826
augcacagacccuuagugg

SEQ ID NO: 1215828 - RNA, 19 nt, Artificial Sequence
  Description of Artificial Sequence: Synthetic oligonucleotide
  Sense strand starting at position 987 of SEQ ID NO: 917190
cacuaagggucugugcauu

SEQ ID NO: 1215829 - RNA, 19 nt, Artificial Sequence
  Description of Artificial Sequence: Synthetic oligonucleotide
  Antisense strand to SEQ ID NO: 1215828
aaugcacagacccuuagug

SEQ ID NO: 1215830 - RNA, 19 nt, Artificial Sequence
  Description of Artificial Sequence: Synthetic oligonucleotide
  Sense strand starting at position 1063 of SEQ ID NO: 917190
cuggcuaauuuccagagaa

SEQ ID NO: 1215831 - RNA, 19 nt, Artificial Sequence
  Description of Artificial Sequence: Synthetic oligonucleotide
  Antisense strand to SEQ ID NO: 1215830
uucucuggaaauuagccag

SEQ ID NO: 1215832 - RNA, 19 nt, Artificial Sequence
  Description of Artificial Sequence: Synthetic oligonucleotide
  Sense strand starting at position 1173 of SEQ ID NO: 917190
ucccaacuguggucaaaca

SEQ ID NO: 1215833 - RNA, 19 nt, Artificial Sequence
  Description of Artificial Sequence: Synthetic oligonucleotide
  Antisense strand to SEQ ID NO: 1215832
uguuugaccacaguuggga

SEQ ID NO: 1215834 - RNA, 19 nt, Artificial Sequence
  Description of Artificial Sequence: Synthetic oligonucleotide
  Sense strand starting at position 1174 of SEQ ID NO: 917190
cccaacuguggucaaacaa

SEQ ID NO: 1215835 - RNA, 19 nt, Artificial Sequence
  Description of Artificial Sequence: Synthetic oligonucleotide
  Antisense strand to SEQ ID NO: 1215834
uuguuugaccacaguuggg

SEQ ID NO: 1215836 - RNA, 19 nt, Artificial Sequence
  Description of Artificial Sequence: Synthetic oligonucleotide
  Sense strand starting at position 1301 of SEQ ID NO: 917190
accgauguggacugaauaa

SEQ ID NO: 1215837 - RNA, 19 nt, Artificial Sequence
  Description of Artificial Sequence: Synthetic oligonucleotide
  Antisense strand to SEQ ID NO: 1215836
uuauucaguccacaucggu

SEQ ID NO: 1215838 - RNA, 19 nt, Artificial Sequence
  Description of Artificial Sequence: Synthetic oligonucleotide
  Sense strand starting at position 2962 of SEQ ID NO: 917190
cguucuaaccuggaaugga

SEQ ID NO: 1215839 - RNA, 19 nt, Artificial Sequence
  Description of Artificial Sequence: Synthetic oligonucleotide
  Antisense strand to SEQ ID NO: 1215838
uccauuccagguuagaacg

SEQ ID NO: 1215840 - RNA, 19 nt, Artificial Sequence
  Description of Artificial Sequence: Synthetic oligonucleotide
  Sense strand starting at position 3220 of SEQ ID NO: 917190
aaaggagugucuuaaugau

SEQ ID NO: 1215841 - RNA, 19 nt, Artificial Sequence
  Description of Artificial Sequence: Synthetic oligonucleotide
  Antisense strand to SEQ ID NO: 1215840
aucauuaagacacuccuuu

SEQ ID NO: 1215842 - RNA, 19 nt, Artificial Sequence
  Description of Artificial Sequence: Synthetic oligonucleotide
  Sense strand starting at position 3224 of SEQ ID NO: 917190
gagugucuuaaugauugga

SEQ ID NO: 1215843 - RNA, 19 nt, Artificial Sequence
  Description of Artificial Sequence: Synthetic oligonucleotide
  Antisense strand to SEQ ID NO: 1215842
uccaaucauuaagacacuc

SEQ ID NO: 1215844 - RNA, 19 nt, Artificial Sequence
  Description of Artificial Sequence: Synthetic oligonucleotide
  Sense strand starting at position 3226 of SEQ ID NO: 917190
gugucuuaaugauuggauu

SEQ ID NO: 1215845 - RNA, 19 nt, Artificial Sequence
  Description of Artificial Sequence: Synthetic oligonucleotide
  Antisense strand to SEQ ID NO: 1215844
aauccaaucauuaagacac

SEQ ID NO: 1215846 - RNA, 19 nt, Artificial Sequence
  Description of Artificial Sequence: Synthetic oligonucleotide
  Sense strand starting at position 3227 of SEQ ID NO: 917190
ugucuuaaugauuggauua

SEQ ID NO: 1215847 - RNA, 19 nt, Artificial Sequence
  Description of Artificial Sequence: Synthetic oligonucleotide
  Antisense strand to SEQ ID NO: 1215846
uaauccaaucauuaagaca

SEQ ID NO: 1215848 - RNA, 19 nt, Artificial Sequence
  Description of Artificial Sequence: Synthetic oligonucleotide
  Sense strand starting at position 3229 of SEQ ID NO: 917190
ucuuaaugauuggauuacu

SEQ ID NO: 1215849 - RNA, 19 nt, Artificial Sequence
  Description of Artificial Sequence: Synthetic oligonucleotide
  Antisense strand to SEQ ID NO: 1215848
aguaauccaaucauuaaga

SEQ ID NO: 1215850 - RNA, 19 nt, Artificial Sequence
  Description of Artificial Sequence: Synthetic oligonucleotide
  Sense strand starting at position 3239 of SEQ ID NO: 917190
uggauuacuugugaaauau

SEQ ID NO: 1215851 - RNA, 19 nt, Artificial Sequence
  Description of Artificial Sequence: Synthetic oligonucleotide
  Antisense strand to SEQ ID NO: 1215850
auauuucacaaguaaucca

SEQ ID NO: 1215852 - RNA, 19 nt, Artificial Sequence
  Description of Artificial Sequence: Synthetic oligonucleotide
  Sense strand starting at position 3271 of SEQ ID NO: 917190
cuccuacaggcuugacuua

SEQ ID NO: 1215853 - RNA, 19 nt, Artificial Sequence
  Description of Artificial Sequence: Synthetic oligonucleotide
  Antisense strand to SEQ ID NO: 1215852
uaagucaagccuguaggag

SEQ ID NO: 1215854 - RNA, 19 nt, Artificial Sequence
  Description of Artificial Sequence: Synthetic oligonucleotide
  Sense strand starting at position 3542 of SEQ ID NO: 917190
acagauaauugugucguaa

SEQ ID NO: 1215855 - RNA, 19 nt, Artificial Sequence
  Description of Artificial Sequence: Synthetic oligonucleotide
  Antisense strand to SEQ ID NO: 1215854
uuacgacacaauuaucugu

SEQ ID NO: 1215856 - RNA, 19 nt, Artificial Sequence
  Description of Artificial Sequence: Synthetic oligonucleotide
  Sense strand starting at position 3557 of SEQ ID NO: 917190
guaauacagcaguggcauu

SEQ ID NO: 1215857 - RNA, 19 nt, Artificial Sequence
  Description of Artificial Sequence: Synthetic oligonucleotide
  Antisense strand to SEQ ID NO: 1215856
aaugccacugcuguauuac

SEQ ID NO: 1215858 - RNA, 19 nt, Artificial Sequence
  Description of Artificial Sequence: Synthetic oligonucleotide
  Sense strand starting at position 3586 of SEQ ID NO: 917190
ccuggucuuagguagaauu

SEQ ID NO: 1215859 - RNA, 19 nt, Artificial Sequence
  Description of Artificial Sequence: Synthetic oligonucleotide
  Antisense strand to SEQ ID NO: 1215858
aauucuaccuaagaccagg

SEQ ID NO: 1215860 - RNA, 19 nt, Artificial Sequence
  Description of Artificial Sequence: Synthetic oligonucleotide
  Sense strand starting at position 3621 of SEQ ID NO: 917190
uugagaugguuguagauca

SEQ ID NO: 1215861 - RNA, 19 nt, Artificial Sequence
  Description of Artificial Sequence: Synthetic oligonucleotide
  Antisense strand to SEQ ID NO: 1215860
ugaucuacaaccaucucaa

SEQ ID NO: 1215862 - RNA, 19 nt, Artificial Sequence
  Description of Artificial Sequence: Synthetic oligonucleotide
  Sense strand starting at position 3628 of SEQ ID NO: 917190
gguuguagaucacaugaag

SEQ ID NO: 1215863 - RNA, 19 nt, Artificial Sequence
  Description of Artificial Sequence: Synthetic oligonucleotide
  Antisense strand to SEQ ID NO: 1215862
cuucaugugaucuacaacc

SEQ ID NO: 1215864 - RNA, 19 nt, Artificial Sequence
  Description of Artificial Sequence: Synthetic oligonucleotide
  Sense strand starting at position 3642 of SEQ ID NO: 917190
ugaaguuguaaggaguaau

SEQ ID NO: 1215865 - RNA, 19 nt, Artificial Sequence
  Description of Artificial Sequence: Synthetic oligonucleotide
  Antisense strand to SEQ ID NO: 1215864
auuacuccuuacaacuuca

SEQ ID NO: 1215866 - RNA, 19 nt, Artificial Sequence
  Description of Artificial Sequence: Synthetic oligonucleotide
  Sense strand starting at position 3767 of SEQ ID NO: 917190
uugagauugcaccaacuau

SEQ ID NO: 1215867 - RNA, 19 nt, Artificial Sequence
  Description of Artificial Sequence: Synthetic oligonucleotide
  Antisense strand to SEQ ID NO: 1215866
auaguuggugcaaucucaa

SEQ ID NO: 1215868 - RNA, 19 nt, Artificial Sequence
  Description of Artificial Sequence: Synthetic oligonucleotide
  Sense strand starting at position 3789 of SEQ ID NO: 917190
ugcacuagugagugugaau

SEQ ID NO: 1215869 - RNA, 19 nt, Artificial Sequence
  Description of Artificial Sequence: Synthetic oligonucleotide
  Antisense strand to SEQ ID NO: 1215868
auucacacucacuagugca

SEQ ID NO: 1215870 - RNA, 19 nt, Artificial Sequence
  Description of Artificial Sequence: Synthetic oligonucleotide
  Sense strand starting at position 3812 of SEQ ID NO: 917190
accugugugucuucucaau

SEQ ID NO: 1215871 - RNA, 19 nt, Artificial Sequence
  Description of Artificial Sequence: Synthetic oligonucleotide
  Antisense strand to SEQ ID NO: 1215870
auugagaagacacacaggu

SEQ ID NO: 1215872 - RNA, 19 nt, Artificial Sequence
  Description of Artificial Sequence: Synthetic oligonucleotide
  Sense strand starting at position 3814 of SEQ ID NO: 917190
cugugugucuucucaauaa

SEQ ID NO: 1215873 - RNA, 19 nt, Artificial Sequence
  Description of Artificial Sequence: Synthetic oligonucleotide
  Antisense strand to SEQ ID NO: 1215872
uuauugagaagacacacag

SEQ ID NO: 1215874 - RNA, 19 nt, Artificial Sequence
  Description of Artificial Sequence: Synthetic oligonucleotide
  Sense strand starting at position 3858 of SEQ ID NO: 917190
uugagauacauccgcauug

SEQ ID NO: 1215875 - RNA, 19 nt, Artificial Sequence
  Description of Artificial Sequence: Synthetic oligonucleotide
  Antisense strand to SEQ ID NO: 1215874
caaugcggauguaucucaa

SEQ ID NO: 1215876 - RNA, 19 nt, Artificial Sequence
  Description of Artificial Sequence: Synthetic oligonucleotide
  Sense strand starting at position 3859 of SEQ ID NO: 917190
ugagauacauccgcauugu

SEQ ID NO: 1215877 - RNA, 19 nt, Artificial Sequence
  Description of Artificial Sequence: Synthetic oligonucleotide
  Antisense strand to SEQ ID NO: 1215876
acaaugcggauguaucuca

SEQ ID NO: 1215878 - RNA, 19 nt, Artificial Sequence
  Description of Artificial Sequence: Synthetic oligonucleotide
  Sense strand starting at position 3860 of SEQ ID NO: 917190
gagauacauccgcauuguu

SEQ ID NO: 1215879 - RNA, 19 nt, Artificial Sequence
  Description of Artificial Sequence: Synthetic oligonucleotide
  Antisense strand to SEQ ID NO: 1215878
aacaaugcggauguaucuc

SEQ ID NO: 1215880 - RNA, 19 nt, Artificial Sequence
  Description of Artificial Sequence: Synthetic oligonucleotide
  Sense strand starting at position 3870 of SEQ ID NO: 917190
cgcauuguuauguguauca

SEQ ID NO: 1215881 - RNA, 19 nt, Artificial Sequence
  Description of Artificial Sequence: Synthetic oligonucleotide
  Antisense strand to SEQ ID NO: 1215880
ugauacacauaacaaugcg

SEQ ID NO: 1215882 - RNA, 19 nt, Artificial Sequence
  Description of Artificial Sequence: Synthetic oligonucleotide
  Sense strand starting at position 3881 of SEQ ID NO: 917190
guguaucaauugcucaaga

SEQ ID NO: 1215883 - RNA, 19 nt, Artificial Sequence
  Description of Artificial Sequence: Synthetic oligonucleotide
  Antisense strand to SEQ ID NO: 1215882
ucuugagcaauugauacac

SEQ ID NO: 1215884 - RNA, 19 nt, Artificial Sequence
  Description of Artificial Sequence: Synthetic oligonucleotide
  Sense strand starting at position 3882 of SEQ ID NO: 917190
uguaucaauugcucaagau

SEQ ID NO: 1215885 - RNA, 19 nt, Artificial Sequence
  Description of Artificial Sequence: Synthetic oligonucleotide
  Antisense strand to SEQ ID NO: 1215884
aucuugagcaauugauaca

SEQ ID NO: 1215886 - RNA, 19 nt, Artificial Sequence
  Description of Artificial Sequence: Synthetic oligonucleotide
  Sense strand starting at position 3883 of SEQ ID NO: 917191
guaucaauugcucaagaug

SEQ ID NO: 1215887 - RNA, 19 nt, Artificial Sequence
  Description of Artificial Sequence: Synthetic oligonucleotide
  Antisense strand to SEQ ID NO: 1215886
caucuugagcaauugauac

SEQ ID NO: 1215888 - RNA, 19 nt, Artificial Sequence
  Description of Artificial Sequence: Synthetic oligonucleotide
  Sense strand starting at position 320 of SEQ ID NO: 917191
cuuccagagcucugaguga

SEQ ID NO: 1215889 - RNA, 19 nt, Artificial Sequence
  Description of Artificial Sequence: Synthetic oligonucleotide
  Antisense strand to SEQ ID NO: 1215888
ucacucagagcucuggaag

SEQ ID NO: 1215890 - RNA, 19 nt, Artificial Sequence
  Description of Artificial Sequence: Synthetic oligonucleotide
  Sense strand starting at position 374 of SEQ ID NO: 917191
ugagacgguucuguuugaa

SEQ ID NO: 1215891 - RNA, 19 nt, Artificial Sequence
  Description of Artificial Sequence: Synthetic oligonucleotide
  Antisense strand to SEQ ID NO: 1215890
uucaaacagaaccgucuca

SEQ ID NO: 1215892 - RNA, 19 nt, Artificial Sequence
  Description of Artificial Sequence: Synthetic oligonucleotide
  Sense strand starting at position 379 of SEQ ID NO: 917191
cgguucuguuugaaucgga

SEQ ID NO: 1215893 - RNA, 19 nt, Artificial Sequence
  Description of Artificial Sequence: Synthetic oligonucleotide
  Antisense strand to SEQ ID NO: 1215892
uccgauucaaacagaaccg

SEQ ID NO: 1215894 - RNA, 19 nt, Artificial Sequence
  Description of Artificial Sequence: Synthetic oligonucleotide
  Sense strand starting at position 382 of SEQ ID NO: 917191
uucuguuugaaucggaaga

SEQ ID NO: 1215895 - RNA, 19 nt, Artificial Sequence
  Description of Artificial Sequence: Synthetic oligonucleotide
  Antisense strand to SEQ ID NO: 1215894
ucuuccgauucaaacagaa

SEQ ID NO: 1215896 - RNA, 19 nt, Artificial Sequence
  Description of Artificial Sequence: Synthetic oligonucleotide
  Sense strand starting at position 383 of SEQ ID NO: 917191
ucuguuugaaucggaagag

SEQ ID NO: 1215897 - RNA, 19 nt, Artificial Sequence
  Description of Artificial Sequence: Synthetic oligonucleotide
  Antisense strand to SEQ ID NO: 1215896
cucuuccgauucaaacaga

SEQ ID NO: 1215898 - RNA, 19 nt, Artificial Sequence
  Description of Artificial Sequence: Synthetic oligonucleotide
  Sense strand starting at position 384 of SEQ ID NO: 917191
cuguuugaaucggaagaga

SEQ ID NO: 1215899 - RNA, 19 nt, Artificial Sequence
  Description of Artificial Sequence: Synthetic oligonucleotide
  Antisense strand to SEQ ID NO: 1215898
ucucuuccgauucaaacag

SEQ ID NO: 1215900 - RNA, 19 nt, Artificial Sequence
  Description of Artificial Sequence: Synthetic oligonucleotide
  Sense strand starting at position 489 of SEQ ID NO: 917191
acacuacucuugguuccua

SEQ ID NO: 1215901 - RNA, 19 nt, Artificial Sequence
  Description of Artificial Sequence: Synthetic oligonucleotide
  Antisense strand to SEQ ID NO: 1215900
uaggaaccaagaguagugu

SEQ ID NO: 1215902 - RNA, 19 nt, Artificial Sequence
  Description of Artificial Sequence: Synthetic oligonucleotide
  Sense strand starting at position 526 of SEQ ID NO: 917191
guugcgugugcagcgaaau

SEQ ID NO: 1215903 - RNA, 19 nt, Artificial Sequence
  Description of Artificial Sequence: Synthetic oligonucleotide
  Antisense strand to SEQ ID NO: 1215902
auuucgcugcacacgcaac

SEQ ID NO: 1215904 - RNA, 19 nt, Artificial Sequence
  Description of Artificial Sequence: Synthetic oligonucleotide
  Sense strand starting at position 537 of SEQ ID NO: 917191
agcgaaaucccaggcgaaa

SEQ ID NO: 1215905 - RNA, 19 nt, Artificial Sequence
  Description of Artificial Sequence: Synthetic oligonucleotide
  Antisense strand to SEQ ID NO: 1215904
uuucgccugggauuucgcu

SEQ ID NO: 1215906 - RNA, 19 nt, Artificial Sequence
  Description of Artificial Sequence: Synthetic oligonucleotide
  Sense strand starting at position 723 of SEQ ID NO: 917191
cgcggucucgacagggaaa

SEQ ID NO: 1215907 - RNA, 19 nt, Artificial Sequence
  Description of Artificial Sequence: Synthetic oligonucleotide
  Antisense strand to SEQ ID NO: 1215906
uuucccugucgagaccgcg

SEQ ID NO: 1215908 - RNA, 19 nt, Artificial Sequence
  Description of Artificial Sequence: Synthetic oligonucleotide
  Sense strand starting at position 909 of SEQ ID NO: 917191
ccucgaucagccggacaaa

SEQ ID NO: 1215909 - RNA, 19 nt, Artificial Sequence
  Description of Artificial Sequence: Synthetic oligonucleotide
  Antisense strand to SEQ ID NO: 1215908
uuuguccggcugaucgagg

SEQ ID NO: 1215910 - RNA, 19 nt, Artificial Sequence
  Description of Artificial Sequence: Synthetic oligonucleotide
  Sense strand starting at position 2006 of SEQ ID NO: 917191
gcagauggguuaccaacua

SEQ ID NO: 1215911 - RNA, 19 nt, Artificial Sequence
  Description of Artificial Sequence: Synthetic oligonucleotide
  Antisense strand to SEQ ID NO: 1215910
uaguugguaacccaucugc

SEQ ID NO: 1215912 - RNA, 19 nt, Artificial Sequence
  Description of Artificial Sequence: Synthetic oligonucleotide
  Sense strand starting at position 2217 of SEQ ID NO: 917191
uuggcauuguaagcgauuu

SEQ ID NO: 1215913 - RNA, 19 nt, Artificial Sequence
  Description of Artificial Sequence: Synthetic oligonucleotide
  Antisense strand to SEQ ID NO: 1215912
aaaucgcuuacaaugccaa

SEQ ID NO: 1215914 - RNA, 19 nt, Artificial Sequence
  Description of Artificial Sequence: Synthetic oligonucleotide
  Sense strand starting at position 2251 of SEQ ID NO: 917191
ccaagugugacuggcuuua

SEQ ID NO: 1215915 - RNA, 19 nt, Artificial Sequence
  Description of Artificial Sequence: Synthetic oligonucleotide
  Antisense strand to SEQ ID NO: 1215914
uaaagccagucacacuugg

SEQ ID NO: 1215916 - RNA, 19 nt, Artificial Sequence
  Description of Artificial Sequence: Synthetic oligonucleotide
  Sense strand starting at position 2253 of SEQ ID NO: 917191
aagugugacuggcuuuaca

SEQ ID NO: 1215917 - RNA, 19 nt, Artificial Sequence
  Description of Artificial Sequence: Synthetic oligonucleotide
  Antisense strand to SEQ ID NO: 1215916
uguaaagccagucacacuu

SEQ ID NO: 1215918 - RNA, 19 nt, Artificial Sequence
  Description of Artificial Sequence: Synthetic oligonucleotide
  Sense strand starting at position 2486 of SEQ ID NO: 917191
gaaagucacuucgugguuu

SEQ ID NO: 1215919 - RNA, 19 nt, Artificial Sequence
  Description of Artificial Sequence: Synthetic oligonucleotide
  Antisense strand to SEQ ID NO: 1215918
aaaccacgaagugacuuuc

SEQ ID NO: 1215920 - RNA, 19 nt, Artificial Sequence
  Description of Artificial Sequence: Synthetic oligonucleotide
  Sense strand starting at position 2542 of SEQ ID NO: 917191
cgucuuacuugaccuauuu

SEQ ID NO: 1215921 - RNA, 19 nt, Artificial Sequence
  Description of Artificial Sequence: Synthetic oligonucleotide
  Antisense strand to SEQ ID NO: 1215920
aaauaggucaaguaagacg

SEQ ID NO: 1215922 - RNA, 19 nt, Artificial Sequence
  Description of Artificial Sequence: Synthetic oligonucleotide
  Sense strand starting at position 2564 of SEQ ID NO: 917191
gcguuugcacuguugauca

SEQ ID NO: 1215923 - RNA, 19 nt, Artificial Sequence
  Description of Artificial Sequence: Synthetic oligonucleotide
  Antisense strand to SEQ ID NO: 1215922
ugaucaacagugcaaacgc

SEQ ID NO: 1215924 - RNA, 19 nt, Artificial Sequence
  Description of Artificial Sequence: Synthetic oligonucleotide
  Sense strand starting at position 2566 of SEQ ID NO: 917191
guuugcacuguugaucaga

SEQ ID NO: 1215925 - RNA, 19 nt, Artificial Sequence
  Description of Artificial Sequence: Synthetic oligonucleotide
  Antisense strand to SEQ ID NO: 1215924
ucugaucaacagugcaaac

SEQ ID NO: 1215926 - RNA, 19 nt, Artificial Sequence
  Description of Artificial Sequence: Synthetic oligonucleotide
  Sense strand starting at position 2568 of SEQ ID NO: 917191
uugcacuguugaucagaua

SEQ ID NO: 1215927 - RNA, 19 nt, Artificial Sequence
  Description of Artificial Sequence: Synthetic oligonucleotide
  Antisense strand to SEQ ID NO: 1215926
uaucugaucaacagugcaa

SEQ ID NO: 1215928 - RNA, 19 nt, Artificial Sequence
  Description of Artificial Sequence: Synthetic oligonucleotide
  Sense strand starting at position 2569 of SEQ ID NO: 917191
ugcacuguugaucagauau

SEQ ID NO: 1215929 - RNA, 19 nt, Artificial Sequence
  Description of Artificial Sequence: Synthetic oligonucleotide
  Antisense strand to SEQ ID NO: 1215928
auaucugaucaacagugca

SEQ ID NO: 1215930 - RNA, 19 nt, Artificial Sequence
  Description of Artificial Sequence: Synthetic oligonucleotide
  Sense strand starting at position 2896 of SEQ ID NO: 917191
uuccauuggcucugugaca

SEQ ID NO: 1215931 - RNA, 19 nt, Artificial Sequence
  Description of Artificial Sequence: Synthetic oligonucleotide
  Antisense strand to SEQ ID NO: 1215930
ugucacagagccaauggaa

SEQ ID NO: 1215932 - RNA, 19 nt, Artificial Sequence
  Description of Artificial Sequence: Synthetic oligonucleotide
  Sense strand starting at position 2968 of SEQ ID NO: 917191
ggagcaucuaaauggucuu

SEQ ID NO: 1215933 - RNA, 19 nt, Artificial Sequence
  Description of Artificial Sequence: Synthetic oligonucleotide
  Antisense strand to SEQ ID NO: 1215932
aagaccauuuagaugcucc

SEQ ID NO: 1215934 - RNA, 19 nt, Artificial Sequence
  Description of Artificial Sequence: Synthetic oligonucleotide
  Sense strand starting at position 2988 of SEQ ID NO: 917191
cccuuagucugucucuaau

SEQ ID NO: 1215935 - RNA, 19 nt, Artificial Sequence
  Description of Artificial Sequence: Synthetic oligonucleotide
  Antisense strand to SEQ ID NO: 1215934
auuagagacagacuaaggg

SEQ ID NO: 1215936 - RNA, 19 nt, Artificial Sequence
  Description of Artificial Sequence: Synthetic oligonucleotide
  Sense strand starting at position 3039 of SEQ ID NO: 917191
augugcugauaacucauaa

SEQ ID NO: 1215937 - RNA, 19 nt, Artificial Sequence
  Description of Artificial Sequence: Synthetic oligonucleotide
  Antisense strand to SEQ ID NO: 1215936
uuaugaguuaucagcacau

SEQ ID NO: 1215938 - RNA, 19 nt, Artificial Sequence
  Description of Artificial Sequence: Synthetic oligonucleotide
  Sense strand starting at position 3197 of SEQ ID NO: 917191
gucucauucucaguaaaug

SEQ ID NO: 1215939 - RNA, 19 nt, Artificial Sequence
  Description of Artificial Sequence: Synthetic oligonucleotide
  Antisense strand to SEQ ID NO: 1215938
cauuuacugagaaugagac

SEQ ID NO: 1215940 - RNA, 19 nt, Artificial Sequence
  Description of Artificial Sequence: Synthetic oligonucleotide
  Sense strand starting at position 3198 of SEQ ID NO: 917191
ucucauucucaguaaaugu

SEQ ID NO: 1215941 - RNA, 19 nt, Artificial Sequence
  Description of Artificial Sequence: Synthetic oligonucleotide
  Antisense strand to SEQ ID NO: 1215940
acauuuacugagaaugaga

SEQ ID NO: 1215942 - RNA, 19 nt, Artificial Sequence
  Description of Artificial Sequence: Synthetic oligonucleotide
  Sense strand starting at position 3452 of SEQ ID NO: 917191
ucacguugugaccgaagua

SEQ ID NO: 1215943 - RNA, 19 nt, Artificial Sequence
  Description of Artificial Sequence: Synthetic oligonucleotide
  Antisense strand to SEQ ID NO: 1215942
uacuucggucacaacguga

SEQ ID NO: 1215944 - RNA, 19 nt, Artificial Sequence
  Description of Artificial Sequence: Synthetic oligonucleotide
  Sense strand starting at position 3453 of SEQ ID NO: 917191
cacguugugaccgaaguaa

SEQ ID NO: 1215945 - RNA, 19 nt, Artificial Sequence
  Description of Artificial Sequence: Synthetic oligonucleotide
  Antisense strand to SEQ ID NO: 1215944
uuacuucggucacaacgug

SEQ ID NO: 1215946 - RNA, 19 nt, Artificial Sequence
  Description of Artificial Sequence: Synthetic oligonucleotide
  Sense strand starting at position 3545 of SEQ ID NO: 917191
ggguaaagucccgauaucu

SEQ ID NO: 1215947 - RNA, 19 nt, Artificial Sequence
  Description of Artificial Sequence: Synthetic oligonucleotide
  Antisense strand to SEQ ID NO: 1215946
agauaucgggacuuuaccc

SEQ ID NO: 1215948 - RNA, 19 nt, Artificial Sequence
  Description of Artificial Sequence: Synthetic oligonucleotide
  Sense strand starting at position 3587 of SEQ ID NO: 917191
cucuuuaaacagugaguuu

SEQ ID NO: 1215949 - RNA, 19 nt, Artificial Sequence
  Description of Artificial Sequence: Synthetic oligonucleotide
  Antisense strand to SEQ ID NO: 1215948
aaacucacuguuuaaagag

SEQ ID NO: 1215950 - RNA, 19 nt, Artificial Sequence
  Description of Artificial Sequence: Synthetic oligonucleotide
  Sense strand starting at position 3716 of SEQ ID NO: 917191
agagucacauuccuuauga

SEQ ID NO: 1215951 - RNA, 19 nt, Artificial Sequence
  Description of Artificial Sequence: Synthetic oligonucleotide
  Antisense strand to SEQ ID NO: 1215950
ucauaaggaaugugacucu

SEQ ID NO: 1215952 - RNA, 19 nt, Artificial Sequence
  Description of Artificial Sequence: Synthetic oligonucleotide
  Sense strand starting at position 3852 of SEQ ID NO: 917191
uauagucuuccugauggca

SEQ ID NO: 1215953 - RNA, 19 nt, Artificial Sequence
  Description of Artificial Sequence: Synthetic oligonucleotide
  Antisense strand to SEQ ID NO: 1215952
ugccaucaggaagacuaua

SEQ ID NO: 1215954 - RNA, 19 nt, Artificial Sequence
  Description of Artificial Sequence: Synthetic oligonucleotide
  Sense strand starting at position 3886 of SEQ ID NO: 917191
uuacuuucgucuucuuagu

SEQ ID NO: 1215955 - RNA, 19 nt, Artificial Sequence
  Description of Artificial Sequence: Synthetic oligonucleotide
  Antisense strand to SEQ ID NO: 1215954
acuaagaagacgaaaguaa

SEQ ID NO: 1215956 - RNA, 19 nt, Artificial Sequence
  Description of Artificial Sequence: Synthetic oligonucleotide
  Sense strand starting at position 3899 of SEQ ID NO: 917191
cuuaguucccaguacaguu

SEQ ID NO: 1215957 - RNA, 19 nt, Artificial Sequence
  Description of Artificial Sequence: Synthetic oligonucleotide
  Antisense strand to SEQ ID NO: 1215956
aacuguacugggaacuaag

SEQ ID NO: 1215958 - RNA, 19 nt, Artificial Sequence
  Description of Artificial Sequence: Synthetic oligonucleotide
  Sense strand starting at position 3909 of SEQ ID NO: 917191
aguacaguuccugacauua

SEQ ID NO: 1215959 - RNA, 19 nt, Artificial Sequence
  Description of Artificial Sequence: Synthetic oligonucleotide
  Antisense strand to SEQ ID NO: 1215958
uaaugucaggaacuguacu

SEQ ID NO: 1215960 - RNA, 19 nt, Artificial Sequence
  Description of Artificial Sequence: Synthetic oligonucleotide
  Sense strand starting at position 3925 of SEQ ID NO: 917191
uuaguaggugcucaguguu

SEQ ID NO: 1215961 - RNA, 19 nt, Artificial Sequence
  Description of Artificial Sequence: Synthetic oligonucleotide
  Antisense strand to SEQ ID NO: 1215960
aacacugagcaccuacuaa

SEQ ID NO: 1215962 - RNA, 19 nt, Artificial Sequence
  Description of Artificial Sequence: Synthetic oligonucleotide
  Sense strand starting at position 3933 of SEQ ID NO: 917191
ugcucaguguuuguggaau

SEQ ID NO: 1215963 - RNA, 19 nt, Artificial Sequence
  Description of Artificial Sequence: Synthetic oligonucleotide
  Antisense strand to SEQ ID NO: 1215962
auuccacaaacacugagca

SEQ ID NO: 1215964 - RNA, 19 nt, Artificial Sequence
  Description of Artificial Sequence: Synthetic oligonucleotide
  Sense strand starting at position 3962 of SEQ ID NO: 917191
ugugauguaccuugaguua

SEQ ID NO: 1215965 - RNA, 19 nt, Artificial Sequence
  Description of Artificial Sequence: Synthetic oligonucleotide
  Antisense strand to SEQ ID NO: 1215964
uaacucaagguacaucaca

SEQ ID NO: 1215966 - RNA, 19 nt, Artificial Sequence
  Description of Artificial Sequence: Synthetic oligonucleotide
  Sense strand starting at position 3965 of SEQ ID NO: 917192
gauguaccuugaguuauua

SEQ ID NO: 1215967 - RNA, 19 nt, Artificial Sequence
  Description of Artificial Sequence: Synthetic oligonucleotide
  Antisense strand to SEQ ID NO: 1215966
uaauaacucaagguacauc

SEQ ID NO: 1215968 - RNA, 19 nt, Artificial Sequence
  Description of Artificial Sequence: Synthetic oligonucleotide
  Sense strand starting at position 575 of SEQ ID NO: 917192
gacacagcucuuuggauga

SEQ ID NO: 1215969 - RNA, 19 nt, Artificial Sequence
  Description of Artificial Sequence: Synthetic oligonucleotide
  Antisense strand to SEQ ID NO: 1215968
ucauccaaagagcuguguc

SEQ ID NO: 1215970 - RNA, 19 nt, Artificial Sequence
  Description of Artificial Sequence: Synthetic oligonucleotide
  Sense strand starting at position 614 of SEQ ID NO: 917192
auugauagugucuauuaac

SEQ ID NO: 1215971 - RNA, 19 nt, Artificial Sequence
  Description of Artificial Sequence: Synthetic oligonucleotide
  Antisense strand to SEQ ID NO: 1215970
guuaauagacacuaucaau

SEQ ID NO: 1215972 - RNA, 19 nt, Artificial Sequence
  Description of Artificial Sequence: Synthetic oligonucleotide
  Sense strand starting at position 647 of SEQ ID NO: 917192
ugaugaaacugaucuaugu

SEQ ID NO: 1215973 - RNA, 19 nt, Artificial Sequence
  Description of Artificial Sequence: Synthetic oligonucleotide
  Antisense strand to SEQ ID NO: 1215972
acauagaucaguuucauca

SEQ ID NO: 1215974 - RNA, 19 nt, Artificial Sequence
  Description of Artificial Sequence: Synthetic oligonucleotide
  Sense strand starting at position 657 of SEQ ID NO: 917192
gaucuauguccugggacuc

SEQ ID NO: 1215975 - RNA, 19 nt, Artificial Sequence
  Description of Artificial Sequence: Synthetic oligonucleotide
  Antisense strand to SEQ ID NO: 1215974
gagucccaggacauagauc

SEQ ID NO: 1215976 - RNA, 19 nt, Artificial Sequence
  Description of Artificial Sequence: Synthetic oligonucleotide
  Sense strand starting at position 781 of SEQ ID NO: 917192
uugaaagauuucuggaagg

SEQ ID NO: 1215977 - RNA, 19 nt, Artificial Sequence
  Description of Artificial Sequence: Synthetic oligonucleotide
  Antisense strand to SEQ ID NO: 1215976
ccuuccagaaaucuuucaa

SEQ ID NO: 1215978 - RNA, 19 nt, Artificial Sequence
  Description of Artificial Sequence: Synthetic oligonucleotide
  Sense strand starting at position 891 of SEQ ID NO: 917192
uuucuuacgcccuaagacu

SEQ ID NO: 1215979 - RNA, 19 nt, Artificial Sequence
  Description of Artificial Sequence: Synthetic oligonucleotide
  Antisense strand to SEQ ID NO: 1215978
agucuuagggcguaagaaa

SEQ ID NO: 1215980 - RNA, 19 nt, Artificial Sequence
  Description of Artificial Sequence: Synthetic oligonucleotide
  Sense strand starting at position 904 of SEQ ID NO: 917192
aagacuuuggugugaggaa

SEQ ID NO: 1215981 - RNA, 19 nt, Artificial Sequence
  Description of Artificial Sequence: Synthetic oligonucleotide
  Antisense strand to SEQ ID NO: 1215980
uuccucacaccaaagucuu

SEQ ID NO: 1215982 - RNA, 19 nt, Artificial Sequence
  Description of Artificial Sequence: Synthetic oligonucleotide
  Sense strand starting at position 913 of SEQ ID NO: 917192
gugugaggaagccaauaau

SEQ ID NO: 1215983 - RNA, 19 nt, Artificial Sequence
  Description of Artificial Sequence: Synthetic oligonucleotide
  Antisense strand to SEQ ID NO: 1215982
auuauuggcuuccucacac

SEQ ID NO: 1215984 - RNA, 19 nt, Artificial Sequence
  Description of Artificial Sequence: Synthetic oligonucleotide
  Sense strand starting at position 942 of SEQ ID NO: 917192
gcuauuucucuggguuagu

SEQ ID NO: 1215985 - RNA, 19 nt, Artificial Sequence
  Description of Artificial Sequence: Synthetic oligonucleotide
  Antisense strand to SEQ ID NO: 1215984
acuaacccagagaaauagc

SEQ ID NO: 1215986 - RNA, 19 nt, Artificial Sequence
  Description of Artificial Sequence: Synthetic oligonucleotide
  Sense strand starting at position 1285 of SEQ ID NO: 917192
gugggaccacugcaaugau

SEQ ID NO: 1215987 - RNA, 19 nt, Artificial Sequence
  Description of Artificial Sequence: Synthetic oligonucleotide
  Antisense strand to SEQ ID NO: 1215986
aucauugcaguggucccac

SEQ ID NO: 1215988 - RNA, 19 nt, Artificial Sequence
  Description of Artificial Sequence: Synthetic oligonucleotide
  Sense strand starting at position 1288 of SEQ ID NO: 917192
ggaccacugcaaugauuaa

SEQ ID NO: 1215989 - RNA, 19 nt, Artificial Sequence
  Description of Artificial Sequence: Synthetic oligonucleotide
  Antisense strand to SEQ ID NO: 1215988
uuaaucauugcaguggucc

SEQ ID NO: 1215990 - RNA, 19 nt, Artificial Sequence
  Description of Artificial Sequence: Synthetic oligonucleotide
  Sense strand starting at position 1316 of SEQ ID NO: 917192
agaaucauguuuguaaaca

SEQ ID NO: 1215991 - RNA, 19 nt, Artificial Sequence
  Description of Artificial Sequence: Synthetic oligonucleotide
  Antisense strand to SEQ ID NO: 1215990
uguuuacaaacaugauucu

SEQ ID NO: 1215992 - RNA, 19 nt, Artificial Sequence
  Description of Artificial Sequence: Synthetic oligonucleotide
  Sense strand starting at position 1324 of SEQ ID NO: 917192
guuuguaaacaugguauaa

SEQ ID NO: 1215993 - RNA, 19 nt, Artificial Sequence
  Description of Artificial Sequence: Synthetic oligonucleotide
  Antisense strand to SEQ ID NO: 1215992
uuauaccauguuuacaaac

SEQ ID NO: 1215994 - RNA, 19 nt, Artificial Sequence
  Description of Artificial Sequence: Synthetic oligonucleotide
  Sense strand starting at position 1344 of SEQ ID NO: 917192
auagucaagucauuacaua

SEQ ID NO: 1215995 - RNA, 19 nt, Artificial Sequence
  Description of Artificial Sequence: Synthetic oligonucleotide
  Antisense strand to SEQ ID NO: 1215994
uauguaaugacuugacuau

SEQ ID NO: 1215996 - RNA, 19 nt, Artificial Sequence
  Description of Artificial Sequence: Synthetic oligonucleotide
  Sense strand starting at position 1767 of SEQ ID NO: 917192
auguaaagugucuagcaua

SEQ ID NO: 1215997 - RNA, 19 nt, Artificial Sequence
  Description of Artificial Sequence: Synthetic oligonucleotide
  Antisense strand to SEQ ID NO: 1215996
uaugcuagacacuuuacau

SEQ ID NO: 1215998 - RNA, 19 nt, Artificial Sequence
  Description of Artificial Sequence: Synthetic oligonucleotide
  Sense strand starting at position 1884 of SEQ ID NO: 917192
gccaucuaaccuugagaaa

SEQ ID NO: 1215999 - RNA, 19 nt, Artificial Sequence
  Description of Artificial Sequence: Synthetic oligonucleotide
  Antisense strand to SEQ ID NO: 1215998
uuucucaagguuagauggc

SEQ ID NO: 1216000 - RNA, 19 nt, Artificial Sequence
  Description of Artificial Sequence: Synthetic oligonucleotide
  Sense strand starting at position 1989 of SEQ ID NO: 917192
gauuucuaauaaugggaag

SEQ ID NO: 1216001 - RNA, 19 nt, Artificial Sequence
  Description of Artificial Sequence: Synthetic oligonucleotide
  Antisense strand to SEQ ID NO: 1216000
cuucccauuauuagaaauc

SEQ ID NO: 1216002 - RNA, 19 nt, Artificial Sequence
  Description of Artificial Sequence: Synthetic oligonucleotide
  Sense strand starting at position 2063 of SEQ ID NO: 917192
cuguuauacugagcuugaa

SEQ ID NO: 1216003 - RNA, 19 nt, Artificial Sequence
  Description of Artificial Sequence: Synthetic oligonucleotide
  Antisense strand to SEQ ID NO: 1216002
uucaagcucaguauaacag

SEQ ID NO: 1216004 - RNA, 19 nt, Artificial Sequence
  Description of Artificial Sequence: Synthetic oligonucleotide
  Sense strand starting at position 2066 of SEQ ID NO: 917192
uuauacugagcuugaauua

SEQ ID NO: 1216005 - RNA, 19 nt, Artificial Sequence
  Description of Artificial Sequence: Synthetic oligonucleotide
  Antisense strand to SEQ ID NO: 1216004
uaauucaagcucaguauaa

SEQ ID NO: 1216006 - RNA, 19 nt, Artificial Sequence
  Description of Artificial Sequence: Synthetic oligonucleotide
  Sense strand starting at position 2077 of SEQ ID NO: 917192
uugaauuauuccuccacga

SEQ ID NO: 1216007 - RNA, 19 nt, Artificial Sequence
  Description of Artificial Sequence: Synthetic oligonucleotide
  Antisense strand to SEQ ID NO: 1216006
ucguggaggaauaauucaa

SEQ ID NO: 1216008 - RNA, 19 nt, Artificial Sequence
  Description of Artificial Sequence: Synthetic oligonucleotide
  Sense strand starting at position 2155 of SEQ ID NO: 917192
augauaacgccucaaauau

SEQ ID NO: 1216009 - RNA, 19 nt, Artificial Sequence
  Description of Artificial Sequence: Synthetic oligonucleotide
  Antisense strand to SEQ ID NO: 1216008
auauuugaggcguuaucau

SEQ ID NO: 1216010 - RNA, 19 nt, Artificial Sequence
  Description of Artificial Sequence: Synthetic oligonucleotide
  Sense strand starting at position 2212 of SEQ ID NO: 917192
uaaagagugcccugaaaug

SEQ ID NO: 1216011 - RNA, 19 nt, Artificial Sequence
  Description of Artificial Sequence: Synthetic oligonucleotide
  Antisense strand to SEQ ID NO: 1216010
cauuucagggcacucuuua

SEQ ID NO: 1216012 - RNA, 19 nt, Artificial Sequence
  Description of Artificial Sequence: Synthetic oligonucleotide
  Sense strand starting at position 2385 of SEQ ID NO: 917192
ggugaugcagcauaagacu

SEQ ID NO: 1216013 - RNA, 19 nt, Artificial Sequence
  Description of Artificial Sequence: Synthetic oligonucleotide
  Antisense strand to SEQ ID NO: 1216012
agucuuaugcugcaucacc

SEQ ID NO: 1216014 - RNA, 19 nt, Artificial Sequence
  Description of Artificial Sequence: Synthetic oligonucleotide
  Sense strand starting at position 2396 of SEQ ID NO: 917192
auaagacucugcuugacuu

SEQ ID NO: 1216015 - RNA, 19 nt, Artificial Sequence
  Description of Artificial Sequence: Synthetic oligonucleotide
  Antisense strand to SEQ ID NO: 1216014
aagucaagcagagucuuau

SEQ ID NO: 1216016 - RNA, 19 nt, Artificial Sequence
  Description of Artificial Sequence: Synthetic oligonucleotide
  Sense strand starting at position 2630 of SEQ ID NO: 917192
auucuugcacucuaggauu

SEQ ID NO: 1216017 - RNA, 19 nt, Artificial Sequence
  Description of Artificial Sequence: Synthetic oligonucleotide
  Antisense strand to SEQ ID NO: 1216016
aauccuagagugcaagaau

SEQ ID NO: 1216018 - RNA, 19 nt, Artificial Sequence
  Description of Artificial Sequence: Synthetic oligonucleotide
  Sense strand starting at position 2660 of SEQ ID NO: 917192
uugaaugaguuaucagaca

SEQ ID NO: 1216019 - RNA, 19 nt, Artificial Sequence
  Description of Artificial Sequence: Synthetic oligonucleotide
  Antisense strand to SEQ ID NO: 1216018
ugucugauaacucauucaa

SEQ ID NO: 1216020 - RNA, 19 nt, Artificial Sequence
  Description of Artificial Sequence: Synthetic oligonucleotide
  Sense strand starting at position 2735 of SEQ ID NO: 917192
acuuacuugucagugauua

SEQ ID NO: 1216021 - RNA, 19 nt, Artificial Sequence
  Description of Artificial Sequence: Synthetic oligonucleotide
  Antisense strand to SEQ ID NO: 1216020
uaaucacugacaaguaagu

SEQ ID NO: 1216022 - RNA, 19 nt, Artificial Sequence
  Description of Artificial Sequence: Synthetic oligonucleotide
  Sense strand starting at position 3074 of SEQ ID NO: 917192
uuugaugugccauaagagu

SEQ ID NO: 1216023 - RNA, 19 nt, Artificial Sequence
  Description of Artificial Sequence: Synthetic oligonucleotide
  Antisense strand to SEQ ID NO: 1216022
acucuuauggcacaucaaa

SEQ ID NO: 1216024 - RNA, 19 nt, Artificial Sequence
  Description of Artificial Sequence: Synthetic oligonucleotide
  Sense strand starting at position 3083 of SEQ ID NO: 917192
ccauaagaguauguucuca

SEQ ID NO: 1216025 - RNA, 19 nt, Artificial Sequence
  Description of Artificial Sequence: Synthetic oligonucleotide
  Antisense strand to SEQ ID NO: 1216024
ugagaacauacucuuaugg

SEQ ID NO: 1216026 - RNA, 19 nt, Artificial Sequence
  Description of Artificial Sequence: Synthetic oligonucleotide
  Sense strand starting at position 3085 of SEQ ID NO: 917192
auaagaguauguucucaug

SEQ ID NO: 1216027 - RNA, 19 nt, Artificial Sequence
  Description of Artificial Sequence: Synthetic oligonucleotide
  Antisense strand to SEQ ID NO: 1216026
caugagaacauacucuuau

SEQ ID NO: 1216028 - RNA, 19 nt, Artificial Sequence
  Description of Artificial Sequence: Synthetic oligonucleotide
  Sense strand starting at position 3179 of SEQ ID NO: 917192
ucacaucugcuguggaaag

SEQ ID NO: 1216029 - RNA, 19 nt, Artificial Sequence
  Description of Artificial Sequence: Synthetic oligonucleotide
  Antisense strand to SEQ ID NO: 1216028
cuuuccacagcagauguga

SEQ ID NO: 1216030 - RNA, 19 nt, Artificial Sequence
  Description of Artificial Sequence: Synthetic oligonucleotide
  Sense strand starting at position 3352 of SEQ ID NO: 917192
aaauguuaugggugguuaa

SEQ ID NO: 1216031 - RNA, 19 nt, Artificial Sequence
  Description of Artificial Sequence: Synthetic oligonucleotide
  Antisense strand to SEQ ID NO: 1216030
uuaaccacccauaacauuu

SEQ ID NO: 1216032 - RNA, 19 nt, Artificial Sequence
  Description of Artificial Sequence: Synthetic oligonucleotide
  Sense strand starting at position 3353 of SEQ ID NO: 917192
aauguuaugggugguuaaa

SEQ ID NO: 1216033 - RNA, 19 nt, Artificial Sequence
  Description of Artificial Sequence: Synthetic oligonucleotide
  Antisense strand to SEQ ID NO: 1216032
uuuaaccacccauaacauu

SEQ ID NO: 1216034 - RNA, 19 nt, Artificial Sequence
  Description of Artificial Sequence: Synthetic oligonucleotide
  Sense strand starting at position 3355 of SEQ ID NO: 917192
uguuaugggugguuaaaua

SEQ ID NO: 1216035 - RNA, 19 nt, Artificial Sequence
  Description of Artificial Sequence: Synthetic oligonucleotide
  Antisense strand to SEQ ID NO: 1216034
uauuuaaccacccauaaca

SEQ ID NO: 1216036 - RNA, 19 nt, Artificial Sequence
  Description of Artificial Sequence: Synthetic oligonucleotide
  Sense strand starting at position 3556 of SEQ ID NO: 917192
ugaacagcaugcuuugaaa

SEQ ID NO: 1216037 - RNA, 19 nt, Artificial Sequence
  Description of Artificial Sequence: Synthetic oligonucleotide
  Antisense strand to SEQ ID NO: 1216036
uuucaaagcaugcuguuca

SEQ ID NO: 1216038 - RNA, 19 nt, Artificial Sequence
  Description of Artificial Sequence: Synthetic oligonucleotide
  Sense strand starting at position 3725 of SEQ ID NO: 917192
uuugcuauaucucugaaag

SEQ ID NO: 1216039 - RNA, 19 nt, Artificial Sequence
  Description of Artificial Sequence: Synthetic oligonucleotide
  Antisense strand to SEQ ID NO: 1216038
cuuucagagauauagcaaa

SEQ ID NO: 1216040 - RNA, 19 nt, Artificial Sequence
  Description of Artificial Sequence: Synthetic oligonucleotide
  Sense strand starting at position 3726 of SEQ ID NO: 917192
uugcuauaucucugaaaga

SEQ ID NO: 1216041 - RNA, 19 nt, Artificial Sequence
  Description of Artificial Sequence: Synthetic oligonucleotide
  Antisense strand to SEQ ID NO: 1216040
ucuuucagagauauagcaa

SEQ ID NO: 1216042 - RNA, 19 nt, Artificial Sequence
  Description of Artificial Sequence: Synthetic oligonucleotide
  Sense strand starting at position 3824 of SEQ ID NO: 917192
acauacugcuacuuggaaa

SEQ ID NO: 1216043 - RNA, 19 nt, Artificial Sequence
  Description of Artificial Sequence: Synthetic oligonucleotide
  Antisense strand to SEQ ID NO: 1216042
uuuccaaguagcaguaugu

SEQ ID NO: 1216044 - RNA, 19 nt, Artificial Sequence
  Description of Artificial Sequence: Synthetic oligonucleotide
  Sense strand starting at position 3879 of SEQ ID NO: 917192
uuuauuaaacugcagguau

SEQ ID NO: 1216045 - RNA, 19 nt, Artificial Sequence
  Description of Artificial Sequence: Synthetic oligonucleotide
  Antisense strand to SEQ ID NO: 1216044
auaccugcaguuuaauaaa

SEQ ID NO: 1216046 - RNA, 19 nt, Artificial Sequence
  Description of Artificial Sequence: Synthetic oligonucleotide
  Sense strand starting at position 3927 of SEQ ID NO: 917192
cuuauaauccuaugaggua

SEQ ID NO: 1216047 - RNA, 19 nt, Artificial Sequence
  Description of Artificial Sequence: Synthetic oligonucleotide
  Antisense strand to SEQ ID NO: 1216046
uaccucauaggauuauaag

SEQ ID NO: 1216048 - RNA, 19 nt, Artificial Sequence
  Description of Artificial Sequence: Synthetic oligonucleotide
  Sense strand starting at position 3927 of SEQ ID NO: 917193
cuuauaauccuaugaggua

SEQ ID NO: 1216049 - RNA, 19 nt, Artificial Sequence
  Description of Artificial Sequence: Synthetic oligonucleotide
  Antisense strand to SEQ ID NO: 1216048
uaccucauaggauuauaag

SEQ ID NO: 1216050 - RNA, 19 nt, Artificial Sequence
  Description of Artificial Sequence: Synthetic oligonucleotide
  Sense strand starting at position 98 of SEQ ID NO: 917193
uuaggaaagucccuaacuu

SEQ ID NO: 1216051 - RNA, 19 nt, Artificial Sequence
  Description of Artificial Sequence: Synthetic oligonucleotide
  Antisense strand to SEQ ID NO: 1216050
aaguuagggacuuuccuaa

SEQ ID NO: 1216052 - RNA, 19 nt, Artificial Sequence
  Description of Artificial Sequence: Synthetic oligonucleotide
  Sense strand starting at position 197 of SEQ ID NO: 917193
ggaguuacaagauguacuc

SEQ ID NO: 1216053 - RNA, 19 nt, Artificial Sequence
  Description of Artificial Sequence: Synthetic oligonucleotide
  Antisense strand to SEQ ID NO: 1216052
gaguacaucuuguaacucc

SEQ ID NO: 1216054 - RNA, 19 nt, Artificial Sequence
  Description of Artificial Sequence: Synthetic oligonucleotide
  Sense strand starting at position 208 of SEQ ID NO: 917193
auguacucuuaacuaaagu

SEQ ID NO: 1216055 - RNA, 19 nt, Artificial Sequence
  Description of Artificial Sequence: Synthetic oligonucleotide
  Antisense strand to SEQ ID NO: 1216054
acuuuaguuaagaguacau

SEQ ID NO: 1216056 - RNA, 19 nt, Artificial Sequence
  Description of Artificial Sequence: Synthetic oligonucleotide
  Sense strand starting at position 251 of SEQ ID NO: 917193
agugcaucuugucaacagu

SEQ ID NO: 1216057 - RNA, 19 nt, Artificial Sequence
  Description of Artificial Sequence: Synthetic oligonucleotide
  Antisense strand to SEQ ID NO: 1216056
acuguugacaagaugcacu

SEQ ID NO: 1216058 - RNA, 19 nt, Artificial Sequence
  Description of Artificial Sequence: Synthetic oligonucleotide
  Sense strand starting at position 254 of SEQ ID NO: 917193
gcaucuugucaacaguugu

SEQ ID NO: 1216059 - RNA, 19 nt, Artificial Sequence
  Description of Artificial Sequence: Synthetic oligonucleotide
  Antisense strand to SEQ ID NO: 1216058
acaacuguugacaagaugc

SEQ ID NO: 1216060 - RNA, 19 nt, Artificial Sequence
  Description of Artificial Sequence: Synthetic oligonucleotide
  Sense strand starting at position 265 of SEQ ID NO: 917193
acaguuguucuuguguguu

SEQ ID NO: 1216061 - RNA, 19 nt, Artificial Sequence
  Description of Artificial Sequence: Synthetic oligonucleotide
  Antisense strand to SEQ ID NO: 1216060
aacacacaagaacaacugu

SEQ ID NO: 1216062 - RNA, 19 nt, Artificial Sequence
  Description of Artificial Sequence: Synthetic oligonucleotide
  Sense strand starting at position 869 of SEQ ID NO: 917193
auaagcauuugcuuuggua

SEQ ID NO: 1216063 - RNA, 19 nt, Artificial Sequence
  Description of Artificial Sequence: Synthetic oligonucleotide
  Antisense strand to SEQ ID NO: 1216062
uaccaaagcaaaugcuuau

SEQ ID NO: 1216064 - RNA, 19 nt, Artificial Sequence
  Description of Artificial Sequence: Synthetic oligonucleotide
  Sense strand starting at position 873 of SEQ ID NO: 917193
gcauuugcuuugguauguu

SEQ ID NO: 1216065 - RNA, 19 nt, Artificial Sequence
  Description of Artificial Sequence: Synthetic oligonucleotide
  Antisense strand to SEQ ID NO: 1216064
aacauaccaaagcaaaugc

SEQ ID NO: 1216066 - RNA, 19 nt, Artificial Sequence
  Description of Artificial Sequence: Synthetic oligonucleotide
  Sense strand starting at position 988 of SEQ ID NO: 917193
agagguaacuucucauuau

SEQ ID NO: 1216067 - RNA, 19 nt, Artificial Sequence
  Description of Artificial Sequence: Synthetic oligonucleotide
  Antisense strand to SEQ ID NO: 1216066
auaaugagaaguuaccucu

SEQ ID NO: 1216068 - RNA, 19 nt, Artificial Sequence
  Description of Artificial Sequence: Synthetic oligonucleotide
  Sense strand starting at position 2509 of SEQ ID NO: 917193
cgcgguuccagcugaauaa

SEQ ID NO: 1216069 - RNA, 19 nt, Artificial Sequence
  Description of Artificial Sequence: Synthetic oligonucleotide
  Antisense strand to SEQ ID NO: 1216068
uuauucagcuggaaccgcg

SEQ ID NO: 1216070 - RNA, 19 nt, Artificial Sequence
  Description of Artificial Sequence: Synthetic oligonucleotide
  Sense strand starting at position 2510 of SEQ ID NO: 917193
gcgguuccagcugaauaaa

SEQ ID NO: 1216071 - RNA, 19 nt, Artificial Sequence
  Description of Artificial Sequence: Synthetic oligonucleotide
  Antisense strand to SEQ ID NO: 1216070
uuuauucagcuggaaccgc

SEQ ID NO: 1216072 - RNA, 19 nt, Artificial Sequence
  Description of Artificial Sequence: Synthetic oligonucleotide
  Sense strand starting at position 2849 of SEQ ID NO: 917193
acgcacaagaagugucuaa

SEQ ID NO: 1216073 - RNA, 19 nt, Artificial Sequence
  Description of Artificial Sequence: Synthetic oligonucleotide
  Antisense strand to SEQ ID NO: 1216072
uuagacacuucuugugcgu

SEQ ID NO: 1216074 - RNA, 19 nt, Artificial Sequence
  Description of Artificial Sequence: Synthetic oligonucleotide
  Sense strand starting at position 2853 of SEQ ID NO: 917193
acaagaagugucuaagcug

SEQ ID NO: 1216075 - RNA, 19 nt, Artificial Sequence
  Description of Artificial Sequence: Synthetic oligonucleotide
  Antisense strand to SEQ ID NO: 1216074
cagcuuagacacuucuugu

SEQ ID NO: 1216076 - RNA, 19 nt, Artificial Sequence
  Description of Artificial Sequence: Synthetic oligonucleotide
  Sense strand starting at position 2856 of SEQ ID NO: 917193
agaagugucuaagcugaag

SEQ ID NO: 1216077 - RNA, 19 nt, Artificial Sequence
  Description of Artificial Sequence: Synthetic oligonucleotide
  Antisense strand to SEQ ID NO: 1216076
cuucagcuuagacacuucu

SEQ ID NO: 1216078 - RNA, 19 nt, Artificial Sequence
  Description of Artificial Sequence: Synthetic oligonucleotide
  Sense strand starting at position 2881 of SEQ ID NO: 917193
ccgagauugccuggaagaa

SEQ ID NO: 1216079 - RNA, 19 nt, Artificial Sequence
  Description of Artificial Sequence: Synthetic oligonucleotide
  Antisense strand to SEQ ID NO: 1216078
uucuuccaggcaaucucgg

SEQ ID NO: 1216080 - RNA, 19 nt, Artificial Sequence
  Description of Artificial Sequence: Synthetic oligonucleotide
  Sense strand starting at position 3079 of SEQ ID NO: 917193
gcggguugugcacgcucaa

SEQ ID NO: 1216081 - RNA, 19 nt, Artificial Sequence
  Description of Artificial Sequence: Synthetic oligonucleotide
  Antisense strand to SEQ ID NO: 1216080
uugagcgugcacaacccgc

SEQ ID NO: 1216082 - RNA, 19 nt, Artificial Sequence
  Description of Artificial Sequence: Synthetic oligonucleotide
  Sense strand starting at position 3165 of SEQ ID NO: 917193
acagaucccucuugucauc

SEQ ID NO: 1216083 - RNA, 19 nt, Artificial Sequence
  Description of Artificial Sequence: Synthetic oligonucleotide
  Antisense strand to SEQ ID NO: 1216082
gaugacaagagggaucugu

SEQ ID NO: 1216084 - RNA, 19 nt, Artificial Sequence
  Description of Artificial Sequence: Synthetic oligonucleotide
  Sense strand starting at position 3195 of SEQ ID NO: 917193
ccaaacugguguuagcuau

SEQ ID NO: 1216085 - RNA, 19 nt, Artificial Sequence
  Description of Artificial Sequence: Synthetic oligonucleotide
  Antisense strand to SEQ ID NO: 1216084
auagcuaacaccaguuugg

SEQ ID NO: 1216086 - RNA, 19 nt, Artificial Sequence
  Description of Artificial Sequence: Synthetic oligonucleotide
  Sense strand starting at position 3253 of SEQ ID NO: 917193
gucucuccaccuggagaaa

SEQ ID NO: 1216087 - RNA, 19 nt, Artificial Sequence
  Description of Artificial Sequence: Synthetic oligonucleotide
  Antisense strand to SEQ ID NO: 1216086
uuucuccagguggagagac

SEQ ID NO: 1216088 - RNA, 19 nt, Artificial Sequence
  Description of Artificial Sequence: Synthetic oligonucleotide
  Sense strand starting at position 3422 of SEQ ID NO: 917193
agcuaacaguucuaagaag

SEQ ID NO: 1216089 - RNA, 19 nt, Artificial Sequence
  Description of Artificial Sequence: Synthetic oligonucleotide
  Antisense strand to SEQ ID NO: 1216088
cuucuuagaacuguuagcu

SEQ ID NO: 1216090 - RNA, 19 nt, Artificial Sequence
  Description of Artificial Sequence: Synthetic oligonucleotide
  Sense strand starting at position 3470 of SEQ ID NO: 917193
uggacaucacacuguaaau

SEQ ID NO: 1216091 - RNA, 19 nt, Artificial Sequence
  Description of Artificial Sequence: Synthetic oligonucleotide
  Antisense strand to SEQ ID NO: 1216090
auuuacagugugaugucca

SEQ ID NO: 1216092 - RNA, 19 nt, Artificial Sequence
  Description of Artificial Sequence: Synthetic oligonucleotide
  Sense strand starting at position 3537 of SEQ ID NO: 917193
ggagacugcugcuauguaa

SEQ ID NO: 1216093 - RNA, 19 nt, Artificial Sequence
  Description of Artificial Sequence: Synthetic oligonucleotide
  Antisense strand to SEQ ID NO: 1216092
uuacauagcagcagucucc

SEQ ID NO: 1216094 - RNA, 19 nt, Artificial Sequence
  Description of Artificial Sequence: Synthetic oligonucleotide
  Sense strand starting at position 3540 of SEQ ID NO: 917193
gacugcugcuauguaauaa

SEQ ID NO: 1216095 - RNA, 19 nt, Artificial Sequence
  Description of Artificial Sequence: Synthetic oligonucleotide
  Antisense strand to SEQ ID NO: 1216094
uuauuacauagcagcaguc

SEQ ID NO: 1216096 - RNA, 19 nt, Artificial Sequence
  Description of Artificial Sequence: Synthetic oligonucleotide
  Sense strand starting at position 3544 of SEQ ID NO: 917193
gcugcuauguaauaauaac

SEQ ID NO: 1216097 - RNA, 19 nt, Artificial Sequence
  Description of Artificial Sequence: Synthetic oligonucleotide
  Antisense strand to SEQ ID NO: 1216096
guuauuauuacauagcagc

SEQ ID NO: 1216098 - RNA, 19 nt, Artificial Sequence
  Description of Artificial Sequence: Synthetic oligonucleotide
  Sense strand starting at position 3566 of SEQ ID NO: 917193
gaggcuauuucugcagcuu

SEQ ID NO: 1216099 - RNA, 19 nt, Artificial Sequence
  Description of Artificial Sequence: Synthetic oligonucleotide
  Antisense strand to SEQ ID NO: 1216098
aagcugcagaaauagccuc

SEQ ID NO: 1216100 - RNA, 19 nt, Artificial Sequence
  Description of Artificial Sequence: Synthetic oligonucleotide
  Sense strand starting at position 3581 of SEQ ID NO: 917193
gcuucuguugucuccuuua

SEQ ID NO: 1216101 - RNA, 19 nt, Artificial Sequence
  Description of Artificial Sequence: Synthetic oligonucleotide
  Antisense strand to SEQ ID NO: 1216100
uaaaggagacaacagaagc

SEQ ID NO: 1216102 - RNA, 19 nt, Artificial Sequence
  Description of Artificial Sequence: Synthetic oligonucleotide
  Sense strand starting at position 3584 of SEQ ID NO: 917193
ucuguugucuccuuuagga

SEQ ID NO: 1216103 - RNA, 19 nt, Artificial Sequence
  Description of Artificial Sequence: Synthetic oligonucleotide
  Antisense strand to SEQ ID NO: 1216102
uccuaaaggagacaacaga

SEQ ID NO: 1216104 - RNA, 19 nt, Artificial Sequence
  Description of Artificial Sequence: Synthetic oligonucleotide
  Sense strand starting at position 3586 of SEQ ID NO: 917193
uguugucuccuuuaggaaa

SEQ ID NO: 1216105 - RNA, 19 nt, Artificial Sequence
  Description of Artificial Sequence: Synthetic oligonucleotide
  Antisense strand to SEQ ID NO: 1216104
uuuccuaaaggagacaaca

SEQ ID NO: 1216106 - RNA, 19 nt, Artificial Sequence
  Description of Artificial Sequence: Synthetic oligonucleotide
  Sense strand starting at position 3636 of SEQ ID NO: 917193
cgcuuagaacucuacaaau

SEQ ID NO: 1216107 - RNA, 19 nt, Artificial Sequence
  Description of Artificial Sequence: Synthetic oligonucleotide
  Antisense strand to SEQ ID NO: 1216106
auuuguagaguucuaagcg

SEQ ID NO: 1216108 - RNA, 19 nt, Artificial Sequence
  Description of Artificial Sequence: Synthetic oligonucleotide
  Sense strand starting at position 3675 of SEQ ID NO: 917193
agaacauauuucuggaaau

SEQ ID NO: 1216109 - RNA, 19 nt, Artificial Sequence
  Description of Artificial Sequence: Synthetic oligonucleotide
  Antisense strand to SEQ ID NO: 1216108
auuuccagaaauauguucu

SEQ ID NO: 1216110 - RNA, 19 nt, Artificial Sequence
  Description of Artificial Sequence: Synthetic oligonucleotide
  Sense strand starting at position 3734 of SEQ ID NO: 917193
ccaccuguuuggucaugga

SEQ ID NO: 1216111 - RNA, 19 nt, Artificial Sequence
  Description of Artificial Sequence: Synthetic oligonucleotide
  Antisense strand to SEQ ID NO: 1216110
uccaugaccaaacaggugg

SEQ ID NO: 1216112 - RNA, 19 nt, Artificial Sequence
  Description of Artificial Sequence: Synthetic oligonucleotide
  Sense strand starting at position 3737 of SEQ ID NO: 917193
ccuguuuggucauggacaa

SEQ ID NO: 1216113 - RNA, 19 nt, Artificial Sequence
  Description of Artificial Sequence: Synthetic oligonucleotide
  Antisense strand to SEQ ID NO: 1216112
uuguccaugaccaaacagg

SEQ ID NO: 1216114 - RNA, 19 nt, Artificial Sequence
  Description of Artificial Sequence: Synthetic oligonucleotide
  Sense strand starting at position 3738 of SEQ ID NO: 917193
cuguuuggucauggacaag

SEQ ID NO: 1216115 - RNA, 19 nt, Artificial Sequence
  Description of Artificial Sequence: Synthetic oligonucleotide
  Antisense strand to SEQ ID NO: 1216114
cuuguccaugaccaaacag

SEQ ID NO: 1216116 - RNA, 19 nt, Artificial Sequence
  Description of Artificial Sequence: Synthetic oligonucleotide
  Sense strand starting at position 3817 of SEQ ID NO: 917193
uuaguuuagucuucuccuu

SEQ ID NO: 1216117 - RNA, 19 nt, Artificial Sequence
  Description of Artificial Sequence: Synthetic oligonucleotide
  Antisense strand to SEQ ID NO: 1216116
aaggagaagacuaaacuaa

SEQ ID NO: 1216118 - RNA, 19 nt, Artificial Sequence
  Description of Artificial Sequence: Synthetic oligonucleotide
  Sense strand starting at position 3819 of SEQ ID NO: 917193
aguuuagucuucuccuuua

SEQ ID NO: 1216119 - RNA, 19 nt, Artificial Sequence
  Description of Artificial Sequence: Synthetic oligonucleotide
  Antisense strand to SEQ ID NO: 1216118
uaaaggagaagacuaaacu

SEQ ID NO: 1216120 - RNA, 19 nt, Artificial Sequence
  Description of Artificial Sequence: Synthetic oligonucleotide
  Sense strand starting at position 3824 of SEQ ID NO: 917193
agucuucuccuuuaaugua

SEQ ID NO: 1216121 - RNA, 19 nt, Artificial Sequence
  Description of Artificial Sequence: Synthetic oligonucleotide
  Antisense strand to SEQ ID NO: 1216120
uacauuaaaggagaagacu

SEQ ID NO: 1216122 - RNA, 19 nt, Artificial Sequence
  Description of Artificial Sequence: Synthetic oligonucleotide
  Sense strand starting at position 3884 of SEQ ID NO: 917193
aaaucaugcgguuaguauu

SEQ ID NO: 1216123 - RNA, 19 nt, Artificial Sequence
  Description of Artificial Sequence: Synthetic oligonucleotide
  Antisense strand to SEQ ID NO: 1216122
aauacuaaccgcaugauuu

SEQ ID NO: 1216124 - RNA, 19 nt, Artificial Sequence
  Description of Artificial Sequence: Synthetic oligonucleotide
  Sense strand starting at position 3890 of SEQ ID NO: 917193
ugcgguuaguauucuaaug

SEQ ID NO: 1216125 - RNA, 19 nt, Artificial Sequence
  Description of Artificial Sequence: Synthetic oligonucleotide
  Antisense strand to SEQ ID NO: 1216124
cauuagaauacuaaccgca

SEQ ID NO: 1216126 - RNA, 19 nt, Artificial Sequence
  Description of Artificial Sequence: Synthetic oligonucleotide
  Sense strand starting at position 3892 of SEQ ID NO: 917193
cgguuaguauucuaauguu

SEQ ID NO: 1216127 - RNA, 19 nt, Artificial Sequence
  Description of Artificial Sequence: Synthetic oligonucleotide
  Antisense strand to SEQ ID NO: 1216126
aacauuagaauacuaaccg

SEQ ID NO: 1216128 - RNA, 19 nt, Artificial Sequence
  Description of Artificial Sequence: Synthetic oligonucleotide
  Sense strand starting at position 3941 of SEQ ID NO: 917193
gucugucaguuaccauaua

SEQ ID NO: 1216129 - RNA, 19 nt, Artificial Sequence
  Description of Artificial Sequence: Synthetic oligonucleotide
  Antisense strand to SEQ ID NO: 1216128
uauaugguaacugacagac

SEQ ID NO: 1216130 - RNA, 19 nt, Artificial Sequence
  Description of Artificial Sequence: Synthetic oligonucleotide
  Sense strand starting at position 3941 of SEQ ID NO: 917194
gucugucaguuaccauaua

SEQ ID NO: 1216131 - RNA, 19 nt, Artificial Sequence
  Description of Artificial Sequence: Synthetic oligonucleotide
  Antisense strand to SEQ ID NO: 1216130
uauaugguaacugacagac

SEQ ID NO: 1216132 - RNA, 19 nt, Artificial Sequence
  Description of Artificial Sequence: Synthetic oligonucleotide
  Sense strand starting at position 73 of SEQ ID NO: 917194
ccagaagguaggugaucuu

SEQ ID NO: 1216133 - RNA, 19 nt, Artificial Sequence
  Description of Artificial Sequence: Synthetic oligonucleotide
  Antisense strand to SEQ ID NO: 1216132
aagaucaccuaccuucugg

SEQ ID NO: 1216134 - RNA, 19 nt, Artificial Sequence
  Description of Artificial Sequence: Synthetic oligonucleotide
  Sense strand starting at position 76 of SEQ ID NO: 917194
gaagguaggugaucuucuu

SEQ ID NO: 1216135 - RNA, 19 nt, Artificial Sequence
  Description of Artificial Sequence: Synthetic oligonucleotide
  Antisense strand to SEQ ID NO: 1216134
aagaagaucaccuaccuuc

SEQ ID NO: 1216136 - RNA, 19 nt, Artificial Sequence
  Description of Artificial Sequence: Synthetic oligonucleotide
  Sense strand starting at position 187 of SEQ ID NO: 917194
agaagugauugcuuggcaa

SEQ ID NO: 1216137 - RNA, 19 nt, Artificial Sequence
  Description of Artificial Sequence: Synthetic oligonucleotide
  Antisense strand to SEQ ID NO: 1216136
uugccaagcaaucacuucu

SEQ ID NO: 1216138 - RNA, 19 nt, Artificial Sequence
  Description of Artificial Sequence: Synthetic oligonucleotide
  Sense strand starting at position 259 of SEQ ID NO: 917194
uguacuuacuguuuccuga

SEQ ID NO: 1216139 - RNA, 19 nt, Artificial Sequence
  Description of Artificial Sequence: Synthetic oligonucleotide
  Antisense strand to SEQ ID NO: 1216138
ucaggaaacaguaaguaca

SEQ ID NO: 1216140 - RNA, 19 nt, Artificial Sequence
  Description of Artificial Sequence: Synthetic oligonucleotide
  Sense strand starting at position 389 of SEQ ID NO: 917194
gguuuaggagucuguuuaa

SEQ ID NO: 1216141 - RNA, 19 nt, Artificial Sequence
  Description of Artificial Sequence: Synthetic oligonucleotide
  Antisense strand to SEQ ID NO: 1216140
uuaaacagacuccuaaacc

SEQ ID NO: 1216142 - RNA, 19 nt, Artificial Sequence
  Description of Artificial Sequence: Synthetic oligonucleotide
  Sense strand starting at position 468 of SEQ ID NO: 917194
gccuuaggagcccaauaua

SEQ ID NO: 1216143 - RNA, 19 nt, Artificial Sequence
  Description of Artificial Sequence: Synthetic oligonucleotide
  Antisense strand to SEQ ID NO: 1216142
uauauugggcuccuaaggc

SEQ ID NO: 1216144 - RNA, 19 nt, Artificial Sequence
  Description of Artificial Sequence: Synthetic oligonucleotide
  Sense strand starting at position 479 of SEQ ID NO: 917194
ccaauauagggaggcuuua

SEQ ID NO: 1216145 - RNA, 19 nt, Artificial Sequence
  Description of Artificial Sequence: Synthetic oligonucleotide
  Antisense strand to SEQ ID NO: 1216144
uaaagccucccuauauugg

SEQ ID NO: 1216146 - RNA, 19 nt, Artificial Sequence
  Description of Artificial Sequence: Synthetic oligonucleotide
  Sense strand starting at position 808 of SEQ ID NO: 917194
cuguguaauguggaaagau

SEQ ID NO: 1216147 - RNA, 19 nt, Artificial Sequence
  Description of Artificial Sequence: Synthetic oligonucleotide
  Antisense strand to SEQ ID NO: 1216146
aucuuuccacauuacacag

SEQ ID NO: 1216148 - RNA, 19 nt, Artificial Sequence
  Description of Artificial Sequence: Synthetic oligonucleotide
  Sense strand starting at position 833 of SEQ ID NO: 917194
auuaauggucauugccaga

SEQ ID NO: 1216149 - RNA, 19 nt, Artificial Sequence
  Description of Artificial Sequence: Synthetic oligonucleotide
  Antisense strand to SEQ ID NO: 1216148
ucuggcaaugaccauuaau

SEQ ID NO: 1216150 - RNA, 19 nt, Artificial Sequence
  Description of Artificial Sequence: Synthetic oligonucleotide
  Sense strand starting at position 838 of SEQ ID NO: 917194
uggucauugccagaggaca

SEQ ID NO: 1216151 - RNA, 19 nt, Artificial Sequence
  Description of Artificial Sequence: Synthetic oligonucleotide
  Antisense strand to SEQ ID NO: 1216150
uguccucuggcaaugacca

SEQ ID NO: 1216152 - RNA, 19 nt, Artificial Sequence
  Description of Artificial Sequence: Synthetic oligonucleotide
  Sense strand starting at position 1042 of SEQ ID NO: 917194
ugccgugggaacugauaaa

SEQ ID NO: 1216153 - RNA, 19 nt, Artificial Sequence
  Description of Artificial Sequence: Synthetic oligonucleotide
  Antisense strand to SEQ ID NO: 1216152
uuuaucaguucccacggca

SEQ ID NO: 1216154 - RNA, 19 nt, Artificial Sequence
  Description of Artificial Sequence: Synthetic oligonucleotide
  Sense strand starting at position 1079 of SEQ ID NO: 917194
gccucucagaggugagaau

SEQ ID NO: 1216155 - RNA, 19 nt, Artificial Sequence
  Description of Artificial Sequence: Synthetic oligonucleotide
  Antisense strand to SEQ ID NO: 1216154
auucucaccucugagaggc

SEQ ID NO: 1216156 - RNA, 19 nt, Artificial Sequence
  Description of Artificial Sequence: Synthetic oligonucleotide
  Sense strand starting at position 1192 of SEQ ID NO: 917194
uuaauucucgcccagugau

SEQ ID NO: 1216157 - RNA, 19 nt, Artificial Sequence
  Description of Artificial Sequence: Synthetic oligonucleotide
  Antisense strand to SEQ ID NO: 1216156
aucacugggcgagaauuaa

SEQ ID NO: 1216158 - RNA, 19 nt, Artificial Sequence
  Description of Artificial Sequence: Synthetic oligonucleotide
  Sense strand starting at position 1489 of SEQ ID NO: 917194
gccuuagcuagcgauuuag

SEQ ID NO: 1216159 - RNA, 19 nt, Artificial Sequence
  Description of Artificial Sequence: Synthetic oligonucleotide
  Antisense strand to SEQ ID NO: 1216158
cuaaaucgcuagcuaaggc

SEQ ID NO: 1216160 - RNA, 19 nt, Artificial Sequence
  Description of Artificial Sequence: Synthetic oligonucleotide
  Sense strand starting at position 2030 of SEQ ID NO: 917194
ugacaucaucccgguuaug

SEQ ID NO: 1216161 - RNA, 19 nt, Artificial Sequence
  Description of Artificial Sequence: Synthetic oligonucleotide
  Antisense strand to SEQ ID NO: 1216160
cauaaccgggaugauguca

SEQ ID NO: 1216162 - RNA, 19 nt, Artificial Sequence
  Description of Artificial Sequence: Synthetic oligonucleotide
  Sense strand starting at position 2033 of SEQ ID NO: 917194
caucaucccgguuauguaa

SEQ ID NO: 1216163 - RNA, 19 nt, Artificial Sequence
  Description of Artificial Sequence: Synthetic oligonucleotide
  Antisense strand to SEQ ID NO: 1216162
uuacauaaccgggaugaug

SEQ ID NO: 1216164 - RNA, 19 nt, Artificial Sequence
  Description of Artificial Sequence: Synthetic oligonucleotide
  Sense strand starting at position 2318 of SEQ ID NO: 917194
aacgacgaggcuuaugaua

SEQ ID NO: 1216165 - RNA, 19 nt, Artificial Sequence
  Description of Artificial Sequence: Synthetic oligonucleotide
  Antisense strand to SEQ ID NO: 1216164
uaucauaagccucgucguu

SEQ ID NO: 1216166 - RNA, 19 nt, Artificial Sequence
  Description of Artificial Sequence: Synthetic oligonucleotide
  Sense strand starting at position 2323 of SEQ ID NO: 917194
cgaggcuuaugauauuuaa

SEQ ID NO: 1216167 - RNA, 19 nt, Artificial Sequence
  Description of Artificial Sequence: Synthetic oligonucleotide
  Antisense strand to SEQ ID NO: 1216166
uuaaauaucauaagccucg

SEQ ID NO: 1216168 - RNA, 19 nt, Artificial Sequence
  Description of Artificial Sequence: Synthetic oligonucleotide
  Sense strand starting at position 2343 of SEQ ID NO: 917194
agacuucugcaucgaauug

SEQ ID NO: 1216169 - RNA, 19 nt, Artificial Sequence
  Description of Artificial Sequence: Synthetic oligonucleotide
  Antisense strand to SEQ ID NO: 1216168
caauucgaugcagaagucu

SEQ ID NO: 1216170 - RNA, 19 nt, Artificial Sequence
  Description of Artificial Sequence: Synthetic oligonucleotide
  Sense strand starting at position 2388 of SEQ ID NO: 917194
acuggcauucucuaaguuu

SEQ ID NO: 1216171 - RNA, 19 nt, Artificial Sequence
  Description of Artificial Sequence: Synthetic oligonucleotide
  Antisense strand to SEQ ID NO: 1216170
aaacuuagagaaugccagu

SEQ ID NO: 1216172 - RNA, 19 nt, Artificial Sequence
  Description of Artificial Sequence: Synthetic oligonucleotide
  Sense strand starting at position 2391 of SEQ ID NO: 917194
ggcauucucuaaguuucua

SEQ ID NO: 1216173 - RNA, 19 nt, Artificial Sequence
  Description of Artificial Sequence: Synthetic oligonucleotide
  Antisense strand to SEQ ID NO: 1216172
uagaaacuuagagaaugcc

SEQ ID NO: 1216174 - RNA, 19 nt, Artificial Sequence
  Description of Artificial Sequence: Synthetic oligonucleotide
  Sense strand starting at position 2502 of SEQ ID NO: 917194
gcucccacccgagaaguaa

SEQ ID NO: 1216175 - RNA, 19 nt, Artificial Sequence
  Description of Artificial Sequence: Synthetic oligonucleotide
  Antisense strand to SEQ ID NO: 1216174
uuacuucucgggugggagc

SEQ ID NO: 1216176 - RNA, 19 nt, Artificial Sequence
  Description of Artificial Sequence: Synthetic oligonucleotide
  Sense strand starting at position 2513 of SEQ ID NO: 917194
agaaguaauugucuccaaa

SEQ ID NO: 1216177 - RNA, 19 nt, Artificial Sequence
  Description of Artificial Sequence: Synthetic oligonucleotide
  Antisense strand to SEQ ID NO: 1216176
uuuggagacaauuacuucu

SEQ ID NO: 1216178 - RNA, 19 nt, Artificial Sequence
  Description of Artificial Sequence: Synthetic oligonucleotide
  Sense strand starting at position 2516 of SEQ ID NO: 917194
aguaauugucuccaaaguu

SEQ ID NO: 1216179 - RNA, 19 nt, Artificial Sequence
  Description of Artificial Sequence: Synthetic oligonucleotide
  Antisense strand to SEQ ID NO: 1216178
aacuuuggagacaauuacu

SEQ ID NO: 1216180 - RNA, 19 nt, Artificial Sequence
  Description of Artificial Sequence: Synthetic oligonucleotide
  Sense strand starting at position 2627 of SEQ ID NO: 917194
ccagaugaacagugugagu

SEQ ID NO: 1216181 - RNA, 19 nt, Artificial Sequence
  Description of Artificial Sequence: Synthetic oligonucleotide
  Antisense strand to SEQ ID NO: 1216180
acucacacuguucaucugg

SEQ ID NO: 1216182 - RNA, 19 nt, Artificial Sequence
  Description of Artificial Sequence: Synthetic oligonucleotide
  Sense strand starting at position 2629 of SEQ ID NO: 917194
agaugaacagugugaguaa

SEQ ID NO: 1216183 - RNA, 19 nt, Artificial Sequence
  Description of Artificial Sequence: Synthetic oligonucleotide
  Antisense strand to SEQ ID NO: 1216182
uuacucacacuguucaucu

SEQ ID NO: 1216184 - RNA, 19 nt, Artificial Sequence
  Description of Artificial Sequence: Synthetic oligonucleotide
  Sense strand starting at position 2743 of SEQ ID NO: 917194
gcccuaacgccacauuaga

SEQ ID NO: 1216185 - RNA, 19 nt, Artificial Sequence
  Description of Artificial Sequence: Synthetic oligonucleotide
  Antisense strand to SEQ ID NO: 1216184
ucuaauguggcguuagggc

SEQ ID NO: 1216186 - RNA, 19 nt, Artificial Sequence
  Description of Artificial Sequence: Synthetic oligonucleotide
  Sense strand starting at position 2768 of SEQ ID NO: 917194
ggucuuacugcugcuguca

SEQ ID NO: 1216187 - RNA, 19 nt, Artificial Sequence
  Description of Artificial Sequence: Synthetic oligonucleotide
  Antisense strand to SEQ ID NO: 1216186
ugacagcagcaguaagacc

SEQ ID NO: 1216188 - RNA, 19 nt, Artificial Sequence
  Description of Artificial Sequence: Synthetic oligonucleotide
  Sense strand starting at position 2800 of SEQ ID NO: 917194
uguuaaauucuauaccggu

SEQ ID NO: 1216189 - RNA, 19 nt, Artificial Sequence
  Description of Artificial Sequence: Synthetic oligonucleotide
  Antisense strand to SEQ ID NO: 1216188
accgguauagaauuuaaca

SEQ ID NO: 1216190 - RNA, 19 nt, Artificial Sequence
  Description of Artificial Sequence: Synthetic oligonucleotide
  Sense strand starting at position 3021 of SEQ ID NO: 917194
gcuguuauuccugacagag

SEQ ID NO: 1216191 - RNA, 19 nt, Artificial Sequence
  Description of Artificial Sequence: Synthetic oligonucleotide
  Antisense strand to SEQ ID NO: 1216190
cucugucaggaauaacagc

SEQ ID NO: 1216192 - RNA, 19 nt, Artificial Sequence
  Description of Artificial Sequence: Synthetic oligonucleotide
  Sense strand starting at position 3172 of SEQ ID NO: 917194
cuuugugucagugauggaa

SEQ ID NO: 1216193 - RNA, 19 nt, Artificial Sequence
  Description of Artificial Sequence: Synthetic oligonucleotide
  Antisense strand to SEQ ID NO: 1216192
uuccaucacugacacaaag

SEQ ID NO: 1216194 - RNA, 19 nt, Artificial Sequence
  Description of Artificial Sequence: Synthetic oligonucleotide
  Sense strand starting at position 3501 of SEQ ID NO: 917194
gguuucccuccuuaaguuu

SEQ ID NO: 1216195 - RNA, 19 nt, Artificial Sequence
  Description of Artificial Sequence: Synthetic oligonucleotide
  Antisense strand to SEQ ID NO: 1216194
aaacuuaaggagggaaacc

SEQ ID NO: 1216196 - RNA, 19 nt, Artificial Sequence
  Description of Artificial Sequence: Synthetic oligonucleotide
  Sense strand starting at position 3622 of SEQ ID NO: 917194
ccacgagguaguuagugua

SEQ ID NO: 1216197 - RNA, 19 nt, Artificial Sequence
  Description of Artificial Sequence: Synthetic oligonucleotide
  Antisense strand to SEQ ID NO: 1216196
uacacuaacuaccucgugg

SEQ ID NO: 1216198 - RNA, 19 nt, Artificial Sequence
  Description of Artificial Sequence: Synthetic oligonucleotide
  Sense strand starting at position 3629 of SEQ ID NO: 917194
guaguuaguguauacauua

SEQ ID NO: 1216199 - RNA, 19 nt, Artificial Sequence
  Description of Artificial Sequence: Synthetic oligonucleotide
  Antisense strand to SEQ ID NO: 1216198
uaauguauacacuaacuac

SEQ ID NO: 1216200 - RNA, 19 nt, Artificial Sequence
  Description of Artificial Sequence: Synthetic oligonucleotide
  Sense strand starting at position 3765 of SEQ ID NO: 917194
aagggaauguucccguuua

SEQ ID NO: 1216201 - RNA, 19 nt, Artificial Sequence
  Description of Artificial Sequence: Synthetic oligonucleotide
  Antisense strand to SEQ ID NO: 1216200
uaaacgggaacauucccuu

SEQ ID NO: 1216202 - RNA, 19 nt, Artificial Sequence
  Description of Artificial Sequence: Synthetic oligonucleotide
  Sense strand starting at position 3799 of SEQ ID NO: 917194
gcuggauucuaguccaauu

SEQ ID NO: 1216203 - RNA, 19 nt, Artificial Sequence
  Description of Artificial Sequence: Synthetic oligonucleotide
  Antisense strand to SEQ ID NO: 1216202
aauuggacuagaauccagc

SEQ ID NO: 1216204 - RNA, 19 nt, Artificial Sequence
  Description of Artificial Sequence: Synthetic oligonucleotide
  Sense strand starting at position 3833 of SEQ ID NO: 917194
cugugugacccaugugaua

SEQ ID NO: 1216205 - RNA, 19 nt, Artificial Sequence
  Description of Artificial Sequence: Synthetic oligonucleotide
  Antisense strand to SEQ ID NO: 1216204
uaucacaugggucacacag

SEQ ID NO: 1216206 - RNA, 19 nt, Artificial Sequence
  Description of Artificial Sequence: Synthetic oligonucleotide
  Sense strand starting at position 3835 of SEQ ID NO: 917194
gugugacccaugugauaaa

SEQ ID NO: 1216207 - RNA, 19 nt, Artificial Sequence
  Description of Artificial Sequence: Synthetic oligonucleotide
  Antisense strand to SEQ ID NO: 1216206
uuuaucacaugggucacac

SEQ ID NO: 1216208 - RNA, 19 nt, Artificial Sequence
  Description of Artificial Sequence: Synthetic oligonucleotide
  Sense strand starting at position 3877 of SEQ ID NO: 917194
ccaagcauuguggauuaua

SEQ ID NO: 1216209 - RNA, 19 nt, Artificial Sequence
  Description of Artificial Sequence: Synthetic oligonucleotide
  Antisense strand to SEQ ID NO: 1216208
uauaauccacaaugcuugg

SEQ ID NO: 1216210 - RNA, 19 nt, Artificial Sequence
  Description of Artificial Sequence: Synthetic oligonucleotide
  Sense strand starting at position 3880 of SEQ ID NO: 917194
agcauuguggauuauagca

SEQ ID NO: 1216211 - RNA, 19 nt, Artificial Sequence
  Description of Artificial Sequence: Synthetic oligonucleotide
  Antisense strand to SEQ ID NO: 1216210
ugcuauaauccacaaugcu

SEQ ID NO: 1216212 - RNA, 19 nt, Artificial Sequence
  Description of Artificial Sequence: Synthetic oligonucleotide
  Sense strand starting at position 3880 of SEQ ID NO: 917195
agcauuguggauuauagca

SEQ ID NO: 1216213 - RNA, 19 nt, Artificial Sequence
  Description of Artificial Sequence: Synthetic oligonucleotide
  Antisense strand to SEQ ID NO: 1216212
ugcuauaauccacaaugcu

SEQ ID NO: 1216214 - RNA, 19 nt, Artificial Sequence
  Description of Artificial Sequence: Synthetic oligonucleotide
  Sense strand starting at position 95 of SEQ ID NO: 917195
accuuuacagcuuaagagu

SEQ ID NO: 1216215 - RNA, 19 nt, Artificial Sequence
  Description of Artificial Sequence: Synthetic oligonucleotide
  Antisense strand to SEQ ID NO: 1216214
acucuuaagcuguaaaggu

SEQ ID NO: 1216216 - RNA, 19 nt, Artificial Sequence
  Description of Artificial Sequence: Synthetic oligonucleotide
  Sense strand starting at position 170 of SEQ ID NO: 917195
ugagauggucaaugugaca

SEQ ID NO: 1216217 - RNA, 19 nt, Artificial Sequence
  Description of Artificial Sequence: Synthetic oligonucleotide
  Antisense strand to SEQ ID NO: 1216216
ugucacauugaccaucuca

SEQ ID NO: 1216218 - RNA, 19 nt, Artificial Sequence
  Description of Artificial Sequence: Synthetic oligonucleotide
  Sense strand starting at position 323 of SEQ ID NO: 917195
uccuguauucuggaccaca

SEQ ID NO: 1216219 - RNA, 19 nt, Artificial Sequence
  Description of Artificial Sequence: Synthetic oligonucleotide
  Antisense strand to SEQ ID NO: 1216218
ugugguccagaauacagga

SEQ ID NO: 1216220 - RNA, 19 nt, Artificial Sequence
  Description of Artificial Sequence: Synthetic oligonucleotide
  Sense strand starting at position 402 of SEQ ID NO: 917195
aagucauugccuuagugga

SEQ ID NO: 1216221 - RNA, 19 nt, Artificial Sequence
  Description of Artificial Sequence: Synthetic oligonucleotide
  Antisense strand to SEQ ID NO: 1216220
uccacuaaggcaaugacuu

SEQ ID NO: 1216222 - RNA, 19 nt, Artificial Sequence
  Description of Artificial Sequence: Synthetic oligonucleotide
  Sense strand starting at position 415 of SEQ ID NO: 917195
aguggauucuucucacauu

SEQ ID NO: 1216223 - RNA, 19 nt, Artificial Sequence
  Description of Artificial Sequence: Synthetic oligonucleotide
  Antisense strand to SEQ ID NO: 1216222
aaugugagaagaauccacu

SEQ ID NO: 1216224 - RNA, 19 nt, Artificial Sequence
  Description of Artificial Sequence: Synthetic oligonucleotide
  Sense strand starting at position 453 of SEQ ID NO: 917195
ggaaguuaacucuguccua

SEQ ID NO: 1216225 - RNA, 19 nt, Artificial Sequence
  Description of Artificial Sequence: Synthetic oligonucleotide
  Antisense strand to SEQ ID NO: 1216224
uaggacagaguuaacuucc

SEQ ID NO: 1216226 - RNA, 19 nt, Artificial Sequence
  Description of Artificial Sequence: Synthetic oligonucleotide
  Sense strand starting at position 739 of SEQ ID NO: 917195
ugugaaucaugacuuaaau

SEQ ID NO: 1216227 - RNA, 19 nt, Artificial Sequence
  Description of Artificial Sequence: Synthetic oligonucleotide
  Antisense strand to SEQ ID NO: 1216226
auuuaagucaugauucaca

SEQ ID NO: 1216228 - RNA, 19 nt, Artificial Sequence
  Description of Artificial Sequence: Synthetic oligonucleotide
  Sense strand starting at position 888 of SEQ ID NO: 917195
uggaguggucaaugugaaa

SEQ ID NO: 1216229 - RNA, 19 nt, Artificial Sequence
  Description of Artificial Sequence: Synthetic oligonucleotide
  Antisense strand to SEQ ID NO: 1216228
uuucacauugaccacucca

SEQ ID NO: 1216230 - RNA, 19 nt, Artificial Sequence
  Description of Artificial Sequence: Synthetic oligonucleotide
  Sense strand starting at position 1029 of SEQ ID NO: 917195
gguguuaaucaugacacuu

SEQ ID NO: 1216231 - RNA, 19 nt, Artificial Sequence
  Description of Artificial Sequence: Synthetic oligonucleotide
  Antisense strand to SEQ ID NO: 1216230
aagugucaugauuaacacc

SEQ ID NO: 1216232 - RNA, 19 nt, Artificial Sequence
  Description of Artificial Sequence: Synthetic oligonucleotide
  Sense strand starting at position 1040 of SEQ ID NO: 917195
ugacacuuuccuuaagugu

SEQ ID NO: 1216233 - RNA, 19 nt, Artificial Sequence
  Description of Artificial Sequence: Synthetic oligonucleotide
  Antisense strand to SEQ ID NO: 1216232
acacuuaaggaaaguguca

SEQ ID NO: 1216234 - RNA, 19 nt, Artificial Sequence
  Description of Artificial Sequence: Synthetic oligonucleotide
  Sense strand starting at position 1344 of SEQ ID NO: 917195
ccuagaugacgucaauaca

SEQ ID NO: 1216235 - RNA, 19 nt, Artificial Sequence
  Description of Artificial Sequence: Synthetic oligonucleotide
  Antisense strand to SEQ ID NO: 1216234
uguauugacgucaucuagg

SEQ ID NO: 1216236 - RNA, 19 nt, Artificial Sequence
  Description of Artificial Sequence: Synthetic oligonucleotide
  Sense strand starting at position 1384 of SEQ ID NO: 917195
ucacaucagcguuaagaaa

SEQ ID NO: 1216237 - RNA, 19 nt, Artificial Sequence
  Description of Artificial Sequence: Synthetic oligonucleotide
  Antisense strand to SEQ ID NO: 1216236
uuucuuaacgcugauguga

SEQ ID NO: 1216238 - RNA, 19 nt, Artificial Sequence
  Description of Artificial Sequence: Synthetic oligonucleotide
  Sense strand starting at position 1488 of SEQ ID NO: 917195
accucuggaucucuagaau

SEQ ID NO: 1216239 - RNA, 19 nt, Artificial Sequence
  Description of Artificial Sequence: Synthetic oligonucleotide
  Antisense strand to SEQ ID NO: 1216238
auucuagagauccagaggu

SEQ ID NO: 1216240 - RNA, 19 nt, Artificial Sequence
  Description of Artificial Sequence: Synthetic oligonucleotide
  Sense strand starting at position 2029 of SEQ ID NO: 917195
ggcacugcgaaacaugauu

SEQ ID NO: 1216241 - RNA, 19 nt, Artificial Sequence
  Description of Artificial Sequence: Synthetic oligonucleotide
  Antisense strand to SEQ ID NO: 1216240
aaucauguuucgcagugcc

SEQ ID NO: 1216242 - RNA, 19 nt, Artificial Sequence
  Description of Artificial Sequence: Synthetic oligonucleotide
  Sense strand starting at position 2113 of SEQ ID NO: 917195
cgcagaguggcgucagauu

SEQ ID NO: 1216243 - RNA, 19 nt, Artificial Sequence
  Description of Artificial Sequence: Synthetic oligonucleotide
  Antisense strand to SEQ ID NO: 1216242
aaucugacgccacucugcg

SEQ ID NO: 1216244 - RNA, 19 nt, Artificial Sequence
  Description of Artificial Sequence: Synthetic oligonucleotide
  Sense strand starting at position 2158 of SEQ ID NO: 917195
aagucaucggccuggauuu

SEQ ID NO: 1216245 - RNA, 19 nt, Artificial Sequence
  Description of Artificial Sequence: Synthetic oligonucleotide
  Antisense strand to SEQ ID NO: 1216244
aaauccaggccgaugacuu

SEQ ID NO: 1216246 - RNA, 19 nt, Artificial Sequence
  Description of Artificial Sequence: Synthetic oligonucleotide
  Sense strand starting at position 2557 of SEQ ID NO: 917195
uuuagaaguuccuugagaa

SEQ ID NO: 1216247 - RNA, 19 nt, Artificial Sequence
  Description of Artificial Sequence: Synthetic oligonucleotide
  Antisense strand to SEQ ID NO: 1216246
uucucaaggaacuucuaaa

SEQ ID NO: 1216248 - RNA, 19 nt, Artificial Sequence
  Description of Artificial Sequence: Synthetic oligonucleotide
  Sense strand starting at position 2558 of SEQ ID NO: 917195
uuagaaguuccuugagaac

SEQ ID NO: 1216249 - RNA, 19 nt, Artificial Sequence
  Description of Artificial Sequence: Synthetic oligonucleotide
  Antisense strand to SEQ ID NO: 1216248
guucucaaggaacuucuaa

SEQ ID NO: 1216250 - RNA, 19 nt, Artificial Sequence
  Description of Artificial Sequence: Synthetic oligonucleotide
  Sense strand starting at position 2624 of SEQ ID NO: 917195
aggaaagcugcauagguuu

SEQ ID NO: 1216251 - RNA, 19 nt, Artificial Sequence
  Description of Artificial Sequence: Synthetic oligonucleotide
  Antisense strand to SEQ ID NO: 1216250
aaaccuaugcagcuuuccu

SEQ ID NO: 1216252 - RNA, 19 nt, Artificial Sequence
  Description of Artificial Sequence: Synthetic oligonucleotide
  Sense strand starting at position 2870 of SEQ ID NO: 917195
uuggaacuauuccuuuaag

SEQ ID NO: 1216253 - RNA, 19 nt, Artificial Sequence
  Description of Artificial Sequence: Synthetic oligonucleotide
  Antisense strand to SEQ ID NO: 1216252
cuuaaaggaauaguuccaa

SEQ ID NO: 1216254 - RNA, 19 nt, Artificial Sequence
  Description of Artificial Sequence: Synthetic oligonucleotide
  Sense strand starting at position 2903 of SEQ ID NO: 917195
auuauauggagguggugua

SEQ ID NO: 1216255 - RNA, 19 nt, Artificial Sequence
  Description of Artificial Sequence: Synthetic oligonucleotide
  Antisense strand to SEQ ID NO: 1216254
uacaccaccuccauauaau

SEQ ID NO: 1216256 - RNA, 19 nt, Artificial Sequence
  Description of Artificial Sequence: Synthetic oligonucleotide
  Sense strand starting at position 2930 of SEQ ID NO: 917195
cucggaaacaugcaguauu

SEQ ID NO: 1216257 - RNA, 19 nt, Artificial Sequence
  Description of Artificial Sequence: Synthetic oligonucleotide
  Antisense strand to SEQ ID NO: 1216256
aauacugcauguuuccgag

SEQ ID NO: 1216258 - RNA, 19 nt, Artificial Sequence
  Description of Artificial Sequence: Synthetic oligonucleotide
  Sense strand starting at position 2983 of SEQ ID NO: 917195
aggaguuuggcacagaggu

SEQ ID NO: 1216259 - RNA, 19 nt, Artificial Sequence
  Description of Artificial Sequence: Synthetic oligonucleotide
  Antisense strand to SEQ ID NO: 1216258
accucugugccaaacuccu

SEQ ID NO: 1216260 - RNA, 19 nt, Artificial Sequence
  Description of Artificial Sequence: Synthetic oligonucleotide
  Sense strand starting at position 3066 of SEQ ID NO: 917195
uuuacugugccagacucua

SEQ ID NO: 1216261 - RNA, 19 nt, Artificial Sequence
  Description of Artificial Sequence: Synthetic oligonucleotide
  Antisense strand to SEQ ID NO: 1216260
uagagucuggcacaguaaa

SEQ ID NO: 1216262 - RNA, 19 nt, Artificial Sequence
  Description of Artificial Sequence: Synthetic oligonucleotide
  Sense strand starting at position 3102 of SEQ ID NO: 917195
agcacauaaucuuuaggga

SEQ ID NO: 1216263 - RNA, 19 nt, Artificial Sequence
  Description of Artificial Sequence: Synthetic oligonucleotide
  Antisense strand to SEQ ID NO: 1216262
ucccuaaagauuaugugcu

SEQ ID NO: 1216264 - RNA, 19 nt, Artificial Sequence
  Description of Artificial Sequence: Synthetic oligonucleotide
  Sense strand starting at position 3154 of SEQ ID NO: 917195
acaaguaguuccuuauauc

SEQ ID NO: 1216265 - RNA, 19 nt, Artificial Sequence
  Description of Artificial Sequence: Synthetic oligonucleotide
  Antisense strand to SEQ ID NO: 1216264
gauauaaggaacuacuugu

SEQ ID NO: 1216266 - RNA, 19 nt, Artificial Sequence
  Description of Artificial Sequence: Synthetic oligonucleotide
  Sense strand starting at position 3230 of SEQ ID NO: 917195
ggagaugacguuuaacuuu

SEQ ID NO: 1216267 - RNA, 19 nt, Artificial Sequence
  Description of Artificial Sequence: Synthetic oligonucleotide
  Antisense strand to SEQ ID NO: 1216266
aaaguuaaacgucaucucc

SEQ ID NO: 1216268 - RNA, 19 nt, Artificial Sequence
  Description of Artificial Sequence: Synthetic oligonucleotide
  Sense strand starting at position 3333 of SEQ ID NO: 917195
auguaaagcccuuagaguu

SEQ ID NO: 1216269 - RNA, 19 nt, Artificial Sequence
  Description of Artificial Sequence: Synthetic oligonucleotide
  Antisense strand to SEQ ID NO: 1216268
aacucuaagggcuuuacau

SEQ ID NO: 1216270 - RNA, 19 nt, Artificial Sequence
  Description of Artificial Sequence: Synthetic oligonucleotide
  Sense strand starting at position 3369 of SEQ ID NO: 917195
ggaauacuguaguugaaga

SEQ ID NO: 1216271 - RNA, 19 nt, Artificial Sequence
  Description of Artificial Sequence: Synthetic oligonucleotide
  Antisense strand to SEQ ID NO: 1216270
ucuucaacuacaguauucc

SEQ ID NO: 1216272 - RNA, 19 nt, Artificial Sequence
  Description of Artificial Sequence: Synthetic oligonucleotide
  Sense strand starting at position 3379 of SEQ ID NO: 917195
aguugaagaaguugggauu

SEQ ID NO: 1216273 - RNA, 19 nt, Artificial Sequence
  Description of Artificial Sequence: Synthetic oligonucleotide
  Antisense strand to SEQ ID NO: 1216272
aaucccaacuucuucaacu

SEQ ID NO: 1216274 - RNA, 19 nt, Artificial Sequence
  Description of Artificial Sequence: Synthetic oligonucleotide
  Sense strand starting at position 3380 of SEQ ID NO: 917195
guugaagaaguugggauua

SEQ ID NO: 1216275 - RNA, 19 nt, Artificial Sequence
  Description of Artificial Sequence: Synthetic oligonucleotide
  Antisense strand to SEQ ID NO: 1216274
uaaucccaacuucuucaac

SEQ ID NO: 1216276 - RNA, 19 nt, Artificial Sequence
  Description of Artificial Sequence: Synthetic oligonucleotide
  Sense strand starting at position 3490 of SEQ ID NO: 917195
uuaggugauuugggaaaga

SEQ ID NO: 1216277 - RNA, 19 nt, Artificial Sequence
  Description of Artificial Sequence: Synthetic oligonucleotide
  Antisense strand to SEQ ID NO: 1216276
ucuuucccaaaucaccuaa

SEQ ID NO: 1216278 - RNA, 19 nt, Artificial Sequence
  Description of Artificial Sequence: Synthetic oligonucleotide
  Sense strand starting at position 3500 of SEQ ID NO: 917195
ugggaaagacuccguggaa

SEQ ID NO: 1216279 - RNA, 19 nt, Artificial Sequence
  Description of Artificial Sequence: Synthetic oligonucleotide
  Antisense strand to SEQ ID NO: 1216278
uuccacggagucuuuccca

SEQ ID NO: 1216280 - RNA, 19 nt, Artificial Sequence
  Description of Artificial Sequence: Synthetic oligonucleotide
  Sense strand starting at position 3524 of SEQ ID NO: 917195
ugggaaggguugcucaaga

SEQ ID NO: 1216281 - RNA, 19 nt, Artificial Sequence
  Description of Artificial Sequence: Synthetic oligonucleotide
  Antisense strand to SEQ ID NO: 1216280
ucuugagcaacccuuccca

SEQ ID NO: 1216282 - RNA, 19 nt, Artificial Sequence
  Description of Artificial Sequence: Synthetic oligonucleotide
  Sense strand starting at position 3562 of SEQ ID NO: 917195
ggagacaguucagugauua

SEQ ID NO: 1216283 - RNA, 19 nt, Artificial Sequence
  Description of Artificial Sequence: Synthetic oligonucleotide
  Antisense strand to SEQ ID NO: 1216282
uaaucacugaacugucucc

SEQ ID NO: 1216284 - RNA, 19 nt, Artificial Sequence
  Description of Artificial Sequence: Synthetic oligonucleotide
  Sense strand starting at position 3574 of SEQ ID NO: 917195
gugauuaucuuaucuagga

SEQ ID NO: 1216285 - RNA, 19 nt, Artificial Sequence
  Description of Artificial Sequence: Synthetic oligonucleotide
  Antisense strand to SEQ ID NO: 1216284
uccuagauaagauaaucac

SEQ ID NO: 1216286 - RNA, 19 nt, Artificial Sequence
  Description of Artificial Sequence: Synthetic oligonucleotide
  Sense strand starting at position 3575 of SEQ ID NO: 917195
ugauuaucuuaucuaggag

SEQ ID NO: 1216287 - RNA, 19 nt, Artificial Sequence
  Description of Artificial Sequence: Synthetic oligonucleotide
  Antisense strand to SEQ ID NO: 1216286
cuccuagauaagauaauca

SEQ ID NO: 1216288 - RNA, 19 nt, Artificial Sequence
  Description of Artificial Sequence: Synthetic oligonucleotide
  Sense strand starting at position 3578 of SEQ ID NO: 917195
uuaucuuaucuaggaggau

SEQ ID NO: 1216289 - RNA, 19 nt, Artificial Sequence
  Description of Artificial Sequence: Synthetic oligonucleotide
  Antisense strand to SEQ ID NO: 1216288
auccuccuagauaagauaa

SEQ ID NO: 1216290 - RNA, 19 nt, Artificial Sequence
  Description of Artificial Sequence: Synthetic oligonucleotide
  Sense strand starting at position 3613 of SEQ ID NO: 917195
agccuaaagcuguaacuga

SEQ ID NO: 1216291 - RNA, 19 nt, Artificial Sequence
  Description of Artificial Sequence: Synthetic oligonucleotide
  Antisense strand to SEQ ID NO: 1216290
ucaguuacagcuuuaggcu

SEQ ID NO: 1216292 - RNA, 19 nt, Artificial Sequence
  Description of Artificial Sequence: Synthetic oligonucleotide
  Sense strand starting at position 3896 of SEQ ID NO: 917195
agcauaccagcucagauaa

SEQ ID NO: 1216293 - RNA, 19 nt, Artificial Sequence
  Description of Artificial Sequence: Synthetic oligonucleotide
  Antisense strand to SEQ ID NO: 1216292
uuaucugagcugguaugcu

SEQ ID NO: 1216294 - RNA, 19 nt, Artificial Sequence
  Description of Artificial Sequence: Synthetic oligonucleotide
  Sense strand starting at position 3896 of SEQ ID NO: 917196
agcauaccagcucagauaa

SEQ ID NO: 1216295 - RNA, 19 nt, Artificial Sequence
  Description of Artificial Sequence: Synthetic oligonucleotide
  Antisense strand to SEQ ID NO: 1216294
uuaucugagcugguaugcu

SEQ ID NO: 1216296 - RNA, 19 nt, Artificial Sequence
  Description of Artificial Sequence: Synthetic oligonucleotide
  Sense strand starting at position 508 of SEQ ID NO: 917196
gaaggaugauuugagcaga

SEQ ID NO: 1216297 - RNA, 19 nt, Artificial Sequence
  Description of Artificial Sequence: Synthetic oligonucleotide
  Antisense strand to SEQ ID NO: 1216296
ucugcucaaaucauccuuc

SEQ ID NO: 1216298 - RNA, 19 nt, Artificial Sequence
  Description of Artificial Sequence: Synthetic oligonucleotide
  Sense strand starting at position 601 of SEQ ID NO: 917196
guuguaaacucauucuaua

SEQ ID NO: 1216299 - RNA, 19 nt, Artificial Sequence
  Description of Artificial Sequence: Synthetic oligonucleotide
  Antisense strand to SEQ ID NO: 1216298
uauagaaugaguuuacaac

SEQ ID NO: 1216300 - RNA, 19 nt, Artificial Sequence
  Description of Artificial Sequence: Synthetic oligonucleotide
  Sense strand starting at position 843 of SEQ ID NO: 917196
agggccuuauucccaauua

SEQ ID NO: 1216301 - RNA, 19 nt, Artificial Sequence
  Description of Artificial Sequence: Synthetic oligonucleotide
  Antisense strand to SEQ ID NO: 1216300
uaauugggaauaaggcccu

SEQ ID NO: 1216302 - RNA, 19 nt, Artificial Sequence
  Description of Artificial Sequence: Synthetic oligonucleotide
  Sense strand starting at position 901 of SEQ ID NO: 917196
agcauugaaguugaaucua

SEQ ID NO: 1216303 - RNA, 19 nt, Artificial Sequence
  Description of Artificial Sequence: Synthetic oligonucleotide
  Antisense strand to SEQ ID NO: 1216302
uagauucaacuucaaugcu

SEQ ID NO: 1216304 - RNA, 19 nt, Artificial Sequence
  Description of Artificial Sequence: Synthetic oligonucleotide
  Sense strand starting at position 935 of SEQ ID NO: 917196
caaguacuuugauugugau

SEQ ID NO: 1216305 - RNA, 19 nt, Artificial Sequence
  Description of Artificial Sequence: Synthetic oligonucleotide
  Antisense strand to SEQ ID NO: 1216304
aucacaaucaaaguacuug

SEQ ID NO: 1216306 - RNA, 19 nt, Artificial Sequence
  Description of Artificial Sequence: Synthetic oligonucleotide
  Sense strand starting at position 936 of SEQ ID NO: 917196
aaguacuuugauugugaua

SEQ ID NO: 1216307 - RNA, 19 nt, Artificial Sequence
  Description of Artificial Sequence: Synthetic oligonucleotide
  Antisense strand to SEQ ID NO: 1216306
uaucacaaucaaaguacuu

SEQ ID NO: 1216308 - RNA, 19 nt, Artificial Sequence
  Description of Artificial Sequence: Synthetic oligonucleotide
  Sense strand starting at position 978 of SEQ ID NO: 917196
ucuuguauauggccauuua

SEQ ID NO: 1216309 - RNA, 19 nt, Artificial Sequence
  Description of Artificial Sequence: Synthetic oligonucleotide
  Antisense strand to SEQ ID NO: 1216308
uaaauggccauauacaaga

SEQ ID NO: 1216310 - RNA, 19 nt, Artificial Sequence
  Description of Artificial Sequence: Synthetic oligonucleotide
  Sense strand starting at position 1008 of SEQ ID NO: 917196
cuuguacugggcugaaaua

SEQ ID NO: 1216311 - RNA, 19 nt, Artificial Sequence
  Description of Artificial Sequence: Synthetic oligonucleotide
  Antisense strand to SEQ ID NO: 1216310
uauuucagcccaguacaag

SEQ ID NO: 1216312 - RNA, 19 nt, Artificial Sequence
  Description of Artificial Sequence: Synthetic oligonucleotide
  Sense strand starting at position 1114 of SEQ ID NO: 917196
uggagagauuacucugucu

SEQ ID NO: 1216313 - RNA, 19 nt, Artificial Sequence
  Description of Artificial Sequence: Synthetic oligonucleotide
  Antisense strand to SEQ ID NO: 1216312
agacagaguaaucucucca

SEQ ID NO: 1216314 - RNA, 19 nt, Artificial Sequence
  Description of Artificial Sequence: Synthetic oligonucleotide
  Sense strand starting at position 1116 of SEQ ID NO: 917196
gagagauuacucugucuug

SEQ ID NO: 1216315 - RNA, 19 nt, Artificial Sequence
  Description of Artificial Sequence: Synthetic oligonucleotide
  Antisense strand to SEQ ID NO: 1216314
caagacagaguaaucucuc

SEQ ID NO: 1216316 - RNA, 19 nt, Artificial Sequence
  Description of Artificial Sequence: Synthetic oligonucleotide
  Sense strand starting at position 1206 of SEQ ID NO: 917196
gcuauuaccuaacuggaaa

SEQ ID NO: 1216317 - RNA, 19 nt, Artificial Sequence
  Description of Artificial Sequence: Synthetic oligonucleotide
  Antisense strand to SEQ ID NO: 1216316
uuuccaguuagguaauagc

SEQ ID NO: 1216318 - RNA, 19 nt, Artificial Sequence
  Description of Artificial Sequence: Synthetic oligonucleotide
  Sense strand starting at position 1271 of SEQ ID NO: 917196
cuaaucauuccagggaauu

SEQ ID NO: 1216319 - RNA, 19 nt, Artificial Sequence
  Description of Artificial Sequence: Synthetic oligonucleotide
  Antisense strand to SEQ ID NO: 1216318
aauucccuggaaugauuag

SEQ ID NO: 1216320 - RNA, 19 nt, Artificial Sequence
  Description of Artificial Sequence: Synthetic oligonucleotide
  Sense strand starting at position 1329 of SEQ ID NO: 917196
gucagucaaugauuaccaa

SEQ ID NO: 1216321 - RNA, 19 nt, Artificial Sequence
  Description of Artificial Sequence: Synthetic oligonucleotide
  Antisense strand to SEQ ID NO: 1216320
uugguaaucauugacugac

SEQ ID NO: 1216322 - RNA, 19 nt, Artificial Sequence
  Description of Artificial Sequence: Synthetic oligonucleotide
  Sense strand starting at position 1332 of SEQ ID NO: 917196
agucaaugauuaccaagua

SEQ ID NO: 1216323 - RNA, 19 nt, Artificial Sequence
  Description of Artificial Sequence: Synthetic oligonucleotide
  Antisense strand to SEQ ID NO: 1216322
uacuugguaaucauugacu

SEQ ID NO: 1216324 - RNA, 19 nt, Artificial Sequence
  Description of Artificial Sequence: Synthetic oligonucleotide
  Sense strand starting at position 1508 of SEQ ID NO: 917196
gcugacuuccuccaaguga

SEQ ID NO: 1216325 - RNA, 19 nt, Artificial Sequence
  Description of Artificial Sequence: Synthetic oligonucleotide
  Antisense strand to SEQ ID NO: 1216324
ucacuuggaggaagucagc

SEQ ID NO: 1216326 - RNA, 19 nt, Artificial Sequence
  Description of Artificial Sequence: Synthetic oligonucleotide
  Sense strand starting at position 1648 of SEQ ID NO: 917196
agguaacguucucugauuu

SEQ ID NO: 1216327 - RNA, 19 nt, Artificial Sequence
  Description of Artificial Sequence: Synthetic oligonucleotide
  Antisense strand to SEQ ID NO: 1216326
aaaucagagaacguuaccu

SEQ ID NO: 1216328 - RNA, 19 nt, Artificial Sequence
  Description of Artificial Sequence: Synthetic oligonucleotide
  Sense strand starting at position 1845 of SEQ ID NO: 917196
cucggauuaaagugcauuu

SEQ ID NO: 1216329 - RNA, 19 nt, Artificial Sequence
  Description of Artificial Sequence: Synthetic oligonucleotide
  Antisense strand to SEQ ID NO: 1216328
aaaugcacuuuaauccgag

SEQ ID NO: 1216330 - RNA, 19 nt, Artificial Sequence
  Description of Artificial Sequence: Synthetic oligonucleotide
  Sense strand starting at position 1858 of SEQ ID NO: 917196
gcauuuaaugagggcuguu

SEQ ID NO: 1216331 - RNA, 19 nt, Artificial Sequence
  Description of Artificial Sequence: Synthetic oligonucleotide
  Antisense strand to SEQ ID NO: 1216330
aacagcccucauuaaaugc

SEQ ID NO: 1216332 - RNA, 19 nt, Artificial Sequence
  Description of Artificial Sequence: Synthetic oligonucleotide
  Sense strand starting at position 1881 of SEQ ID NO: 917196
guuagagaggcaugacaaa

SEQ ID NO: 1216333 - RNA, 19 nt, Artificial Sequence
  Description of Artificial Sequence: Synthetic oligonucleotide
  Antisense strand to SEQ ID NO: 1216332
uuugucaugccucucuaac

SEQ ID NO: 1216334 - RNA, 19 nt, Artificial Sequence
  Description of Artificial Sequence: Synthetic oligonucleotide
  Sense strand starting at position 1908 of SEQ ID NO: 917196
ggucuaaggauguaucuuu

SEQ ID NO: 1216335 - RNA, 19 nt, Artificial Sequence
  Description of Artificial Sequence: Synthetic oligonucleotide
  Antisense strand to SEQ ID NO: 1216334
aaagauacauccuuagacc

SEQ ID NO: 1216336 - RNA, 19 nt, Artificial Sequence
  Description of Artificial Sequence: Synthetic oligonucleotide
  Sense strand starting at position 1913 of SEQ ID NO: 917196
aaggauguaucuuuccuga

SEQ ID NO: 1216337 - RNA, 19 nt, Artificial Sequence
  Description of Artificial Sequence: Synthetic oligonucleotide
  Antisense strand to SEQ ID NO: 1216336
ucaggaaagauacauccuu

SEQ ID NO: 1216338 - RNA, 19 nt, Artificial Sequence
  Description of Artificial Sequence: Synthetic oligonucleotide
  Sense strand starting at position 1915 of SEQ ID NO: 917196
ggauguaucuuuccugaau

SEQ ID NO: 1216339 - RNA, 19 nt, Artificial Sequence
  Description of Artificial Sequence: Synthetic oligonucleotide
  Antisense strand to SEQ ID NO: 1216338
auucaggaaagauacaucc

SEQ ID NO: 1216340 - RNA, 19 nt, Artificial Sequence
  Description of Artificial Sequence: Synthetic oligonucleotide
  Sense strand starting at position 1916 of SEQ ID NO: 917196
gauguaucuuuccugaaug

SEQ ID NO: 1216341 - RNA, 19 nt, Artificial Sequence
  Description of Artificial Sequence: Synthetic oligonucleotide
  Antisense strand to SEQ ID NO: 1216340
cauucaggaaagauacauc

SEQ ID NO: 1216342 - RNA, 19 nt, Artificial Sequence
  Description of Artificial Sequence: Synthetic oligonucleotide
  Sense strand starting at position 1918 of SEQ ID NO: 917196
uguaucuuuccugaauguc

SEQ ID NO: 1216343 - RNA, 19 nt, Artificial Sequence
  Description of Artificial Sequence: Synthetic oligonucleotide
  Antisense strand to SEQ ID NO: 1216342
gacauucaggaaagauaca

SEQ ID NO: 1216344 - RNA, 19 nt, Artificial Sequence
  Description of Artificial Sequence: Synthetic oligonucleotide
  Sense strand starting at position 2010 of SEQ ID NO: 917196
ccacaugaggccuauuauu

SEQ ID NO: 1216345 - RNA, 19 nt, Artificial Sequence
  Description of Artificial Sequence: Synthetic oligonucleotide
  Antisense strand to SEQ ID NO: 1216344
aauaauaggccucaugugg

SEQ ID NO: 1216346 - RNA, 19 nt, Artificial Sequence
  Description of Artificial Sequence: Synthetic oligonucleotide
  Sense strand starting at position 2166 of SEQ ID NO: 917196
aguuaaucccaguagcaga

SEQ ID NO: 1216347 - RNA, 19 nt, Artificial Sequence
  Description of Artificial Sequence: Synthetic oligonucleotide
  Antisense strand to SEQ ID NO: 1216346
ucugcuacugggauuaacu

SEQ ID NO: 1216348 - RNA, 19 nt, Artificial Sequence
  Description of Artificial Sequence: Synthetic oligonucleotide
  Sense strand starting at position 2180 of SEQ ID NO: 917196
gcagaaauaaugugguuaa

SEQ ID NO: 1216349 - RNA, 19 nt, Artificial Sequence
  Description of Artificial Sequence: Synthetic oligonucleotide
  Antisense strand to SEQ ID NO: 1216348
uuaaccacauuauuucugc

SEQ ID NO: 1216350 - RNA, 19 nt, Artificial Sequence
  Description of Artificial Sequence: Synthetic oligonucleotide
  Sense strand starting at position 2183 of SEQ ID NO: 917196
gaaauaaugugguuaaagu

SEQ ID NO: 1216351 - RNA, 19 nt, Artificial Sequence
  Description of Artificial Sequence: Synthetic oligonucleotide
  Antisense strand to SEQ ID NO: 1216350
acuuuaaccacauuauuuc

SEQ ID NO: 1216352 - RNA, 19 nt, Artificial Sequence
  Description of Artificial Sequence: Synthetic oligonucleotide
  Sense strand starting at position 2275 of SEQ ID NO: 917196
acugaagucucuguucuaa

SEQ ID NO: 1216353 - RNA, 19 nt, Artificial Sequence
  Description of Artificial Sequence: Synthetic oligonucleotide
  Antisense strand to SEQ ID NO: 1216352
uuagaacagagacuucagu

SEQ ID NO: 1216354 - RNA, 19 nt, Artificial Sequence
  Description of Artificial Sequence: Synthetic oligonucleotide
  Sense strand starting at position 2529 of SEQ ID NO: 917196
gcuaauaaagacuguauaa

SEQ ID NO: 1216355 - RNA, 19 nt, Artificial Sequence
  Description of Artificial Sequence: Synthetic oligonucleotide
  Antisense strand to SEQ ID NO: 1216354
uuauacagucuuuauuagc

SEQ ID NO: 1216356 - RNA, 19 nt, Artificial Sequence
  Description of Artificial Sequence: Synthetic oligonucleotide
  Sense strand starting at position 2538 of SEQ ID NO: 917196
gacuguauaagugagguuu

SEQ ID NO: 1216357 - RNA, 19 nt, Artificial Sequence
  Description of Artificial Sequence: Synthetic oligonucleotide
  Antisense strand to SEQ ID NO: 1216356
aaaccucacuuauacaguc

SEQ ID NO: 1216358 - RNA, 19 nt, Artificial Sequence
  Description of Artificial Sequence: Synthetic oligonucleotide
  Sense strand starting at position 2648 of SEQ ID NO: 917196
acauauugcuagguuuaga

SEQ ID NO: 1216359 - RNA, 19 nt, Artificial Sequence
  Description of Artificial Sequence: Synthetic oligonucleotide
  Antisense strand to SEQ ID NO: 1216358
ucuaaaccuagcaauaugu

SEQ ID NO: 1216360 - RNA, 19 nt, Artificial Sequence
  Description of Artificial Sequence: Synthetic oligonucleotide
  Sense strand starting at position 2651 of SEQ ID NO: 917196
uauugcuagguuuagaguu

SEQ ID NO: 1216361 - RNA, 19 nt, Artificial Sequence
  Description of Artificial Sequence: Synthetic oligonucleotide
  Antisense strand to SEQ ID NO: 1216360
aacucuaaaccuagcaaua

SEQ ID NO: 1216362 - RNA, 19 nt, Artificial Sequence
  Description of Artificial Sequence: Synthetic oligonucleotide
  Sense strand starting at position 3059 of SEQ ID NO: 917196
uguacuuagugggcaaaga

SEQ ID NO: 1216363 - RNA, 19 nt, Artificial Sequence
  Description of Artificial Sequence: Synthetic oligonucleotide
  Antisense strand to SEQ ID NO: 1216362
ucuuugcccacuaaguaca

SEQ ID NO: 1216364 - RNA, 19 nt, Artificial Sequence
  Description of Artificial Sequence: Synthetic oligonucleotide
  Sense strand starting at position 3188 of SEQ ID NO: 917196
auagaaaggaguugugauu

SEQ ID NO: 1216365 - RNA, 19 nt, Artificial Sequence
  Description of Artificial Sequence: Synthetic oligonucleotide
  Antisense strand to SEQ ID NO: 1216364
aaucacaacuccuuucuau

SEQ ID NO: 1216366 - RNA, 19 nt, Artificial Sequence
  Description of Artificial Sequence: Synthetic oligonucleotide
  Sense strand starting at position 3199 of SEQ ID NO: 917196
uugugauuccuacaucaca

SEQ ID NO: 1216367 - RNA, 19 nt, Artificial Sequence
  Description of Artificial Sequence: Synthetic oligonucleotide
  Antisense strand to SEQ ID NO: 1216366
ugugauguaggaaucacaa

SEQ ID NO: 1216368 - RNA, 19 nt, Artificial Sequence
  Description of Artificial Sequence: Synthetic oligonucleotide
  Sense strand starting at position 3231 of SEQ ID NO: 917196
aauaauaucuguuuagagg

SEQ ID NO: 1216369 - RNA, 19 nt, Artificial Sequence
  Description of Artificial Sequence: Synthetic oligonucleotide
  Antisense strand to SEQ ID NO: 1216368
ccucuaaacagauauuauu

SEQ ID NO: 1216370 - RNA, 19 nt, Artificial Sequence
  Description of Artificial Sequence: Synthetic oligonucleotide
  Sense strand starting at position 3603 of SEQ ID NO: 917196
ugagguaaauguguuuaga

SEQ ID NO: 1216371 - RNA, 19 nt, Artificial Sequence
  Description of Artificial Sequence: Synthetic oligonucleotide
  Antisense strand to SEQ ID NO: 1216370
ucuaaacacauuuaccuca

SEQ ID NO: 1216372 - RNA, 19 nt, Artificial Sequence
  Description of Artificial Sequence: Synthetic oligonucleotide
  Sense strand starting at position 3605 of SEQ ID NO: 917196
agguaaauguguuuagaug

SEQ ID NO: 1216373 - RNA, 19 nt, Artificial Sequence
  Description of Artificial Sequence: Synthetic oligonucleotide
  Antisense strand to SEQ ID NO: 1216372
caucuaaacacauuuaccu

SEQ ID NO: 1216374 - RNA, 19 nt, Artificial Sequence
  Description of Artificial Sequence: Synthetic oligonucleotide
  Sense strand starting at position 3841 of SEQ ID NO: 917196
cagugauucgaucacaguu

SEQ ID NO: 1216375 - RNA, 19 nt, Artificial Sequence
  Description of Artificial Sequence: Synthetic oligonucleotide
  Antisense strand to SEQ ID NO: 1216374
aacugugaucgaaucacug

SEQ ID NO: 1216376 - RNA, 19 nt, Artificial Sequence
  Description of Artificial Sequence: Synthetic oligonucleotide
  Sense strand starting at position 3841 of SEQ ID NO: 917197
cagugauucgaucacaguu

SEQ ID NO: 1216377 - RNA, 19 nt, Artificial Sequence
  Description of Artificial Sequence: Synthetic oligonucleotide
  Antisense strand to SEQ ID NO: 1216376
aacugugaucgaaucacug

SEQ ID NO: 1216378 - RNA, 19 nt, Artificial Sequence
  Description of Artificial Sequence: Synthetic oligonucleotide
  Sense strand starting at position 254 of SEQ ID NO: 917197
uguaaucagcugcaaagua

SEQ ID NO: 1216379 - RNA, 19 nt, Artificial Sequence
  Description of Artificial Sequence: Synthetic oligonucleotide
  Antisense strand to SEQ ID NO: 1216378
uacuuugcagcugauuaca

SEQ ID NO: 1216380 - RNA, 19 nt, Artificial Sequence
  Description of Artificial Sequence: Synthetic oligonucleotide
  Sense strand starting at position 378 of SEQ ID NO: 917197
auaauaugguauuccagga

SEQ ID NO: 1216381 - RNA, 19 nt, Artificial Sequence
  Description of Artificial Sequence: Synthetic oligonucleotide
  Antisense strand to SEQ ID NO: 1216380
uccuggaauaccauauuau

SEQ ID NO: 1216382 - RNA, 19 nt, Artificial Sequence
  Description of Artificial Sequence: Synthetic oligonucleotide
  Sense strand starting at position 382 of SEQ ID NO: 917197
uaugguauuccaggaacuu

SEQ ID NO: 1216383 - RNA, 19 nt, Artificial Sequence
  Description of Artificial Sequence: Synthetic oligonucleotide
  Antisense strand to SEQ ID NO: 1216382
aaguuccuggaauaccaua

SEQ ID NO: 1216384 - RNA, 19 nt, Artificial Sequence
  Description of Artificial Sequence: Synthetic oligonucleotide
  Sense strand starting at position 482 of SEQ ID NO: 917197
uaccuauuguagucuagga

SEQ ID NO: 1216385 - RNA, 19 nt, Artificial Sequence
  Description of Artificial Sequence: Synthetic oligonucleotide
  Antisense strand to SEQ ID NO: 1216384
uccuagacuacaauaggua

SEQ ID NO: 1216386 - RNA, 19 nt, Artificial Sequence
  Description of Artificial Sequence: Synthetic oligonucleotide
  Sense strand starting at position 484 of SEQ ID NO: 917197
ccuauuguagucuaggagu

SEQ ID NO: 1216387 - RNA, 19 nt, Artificial Sequence
  Description of Artificial Sequence: Synthetic oligonucleotide
  Antisense strand to SEQ ID NO: 1216386
acuccuagacuacaauagg

SEQ ID NO: 1216388 - RNA, 19 nt, Artificial Sequence
  Description of Artificial Sequence: Synthetic oligonucleotide
  Sense strand starting at position 716 of SEQ ID NO: 917197
accuauggugcucauuagu

SEQ ID NO: 1216389 - RNA, 19 nt, Artificial Sequence
  Description of Artificial Sequence: Synthetic oligonucleotide
  Antisense strand to SEQ ID NO: 1216388
acuaaugagcaccauaggu

SEQ ID NO: 1216390 - RNA, 19 nt, Artificial Sequence
  Description of Artificial Sequence: Synthetic oligonucleotide
  Sense strand starting at position 719 of SEQ ID NO: 917197
uauggugcucauuagugaa

SEQ ID NO: 1216391 - RNA, 19 nt, Artificial Sequence
  Description of Artificial Sequence: Synthetic oligonucleotide
  Antisense strand to SEQ ID NO: 1216390
uucacuaaugagcaccaua

SEQ ID NO: 1216392 - RNA, 19 nt, Artificial Sequence
  Description of Artificial Sequence: Synthetic oligonucleotide
  Sense strand starting at position 723 of SEQ ID NO: 917197
gugcucauuagugaaagua

SEQ ID NO: 1216393 - RNA, 19 nt, Artificial Sequence
  Description of Artificial Sequence: Synthetic oligonucleotide
  Antisense strand to SEQ ID NO: 1216392
uacuuucacuaaugagcac

SEQ ID NO: 1216394 - RNA, 19 nt, Artificial Sequence
  Description of Artificial Sequence: Synthetic oligonucleotide
  Sense strand starting at position 800 of SEQ ID NO: 917197
ugcgauuucucacuucuug

SEQ ID NO: 1216395 - RNA, 19 nt, Artificial Sequence
  Description of Artificial Sequence: Synthetic oligonucleotide
  Antisense strand to SEQ ID NO: 1216394
caagaagugagaaaucgca

SEQ ID NO: 1216396 - RNA, 19 nt, Artificial Sequence
  Description of Artificial Sequence: Synthetic oligonucleotide
  Sense strand starting at position 850 of SEQ ID NO: 917197
auggcaggguccucaagaa

SEQ ID NO: 1216397 - RNA, 19 nt, Artificial Sequence
  Description of Artificial Sequence: Synthetic oligonucleotide
  Antisense strand to SEQ ID NO: 1216396
uucuugaggacccugccau

SEQ ID NO: 1216398 - RNA, 19 nt, Artificial Sequence
  Description of Artificial Sequence: Synthetic oligonucleotide
  Sense strand starting at position 947 of SEQ ID NO: 917197
uuauguugggcauaaauac

SEQ ID NO: 1216399 - RNA, 19 nt, Artificial Sequence
  Description of Artificial Sequence: Synthetic oligonucleotide
  Antisense strand to SEQ ID NO: 1216398
guauuuaugcccaacauaa

SEQ ID NO: 1216400 - RNA, 19 nt, Artificial Sequence
  Description of Artificial Sequence: Synthetic oligonucleotide
  Sense strand starting at position 954 of SEQ ID NO: 917197
gggcauaaauacuuuaugu

SEQ ID NO: 1216401 - RNA, 19 nt, Artificial Sequence
  Description of Artificial Sequence: Synthetic oligonucleotide
  Antisense strand to SEQ ID NO: 1216400
acauaaaguauuuaugccc

SEQ ID NO: 1216402 - RNA, 19 nt, Artificial Sequence
  Description of Artificial Sequence: Synthetic oligonucleotide
  Sense strand starting at position 984 of SEQ ID NO: 917197
ugaauaaguuaagccaaga

SEQ ID NO: 1216403 - RNA, 19 nt, Artificial Sequence
  Description of Artificial Sequence: Synthetic oligonucleotide
  Antisense strand to SEQ ID NO: 1216402
ucuuggcuuaacuuauuca

SEQ ID NO: 1216404 - RNA, 19 nt, Artificial Sequence
  Description of Artificial Sequence: Synthetic oligonucleotide
  Sense strand starting at position 1022 of SEQ ID NO: 917197
acgagacaauagucacuaa

SEQ ID NO: 1216405 - RNA, 19 nt, Artificial Sequence
  Description of Artificial Sequence: Synthetic oligonucleotide
  Antisense strand to SEQ ID NO: 1216404
uuagugacuauugucucgu

SEQ ID NO: 1216406 - RNA, 19 nt, Artificial Sequence
  Description of Artificial Sequence: Synthetic oligonucleotide
  Sense strand starting at position 1082 of SEQ ID NO: 917197
aucacaagacuucguagaa

SEQ ID NO: 1216407 - RNA, 19 nt, Artificial Sequence
  Description of Artificial Sequence: Synthetic oligonucleotide
  Antisense strand to SEQ ID NO: 1216406
uucuacgaagucuugugau

SEQ ID NO: 1216408 - RNA, 19 nt, Artificial Sequence
  Description of Artificial Sequence: Synthetic oligonucleotide
  Sense strand starting at position 1083 of SEQ ID NO: 917197
ucacaagacuucguagaau

SEQ ID NO: 1216409 - RNA, 19 nt, Artificial Sequence
  Description of Artificial Sequence: Synthetic oligonucleotide
  Antisense strand to SEQ ID NO: 1216408
auucuacgaagucuuguga

SEQ ID NO: 1216410 - RNA, 19 nt, Artificial Sequence
  Description of Artificial Sequence: Synthetic oligonucleotide
  Sense strand starting at position 1094 of SEQ ID NO: 917197
cguagaauuaaggguauua

SEQ ID NO: 1216411 - RNA, 19 nt, Artificial Sequence
  Description of Artificial Sequence: Synthetic oligonucleotide
  Antisense strand to SEQ ID NO: 1216410
uaauacccuuaauucuacg

SEQ ID NO: 1216412 - RNA, 19 nt, Artificial Sequence
  Description of Artificial Sequence: Synthetic oligonucleotide
  Sense strand starting at position 1259 of SEQ ID NO: 917197
aaauaacgugucugaacua

SEQ ID NO: 1216413 - RNA, 19 nt, Artificial Sequence
  Description of Artificial Sequence: Synthetic oligonucleotide
  Antisense strand to SEQ ID NO: 1216412
uaguucagacacguuauuu

SEQ ID NO: 1216414 - RNA, 19 nt, Artificial Sequence
  Description of Artificial Sequence: Synthetic oligonucleotide
  Sense strand starting at position 1617 of SEQ ID NO: 917197
cgaugucgucucgcaggua

SEQ ID NO: 1216415 - RNA, 19 nt, Artificial Sequence
  Description of Artificial Sequence: Synthetic oligonucleotide
  Antisense strand to SEQ ID NO: 1216414
uaccugcgagacgacaucg

SEQ ID NO: 1216416 - RNA, 19 nt, Artificial Sequence
  Description of Artificial Sequence: Synthetic oligonucleotide
  Sense strand starting at position 1783 of SEQ ID NO: 917197
ggagguucuucccuuucca

SEQ ID NO: 1216417 - RNA, 19 nt, Artificial Sequence
  Description of Artificial Sequence: Synthetic oligonucleotide
  Antisense strand to SEQ ID NO: 1216416
uggaaagggaagaaccucc

SEQ ID NO: 1216418 - RNA, 19 nt, Artificial Sequence
  Description of Artificial Sequence: Synthetic oligonucleotide
  Sense strand starting at position 1796 of SEQ ID NO: 917197
uuuccauucccggauauua

SEQ ID NO: 1216419 - RNA, 19 nt, Artificial Sequence
  Description of Artificial Sequence: Synthetic oligonucleotide
  Antisense strand to SEQ ID NO: 1216418
uaauauccgggaauggaaa

SEQ ID NO: 1216420 - RNA, 19 nt, Artificial Sequence
  Description of Artificial Sequence: Synthetic oligonucleotide
  Sense strand starting at position 1798 of SEQ ID NO: 917197
uccauucccggauauuagu

SEQ ID NO: 1216421 - RNA, 19 nt, Artificial Sequence
  Description of Artificial Sequence: Synthetic oligonucleotide
  Antisense strand to SEQ ID NO: 1216420
acuaauauccgggaaugga

SEQ ID NO: 1216422 - RNA, 19 nt, Artificial Sequence
  Description of Artificial Sequence: Synthetic oligonucleotide
  Sense strand starting at position 2209 of SEQ ID NO: 917197
ugacacuuucgagguaacu

SEQ ID NO: 1216423 - RNA, 19 nt, Artificial Sequence
  Description of Artificial Sequence: Synthetic oligonucleotide
  Antisense strand to SEQ ID NO: 1216422
aguuaccucgaaaguguca

SEQ ID NO: 1216424 - RNA, 19 nt, Artificial Sequence
  Description of Artificial Sequence: Synthetic oligonucleotide
  Sense strand starting at position 2222 of SEQ ID NO: 917197
guaacuugcgacuaucauc

SEQ ID NO: 1216425 - RNA, 19 nt, Artificial Sequence
  Description of Artificial Sequence: Synthetic oligonucleotide
  Antisense strand to SEQ ID NO: 1216424
gaugauagucgcaaguuac

SEQ ID NO: 1216426 - RNA, 19 nt, Artificial Sequence
  Description of Artificial Sequence: Synthetic oligonucleotide
  Sense strand starting at position 2229 of SEQ ID NO: 917197
gcgacuaucaucgcuuucu

SEQ ID NO: 1216427 - RNA, 19 nt, Artificial Sequence
  Description of Artificial Sequence: Synthetic oligonucleotide
  Antisense strand to SEQ ID NO: 1216426
agaaagcgaugauagucgc

SEQ ID NO: 1216428 - RNA, 19 nt, Artificial Sequence
  Description of Artificial Sequence: Synthetic oligonucleotide
  Sense strand starting at position 2334 of SEQ ID NO: 917197
cccuuuguaaucgaggaga

SEQ ID NO: 1216429 - RNA, 19 nt, Artificial Sequence
  Description of Artificial Sequence: Synthetic oligonucleotide
  Antisense strand to SEQ ID NO: 1216428
ucuccucgauuacaaaggg

SEQ ID NO: 1216430 - RNA, 19 nt, Artificial Sequence
  Description of Artificial Sequence: Synthetic oligonucleotide
  Sense strand starting at position 2336 of SEQ ID NO: 917197
cuuuguaaucgaggagaga

SEQ ID NO: 1216431 - RNA, 19 nt, Artificial Sequence
  Description of Artificial Sequence: Synthetic oligonucleotide
  Antisense strand to SEQ ID NO: 1216430
ucucuccucgauuacaaag

SEQ ID NO: 1216432 - RNA, 19 nt, Artificial Sequence
  Description of Artificial Sequence: Synthetic oligonucleotide
  Sense strand starting at position 2420 of SEQ ID NO: 917197
aguauaguucucgcuguuu

SEQ ID NO: 1216433 - RNA, 19 nt, Artificial Sequence
  Description of Artificial Sequence: Synthetic oligonucleotide
  Antisense strand to SEQ ID NO: 1216432
aaacagcgagaacuauacu

SEQ ID NO: 1216434 - RNA, 19 nt, Artificial Sequence
  Description of Artificial Sequence: Synthetic oligonucleotide
  Sense strand starting at position 2501 of SEQ ID NO: 917197
uuguuauaucaugagguau

SEQ ID NO: 1216435 - RNA, 19 nt, Artificial Sequence
  Description of Artificial Sequence: Synthetic oligonucleotide
  Antisense strand to SEQ ID NO: 1216434
auaccucaugauauaacaa

SEQ ID NO: 1216436 - RNA, 19 nt, Artificial Sequence
  Description of Artificial Sequence: Synthetic oligonucleotide
  Sense strand starting at position 2551 of SEQ ID NO: 917197
gagaguuagaaguaaguuc

SEQ ID NO: 1216437 - RNA, 19 nt, Artificial Sequence
  Description of Artificial Sequence: Synthetic oligonucleotide
  Antisense strand to SEQ ID NO: 1216436
gaacuuacuucuaacucuc

SEQ ID NO: 1216438 - RNA, 19 nt, Artificial Sequence
  Description of Artificial Sequence: Synthetic oligonucleotide
  Sense strand starting at position 2800 of SEQ ID NO: 917197
cggugaaaggaguaacuau

SEQ ID NO: 1216439 - RNA, 19 nt, Artificial Sequence
  Description of Artificial Sequence: Synthetic oligonucleotide
  Antisense strand to SEQ ID NO: 1216438
auaguuacuccuuucaccg

SEQ ID NO: 1216440 - RNA, 19 nt, Artificial Sequence
  Description of Artificial Sequence: Synthetic oligonucleotide
  Sense strand starting at position 2997 of SEQ ID NO: 917197
ggugccauucuugauuaua

SEQ ID NO: 1216441 - RNA, 19 nt, Artificial Sequence
  Description of Artificial Sequence: Synthetic oligonucleotide
  Antisense strand to SEQ ID NO: 1216440
uauaaucaagaauggcacc

SEQ ID NO: 1216442 - RNA, 19 nt, Artificial Sequence
  Description of Artificial Sequence: Synthetic oligonucleotide
  Sense strand starting at position 3000 of SEQ ID NO: 917197
gccauucuugauuauaaug

SEQ ID NO: 1216443 - RNA, 19 nt, Artificial Sequence
  Description of Artificial Sequence: Synthetic oligonucleotide
  Antisense strand to SEQ ID NO: 1216442
cauuauaaucaagaauggc

SEQ ID NO: 1216444 - RNA, 19 nt, Artificial Sequence
  Description of Artificial Sequence: Synthetic oligonucleotide
  Sense strand starting at position 3045 of SEQ ID NO: 917197
cuuuguuuccuccaaguaa

SEQ ID NO: 1216445 - RNA, 19 nt, Artificial Sequence
  Description of Artificial Sequence: Synthetic oligonucleotide
  Antisense strand to SEQ ID NO: 1216444
uuacuuggaggaaacaaag

SEQ ID NO: 1216446 - RNA, 19 nt, Artificial Sequence
  Description of Artificial Sequence: Synthetic oligonucleotide
  Sense strand starting at position 3119 of SEQ ID NO: 917197
aggaauuaauguguuugau

SEQ ID NO: 1216447 - RNA, 19 nt, Artificial Sequence
  Description of Artificial Sequence: Synthetic oligonucleotide
  Antisense strand to SEQ ID NO: 1216446
aucaaacacauuaauuccu

SEQ ID NO: 1216448 - RNA, 19 nt, Artificial Sequence
  Description of Artificial Sequence: Synthetic oligonucleotide
  Sense strand starting at position 3127 of SEQ ID NO: 917197
auguguuugauuugagcau

SEQ ID NO: 1216449 - RNA, 19 nt, Artificial Sequence
  Description of Artificial Sequence: Synthetic oligonucleotide
  Antisense strand to SEQ ID NO: 1216448
augcucaaaucaaacacau

SEQ ID NO: 1216450 - RNA, 19 nt, Artificial Sequence
  Description of Artificial Sequence: Synthetic oligonucleotide
  Sense strand starting at position 3156 of SEQ ID NO: 917197
gcaauaaucuguucuagau

SEQ ID NO: 1216451 - RNA, 19 nt, Artificial Sequence
  Description of Artificial Sequence: Synthetic oligonucleotide
  Antisense strand to SEQ ID NO: 1216450
aucuagaacagauuauugc

SEQ ID NO: 1216452 - RNA, 19 nt, Artificial Sequence
  Description of Artificial Sequence: Synthetic oligonucleotide
  Sense strand starting at position 3234 of SEQ ID NO: 917197
aguccaugauuucuguagu

SEQ ID NO: 1216453 - RNA, 19 nt, Artificial Sequence
  Description of Artificial Sequence: Synthetic oligonucleotide
  Antisense strand to SEQ ID NO: 1216452
acuacagaaaucauggacu

SEQ ID NO: 1216454 - RNA, 19 nt, Artificial Sequence
  Description of Artificial Sequence: Synthetic oligonucleotide
  Sense strand starting at position 3889 of SEQ ID NO: 917197
aguuaaugacauuguaauc

SEQ ID NO: 1216455 - RNA, 19 nt, Artificial Sequence
  Description of Artificial Sequence: Synthetic oligonucleotide
  Antisense strand to SEQ ID NO: 1216454
gauuacaaugucauuaacu

SEQ ID NO: 1216456 - RNA, 19 nt, Artificial Sequence
  Description of Artificial Sequence: Synthetic oligonucleotide
  Sense strand starting at position 3894 of SEQ ID NO: 917197
augacauuguaaucuugga

SEQ ID NO: 1216457 - RNA, 19 nt, Artificial Sequence
  Description of Artificial Sequence: Synthetic oligonucleotide
  Antisense strand to SEQ ID NO: 1216456
uccaagauuacaaugucau

SEQ ID NO: 1216458 - RNA, 19 nt, Artificial Sequence
  Description of Artificial Sequence: Synthetic oligonucleotide
  Sense strand starting at position 3894 of SEQ ID NO: 917198
augacauuguaaucuugga

SEQ ID NO: 1216459 - RNA, 19 nt, Artificial Sequence
  Description of Artificial Sequence: Synthetic oligonucleotide
  Antisense strand to SEQ ID NO: 1216458
uccaagauuacaaugucau

SEQ ID NO: 1216460 - RNA, 19 nt, Artificial Sequence
  Description of Artificial Sequence: Synthetic oligonucleotide
  Sense strand starting at position 27 of SEQ ID NO: 917198
acuuauaaucaauggugua

SEQ ID NO: 1216461 - RNA, 19 nt, Artificial Sequence
  Description of Artificial Sequence: Synthetic oligonucleotide
  Antisense strand to SEQ ID NO: 1216460
uacaccauugauuauaagu

SEQ ID NO: 1216462 - RNA, 19 nt, Artificial Sequence
  Description of Artificial Sequence: Synthetic oligonucleotide
  Sense strand starting at position 101 of SEQ ID NO: 917198
ucuuacauuggagagcauu

SEQ ID NO: 1216463 - RNA, 19 nt, Artificial Sequence
  Description of Artificial Sequence: Synthetic oligonucleotide
  Antisense strand to SEQ ID NO: 1216462
aaugcucuccaauguaaga

SEQ ID NO: 1216464 - RNA, 19 nt, Artificial Sequence
  Description of Artificial Sequence: Synthetic oligonucleotide
  Sense strand starting at position 410 of SEQ ID NO: 917198
ggguauauaauaggcuuua

SEQ ID NO: 1216465 - RNA, 19 nt, Artificial Sequence
  Description of Artificial Sequence: Synthetic oligonucleotide
  Antisense strand to SEQ ID NO: 1216464
uaaagccuauuauauaccc

SEQ ID NO: 1216466 - RNA, 19 nt, Artificial Sequence
  Description of Artificial Sequence: Synthetic oligonucleotide
  Sense strand starting at position 411 of SEQ ID NO: 917198
gguauauaauaggcuuuau

SEQ ID NO: 1216467 - RNA, 19 nt, Artificial Sequence
  Description of Artificial Sequence: Synthetic oligonucleotide
  Antisense strand to SEQ ID NO: 1216466
auaaagccuauuauauacc

SEQ ID NO: 1216468 - RNA, 19 nt, Artificial Sequence
  Description of Artificial Sequence: Synthetic oligonucleotide
  Sense strand starting at position 457 of SEQ ID NO: 917198
caguguauagugcaacuua

SEQ ID NO: 1216469 - RNA, 19 nt, Artificial Sequence
  Description of Artificial Sequence: Synthetic oligonucleotide
  Antisense strand to SEQ ID NO: 1216468
uaaguugcacuauacacug

SEQ ID NO: 1216470 - RNA, 19 nt, Artificial Sequence
  Description of Artificial Sequence: Synthetic oligonucleotide
  Sense strand starting at position 641 of SEQ ID NO: 917198
agagauucgugaccuuaaa

SEQ ID NO: 1216471 - RNA, 19 nt, Artificial Sequence
  Description of Artificial Sequence: Synthetic oligonucleotide
  Antisense strand to SEQ ID NO: 1216470
uuuaaggucacgaaucucu

SEQ ID NO: 1216472 - RNA, 19 nt, Artificial Sequence
  Description of Artificial Sequence: Synthetic oligonucleotide
  Sense strand starting at position 756 of SEQ ID NO: 917198
ggcuaaauuggcuaacaca

SEQ ID NO: 1216473 - RNA, 19 nt, Artificial Sequence
  Description of Artificial Sequence: Synthetic oligonucleotide
  Antisense strand to SEQ ID NO: 1216472
uguguuagccaauuuagcc

SEQ ID NO: 1216474 - RNA, 19 nt, Artificial Sequence
  Description of Artificial Sequence: Synthetic oligonucleotide
  Sense strand starting at position 772 of SEQ ID NO: 917198
acaguuugguaccuuaaga

SEQ ID NO: 1216475 - RNA, 19 nt, Artificial Sequence
  Description of Artificial Sequence: Synthetic oligonucleotide
  Antisense strand to SEQ ID NO: 1216474
ucuuaagguaccaaacugu

SEQ ID NO: 1216476 - RNA, 19 nt, Artificial Sequence
  Description of Artificial Sequence: Synthetic oligonucleotide
  Sense strand starting at position 789 of SEQ ID NO: 917198
gaggaaaugugcccuaccu

SEQ ID NO: 1216477 - RNA, 19 nt, Artificial Sequence
  Description of Artificial Sequence: Synthetic oligonucleotide
  Antisense strand to SEQ ID NO: 1216476
agguagggcacauuuccuc

SEQ ID NO: 1216478 - RNA, 19 nt, Artificial Sequence
  Description of Artificial Sequence: Synthetic oligonucleotide
  Sense strand starting at position 791 of SEQ ID NO: 917198
ggaaaugugcccuaccuau

SEQ ID NO: 1216479 - RNA, 19 nt, Artificial Sequence
  Description of Artificial Sequence: Synthetic oligonucleotide
  Antisense strand to SEQ ID NO: 1216478
auagguagggcacauuucc

SEQ ID NO: 1216480 - RNA, 19 nt, Artificial Sequence
  Description of Artificial Sequence: Synthetic oligonucleotide
  Sense strand starting at position 804 of SEQ ID NO: 917198
accuauaugagcuggguga

SEQ ID NO: 1216481 - RNA, 19 nt, Artificial Sequence
  Description of Artificial Sequence: Synthetic oligonucleotide
  Antisense strand to SEQ ID NO: 1216480
ucacccagcucauauaggu

SEQ ID NO: 1216482 - RNA, 19 nt, Artificial Sequence
  Description of Artificial Sequence: Synthetic oligonucleotide
  Sense strand starting at position 808 of SEQ ID NO: 917198
auaugagcugggugacuua

SEQ ID NO: 1216483 - RNA, 19 nt, Artificial Sequence
  Description of Artificial Sequence: Synthetic oligonucleotide
  Antisense strand to SEQ ID NO: 1216482
uaagucacccagcucauau

SEQ ID NO: 1216484 - RNA, 19 nt, Artificial Sequence
  Description of Artificial Sequence: Synthetic oligonucleotide
  Sense strand starting at position 819 of SEQ ID NO: 917198
gugacuuagcaagaguuua

SEQ ID NO: 1216485 - RNA, 19 nt, Artificial Sequence
  Description of Artificial Sequence: Synthetic oligonucleotide
  Antisense strand to SEQ ID NO: 1216484
uaaacucuugcuaagucac

SEQ ID NO: 1216486 - RNA, 19 nt, Artificial Sequence
  Description of Artificial Sequence: Synthetic oligonucleotide
  Sense strand starting at position 824 of SEQ ID NO: 917198
uuagcaagaguuuagcauu

SEQ ID NO: 1216487 - RNA, 19 nt, Artificial Sequence
  Description of Artificial Sequence: Synthetic oligonucleotide
  Antisense strand to SEQ ID NO: 1216486
aaugcuaaacucuugcuaa

SEQ ID NO: 1216488 - RNA, 19 nt, Artificial Sequence
  Description of Artificial Sequence: Synthetic oligonucleotide
  Sense strand starting at position 888 of SEQ ID NO: 917198
acuuuaugagaauguaggu

SEQ ID NO: 1216489 - RNA, 19 nt, Artificial Sequence
  Description of Artificial Sequence: Synthetic oligonucleotide
  Antisense strand to SEQ ID NO: 1216488
accuacauucucauaaagu

SEQ ID NO: 1216490 - RNA, 19 nt, Artificial Sequence
  Description of Artificial Sequence: Synthetic oligonucleotide
  Sense strand starting at position 893 of SEQ ID NO: 917198
augagaauguagguugacu

SEQ ID NO: 1216491 - RNA, 19 nt, Artificial Sequence
  Description of Artificial Sequence: Synthetic oligonucleotide
  Antisense strand to SEQ ID NO: 1216490
agucaaccuacauucucau

SEQ ID NO: 1216492 - RNA, 19 nt, Artificial Sequence
  Description of Artificial Sequence: Synthetic oligonucleotide
  Sense strand starting at position 901 of SEQ ID NO: 917198
guagguugacucuguaaga

SEQ ID NO: 1216493 - RNA, 19 nt, Artificial Sequence
  Description of Artificial Sequence: Synthetic oligonucleotide
  Antisense strand to SEQ ID NO: 1216492
ucuuacagagucaaccuac

SEQ ID NO: 1216494 - RNA, 19 nt, Artificial Sequence
  Description of Artificial Sequence: Synthetic oligonucleotide
  Sense strand starting at position 902 of SEQ ID NO: 917198
uagguugacucuguaagac

SEQ ID NO: 1216495 - RNA, 19 nt, Artificial Sequence
  Description of Artificial Sequence: Synthetic oligonucleotide
  Antisense strand to SEQ ID NO: 1216494
gucuuacagagucaaccua

SEQ ID NO: 1216496 - RNA, 19 nt, Artificial Sequence
  Description of Artificial Sequence: Synthetic oligonucleotide
  Sense strand starting at position 1027 of SEQ ID NO: 917198
gggacuuaguaaguguauu

SEQ ID NO: 1216497 - RNA, 19 nt, Artificial Sequence
  Description of Artificial Sequence: Synthetic oligonucleotide
  Antisense strand to SEQ ID NO: 1216496
aauacacuuacuaaguccc

SEQ ID NO: 1216498 - RNA, 19 nt, Artificial Sequence
  Description of Artificial Sequence: Synthetic oligonucleotide
  Sense strand starting at position 1064 of SEQ ID NO: 917198
guuauuaauuuggaaagug

SEQ ID NO: 1216499 - RNA, 19 nt, Artificial Sequence
  Description of Artificial Sequence: Synthetic oligonucleotide
  Antisense strand to SEQ ID NO: 1216498
cacuuuccaaauuaauaac

SEQ ID NO: 1216500 - RNA, 19 nt, Artificial Sequence
  Description of Artificial Sequence: Synthetic oligonucleotide
  Sense strand starting at position 1149 of SEQ ID NO: 917198
gcugauuuaugugagagag

SEQ ID NO: 1216501 - RNA, 19 nt, Artificial Sequence
  Description of Artificial Sequence: Synthetic oligonucleotide
  Antisense strand to SEQ ID NO: 1216500
cucucucacauaaaucagc

SEQ ID NO: 1216502 - RNA, 19 nt, Artificial Sequence
  Description of Artificial Sequence: Synthetic oligonucleotide
  Sense strand starting at position 1151 of SEQ ID NO: 917198
ugauuuaugugagagagga

SEQ ID NO: 1216503 - RNA, 19 nt, Artificial Sequence
  Description of Artificial Sequence: Synthetic oligonucleotide
  Antisense strand to SEQ ID NO: 1216502
uccucucucacauaaauca

SEQ ID NO: 1216504 - RNA, 19 nt, Artificial Sequence
  Description of Artificial Sequence: Synthetic oligonucleotide
  Sense strand starting at position 2451 of SEQ ID NO: 917198
ggaggaguuguguaucugg

SEQ ID NO: 1216505 - RNA, 19 nt, Artificial Sequence
  Description of Artificial Sequence: Synthetic oligonucleotide
  Antisense strand to SEQ ID NO: 1216504
ccagauacacaacuccucc

SEQ ID NO: 1216506 - RNA, 19 nt, Artificial Sequence
  Description of Artificial Sequence: Synthetic oligonucleotide
  Sense strand starting at position 2454 of SEQ ID NO: 917198
ggaguuguguaucuggaag

SEQ ID NO: 1216507 - RNA, 19 nt, Artificial Sequence
  Description of Artificial Sequence: Synthetic oligonucleotide
  Antisense strand to SEQ ID NO: 1216506
cuuccagauacacaacucc

SEQ ID NO: 1216508 - RNA, 19 nt, Artificial Sequence
  Description of Artificial Sequence: Synthetic oligonucleotide
  Sense strand starting at position 2737 of SEQ ID NO: 917198
aauguuaugcuuugauaga

SEQ ID NO: 1216509 - RNA, 19 nt, Artificial Sequence
  Description of Artificial Sequence: Synthetic oligonucleotide
  Antisense strand to SEQ ID NO: 1216508
ucuaucaaagcauaacauu

SEQ ID NO: 1216510 - RNA, 19 nt, Artificial Sequence
  Description of Artificial Sequence: Synthetic oligonucleotide
  Sense strand starting at position 2794 of SEQ ID NO: 917198
gaagauauuugagaggagu

SEQ ID NO: 1216511 - RNA, 19 nt, Artificial Sequence
  Description of Artificial Sequence: Synthetic oligonucleotide
  Antisense strand to SEQ ID NO: 1216510
acuccucucaaauaucuuc

SEQ ID NO: 1216512 - RNA, 19 nt, Artificial Sequence
  Description of Artificial Sequence: Synthetic oligonucleotide
  Sense strand starting at position 2947 of SEQ ID NO: 917198
ugaggauggaauugcauua

SEQ ID NO: 1216513 - RNA, 19 nt, Artificial Sequence
  Description of Artificial Sequence: Synthetic oligonucleotide
  Antisense strand to SEQ ID NO: 1216512
uaaugcaauuccauccuca

SEQ ID NO: 1216514 - RNA, 19 nt, Artificial Sequence
  Description of Artificial Sequence: Synthetic oligonucleotide
  Sense strand starting at position 2958 of SEQ ID NO: 917198
uugcauuacuccuuuggga

SEQ ID NO: 1216515 - RNA, 19 nt, Artificial Sequence
  Description of Artificial Sequence: Synthetic oligonucleotide
  Antisense strand to SEQ ID NO: 1216514
ucccaaaggaguaaugcaa

SEQ ID NO: 1216516 - RNA, 19 nt, Artificial Sequence
  Description of Artificial Sequence: Synthetic oligonucleotide
  Sense strand starting at position 3057 of SEQ ID NO: 917198
aaaggaucaucagaagaga

SEQ ID NO: 1216517 - RNA, 19 nt, Artificial Sequence
  Description of Artificial Sequence: Synthetic oligonucleotide
  Antisense strand to SEQ ID NO: 1216516
ucucuucugaugauccuuu

SEQ ID NO: 1216518 - RNA, 19 nt, Artificial Sequence
  Description of Artificial Sequence: Synthetic oligonucleotide
  Sense strand starting at position 3082 of SEQ ID NO: 917198
gagggauguuggguccuuu

SEQ ID NO: 1216519 - RNA, 19 nt, Artificial Sequence
  Description of Artificial Sequence: Synthetic oligonucleotide
  Antisense strand to SEQ ID NO: 1216518
aaaggacccaacaucccuc

SEQ ID NO: 1216520 - RNA, 19 nt, Artificial Sequence
  Description of Artificial Sequence: Synthetic oligonucleotide
  Sense strand starting at position 3105 of SEQ ID NO: 917198
uuuccuuaacccugggaua

SEQ ID NO: 1216521 - RNA, 19 nt, Artificial Sequence
  Description of Artificial Sequence: Synthetic oligonucleotide
  Antisense strand to SEQ ID NO: 1216520
uaucccaggguuaaggaaa

SEQ ID NO: 1216522 - RNA, 19 nt, Artificial Sequence
  Description of Artificial Sequence: Synthetic oligonucleotide
  Sense strand starting at position 3107 of SEQ ID NO: 917198
uccuuaacccugggauagu

SEQ ID NO: 1216523 - RNA, 19 nt, Artificial Sequence
  Description of Artificial Sequence: Synthetic oligonucleotide
  Antisense strand to SEQ ID NO: 1216522
acuaucccaggguuaagga

SEQ ID NO: 1216524 - RNA, 19 nt, Artificial Sequence
  Description of Artificial Sequence: Synthetic oligonucleotide
  Sense strand starting at position 3320 of SEQ ID NO: 917198
ggaaguaaauaguuuaaug

SEQ ID NO: 1216525 - RNA, 19 nt, Artificial Sequence
  Description of Artificial Sequence: Synthetic oligonucleotide
  Antisense strand to SEQ ID NO: 1216524
cauuaaacuauuuacuucc

SEQ ID NO: 1216526 - RNA, 19 nt, Artificial Sequence
  Description of Artificial Sequence: Synthetic oligonucleotide
  Sense strand starting at position 3356 of SEQ ID NO: 917198
ccaugaaguuacuuaaguu

SEQ ID NO: 1216527 - RNA, 19 nt, Artificial Sequence
  Description of Artificial Sequence: Synthetic oligonucleotide
  Antisense strand to SEQ ID NO: 1216526
aacuuaaguaacuucaugg

SEQ ID NO: 1216528 - RNA, 19 nt, Artificial Sequence
  Description of Artificial Sequence: Synthetic oligonucleotide
  Sense strand starting at position 3790 of SEQ ID NO: 917198
uuucuaguauucuuaggaa

SEQ ID NO: 1216529 - RNA, 19 nt, Artificial Sequence
  Description of Artificial Sequence: Synthetic oligonucleotide
  Antisense strand to SEQ ID NO: 1216528
uuccuaagaauacuagaaa

SEQ ID NO: 1216530 - RNA, 19 nt, Artificial Sequence
  Description of Artificial Sequence: Synthetic oligonucleotide
  Sense strand starting at position 3802 of SEQ ID NO: 917198
uuaggaagcccuggaucau

SEQ ID NO: 1216531 - RNA, 19 nt, Artificial Sequence
  Description of Artificial Sequence: Synthetic oligonucleotide
  Antisense strand to SEQ ID NO: 1216530
augauccagggcuuccuaa

SEQ ID NO: 1216532 - RNA, 19 nt, Artificial Sequence
  Description of Artificial Sequence: Synthetic oligonucleotide
  Sense strand starting at position 3892 of SEQ ID NO: 917198
guguuccaaagcuagagau

SEQ ID NO: 1216533 - RNA, 19 nt, Artificial Sequence
  Description of Artificial Sequence: Synthetic oligonucleotide
  Antisense strand to SEQ ID NO: 1216532
aucucuagcuuuggaacac

SEQ ID NO: 1216534 - RNA, 19 nt, Artificial Sequence
  Description of Artificial Sequence: Synthetic oligonucleotide
  Sense strand starting at position 3894 of SEQ ID NO: 917198
guuccaaagcuagagauau

SEQ ID NO: 1216535 - RNA, 19 nt, Artificial Sequence
  Description of Artificial Sequence: Synthetic oligonucleotide
  Antisense strand to SEQ ID NO: 1216534
auaucucuagcuuuggaac

SEQ ID NO: 1216536 - RNA, 19 nt, Artificial Sequence
  Description of Artificial Sequence: Synthetic oligonucleotide
  Sense strand starting at position 3939 of SEQ ID NO: 917198
auagucuauuuagaugagu

SEQ ID NO: 1216537 - RNA, 19 nt, Artificial Sequence
  Description of Artificial Sequence: Synthetic oligonucleotide
  Antisense strand to SEQ ID NO: 1216536
acucaucuaaauagacuau

SEQ ID NO: 1216538 - RNA, 19 nt, Artificial Sequence
  Description of Artificial Sequence: Synthetic oligonucleotide
  Sense strand starting at position 3954 of SEQ ID NO: 917199
gagucaauagcauagcaga

SEQ ID NO: 1216539 - RNA, 19 nt, Artificial Sequence
  Description of Artificial Sequence: Synthetic oligonucleotide
  Antisense strand to SEQ ID NO: 1216538
ucugcuaugcuauugacuc

SEQ ID NO: 1216540 - RNA, 19 nt, Artificial Sequence
  Description of Artificial Sequence: Synthetic oligonucleotide
  Sense strand starting at position 26 of SEQ ID NO: 917199
ccuuauuucuaaggaguca

SEQ ID NO: 1216541 - RNA, 19 nt, Artificial Sequence
  Description of Artificial Sequence: Synthetic oligonucleotide
  Antisense strand to SEQ ID NO: 1216540
ugacuccuuagaaauaagg

SEQ ID NO: 1216542 - RNA, 19 nt, Artificial Sequence
  Description of Artificial Sequence: Synthetic oligonucleotide
  Sense strand starting at position 41 of SEQ ID NO: 917199
gucagcaagucauaaggga

SEQ ID NO: 1216543 - RNA, 19 nt, Artificial Sequence
  Description of Artificial Sequence: Synthetic oligonucleotide
  Antisense strand to SEQ ID NO: 1216542
ucccuuaugacuugcugac

SEQ ID NO: 1216544 - RNA, 19 nt, Artificial Sequence
  Description of Artificial Sequence: Synthetic oligonucleotide
  Sense strand starting at position 89 of SEQ ID NO: 917199
gccacuuaccagggaugau

SEQ ID NO: 1216545 - RNA, 19 nt, Artificial Sequence
  Description of Artificial Sequence: Synthetic oligonucleotide
  Antisense strand to SEQ ID NO: 1216544
aucaucccugguaaguggc

SEQ ID NO: 1216546 - RNA, 19 nt, Artificial Sequence
  Description of Artificial Sequence: Synthetic oligonucleotide
  Sense strand starting at position 209 of SEQ ID NO: 917199
gcgaaaucauagcucacua

SEQ ID NO: 1216547 - RNA, 19 nt, Artificial Sequence
  Description of Artificial Sequence: Synthetic oligonucleotide
  Antisense strand to SEQ ID NO: 1216546
uagugagcuaugauuucgc

SEQ ID NO: 1216548 - RNA, 19 nt, Artificial Sequence
  Description of Artificial Sequence: Synthetic oligonucleotide
  Sense strand starting at position 439 of SEQ ID NO: 917199
ccaccacuugggcaauauu

SEQ ID NO: 1216549 - RNA, 19 nt, Artificial Sequence
  Description of Artificial Sequence: Synthetic oligonucleotide
  Antisense strand to SEQ ID NO: 1216548
aauauugcccaaguggugg

SEQ ID NO: 1216550 - RNA, 19 nt, Artificial Sequence
  Description of Artificial Sequence: Synthetic oligonucleotide
  Sense strand starting at position 480 of SEQ ID NO: 917199
ccaugcaacugugcauaua

SEQ ID NO: 1216551 - RNA, 19 nt, Artificial Sequence
  Description of Artificial Sequence: Synthetic oligonucleotide
  Antisense strand to SEQ ID NO: 1216550
uauaugcacaguugcaugg

SEQ ID NO: 1216552 - RNA, 19 nt, Artificial Sequence
  Description of Artificial Sequence: Synthetic oligonucleotide
  Sense strand starting at position 483 of SEQ ID NO: 917199
ugcaacugugcauauauca

SEQ ID NO: 1216553 - RNA, 19 nt, Artificial Sequence
  Description of Artificial Sequence: Synthetic oligonucleotide
  Antisense strand to SEQ ID NO: 1216552
ugauauaugcacaguugca

SEQ ID NO: 1216554 - RNA, 19 nt, Artificial Sequence
  Description of Artificial Sequence: Synthetic oligonucleotide
  Sense strand starting at position 488 of SEQ ID NO: 917199
cugugcauauaucagguua

SEQ ID NO: 1216555 - RNA, 19 nt, Artificial Sequence
  Description of Artificial Sequence: Synthetic oligonucleotide
  Antisense strand to SEQ ID NO: 1216554
uaaccugauauaugcacag

SEQ ID NO: 1216556 - RNA, 19 nt, Artificial Sequence
  Description of Artificial Sequence: Synthetic oligonucleotide
  Sense strand starting at position 490 of SEQ ID NO: 917199
gugcauauaucagguuaaa

SEQ ID NO: 1216557 - RNA, 19 nt, Artificial Sequence
  Description of Artificial Sequence: Synthetic oligonucleotide
  Antisense strand to SEQ ID NO: 1216556
uuuaaccugauauaugcac

SEQ ID NO: 1216558 - RNA, 19 nt, Artificial Sequence
  Description of Artificial Sequence: Synthetic oligonucleotide
  Sense strand starting at position 552 of SEQ ID NO: 917199
uguuuaauauggcuacaaa

SEQ ID NO: 1216559 - RNA, 19 nt, Artificial Sequence
  Description of Artificial Sequence: Synthetic oligonucleotide
  Antisense strand to SEQ ID NO: 1216558
uuuguagccauauuaaaca

SEQ ID NO: 1216560 - RNA, 19 nt, Artificial Sequence
  Description of Artificial Sequence: Synthetic oligonucleotide
  Sense strand starting at position 897 of SEQ ID NO: 917199
auacguauguggcucacaa

SEQ ID NO: 1216561 - RNA, 19 nt, Artificial Sequence
  Description of Artificial Sequence: Synthetic oligonucleotide
  Antisense strand to SEQ ID NO: 1216560
uugugagccacauacguau

SEQ ID NO: 1216562 - RNA, 19 nt, Artificial Sequence
  Description of Artificial Sequence: Synthetic oligonucleotide
  Sense strand starting at position 899 of SEQ ID NO: 917199
acguauguggcucacaaua

SEQ ID NO: 1216563 - RNA, 19 nt, Artificial Sequence
  Description of Artificial Sequence: Synthetic oligonucleotide
  Antisense strand to SEQ ID NO: 1216562
uauugugagccacauacgu

SEQ ID NO: 1216564 - RNA, 19 nt, Artificial Sequence
  Description of Artificial Sequence: Synthetic oligonucleotide
  Sense strand starting at position 901 of SEQ ID NO: 917199
guauguggcucacaauaug

SEQ ID NO: 1216565 - RNA, 19 nt, Artificial Sequence
  Description of Artificial Sequence: Synthetic oligonucleotide
  Antisense strand to SEQ ID NO: 1216564
cauauugugagccacauac

SEQ ID NO: 1216566 - RNA, 19 nt, Artificial Sequence
  Description of Artificial Sequence: Synthetic oligonucleotide
  Sense strand starting at position 912 of SEQ ID NO: 917199
acaauaugcuucuguugga

SEQ ID NO: 1216567 - RNA, 19 nt, Artificial Sequence
  Description of Artificial Sequence: Synthetic oligonucleotide
  Antisense strand to SEQ ID NO: 1216566
uccaacagaagcauauugu

SEQ ID NO: 1216568 - RNA, 19 nt, Artificial Sequence
  Description of Artificial Sequence: Synthetic oligonucleotide
  Sense strand starting at position 1011 of SEQ ID NO: 917199
guuucugugccggagacuu

SEQ ID NO: 1216569 - RNA, 19 nt, Artificial Sequence
  Description of Artificial Sequence: Synthetic oligonucleotide
  Antisense strand to SEQ ID NO: 1216568
aagucuccggcacagaaac

SEQ ID NO: 1216570 - RNA, 19 nt, Artificial Sequence
  Description of Artificial Sequence: Synthetic oligonucleotide
  Sense strand starting at position 1021 of SEQ ID NO: 917199
cggagacuuuggagacagu

SEQ ID NO: 1216571 - RNA, 19 nt, Artificial Sequence
  Description of Artificial Sequence: Synthetic oligonucleotide
  Antisense strand to SEQ ID NO: 1216570
acugucuccaaagucuccg

SEQ ID NO: 1216572 - RNA, 19 nt, Artificial Sequence
  Description of Artificial Sequence: Synthetic oligonucleotide
  Sense strand starting at position 1123 of SEQ ID NO: 917199
agcuuucuccaagaagcgu

SEQ ID NO: 1216573 - RNA, 19 nt, Artificial Sequence
  Description of Artificial Sequence: Synthetic oligonucleotide
  Antisense strand to SEQ ID NO: 1216572
acgcuucuuggagaaagcu

SEQ ID NO: 1216574 - RNA, 19 nt, Artificial Sequence
  Description of Artificial Sequence: Synthetic oligonucleotide
  Sense strand starting at position 1176 of SEQ ID NO: 917199
uagggccuccuaugagaua

SEQ ID NO: 1216575 - RNA, 19 nt, Artificial Sequence
  Description of Artificial Sequence: Synthetic oligonucleotide
  Antisense strand to SEQ ID NO: 1216574
uaucucauaggaggcccua

SEQ ID NO: 1216576 - RNA, 19 nt, Artificial Sequence
  Description of Artificial Sequence: Synthetic oligonucleotide
  Sense strand starting at position 1247 of SEQ ID NO: 917199
ugguuugugucccagacaa

SEQ ID NO: 1216577 - RNA, 19 nt, Artificial Sequence
  Description of Artificial Sequence: Synthetic oligonucleotide
  Antisense strand to SEQ ID NO: 1216576
uugucugggacacaaacca

SEQ ID NO: 1216578 - RNA, 19 nt, Artificial Sequence
  Description of Artificial Sequence: Synthetic oligonucleotide
  Sense strand starting at position 1249 of SEQ ID NO: 917199
guuugugucccagacaaga

SEQ ID NO: 1216579 - RNA, 19 nt, Artificial Sequence
  Description of Artificial Sequence: Synthetic oligonucleotide
  Antisense strand to SEQ ID NO: 1216578
ucuugucugggacacaaac

SEQ ID NO: 1216580 - RNA, 19 nt, Artificial Sequence
  Description of Artificial Sequence: Synthetic oligonucleotide
  Sense strand starting at position 1344 of SEQ ID NO: 917199
cggucucuccacugaacaa

SEQ ID NO: 1216581 - RNA, 19 nt, Artificial Sequence
  Description of Artificial Sequence: Synthetic oligonucleotide
  Antisense strand to SEQ ID NO: 1216580
uuguucaguggagagaccg

SEQ ID NO: 1216582 - RNA, 19 nt, Artificial Sequence
  Description of Artificial Sequence: Synthetic oligonucleotide
  Sense strand starting at position 2062 of SEQ ID NO: 917199
guucgcacuucuguuuaau

SEQ ID NO: 1216583 - RNA, 19 nt, Artificial Sequence
  Description of Artificial Sequence: Synthetic oligonucleotide
  Antisense strand to SEQ ID NO: 1216582
auuaaacagaagugcgaac

SEQ ID NO: 1216584 - RNA, 19 nt, Artificial Sequence
  Description of Artificial Sequence: Synthetic oligonucleotide
  Sense strand starting at position 2073 of SEQ ID NO: 917199
uguuuaaugccacaguucu

SEQ ID NO: 1216585 - RNA, 19 nt, Artificial Sequence
  Description of Artificial Sequence: Synthetic oligonucleotide
  Antisense strand to SEQ ID NO: 1216584
agaacuguggcauuaaaca

SEQ ID NO: 1216586 - RNA, 19 nt, Artificial Sequence
  Description of Artificial Sequence: Synthetic oligonucleotide
  Sense strand starting at position 2138 of SEQ ID NO: 917199
ccaaguaaauggcuguauu

SEQ ID NO: 1216587 - RNA, 19 nt, Artificial Sequence
  Description of Artificial Sequence: Synthetic oligonucleotide
  Antisense strand to SEQ ID NO: 1216586
aauacagccauuuacuugg

SEQ ID NO: 1216588 - RNA, 19 nt, Artificial Sequence
  Description of Artificial Sequence: Synthetic oligonucleotide
  Sense strand starting at position 2148 of SEQ ID NO: 917199
ggcuguauuuaaggugaaa

SEQ ID NO: 1216589 - RNA, 19 nt, Artificial Sequence
  Description of Artificial Sequence: Synthetic oligonucleotide
  Antisense strand to SEQ ID NO: 1216588
uuucaccuuaaauacagcc

SEQ ID NO: 1216590 - RNA, 19 nt, Artificial Sequence
  Description of Artificial Sequence: Synthetic oligonucleotide
  Sense strand starting at position 2398 of SEQ ID NO: 917199
ucaaaugaguuugugcuga

SEQ ID NO: 1216591 - RNA, 19 nt, Artificial Sequence
  Description of Artificial Sequence: Synthetic oligonucleotide
  Antisense strand to SEQ ID NO: 1216590
ucagcacaaacucauuuga

SEQ ID NO: 1216592 - RNA, 19 nt, Artificial Sequence
  Description of Artificial Sequence: Synthetic oligonucleotide
  Sense strand starting at position 2400 of SEQ ID NO: 917199
aaaugaguuugugcugauu

SEQ ID NO: 1216593 - RNA, 19 nt, Artificial Sequence
  Description of Artificial Sequence: Synthetic oligonucleotide
  Antisense strand to SEQ ID NO: 1216592
aaucagcacaaacucauuu

SEQ ID NO: 1216594 - RNA, 19 nt, Artificial Sequence
  Description of Artificial Sequence: Synthetic oligonucleotide
  Sense strand starting at position 2402 of SEQ ID NO: 917199
augaguuugugcugauuug

SEQ ID NO: 1216595 - RNA, 19 nt, Artificial Sequence
  Description of Artificial Sequence: Synthetic oligonucleotide
  Antisense strand to SEQ ID NO: 1216594
caaaucagcacaaacucau

SEQ ID NO: 1216596 - RNA, 19 nt, Artificial Sequence
  Description of Artificial Sequence: Synthetic oligonucleotide
  Sense strand starting at position 2409 of SEQ ID NO: 917199
ugugcugauuuguauauau

SEQ ID NO: 1216597 - RNA, 19 nt, Artificial Sequence
  Description of Artificial Sequence: Synthetic oligonucleotide
  Antisense strand to SEQ ID NO: 1216596
auauauacaaaucagcaca

SEQ ID NO: 1216598 - RNA, 19 nt, Artificial Sequence
  Description of Artificial Sequence: Synthetic oligonucleotide
  Sense strand starting at position 2748 of SEQ ID NO: 917199
aguugaagcguaugguguu

SEQ ID NO: 1216599 - RNA, 19 nt, Artificial Sequence
  Description of Artificial Sequence: Synthetic oligonucleotide
  Antisense strand to SEQ ID NO: 1216598
aacaccauacgcuucaacu

SEQ ID NO: 1216600 - RNA, 19 nt, Artificial Sequence
  Description of Artificial Sequence: Synthetic oligonucleotide
  Sense strand starting at position 2914 of SEQ ID NO: 917199
uagcaugucuaagaaguua

SEQ ID NO: 1216601 - RNA, 19 nt, Artificial Sequence
  Description of Artificial Sequence: Synthetic oligonucleotide
  Antisense strand to SEQ ID NO: 1216600
uaacuucuuagacaugcua

SEQ ID NO: 1216602 - RNA, 19 nt, Artificial Sequence
  Description of Artificial Sequence: Synthetic oligonucleotide
  Sense strand starting at position 2926 of SEQ ID NO: 917199
gaaguuagguccuagaaau

SEQ ID NO: 1216603 - RNA, 19 nt, Artificial Sequence
  Description of Artificial Sequence: Synthetic oligonucleotide
  Antisense strand to SEQ ID NO: 1216602
auuucuaggaccuaacuuc

SEQ ID NO: 1216604 - RNA, 19 nt, Artificial Sequence
  Description of Artificial Sequence: Synthetic oligonucleotide
  Sense strand starting at position 2944 of SEQ ID NO: 917199
uuuacaaucuuguagggaa

SEQ ID NO: 1216605 - RNA, 19 nt, Artificial Sequence
  Description of Artificial Sequence: Synthetic oligonucleotide
  Antisense strand to SEQ ID NO: 1216604
uucccuacaagauuguaaa

SEQ ID NO: 1216606 - RNA, 19 nt, Artificial Sequence
  Description of Artificial Sequence: Synthetic oligonucleotide
  Sense strand starting at position 2947 of SEQ ID NO: 917199
acaaucuuguagggaagau

SEQ ID NO: 1216607 - RNA, 19 nt, Artificial Sequence
  Description of Artificial Sequence: Synthetic oligonucleotide
  Antisense strand to SEQ ID NO: 1216606
aucuucccuacaagauugu

SEQ ID NO: 1216608 - RNA, 19 nt, Artificial Sequence
  Description of Artificial Sequence: Synthetic oligonucleotide
  Sense strand starting at position 3009 of SEQ ID NO: 917199
ugcauugcauagcaguaua

SEQ ID NO: 1216609 - RNA, 19 nt, Artificial Sequence
  Description of Artificial Sequence: Synthetic oligonucleotide
  Antisense strand to SEQ ID NO: 1216608
uauacugcuaugcaaugca

SEQ ID NO: 1216610 - RNA, 19 nt, Artificial Sequence
  Description of Artificial Sequence: Synthetic oligonucleotide
  Sense strand starting at position 3012 of SEQ ID NO: 917199
auugcauagcaguauaaag

SEQ ID NO: 1216611 - RNA, 19 nt, Artificial Sequence
  Description of Artificial Sequence: Synthetic oligonucleotide
  Antisense strand to SEQ ID NO: 1216610
cuuuauacugcuaugcaau

SEQ ID NO: 1216612 - RNA, 19 nt, Artificial Sequence
  Description of Artificial Sequence: Synthetic oligonucleotide
  Sense strand starting at position 3354 of SEQ ID NO: 917199
uggagcuaacaucacuauu

SEQ ID NO: 1216613 - RNA, 19 nt, Artificial Sequence
  Description of Artificial Sequence: Synthetic oligonucleotide
  Antisense strand to SEQ ID NO: 1216612
aauagugauguuagcucca

SEQ ID NO: 1216614 - RNA, 19 nt, Artificial Sequence
  Description of Artificial Sequence: Synthetic oligonucleotide
  Sense strand starting at position 3382 of SEQ ID NO: 917199
accaccagugcuugagaua

SEQ ID NO: 1216615 - RNA, 19 nt, Artificial Sequence
  Description of Artificial Sequence: Synthetic oligonucleotide
  Antisense strand to SEQ ID NO: 1216614
uaucucaagcacugguggu

SEQ ID NO: 1216616 - RNA, 19 nt, Artificial Sequence
  Description of Artificial Sequence: Synthetic oligonucleotide
  Sense strand starting at position 3383 of SEQ ID NO: 917199
ccaccagugcuugagauau

SEQ ID NO: 1216617 - RNA, 19 nt, Artificial Sequence
  Description of Artificial Sequence: Synthetic oligonucleotide
  Antisense strand to SEQ ID NO: 1216616
auaucucaagcacuggugg

SEQ ID NO: 1216618 - RNA, 19 nt, Artificial Sequence
  Description of Artificial Sequence: Synthetic oligonucleotide
  Sense strand starting at position 3573 of SEQ ID NO: 917200
cucaccgaguuguccuuaa

SEQ ID NO: 1216619 - RNA, 19 nt, Artificial Sequence
  Description of Artificial Sequence: Synthetic oligonucleotide
  Antisense strand to SEQ ID NO: 1216618
uuaaggacaacucggugag

SEQ ID NO: 1216620 - RNA, 19 nt, Artificial Sequence
  Description of Artificial Sequence: Synthetic oligonucleotide
  Sense strand starting at position 73 of SEQ ID NO: 917200
uggucuguaaaguaggaau

SEQ ID NO: 1216621 - RNA, 19 nt, Artificial Sequence
  Description of Artificial Sequence: Synthetic oligonucleotide
  Antisense strand to SEQ ID NO: 1216620
auuccuacuuuacagacca

SEQ ID NO: 1216622 - RNA, 19 nt, Artificial Sequence
  Description of Artificial Sequence: Synthetic oligonucleotide
  Sense strand starting at position 75 of SEQ ID NO: 917200
gucuguaaaguaggaauga

SEQ ID NO: 1216623 - RNA, 19 nt, Artificial Sequence
  Description of Artificial Sequence: Synthetic oligonucleotide
  Antisense strand to SEQ ID NO: 1216622
ucauuccuacuuuacagac

SEQ ID NO: 1216624 - RNA, 19 nt, Artificial Sequence
  Description of Artificial Sequence: Synthetic oligonucleotide
  Sense strand starting at position 107 of SEQ ID NO: 917200
ucgugaauaagauauggcu

SEQ ID NO: 1216625 - RNA, 19 nt, Artificial Sequence
  Description of Artificial Sequence: Synthetic oligonucleotide
  Antisense strand to SEQ ID NO: 1216624
agccauaucuuauucacga

SEQ ID NO: 1216626 - RNA, 19 nt, Artificial Sequence
  Description of Artificial Sequence: Synthetic oligonucleotide
  Sense strand starting at position 109 of SEQ ID NO: 917200
gugaauaagauauggcuua

SEQ ID NO: 1216627 - RNA, 19 nt, Artificial Sequence
  Description of Artificial Sequence: Synthetic oligonucleotide
  Antisense strand to SEQ ID NO: 1216626
uaagccauaucuuauucac

SEQ ID NO: 1216628 - RNA, 19 nt, Artificial Sequence
  Description of Artificial Sequence: Synthetic oligonucleotide
  Sense strand starting at position 152 of SEQ ID NO: 917200
uucuguuaccuguacuaag

SEQ ID NO: 1216629 - RNA, 19 nt, Artificial Sequence
  Description of Artificial Sequence: Synthetic oligonucleotide
  Antisense strand to SEQ ID NO: 1216628
cuuaguacagguaacagaa

SEQ ID NO: 1216630 - RNA, 19 nt, Artificial Sequence
  Description of Artificial Sequence: Synthetic oligonucleotide
  Sense strand starting at position 213 of SEQ ID NO: 917200
cuggcacuccucugagaaa

SEQ ID NO: 1216631 - RNA, 19 nt, Artificial Sequence
  Description of Artificial Sequence: Synthetic oligonucleotide
  Antisense strand to SEQ ID NO: 1216630
uuucucagaggagugccag

SEQ ID NO: 1216632 - RNA, 19 nt, Artificial Sequence
  Description of Artificial Sequence: Synthetic oligonucleotide
  Sense strand starting at position 309 of SEQ ID NO: 917200
aguuaagaguccuuacaga

SEQ ID NO: 1216633 - RNA, 19 nt, Artificial Sequence
  Description of Artificial Sequence: Synthetic oligonucleotide
  Antisense strand to SEQ ID NO: 1216632
ucuguaaggacucuuaacu

SEQ ID NO: 1216634 - RNA, 19 nt, Artificial Sequence
  Description of Artificial Sequence: Synthetic oligonucleotide
  Sense strand starting at position 827 of SEQ ID NO: 917200
gcucccuuugaauggaaua

SEQ ID NO: 1216635 - RNA, 19 nt, Artificial Sequence
  Description of Artificial Sequence: Synthetic oligonucleotide
  Antisense strand to SEQ ID NO: 1216634
uauuccauucaaagggagc

SEQ ID NO: 1216636 - RNA, 19 nt, Artificial Sequence
  Description of Artificial Sequence: Synthetic oligonucleotide
  Sense strand starting at position 899 of SEQ ID NO: 917200
aauagaucagugcauguga

SEQ ID NO: 1216637 - RNA, 19 nt, Artificial Sequence
  Description of Artificial Sequence: Synthetic oligonucleotide
  Antisense strand to SEQ ID NO: 1216636
ucacaugcacugaucuauu

SEQ ID NO: 1216638 - RNA, 19 nt, Artificial Sequence
  Description of Artificial Sequence: Synthetic oligonucleotide
  Sense strand starting at position 921 of SEQ ID NO: 917200
gucauuacacucgaauauu

SEQ ID NO: 1216639 - RNA, 19 nt, Artificial Sequence
  Description of Artificial Sequence: Synthetic oligonucleotide
  Antisense strand to SEQ ID NO: 1216638
aauauucgaguguaaugac

SEQ ID NO: 1216640 - RNA, 19 nt, Artificial Sequence
  Description of Artificial Sequence: Synthetic oligonucleotide
  Sense strand starting at position 930 of SEQ ID NO: 917200
cucgaauauuucgcacagu

SEQ ID NO: 1216641 - RNA, 19 nt, Artificial Sequence
  Description of Artificial Sequence: Synthetic oligonucleotide
  Antisense strand to SEQ ID NO: 1216640
acugugcgaaauauucgag

SEQ ID NO: 1216642 - RNA, 19 nt, Artificial Sequence
  Description of Artificial Sequence: Synthetic oligonucleotide
  Sense strand starting at position 953 of SEQ ID NO: 917200
gcgccagaagcauucguua

SEQ ID NO: 1216643 - RNA, 19 nt, Artificial Sequence
  Description of Artificial Sequence: Synthetic oligonucleotide
  Antisense strand to SEQ ID NO: 1216642
uaacgaaugcuucuggcgc

SEQ ID NO: 1216644 - RNA, 19 nt, Artificial Sequence
  Description of Artificial Sequence: Synthetic oligonucleotide
  Sense strand starting at position 1072 of SEQ ID NO: 917200
gcaggacugaagugaaauu

SEQ ID NO: 1216645 - RNA, 19 nt, Artificial Sequence
  Description of Artificial Sequence: Synthetic oligonucleotide
  Antisense strand to SEQ ID NO: 1216644
aauuucacuucaguccugc

SEQ ID NO: 1216646 - RNA, 19 nt, Artificial Sequence
  Description of Artificial Sequence: Synthetic oligonucleotide
  Sense strand starting at position 1083 of SEQ ID NO: 917200
gugaaauuuaaucguucgu

SEQ ID NO: 1216647 - RNA, 19 nt, Artificial Sequence
  Description of Artificial Sequence: Synthetic oligonucleotide
  Antisense strand to SEQ ID NO: 1216646
acgaacgauuaaauuucac

SEQ ID NO: 1216648 - RNA, 19 nt, Artificial Sequence
  Description of Artificial Sequence: Synthetic oligonucleotide
  Sense strand starting at position 1085 of SEQ ID NO: 917200
gaaauuuaaucguucguau

SEQ ID NO: 1216649 - RNA, 19 nt, Artificial Sequence
  Description of Artificial Sequence: Synthetic oligonucleotide
  Antisense strand to SEQ ID NO: 1216648
auacgaacgauuaaauuuc

SEQ ID NO: 1216650 - RNA, 19 nt, Artificial Sequence
  Description of Artificial Sequence: Synthetic oligonucleotide
  Sense strand starting at position 1087 of SEQ ID NO: 917200
aauuuaaucguucguaucu

SEQ ID NO: 1216651 - RNA, 19 nt, Artificial Sequence
  Description of Artificial Sequence: Synthetic oligonucleotide
  Antisense strand to SEQ ID NO: 1216650
agauacgaacgauuaaauu

SEQ ID NO: 1216652 - RNA, 19 nt, Artificial Sequence
  Description of Artificial Sequence: Synthetic oligonucleotide
  Sense strand starting at position 1088 of SEQ ID NO: 917200
auuuaaucguucguaucuu

SEQ ID NO: 1216653 - RNA, 19 nt, Artificial Sequence
  Description of Artificial Sequence: Synthetic oligonucleotide
  Antisense strand to SEQ ID NO: 1216652
aagauacgaacgauuaaau

SEQ ID NO: 1216654 - RNA, 19 nt, Artificial Sequence
  Description of Artificial Sequence: Synthetic oligonucleotide
  Sense strand starting at position 2209 of SEQ ID NO: 917200
gucgcagagcugucagcaa

SEQ ID NO: 1216655 - RNA, 19 nt, Artificial Sequence
  Description of Artificial Sequence: Synthetic oligonucleotide
  Antisense strand to SEQ ID NO: 1216654
uugcugacagcucugcgac

SEQ ID NO: 1216656 - RNA, 19 nt, Artificial Sequence
  Description of Artificial Sequence: Synthetic oligonucleotide
  Sense strand starting at position 2382 of SEQ ID NO: 917200
gugguguuacgagaggaaa

SEQ ID NO: 1216657 - RNA, 19 nt, Artificial Sequence
  Description of Artificial Sequence: Synthetic oligonucleotide
  Antisense strand to SEQ ID NO: 1216656
uuuccucucguaacaccac

SEQ ID NO: 1216658 - RNA, 19 nt, Artificial Sequence
  Description of Artificial Sequence: Synthetic oligonucleotide
  Sense strand starting at position 2579 of SEQ ID NO: 917200
gggcgaucugaugauuaga

SEQ ID NO: 1216659 - RNA, 19 nt, Artificial Sequence
  Description of Artificial Sequence: Synthetic oligonucleotide
  Antisense strand to SEQ ID NO: 1216658
ucuaaucaucagaucgccc

SEQ ID NO: 1216660 - RNA, 19 nt, Artificial Sequence
  Description of Artificial Sequence: Synthetic oligonucleotide
  Sense strand starting at position 2581 of SEQ ID NO: 917200
gcgaucugaugauuagaac

SEQ ID NO: 1216661 - RNA, 19 nt, Artificial Sequence
  Description of Artificial Sequence: Synthetic oligonucleotide
  Antisense strand to SEQ ID NO: 1216660
guucuaaucaucagaucgc

SEQ ID NO: 1216662 - RNA, 19 nt, Artificial Sequence
  Description of Artificial Sequence: Synthetic oligonucleotide
  Sense strand starting at position 2647 of SEQ ID NO: 917200
agguaauuggccuggaaac

SEQ ID NO: 1216663 - RNA, 19 nt, Artificial Sequence
  Description of Artificial Sequence: Synthetic oligonucleotide
  Antisense strand to SEQ ID NO: 1216662
guuuccaggccaauuaccu

SEQ ID NO: 1216664 - RNA, 19 nt, Artificial Sequence
  Description of Artificial Sequence: Synthetic oligonucleotide
  Sense strand starting at position 2648 of SEQ ID NO: 917200
gguaauuggccuggaaacu

SEQ ID NO: 1216665 - RNA, 19 nt, Artificial Sequence
  Description of Artificial Sequence: Synthetic oligonucleotide
  Antisense strand to SEQ ID NO: 1216664
aguuuccaggccaauuacc

SEQ ID NO: 1216666 - RNA, 19 nt, Artificial Sequence
  Description of Artificial Sequence: Synthetic oligonucleotide
  Sense strand starting at position 2649 of SEQ ID NO: 917200
guaauuggccuggaaacuu

SEQ ID NO: 1216667 - RNA, 19 nt, Artificial Sequence
  Description of Artificial Sequence: Synthetic oligonucleotide
  Antisense strand to SEQ ID NO: 1216666
aaguuuccaggccaauuac

SEQ ID NO: 1216668 - RNA, 19 nt, Artificial Sequence
  Description of Artificial Sequence: Synthetic oligonucleotide
  Sense strand starting at position 2762 of SEQ ID NO: 917200
ggcacuguggcuuaagaga

SEQ ID NO: 1216669 - RNA, 19 nt, Artificial Sequence
  Description of Artificial Sequence: Synthetic oligonucleotide
  Antisense strand to SEQ ID NO: 1216668
ucucuuaagccacagugcc

SEQ ID NO: 1216670 - RNA, 19 nt, Artificial Sequence
  Description of Artificial Sequence: Synthetic oligonucleotide
  Sense strand starting at position 3008 of SEQ ID NO: 917200
aguacuaucagguggauaa

SEQ ID NO: 1216671 - RNA, 19 nt, Artificial Sequence
  Description of Artificial Sequence: Synthetic oligonucleotide
  Antisense strand to SEQ ID NO: 1216670
uuauccaccugauaguacu

SEQ ID NO: 1216672 - RNA, 19 nt, Artificial Sequence
  Description of Artificial Sequence: Synthetic oligonucleotide
  Sense strand starting at position 3009 of SEQ ID NO: 917200
guacuaucagguggauaau

SEQ ID NO: 1216673 - RNA, 19 nt, Artificial Sequence
  Description of Artificial Sequence: Synthetic oligonucleotide
  Antisense strand to SEQ ID NO: 1216672
auuauccaccugauaguac

SEQ ID NO: 1216674 - RNA, 19 nt, Artificial Sequence
  Description of Artificial Sequence: Synthetic oligonucleotide
  Sense strand starting at position 3200 of SEQ ID NO: 917200
aacggaguccuugauuagu

SEQ ID NO: 1216675 - RNA, 19 nt, Artificial Sequence
  Description of Artificial Sequence: Synthetic oligonucleotide
  Antisense strand to SEQ ID NO: 1216674
acuaaucaaggacuccguu

SEQ ID NO: 1216676 - RNA, 19 nt, Artificial Sequence
  Description of Artificial Sequence: Synthetic oligonucleotide
  Sense strand starting at position 3304 of SEQ ID NO: 917200
cuguaaagugguuaggauc

SEQ ID NO: 1216677 - RNA, 19 nt, Artificial Sequence
  Description of Artificial Sequence: Synthetic oligonucleotide
  Antisense strand to SEQ ID NO: 1216676
gauccuaaccacuuuacag

SEQ ID NO: 1216678 - RNA, 19 nt, Artificial Sequence
  Description of Artificial Sequence: Synthetic oligonucleotide
  Sense strand starting at position 3318 of SEQ ID NO: 917200
ggauccugauagucucaaa

SEQ ID NO: 1216679 - RNA, 19 nt, Artificial Sequence
  Description of Artificial Sequence: Synthetic oligonucleotide
  Antisense strand to SEQ ID NO: 1216678
uuugagacuaucaggaucc

SEQ ID NO: 1216680 - RNA, 19 nt, Artificial Sequence
  Description of Artificial Sequence: Synthetic oligonucleotide
  Sense strand starting at position 3360 of SEQ ID NO: 917200
gcagauaaauauucuugua

SEQ ID NO: 1216681 - RNA, 19 nt, Artificial Sequence
  Description of Artificial Sequence: Synthetic oligonucleotide
  Antisense strand to SEQ ID NO: 1216680
uacaagaauauuuaucugc

SEQ ID NO: 1216682 - RNA, 19 nt, Artificial Sequence
  Description of Artificial Sequence: Synthetic oligonucleotide
  Sense strand starting at position 3398 of SEQ ID NO: 917200
aguguuacucauuauucua

SEQ ID NO: 1216683 - RNA, 19 nt, Artificial Sequence
  Description of Artificial Sequence: Synthetic oligonucleotide
  Antisense strand to SEQ ID NO: 1216682
uagaauaaugaguaacacu

SEQ ID NO: 1216684 - RNA, 19 nt, Artificial Sequence
  Description of Artificial Sequence: Synthetic oligonucleotide
  Sense strand starting at position 3447 of SEQ ID NO: 917200
ucagaaauuccuugggauu

SEQ ID NO: 1216685 - RNA, 19 nt, Artificial Sequence
  Description of Artificial Sequence: Synthetic oligonucleotide
  Antisense strand to SEQ ID NO: 1216684
aaucccaaggaauuucuga

SEQ ID NO: 1216686 - RNA, 19 nt, Artificial Sequence
  Description of Artificial Sequence: Synthetic oligonucleotide
  Sense strand starting at position 3630 of SEQ ID NO: 917200
augcaauauuucuagacag

SEQ ID NO: 1216687 - RNA, 19 nt, Artificial Sequence
  Description of Artificial Sequence: Synthetic oligonucleotide
  Antisense strand to SEQ ID NO: 1216686
cugucuagaaauauugcau

SEQ ID NO: 1216688 - RNA, 19 nt, Artificial Sequence
  Description of Artificial Sequence: Synthetic oligonucleotide
  Sense strand starting at position 3640 of SEQ ID NO: 917200
ucuagacagugaguuauca

SEQ ID NO: 1216689 - RNA, 19 nt, Artificial Sequence
  Description of Artificial Sequence: Synthetic oligonucleotide
  Antisense strand to SEQ ID NO: 1216688
ugauaacucacugucuaga

SEQ ID NO: 1216690 - RNA, 19 nt, Artificial Sequence
  Description of Artificial Sequence: Synthetic oligonucleotide
  Sense strand starting at position 3786 of SEQ ID NO: 917200
gucuucaauggugagugau

SEQ ID NO: 1216691 - RNA, 19 nt, Artificial Sequence
  Description of Artificial Sequence: Synthetic oligonucleotide
  Antisense strand to SEQ ID NO: 1216690
aucacucaccauugaagac

SEQ ID NO: 1216692 - RNA, 19 nt, Artificial Sequence
  Description of Artificial Sequence: Synthetic oligonucleotide
  Sense strand starting at position 3936 of SEQ ID NO: 917200
ugauuaaugcuugggaaug

SEQ ID NO: 1216693 - RNA, 19 nt, Artificial Sequence
  Description of Artificial Sequence: Synthetic oligonucleotide
  Antisense strand to SEQ ID NO: 1216692
cauucccaagcauuaauca

SEQ ID NO: 1216694 - RNA, 19 nt, Artificial Sequence
  Description of Artificial Sequence: Synthetic oligonucleotide
  Sense strand starting at position 3946 of SEQ ID NO: 917200
uugggaauguuuccuccaa

SEQ ID NO: 1216695 - RNA, 19 nt, Artificial Sequence
  Description of Artificial Sequence: Synthetic oligonucleotide
  Antisense strand to SEQ ID NO: 1216694
uuggaggaaacauucccaa

SEQ ID NO: 1216696 - RNA, 19 nt, Artificial Sequence
  Description of Artificial Sequence: Synthetic oligonucleotide
  Sense strand starting at position 3947 of SEQ ID NO: 917200
ugggaauguuuccuccaau

SEQ ID NO: 1216697 - RNA, 19 nt, Artificial Sequence
  Description of Artificial Sequence: Synthetic oligonucleotide
  Antisense strand to SEQ ID NO: 1216696
auuggaggaaacauuccca

SEQ ID NO: 1216698 - RNA, 19 nt, Artificial Sequence
  Description of Artificial Sequence: Synthetic oligonucleotide
  Sense strand starting at position 3948 of SEQ ID NO: 917201
gggaauguuuccuccaaug

SEQ ID NO: 1216699 - RNA, 19 nt, Artificial Sequence
  Description of Artificial Sequence: Synthetic oligonucleotide
  Antisense strand to SEQ ID NO: 1216698
cauuggaggaaacauuccc

SEQ ID NO: 1216700 - RNA, 19 nt, Artificial Sequence
  Description of Artificial Sequence: Synthetic oligonucleotide
  Sense strand starting at position 15 of SEQ ID NO: 917201
gagaaacacugcccgauaa

SEQ ID NO: 1216701 - RNA, 19 nt, Artificial Sequence
  Description of Artificial Sequence: Synthetic oligonucleotide
  Antisense strand to SEQ ID NO: 1216700
uuaucgggcaguguuucuc

SEQ ID NO: 1216702 - RNA, 19 nt, Artificial Sequence
  Description of Artificial Sequence: Synthetic oligonucleotide
  Sense strand starting at position 131 of SEQ ID NO: 917201
ugacaaguguucccaccaa

SEQ ID NO: 1216703 - RNA, 19 nt, Artificial Sequence
  Description of Artificial Sequence: Synthetic oligonucleotide
  Antisense strand to SEQ ID NO: 1216702
uuggugggaacacuuguca

SEQ ID NO: 1216704 - RNA, 19 nt, Artificial Sequence
  Description of Artificial Sequence: Synthetic oligonucleotide
  Sense strand starting at position 204 of SEQ ID NO: 917201
ggaacugccuggagugaga

SEQ ID NO: 1216705 - RNA, 19 nt, Artificial Sequence
  Description of Artificial Sequence: Synthetic oligonucleotide
  Antisense strand to SEQ ID NO: 1216704
ucucacuccaggcaguucc

SEQ ID NO: 1216706 - RNA, 19 nt, Artificial Sequence
  Description of Artificial Sequence: Synthetic oligonucleotide
  Sense strand starting at position 243 of SEQ ID NO: 917201
ggacauaaauggcaaauuu

SEQ ID NO: 1216707 - RNA, 19 nt, Artificial Sequence
  Description of Artificial Sequence: Synthetic oligonucleotide
  Antisense strand to SEQ ID NO: 1216706
aaauuugccauuuaugucc

SEQ ID NO: 1216708 - RNA, 19 nt, Artificial Sequence
  Description of Artificial Sequence: Synthetic oligonucleotide
  Sense strand starting at position 328 of SEQ ID NO: 917201
agcaucuuucuacagugua

SEQ ID NO: 1216709 - RNA, 19 nt, Artificial Sequence
  Description of Artificial Sequence: Synthetic oligonucleotide
  Antisense strand to SEQ ID NO: 1216708
uacacuguagaaagaugcu

SEQ ID NO: 1216710 - RNA, 19 nt, Artificial Sequence
  Description of Artificial Sequence: Synthetic oligonucleotide
  Sense strand starting at position 381 of SEQ ID NO: 917201
gagaaucacugacagaaga

SEQ ID NO: 1216711 - RNA, 19 nt, Artificial Sequence
  Description of Artificial Sequence: Synthetic oligonucleotide
  Antisense strand to SEQ ID NO: 1216710
ucuucugucagugauucuc

SEQ ID NO: 1216712 - RNA, 19 nt, Artificial Sequence
  Description of Artificial Sequence: Synthetic oligonucleotide
  Sense strand starting at position 509 of SEQ ID NO: 917201
aacagagaagugggcuauu

SEQ ID NO: 1216713 - RNA, 19 nt, Artificial Sequence
  Description of Artificial Sequence: Synthetic oligonucleotide
  Antisense strand to SEQ ID NO: 1216712
aauagcccacuucucuguu

SEQ ID NO: 1216714 - RNA, 19 nt, Artificial Sequence
  Description of Artificial Sequence: Synthetic oligonucleotide
  Sense strand starting at position 526 of SEQ ID NO: 917201
uuauauuggcagcaaggaa

SEQ ID NO: 1216715 - RNA, 19 nt, Artificial Sequence
  Description of Artificial Sequence: Synthetic oligonucleotide
  Antisense strand to SEQ ID NO: 1216714
uuccuugcugccaauauaa

SEQ ID NO: 1216716 - RNA, 19 nt, Artificial Sequence
  Description of Artificial Sequence: Synthetic oligonucleotide
  Sense strand starting at position 800 of SEQ ID NO: 917201
guaaauuaguaagcaaaca

SEQ ID NO: 1216717 - RNA, 19 nt, Artificial Sequence
  Description of Artificial Sequence: Synthetic oligonucleotide
  Antisense strand to SEQ ID NO: 1216716
uguuugcuuacuaauuuac

SEQ ID NO: 1216718 - RNA, 19 nt, Artificial Sequence
  Description of Artificial Sequence: Synthetic oligonucleotide
  Sense strand starting at position 835 of SEQ ID NO: 917201
acugaaccuccacguuaaa

SEQ ID NO: 1216719 - RNA, 19 nt, Artificial Sequence
  Description of Artificial Sequence: Synthetic oligonucleotide
  Antisense strand to SEQ ID NO: 1216718
uuuaacguggagguucagu

SEQ ID NO: 1216720 - RNA, 19 nt, Artificial Sequence
  Description of Artificial Sequence: Synthetic oligonucleotide
  Sense strand starting at position 1003 of SEQ ID NO: 917201
ugaagaaauuccgagagaa

SEQ ID NO: 1216721 - RNA, 19 nt, Artificial Sequence
  Description of Artificial Sequence: Synthetic oligonucleotide
  Antisense strand to SEQ ID NO: 1216720
uucucucggaauuucuuca

SEQ ID NO: 1216722 - RNA, 19 nt, Artificial Sequence
  Description of Artificial Sequence: Synthetic oligonucleotide
  Sense strand starting at position 1090 of SEQ ID NO: 917201
agcacuuggcuuuagacaa

SEQ ID NO: 1216723 - RNA, 19 nt, Artificial Sequence
  Description of Artificial Sequence: Synthetic oligonucleotide
  Antisense strand to SEQ ID NO: 1216722
uugucuaaagccaagugcu

SEQ ID NO: 1216724 - RNA, 19 nt, Artificial Sequence
  Description of Artificial Sequence: Synthetic oligonucleotide
  Sense strand starting at position 1114 of SEQ ID NO: 917201
gagaguuuagcugauguua

SEQ ID NO: 1216725 - RNA, 19 nt, Artificial Sequence
  Description of Artificial Sequence: Synthetic oligonucleotide
  Antisense strand to SEQ ID NO: 1216724
uaacaucagcuaaacucuc

SEQ ID NO: 1216726 - RNA, 19 nt, Artificial Sequence
  Description of Artificial Sequence: Synthetic oligonucleotide
  Sense strand starting at position 1136 of SEQ ID NO: 917201
acagaaacguuucuaucag

SEQ ID NO: 1216727 - RNA, 19 nt, Artificial Sequence
  Description of Artificial Sequence: Synthetic oligonucleotide
  Antisense strand to SEQ ID NO: 1216726
cugauagaaacguuucugu

SEQ ID NO: 1216728 - RNA, 19 nt, Artificial Sequence
  Description of Artificial Sequence: Synthetic oligonucleotide
  Sense strand starting at position 1251 of SEQ ID NO: 917201
auguaauauuuccaacagu

SEQ ID NO: 1216729 - RNA, 19 nt, Artificial Sequence
  Description of Artificial Sequence: Synthetic oligonucleotide
  Antisense strand to SEQ ID NO: 1216728
acuguuggaaauauuacau

SEQ ID NO: 1216730 - RNA, 19 nt, Artificial Sequence
  Description of Artificial Sequence: Synthetic oligonucleotide
  Sense strand starting at position 1427 of SEQ ID NO: 917201
gugggacauaauugugaac

SEQ ID NO: 1216731 - RNA, 19 nt, Artificial Sequence
  Description of Artificial Sequence: Synthetic oligonucleotide
  Antisense strand to SEQ ID NO: 1216730
guucacaauuaugucccac

SEQ ID NO: 1216732 - RNA, 19 nt, Artificial Sequence
  Description of Artificial Sequence: Synthetic oligonucleotide
  Sense strand starting at position 1900 of SEQ ID NO: 917201
augccagugguccaaggaa

SEQ ID NO: 1216733 - RNA, 19 nt, Artificial Sequence
  Description of Artificial Sequence: Synthetic oligonucleotide
  Antisense strand to SEQ ID NO: 1216732
uuccuuggaccacuggcau

SEQ ID NO: 1216734 - RNA, 19 nt, Artificial Sequence
  Description of Artificial Sequence: Synthetic oligonucleotide
  Sense strand starting at position 2022 of SEQ ID NO: 917201
guguuacuacuccaugcaa

SEQ ID NO: 1216735 - RNA, 19 nt, Artificial Sequence
  Description of Artificial Sequence: Synthetic oligonucleotide
  Antisense strand to SEQ ID NO: 1216734
uugcauggaguaguaacac

SEQ ID NO: 1216736 - RNA, 19 nt, Artificial Sequence
  Description of Artificial Sequence: Synthetic oligonucleotide
  Sense strand starting at position 2113 of SEQ ID NO: 917201
cugauaaagaccggcuuua

SEQ ID NO: 1216737 - RNA, 19 nt, Artificial Sequence
  Description of Artificial Sequence: Synthetic oligonucleotide
  Antisense strand to SEQ ID NO: 1216736
uaaagccggucuuuaucag

SEQ ID NO: 1216738 - RNA, 19 nt, Artificial Sequence
  Description of Artificial Sequence: Synthetic oligonucleotide
  Sense strand starting at position 2242 of SEQ ID NO: 917201
gcucguggagcuuaagaga

SEQ ID NO: 1216739 - RNA, 19 nt, Artificial Sequence
  Description of Artificial Sequence: Synthetic oligonucleotide
  Antisense strand to SEQ ID NO: 1216738
ucucuuaagcuccacgagc

SEQ ID NO: 1216740 - RNA, 19 nt, Artificial Sequence
  Description of Artificial Sequence: Synthetic oligonucleotide
  Sense strand starting at position 2362 of SEQ ID NO: 917201
aagagcuaccagcaaguau

SEQ ID NO: 1216741 - RNA, 19 nt, Artificial Sequence
  Description of Artificial Sequence: Synthetic oligonucleotide
  Antisense strand to SEQ ID NO: 1216740
auacuugcugguagcucuu

SEQ ID NO: 1216742 - RNA, 19 nt, Artificial Sequence
  Description of Artificial Sequence: Synthetic oligonucleotide
  Sense strand starting at position 2471 of SEQ ID NO: 917201
acuauuugaugccagaaag

SEQ ID NO: 1216743 - RNA, 19 nt, Artificial Sequence
  Description of Artificial Sequence: Synthetic oligonucleotide
  Antisense strand to SEQ ID NO: 1216742
cuuucuggcaucaaauagu

SEQ ID NO: 1216744 - RNA, 19 nt, Artificial Sequence
  Description of Artificial Sequence: Synthetic oligonucleotide
  Sense strand starting at position 2557 of SEQ ID NO: 917201
uuacuuuaaguccagaugu

SEQ ID NO: 1216745 - RNA, 19 nt, Artificial Sequence
  Description of Artificial Sequence: Synthetic oligonucleotide
  Antisense strand to SEQ ID NO: 1216744
acaucuggacuuaaaguaa

SEQ ID NO: 1216746 - RNA, 19 nt, Artificial Sequence
  Description of Artificial Sequence: Synthetic oligonucleotide
  Sense strand starting at position 2559 of SEQ ID NO: 917201
acuuuaaguccagaugugu

SEQ ID NO: 1216747 - RNA, 19 nt, Artificial Sequence
  Description of Artificial Sequence: Synthetic oligonucleotide
  Antisense strand to SEQ ID NO: 1216746
acacaucuggacuuaaagu

SEQ ID NO: 1216748 - RNA, 19 nt, Artificial Sequence
  Description of Artificial Sequence: Synthetic oligonucleotide
  Sense strand starting at position 2567 of SEQ ID NO: 917201
uccagauguguggguauca

SEQ ID NO: 1216749 - RNA, 19 nt, Artificial Sequence
  Description of Artificial Sequence: Synthetic oligonucleotide
  Antisense strand to SEQ ID NO: 1216748
ugauacccacacaucugga

SEQ ID NO: 1216750 - RNA, 19 nt, Artificial Sequence
  Description of Artificial Sequence: Synthetic oligonucleotide
  Sense strand starting at position 2609 of SEQ ID NO: 917201
cugagaggaucauacuaaa

SEQ ID NO: 1216751 - RNA, 19 nt, Artificial Sequence
  Description of Artificial Sequence: Synthetic oligonucleotide
  Antisense strand to SEQ ID NO: 1216750
uuuaguaugauccucucag

SEQ ID NO: 1216752 - RNA, 19 nt, Artificial Sequence
  Description of Artificial Sequence: Synthetic oligonucleotide
  Sense strand starting at position 2635 of SEQ ID NO: 917201
gguagaguaucucucccuu

SEQ ID NO: 1216753 - RNA, 19 nt, Artificial Sequence
  Description of Artificial Sequence: Synthetic oligonucleotide
  Antisense strand to SEQ ID NO: 1216752
aagggagagauacucuacc

SEQ ID NO: 1216754 - RNA, 19 nt, Artificial Sequence
  Description of Artificial Sequence: Synthetic oligonucleotide
  Sense strand starting at position 3017 of SEQ ID NO: 917201
aagauuuaguaacaguaga

SEQ ID NO: 1216755 - RNA, 19 nt, Artificial Sequence
  Description of Artificial Sequence: Synthetic oligonucleotide
  Antisense strand to SEQ ID NO: 1216754
ucuacuguuacuaaaucuu

SEQ ID NO: 1216756 - RNA, 19 nt, Artificial Sequence
  Description of Artificial Sequence: Synthetic oligonucleotide
  Sense strand starting at position 3187 of SEQ ID NO: 917201
caacaacgagaguaguuau

SEQ ID NO: 1216757 - RNA, 19 nt, Artificial Sequence
  Description of Artificial Sequence: Synthetic oligonucleotide
  Antisense strand to SEQ ID NO: 1216756
auaacuacucucguuguug

SEQ ID NO: 1216758 - RNA, 19 nt, Artificial Sequence
  Description of Artificial Sequence: Synthetic oligonucleotide
  Sense strand starting at position 3190 of SEQ ID NO: 917201
caacgagaguaguuaucau

SEQ ID NO: 1216759 - RNA, 19 nt, Artificial Sequence
  Description of Artificial Sequence: Synthetic oligonucleotide
  Antisense strand to SEQ ID NO: 1216758
augauaacuacucucguug

SEQ ID NO: 1216760 - RNA, 19 nt, Artificial Sequence
  Description of Artificial Sequence: Synthetic oligonucleotide
  Sense strand starting at position 3198 of SEQ ID NO: 917201
guaguuaucauguagcaac

SEQ ID NO: 1216761 - RNA, 19 nt, Artificial Sequence
  Description of Artificial Sequence: Synthetic oligonucleotide
  Antisense strand to SEQ ID NO: 1216760
guugcuacaugauaacuac

SEQ ID NO: 1216762 - RNA, 19 nt, Artificial Sequence
  Description of Artificial Sequence: Synthetic oligonucleotide
  Sense strand starting at position 3454 of SEQ ID NO: 917201
gaacccuucugagugugaa

SEQ ID NO: 1216763 - RNA, 19 nt, Artificial Sequence
  Description of Artificial Sequence: Synthetic oligonucleotide
  Antisense strand to SEQ ID NO: 1216762
uucacacucagaaggguuc

SEQ ID NO: 1216764 - RNA, 19 nt, Artificial Sequence
  Description of Artificial Sequence: Synthetic oligonucleotide
  Sense strand starting at position 3455 of SEQ ID NO: 917201
aacccuucugagugugaau

SEQ ID NO: 1216765 - RNA, 19 nt, Artificial Sequence
  Description of Artificial Sequence: Synthetic oligonucleotide
  Antisense strand to SEQ ID NO: 1216764
auucacacucagaaggguu

SEQ ID NO: 1216766 - RNA, 19 nt, Artificial Sequence
  Description of Artificial Sequence: Synthetic oligonucleotide
  Sense strand starting at position 3457 of SEQ ID NO: 917201
cccuucugagugugaauau

SEQ ID NO: 1216767 - RNA, 19 nt, Artificial Sequence
  Description of Artificial Sequence: Synthetic oligonucleotide
  Antisense strand to SEQ ID NO: 1216766
auauucacacucagaaggg

SEQ ID NO: 1216768 - RNA, 19 nt, Artificial Sequence
  Description of Artificial Sequence: Synthetic oligonucleotide
  Sense strand starting at position 3599 of SEQ ID NO: 917201
cuaccaaaucuguguucca

SEQ ID NO: 1216769 - RNA, 19 nt, Artificial Sequence
  Description of Artificial Sequence: Synthetic oligonucleotide
  Antisense strand to SEQ ID NO: 1216768
uggaacacagauuugguag

SEQ ID NO: 1216770 - RNA, 19 nt, Artificial Sequence
  Description of Artificial Sequence: Synthetic oligonucleotide
  Sense strand starting at position 3787 of SEQ ID NO: 917201
cuaacugagccuuaguaaa

SEQ ID NO: 1216771 - RNA, 19 nt, Artificial Sequence
  Description of Artificial Sequence: Synthetic oligonucleotide
  Antisense strand to SEQ ID NO: 1216770
uuuacuaaggcucaguuag

SEQ ID NO: 1216772 - RNA, 19 nt, Artificial Sequence
  Description of Artificial Sequence: Synthetic oligonucleotide
  Sense strand starting at position 3853 of SEQ ID NO: 917201
aguucuaaauaguccaguu

SEQ ID NO: 1216773 - RNA, 19 nt, Artificial Sequence
  Description of Artificial Sequence: Synthetic oligonucleotide
  Antisense strand to SEQ ID NO: 1216772
aacuggacuauuuagaacu

SEQ ID NO: 1216774 - RNA, 19 nt, Artificial Sequence
  Description of Artificial Sequence: Synthetic oligonucleotide
  Sense strand starting at position 3902 of SEQ ID NO: 917201
ucagaaugucugggcauua

SEQ ID NO: 1216775 - RNA, 19 nt, Artificial Sequence
  Description of Artificial Sequence: Synthetic oligonucleotide
  Antisense strand to SEQ ID NO: 1216774
uaaugcccagacauucuga

SEQ ID NO: 1216776 - RNA, 19 nt, Artificial Sequence
  Description of Artificial Sequence: Synthetic oligonucleotide
  Sense strand starting at position 3903 of SEQ ID NO: 917201
cagaaugucugggcauuaa

SEQ ID NO: 1216777 - RNA, 19 nt, Artificial Sequence
  Description of Artificial Sequence: Synthetic oligonucleotide
  Antisense strand to SEQ ID NO: 1216776
uuaaugcccagacauucug

SEQ ID NO: 1216778 - RNA, 19 nt, Artificial Sequence
  Description of Artificial Sequence: Synthetic oligonucleotide
  Sense strand starting at position 3907 of SEQ ID NO: 917202
augucugggcauuaauaag

SEQ ID NO: 1216779 - RNA, 19 nt, Artificial Sequence
  Description of Artificial Sequence: Synthetic oligonucleotide
  Antisense strand to SEQ ID NO: 1216778
cuuauuaaugcccagacau

SEQ ID NO: 1216780 - RNA, 19 nt, Artificial Sequence
  Description of Artificial Sequence: Synthetic oligonucleotide
  Sense strand starting at position 15 of SEQ ID NO: 917202
agacgagacuaagaguuaa

SEQ ID NO: 1216781 - RNA, 19 nt, Artificial Sequence
  Description of Artificial Sequence: Synthetic oligonucleotide
  Antisense strand to SEQ ID NO: 1216780
uuaacucuuagucucgucu

SEQ ID NO: 1216782 - RNA, 19 nt, Artificial Sequence
  Description of Artificial Sequence: Synthetic oligonucleotide
  Sense strand starting at position 92 of SEQ ID NO: 917202
cuacuaaaguaucaugaga

SEQ ID NO: 1216783 - RNA, 19 nt, Artificial Sequence
  Description of Artificial Sequence: Synthetic oligonucleotide
  Antisense strand to SEQ ID NO: 1216782
ucucaugauacuuuaguag

SEQ ID NO: 1216784 - RNA, 19 nt, Artificial Sequence
  Description of Artificial Sequence: Synthetic oligonucleotide
  Sense strand starting at position 94 of SEQ ID NO: 917202
acuaaaguaucaugagaua

SEQ ID NO: 1216785 - RNA, 19 nt, Artificial Sequence
  Description of Artificial Sequence: Synthetic oligonucleotide
  Antisense strand to SEQ ID NO: 1216784
uaucucaugauacuuuagu

SEQ ID NO: 1216786 - RNA, 19 nt, Artificial Sequence
  Description of Artificial Sequence: Synthetic oligonucleotide
  Sense strand starting at position 125 of SEQ ID NO: 917202
gccugucacacgugggaau

SEQ ID NO: 1216787 - RNA, 19 nt, Artificial Sequence
  Description of Artificial Sequence: Synthetic oligonucleotide
  Antisense strand to SEQ ID NO: 1216786
auucccacgugugacaggc

SEQ ID NO: 1216788 - RNA, 19 nt, Artificial Sequence
  Description of Artificial Sequence: Synthetic oligonucleotide
  Sense strand starting at position 219 of SEQ ID NO: 917202
caguguugugucugcacca

SEQ ID NO: 1216789 - RNA, 19 nt, Artificial Sequence
  Description of Artificial Sequence: Synthetic oligonucleotide
  Antisense strand to SEQ ID NO: 1216788
uggugcagacacaacacug

SEQ ID NO: 1216790 - RNA, 19 nt, Artificial Sequence
  Description of Artificial Sequence: Synthetic oligonucleotide
  Sense strand starting at position 253 of SEQ ID NO: 917202
aucuacacggcuuauuaaa

SEQ ID NO: 1216791 - RNA, 19 nt, Artificial Sequence
  Description of Artificial Sequence: Synthetic oligonucleotide
  Antisense strand to SEQ ID NO: 1216790
uuuaauaagccguguagau

SEQ ID NO: 1216792 - RNA, 19 nt, Artificial Sequence
  Description of Artificial Sequence: Synthetic oligonucleotide
  Sense strand starting at position 278 of SEQ ID NO: 917202
ccugcagcacuuuggaaau

SEQ ID NO: 1216793 - RNA, 19 nt, Artificial Sequence
  Description of Artificial Sequence: Synthetic oligonucleotide
  Antisense strand to SEQ ID NO: 1216792
auuuccaaagugcugcagg

SEQ ID NO: 1216794 - RNA, 19 nt, Artificial Sequence
  Description of Artificial Sequence: Synthetic oligonucleotide
  Sense strand starting at position 333 of SEQ ID NO: 917202
gccucaaaucccugaugac

SEQ ID NO: 1216795 - RNA, 19 nt, Artificial Sequence
  Description of Artificial Sequence: Synthetic oligonucleotide
  Antisense strand to SEQ ID NO: 1216794
gucaucagggauuugaggc

SEQ ID NO: 1216796 - RNA, 19 nt, Artificial Sequence
  Description of Artificial Sequence: Synthetic oligonucleotide
  Sense strand starting at position 372 of SEQ ID NO: 917202
ggaaccaacuucuguguga

SEQ ID NO: 1216797 - RNA, 19 nt, Artificial Sequence
  Description of Artificial Sequence: Synthetic oligonucleotide
  Antisense strand to SEQ ID NO: 1216796
ucacacagaaguugguucc

SEQ ID NO: 1216798 - RNA, 19 nt, Artificial Sequence
  Description of Artificial Sequence: Synthetic oligonucleotide
  Sense strand starting at position 374 of SEQ ID NO: 917202
aaccaacuucugugugaga

SEQ ID NO: 1216799 - RNA, 19 nt, Artificial Sequence
  Description of Artificial Sequence: Synthetic oligonucleotide
  Antisense strand to SEQ ID NO: 1216798
ucucacacagaaguugguu

SEQ ID NO: 1216800 - RNA, 19 nt, Artificial Sequence
  Description of Artificial Sequence: Synthetic oligonucleotide
  Sense strand starting at position 375 of SEQ ID NO: 917202
accaacuucugugugagaa

SEQ ID NO: 1216801 - RNA, 19 nt, Artificial Sequence
  Description of Artificial Sequence: Synthetic oligonucleotide
  Antisense strand to SEQ ID NO: 1216800
uucucacacagaaguuggu

SEQ ID NO: 1216802 - RNA, 19 nt, Artificial Sequence
  Description of Artificial Sequence: Synthetic oligonucleotide
  Sense strand starting at position 376 of SEQ ID NO: 917202
ccaacuucugugugagaac

SEQ ID NO: 1216803 - RNA, 19 nt, Artificial Sequence
  Description of Artificial Sequence: Synthetic oligonucleotide
  Antisense strand to SEQ ID NO: 1216802
guucucacacagaaguugg

SEQ ID NO: 1216804 - RNA, 19 nt, Artificial Sequence
  Description of Artificial Sequence: Synthetic oligonucleotide
  Sense strand starting at position 377 of SEQ ID NO: 917202
caacuucugugugagaaca

SEQ ID NO: 1216805 - RNA, 19 nt, Artificial Sequence
  Description of Artificial Sequence: Synthetic oligonucleotide
  Antisense strand to SEQ ID NO: 1216804
uguucucacacagaaguug

SEQ ID NO: 1216806 - RNA, 19 nt, Artificial Sequence
  Description of Artificial Sequence: Synthetic oligonucleotide
  Sense strand starting at position 379 of SEQ ID NO: 917202
acuucugugugagaacaga

SEQ ID NO: 1216807 - RNA, 19 nt, Artificial Sequence
  Description of Artificial Sequence: Synthetic oligonucleotide
  Antisense strand to SEQ ID NO: 1216806
ucuguucucacacagaagu

SEQ ID NO: 1216808 - RNA, 19 nt, Artificial Sequence
  Description of Artificial Sequence: Synthetic oligonucleotide
  Sense strand starting at position 407 of SEQ ID NO: 917202
aaagaaguugcaggcuuua

SEQ ID NO: 1216809 - RNA, 19 nt, Artificial Sequence
  Description of Artificial Sequence: Synthetic oligonucleotide
  Antisense strand to SEQ ID NO: 1216808
uaaagccugcaacuucuuu

SEQ ID NO: 1216810 - RNA, 19 nt, Artificial Sequence
  Description of Artificial Sequence: Synthetic oligonucleotide
  Sense strand starting at position 418 of SEQ ID NO: 917202
aggcuuuauccuuaacaug

SEQ ID NO: 1216811 - RNA, 19 nt, Artificial Sequence
  Description of Artificial Sequence: Synthetic oligonucleotide
  Antisense strand to SEQ ID NO: 1216810
cauguuaaggauaaagccu

SEQ ID NO: 1216812 - RNA, 19 nt, Artificial Sequence
  Description of Artificial Sequence: Synthetic oligonucleotide
  Sense strand starting at position 470 of SEQ ID NO: 917202
cacagaaguuagcugguua

SEQ ID NO: 1216813 - RNA, 19 nt, Artificial Sequence
  Description of Artificial Sequence: Synthetic oligonucleotide
  Antisense strand to SEQ ID NO: 1216812
uaaccagcuaacuucugug

SEQ ID NO: 1216814 - RNA, 19 nt, Artificial Sequence
  Description of Artificial Sequence: Synthetic oligonucleotide
  Sense strand starting at position 471 of SEQ ID NO: 917202
acagaaguuagcugguuau

SEQ ID NO: 1216815 - RNA, 19 nt, Artificial Sequence
  Description of Artificial Sequence: Synthetic oligonucleotide
  Antisense strand to SEQ ID NO: 1216814
auaaccagcuaacuucugu

SEQ ID NO: 1216816 - RNA, 19 nt, Artificial Sequence
  Description of Artificial Sequence: Synthetic oligonucleotide
  Sense strand starting at position 474 of SEQ ID NO: 917202
gaaguuagcugguuaugga

SEQ ID NO: 1216817 - RNA, 19 nt, Artificial Sequence
  Description of Artificial Sequence: Synthetic oligonucleotide
  Antisense strand to SEQ ID NO: 1216816
uccauaaccagcuaacuuc

SEQ ID NO: 1216818 - RNA, 19 nt, Artificial Sequence
  Description of Artificial Sequence: Synthetic oligonucleotide
  Sense strand starting at position 475 of SEQ ID NO: 917202
aaguuagcugguuauggaa

SEQ ID NO: 1216819 - RNA, 19 nt, Artificial Sequence
  Description of Artificial Sequence: Synthetic oligonucleotide
  Antisense strand to SEQ ID NO: 1216818
uuccauaaccagcuaacuu

SEQ ID NO: 1216820 - RNA, 19 nt, Artificial Sequence
  Description of Artificial Sequence: Synthetic oligonucleotide
  Sense strand starting at position 573 of SEQ ID NO: 917202
auccuuguuuacuauggau

SEQ ID NO: 1216821 - RNA, 19 nt, Artificial Sequence
  Description of Artificial Sequence: Synthetic oligonucleotide
  Antisense strand to SEQ ID NO: 1216820
auccauaguaaacaaggau

SEQ ID NO: 1216822 - RNA, 19 nt, Artificial Sequence
  Description of Artificial Sequence: Synthetic oligonucleotide
  Sense strand starting at position 576 of SEQ ID NO: 917202
cuuguuuacuauggaucaa

SEQ ID NO: 1216823 - RNA, 19 nt, Artificial Sequence
  Description of Artificial Sequence: Synthetic oligonucleotide
  Antisense strand to SEQ ID NO: 1216822
uugauccauaguaaacaag

SEQ ID NO: 1216824 - RNA, 19 nt, Artificial Sequence
  Description of Artificial Sequence: Synthetic oligonucleotide
  Sense strand starting at position 665 of SEQ ID NO: 917202
uauagaaaucagcgaagcu

SEQ ID NO: 1216825 - RNA, 19 nt, Artificial Sequence
  Description of Artificial Sequence: Synthetic oligonucleotide
  Antisense strand to SEQ ID NO: 1216824
agcuucgcugauuucuaua

SEQ ID NO: 1216826 - RNA, 19 nt, Artificial Sequence
  Description of Artificial Sequence: Synthetic oligonucleotide
  Sense strand starting at position 718 of SEQ ID NO: 917202
uucugugucugcccaggaa

SEQ ID NO: 1216827 - RNA, 19 nt, Artificial Sequence
  Description of Artificial Sequence: Synthetic oligonucleotide
  Antisense strand to SEQ ID NO: 1216826
uuccugggcagacacagaa

SEQ ID NO: 1216828 - RNA, 19 nt, Artificial Sequence
  Description of Artificial Sequence: Synthetic oligonucleotide
  Sense strand starting at position 1005 of SEQ ID NO: 917202
ggugaaucggguuguagug

SEQ ID NO: 1216829 - RNA, 19 nt, Artificial Sequence
  Description of Artificial Sequence: Synthetic oligonucleotide
  Antisense strand to SEQ ID NO: 1216828
cacuacaacccgauucacc

SEQ ID NO: 1216830 - RNA, 19 nt, Artificial Sequence
  Description of Artificial Sequence: Synthetic oligonucleotide
  Sense strand starting at position 1014 of SEQ ID NO: 917202
gguuguagugcguuuccaa

SEQ ID NO: 1216831 - RNA, 19 nt, Artificial Sequence
  Description of Artificial Sequence: Synthetic oligonucleotide
  Antisense strand to SEQ ID NO: 1216830
uuggaaacgcacuacaacc

SEQ ID NO: 1216832 - RNA, 19 nt, Artificial Sequence
  Description of Artificial Sequence: Synthetic oligonucleotide
  Sense strand starting at position 1015 of SEQ ID NO: 917202
guuguagugcguuuccaaa

SEQ ID NO: 1216833 - RNA, 19 nt, Artificial Sequence
  Description of Artificial Sequence: Synthetic oligonucleotide
  Antisense strand to SEQ ID NO: 1216832
uuuggaaacgcacuacaac

SEQ ID NO: 1216834 - RNA, 19 nt, Artificial Sequence
  Description of Artificial Sequence: Synthetic oligonucleotide
  Sense strand starting at position 1017 of SEQ ID NO: 917202
uguagugcguuuccaaaua

SEQ ID NO: 1216835 - RNA, 19 nt, Artificial Sequence
  Description of Artificial Sequence: Synthetic oligonucleotide
  Antisense strand to SEQ ID NO: 1216834
uauuuggaaacgcacuaca

SEQ ID NO: 1216836 - RNA, 19 nt, Artificial Sequence
  Description of Artificial Sequence: Synthetic oligonucleotide
  Sense strand starting at position 1097 of SEQ ID NO: 917202
aggccuauucucuaaagac

SEQ ID NO: 1216837 - RNA, 19 nt, Artificial Sequence
  Description of Artificial Sequence: Synthetic oligonucleotide
  Antisense strand to SEQ ID NO: 1216836
gucuuuagagaauaggccu

SEQ ID NO: 1216838 - RNA, 19 nt, Artificial Sequence
  Description of Artificial Sequence: Synthetic oligonucleotide
  Sense strand starting at position 1115 of SEQ ID NO: 917202
cguucugccacgggaagau

SEQ ID NO: 1216839 - RNA, 19 nt, Artificial Sequence
  Description of Artificial Sequence: Synthetic oligonucleotide
  Antisense strand to SEQ ID NO: 1216838
aucuucccguggcagaacg

SEQ ID NO: 1216840 - RNA, 19 nt, Artificial Sequence
  Description of Artificial Sequence: Synthetic oligonucleotide
  Sense strand starting at position 1148 of SEQ ID NO: 917202
uggcuuugcuuacuuagaa

SEQ ID NO: 1216841 - RNA, 19 nt, Artificial Sequence
  Description of Artificial Sequence: Synthetic oligonucleotide
  Antisense strand to SEQ ID NO: 1216840
uucuaaguaagcaaagcca

SEQ ID NO: 1216842 - RNA, 19 nt, Artificial Sequence
  Description of Artificial Sequence: Synthetic oligonucleotide
  Sense strand starting at position 1149 of SEQ ID NO: 917202
ggcuuugcuuacuuagaac

SEQ ID NO: 1216843 - RNA, 19 nt, Artificial Sequence
  Description of Artificial Sequence: Synthetic oligonucleotide
  Antisense strand to SEQ ID NO: 1216842
guucuaaguaagcaaagcc

SEQ ID NO: 1216844 - RNA, 19 nt, Artificial Sequence
  Description of Artificial Sequence: Synthetic oligonucleotide
  Sense strand starting at position 1204 of SEQ ID NO: 917202
uagcgaggguucccaucau

SEQ ID NO: 1216845 - RNA, 19 nt, Artificial Sequence
  Description of Artificial Sequence: Synthetic oligonucleotide
  Antisense strand to SEQ ID NO: 1216844
augaugggaacccucgcua

SEQ ID NO: 1216846 - RNA, 19 nt, Artificial Sequence
  Description of Artificial Sequence: Synthetic oligonucleotide
  Sense strand starting at position 1475 of SEQ ID NO: 917202
aguguaauuucccaguuga

SEQ ID NO: 1216847 - RNA, 19 nt, Artificial Sequence
  Description of Artificial Sequence: Synthetic oligonucleotide
  Antisense strand to SEQ ID NO: 1216846
ucaacugggaaauuacacu

SEQ ID NO: 1216848 - RNA, 19 nt, Artificial Sequence
  Description of Artificial Sequence: Synthetic oligonucleotide
  Sense strand starting at position 1500 of SEQ ID NO: 917202
gcagguaaauugggagaga

SEQ ID NO: 1216849 - RNA, 19 nt, Artificial Sequence
  Description of Artificial Sequence: Synthetic oligonucleotide
  Antisense strand to SEQ ID NO: 1216848
ucucucccaauuuaccugc

SEQ ID NO: 1216850 - RNA, 19 nt, Artificial Sequence
  Description of Artificial Sequence: Synthetic oligonucleotide
  Sense strand starting at position 1541 of SEQ ID NO: 917202
gcgacaucacucugcggaa

SEQ ID NO: 1216851 - RNA, 19 nt, Artificial Sequence
  Description of Artificial Sequence: Synthetic oligonucleotide
  Antisense strand to SEQ ID NO: 1216850
uuccgcagagugaugucgc

SEQ ID NO: 1216852 - RNA, 19 nt, Artificial Sequence
  Description of Artificial Sequence: Synthetic oligonucleotide
  Sense strand starting at position 1542 of SEQ ID NO: 917202
cgacaucacucugcggaaa

SEQ ID NO: 1216853 - RNA, 19 nt, Artificial Sequence
  Description of Artificial Sequence: Synthetic oligonucleotide
  Antisense strand to SEQ ID NO: 1216852
uuuccgcagagugaugucg

SEQ ID NO: 1216854 - RNA, 19 nt, Artificial Sequence
  Description of Artificial Sequence: Synthetic oligonucleotide
  Sense strand starting at position 1543 of SEQ ID NO: 917202
gacaucacucugcggaaau

SEQ ID NO: 1216855 - RNA, 19 nt, Artificial Sequence
  Description of Artificial Sequence: Synthetic oligonucleotide
  Antisense strand to SEQ ID NO: 1216854
auuuccgcagagugauguc

SEQ ID NO: 1216856 - RNA, 19 nt, Artificial Sequence
  Description of Artificial Sequence: Synthetic oligonucleotide
  Sense strand starting at position 1544 of SEQ ID NO: 917202
acaucacucugcggaaauu

SEQ ID NO: 1216857 - RNA, 19 nt, Artificial Sequence
  Description of Artificial Sequence: Synthetic oligonucleotide
  Antisense strand to SEQ ID NO: 1216856
aauuuccgcagagugaugu

SEQ ID NO: 1216858 - RNA, 19 nt, Artificial Sequence
  Description of Artificial Sequence: Synthetic oligonucleotide
  Sense strand starting at position 1685 of SEQ ID NO: 917201
ucuugauuccgcggaccca

SEQ ID NO: 1216859 - RNA, 19 nt, Artificial Sequence
  Description of Artificial Sequence: Synthetic oligonucleotide
  Antisense strand to SEQ ID NO: 1216858
uggguccgcggaaucaaga

SEQ ID NO: 1216860 - RNA, 19 nt, Artificial Sequence
  Description of Artificial Sequence: Synthetic oligonucleotide
  Sense strand starting at position 1685 of SEQ ID NO: 917203
ucuugauuccgcggaccca

SEQ ID NO: 1216861 - RNA, 19 nt, Artificial Sequence
  Description of Artificial Sequence: Synthetic oligonucleotide
  Antisense strand to SEQ ID NO: 1216860
uggguccgcggaaucaaga

SEQ ID NO: 1216862 - RNA, 19 nt, Artificial Sequence
  Description of Artificial Sequence: Synthetic oligonucleotide
  Sense strand starting at position 1 of SEQ ID NO: 917203
accgaauuguguccuuaaa

SEQ ID NO: 1216863 - RNA, 19 nt, Artificial Sequence
  Description of Artificial Sequence: Synthetic oligonucleotide
  Antisense strand to SEQ ID NO: 1216862
uuuaaggacacaauucggu

SEQ ID NO: 1216864 - RNA, 19 nt, Artificial Sequence
  Description of Artificial Sequence: Synthetic oligonucleotide
  Sense strand starting at position 155 of SEQ ID NO: 917203
agguuagcagccuaaauau

SEQ ID NO: 1216865 - RNA, 19 nt, Artificial Sequence
  Description of Artificial Sequence: Synthetic oligonucleotide
  Antisense strand to SEQ ID NO: 1216864
auauuuaggcugcuaaccu

SEQ ID NO: 1216866 - RNA, 19 nt, Artificial Sequence
  Description of Artificial Sequence: Synthetic oligonucleotide
  Sense strand starting at position 366 of SEQ ID NO: 917203
gggcuuuggagaggcuaaa

SEQ ID NO: 1216867 - RNA, 19 nt, Artificial Sequence
  Description of Artificial Sequence: Synthetic oligonucleotide
  Antisense strand to SEQ ID NO: 1216866
uuuagccucuccaaagccc

SEQ ID NO: 1216868 - RNA, 19 nt, Artificial Sequence
  Description of Artificial Sequence: Synthetic oligonucleotide
  Sense strand starting at position 508 of SEQ ID NO: 917203
ggaauuccugcuuggacca

SEQ ID NO: 1216869 - RNA, 19 nt, Artificial Sequence
  Description of Artificial Sequence: Synthetic oligonucleotide
  Antisense strand to SEQ ID NO: 1216868
ugguccaagcaggaauucc

SEQ ID NO: 1216870 - RNA, 19 nt, Artificial Sequence
  Description of Artificial Sequence: Synthetic oligonucleotide
  Sense strand starting at position 730 of SEQ ID NO: 917203
ccaaguuaauuggccuuua

SEQ ID NO: 1216871 - RNA, 19 nt, Artificial Sequence
  Description of Artificial Sequence: Synthetic oligonucleotide
  Antisense strand to SEQ ID NO: 1216870
uaaaggccaauuaacuugg

SEQ ID NO: 1216872 - RNA, 19 nt, Artificial Sequence
  Description of Artificial Sequence: Synthetic oligonucleotide
  Sense strand starting at position 816 of SEQ ID NO: 917203
cuugcucccugaucuagaa

SEQ ID NO: 1216873 - RNA, 19 nt, Artificial Sequence
  Description of Artificial Sequence: Synthetic oligonucleotide
  Antisense strand to SEQ ID NO: 1216872
uucuagaucagggagcaag

SEQ ID NO: 1216874 - RNA, 19 nt, Artificial Sequence
  Description of Artificial Sequence: Synthetic oligonucleotide
  Sense strand starting at position 934 of SEQ ID NO: 917203
gcaggaucagcgggaacaa

SEQ ID NO: 1216875 - RNA, 19 nt, Artificial Sequence
  Description of Artificial Sequence: Synthetic oligonucleotide
  Antisense strand to SEQ ID NO: 1216874
uuguucccgcugauccugc

SEQ ID NO: 1216876 - RNA, 19 nt, Artificial Sequence
  Description of Artificial Sequence: Synthetic oligonucleotide
  Sense strand starting at position 974 of SEQ ID NO: 917203
aaguauacgucccuagaac

SEQ ID NO: 1216877 - RNA, 19 nt, Artificial Sequence
  Description of Artificial Sequence: Synthetic oligonucleotide
  Antisense strand to SEQ ID NO: 1216876
guucuagggacguauacuu

SEQ ID NO: 1216878 - RNA, 19 nt, Artificial Sequence
  Description of Artificial Sequence: Synthetic oligonucleotide
  Sense strand starting at position 1011 of SEQ ID NO: 917203
ggagaaggcguucagaauu

SEQ ID NO: 1216879 - RNA, 19 nt, Artificial Sequence
  Description of Artificial Sequence: Synthetic oligonucleotide
  Antisense strand to SEQ ID NO: 1216878
aauucugaacgccuucucc

SEQ ID NO: 1216880 - RNA, 19 nt, Artificial Sequence
  Description of Artificial Sequence: Synthetic oligonucleotide
  Sense strand starting at position 1031 of SEQ ID NO: 917203
gcugaauggacacgugaau

SEQ ID NO: 1216881 - RNA, 19 nt, Artificial Sequence
  Description of Artificial Sequence: Synthetic oligonucleotide
  Antisense strand to SEQ ID NO: 1216880
auucacguguccauucagc

SEQ ID NO: 1216882 - RNA, 19 nt, Artificial Sequence
  Description of Artificial Sequence: Synthetic oligonucleotide
  Sense strand starting at position 1073 of SEQ ID NO: 917203
cgcuuaguuaaggaaacau

SEQ ID NO: 1216883 - RNA, 19 nt, Artificial Sequence
  Description of Artificial Sequence: Synthetic oligonucleotide
  Antisense strand to SEQ ID NO: 1216882
auguuuccuuaacuaagcg

SEQ ID NO: 1216884 - RNA, 19 nt, Artificial Sequence
  Description of Artificial Sequence: Synthetic oligonucleotide
  Sense strand starting at position 1133 of SEQ ID NO: 917203
gccuguuagaacgauuaac

SEQ ID NO: 1216885 - RNA, 19 nt, Artificial Sequence
  Description of Artificial Sequence: Synthetic oligonucleotide
  Antisense strand to SEQ ID NO: 1216884
guuaaucguucuaacaggc

SEQ ID NO: 1216886 - RNA, 19 nt, Artificial Sequence
  Description of Artificial Sequence: Synthetic oligonucleotide
  Sense strand starting at position 1143 of SEQ ID NO: 917203
acgauuaacccaugaucug

SEQ ID NO: 1216887 - RNA, 19 nt, Artificial Sequence
  Description of Artificial Sequence: Synthetic oligonucleotide
  Antisense strand to SEQ ID NO: 1216886
cagaucauggguuaaucgu

SEQ ID NO: 1216888 - RNA, 19 nt, Artificial Sequence
  Description of Artificial Sequence: Synthetic oligonucleotide
  Sense strand starting at position 1313 of SEQ ID NO: 917203
guggaucucggucacaaga

SEQ ID NO: 1216889 - RNA, 19 nt, Artificial Sequence
  Description of Artificial Sequence: Synthetic oligonucleotide
  Antisense strand to SEQ ID NO: 1216888
ucuugugaccgagauccac

SEQ ID NO: 1216890 - RNA, 19 nt, Artificial Sequence
  Description of Artificial Sequence: Synthetic oligonucleotide
  Sense strand starting at position 2202 of SEQ ID NO: 917203
ggagcuucaggugaauuau

SEQ ID NO: 1216891 - RNA, 19 nt, Artificial Sequence
  Description of Artificial Sequence: Synthetic oligonucleotide
  Antisense strand to SEQ ID NO: 1216890
auaauucaccugaagcucc

SEQ ID NO: 1216892 - RNA, 19 nt, Artificial Sequence
  Description of Artificial Sequence: Synthetic oligonucleotide
  Sense strand starting at position 2208 of SEQ ID NO: 917203
ucaggugaauuaucuucca

SEQ ID NO: 1216893 - RNA, 19 nt, Artificial Sequence
  Description of Artificial Sequence: Synthetic oligonucleotide
  Antisense strand to SEQ ID NO: 1216892
uggaagauaauucaccuga

SEQ ID NO: 1216894 - RNA, 19 nt, Artificial Sequence
  Description of Artificial Sequence: Synthetic oligonucleotide
  Sense strand starting at position 2339 of SEQ ID NO: 917203
accaaagcccucuaggauu

SEQ ID NO: 1216895 - RNA, 19 nt, Artificial Sequence
  Description of Artificial Sequence: Synthetic oligonucleotide
  Antisense strand to SEQ ID NO: 1216894
aauccuagagggcuuuggu

SEQ ID NO: 1216896 - RNA, 19 nt, Artificial Sequence
  Description of Artificial Sequence: Synthetic oligonucleotide
  Sense strand starting at position 2416 of SEQ ID NO: 917203
cggaucuuuguugguagaa

SEQ ID NO: 1216897 - RNA, 19 nt, Artificial Sequence
  Description of Artificial Sequence: Synthetic oligonucleotide
  Antisense strand to SEQ ID NO: 1216896
uucuaccaacaaagauccg

SEQ ID NO: 1216898 - RNA, 19 nt, Artificial Sequence
  Description of Artificial Sequence: Synthetic oligonucleotide
  Sense strand starting at position 2417 of SEQ ID NO: 917203
ggaucuuuguugguagaaa

SEQ ID NO: 1216899 - RNA, 19 nt, Artificial Sequence
  Description of Artificial Sequence: Synthetic oligonucleotide
  Antisense strand to SEQ ID NO: 1216898
uuucuaccaacaaagaucc

SEQ ID NO: 1216900 - RNA, 19 nt, Artificial Sequence
  Description of Artificial Sequence: Synthetic oligonucleotide
  Sense strand starting at position 2433 of SEQ ID NO: 917203
aaaguuaggcacugaauua

SEQ ID NO: 1216901 - RNA, 19 nt, Artificial Sequence
  Description of Artificial Sequence: Synthetic oligonucleotide
  Antisense strand to SEQ ID NO: 1216900
uaauucagugccuaacuuu

SEQ ID NO: 1216902 - RNA, 19 nt, Artificial Sequence
  Description of Artificial Sequence: Synthetic oligonucleotide
  Sense strand starting at position 2468 of SEQ ID NO: 917203
ggaguagugugcucauuua

SEQ ID NO: 1216903 - RNA, 19 nt, Artificial Sequence
  Description of Artificial Sequence: Synthetic oligonucleotide
  Antisense strand to SEQ ID NO: 1216902
uaaaugagcacacuacucc

SEQ ID NO: 1216904 - RNA, 19 nt, Artificial Sequence
  Description of Artificial Sequence: Synthetic oligonucleotide
  Sense strand starting at position 2536 of SEQ ID NO: 917203
acaaguaauccagaacgua

SEQ ID NO: 1216905 - RNA, 19 nt, Artificial Sequence
  Description of Artificial Sequence: Synthetic oligonucleotide
  Antisense strand to SEQ ID NO: 1216904
uacguucuggauuacuugu

SEQ ID NO: 1216906 - RNA, 19 nt, Artificial Sequence
  Description of Artificial Sequence: Synthetic oligonucleotide
  Sense strand starting at position 2544 of SEQ ID NO: 917203
uccagaacguauguauaua

SEQ ID NO: 1216907 - RNA, 19 nt, Artificial Sequence
  Description of Artificial Sequence: Synthetic oligonucleotide
  Antisense strand to SEQ ID NO: 1216906
uauauacauacguucugga

SEQ ID NO: 1216908 - RNA, 19 nt, Artificial Sequence
  Description of Artificial Sequence: Synthetic oligonucleotide
  Sense strand starting at position 2560 of SEQ ID NO: 917203
auaccaucaugagaaauga

SEQ ID NO: 1216909 - RNA, 19 nt, Artificial Sequence
  Description of Artificial Sequence: Synthetic oligonucleotide
  Antisense strand to SEQ ID NO: 1216908
ucauuucucaugaugguau

SEQ ID NO: 1216910 - RNA, 19 nt, Artificial Sequence
  Description of Artificial Sequence: Synthetic oligonucleotide
  Sense strand starting at position 2665 of SEQ ID NO: 917203
ggaguagcugcagaacuuu

SEQ ID NO: 1216911 - RNA, 19 nt, Artificial Sequence
  Description of Artificial Sequence: Synthetic oligonucleotide
  Antisense strand to SEQ ID NO: 1216910
aaaguucugcagcuacucc

SEQ ID NO: 1216912 - RNA, 19 nt, Artificial Sequence
  Description of Artificial Sequence: Synthetic oligonucleotide
  Sense strand starting at position 2722 of SEQ ID NO: 917203
gugcuucucccugacagaa

SEQ ID NO: 1216913 - RNA, 19 nt, Artificial Sequence
  Description of Artificial Sequence: Synthetic oligonucleotide
  Antisense strand to SEQ ID NO: 1216912
uucugucagggagaagcac

SEQ ID NO: 1216914 - RNA, 19 nt, Artificial Sequence
  Description of Artificial Sequence: Synthetic oligonucleotide
  Sense strand starting at position 3409 of SEQ ID NO: 917203
gagagaugauugcuuaauu

SEQ ID NO: 1216915 - RNA, 19 nt, Artificial Sequence
  Description of Artificial Sequence: Synthetic oligonucleotide
  Antisense strand to SEQ ID NO: 1216914
aauuaagcaaucaucucuc

SEQ ID NO: 1216916 - RNA, 19 nt, Artificial Sequence
  Description of Artificial Sequence: Synthetic oligonucleotide
  Sense strand starting at position 3431 of SEQ ID NO: 917203
auuauuuguugacauacca

SEQ ID NO: 1216917 - RNA, 19 nt, Artificial Sequence
  Description of Artificial Sequence: Synthetic oligonucleotide
  Antisense strand to SEQ ID NO: 1216916
ugguaugucaacaaauaau

SEQ ID NO: 1216918 - RNA, 19 nt, Artificial Sequence
  Description of Artificial Sequence: Synthetic oligonucleotide
  Sense strand starting at position 3483 of SEQ ID NO: 917203
aguauauuacccuacaggu

SEQ ID NO: 1216919 - RNA, 19 nt, Artificial Sequence
  Description of Artificial Sequence: Synthetic oligonucleotide
  Antisense strand to SEQ ID NO: 1216918
accuguaggguaauauacu

SEQ ID NO: 1216920 - RNA, 19 nt, Artificial Sequence
  Description of Artificial Sequence: Synthetic oligonucleotide
  Sense strand starting at position 3491 of SEQ ID NO: 917203
acccuacagguguagaauu

SEQ ID NO: 1216921 - RNA, 19 nt, Artificial Sequence
  Description of Artificial Sequence: Synthetic oligonucleotide
  Antisense strand to SEQ ID NO: 1216920
aauucuacaccuguagggu

SEQ ID NO: 1216922 - RNA, 19 nt, Artificial Sequence
  Description of Artificial Sequence: Synthetic oligonucleotide
  Sense strand starting at position 3527 of SEQ ID NO: 917203
uugacuuuggcaugacuua

SEQ ID NO: 1216923 - RNA, 19 nt, Artificial Sequence
  Description of Artificial Sequence: Synthetic oligonucleotide
  Antisense strand to SEQ ID NO: 1216922
uaagucaugccaaagucaa

SEQ ID NO: 1216924 - RNA, 19 nt, Artificial Sequence
  Description of Artificial Sequence: Synthetic oligonucleotide
  Sense strand starting at position 3553 of SEQ ID NO: 917203
ugaugcauucuugaucuau

SEQ ID NO: 1216925 - RNA, 19 nt, Artificial Sequence
  Description of Artificial Sequence: Synthetic oligonucleotide
  Antisense strand to SEQ ID NO: 1216924
auagaucaagaaugcauca

SEQ ID NO: 1216926 - RNA, 19 nt, Artificial Sequence
  Description of Artificial Sequence: Synthetic oligonucleotide
  Sense strand starting at position 3682 of SEQ ID NO: 917203
uuuaguaaguccucaaaua

SEQ ID NO: 1216927 - RNA, 19 nt, Artificial Sequence
  Description of Artificial Sequence: Synthetic oligonucleotide
  Antisense strand to SEQ ID NO: 1216926
uauuugaggacuuacuaaa

SEQ ID NO: 1216928 - RNA, 19 nt, Artificial Sequence
  Description of Artificial Sequence: Synthetic oligonucleotide
  Sense strand starting at position 3789 of SEQ ID NO: 917203
aaagcauuguagcugaauu

SEQ ID NO: 1216929 - RNA, 19 nt, Artificial Sequence
  Description of Artificial Sequence: Synthetic oligonucleotide
  Antisense strand to SEQ ID NO: 1216928
aauucagcuacaaugcuuu

SEQ ID NO: 1216930 - RNA, 19 nt, Artificial Sequence
  Description of Artificial Sequence: Synthetic oligonucleotide
  Sense strand starting at position 3852 of SEQ ID NO: 917203
uugauauuaccuggcuaau

SEQ ID NO: 1216931 - RNA, 19 nt, Artificial Sequence
  Description of Artificial Sequence: Synthetic oligonucleotide
  Antisense strand to SEQ ID NO: 1216930
auuagccagguaauaucaa

SEQ ID NO: 1216932 - RNA, 19 nt, Artificial Sequence
  Description of Artificial Sequence: Synthetic oligonucleotide
  Sense strand starting at position 3854 of SEQ ID NO: 917203
gauauuaccuggcuaaugu

SEQ ID NO: 1216933 - RNA, 19 nt, Artificial Sequence
  Description of Artificial Sequence: Synthetic oligonucleotide
  Antisense strand to SEQ ID NO: 1216932
acauuagccagguaauauc

SEQ ID NO: 1216934 - RNA, 19 nt, Artificial Sequence
  Description of Artificial Sequence: Synthetic oligonucleotide
  Sense strand starting at position 3865 of SEQ ID NO: 917203
gcuaauguccuuuaguaug

SEQ ID NO: 1216935 - RNA, 19 nt, Artificial Sequence
  Description of Artificial Sequence: Synthetic oligonucleotide
  Antisense strand to SEQ ID NO: 1216934
cauacuaaaggacauuagc

SEQ ID NO: 1216936 - RNA, 19 nt, Artificial Sequence
  Description of Artificial Sequence: Synthetic oligonucleotide
  Sense strand starting at position 3876 of SEQ ID NO: 917203
uuaguaugaaggcgauaaa

SEQ ID NO: 1216937 - RNA, 19 nt, Artificial Sequence
  Description of Artificial Sequence: Synthetic oligonucleotide
  Antisense strand to SEQ ID NO: 1216936
uuuaucgccuucauacuaa

SEQ ID NO: 1216938 - RNA, 19 nt, Artificial Sequence
  Description of Artificial Sequence: Synthetic oligonucleotide
  Sense strand starting at position 3877 of SEQ ID NO: 917203
uaguaugaaggcgauaaau

SEQ ID NO: 1216939 - RNA, 19 nt, Artificial Sequence
  Description of Artificial Sequence: Synthetic oligonucleotide
  Antisense strand to SEQ ID NO: 1216938
auuuaucgccuucauacua

SEQ ID NO: 1216940 - RNA, 19 nt, Artificial Sequence
  Description of Artificial Sequence: Synthetic oligonucleotide
  Sense strand starting at position 3904 of SEQ ID NO: 917203
gcagaaaucacauguguug

SEQ ID NO: 1216941 - RNA, 19 nt, Artificial Sequence
  Description of Artificial Sequence: Synthetic oligonucleotide
  Antisense strand to SEQ ID NO: 1216940
caacacaugugauuucugc

SEQ ID NO: 1216942 - RNA, 19 nt, Artificial Sequence
  Description of Artificial Sequence: Synthetic oligonucleotide
  Sense strand starting at position 3904 of SEQ ID NO: 917204
gcagaaaucacauguguug

SEQ ID NO: 1216943 - RNA, 19 nt, Artificial Sequence
  Description of Artificial Sequence: Synthetic oligonucleotide
  Antisense strand to SEQ ID NO: 1216942
caacacaugugauuucugc

SEQ ID NO: 1216944 - RNA, 19 nt, Artificial Sequence
  Description of Artificial Sequence: Synthetic oligonucleotide
  Sense strand starting at position 186 of SEQ ID NO: 917204
ucugauaugcuauauacag

SEQ ID NO: 1216945 - RNA, 19 nt, Artificial Sequence
  Description of Artificial Sequence: Synthetic oligonucleotide
  Antisense strand to SEQ ID NO: 1216944
cuguauauagcauaucaga

SEQ ID NO: 1216946 - RNA, 19 nt, Artificial Sequence
  Description of Artificial Sequence: Synthetic oligonucleotide
  Sense strand starting at position 319 of SEQ ID NO: 917204
cucccuuguucugugggaa

SEQ ID NO: 1216947 - RNA, 19 nt, Artificial Sequence
  Description of Artificial Sequence: Synthetic oligonucleotide
  Antisense strand to SEQ ID NO: 1216946
uucccacagaacaagggag

SEQ ID NO: 1216948 - RNA, 19 nt, Artificial Sequence
  Description of Artificial Sequence: Synthetic oligonucleotide
  Sense strand starting at position 320 of SEQ ID NO: 917204
ucccuuguucugugggaaa

SEQ ID NO: 1216949 - RNA, 19 nt, Artificial Sequence
  Description of Artificial Sequence: Synthetic oligonucleotide
  Antisense strand to SEQ ID NO: 1216948
uuucccacagaacaaggga

SEQ ID NO: 1216950 - RNA, 19 nt, Artificial Sequence
  Description of Artificial Sequence: Synthetic oligonucleotide
  Sense strand starting at position 333 of SEQ ID NO: 917204
gggaaaccuuguguucaag

SEQ ID NO: 1216951 - RNA, 19 nt, Artificial Sequence
  Description of Artificial Sequence: Synthetic oligonucleotide
  Antisense strand to SEQ ID NO: 1216950
cuugaacacaagguuuccc

SEQ ID NO: 1216952 - RNA, 19 nt, Artificial Sequence
  Description of Artificial Sequence: Synthetic oligonucleotide
  Sense strand starting at position 740 of SEQ ID NO: 917204
gucccuuaucucuacaugu

SEQ ID NO: 1216953 - RNA, 19 nt, Artificial Sequence
  Description of Artificial Sequence: Synthetic oligonucleotide
  Antisense strand to SEQ ID NO: 1216952
acauguagagauaagggac

SEQ ID NO: 1216954 - RNA, 19 nt, Artificial Sequence
  Description of Artificial Sequence: Synthetic oligonucleotide
  Sense strand starting at position 753 of SEQ ID NO: 917204
acauguugauuaucagaau

SEQ ID NO: 1216955 - RNA, 19 nt, Artificial Sequence
  Description of Artificial Sequence: Synthetic oligonucleotide
  Antisense strand to SEQ ID NO: 1216954
auucugauaaucaacaugu

SEQ ID NO: 1216956 - RNA, 19 nt, Artificial Sequence
  Description of Artificial Sequence: Synthetic oligonucleotide
  Sense strand starting at position 815 of SEQ ID NO: 917204
cguaaacauuuacagaacu

SEQ ID NO: 1216957 - RNA, 19 nt, Artificial Sequence
  Description of Artificial Sequence: Synthetic oligonucleotide
  Antisense strand to SEQ ID NO: 1216956
aguucuguaaauguuuacg

SEQ ID NO: 1216958 - RNA, 19 nt, Artificial Sequence
  Description of Artificial Sequence: Synthetic oligonucleotide
  Sense strand starting at position 950 of SEQ ID NO: 917204
acugauacuugggcauagu

SEQ ID NO: 1216959 - RNA, 19 nt, Artificial Sequence
  Description of Artificial Sequence: Synthetic oligonucleotide
  Antisense strand to SEQ ID NO: 1216958
acuaugcccaaguaucagu

SEQ ID NO: 1216960 - RNA, 19 nt, Artificial Sequence
  Description of Artificial Sequence: Synthetic oligonucleotide
  Sense strand starting at position 951 of SEQ ID NO: 917204
cugauacuugggcauaguu

SEQ ID NO: 1216961 - RNA, 19 nt, Artificial Sequence
  Description of Artificial Sequence: Synthetic oligonucleotide
  Antisense strand to SEQ ID NO: 1216960
aacuaugcccaaguaucag

SEQ ID NO: 1216962 - RNA, 19 nt, Artificial Sequence
  Description of Artificial Sequence: Synthetic oligonucleotide
  Sense strand starting at position 953 of SEQ ID NO: 917204
gauacuugggcauaguuua

SEQ ID NO: 1216963 - RNA, 19 nt, Artificial Sequence
  Description of Artificial Sequence: Synthetic oligonucleotide
  Antisense strand to SEQ ID NO: 1216962
uaaacuaugcccaaguauc

SEQ ID NO: 1216964 - RNA, 19 nt, Artificial Sequence
  Description of Artificial Sequence: Synthetic oligonucleotide
  Sense strand starting at position 1080 of SEQ ID NO: 917204
uggguugaaucucuaagga

SEQ ID NO: 1216965 - RNA, 19 nt, Artificial Sequence
  Description of Artificial Sequence: Synthetic oligonucleotide
  Antisense strand to SEQ ID NO: 1216964
uccuuagagauucaaccca

SEQ ID NO: 1216966 - RNA, 19 nt, Artificial Sequence
  Description of Artificial Sequence: Synthetic oligonucleotide
  Sense strand starting at position 1106 of SEQ ID NO: 917204
uuccuaagaccucgacuga

SEQ ID NO: 1216967 - RNA, 19 nt, Artificial Sequence
  Description of Artificial Sequence: Synthetic oligonucleotide
  Antisense strand to SEQ ID NO: 1216966
ucagucgaggucuuaggaa

SEQ ID NO: 1216968 - RNA, 19 nt, Artificial Sequence
  Description of Artificial Sequence: Synthetic oligonucleotide
  Sense strand starting at position 1107 of SEQ ID NO: 917204
uccuaagaccucgacugau

SEQ ID NO: 1216969 - RNA, 19 nt, Artificial Sequence
  Description of Artificial Sequence: Synthetic oligonucleotide
  Antisense strand to SEQ ID NO: 1216968
aucagucgaggucuuagga

SEQ ID NO: 1216970 - RNA, 19 nt, Artificial Sequence
  Description of Artificial Sequence: Synthetic oligonucleotide
  Sense strand starting at position 1150 of SEQ ID NO: 917204
agacuagacugccucagaa

SEQ ID NO: 1216971 - RNA, 19 nt, Artificial Sequence
  Description of Artificial Sequence: Synthetic oligonucleotide
  Antisense strand to SEQ ID NO: 1216970
uucugaggcagucuagucu

SEQ ID NO: 1216972 - RNA, 19 nt, Artificial Sequence
  Description of Artificial Sequence: Synthetic oligonucleotide
  Sense strand starting at position 1152 of SEQ ID NO: 917204
acuagacugccucagaauc

SEQ ID NO: 1216973 - RNA, 19 nt, Artificial Sequence
  Description of Artificial Sequence: Synthetic oligonucleotide
  Antisense strand to SEQ ID NO: 1216972
gauucugaggcagucuagu

SEQ ID NO: 1216974 - RNA, 19 nt, Artificial Sequence
  Description of Artificial Sequence: Synthetic oligonucleotide
  Sense strand starting at position 1187 of SEQ ID NO: 917204
acuggaaagucaccuaauu

SEQ ID NO: 1216975 - RNA, 19 nt, Artificial Sequence
  Description of Artificial Sequence: Synthetic oligonucleotide
  Antisense strand to SEQ ID NO: 1216974
aauuaggugacuuuccagu

SEQ ID NO: 1216976 - RNA, 19 nt, Artificial Sequence
  Description of Artificial Sequence: Synthetic oligonucleotide
  Sense strand starting at position 1265 of SEQ ID NO: 917204
cuguaaagaucugaaauuu

SEQ ID NO: 1216977 - RNA, 19 nt, Artificial Sequence
  Description of Artificial Sequence: Synthetic oligonucleotide
  Antisense strand to SEQ ID NO: 1216976
aaauuucagaucuuuacag

SEQ ID NO: 1216978 - RNA, 19 nt, Artificial Sequence
  Description of Artificial Sequence: Synthetic oligonucleotide
  Sense strand starting at position 1308 of SEQ ID NO: 917204
acauuagacacggguguuu

SEQ ID NO: 1216979 - RNA, 19 nt, Artificial Sequence
  Description of Artificial Sequence: Synthetic oligonucleotide
  Antisense strand to SEQ ID NO: 1216978
aaacacccgugucuaaugu

SEQ ID NO: 1216980 - RNA, 19 nt, Artificial Sequence
  Description of Artificial Sequence: Synthetic oligonucleotide
  Sense strand starting at position 1318 of SEQ ID NO: 917204
cggguguuucguuugucuu

SEQ ID NO: 1216981 - RNA, 19 nt, Artificial Sequence
  Description of Artificial Sequence: Synthetic oligonucleotide
  Antisense strand to SEQ ID NO: 1216980
aagacaaacgaaacacccg

SEQ ID NO: 1216982 - RNA, 19 nt, Artificial Sequence
  Description of Artificial Sequence: Synthetic oligonucleotide
  Sense strand starting at position 2198 of SEQ ID NO: 917204
gaaggaacgugcucaccaa

SEQ ID NO: 1216983 - RNA, 19 nt, Artificial Sequence
  Description of Artificial Sequence: Synthetic oligonucleotide
  Antisense strand to SEQ ID NO: 1216982
uuggugagcacguuccuuc

SEQ ID NO: 1216984 - RNA, 19 nt, Artificial Sequence
  Description of Artificial Sequence: Synthetic oligonucleotide
  Sense strand starting at position 2255 of SEQ ID NO: 917204
agcccaaaggauugguaau

SEQ ID NO: 1216985 - RNA, 19 nt, Artificial Sequence
  Description of Artificial Sequence: Synthetic oligonucleotide
  Antisense strand to SEQ ID NO: 1216984
auuaccaauccuuugggcu

SEQ ID NO: 1216986 - RNA, 19 nt, Artificial Sequence
  Description of Artificial Sequence: Synthetic oligonucleotide
  Sense strand starting at position 2256 of SEQ ID NO: 917204
gcccaaaggauugguaaua

SEQ ID NO: 1216987 - RNA, 19 nt, Artificial Sequence
  Description of Artificial Sequence: Synthetic oligonucleotide
  Antisense strand to SEQ ID NO: 1216986
uauuaccaauccuuugggc

SEQ ID NO: 1216988 - RNA, 19 nt, Artificial Sequence
  Description of Artificial Sequence: Synthetic oligonucleotide
  Sense strand starting at position 2337 of SEQ ID NO: 917204
agccuagguaguggaaauu

SEQ ID NO: 1216989 - RNA, 19 nt, Artificial Sequence
  Description of Artificial Sequence: Synthetic oligonucleotide
  Antisense strand to SEQ ID NO: 1216988
aauuuccacuaccuaggcu

SEQ ID NO: 1216990 - RNA, 19 nt, Artificial Sequence
  Description of Artificial Sequence: Synthetic oligonucleotide
  Sense strand starting at position 2564 of SEQ ID NO: 917204
gauagaugcguuuaaccug

SEQ ID NO: 1216991 - RNA, 19 nt, Artificial Sequence
  Description of Artificial Sequence: Synthetic oligonucleotide
  Antisense strand to SEQ ID NO: 1216990
cagguuaaacgcaucuauc

SEQ ID NO: 1216992 - RNA, 19 nt, Artificial Sequence
  Description of Artificial Sequence: Synthetic oligonucleotide
  Sense strand starting at position 2629 of SEQ ID NO: 917204
agcacugagugguuaaauu

SEQ ID NO: 1216993 - RNA, 19 nt, Artificial Sequence
  Description of Artificial Sequence: Synthetic oligonucleotide
  Antisense strand to SEQ ID NO: 1216992
aauuuaaccacucagugcu

SEQ ID NO: 1216994 - RNA, 19 nt, Artificial Sequence
  Description of Artificial Sequence: Synthetic oligonucleotide
  Sense strand starting at position 2970 of SEQ ID NO: 917204
aagagucagugcccauaua

SEQ ID NO: 1216995 - RNA, 19 nt, Artificial Sequence
  Description of Artificial Sequence: Synthetic oligonucleotide
  Antisense strand to SEQ ID NO: 1216994
uauaugggcacugacucuu

SEQ ID NO: 1216996 - RNA, 19 nt, Artificial Sequence
  Description of Artificial Sequence: Synthetic oligonucleotide
  Sense strand starting at position 3156 of SEQ ID NO: 917204
uugggagucuggaggaauu

SEQ ID NO: 1216997 - RNA, 19 nt, Artificial Sequence
  Description of Artificial Sequence: Synthetic oligonucleotide
  Antisense strand to SEQ ID NO: 1216996
aauuccuccagacucccaa

SEQ ID NO: 1216998 - RNA, 19 nt, Artificial Sequence
  Description of Artificial Sequence: Synthetic oligonucleotide
  Sense strand starting at position 3274 of SEQ ID NO: 917204
ggucuucaggauuagaagu

SEQ ID NO: 1216999 - RNA, 19 nt, Artificial Sequence
  Description of Artificial Sequence: Synthetic oligonucleotide
  Antisense strand to SEQ ID NO: 1216998
acuucuaauccugaagacc

SEQ ID NO: 1217000 - RNA, 19 nt, Artificial Sequence
  Description of Artificial Sequence: Synthetic oligonucleotide
  Sense strand starting at position 3281 of SEQ ID NO: 917204
aggauuagaaguuguuaau

SEQ ID NO: 1217001 - RNA, 19 nt, Artificial Sequence
  Description of Artificial Sequence: Synthetic oligonucleotide
  Antisense strand to SEQ ID NO: 1217000
auuaacaacuucuaauccu

SEQ ID NO: 1217002 - RNA, 19 nt, Artificial Sequence
  Description of Artificial Sequence: Synthetic oligonucleotide
  Sense strand starting at position 3287 of SEQ ID NO: 917204
agaaguuguuaaucacuua

SEQ ID NO: 1217003 - RNA, 19 nt, Artificial Sequence
  Description of Artificial Sequence: Synthetic oligonucleotide
  Antisense strand to SEQ ID NO: 1217002
uaagugauuaacaacuucu

SEQ ID NO: 1217004 - RNA, 19 nt, Artificial Sequence
  Description of Artificial Sequence: Synthetic oligonucleotide
  Sense strand starting at position 3324 of SEQ ID NO: 917204
cucuuacacguagacauau

SEQ ID NO: 1217005 - RNA, 19 nt, Artificial Sequence
  Description of Artificial Sequence: Synthetic oligonucleotide
  Antisense strand to SEQ ID NO: 1217004
auaugucuacguguaagag

SEQ ID NO: 1217006 - RNA, 19 nt, Artificial Sequence
  Description of Artificial Sequence: Synthetic oligonucleotide
  Sense strand starting at position 3377 of SEQ ID NO: 917204
guaauuaugaguuggucug

SEQ ID NO: 1217007 - RNA, 19 nt, Artificial Sequence
  Description of Artificial Sequence: Synthetic oligonucleotide
  Antisense strand to SEQ ID NO: 1217006
cagaccaacucauaauuac

SEQ ID NO: 1217008 - RNA, 19 nt, Artificial Sequence
  Description of Artificial Sequence: Synthetic oligonucleotide
  Sense strand starting at position 3537 of SEQ ID NO: 917204
acccuaugaggucggugaa

SEQ ID NO: 1217009 - RNA, 19 nt, Artificial Sequence
  Description of Artificial Sequence: Synthetic oligonucleotide
  Antisense strand to SEQ ID NO: 1217008
uucaccgaccucauagggu

SEQ ID NO: 1217010 - RNA, 19 nt, Artificial Sequence
  Description of Artificial Sequence: Synthetic oligonucleotide
  Sense strand starting at position 3538 of SEQ ID NO: 917204
cccuaugaggucggugaaa

SEQ ID NO: 1217011 - RNA, 19 nt, Artificial Sequence
  Description of Artificial Sequence: Synthetic oligonucleotide
  Antisense strand to SEQ ID NO: 1217010
uuucaccgaccucauaggg

SEQ ID NO: 1217012 - RNA, 19 nt, Artificial Sequence
  Description of Artificial Sequence: Synthetic oligonucleotide
  Sense strand starting at position 3540 of SEQ ID NO: 917204
cuaugaggucggugaaaua

SEQ ID NO: 1217013 - RNA, 19 nt, Artificial Sequence
  Description of Artificial Sequence: Synthetic oligonucleotide
  Antisense strand to SEQ ID NO: 1217012
uauuucaccgaccucauag

SEQ ID NO: 1217014 - RNA, 19 nt, Artificial Sequence
  Description of Artificial Sequence: Synthetic oligonucleotide
  Sense strand starting at position 3696 of SEQ ID NO: 917204
guguuauuuauucggauag

SEQ ID NO: 1217015 - RNA, 19 nt, Artificial Sequence
  Description of Artificial Sequence: Synthetic oligonucleotide
  Antisense strand to SEQ ID NO: 1217014
cuauccgaauaaauaacac

SEQ ID NO: 1217016 - RNA, 19 nt, Artificial Sequence
  Description of Artificial Sequence: Synthetic oligonucleotide
  Sense strand starting at position 3703 of SEQ ID NO: 917204
uuauucggauaguuugauu

SEQ ID NO: 1217017 - RNA, 19 nt, Artificial Sequence
  Description of Artificial Sequence: Synthetic oligonucleotide
  Antisense strand to SEQ ID NO: 1217016
aaucaaacuauccgaauaa

SEQ ID NO: 1217018 - RNA, 19 nt, Artificial Sequence
  Description of Artificial Sequence: Synthetic oligonucleotide
  Sense strand starting at position 3723 of SEQ ID NO: 917204
gcaagaugauguucuggag

SEQ ID NO: 1217019 - RNA, 19 nt, Artificial Sequence
  Description of Artificial Sequence: Synthetic oligonucleotide
  Antisense strand to SEQ ID NO: 1217018
cuccagaacaucaucuugc

SEQ ID NO: 1217020 - RNA, 19 nt, Artificial Sequence
  Description of Artificial Sequence: Synthetic oligonucleotide
  Sense strand starting at position 3729 of SEQ ID NO: 917204
ugauguucuggagauuggu

SEQ ID NO: 1217021 - RNA, 19 nt, Artificial Sequence
  Description of Artificial Sequence: Synthetic oligonucleotide
  Antisense strand to SEQ ID NO: 1217020
accaaucuccagaacauca

SEQ ID NO: 1217022 - RNA, 19 nt, Artificial Sequence
  Description of Artificial Sequence: Synthetic oligonucleotide
  Sense strand starting at position 3913 of SEQ ID NO: 917204
auagaaugauccuuguuua

SEQ ID NO: 1217023 - RNA, 19 nt, Artificial Sequence
  Description of Artificial Sequence: Synthetic oligonucleotide
  Antisense strand to SEQ ID NO: 1217022
uaaacaaggaucauucuau

SEQ ID NO: 1217024 - RNA, 19 nt, Artificial Sequence
  Description of Artificial Sequence: Synthetic oligonucleotide
  Sense strand starting at position 3913 of SEQ ID NO: 917205
auagaaugauccuuguuua

SEQ ID NO: 1217025 - RNA, 19 nt, Artificial Sequence
  Description of Artificial Sequence: Synthetic oligonucleotide
  Antisense strand to SEQ ID NO: 1217024
uaaacaaggaucauucuau

SEQ ID NO: 1217026 - RNA, 19 nt, Artificial Sequence
  Description of Artificial Sequence: Synthetic oligonucleotide
  Sense strand starting at position 478 of SEQ ID NO: 917205
ugucuaaggccgcaagaau

SEQ ID NO: 1217027 - RNA, 19 nt, Artificial Sequence
  Description of Artificial Sequence: Synthetic oligonucleotide
  Antisense strand to SEQ ID NO: 1217026
auucuugcggccuuagaca

SEQ ID NO: 1217028 - RNA, 19 nt, Artificial Sequence
  Description of Artificial Sequence: Synthetic oligonucleotide
  Sense strand starting at position 486 of SEQ ID NO: 917205
gccgcaagaauagaaguua

SEQ ID NO: 1217029 - RNA, 19 nt, Artificial Sequence
  Description of Artificial Sequence: Synthetic oligonucleotide
  Antisense strand to SEQ ID NO: 1217028
uaacuucuauucuugcggc

SEQ ID NO: 1217030 - RNA, 19 nt, Artificial Sequence
  Description of Artificial Sequence: Synthetic oligonucleotide
  Sense strand starting at position 852 of SEQ ID NO: 917205
gggcuacuggguuaaggau

SEQ ID NO: 1217031 - RNA, 19 nt, Artificial Sequence
  Description of Artificial Sequence: Synthetic oligonucleotide
  Antisense strand to SEQ ID NO: 1217030
auccuuaacccaguagccc

SEQ ID NO: 1217032 - RNA, 19 nt, Artificial Sequence
  Description of Artificial Sequence: Synthetic oligonucleotide
  Sense strand starting at position 936 of SEQ ID NO: 917205
uggaguguuacaggauuau

SEQ ID NO: 1217033 - RNA, 19 nt, Artificial Sequence
  Description of Artificial Sequence: Synthetic oligonucleotide
  Antisense strand to SEQ ID NO: 1217032
auaauccuguaacacucca

SEQ ID NO: 1217034 - RNA, 19 nt, Artificial Sequence
  Description of Artificial Sequence: Synthetic oligonucleotide
  Sense strand starting at position 1993 of SEQ ID NO: 917205
cggaauguuccacagggca

SEQ ID NO: 1217035 - RNA, 19 nt, Artificial Sequence
  Description of Artificial Sequence: Synthetic oligonucleotide
  Antisense strand to SEQ ID NO: 1217034
ugcccuguggaacauuccg

SEQ ID NO: 1217036 - RNA, 19 nt, Artificial Sequence
  Description of Artificial Sequence: Synthetic oligonucleotide
  Sense strand starting at position 2013 of SEQ ID NO: 917205
gcuuaagucaccuaaggag

SEQ ID NO: 1217037 - RNA, 19 nt, Artificial Sequence
  Description of Artificial Sequence: Synthetic oligonucleotide
  Antisense strand to SEQ ID NO: 1217036
cuccuuaggugacuuaagc

SEQ ID NO: 1217038 - RNA, 19 nt, Artificial Sequence
  Description of Artificial Sequence: Synthetic oligonucleotide
  Sense strand starting at position 2138 of SEQ ID NO: 917205
gagguuuauucggccagaa

SEQ ID NO: 1217039 - RNA, 19 nt, Artificial Sequence
  Description of Artificial Sequence: Synthetic oligonucleotide
  Antisense strand to SEQ ID NO: 1217038
uucuggccgaauaaaccuc

SEQ ID NO: 1217040 - RNA, 19 nt, Artificial Sequence
  Description of Artificial Sequence: Synthetic oligonucleotide
  Sense strand starting at position 2441 of SEQ ID NO: 917205
acugucugccaguggauuu

SEQ ID NO: 1217041 - RNA, 19 nt, Artificial Sequence
  Description of Artificial Sequence: Synthetic oligonucleotide
  Antisense strand to SEQ ID NO: 1217040
aaauccacuggcagacagu

SEQ ID NO: 1217042 - RNA, 19 nt, Artificial Sequence
  Description of Artificial Sequence: Synthetic oligonucleotide
  Sense strand starting at position 2530 of SEQ ID NO: 917205
gugguauccucccuuaaau

SEQ ID NO: 1217043 - RNA, 19 nt, Artificial Sequence
  Description of Artificial Sequence: Synthetic oligonucleotide
  Antisense strand to SEQ ID NO: 1217042
auuuaagggaggauaccac

SEQ ID NO: 1217044 - RNA, 19 nt, Artificial Sequence
  Description of Artificial Sequence: Synthetic oligonucleotide
  Sense strand starting at position 2582 of SEQ ID NO: 917205
auggauugcucuccauuag

SEQ ID NO: 1217045 - RNA, 19 nt, Artificial Sequence
  Description of Artificial Sequence: Synthetic oligonucleotide
  Antisense strand to SEQ ID NO: 1217044
cuaauggagagcaauccau

SEQ ID NO: 1217046 - RNA, 19 nt, Artificial Sequence
  Description of Artificial Sequence: Synthetic oligonucleotide
  Sense strand starting at position 2644 of SEQ ID NO: 917205
uuagguuugaguuaggcaa

SEQ ID NO: 1217047 - RNA, 19 nt, Artificial Sequence
  Description of Artificial Sequence: Synthetic oligonucleotide
  Antisense strand to SEQ ID NO: 1217046
uugccuaacucaaaccuaa

SEQ ID NO: 1217048 - RNA, 19 nt, Artificial Sequence
  Description of Artificial Sequence: Synthetic oligonucleotide
  Sense strand starting at position 2648 of SEQ ID NO: 917205
guuugaguuaggcaagaua

SEQ ID NO: 1217049 - RNA, 19 nt, Artificial Sequence
  Description of Artificial Sequence: Synthetic oligonucleotide
  Antisense strand to SEQ ID NO: 1217048
uaucuugccuaacucaaac

SEQ ID NO: 1217050 - RNA, 19 nt, Artificial Sequence
  Description of Artificial Sequence: Synthetic oligonucleotide
  Sense strand starting at position 2711 of SEQ ID NO: 917205
ugccuuauccgagaaaugu

SEQ ID NO: 1217051 - RNA, 19 nt, Artificial Sequence
  Description of Artificial Sequence: Synthetic oligonucleotide
  Antisense strand to SEQ ID NO: 1217050
acauuucucggauaaggca

SEQ ID NO: 1217052 - RNA, 19 nt, Artificial Sequence
  Description of Artificial Sequence: Synthetic oligonucleotide
  Sense strand starting at position 2719 of SEQ ID NO: 917205
ccgagaaauguccaagucu

SEQ ID NO: 1217053 - RNA, 19 nt, Artificial Sequence
  Description of Artificial Sequence: Synthetic oligonucleotide
  Antisense strand to SEQ ID NO: 1217052
agacuuggacauuucucgg

SEQ ID NO: 1217054 - RNA, 19 nt, Artificial Sequence
  Description of Artificial Sequence: Synthetic oligonucleotide
  Sense strand starting at position 2735 of SEQ ID NO: 917205
ucugcauaaccaggagaga

SEQ ID NO: 1217055 - RNA, 19 nt, Artificial Sequence
  Description of Artificial Sequence: Synthetic oligonucleotide
  Antisense strand to SEQ ID NO: 1217054
ucucuccugguuaugcaga

SEQ ID NO: 1217056 - RNA, 19 nt, Artificial Sequence
  Description of Artificial Sequence: Synthetic oligonucleotide
  Sense strand starting at position 2786 of SEQ ID NO: 917205
uugcuaugucuauagucaa

SEQ ID NO: 1217057 - RNA, 19 nt, Artificial Sequence
  Description of Artificial Sequence: Synthetic oligonucleotide
  Antisense strand to SEQ ID NO: 1217056
uugacuauagacauagcaa

SEQ ID NO: 1217058 - RNA, 19 nt, Artificial Sequence
  Description of Artificial Sequence: Synthetic oligonucleotide
  Sense strand starting at position 2833 of SEQ ID NO: 917205
augcaagucuaagucaauu

SEQ ID NO: 1217059 - RNA, 19 nt, Artificial Sequence
  Description of Artificial Sequence: Synthetic oligonucleotide
  Antisense strand to SEQ ID NO: 1217058
aauugacuuagacuugcau

SEQ ID NO: 1217060 - RNA, 19 nt, Artificial Sequence
  Description of Artificial Sequence: Synthetic oligonucleotide
  Sense strand starting at position 2866 of SEQ ID NO: 917205
gcuuaagacuuuccaaugu

SEQ ID NO: 1217061 - RNA, 19 nt, Artificial Sequence
  Description of Artificial Sequence: Synthetic oligonucleotide
  Antisense strand to SEQ ID NO: 1217060
acauuggaaagucuuaagc

SEQ ID NO: 1217062 - RNA, 19 nt, Artificial Sequence
  Description of Artificial Sequence: Synthetic oligonucleotide
  Sense strand starting at position 2885 of SEQ ID NO: 917205
cucccaguagcugaauaaa

SEQ ID NO: 1217063 - RNA, 19 nt, Artificial Sequence
  Description of Artificial Sequence: Synthetic oligonucleotide
  Antisense strand to SEQ ID NO: 1217062
uuuauucagcuacugggag

SEQ ID NO: 1217064 - RNA, 19 nt, Artificial Sequence
  Description of Artificial Sequence: Synthetic oligonucleotide
  Sense strand starting at position 2888 of SEQ ID NO: 917205
ccaguagcugaauaaaguu

SEQ ID NO: 1217065 - RNA, 19 nt, Artificial Sequence
  Description of Artificial Sequence: Synthetic oligonucleotide
  Antisense strand to SEQ ID NO: 1217064
aacuuuauucagcuacugg

SEQ ID NO: 1217066 - RNA, 19 nt, Artificial Sequence
  Description of Artificial Sequence: Synthetic oligonucleotide
  Sense strand starting at position 3060 of SEQ ID NO: 917205
uuugcagauccugaaacau

SEQ ID NO: 1217067 - RNA, 19 nt, Artificial Sequence
  Description of Artificial Sequence: Synthetic oligonucleotide
  Antisense strand to SEQ ID NO: 1217066
auguuucaggaucugcaaa

SEQ ID NO: 1217068 - RNA, 19 nt, Artificial Sequence
  Description of Artificial Sequence: Synthetic oligonucleotide
  Sense strand starting at position 3071 of SEQ ID NO: 917205
ugaaacaugccaugcugaa

SEQ ID NO: 1217069 - RNA, 19 nt, Artificial Sequence
  Description of Artificial Sequence: Synthetic oligonucleotide
  Antisense strand to SEQ ID NO: 1217068
uucagcauggcauguuuca

SEQ ID NO: 1217070 - RNA, 19 nt, Artificial Sequence
  Description of Artificial Sequence: Synthetic oligonucleotide
  Sense strand starting at position 3099 of SEQ ID NO: 917205
agggacuucuucuugcuga

SEQ ID NO: 1217071 - RNA, 19 nt, Artificial Sequence
  Description of Artificial Sequence: Synthetic oligonucleotide
  Antisense strand to SEQ ID NO: 1217070
ucagcaagaagaagucccu

SEQ ID NO: 1217072 - RNA, 19 nt, Artificial Sequence
  Description of Artificial Sequence: Synthetic oligonucleotide
  Sense strand starting at position 3162 of SEQ ID NO: 917205
ccuaguugucugccuguau

SEQ ID NO: 1217073 - RNA, 19 nt, Artificial Sequence
  Description of Artificial Sequence: Synthetic oligonucleotide
  Antisense strand to SEQ ID NO: 1217072
auacaggcagacaacuagg

SEQ ID NO: 1217074 - RNA, 19 nt, Artificial Sequence
  Description of Artificial Sequence: Synthetic oligonucleotide
  Sense strand starting at position 3175 of SEQ ID NO: 917205
cuguauugaucucucacuu

SEQ ID NO: 1217075 - RNA, 19 nt, Artificial Sequence
  Description of Artificial Sequence: Synthetic oligonucleotide
  Antisense strand to SEQ ID NO: 1217074
aagugagagaucaauacag

SEQ ID NO: 1217076 - RNA, 19 nt, Artificial Sequence
  Description of Artificial Sequence: Synthetic oligonucleotide
  Sense strand starting at position 3217 of SEQ ID NO: 917205
caagucuucuccuuggaga

SEQ ID NO: 1217077 - RNA, 19 nt, Artificial Sequence
  Description of Artificial Sequence: Synthetic oligonucleotide
  Antisense strand to SEQ ID NO: 1217076
ucuccaaggagaagacuug

SEQ ID NO: 1217078 - RNA, 19 nt, Artificial Sequence
  Description of Artificial Sequence: Synthetic oligonucleotide
  Sense strand starting at position 3218 of SEQ ID NO: 917205
aagucuucuccuuggagaa

SEQ ID NO: 1217079 - RNA, 19 nt, Artificial Sequence
  Description of Artificial Sequence: Synthetic oligonucleotide
  Antisense strand to SEQ ID NO: 1217078
uucuccaaggagaagacuu

SEQ ID NO: 1217080 - RNA, 19 nt, Artificial Sequence
  Description of Artificial Sequence: Synthetic oligonucleotide
  Sense strand starting at position 3219 of SEQ ID NO: 917205
agucuucuccuuggagaag

SEQ ID NO: 1217081 - RNA, 19 nt, Artificial Sequence
  Description of Artificial Sequence: Synthetic oligonucleotide
  Antisense strand to SEQ ID NO: 1217080
cuucuccaaggagaagacu

SEQ ID NO: 1217082 - RNA, 19 nt, Artificial Sequence
  Description of Artificial Sequence: Synthetic oligonucleotide
  Sense strand starting at position 3231 of SEQ ID NO: 917205
ggagaagucuucccuagua

SEQ ID NO: 1217083 - RNA, 19 nt, Artificial Sequence
  Description of Artificial Sequence: Synthetic oligonucleotide
  Antisense strand to SEQ ID NO: 1217082
uacuagggaagacuucucc

SEQ ID NO: 1217084 - RNA, 19 nt, Artificial Sequence
  Description of Artificial Sequence: Synthetic oligonucleotide
  Sense strand starting at position 3233 of SEQ ID NO: 917205
agaagucuucccuaguaca

SEQ ID NO: 1217085 - RNA, 19 nt, Artificial Sequence
  Description of Artificial Sequence: Synthetic oligonucleotide
  Antisense strand to SEQ ID NO: 1217084
uguacuagggaagacuucu

SEQ ID NO: 1217086 - RNA, 19 nt, Artificial Sequence
  Description of Artificial Sequence: Synthetic oligonucleotide
  Sense strand starting at position 3274 of SEQ ID NO: 917205
ccgucaugaggccaaauua

SEQ ID NO: 1217087 - RNA, 19 nt, Artificial Sequence
  Description of Artificial Sequence: Synthetic oligonucleotide
  Antisense strand to SEQ ID NO: 1217086
uaauuuggccucaugacgg

SEQ ID NO: 1217088 - RNA, 19 nt, Artificial Sequence
  Description of Artificial Sequence: Synthetic oligonucleotide
  Sense strand starting at position 3324 of SEQ ID NO: 917205
gcuuuauugagguacagcu

SEQ ID NO: 1217089 - RNA, 19 nt, Artificial Sequence
  Description of Artificial Sequence: Synthetic oligonucleotide
  Antisense strand to SEQ ID NO: 1217088
agcuguaccucaauaaagc

SEQ ID NO: 1217090 - RNA, 19 nt, Artificial Sequence
  Description of Artificial Sequence: Synthetic oligonucleotide
  Sense strand starting at position 3382 of SEQ ID NO: 917205
gguggguuuggacaagugu

SEQ ID NO: 1217091 - RNA, 19 nt, Artificial Sequence
  Description of Artificial Sequence: Synthetic oligonucleotide
  Antisense strand to SEQ ID NO: 1217090
acacuuguccaaacccacc

SEQ ID NO: 1217092 - RNA, 19 nt, Artificial Sequence
  Description of Artificial Sequence: Synthetic oligonucleotide
  Sense strand starting at position 3388 of SEQ ID NO: 917205
uuuggacaaguguauacau

SEQ ID NO: 1217093 - RNA, 19 nt, Artificial Sequence
  Description of Artificial Sequence: Synthetic oligonucleotide
  Antisense strand to SEQ ID NO: 1217092
auguauacacuuguccaaa

SEQ ID NO: 1217094 - RNA, 19 nt, Artificial Sequence
  Description of Artificial Sequence: Synthetic oligonucleotide
  Sense strand starting at position 3405 of SEQ ID NO: 917205
auacacucacguuaucauu

SEQ ID NO: 1217095 - RNA, 19 nt, Artificial Sequence
  Description of Artificial Sequence: Synthetic oligonucleotide
  Antisense strand to SEQ ID NO: 1217094
aaugauaacgugaguguau

SEQ ID NO: 1217096 - RNA, 19 nt, Artificial Sequence
  Description of Artificial Sequence: Synthetic oligonucleotide
  Sense strand starting at position 3411 of SEQ ID NO: 917205
ucacguuaucauuacuaca

SEQ ID NO: 1217097 - RNA, 19 nt, Artificial Sequence
  Description of Artificial Sequence: Synthetic oligonucleotide
  Antisense strand to SEQ ID NO: 1217096
uguaguaaugauaacguga

SEQ ID NO: 1217098 - RNA, 19 nt, Artificial Sequence
  Description of Artificial Sequence: Synthetic oligonucleotide
  Sense strand starting at position 3413 of SEQ ID NO: 917205
acguuaucauuacuacaag

SEQ ID NO: 1217099 - RNA, 19 nt, Artificial Sequence
  Description of Artificial Sequence: Synthetic oligonucleotide
  Antisense strand to SEQ ID NO: 1217098
cuuguaguaaugauaacgu

SEQ ID NO: 1217100 - RNA, 19 nt, Artificial Sequence
  Description of Artificial Sequence: Synthetic oligonucleotide
  Sense strand starting at position 3557 of SEQ ID NO: 917205
uaacuauagucacuggguu

SEQ ID NO: 1217101 - RNA, 19 nt, Artificial Sequence
  Description of Artificial Sequence: Synthetic oligonucleotide
  Antisense strand to SEQ ID NO: 1217100
aacccagugacuauaguua

SEQ ID NO: 1217102 - RNA, 19 nt, Artificial Sequence
  Description of Artificial Sequence: Synthetic oligonucleotide
  Sense strand starting at position 3725 of SEQ ID NO: 917205
uuacguauaagaggaauau

SEQ ID NO: 1217103 - RNA, 19 nt, Artificial Sequence
  Description of Artificial Sequence: Synthetic oligonucleotide
  Antisense strand to SEQ ID NO: 1217102
auauuccucuuauacguaa

SEQ ID NO: 1217104 - RNA, 19 nt, Artificial Sequence
  Description of Artificial Sequence: Synthetic oligonucleotide
  Sense strand starting at position 3757 of SEQ ID NO: 917206
uucugugacuuaucccacu

SEQ ID NO: 1217105 - RNA, 19 nt, Artificial Sequence
  Description of Artificial Sequence: Synthetic oligonucleotide
  Antisense strand to SEQ ID NO: 1217104
agugggauaagucacagaa

SEQ ID NO: 1217106 - RNA, 19 nt, Artificial Sequence
  Description of Artificial Sequence: Synthetic oligonucleotide
  Sense strand starting at position 129 of SEQ ID NO: 917206
agccuuauuguggaauuga

SEQ ID NO: 1217107 - RNA, 19 nt, Artificial Sequence
  Description of Artificial Sequence: Synthetic oligonucleotide
  Antisense strand to SEQ ID NO: 1217106
ucaauuccacaauaaggcu

SEQ ID NO: 1217108 - RNA, 19 nt, Artificial Sequence
  Description of Artificial Sequence: Synthetic oligonucleotide
  Sense strand starting at position 293 of SEQ ID NO: 917206
cuuggucuuguccaugaaa

SEQ ID NO: 1217109 - RNA, 19 nt, Artificial Sequence
  Description of Artificial Sequence: Synthetic oligonucleotide
  Antisense strand to SEQ ID NO: 1217108
uuucauggacaagaccaag

SEQ ID NO: 1217110 - RNA, 19 nt, Artificial Sequence
  Description of Artificial Sequence: Synthetic oligonucleotide
  Sense strand starting at position 296 of SEQ ID NO: 917206
ggucuuguccaugaaauaa

SEQ ID NO: 1217111 - RNA, 19 nt, Artificial Sequence
  Description of Artificial Sequence: Synthetic oligonucleotide
  Antisense strand to SEQ ID NO: 1217110
uuauuucauggacaagacc

SEQ ID NO: 1217112 - RNA, 19 nt, Artificial Sequence
  Description of Artificial Sequence: Synthetic oligonucleotide
  Sense strand starting at position 352 of SEQ ID NO: 917206
cugacagauugggucugau

SEQ ID NO: 1217113 - RNA, 19 nt, Artificial Sequence
  Description of Artificial Sequence: Synthetic oligonucleotide
  Antisense strand to SEQ ID NO: 1217112
aucagacccaaucugucag

SEQ ID NO: 1217114 - RNA, 19 nt, Artificial Sequence
  Description of Artificial Sequence: Synthetic oligonucleotide
  Sense strand starting at position 410 of SEQ ID NO: 917206
accagucaucuguaaacua

SEQ ID NO: 1217115 - RNA, 19 nt, Artificial Sequence
  Description of Artificial Sequence: Synthetic oligonucleotide
  Antisense strand to SEQ ID NO: 1217114
uaguuuacagaugacuggu

SEQ ID NO: 1217116 - RNA, 19 nt, Artificial Sequence
  Description of Artificial Sequence: Synthetic oligonucleotide
  Sense strand starting at position 657 of SEQ ID NO: 917206
aaaguuagugggcauauca

SEQ ID NO: 1217117 - RNA, 19 nt, Artificial Sequence
  Description of Artificial Sequence: Synthetic oligonucleotide
  Antisense strand to SEQ ID NO: 1217116
ugauaugcccacuaacuuu

SEQ ID NO: 1217118 - RNA, 19 nt, Artificial Sequence
  Description of Artificial Sequence: Synthetic oligonucleotide
  Sense strand starting at position 837 of SEQ ID NO: 917206
caggacuagugguucucaa

SEQ ID NO: 1217119 - RNA, 19 nt, Artificial Sequence
  Description of Artificial Sequence: Synthetic oligonucleotide
  Antisense strand to SEQ ID NO: 1217118
uugagaaccacuaguccug

SEQ ID NO: 1217120 - RNA, 19 nt, Artificial Sequence
  Description of Artificial Sequence: Synthetic oligonucleotide
  Sense strand starting at position 848 of SEQ ID NO: 917206
guucucaaacuuuacaguu

SEQ ID NO: 1217121 - RNA, 19 nt, Artificial Sequence
  Description of Artificial Sequence: Synthetic oligonucleotide
  Antisense strand to SEQ ID NO: 1217120
aacuguaaaguuugagaac

SEQ ID NO: 1217122 - RNA, 19 nt, Artificial Sequence
  Description of Artificial Sequence: Synthetic oligonucleotide
  Sense strand starting at position 877 of SEQ ID NO: 917206
acauaaagggcuuguuaaa

SEQ ID NO: 1217123 - RNA, 19 nt, Artificial Sequence
  Description of Artificial Sequence: Synthetic oligonucleotide
  Antisense strand to SEQ ID NO: 1217122
uuuaacaagcccuuuaugu

SEQ ID NO: 1217124 - RNA, 19 nt, Artificial Sequence
  Description of Artificial Sequence: Synthetic oligonucleotide
  Sense strand starting at position 987 of SEQ ID NO: 917206
ugauacuaacauugcuaga

SEQ ID NO: 1217125 - RNA, 19 nt, Artificial Sequence
  Description of Artificial Sequence: Synthetic oligonucleotide
  Antisense strand to SEQ ID NO: 1217124
ucuagcaauguuaguauca

SEQ ID NO: 1217126 - RNA, 19 nt, Artificial Sequence
  Description of Artificial Sequence: Synthetic oligonucleotide
  Sense strand starting at position 1030 of SEQ ID NO: 917206
uuagcagaggucuacugaa

SEQ ID NO: 1217127 - RNA, 19 nt, Artificial Sequence
  Description of Artificial Sequence: Synthetic oligonucleotide
  Antisense strand to SEQ ID NO: 1217126
uucaguagaccucugcuaa

SEQ ID NO: 1217128 - RNA, 19 nt, Artificial Sequence
  Description of Artificial Sequence: Synthetic oligonucleotide
  Sense strand starting at position 1108 of SEQ ID NO: 917206
ggaauuugguuccaaagau

SEQ ID NO: 1217129 - RNA, 19 nt, Artificial Sequence
  Description of Artificial Sequence: Synthetic oligonucleotide
  Antisense strand to SEQ ID NO: 1217128
aucuuuggaaccaaauucc

SEQ ID NO: 1217130 - RNA, 19 nt, Artificial Sequence
  Description of Artificial Sequence: Synthetic oligonucleotide
  Sense strand starting at position 1249 of SEQ ID NO: 917206
gcgcccuuuaccuuguaga

SEQ ID NO: 1217131 - RNA, 19 nt, Artificial Sequence
  Description of Artificial Sequence: Synthetic oligonucleotide
  Antisense strand to SEQ ID NO: 1217130
ucuacaagguaaagggcgc

SEQ ID NO: 1217132 - RNA, 19 nt, Artificial Sequence
  Description of Artificial Sequence: Synthetic oligonucleotide
  Sense strand starting at position 1268 of SEQ ID NO: 917206
cauugauagggaugucaau

SEQ ID NO: 1217133 - RNA, 19 nt, Artificial Sequence
  Description of Artificial Sequence: Synthetic oligonucleotide
  Antisense strand to SEQ ID NO: 1217132
auugacaucccuaucaaug

SEQ ID NO: 1217134 - RNA, 19 nt, Artificial Sequence
  Description of Artificial Sequence: Synthetic oligonucleotide
  Sense strand starting at position 1274 of SEQ ID NO: 917206
uagggaugucaaugacgau

SEQ ID NO: 1217135 - RNA, 19 nt, Artificial Sequence
  Description of Artificial Sequence: Synthetic oligonucleotide
  Antisense strand to SEQ ID NO: 1217134
aucgucauugacaucccua

SEQ ID NO: 1217136 - RNA, 19 nt, Artificial Sequence
  Description of Artificial Sequence: Synthetic oligonucleotide
  Sense strand starting at position 1314 of SEQ ID NO: 917206
caagcuggcgaucaagaua

SEQ ID NO: 1217137 - RNA, 19 nt, Artificial Sequence
  Description of Artificial Sequence: Synthetic oligonucleotide
  Antisense strand to SEQ ID NO: 1217136
uaucuugaucgccagcuug

SEQ ID NO: 1217138 - RNA, 19 nt, Artificial Sequence
  Description of Artificial Sequence: Synthetic oligonucleotide
  Sense strand starting at position 1353 of SEQ ID NO: 917206
cuuguucuuguagauaauu

SEQ ID NO: 1217139 - RNA, 19 nt, Artificial Sequence
  Description of Artificial Sequence: Synthetic oligonucleotide
  Antisense strand to SEQ ID NO: 1217138
aauuaucuacaagaacaag

SEQ ID NO: 1217140 - RNA, 19 nt, Artificial Sequence
  Description of Artificial Sequence: Synthetic oligonucleotide
  Sense strand starting at position 1361 of SEQ ID NO: 917206
uguagauaauucucagaag

SEQ ID NO: 1217141 - RNA, 19 nt, Artificial Sequence
  Description of Artificial Sequence: Synthetic oligonucleotide
  Antisense strand to SEQ ID NO: 1217140
cuucugagaauuaucuaca

SEQ ID NO: 1217142 - RNA, 19 nt, Artificial Sequence
  Description of Artificial Sequence: Synthetic oligonucleotide
  Sense strand starting at position 1607 of SEQ ID NO: 917206
uuaucucugcgguuugcaa

SEQ ID NO: 1217143 - RNA, 19 nt, Artificial Sequence
  Description of Artificial Sequence: Synthetic oligonucleotide
  Antisense strand to SEQ ID NO: 1217142
uugcaaaccgcagagauaa

SEQ ID NO: 1217144 - RNA, 19 nt, Artificial Sequence
  Description of Artificial Sequence: Synthetic oligonucleotide
  Sense strand starting at position 1877 of SEQ ID NO: 917206
gccucuucgccaguaucca

SEQ ID NO: 1217145 - RNA, 19 nt, Artificial Sequence
  Description of Artificial Sequence: Synthetic oligonucleotide
  Antisense strand to SEQ ID NO: 1217144
uggauacuggcgaagaggc

SEQ ID NO: 1217146 - RNA, 19 nt, Artificial Sequence
  Description of Artificial Sequence: Synthetic oligonucleotide
  Sense strand starting at position 2122 of SEQ ID NO: 917206
ggaauacagacacgucuua

SEQ ID NO: 1217147 - RNA, 19 nt, Artificial Sequence
  Description of Artificial Sequence: Synthetic oligonucleotide
  Antisense strand to SEQ ID NO: 1217146
uaagacgugucuguauucc

SEQ ID NO: 1217148 - RNA, 19 nt, Artificial Sequence
  Description of Artificial Sequence: Synthetic oligonucleotide
  Sense strand starting at position 2152 of SEQ ID NO: 917206
gugggaaccgcggaauuaa

SEQ ID NO: 1217149 - RNA, 19 nt, Artificial Sequence
  Description of Artificial Sequence: Synthetic oligonucleotide
  Antisense strand to SEQ ID NO: 1217148
uuaauuccgcgguucccac

SEQ ID NO: 1217150 - RNA, 19 nt, Artificial Sequence
  Description of Artificial Sequence: Synthetic oligonucleotide
  Sense strand starting at position 2191 of SEQ ID NO: 917206
uugugucaagcucugcauu

SEQ ID NO: 1217151 - RNA, 19 nt, Artificial Sequence
  Description of Artificial Sequence: Synthetic oligonucleotide
  Antisense strand to SEQ ID NO: 1217150
aaugcagagcuugacacaa

SEQ ID NO: 1217152 - RNA, 19 nt, Artificial Sequence
  Description of Artificial Sequence: Synthetic oligonucleotide
  Sense strand starting at position 2238 of SEQ ID NO: 917206
gcgauugaacucgaaagac

SEQ ID NO: 1217153 - RNA, 19 nt, Artificial Sequence
  Description of Artificial Sequence: Synthetic oligonucleotide
  Antisense strand to SEQ ID NO: 1217152
gucuuucgaguucaaucgc

SEQ ID NO: 1217154 - RNA, 19 nt, Artificial Sequence
  Description of Artificial Sequence: Synthetic oligonucleotide
  Sense strand starting at position 2711 of SEQ ID NO: 917206
gagaaugccagacagugua

SEQ ID NO: 1217155 - RNA, 19 nt, Artificial Sequence
  Description of Artificial Sequence: Synthetic oligonucleotide
  Antisense strand to SEQ ID NO: 1217154
uacacugucuggcauucuc

SEQ ID NO: 1217156 - RNA, 19 nt, Artificial Sequence
  Description of Artificial Sequence: Synthetic oligonucleotide
  Sense strand starting at position 2927 of SEQ ID NO: 917206
aaaggcuguuuauuuguua

SEQ ID NO: 1217157 - RNA, 19 nt, Artificial Sequence
  Description of Artificial Sequence: Synthetic oligonucleotide
  Antisense strand to SEQ ID NO: 1217156
uaacaaauaaacagccuuu

SEQ ID NO: 1217158 - RNA, 19 nt, Artificial Sequence
  Description of Artificial Sequence: Synthetic oligonucleotide
  Sense strand starting at position 2930 of SEQ ID NO: 917206
ggcuguuuauuuguuagag

SEQ ID NO: 1217159 - RNA, 19 nt, Artificial Sequence
  Description of Artificial Sequence: Synthetic oligonucleotide
  Antisense strand to SEQ ID NO: 1217158
cucuaacaaauaaacagcc

SEQ ID NO: 1217160 - RNA, 19 nt, Artificial Sequence
  Description of Artificial Sequence: Synthetic oligonucleotide
  Sense strand starting at position 3035 of SEQ ID NO: 917206
ugcacugaacgugauaauu

SEQ ID NO: 1217161 - RNA, 19 nt, Artificial Sequence
  Description of Artificial Sequence: Synthetic oligonucleotide
  Antisense strand to SEQ ID NO: 1217160
aauuaucacguucagugca

SEQ ID NO: 1217162 - RNA, 19 nt, Artificial Sequence
  Description of Artificial Sequence: Synthetic oligonucleotide
  Sense strand starting at position 3090 of SEQ ID NO: 917206
aaauguuccgccgcuguga

SEQ ID NO: 1217163 - RNA, 19 nt, Artificial Sequence
  Description of Artificial Sequence: Synthetic oligonucleotide
  Antisense strand to SEQ ID NO: 1217162
ucacagcggcggaacauuu

SEQ ID NO: 1217164 - RNA, 19 nt, Artificial Sequence
  Description of Artificial Sequence: Synthetic oligonucleotide
  Sense strand starting at position 3101 of SEQ ID NO: 917206
cgcugugauauuuaagguu

SEQ ID NO: 1217165 - RNA, 19 nt, Artificial Sequence
  Description of Artificial Sequence: Synthetic oligonucleotide
  Antisense strand to SEQ ID NO: 1217164
aaccuuaaauaucacagcg

SEQ ID NO: 1217166 - RNA, 19 nt, Artificial Sequence
  Description of Artificial Sequence: Synthetic oligonucleotide
  Sense strand starting at position 3349 of SEQ ID NO: 917206
agacuugaugcuuaucgga

SEQ ID NO: 1217167 - RNA, 19 nt, Artificial Sequence
  Description of Artificial Sequence: Synthetic oligonucleotide
  Antisense strand to SEQ ID NO: 1217166
uccgauaagcaucaagucu

SEQ ID NO: 1217168 - RNA, 19 nt, Artificial Sequence
  Description of Artificial Sequence: Synthetic oligonucleotide
  Sense strand starting at position 3356 of SEQ ID NO: 917206
augcuuaucggagacauga

SEQ ID NO: 1217169 - RNA, 19 nt, Artificial Sequence
  Description of Artificial Sequence: Synthetic oligonucleotide
  Antisense strand to SEQ ID NO: 1217168
ucaugucuccgauaagcau

SEQ ID NO: 1217170 - RNA, 19 nt, Artificial Sequence
  Description of Artificial Sequence: Synthetic oligonucleotide
  Sense strand starting at position 3468 of SEQ ID NO: 917206
auguuuaccgcagagagga

SEQ ID NO: 1217171 - RNA, 19 nt, Artificial Sequence
  Description of Artificial Sequence: Synthetic oligonucleotide
  Antisense strand to SEQ ID NO: 1217170
uccucucugcgguaaacau

SEQ ID NO: 1217172 - RNA, 19 nt, Artificial Sequence
  Description of Artificial Sequence: Synthetic oligonucleotide
  Sense strand starting at position 3536 of SEQ ID NO: 917206
ggaagucaggcuuggagau

SEQ ID NO: 1217173 - RNA, 19 nt, Artificial Sequence
  Description of Artificial Sequence: Synthetic oligonucleotide
  Antisense strand to SEQ ID NO: 1217172
aucuccaagccugacuucc

SEQ ID NO: 1217174 - RNA, 19 nt, Artificial Sequence
  Description of Artificial Sequence: Synthetic oligonucleotide
  Sense strand starting at position 3682 of SEQ ID NO: 917206
auguuaguuaauggaauag

SEQ ID NO: 1217175 - RNA, 19 nt, Artificial Sequence
  Description of Artificial Sequence: Synthetic oligonucleotide
  Antisense strand to SEQ ID NO: 1217174
cuauuccauuaacuaacau

SEQ ID NO: 1217176 - RNA, 19 nt, Artificial Sequence
  Description of Artificial Sequence: Synthetic oligonucleotide
  Sense strand starting at position 3785 of SEQ ID NO: 917206
gugaacuuuaagugugaaa

SEQ ID NO: 1217177 - RNA, 19 nt, Artificial Sequence
  Description of Artificial Sequence: Synthetic oligonucleotide
  Antisense strand to SEQ ID NO: 1217176
uuucacacuuaaaguucac

SEQ ID NO: 1217178 - RNA, 19 nt, Artificial Sequence
  Description of Artificial Sequence: Synthetic oligonucleotide
  Sense strand starting at position 3787 of SEQ ID NO: 917206
gaacuuuaagugugaaaug

SEQ ID NO: 1217179 - RNA, 19 nt, Artificial Sequence
  Description of Artificial Sequence: Synthetic oligonucleotide
  Antisense strand to SEQ ID NO: 1217178
cauuucacacuuaaaguuc

SEQ ID NO: 1217180 - RNA, 19 nt, Artificial Sequence
  Description of Artificial Sequence: Synthetic oligonucleotide
  Sense strand starting at position 3797 of SEQ ID NO: 917206
ugugaaaugugguuaggaa

SEQ ID NO: 1217181 - RNA, 19 nt, Artificial Sequence
  Description of Artificial Sequence: Synthetic oligonucleotide
  Antisense strand to SEQ ID NO: 1217180
uuccuaaccacauuucaca

SEQ ID NO: 1217182 - RNA, 19 nt, Artificial Sequence
  Description of Artificial Sequence: Synthetic oligonucleotide
  Sense strand starting at position 3798 of SEQ ID NO: 917206
gugaaaugugguuaggaac

SEQ ID NO: 1217183 - RNA, 19 nt, Artificial Sequence
  Description of Artificial Sequence: Synthetic oligonucleotide
  Antisense strand to SEQ ID NO: 1217182
guuccuaaccacauuucac

SEQ ID NO: 1217184 - RNA, 19 nt, Artificial Sequence
  Description of Artificial Sequence: Synthetic oligonucleotide
  Sense strand starting at position 3965 of SEQ ID NO: 917207
auacaauguugucugaaua

SEQ ID NO: 1217185 - RNA, 19 nt, Artificial Sequence
  Description of Artificial Sequence: Synthetic oligonucleotide
  Antisense strand to SEQ ID NO: 1217184
uauucagacaacauuguau

SEQ ID NO: 1217186 - RNA, 19 nt, Artificial Sequence
  Description of Artificial Sequence: Synthetic oligonucleotide
  Sense strand starting at position 50 of SEQ ID NO: 917207
ugauacuaacauugcuaga

SEQ ID NO: 1217187 - RNA, 19 nt, Artificial Sequence
  Description of Artificial Sequence: Synthetic oligonucleotide
  Antisense strand to SEQ ID NO: 1217186
ucuagcaauguuaguauca

SEQ ID NO: 1217188 - RNA, 19 nt, Artificial Sequence
  Description of Artificial Sequence: Synthetic oligonucleotide
  Sense strand starting at position 93 of SEQ ID NO: 917207
uuagcagaggucuacugaa

SEQ ID NO: 1217189 - RNA, 19 nt, Artificial Sequence
  Description of Artificial Sequence: Synthetic oligonucleotide
  Antisense strand to SEQ ID NO: 1217188
uucaguagaccucugcuaa

SEQ ID NO: 1217190 - RNA, 19 nt, Artificial Sequence
  Description of Artificial Sequence: Synthetic oligonucleotide
  Sense strand starting at position 171 of SEQ ID NO: 917207
ggaauuugguuccaaagau

SEQ ID NO: 1217191 - RNA, 19 nt, Artificial Sequence
  Description of Artificial Sequence: Synthetic oligonucleotide
  Antisense strand to SEQ ID NO: 1217190
aucuuuggaaccaaauucc

SEQ ID NO: 1217192 - RNA, 19 nt, Artificial Sequence
  Description of Artificial Sequence: Synthetic oligonucleotide
  Sense strand starting at position 312 of SEQ ID NO: 917207
gcgcccuuuaccuuguaga

SEQ ID NO: 1217193 - RNA, 19 nt, Artificial Sequence
  Description of Artificial Sequence: Synthetic oligonucleotide
  Antisense strand to SEQ ID NO: 1217192
ucuacaagguaaagggcgc

SEQ ID NO: 1217194 - RNA, 19 nt, Artificial Sequence
  Description of Artificial Sequence: Synthetic oligonucleotide
  Sense strand starting at position 331 of SEQ ID NO: 917207
cauugauagggaugucaau

SEQ ID NO: 1217195 - RNA, 19 nt, Artificial Sequence
  Description of Artificial Sequence: Synthetic oligonucleotide
  Antisense strand to SEQ ID NO: 1217194
auugacaucccuaucaaug

SEQ ID NO: 1217196 - RNA, 19 nt, Artificial Sequence
  Description of Artificial Sequence: Synthetic oligonucleotide
  Sense strand starting at position 337 of SEQ ID NO: 917207
uagggaugucaaugacgau

SEQ ID NO: 1217197 - RNA, 19 nt, Artificial Sequence
  Description of Artificial Sequence: Synthetic oligonucleotide
  Antisense strand to SEQ ID NO: 1217196
aucgucauugacaucccua

SEQ ID NO: 1217198 - RNA, 19 nt, Artificial Sequence
  Description of Artificial Sequence: Synthetic oligonucleotide
  Sense strand starting at position 377 of SEQ ID NO: 917207
caagcuggcgaucaagaua

SEQ ID NO: 1217199 - RNA, 19 nt, Artificial Sequence
  Description of Artificial Sequence: Synthetic oligonucleotide
  Antisense strand to SEQ ID NO: 1217198
uaucuugaucgccagcuug

SEQ ID NO: 1217200 - RNA, 19 nt, Artificial Sequence
  Description of Artificial Sequence: Synthetic oligonucleotide
  Sense strand starting at position 424 of SEQ ID NO: 917207
uguagauaauucucagaag

SEQ ID NO: 1217201 - RNA, 19 nt, Artificial Sequence
  Description of Artificial Sequence: Synthetic oligonucleotide
  Antisense strand to SEQ ID NO: 1217200
cuucugagaauuaucuaca

SEQ ID NO: 1217202 - RNA, 19 nt, Artificial Sequence
  Description of Artificial Sequence: Synthetic oligonucleotide
  Sense strand starting at position 670 of SEQ ID NO: 917207
uuaucucugcgguuugcaa

SEQ ID NO: 1217203 - RNA, 19 nt, Artificial Sequence
  Description of Artificial Sequence: Synthetic oligonucleotide
  Antisense strand to SEQ ID NO: 1217202
uugcaaaccgcagagauaa

SEQ ID NO: 1217204 - RNA, 19 nt, Artificial Sequence
  Description of Artificial Sequence: Synthetic oligonucleotide
  Sense strand starting at position 940 of SEQ ID NO: 917207
gccucuucgccaguaucca

SEQ ID NO: 1217205 - RNA, 19 nt, Artificial Sequence
  Description of Artificial Sequence: Synthetic oligonucleotide
  Antisense strand to SEQ ID NO: 1217204
uggauacuggcgaagaggc

SEQ ID NO: 1217206 - RNA, 19 nt, Artificial Sequence
  Description of Artificial Sequence: Synthetic oligonucleotide
  Sense strand starting at position 1185 of SEQ ID NO: 917207
ggaauacagacacgucuua

SEQ ID NO: 1217207 - RNA, 19 nt, Artificial Sequence
  Description of Artificial Sequence: Synthetic oligonucleotide
  Antisense strand to SEQ ID NO: 1217206
uaagacgugucuguauucc

SEQ ID NO: 1217208 - RNA, 19 nt, Artificial Sequence
  Description of Artificial Sequence: Synthetic oligonucleotide
  Sense strand starting at position 1254 of SEQ ID NO: 917207
uugugucaagcucugcauu

SEQ ID NO: 1217209 - RNA, 19 nt, Artificial Sequence
  Description of Artificial Sequence: Synthetic oligonucleotide
  Antisense strand to SEQ ID NO: 1217208
aaugcagagcuugacacaa

SEQ ID NO: 1217210 - RNA, 19 nt, Artificial Sequence
  Description of Artificial Sequence: Synthetic oligonucleotide
  Sense strand starting at position 1301 of SEQ ID NO: 917207
gcgauugaacucgaaagac

SEQ ID NO: 1217211 - RNA, 19 nt, Artificial Sequence
  Description of Artificial Sequence: Synthetic oligonucleotide
  Antisense strand to SEQ ID NO: 1217210
gucuuucgaguucaaucgc

SEQ ID NO: 1217212 - RNA, 19 nt, Artificial Sequence
  Description of Artificial Sequence: Synthetic oligonucleotide
  Sense strand starting at position 1774 of SEQ ID NO: 917207
gagaaugccagacagugua

SEQ ID NO: 1217213 - RNA, 19 nt, Artificial Sequence
  Description of Artificial Sequence: Synthetic oligonucleotide
  Antisense strand to SEQ ID NO: 1217212
uacacugucuggcauucuc

SEQ ID NO: 1217214 - RNA, 19 nt, Artificial Sequence
  Description of Artificial Sequence: Synthetic oligonucleotide
  Sense strand starting at position 1990 of SEQ ID NO: 917207
aaaggcuguuuauuuguua

SEQ ID NO: 1217215 - RNA, 19 nt, Artificial Sequence
  Description of Artificial Sequence: Synthetic oligonucleotide
  Antisense strand to SEQ ID NO: 1217214
uaacaaauaaacagccuuu

SEQ ID NO: 1217216 - RNA, 19 nt, Artificial Sequence
  Description of Artificial Sequence: Synthetic oligonucleotide
  Sense strand starting at position 1993 of SEQ ID NO: 917207
ggcuguuuauuuguuagag

SEQ ID NO: 1217217 - RNA, 19 nt, Artificial Sequence
  Description of Artificial Sequence: Synthetic oligonucleotide
  Antisense strand to SEQ ID NO: 1217216
cucuaacaaauaaacagcc

SEQ ID NO: 1217218 - RNA, 19 nt, Artificial Sequence
  Description of Artificial Sequence: Synthetic oligonucleotide
  Sense strand starting at position 2153 of SEQ ID NO: 917207
aaauguuccgccgcuguga

SEQ ID NO: 1217219 - RNA, 19 nt, Artificial Sequence
  Description of Artificial Sequence: Synthetic oligonucleotide
  Antisense strand to SEQ ID NO: 1217218
ucacagcggcggaacauuu

SEQ ID NO: 1217220 - RNA, 19 nt, Artificial Sequence
  Description of Artificial Sequence: Synthetic oligonucleotide
  Sense strand starting at position 2164 of SEQ ID NO: 917207
cgcugugauauuuaagguu

SEQ ID NO: 1217221 - RNA, 19 nt, Artificial Sequence
  Description of Artificial Sequence: Synthetic oligonucleotide
  Antisense strand to SEQ ID NO: 1217220
aaccuuaaauaucacagcg

SEQ ID NO: 1217222 - RNA, 19 nt, Artificial Sequence
  Description of Artificial Sequence: Synthetic oligonucleotide
  Sense strand starting at position 2412 of SEQ ID NO: 917207
agacuugaugcuuaucgga

SEQ ID NO: 1217223 - RNA, 19 nt, Artificial Sequence
  Description of Artificial Sequence: Synthetic oligonucleotide
  Antisense strand to SEQ ID NO: 1217222
uccgauaagcaucaagucu

SEQ ID NO: 1217224 - RNA, 19 nt, Artificial Sequence
  Description of Artificial Sequence: Synthetic oligonucleotide
  Sense strand starting at position 2419 of SEQ ID NO: 917207
augcuuaucggagacauga

SEQ ID NO: 1217225 - RNA, 19 nt, Artificial Sequence
  Description of Artificial Sequence: Synthetic oligonucleotide
  Antisense strand to SEQ ID NO: 1217224
ucaugucuccgauaagcau

SEQ ID NO: 1217226 - RNA, 19 nt, Artificial Sequence
  Description of Artificial Sequence: Synthetic oligonucleotide
  Sense strand starting at position 2531 of SEQ ID NO: 917207
auguuuaccgcagagagga

SEQ ID NO: 1217227 - RNA, 19 nt, Artificial Sequence
  Description of Artificial Sequence: Synthetic oligonucleotide
  Antisense strand to SEQ ID NO: 1217226
uccucucugcgguaaacau

SEQ ID NO: 1217228 - RNA, 19 nt, Artificial Sequence
  Description of Artificial Sequence: Synthetic oligonucleotide
  Sense strand starting at position 2599 of SEQ ID NO: 917207
ggaagucaggcuuggagau

SEQ ID NO: 1217229 - RNA, 19 nt, Artificial Sequence
  Description of Artificial Sequence: Synthetic oligonucleotide
  Antisense strand to SEQ ID NO: 1217228
aucuccaagccugacuucc

SEQ ID NO: 1217230 - RNA, 19 nt, Artificial Sequence
  Description of Artificial Sequence: Synthetic oligonucleotide
  Sense strand starting at position 2745 of SEQ ID NO: 917207
auguuaguuaauggaauag

SEQ ID NO: 1217231 - RNA, 19 nt, Artificial Sequence
  Description of Artificial Sequence: Synthetic oligonucleotide
  Antisense strand to SEQ ID NO: 1217230
cuauuccauuaacuaacau

SEQ ID NO: 1217232 - RNA, 19 nt, Artificial Sequence
  Description of Artificial Sequence: Synthetic oligonucleotide
  Sense strand starting at position 2850 of SEQ ID NO: 917207
gaacuuuaagugugaaaug

SEQ ID NO: 1217233 - RNA, 19 nt, Artificial Sequence
  Description of Artificial Sequence: Synthetic oligonucleotide
  Antisense strand to SEQ ID NO: 1217232
cauuucacacuuaaaguuc

SEQ ID NO: 1217234 - RNA, 19 nt, Artificial Sequence
  Description of Artificial Sequence: Synthetic oligonucleotide
  Sense strand starting at position 2861 of SEQ ID NO: 917207
gugaaaugugguuaggaac

SEQ ID NO: 1217235 - RNA, 19 nt, Artificial Sequence
  Description of Artificial Sequence: Synthetic oligonucleotide
  Antisense strand to SEQ ID NO: 1217234
guuccuaaccacauuucac

SEQ ID NO: 1217236 - RNA, 19 nt, Artificial Sequence
  Description of Artificial Sequence: Synthetic oligonucleotide
  Sense strand starting at position 3028 of SEQ ID NO: 917207
auacaauguugucugaaua

SEQ ID NO: 1217237 - RNA, 19 nt, Artificial Sequence
  Description of Artificial Sequence: Synthetic oligonucleotide
  Antisense strand to SEQ ID NO: 1217236
uauucagacaacauuguau

SEQ ID NO: 1217238 - RNA, 19 nt, Artificial Sequence
  Description of Artificial Sequence: Synthetic oligonucleotide
  Sense strand starting at position 3222 of SEQ ID NO: 917207
cacugaguccuggaagucu

SEQ ID NO: 1217239 - RNA, 19 nt, Artificial Sequence
  Description of Artificial Sequence: Synthetic oligonucleotide
  Antisense strand to SEQ ID NO: 1217238
agacuuccaggacucagug

SEQ ID NO: 1217240 - RNA, 19 nt, Artificial Sequence
  Description of Artificial Sequence: Synthetic oligonucleotide
  Sense strand starting at position 3332 of SEQ ID NO: 917207
agacaucuaugggucacua

SEQ ID NO: 1217241 - RNA, 19 nt, Artificial Sequence
  Description of Artificial Sequence: Synthetic oligonucleotide
  Antisense strand to SEQ ID NO: 1217240
uagugacccauagaugucu

SEQ ID NO: 1217242 - RNA, 19 nt, Artificial Sequence
  Description of Artificial Sequence: Synthetic oligonucleotide
  Sense strand starting at position 3334 of SEQ ID NO: 917207
acaucuaugggucacuauu

SEQ ID NO: 1217243 - RNA, 19 nt, Artificial Sequence
  Description of Artificial Sequence: Synthetic oligonucleotide
  Antisense strand to SEQ ID NO: 1217242
aauagugacccauagaugu

SEQ ID NO: 1217244 - RNA, 19 nt, Artificial Sequence
  Description of Artificial Sequence: Synthetic oligonucleotide
  Sense strand starting at position 3336 of SEQ ID NO: 917207
aucuaugggucacuauuga

SEQ ID NO: 1217245 - RNA, 19 nt, Artificial Sequence
  Description of Artificial Sequence: Synthetic oligonucleotide
  Antisense strand to SEQ ID NO: 1217244
ucaauagugacccauagau

SEQ ID NO: 1217246 - RNA, 19 nt, Artificial Sequence
  Description of Artificial Sequence: Synthetic oligonucleotide
  Sense strand starting at position 3350 of SEQ ID NO: 917207
auugauuucgugugacuua

SEQ ID NO: 1217247 - RNA, 19 nt, Artificial Sequence
  Description of Artificial Sequence: Synthetic oligonucleotide
  Antisense strand to SEQ ID NO: 1217246
uaagucacacgaaaucaau

SEQ ID NO: 1217248 - RNA, 19 nt, Artificial Sequence
  Description of Artificial Sequence: Synthetic oligonucleotide
  Sense strand starting at position 3353 of SEQ ID NO: 917207
gauuucgugugacuuaauu

SEQ ID NO: 1217249 - RNA, 19 nt, Artificial Sequence
  Description of Artificial Sequence: Synthetic oligonucleotide
  Antisense strand to SEQ ID NO: 1217248
aauuaagucacacgaaauc

SEQ ID NO: 1217250 - RNA, 19 nt, Artificial Sequence
  Description of Artificial Sequence: Synthetic oligonucleotide
  Sense strand starting at position 3387 of SEQ ID NO: 917207
ggacuugaaugaguuauau

SEQ ID NO: 1217251 - RNA, 19 nt, Artificial Sequence
  Description of Artificial Sequence: Synthetic oligonucleotide
  Antisense strand to SEQ ID NO: 1217250
auauaacucauucaagucc

SEQ ID NO: 1217252 - RNA, 19 nt, Artificial Sequence
  Description of Artificial Sequence: Synthetic oligonucleotide
  Sense strand starting at position 3510 of SEQ ID NO: 917207
ggucauugggcucaagaau

SEQ ID NO: 1217253 - RNA, 19 nt, Artificial Sequence
  Description of Artificial Sequence: Synthetic oligonucleotide
  Antisense strand to SEQ ID NO: 1217252
auucuugagcccaaugacc

SEQ ID NO: 1217254 - RNA, 19 nt, Artificial Sequence
  Description of Artificial Sequence: Synthetic oligonucleotide
  Sense strand starting at position 3641 of SEQ ID NO: 917207
ccucauugauucucugaug

SEQ ID NO: 1217255 - RNA, 19 nt, Artificial Sequence
  Description of Artificial Sequence: Synthetic oligonucleotide
  Antisense strand to SEQ ID NO: 1217254
caucagagaaucaaugagg

SEQ ID NO: 1217256 - RNA, 19 nt, Artificial Sequence
  Description of Artificial Sequence: Synthetic oligonucleotide
  Sense strand starting at position 3689 of SEQ ID NO: 917207
ugauguuauaggcagugaa

SEQ ID NO: 1217257 - RNA, 19 nt, Artificial Sequence
  Description of Artificial Sequence: Synthetic oligonucleotide
  Antisense strand to SEQ ID NO: 1217256
uucacugccuauaacauca

SEQ ID NO: 1217258 - RNA, 19 nt, Artificial Sequence
  Description of Artificial Sequence: Synthetic oligonucleotide
  Sense strand starting at position 3786 of SEQ ID NO: 917207
augucuaaaugguuacaca

SEQ ID NO: 1217259 - RNA, 19 nt, Artificial Sequence
  Description of Artificial Sequence: Synthetic oligonucleotide
  Antisense strand to SEQ ID NO: 1217258
uguguaaccauuuagacau

SEQ ID NO: 1217260 - RNA, 19 nt, Artificial Sequence
  Description of Artificial Sequence: Synthetic oligonucleotide
  Sense strand starting at position 3864 of SEQ ID NO: 917207
gggaaacaguguucuagac

SEQ ID NO: 1217261 - RNA, 19 nt, Artificial Sequence
  Description of Artificial Sequence: Synthetic oligonucleotide
  Antisense strand to SEQ ID NO: 1217260
gucuagaacacuguuuccc

SEQ ID NO: 1217262 - RNA, 19 nt, Artificial Sequence
  Description of Artificial Sequence: Synthetic oligonucleotide
  Sense strand starting at position 3873 of SEQ ID NO: 917207
uguucuagacaucaguaau

SEQ ID NO: 1217263 - RNA, 19 nt, Artificial Sequence
  Description of Artificial Sequence: Synthetic oligonucleotide
  Antisense strand to SEQ ID NO: 1217262
auuacugaugucuagaaca

SEQ ID NO: 1217264 - RNA, 19 nt, Artificial Sequence
  Description of Artificial Sequence: Synthetic oligonucleotide
  Sense strand starting at position 3894 of SEQ ID NO: 917206
gcaauugaaguuuaaccuu

SEQ ID NO: 1217265 - RNA, 19 nt, Artificial Sequence
  Description of Artificial Sequence: Synthetic oligonucleotide
  Antisense strand to SEQ ID NO: 1217264
aagguuaaacuucaauugc

SEQ ID NO: 1217266 - RNA, 19 nt, Artificial Sequence
  Description of Artificial Sequence: Synthetic oligonucleotide
  Sense strand starting at position 3965 of SEQ ID NO: 917208
auacaauguugucugaaua

SEQ ID NO: 1217267 - RNA, 19 nt, Artificial Sequence
  Description of Artificial Sequence: Synthetic oligonucleotide
  Antisense strand to SEQ ID NO: 1217266
uauucagacaacauuguau

SEQ ID NO: 1217268 - RNA, 19 nt, Artificial Sequence
  Description of Artificial Sequence: Synthetic oligonucleotide
  Sense strand starting at position 85 of SEQ ID NO: 917208
agaaccggucagugaaagu

SEQ ID NO: 1217269 - RNA, 19 nt, Artificial Sequence
  Description of Artificial Sequence: Synthetic oligonucleotide
  Antisense strand to SEQ ID NO: 1217268
acuuucacugaccgguucu

SEQ ID NO: 1217270 - RNA, 19 nt, Artificial Sequence
  Description of Artificial Sequence: Synthetic oligonucleotide
  Sense strand starting at position 154 of SEQ ID NO: 917208
cgcgauuccgcauggaaga

SEQ ID NO: 1217271 - RNA, 19 nt, Artificial Sequence
  Description of Artificial Sequence: Synthetic oligonucleotide
  Antisense strand to SEQ ID NO: 1217270
ucuuccaugcggaaucgcg

SEQ ID NO: 1217272 - RNA, 19 nt, Artificial Sequence
  Description of Artificial Sequence: Synthetic oligonucleotide
  Sense strand starting at position 321 of SEQ ID NO: 917208
ccggcaucgaugcaaagau

SEQ ID NO: 1217273 - RNA, 19 nt, Artificial Sequence
  Description of Artificial Sequence: Synthetic oligonucleotide
  Antisense strand to SEQ ID NO: 1217272
aucuuugcaucgaugccgg

SEQ ID NO: 1217274 - RNA, 19 nt, Artificial Sequence
  Description of Artificial Sequence: Synthetic oligonucleotide
  Sense strand starting at position 428 of SEQ ID NO: 917208
cuaaguaacuucuccguau

SEQ ID NO: 1217275 - RNA, 19 nt, Artificial Sequence
  Description of Artificial Sequence: Synthetic oligonucleotide
  Antisense strand to SEQ ID NO: 1217274
auacggagaaguuacuuag

SEQ ID NO: 1217276 - RNA, 19 nt, Artificial Sequence
  Description of Artificial Sequence: Synthetic oligonucleotide
  Sense strand starting at position 429 of SEQ ID NO: 917208
uaaguaacuucuccguaug

SEQ ID NO: 1217277 - RNA, 19 nt, Artificial Sequence
  Description of Artificial Sequence: Synthetic oligonucleotide
  Antisense strand to SEQ ID NO: 1217276
cauacggagaaguuacuua

SEQ ID NO: 1217278 - RNA, 19 nt, Artificial Sequence
  Description of Artificial Sequence: Synthetic oligonucleotide
  Sense strand starting at position 430 of SEQ ID NO: 917208
aaguaacuucuccguauga

SEQ ID NO: 1217279 - RNA, 19 nt, Artificial Sequence
  Description of Artificial Sequence: Synthetic oligonucleotide
  Antisense strand to SEQ ID NO: 1217278
ucauacggagaaguuacuu

SEQ ID NO: 1217280 - RNA, 19 nt, Artificial Sequence
  Description of Artificial Sequence: Synthetic oligonucleotide
  Sense strand starting at position 432 of SEQ ID NO: 917208
guaacuucuccguaugagc

SEQ ID NO: 1217281 - RNA, 19 nt, Artificial Sequence
  Description of Artificial Sequence: Synthetic oligonucleotide
  Antisense strand to SEQ ID NO: 1217280
gcucauacggagaaguuac

SEQ ID NO: 1217282 - RNA, 19 nt, Artificial Sequence
  Description of Artificial Sequence: Synthetic oligonucleotide
  Sense strand starting at position 440 of SEQ ID NO: 917208
uccguaugagcgguguuga

SEQ ID NO: 1217283 - RNA, 19 nt, Artificial Sequence
  Description of Artificial Sequence: Synthetic oligonucleotide
  Antisense strand to SEQ ID NO: 1217282
ucaacaccgcucauacgga

SEQ ID NO: 1217284 - RNA, 19 nt, Artificial Sequence
  Description of Artificial Sequence: Synthetic oligonucleotide
  Sense strand starting at position 441 of SEQ ID NO: 917208
ccguaugagcgguguugaa

SEQ ID NO: 1217285 - RNA, 19 nt, Artificial Sequence
  Description of Artificial Sequence: Synthetic oligonucleotide
  Antisense strand to SEQ ID NO: 1217284
uucaacaccgcucauacgg

SEQ ID NO: 1217286 - RNA, 19 nt, Artificial Sequence
  Description of Artificial Sequence: Synthetic oligonucleotide
  Sense strand starting at position 495 of SEQ ID NO: 917208
ccgauuuguaaccgacguu

SEQ ID NO: 1217287 - RNA, 19 nt, Artificial Sequence
  Description of Artificial Sequence: Synthetic oligonucleotide
  Antisense strand to SEQ ID NO: 1217286
aacgucgguuacaaaucgg

SEQ ID NO: 1217288 - RNA, 19 nt, Artificial Sequence
  Description of Artificial Sequence: Synthetic oligonucleotide
  Sense strand starting at position 496 of SEQ ID NO: 917208
cgauuuguaaccgacguuu

SEQ ID NO: 1217289 - RNA, 19 nt, Artificial Sequence
  Description of Artificial Sequence: Synthetic oligonucleotide
  Antisense strand to SEQ ID NO: 1217288
aaacgucgguuacaaaucg

SEQ ID NO: 1217290 - RNA, 19 nt, Artificial Sequence
  Description of Artificial Sequence: Synthetic oligonucleotide
  Sense strand starting at position 529 of SEQ ID NO: 917208
aagggauucuugguuaaca

SEQ ID NO: 1217291 - RNA, 19 nt, Artificial Sequence
  Description of Artificial Sequence: Synthetic oligonucleotide
  Antisense strand to SEQ ID NO: 1217290
uguuaaccaagaaucccuu

SEQ ID NO: 1217292 - RNA, 19 nt, Artificial Sequence
  Description of Artificial Sequence: Synthetic oligonucleotide
  Sense strand starting at position 530 of SEQ ID NO: 917208
agggauucuugguuaacau

SEQ ID NO: 1217293 - RNA, 19 nt, Artificial Sequence
  Description of Artificial Sequence: Synthetic oligonucleotide
  Antisense strand to SEQ ID NO: 1217292
auguuaaccaagaaucccu

SEQ ID NO: 1217294 - RNA, 19 nt, Artificial Sequence
  Description of Artificial Sequence: Synthetic oligonucleotide
  Sense strand starting at position 541 of SEQ ID NO: 917208
guuaacauguuagugaauu

SEQ ID NO: 1217295 - RNA, 19 nt, Artificial Sequence
  Description of Artificial Sequence: Synthetic oligonucleotide
  Antisense strand to SEQ ID NO: 1217294
aauucacuaacauguuaac

SEQ ID NO: 1217296 - RNA, 19 nt, Artificial Sequence
  Description of Artificial Sequence: Synthetic oligonucleotide
  Sense strand starting at position 600 of SEQ ID NO: 917208
agacgugauuucuaaauca

SEQ ID NO: 1217297 - RNA, 19 nt, Artificial Sequence
  Description of Artificial Sequence: Synthetic oligonucleotide
  Antisense strand to SEQ ID NO: 1217296
ugauuuagaaaucacgucu

SEQ ID NO: 1217298 - RNA, 19 nt, Artificial Sequence
  Description of Artificial Sequence: Synthetic oligonucleotide
  Sense strand starting at position 714 of SEQ ID NO: 917208
accagcuaaugucugcaua

SEQ ID NO: 1217299 - RNA, 19 nt, Artificial Sequence
  Description of Artificial Sequence: Synthetic oligonucleotide
  Antisense strand to SEQ ID NO: 1217298
uaugcagacauuagcuggu

SEQ ID NO: 1217300 - RNA, 19 nt, Artificial Sequence
  Description of Artificial Sequence: Synthetic oligonucleotide
  Sense strand starting at position 717 of SEQ ID NO: 917208
agcuaaugucugcauacuu

SEQ ID NO: 1217301 - RNA, 19 nt, Artificial Sequence
  Description of Artificial Sequence: Synthetic oligonucleotide
  Antisense strand to SEQ ID NO: 1217300
aaguaugcagacauuagcu

SEQ ID NO: 1217302 - RNA, 19 nt, Artificial Sequence
  Description of Artificial Sequence: Synthetic oligonucleotide
  Sense strand starting at position 742 of SEQ ID NO: 917208
caaguuucccgagacuaca

SEQ ID NO: 1217303 - RNA, 19 nt, Artificial Sequence
  Description of Artificial Sequence: Synthetic oligonucleotide
  Antisense strand to SEQ ID NO: 1217302
uguagucucgggaaacuug

SEQ ID NO: 1217304 - RNA, 19 nt, Artificial Sequence
  Description of Artificial Sequence: Synthetic oligonucleotide
  Sense strand starting at position 786 of SEQ ID NO: 917208
uuggcugugauucgaaaua

SEQ ID NO: 1217305 - RNA, 19 nt, Artificial Sequence
  Description of Artificial Sequence: Synthetic oligonucleotide
  Antisense strand to SEQ ID NO: 1217304
uauuucgaaucacagccaa

SEQ ID NO: 1217306 - RNA, 19 nt, Artificial Sequence
  Description of Artificial Sequence: Synthetic oligonucleotide
  Sense strand starting at position 827 of SEQ ID NO: 917208
cccagaugacuacgaguua

SEQ ID NO: 1217307 - RNA, 19 nt, Artificial Sequence
  Description of Artificial Sequence: Synthetic oligonucleotide
  Antisense strand to SEQ ID NO: 1217306
uaacucguagucaucuggg

SEQ ID NO: 1217308 - RNA, 19 nt, Artificial Sequence
  Description of Artificial Sequence: Synthetic oligonucleotide
  Sense strand starting at position 828 of SEQ ID NO: 917208
ccagaugacuacgaguuau

SEQ ID NO: 1217309 - RNA, 19 nt, Artificial Sequence
  Description of Artificial Sequence: Synthetic oligonucleotide
  Antisense strand to SEQ ID NO: 1217308
auaacucguagucaucugg

SEQ ID NO: 1217310 - RNA, 19 nt, Artificial Sequence
  Description of Artificial Sequence: Synthetic oligonucleotide
  Sense strand starting at position 1204 of SEQ ID NO: 917208
gcccgaguucuccugcgaa

SEQ ID NO: 1217311 - RNA, 19 nt, Artificial Sequence
  Description of Artificial Sequence: Synthetic oligonucleotide
  Antisense strand to SEQ ID NO: 1217310
uucgcaggagaacucgggc

SEQ ID NO: 1217312 - RNA, 19 nt, Artificial Sequence
  Description of Artificial Sequence: Synthetic oligonucleotide
  Sense strand starting at position 1206 of SEQ ID NO: 917208
ccgaguucuccugcgaagc

SEQ ID NO: 1217313 - RNA, 19 nt, Artificial Sequence
  Description of Artificial Sequence: Synthetic oligonucleotide
  Antisense strand to SEQ ID NO: 1217312
gcuucgcaggagaacucgg

SEQ ID NO: 1217314 - RNA, 19 nt, Artificial Sequence
  Description of Artificial Sequence: Synthetic oligonucleotide
  Sense strand starting at position 1207 of SEQ ID NO: 917208
cgaguucuccugcgaagca

SEQ ID NO: 1217315 - RNA, 19 nt, Artificial Sequence
  Description of Artificial Sequence: Synthetic oligonucleotide
  Antisense strand to SEQ ID NO: 1217314
ugcuucgcaggagaacucg

SEQ ID NO: 1217316 - RNA, 19 nt, Artificial Sequence
  Description of Artificial Sequence: Synthetic oligonucleotide
  Sense strand starting at position 1640 of SEQ ID NO: 917208
ggagucuccaccuagugaa

SEQ ID NO: 1217317 - RNA, 19 nt, Artificial Sequence
  Description of Artificial Sequence: Synthetic oligonucleotide
  Antisense strand to SEQ ID NO: 1217316
uucacuagguggagacucc

SEQ ID NO: 1217318 - RNA, 19 nt, Artificial Sequence
  Description of Artificial Sequence: Synthetic oligonucleotide
  Sense strand starting at position 1799 of SEQ ID NO: 917208
uuacuuggaguucgaggaa

SEQ ID NO: 1217319 - RNA, 19 nt, Artificial Sequence
  Description of Artificial Sequence: Synthetic oligonucleotide
  Antisense strand to SEQ ID NO: 1217318
uuccucgaacuccaaguaa

SEQ ID NO: 1217320 - RNA, 19 nt, Artificial Sequence
  Description of Artificial Sequence: Synthetic oligonucleotide
  Sense strand starting at position 1802 of SEQ ID NO: 917208
cuuggaguucgaggaauuc

SEQ ID NO: 1217321 - RNA, 19 nt, Artificial Sequence
  Description of Artificial Sequence: Synthetic oligonucleotide
  Antisense strand to SEQ ID NO: 1217320
gaauuccucgaacuccaag

SEQ ID NO: 1217322 - RNA, 19 nt, Artificial Sequence
  Description of Artificial Sequence: Synthetic oligonucleotide
  Sense strand starting at position 1819 of SEQ ID NO: 917208
uccaauagauaggcucuaa

SEQ ID NO: 1217323 - RNA, 19 nt, Artificial Sequence
  Description of Artificial Sequence: Synthetic oligonucleotide
  Antisense strand to SEQ ID NO: 1217322
uuagagccuaucuauugga

SEQ ID NO: 1217324 - RNA, 19 nt, Artificial Sequence
  Description of Artificial Sequence: Synthetic oligonucleotide
  Sense strand starting at position 1844 of SEQ ID NO: 917208
cgauuuggaaaucgcaguu

SEQ ID NO: 1217325 - RNA, 19 nt, Artificial Sequence
  Description of Artificial Sequence: Synthetic oligonucleotide
  Antisense strand to SEQ ID NO: 1217324
aacugcgauuuccaaaucg

SEQ ID NO: 1217326 - RNA, 19 nt, Artificial Sequence
  Description of Artificial Sequence: Synthetic oligonucleotide
  Sense strand starting at position 1853 of SEQ ID NO: 917208
aaucgcaguucugcauaaa

SEQ ID NO: 1217327 - RNA, 19 nt, Artificial Sequence
  Description of Artificial Sequence: Synthetic oligonucleotide
  Antisense strand to SEQ ID NO: 1217326
uuuaugcagaacugcgauu

SEQ ID NO: 1217328 - RNA, 19 nt, Artificial Sequence
  Description of Artificial Sequence: Synthetic oligonucleotide
  Sense strand starting at position 2331 of SEQ ID NO: 917208
gccgccugugacuauagau

SEQ ID NO: 1217329 - RNA, 19 nt, Artificial Sequence
  Description of Artificial Sequence: Synthetic oligonucleotide
  Antisense strand to SEQ ID NO: 1217328
aucuauagucacaggcggc

SEQ ID NO: 1217330 - RNA, 19 nt, Artificial Sequence
  Description of Artificial Sequence: Synthetic oligonucleotide
  Sense strand starting at position 2633 of SEQ ID NO: 917208
cgcugucagagcgcuauaa

SEQ ID NO: 1217331 - RNA, 19 nt, Artificial Sequence
  Description of Artificial Sequence: Synthetic oligonucleotide
  Antisense strand to SEQ ID NO: 1217330
uuauagcgcucugacagcg

SEQ ID NO: 1217332 - RNA, 19 nt, Artificial Sequence
  Description of Artificial Sequence: Synthetic oligonucleotide
  Sense strand starting at position 2635 of SEQ ID NO: 917208
cugucagagcgcuauaaac

SEQ ID NO: 1217333 - RNA, 19 nt, Artificial Sequence
  Description of Artificial Sequence: Synthetic oligonucleotide
  Antisense strand to SEQ ID NO: 1217332
guuuauagcgcucugacag

SEQ ID NO: 1217334 - RNA, 19 nt, Artificial Sequence
  Description of Artificial Sequence: Synthetic oligonucleotide
  Sense strand starting at position 2991 of SEQ ID NO: 917208
cggcuuucccucgagcagu

SEQ ID NO: 1217335 - RNA, 19 nt, Artificial Sequence
  Description of Artificial Sequence: Synthetic oligonucleotide
  Antisense strand to SEQ ID NO: 1217334
acugcucgagggaaagccg

SEQ ID NO: 1217336 - RNA, 19 nt, Artificial Sequence
  Description of Artificial Sequence: Synthetic oligonucleotide
  Sense strand starting at position 3140 of SEQ ID NO: 917208
gagggcuucucacuugauu

SEQ ID NO: 1217337 - RNA, 19 nt, Artificial Sequence
  Description of Artificial Sequence: Synthetic oligonucleotide
  Antisense strand to SEQ ID NO: 1217336
aaucaagugagaagcccuc

SEQ ID NO: 1217338 - RNA, 19 nt, Artificial Sequence
  Description of Artificial Sequence: Synthetic oligonucleotide
  Sense strand starting at position 3200 of SEQ ID NO: 917208
cgggaauugcaagacgauu

SEQ ID NO: 1217339 - RNA, 19 nt, Artificial Sequence
  Description of Artificial Sequence: Synthetic oligonucleotide
  Antisense strand to SEQ ID NO: 1217338
aaucgucuugcaauucccg

SEQ ID NO: 1217340 - RNA, 19 nt, Artificial Sequence
  Description of Artificial Sequence: Synthetic oligonucleotide
  Sense strand starting at position 3381 of SEQ ID NO: 917208
cucacuagccucuaggaga

SEQ ID NO: 1217341 - RNA, 19 nt, Artificial Sequence
  Description of Artificial Sequence: Synthetic oligonucleotide
  Antisense strand to SEQ ID NO: 1217340
ucuccuagaggcuagugag

SEQ ID NO: 1217342 - RNA, 19 nt, Artificial Sequence
  Description of Artificial Sequence: Synthetic oligonucleotide
  Sense strand starting at position 3503 of SEQ ID NO: 917208
gcaggaacuccucgcuacu

SEQ ID NO: 1217343 - RNA, 19 nt, Artificial Sequence
  Description of Artificial Sequence: Synthetic oligonucleotide
  Antisense strand to SEQ ID NO: 1217342
aguagcgaggaguuccugc

SEQ ID NO: 1217344 - RNA, 19 nt, Artificial Sequence
  Description of Artificial Sequence: Synthetic oligonucleotide
  Sense strand starting at position 3940 of SEQ ID NO: 917208
uguaacaauuucugaagau

SEQ ID NO: 1217345 - RNA, 19 nt, Artificial Sequence
  Description of Artificial Sequence: Synthetic oligonucleotide
  Antisense strand to SEQ ID NO: 1217344
aucuucagaaauuguuaca

SEQ ID NO: 1217346 - RNA, 19 nt, Artificial Sequence
  Description of Artificial Sequence: Synthetic oligonucleotide
  Sense strand starting at position 3941 of SEQ ID NO: 917209
guaacaauuucugaagauu

SEQ ID NO: 1217347 - RNA, 19 nt, Artificial Sequence
  Description of Artificial Sequence: Synthetic oligonucleotide
  Antisense strand to SEQ ID NO: 1217346
aaucuucagaaauuguuac

SEQ ID NO: 1217348 - RNA, 19 nt, Artificial Sequence
  Description of Artificial Sequence: Synthetic oligonucleotide
  Sense strand starting at position 298 of SEQ ID NO: 917209
uguuccaaagagugucaaa

SEQ ID NO: 1217349 - RNA, 19 nt, Artificial Sequence
  Description of Artificial Sequence: Synthetic oligonucleotide
  Antisense strand to SEQ ID NO: 1217348
uuugacacucuuuggaaca

SEQ ID NO: 1217350 - RNA, 19 nt, Artificial Sequence
  Description of Artificial Sequence: Synthetic oligonucleotide
  Sense strand starting at position 323 of SEQ ID NO: 917209
auaacuagagcauauuagu

SEQ ID NO: 1217351 - RNA, 19 nt, Artificial Sequence
  Description of Artificial Sequence: Synthetic oligonucleotide
  Antisense strand to SEQ ID NO: 1217350
acuaauaugcucuaguuau

SEQ ID NO: 1217352 - RNA, 19 nt, Artificial Sequence
  Description of Artificial Sequence: Synthetic oligonucleotide
  Sense strand starting at position 367 of SEQ ID NO: 917209
cugcuacauccugagauca

SEQ ID NO: 1217353 - RNA, 19 nt, Artificial Sequence
  Description of Artificial Sequence: Synthetic oligonucleotide
  Antisense strand to SEQ ID NO: 1217352
ugaucucaggauguagcag

SEQ ID NO: 1217354 - RNA, 19 nt, Artificial Sequence
  Description of Artificial Sequence: Synthetic oligonucleotide
  Sense strand starting at position 431 of SEQ ID NO: 917209
uuaagagggcugcauagua

SEQ ID NO: 1217355 - RNA, 19 nt, Artificial Sequence
  Description of Artificial Sequence: Synthetic oligonucleotide
  Antisense strand to SEQ ID NO: 1217354
uacuaugcagcccucuuaa

SEQ ID NO: 1217356 - RNA, 19 nt, Artificial Sequence
  Description of Artificial Sequence: Synthetic oligonucleotide
  Sense strand starting at position 533 of SEQ ID NO: 917209
uuguauugucucuagauua

SEQ ID NO: 1217357 - RNA, 19 nt, Artificial Sequence
  Description of Artificial Sequence: Synthetic oligonucleotide
  Antisense strand to SEQ ID NO: 1217356
uaaucuagagacaauacaa

SEQ ID NO: 1217358 - RNA, 19 nt, Artificial Sequence
  Description of Artificial Sequence: Synthetic oligonucleotide
  Sense strand starting at position 610 of SEQ ID NO: 917209
uguuauccucccuagucaa

SEQ ID NO: 1217359 - RNA, 19 nt, Artificial Sequence
  Description of Artificial Sequence: Synthetic oligonucleotide
  Antisense strand to SEQ ID NO: 1217358
uugacuagggaggauaaca

SEQ ID NO: 1217360 - RNA, 19 nt, Artificial Sequence
  Description of Artificial Sequence: Synthetic oligonucleotide
  Sense strand starting at position 795 of SEQ ID NO: 917209
guaacuauguuuccagaau

SEQ ID NO: 1217361 - RNA, 19 nt, Artificial Sequence
  Description of Artificial Sequence: Synthetic oligonucleotide
  Antisense strand to SEQ ID NO: 1217360
auucuggaaacauaguuac

SEQ ID NO: 1217362 - RNA, 19 nt, Artificial Sequence
  Description of Artificial Sequence: Synthetic oligonucleotide
  Sense strand starting at position 845 of SEQ ID NO: 917209
aaauuagguguugagcauu

SEQ ID NO: 1217363 - RNA, 19 nt, Artificial Sequence
  Description of Artificial Sequence: Synthetic oligonucleotide
  Antisense strand to SEQ ID NO: 1217362
aaugcucaacaccuaauuu

SEQ ID NO: 1217364 - RNA, 19 nt, Artificial Sequence
  Description of Artificial Sequence: Synthetic oligonucleotide
  Sense strand starting at position 887 of SEQ ID NO: 917209
acuuuagguugguucucaa

SEQ ID NO: 1217365 - RNA, 19 nt, Artificial Sequence
  Description of Artificial Sequence: Synthetic oligonucleotide
  Antisense strand to SEQ ID NO: 1217364
uugagaaccaaccuaaagu

SEQ ID NO: 1217366 - RNA, 19 nt, Artificial Sequence
  Description of Artificial Sequence: Synthetic oligonucleotide
  Sense strand starting at position 1097 of SEQ ID NO: 917209
uuagauccuuuacucagua

SEQ ID NO: 1217367 - RNA, 19 nt, Artificial Sequence
  Description of Artificial Sequence: Synthetic oligonucleotide
  Antisense strand to SEQ ID NO: 1217366
uacugaguaaaggaucuaa

SEQ ID NO: 1217368 - RNA, 19 nt, Artificial Sequence
  Description of Artificial Sequence: Synthetic oligonucleotide
  Sense strand starting at position 1209 of SEQ ID NO: 917209
ccucauucugcagaugaug

SEQ ID NO: 1217369 - RNA, 19 nt, Artificial Sequence
  Description of Artificial Sequence: Synthetic oligonucleotide
  Antisense strand to SEQ ID NO: 1217368
caucaucugcagaaugagg

SEQ ID NO: 1217370 - RNA, 19 nt, Artificial Sequence
  Description of Artificial Sequence: Synthetic oligonucleotide
  Sense strand starting at position 1269 of SEQ ID NO: 917209
caugcuuuggacugaaaug

SEQ ID NO: 1217371 - RNA, 19 nt, Artificial Sequence
  Description of Artificial Sequence: Synthetic oligonucleotide
  Antisense strand to SEQ ID NO: 1217370
cauuucaguccaaagcaug

SEQ ID NO: 1217372 - RNA, 19 nt, Artificial Sequence
  Description of Artificial Sequence: Synthetic oligonucleotide
  Sense strand starting at position 1274 of SEQ ID NO: 917209
uuuggacugaaaugaugua

SEQ ID NO: 1217373 - RNA, 19 nt, Artificial Sequence
  Description of Artificial Sequence: Synthetic oligonucleotide
  Antisense strand to SEQ ID NO: 1217372
uacaucauuucaguccaaa

SEQ ID NO: 1217374 - RNA, 19 nt, Artificial Sequence
  Description of Artificial Sequence: Synthetic oligonucleotide
  Sense strand starting at position 1314 of SEQ ID NO: 917209
ugucucaucuacuugaaga

SEQ ID NO: 1217375 - RNA, 19 nt, Artificial Sequence
  Description of Artificial Sequence: Synthetic oligonucleotide
  Antisense strand to SEQ ID NO: 1217374
ucuucaaguagaugagaca

SEQ ID NO: 1217376 - RNA, 19 nt, Artificial Sequence
  Description of Artificial Sequence: Synthetic oligonucleotide
  Sense strand starting at position 1330 of SEQ ID NO: 917209
agaaguagcccaugauuac

SEQ ID NO: 1217377 - RNA, 19 nt, Artificial Sequence
  Description of Artificial Sequence: Synthetic oligonucleotide
  Antisense strand to SEQ ID NO: 1217376
guaaucaugggcuacuucu

SEQ ID NO: 1217378 - RNA, 19 nt, Artificial Sequence
  Description of Artificial Sequence: Synthetic oligonucleotide
  Sense strand starting at position 1331 of SEQ ID NO: 917209
gaaguagcccaugauuaca

SEQ ID NO: 1217379 - RNA, 19 nt, Artificial Sequence
  Description of Artificial Sequence: Synthetic oligonucleotide
  Antisense strand to SEQ ID NO: 1217378
uguaaucaugggcuacuuc

SEQ ID NO: 1217380 - RNA, 19 nt, Artificial Sequence
  Description of Artificial Sequence: Synthetic oligonucleotide
  Sense strand starting at position 1377 of SEQ ID NO: 917209
ggcaguauauucucuagaa

SEQ ID NO: 1217381 - RNA, 19 nt, Artificial Sequence
  Description of Artificial Sequence: Synthetic oligonucleotide
  Antisense strand to SEQ ID NO: 1217380
uucuagagaauauacugcc

SEQ ID NO: 1217382 - RNA, 19 nt, Artificial Sequence
  Description of Artificial Sequence: Synthetic oligonucleotide
  Sense strand starting at position 1378 of SEQ ID NO: 917209
gcaguauauucucuagaac

SEQ ID NO: 1217383 - RNA, 19 nt, Artificial Sequence
  Description of Artificial Sequence: Synthetic oligonucleotide
  Antisense strand to SEQ ID NO: 1217382
guucuagagaauauacugc

SEQ ID NO: 1217384 - RNA, 19 nt, Artificial Sequence
  Description of Artificial Sequence: Synthetic oligonucleotide
  Sense strand starting at position 1476 of SEQ ID NO: 917209
agguauuacuuccuuguua

SEQ ID NO: 1217385 - RNA, 19 nt, Artificial Sequence
  Description of Artificial Sequence: Synthetic oligonucleotide
  Antisense strand to SEQ ID NO: 1217384
uaacaaggaaguaauaccu

SEQ ID NO: 1217386 - RNA, 19 nt, Artificial Sequence
  Description of Artificial Sequence: Synthetic oligonucleotide
  Sense strand starting at position 1820 of SEQ ID NO: 917209
ucacguaucaggcagcaaa

SEQ ID NO: 1217387 - RNA, 19 nt, Artificial Sequence
  Description of Artificial Sequence: Synthetic oligonucleotide
  Antisense strand to SEQ ID NO: 1217386
uuugcugccugauacguga

SEQ ID NO: 1217388 - RNA, 19 nt, Artificial Sequence
  Description of Artificial Sequence: Synthetic oligonucleotide
  Sense strand starting at position 1885 of SEQ ID NO: 917209
guaauuguauacccaaguu

SEQ ID NO: 1217389 - RNA, 19 nt, Artificial Sequence
  Description of Artificial Sequence: Synthetic oligonucleotide
  Antisense strand to SEQ ID NO: 1217388
aacuuggguauacaauuac

SEQ ID NO: 1217390 - RNA, 19 nt, Artificial Sequence
  Description of Artificial Sequence: Synthetic oligonucleotide
  Sense strand starting at position 2012 of SEQ ID NO: 917209
aagcucagauuaguuauga

SEQ ID NO: 1217391 - RNA, 19 nt, Artificial Sequence
  Description of Artificial Sequence: Synthetic oligonucleotide
  Antisense strand to SEQ ID NO: 1217390
ucauaacuaaucugagcuu

SEQ ID NO: 1217392 - RNA, 19 nt, Artificial Sequence
  Description of Artificial Sequence: Synthetic oligonucleotide
  Sense strand starting at position 2013 of SEQ ID NO: 917209
agcucagauuaguuaugaa

SEQ ID NO: 1217393 - RNA, 19 nt, Artificial Sequence
  Description of Artificial Sequence: Synthetic oligonucleotide
  Antisense strand to SEQ ID NO: 1217392
uucauaacuaaucugagcu

SEQ ID NO: 1217394 - RNA, 19 nt, Artificial Sequence
  Description of Artificial Sequence: Synthetic oligonucleotide
  Sense strand starting at position 2185 of SEQ ID NO: 917209
cugcuaagaucaucuguca

SEQ ID NO: 1217395 - RNA, 19 nt, Artificial Sequence
  Description of Artificial Sequence: Synthetic oligonucleotide
  Antisense strand to SEQ ID NO: 1217394
ugacagaugaucuuagcag

SEQ ID NO: 1217396 - RNA, 19 nt, Artificial Sequence
  Description of Artificial Sequence: Synthetic oligonucleotide
  Sense strand starting at position 2297 of SEQ ID NO: 917209
agcaauaaugaggguugua

SEQ ID NO: 1217397 - RNA, 19 nt, Artificial Sequence
  Description of Artificial Sequence: Synthetic oligonucleotide
  Antisense strand to SEQ ID NO: 1217396
uacaacccucauuauugcu

SEQ ID NO: 1217398 - RNA, 19 nt, Artificial Sequence
  Description of Artificial Sequence: Synthetic oligonucleotide
  Sense strand starting at position 2300 of SEQ ID NO: 917209
aauaaugaggguuguaauc

SEQ ID NO: 1217399 - RNA, 19 nt, Artificial Sequence
  Description of Artificial Sequence: Synthetic oligonucleotide
  Antisense strand to SEQ ID NO: 1217398
gauuacaacccucauuauu

SEQ ID NO: 1217400 - RNA, 19 nt, Artificial Sequence
  Description of Artificial Sequence: Synthetic oligonucleotide
  Sense strand starting at position 2311 of SEQ ID NO: 917209
uuguaaucgcaauaaagga

SEQ ID NO: 1217401 - RNA, 19 nt, Artificial Sequence
  Description of Artificial Sequence: Synthetic oligonucleotide
  Antisense strand to SEQ ID NO: 1217400
uccuuuauugcgauuacaa

SEQ ID NO: 1217402 - RNA, 19 nt, Artificial Sequence
  Description of Artificial Sequence: Synthetic oligonucleotide
  Sense strand starting at position 2710 of SEQ ID NO: 917209
ugcacuuuacaauaguaga

SEQ ID NO: 1217403 - RNA, 19 nt, Artificial Sequence
  Description of Artificial Sequence: Synthetic oligonucleotide
  Antisense strand to SEQ ID NO: 1217402
ucuacuauuguaaagugca

SEQ ID NO: 1217404 - RNA, 19 nt, Artificial Sequence
  Description of Artificial Sequence: Synthetic oligonucleotide
  Sense strand starting at position 2855 of SEQ ID NO: 917209
ucuuuagguguuuaucaca

SEQ ID NO: 1217405 - RNA, 19 nt, Artificial Sequence
  Description of Artificial Sequence: Synthetic oligonucleotide
  Antisense strand to SEQ ID NO: 1217404
ugugauaaacaccuaaaga

SEQ ID NO: 1217406 - RNA, 19 nt, Artificial Sequence
  Description of Artificial Sequence: Synthetic oligonucleotide
  Sense strand starting at position 3058 of SEQ ID NO: 917209
ggaugaagcugaucuagug

SEQ ID NO: 1217407 - RNA, 19 nt, Artificial Sequence
  Description of Artificial Sequence: Synthetic oligonucleotide
  Antisense strand to SEQ ID NO: 1217406
cacuagaucagcuucaucc

SEQ ID NO: 1217408 - RNA, 19 nt, Artificial Sequence
  Description of Artificial Sequence: Synthetic oligonucleotide
  Sense strand starting at position 3074 of SEQ ID NO: 917209
gugaaucaguuucccugaa

SEQ ID NO: 1217409 - RNA, 19 nt, Artificial Sequence
  Description of Artificial Sequence: Synthetic oligonucleotide
  Antisense strand to SEQ ID NO: 1217408
uucagggaaacugauucac

SEQ ID NO: 1217410 - RNA, 19 nt, Artificial Sequence
  Description of Artificial Sequence: Synthetic oligonucleotide
  Sense strand starting at position 3075 of SEQ ID NO: 917209
ugaaucaguuucccugaaa

SEQ ID NO: 1217411 - RNA, 19 nt, Artificial Sequence
  Description of Artificial Sequence: Synthetic oligonucleotide
  Antisense strand to SEQ ID NO: 1217410
uuucagggaaacugauuca

SEQ ID NO: 1217412 - RNA, 19 nt, Artificial Sequence
  Description of Artificial Sequence: Synthetic oligonucleotide
  Sense strand starting at position 3095 of SEQ ID NO: 917209
cguaaauccagcuaguaug

SEQ ID NO: 1217413 - RNA, 19 nt, Artificial Sequence
  Description of Artificial Sequence: Synthetic oligonucleotide
  Antisense strand to SEQ ID NO: 1217412
cauacuagcuggauuuacg

SEQ ID NO: 1217414 - RNA, 19 nt, Artificial Sequence
  Description of Artificial Sequence: Synthetic oligonucleotide
  Sense strand starting at position 3109 of SEQ ID NO: 917209
guaugugucagccaaauca

SEQ ID NO: 1217415 - RNA, 19 nt, Artificial Sequence
  Description of Artificial Sequence: Synthetic oligonucleotide
  Antisense strand to SEQ ID NO: 1217414
ugauuuggcugacacauac

SEQ ID NO: 1217416 - RNA, 19 nt, Artificial Sequence
  Description of Artificial Sequence: Synthetic oligonucleotide
  Sense strand starting at position 3185 of SEQ ID NO: 917209
ggucaucauggaugacugu

SEQ ID NO: 1217417 - RNA, 19 nt, Artificial Sequence
  Description of Artificial Sequence: Synthetic oligonucleotide
  Antisense strand to SEQ ID NO: 1217416
acagucauccaugaugacc

SEQ ID NO: 1217418 - RNA, 19 nt, Artificial Sequence
  Description of Artificial Sequence: Synthetic oligonucleotide
  Sense strand starting at position 3506 of SEQ ID NO: 917209
acccaauuccucuguagua

SEQ ID NO: 1217419 - RNA, 19 nt, Artificial Sequence
  Description of Artificial Sequence: Synthetic oligonucleotide
  Antisense strand to SEQ ID NO: 1217418
uacuacagaggaauugggu

SEQ ID NO: 1217420 - RNA, 19 nt, Artificial Sequence
  Description of Artificial Sequence: Synthetic oligonucleotide
  Sense strand starting at position 3508 of SEQ ID NO: 917209
ccaauuccucuguaguaga

SEQ ID NO: 1217421 - RNA, 19 nt, Artificial Sequence
  Description of Artificial Sequence: Synthetic oligonucleotide
  Antisense strand to SEQ ID NO: 1217420
ucuacuacagaggaauugg

SEQ ID NO: 1217422 - RNA, 19 nt, Artificial Sequence
  Description of Artificial Sequence: Synthetic oligonucleotide
  Sense strand starting at position 3812 of SEQ ID NO: 917209
cugaauacauguuugagua

SEQ ID NO: 1217423 - RNA, 19 nt, Artificial Sequence
  Description of Artificial Sequence: Synthetic oligonucleotide
  Antisense strand to SEQ ID NO: 1217422
uacucaaacauguauucag

SEQ ID NO: 1217424 - RNA, 19 nt, Artificial Sequence
  Description of Artificial Sequence: Synthetic oligonucleotide
  Sense strand starting at position 3813 of SEQ ID NO: 917209
ugaauacauguuugaguac

SEQ ID NO: 1217425 - RNA, 19 nt, Artificial Sequence
  Description of Artificial Sequence: Synthetic oligonucleotide
  Antisense strand to SEQ ID NO: 1217424
guacucaaacauguauuca

SEQ ID NO: 1217426 - RNA, 19 nt, Artificial Sequence
  Description of Artificial Sequence: Synthetic oligonucleotide
  Sense strand starting at position 3816 of SEQ ID NO: 917210
auacauguuugaguaccaa

SEQ ID NO: 1217427 - RNA, 19 nt, Artificial Sequence
  Description of Artificial Sequence: Synthetic oligonucleotide
  Antisense strand to SEQ ID NO: 1217426
uugguacucaaacauguau

SEQ ID NO: 1217428 - RNA, 19 nt, Artificial Sequence
  Description of Artificial Sequence: Synthetic oligonucleotide
  Sense strand starting at position 37 of SEQ ID NO: 917210
gaggcaguuggacaaucuu

SEQ ID NO: 1217429 - RNA, 19 nt, Artificial Sequence
  Description of Artificial Sequence: Synthetic oligonucleotide
  Antisense strand to SEQ ID NO: 1217428
aagauuguccaacugccuc

SEQ ID NO: 1217430 - RNA, 19 nt, Artificial Sequence
  Description of Artificial Sequence: Synthetic oligonucleotide
  Sense strand starting at position 97 of SEQ ID NO: 917210
aaauuuaauucugaugggu

SEQ ID NO: 1217431 - RNA, 19 nt, Artificial Sequence
  Description of Artificial Sequence: Synthetic oligonucleotide
  Antisense strand to SEQ ID NO: 1217430
acccaucagaauuaaauuu

SEQ ID NO: 1217432 - RNA, 19 nt, Artificial Sequence
  Description of Artificial Sequence: Synthetic oligonucleotide
  Sense strand starting at position 371 of SEQ ID NO: 917210
uuauuugugugccucuuga

SEQ ID NO: 1217433 - RNA, 19 nt, Artificial Sequence
  Description of Artificial Sequence: Synthetic oligonucleotide
  Antisense strand to SEQ ID NO: 1217432
ucaagaggcacacaaauaa

SEQ ID NO: 1217434 - RNA, 19 nt, Artificial Sequence
  Description of Artificial Sequence: Synthetic oligonucleotide
  Sense strand starting at position 698 of SEQ ID NO: 917210
uuaguaagugcauagcaaa

SEQ ID NO: 1217435 - RNA, 19 nt, Artificial Sequence
  Description of Artificial Sequence: Synthetic oligonucleotide
  Antisense strand to SEQ ID NO: 1217434
uuugcuaugcacuuacuaa

SEQ ID NO: 1217436 - RNA, 19 nt, Artificial Sequence
  Description of Artificial Sequence: Synthetic oligonucleotide
  Sense strand starting at position 797 of SEQ ID NO: 917210
ggaaucacugcauauucca

SEQ ID NO: 1217437 - RNA, 19 nt, Artificial Sequence
  Description of Artificial Sequence: Synthetic oligonucleotide
  Antisense strand to SEQ ID NO: 1217436
uggaauaugcagugauucc

SEQ ID NO: 1217438 - RNA, 19 nt, Artificial Sequence
  Description of Artificial Sequence: Synthetic oligonucleotide
  Sense strand starting at position 1075 of SEQ ID NO: 917210
aacuacguuuccuuagaag

SEQ ID NO: 1217439 - RNA, 19 nt, Artificial Sequence
  Description of Artificial Sequence: Synthetic oligonucleotide
  Antisense strand to SEQ ID NO: 1217438
cuucuaaggaaacguaguu

SEQ ID NO: 1217440 - RNA, 19 nt, Artificial Sequence
  Description of Artificial Sequence: Synthetic oligonucleotide
  Sense strand starting at position 1107 of SEQ ID NO: 917210
uaagguuguuacucagaac

SEQ ID NO: 1217441 - RNA, 19 nt, Artificial Sequence
  Description of Artificial Sequence: Synthetic oligonucleotide
  Antisense strand to SEQ ID NO: 1217440
guucugaguaacaaccuua

SEQ ID NO: 1217442 - RNA, 19 nt, Artificial Sequence
  Description of Artificial Sequence: Synthetic oligonucleotide
  Sense strand starting at position 1113 of SEQ ID NO: 917210
uguuacucagaacaaguuu

SEQ ID NO: 1217443 - RNA, 19 nt, Artificial Sequence
  Description of Artificial Sequence: Synthetic oligonucleotide
  Antisense strand to SEQ ID NO: 1217442
aaacuuguucugaguaaca

SEQ ID NO: 1217444 - RNA, 19 nt, Artificial Sequence
  Description of Artificial Sequence: Synthetic oligonucleotide
  Sense strand starting at position 1168 of SEQ ID NO: 917210
guaaaugaaucauucuagu

SEQ ID NO: 1217445 - RNA, 19 nt, Artificial Sequence
  Description of Artificial Sequence: Synthetic oligonucleotide
  Antisense strand to SEQ ID NO: 1217444
acuagaaugauucauuuac

SEQ ID NO: 1217446 - RNA, 19 nt, Artificial Sequence
  Description of Artificial Sequence: Synthetic oligonucleotide
  Sense strand starting at position 1467 of SEQ ID NO: 917210
acaggaauaauacgguuua

SEQ ID NO: 1217447 - RNA, 19 nt, Artificial Sequence
  Description of Artificial Sequence: Synthetic oligonucleotide
  Antisense strand to SEQ ID NO: 1217446
uaaaccguauuauuccugu

SEQ ID NO: 1217448 - RNA, 19 nt, Artificial Sequence
  Description of Artificial Sequence: Synthetic oligonucleotide
  Sense strand starting at position 1643 of SEQ ID NO: 917210
augcuuuagcaagaagauc

SEQ ID NO: 1217449 - RNA, 19 nt, Artificial Sequence
  Description of Artificial Sequence: Synthetic oligonucleotide
  Antisense strand to SEQ ID NO: 1217448
gaucuucuugcuaaagcau

SEQ ID NO: 1217450 - RNA, 19 nt, Artificial Sequence
  Description of Artificial Sequence: Synthetic oligonucleotide
  Sense strand starting at position 2026 of SEQ ID NO: 917210
ggacccaauuauucugcua

SEQ ID NO: 1217451 - RNA, 19 nt, Artificial Sequence
  Description of Artificial Sequence: Synthetic oligonucleotide
  Antisense strand to SEQ ID NO: 1217450
uagcagaauaauugggucc

SEQ ID NO: 1217452 - RNA, 19 nt, Artificial Sequence
  Description of Artificial Sequence: Synthetic oligonucleotide
  Sense strand starting at position 2052 of SEQ ID NO: 917210
caugcaaaucugcagguaa

SEQ ID NO: 1217453 - RNA, 19 nt, Artificial Sequence
  Description of Artificial Sequence: Synthetic oligonucleotide
  Antisense strand to SEQ ID NO: 1217452
uuaccugcagauuugcaug

SEQ ID NO: 1217454 - RNA, 19 nt, Artificial Sequence
  Description of Artificial Sequence: Synthetic oligonucleotide
  Sense strand starting at position 2346 of SEQ ID NO: 917210
auggacuggugaguguaau

SEQ ID NO: 1217455 - RNA, 19 nt, Artificial Sequence
  Description of Artificial Sequence: Synthetic oligonucleotide
  Antisense strand to SEQ ID NO: 1217454
auuacacucaccaguccau

SEQ ID NO: 1217456 - RNA, 19 nt, Artificial Sequence
  Description of Artificial Sequence: Synthetic oligonucleotide
  Sense strand starting at position 2392 of SEQ ID NO: 917210
agagauauauugcuaugua

SEQ ID NO: 1217457 - RNA, 19 nt, Artificial Sequence
  Description of Artificial Sequence: Synthetic oligonucleotide
  Antisense strand to SEQ ID NO: 1217456
uacauagcaauauaucucu

SEQ ID NO: 1217458 - RNA, 19 nt, Artificial Sequence
  Description of Artificial Sequence: Synthetic oligonucleotide
  Sense strand starting at position 2441 of SEQ ID NO: 917210
gaugcagaucuguaaguuc

SEQ ID NO: 1217459 - RNA, 19 nt, Artificial Sequence
  Description of Artificial Sequence: Synthetic oligonucleotide
  Antisense strand to SEQ ID NO: 1217458
gaacuuacagaucugcauc

SEQ ID NO: 1217460 - RNA, 19 nt, Artificial Sequence
  Description of Artificial Sequence: Synthetic oligonucleotide
  Sense strand starting at position 2514 of SEQ ID NO: 917210
gaauuaaacugguuuacag

SEQ ID NO: 1217461 - RNA, 19 nt, Artificial Sequence
  Description of Artificial Sequence: Synthetic oligonucleotide
  Antisense strand to SEQ ID NO: 1217460
cuguaaaccaguuuaauuc

SEQ ID NO: 1217462 - RNA, 19 nt, Artificial Sequence
  Description of Artificial Sequence: Synthetic oligonucleotide
  Sense strand starting at position 2551 of SEQ ID NO: 917210
cuccaauguuaggaauuua

SEQ ID NO: 1217463 - RNA, 19 nt, Artificial Sequence
  Description of Artificial Sequence: Synthetic oligonucleotide
  Antisense strand to SEQ ID NO: 1217462
uaaauuccuaacauuggag

SEQ ID NO: 1217464 - RNA, 19 nt, Artificial Sequence
  Description of Artificial Sequence: Synthetic oligonucleotide
  Sense strand starting at position 2629 of SEQ ID NO: 917210
aaaguauugguacgaucau

SEQ ID NO: 1217465 - RNA, 19 nt, Artificial Sequence
  Description of Artificial Sequence: Synthetic oligonucleotide
  Antisense strand to SEQ ID NO: 1217464
augaucguaccaauacuuu

SEQ ID NO: 1217466 - RNA, 19 nt, Artificial Sequence
  Description of Artificial Sequence: Synthetic oligonucleotide
  Sense strand starting at position 2667 of SEQ ID NO: 917210
uccaaaugauagcuacagu

SEQ ID NO: 1217467 - RNA, 19 nt, Artificial Sequence
  Description of Artificial Sequence: Synthetic oligonucleotide
  Antisense strand to SEQ ID NO: 1217466
acuguagcuaucauuugga

SEQ ID NO: 1217468 - RNA, 19 nt, Artificial Sequence
  Description of Artificial Sequence: Synthetic oligonucleotide
  Sense strand starting at position 2789 of SEQ ID NO: 917210
gacaacuguggccagugaa

SEQ ID NO: 1217469 - RNA, 19 nt, Artificial Sequence
  Description of Artificial Sequence: Synthetic oligonucleotide
  Antisense strand to SEQ ID NO: 1217468
uucacuggccacaguuguc

SEQ ID NO: 1217470 - RNA, 19 nt, Artificial Sequence
  Description of Artificial Sequence: Synthetic oligonucleotide
  Sense strand starting at position 2887 of SEQ ID NO: 917210
cugggugaauacuuauuaa

SEQ ID NO: 1217471 - RNA, 19 nt, Artificial Sequence
  Description of Artificial Sequence: Synthetic oligonucleotide
  Antisense strand to SEQ ID NO: 1217470
uuaauaaguauucacccag

SEQ ID NO: 1217472 - RNA, 19 nt, Artificial Sequence
  Description of Artificial Sequence: Synthetic oligonucleotide
  Sense strand starting at position 2957 of SEQ ID NO: 917210
uccaaagcgcuugaaauga

SEQ ID NO: 1217473 - RNA, 19 nt, Artificial Sequence
  Description of Artificial Sequence: Synthetic oligonucleotide
  Antisense strand to SEQ ID NO: 1217472
ucauuucaagcgcuuugga

SEQ ID NO: 1217474 - RNA, 19 nt, Artificial Sequence
  Description of Artificial Sequence: Synthetic oligonucleotide
  Sense strand starting at position 3071 of SEQ ID NO: 917210
uuuauucuggcuuaccaga

SEQ ID NO: 1217475 - RNA, 19 nt, Artificial Sequence
  Description of Artificial Sequence: Synthetic oligonucleotide
  Antisense strand to SEQ ID NO: 1217474
ucugguaagccagaauaaa

SEQ ID NO: 1217476 - RNA, 19 nt, Artificial Sequence
  Description of Artificial Sequence: Synthetic oligonucleotide
  Sense strand starting at position 3108 of SEQ ID NO: 917210
agcugucacugacuuagga

SEQ ID NO: 1217477 - RNA, 19 nt, Artificial Sequence
  Description of Artificial Sequence: Synthetic oligonucleotide
  Antisense strand to SEQ ID NO: 1217476
uccuaagucagugacagcu

SEQ ID NO: 1217478 - RNA, 19 nt, Artificial Sequence
  Description of Artificial Sequence: Synthetic oligonucleotide
  Sense strand starting at position 3172 of SEQ ID NO: 917210
cugccugcugucuauuuau

SEQ ID NO: 1217479 - RNA, 19 nt, Artificial Sequence
  Description of Artificial Sequence: Synthetic oligonucleotide
  Antisense strand to SEQ ID NO: 1217478
auaaauagacagcaggcag

SEQ ID NO: 1217480 - RNA, 19 nt, Artificial Sequence
  Description of Artificial Sequence: Synthetic oligonucleotide
  Sense strand starting at position 3178 of SEQ ID NO: 917210
gcugucuauuuauuccuua

SEQ ID NO: 1217481 - RNA, 19 nt, Artificial Sequence
  Description of Artificial Sequence: Synthetic oligonucleotide
  Antisense strand to SEQ ID NO: 1217480
uaaggaauaaauagacagc

SEQ ID NO: 1217482 - RNA, 19 nt, Artificial Sequence
  Description of Artificial Sequence: Synthetic oligonucleotide
  Sense strand starting at position 3310 of SEQ ID NO: 917210
ugucauauuuagcuuacuu

SEQ ID NO: 1217483 - RNA, 19 nt, Artificial Sequence
  Description of Artificial Sequence: Synthetic oligonucleotide
  Antisense strand to SEQ ID NO: 1217482
aaguaagcuaaauaugaca

SEQ ID NO: 1217484 - RNA, 19 nt, Artificial Sequence
  Description of Artificial Sequence: Synthetic oligonucleotide
  Sense strand starting at position 3404 of SEQ ID NO: 917210
ucacuuguucccuggaaag

SEQ ID NO: 1217485 - RNA, 19 nt, Artificial Sequence
  Description of Artificial Sequence: Synthetic oligonucleotide
  Antisense strand to SEQ ID NO: 1217484
cuuuccagggaacaaguga

SEQ ID NO: 1217486 - RNA, 19 nt, Artificial Sequence
  Description of Artificial Sequence: Synthetic oligonucleotide
  Sense strand starting at position 3406 of SEQ ID NO: 917210
acuuguucccuggaaaguu

SEQ ID NO: 1217487 - RNA, 19 nt, Artificial Sequence
  Description of Artificial Sequence: Synthetic oligonucleotide
  Antisense strand to SEQ ID NO: 1217486
aacuuuccagggaacaagu

SEQ ID NO: 1217488 - RNA, 19 nt, Artificial Sequence
  Description of Artificial Sequence: Synthetic oligonucleotide
  Sense strand starting at position 3661 of SEQ ID NO: 917210
uauauaaggucaguaaguu

SEQ ID NO: 1217489 - RNA, 19 nt, Artificial Sequence
  Description of Artificial Sequence: Synthetic oligonucleotide
  Antisense strand to SEQ ID NO: 1217488
aacuuacugaccuuauaua

SEQ ID NO: 1217490 - RNA, 19 nt, Artificial Sequence
  Description of Artificial Sequence: Synthetic oligonucleotide
  Sense strand starting at position 3678 of SEQ ID NO: 917210
uuguaauauucccuaagua

SEQ ID NO: 1217491 - RNA, 19 nt, Artificial Sequence
  Description of Artificial Sequence: Synthetic oligonucleotide
  Antisense strand to SEQ ID NO: 1217490
uacuuagggaauauuacaa

SEQ ID NO: 1217492 - RNA, 19 nt, Artificial Sequence
  Description of Artificial Sequence: Synthetic oligonucleotide
  Sense strand starting at position 3679 of SEQ ID NO: 917210
uguaauauucccuaaguau

SEQ ID NO: 1217493 - RNA, 19 nt, Artificial Sequence
  Description of Artificial Sequence: Synthetic oligonucleotide
  Antisense strand to SEQ ID NO: 1217492
auacuuagggaauauuaca

SEQ ID NO: 1217494 - RNA, 19 nt, Artificial Sequence
  Description of Artificial Sequence: Synthetic oligonucleotide
  Sense strand starting at position 3719 of SEQ ID NO: 917210
ccaagucagcauuaguuua

SEQ ID NO: 1217495 - RNA, 19 nt, Artificial Sequence
  Description of Artificial Sequence: Synthetic oligonucleotide
  Antisense strand to SEQ ID NO: 1217494
uaaacuaaugcugacuugg

SEQ ID NO: 1217496 - RNA, 19 nt, Artificial Sequence
  Description of Artificial Sequence: Synthetic oligonucleotide
  Sense strand starting at position 3724 of SEQ ID NO: 917210
ucagcauuaguuuaagaca

SEQ ID NO: 1217497 - RNA, 19 nt, Artificial Sequence
  Description of Artificial Sequence: Synthetic oligonucleotide
  Antisense strand to SEQ ID NO: 1217496
ugucuuaaacuaaugcuga

SEQ ID NO: 1217498 - RNA, 19 nt, Artificial Sequence
  Description of Artificial Sequence: Synthetic oligonucleotide
  Sense strand starting at position 3753 of SEQ ID NO: 917210
agccaaaguguguaacauc

SEQ ID NO: 1217499 - RNA, 19 nt, Artificial Sequence
  Description of Artificial Sequence: Synthetic oligonucleotide
  Antisense strand to SEQ ID NO: 1217498
gauguuacacacuuuggcu

SEQ ID NO: 1217500 - RNA, 19 nt, Artificial Sequence
  Description of Artificial Sequence: Synthetic oligonucleotide
  Sense strand starting at position 3765 of SEQ ID NO: 917210
uaacaucaagugugugaga

SEQ ID NO: 1217501 - RNA, 19 nt, Artificial Sequence
  Description of Artificial Sequence: Synthetic oligonucleotide
  Antisense strand to SEQ ID NO: 1217500
ucucacacacuugauguua

SEQ ID NO: 1217502 - RNA, 19 nt, Artificial Sequence
  Description of Artificial Sequence: Synthetic oligonucleotide
  Sense strand starting at position 3766 of SEQ ID NO: 917210
aacaucaagugugugagau

SEQ ID NO: 1217503 - RNA, 19 nt, Artificial Sequence
  Description of Artificial Sequence: Synthetic oligonucleotide
  Antisense strand to SEQ ID NO: 1217502
aucucacacacuugauguu

SEQ ID NO: 1217504 - RNA, 19 nt, Artificial Sequence
  Description of Artificial Sequence: Synthetic oligonucleotide
  Sense strand starting at position 3767 of SEQ ID NO: 917210
acaucaagugugugagaug

SEQ ID NO: 1217505 - RNA, 19 nt, Artificial Sequence
  Description of Artificial Sequence: Synthetic oligonucleotide
  Antisense strand to SEQ ID NO: 1217504
caucucacacacuugaugu

SEQ ID NO: 1217506 - RNA, 19 nt, Artificial Sequence
  Description of Artificial Sequence: Synthetic oligonucleotide
  Sense strand starting at position 3976 of SEQ ID NO: 917211
gcuguuccuaaggagauga

SEQ ID NO: 1217507 - RNA, 19 nt, Artificial Sequence
  Description of Artificial Sequence: Synthetic oligonucleotide
  Antisense strand to SEQ ID NO: 1217506
ucaucuccuuaggaacagc

SEQ ID NO: 1217508 - RNA, 19 nt, Artificial Sequence
  Description of Artificial Sequence: Synthetic oligonucleotide
  Sense strand starting at position 7 of SEQ ID NO: 917211
uuaucaguuugagugaacu

SEQ ID NO: 1217509 - RNA, 19 nt, Artificial Sequence
  Description of Artificial Sequence: Synthetic oligonucleotide
  Antisense strand to SEQ ID NO: 1217508
aguucacucaaacugauaa

SEQ ID NO: 1217510 - RNA, 19 nt, Artificial Sequence
  Description of Artificial Sequence: Synthetic oligonucleotide
  Sense strand starting at position 116 of SEQ ID NO: 917211
uacaucagacaggguuaua

SEQ ID NO: 1217511 - RNA, 19 nt, Artificial Sequence
  Description of Artificial Sequence: Synthetic oligonucleotide
  Antisense strand to SEQ ID NO: 1217510
uauaacccugucugaugua

SEQ ID NO: 1217512 - RNA, 19 nt, Artificial Sequence
  Description of Artificial Sequence: Synthetic oligonucleotide
  Sense strand starting at position 316 of SEQ ID NO: 917211
gcagguuuaaggugacuaa

SEQ ID NO: 1217513 - RNA, 19 nt, Artificial Sequence
  Description of Artificial Sequence: Synthetic oligonucleotide
  Antisense strand to SEQ ID NO: 1217512
uuagucaccuuaaaccugc

SEQ ID NO: 1217514 - RNA, 19 nt, Artificial Sequence
  Description of Artificial Sequence: Synthetic oligonucleotide
  Sense strand starting at position 319 of SEQ ID NO: 917211
gguuuaaggugacuaaauc

SEQ ID NO: 1217515 - RNA, 19 nt, Artificial Sequence
  Description of Artificial Sequence: Synthetic oligonucleotide
  Antisense strand to SEQ ID NO: 1217514
gauuuagucaccuuaaacc

SEQ ID NO: 1217516 - RNA, 19 nt, Artificial Sequence
  Description of Artificial Sequence: Synthetic oligonucleotide
  Sense strand starting at position 389 of SEQ ID NO: 917211
ggauaauuccacuggguuu

SEQ ID NO: 1217517 - RNA, 19 nt, Artificial Sequence
  Description of Artificial Sequence: Synthetic oligonucleotide
  Antisense strand to SEQ ID NO: 1217516
aaacccaguggaauuaucc

SEQ ID NO: 1217518 - RNA, 19 nt, Artificial Sequence
  Description of Artificial Sequence: Synthetic oligonucleotide
  Sense strand starting at position 395 of SEQ ID NO: 917211
uuccacuggguuuagaauu

SEQ ID NO: 1217519 - RNA, 19 nt, Artificial Sequence
  Description of Artificial Sequence: Synthetic oligonucleotide
  Antisense strand to SEQ ID NO: 1217518
aauucuaaacccaguggaa

SEQ ID NO: 1217520 - RNA, 19 nt, Artificial Sequence
  Description of Artificial Sequence: Synthetic oligonucleotide
  Sense strand starting at position 401 of SEQ ID NO: 917211
uggguuuagaauuaugagu

SEQ ID NO: 1217521 - RNA, 19 nt, Artificial Sequence
  Description of Artificial Sequence: Synthetic oligonucleotide
  Antisense strand to SEQ ID NO: 1217520
acucauaauucuaaaccca

SEQ ID NO: 1217522 - RNA, 19 nt, Artificial Sequence
  Description of Artificial Sequence: Synthetic oligonucleotide
  Sense strand starting at position 771 of SEQ ID NO: 917211
guuauaaucccacaggucu

SEQ ID NO: 1217523 - RNA, 19 nt, Artificial Sequence
  Description of Artificial Sequence: Synthetic oligonucleotide
  Antisense strand to SEQ ID NO: 1217522
agaccugugggauuauaac

SEQ ID NO: 1217524 - RNA, 19 nt, Artificial Sequence
  Description of Artificial Sequence: Synthetic oligonucleotide
  Sense strand starting at position 1169 of SEQ ID NO: 917211
ugguucuuuguauaaagag

SEQ ID NO: 1217525 - RNA, 19 nt, Artificial Sequence
  Description of Artificial Sequence: Synthetic oligonucleotide
  Antisense strand to SEQ ID NO: 1217524
cucuuuauacaaagaacca

SEQ ID NO: 1217526 - RNA, 19 nt, Artificial Sequence
  Description of Artificial Sequence: Synthetic oligonucleotide
  Sense strand starting at position 1214 of SEQ ID NO: 917211
uuuauauuaugcucugaga

SEQ ID NO: 1217527 - RNA, 19 nt, Artificial Sequence
  Description of Artificial Sequence: Synthetic oligonucleotide
  Antisense strand to SEQ ID NO: 1217526
ucucagagcauaauauaaa

SEQ ID NO: 1217528 - RNA, 19 nt, Artificial Sequence
  Description of Artificial Sequence: Synthetic oligonucleotide
  Sense strand starting at position 1456 of SEQ ID NO: 917211
accacuaggcaaugguaaa

SEQ ID NO: 1217529 - RNA, 19 nt, Artificial Sequence
  Description of Artificial Sequence: Synthetic oligonucleotide
  Antisense strand to SEQ ID NO: 1217528
uuuaccauugccuaguggu

SEQ ID NO: 1217530 - RNA, 19 nt, Artificial Sequence
  Description of Artificial Sequence: Synthetic oligonucleotide
  Sense strand starting at position 1570 of SEQ ID NO: 917211
cugauacugcagcaugaau

SEQ ID NO: 1217531 - RNA, 19 nt, Artificial Sequence
  Description of Artificial Sequence: Synthetic oligonucleotide
  Antisense strand to SEQ ID NO: 1217530
auucaugcugcaguaucag

SEQ ID NO: 1217532 - RNA, 19 nt, Artificial Sequence
  Description of Artificial Sequence: Synthetic oligonucleotide
  Sense strand starting at position 1572 of SEQ ID NO: 917211
gauacugcagcaugaauga

SEQ ID NO: 1217533 - RNA, 19 nt, Artificial Sequence
  Description of Artificial Sequence: Synthetic oligonucleotide
  Antisense strand to SEQ ID NO: 1217532
ucauucaugcugcaguauc

SEQ ID NO: 1217534 - RNA, 19 nt, Artificial Sequence
  Description of Artificial Sequence: Synthetic oligonucleotide
  Sense strand starting at position 1597 of SEQ ID NO: 917211
gggacaagucguuaccaac

SEQ ID NO: 1217535 - RNA, 19 nt, Artificial Sequence
  Description of Artificial Sequence: Synthetic oligonucleotide
  Antisense strand to SEQ ID NO: 1217534
guugguaacgacuuguccc

SEQ ID NO: 1217536 - RNA, 19 nt, Artificial Sequence
  Description of Artificial Sequence: Synthetic oligonucleotide
  Sense strand starting at position 1675 of SEQ ID NO: 917211
aguuauagccucuggaaag

SEQ ID NO: 1217537 - RNA, 19 nt, Artificial Sequence
  Description of Artificial Sequence: Synthetic oligonucleotide
  Antisense strand to SEQ ID NO: 1217536
cuuuccagaggcuauaacu

SEQ ID NO: 1217538 - RNA, 19 nt, Artificial Sequence
  Description of Artificial Sequence: Synthetic oligonucleotide
  Sense strand starting at position 1757 of SEQ ID NO: 917211
auuucuguuguuuggcaaa

SEQ ID NO: 1217539 - RNA, 19 nt, Artificial Sequence
  Description of Artificial Sequence: Synthetic oligonucleotide
  Antisense strand to SEQ ID NO: 1217538
uuugccaaacaacagaaau

SEQ ID NO: 1217540 - RNA, 19 nt, Artificial Sequence
  Description of Artificial Sequence: Synthetic oligonucleotide
  Sense strand starting at position 1764 of SEQ ID NO: 917211
uuguuuggcaaagagauua

SEQ ID NO: 1217541 - RNA, 19 nt, Artificial Sequence
  Description of Artificial Sequence: Synthetic oligonucleotide
  Antisense strand to SEQ ID NO: 1217540
uaaucucuuugccaaacaa

SEQ ID NO: 1217542 - RNA, 19 nt, Artificial Sequence
  Description of Artificial Sequence: Synthetic oligonucleotide
  Sense strand starting at position 1793 of SEQ ID NO: 917211
guguucugucuugcugcaa

SEQ ID NO: 1217543 - RNA, 19 nt, Artificial Sequence
  Description of Artificial Sequence: Synthetic oligonucleotide
  Antisense strand to SEQ ID NO: 1217542
uugcagcaagacagaacac

SEQ ID NO: 1217544 - RNA, 19 nt, Artificial Sequence
  Description of Artificial Sequence: Synthetic oligonucleotide
  Sense strand starting at position 1910 of SEQ ID NO: 917211
ucaagucuuggauauguaa

SEQ ID NO: 1217545 - RNA, 19 nt, Artificial Sequence
  Description of Artificial Sequence: Synthetic oligonucleotide
  Antisense strand to SEQ ID NO: 1217544
uuacauauccaagacuuga

SEQ ID NO: 1217546 - RNA, 19 nt, Artificial Sequence
  Description of Artificial Sequence: Synthetic oligonucleotide
  Sense strand starting at position 1913 of SEQ ID NO: 917211
agucuuggauauguaagau

SEQ ID NO: 1217547 - RNA, 19 nt, Artificial Sequence
  Description of Artificial Sequence: Synthetic oligonucleotide
  Antisense strand to SEQ ID NO: 1217546
aucuuacauauccaagacu

SEQ ID NO: 1217548 - RNA, 19 nt, Artificial Sequence
  Description of Artificial Sequence: Synthetic oligonucleotide
  Sense strand starting at position 1975 of SEQ ID NO: 917211
gucucauguccuuaaccag

SEQ ID NO: 1217549 - RNA, 19 nt, Artificial Sequence
  Description of Artificial Sequence: Synthetic oligonucleotide
  Antisense strand to SEQ ID NO: 1217548
cugguuaaggacaugagac

SEQ ID NO: 1217550 - RNA, 19 nt, Artificial Sequence
  Description of Artificial Sequence: Synthetic oligonucleotide
  Sense strand starting at position 2026 of SEQ ID NO: 917211
guguuuguucuauauggaa

SEQ ID NO: 1217551 - RNA, 19 nt, Artificial Sequence
  Description of Artificial Sequence: Synthetic oligonucleotide
  Antisense strand to SEQ ID NO: 1217550
uuccauauagaacaaacac

SEQ ID NO: 1217552 - RNA, 19 nt, Artificial Sequence
  Description of Artificial Sequence: Synthetic oligonucleotide
  Sense strand starting at position 2028 of SEQ ID NO: 917211
guuuguucuauauggaaug

SEQ ID NO: 1217553 - RNA, 19 nt, Artificial Sequence
  Description of Artificial Sequence: Synthetic oligonucleotide
  Antisense strand to SEQ ID NO: 1217552
cauuccauauagaacaaac

SEQ ID NO: 1217554 - RNA, 19 nt, Artificial Sequence
  Description of Artificial Sequence: Synthetic oligonucleotide
  Sense strand starting at position 2039 of SEQ ID NO: 917211
auggaauguccaggaguuu

SEQ ID NO: 1217555 - RNA, 19 nt, Artificial Sequence
  Description of Artificial Sequence: Synthetic oligonucleotide
  Antisense strand to SEQ ID NO: 1217554
aaacuccuggacauuccau

SEQ ID NO: 1217556 - RNA, 19 nt, Artificial Sequence
  Description of Artificial Sequence: Synthetic oligonucleotide
  Sense strand starting at position 2097 of SEQ ID NO: 917211
cuccaauuacucgaaagug

SEQ ID NO: 1217557 - RNA, 19 nt, Artificial Sequence
  Description of Artificial Sequence: Synthetic oligonucleotide
  Antisense strand to SEQ ID NO: 1217556
cacuuucgaguaauuggag

SEQ ID NO: 1217558 - RNA, 19 nt, Artificial Sequence
  Description of Artificial Sequence: Synthetic oligonucleotide
  Sense strand starting at position 2102 of SEQ ID NO: 917211
auuacucgaaaguggaauu

SEQ ID NO: 1217559 - RNA, 19 nt, Artificial Sequence
  Description of Artificial Sequence: Synthetic oligonucleotide
  Antisense strand to SEQ ID NO: 1217558
aauuccacuuucgaguaau

SEQ ID NO: 1217560 - RNA, 19 nt, Artificial Sequence
  Description of Artificial Sequence: Synthetic oligonucleotide
  Sense strand starting at position 2213 of SEQ ID NO: 917211
cagaguuaacacugguuua

SEQ ID NO: 1217561 - RNA, 19 nt, Artificial Sequence
  Description of Artificial Sequence: Synthetic oligonucleotide
  Antisense strand to SEQ ID NO: 1217560
uaaaccaguguuaacucug

SEQ ID NO: 1217562 - RNA, 19 nt, Artificial Sequence
  Description of Artificial Sequence: Synthetic oligonucleotide
  Sense strand starting at position 2330 of SEQ ID NO: 917211
uucuucuuacaggguagaa

SEQ ID NO: 1217563 - RNA, 19 nt, Artificial Sequence
  Description of Artificial Sequence: Synthetic oligonucleotide
  Antisense strand to SEQ ID NO: 1217562
uucuacccuguaagaagaa

SEQ ID NO: 1217564 - RNA, 19 nt, Artificial Sequence
  Description of Artificial Sequence: Synthetic oligonucleotide
  Sense strand starting at position 2439 of SEQ ID NO: 917211
aggugauuaguggagcuuu

SEQ ID NO: 1217565 - RNA, 19 nt, Artificial Sequence
  Description of Artificial Sequence: Synthetic oligonucleotide
  Antisense strand to SEQ ID NO: 1217564
aaagcuccacuaaucaccu

SEQ ID NO: 1217566 - RNA, 19 nt, Artificial Sequence
  Description of Artificial Sequence: Synthetic oligonucleotide
  Sense strand starting at position 2575 of SEQ ID NO: 917211
uucccugaaguuugaggua

SEQ ID NO: 1217567 - RNA, 19 nt, Artificial Sequence
  Description of Artificial Sequence: Synthetic oligonucleotide
  Antisense strand to SEQ ID NO: 1217566
uaccucaaacuucagggaa

SEQ ID NO: 1217568 - RNA, 19 nt, Artificial Sequence
  Description of Artificial Sequence: Synthetic oligonucleotide
  Sense strand starting at position 2599 of SEQ ID NO: 917211
uugggacuauucccuaauc

SEQ ID NO: 1217569 - RNA, 19 nt, Artificial Sequence
  Description of Artificial Sequence: Synthetic oligonucleotide
  Antisense strand to SEQ ID NO: 1217568
gauuagggaauagucccaa

SEQ ID NO: 1217570 - RNA, 19 nt, Artificial Sequence
  Description of Artificial Sequence: Synthetic oligonucleotide
  Sense strand starting at position 2762 of SEQ ID NO: 917211
auguguaagaacuaagguu

SEQ ID NO: 1217571 - RNA, 19 nt, Artificial Sequence
  Description of Artificial Sequence: Synthetic oligonucleotide
  Antisense strand to SEQ ID NO: 1217570
aaccuuaguucuuacacau

SEQ ID NO: 1217572 - RNA, 19 nt, Artificial Sequence
  Description of Artificial Sequence: Synthetic oligonucleotide
  Sense strand starting at position 2798 of SEQ ID NO: 917211
ccagaugaguauccacuuu

SEQ ID NO: 1217573 - RNA, 19 nt, Artificial Sequence
  Description of Artificial Sequence: Synthetic oligonucleotide
  Antisense strand to SEQ ID NO: 1217572
aaaguggauacucaucugg

SEQ ID NO: 1217574 - RNA, 19 nt, Artificial Sequence
  Description of Artificial Sequence: Synthetic oligonucleotide
  Sense strand starting at position 3108 of SEQ ID NO: 917211
aaaggauuaccuugugagc

SEQ ID NO: 1217575 - RNA, 19 nt, Artificial Sequence
  Description of Artificial Sequence: Synthetic oligonucleotide
  Antisense strand to SEQ ID NO: 1217574
gcucacaagguaauccuuu

SEQ ID NO: 1217576 - RNA, 19 nt, Artificial Sequence
  Description of Artificial Sequence: Synthetic oligonucleotide
  Sense strand starting at position 3325 of SEQ ID NO: 917211
agucucuuccuaggcauuu

SEQ ID NO: 1217577 - RNA, 19 nt, Artificial Sequence
  Description of Artificial Sequence: Synthetic oligonucleotide
  Antisense strand to SEQ ID NO: 1217576
aaaugccuaggaagagacu

SEQ ID NO: 1217578 - RNA, 19 nt, Artificial Sequence
  Description of Artificial Sequence: Synthetic oligonucleotide
  Sense strand starting at position 3326 of SEQ ID NO: 917211
gucucuuccuaggcauuua

SEQ ID NO: 1217579 - RNA, 19 nt, Artificial Sequence
  Description of Artificial Sequence: Synthetic oligonucleotide
  Antisense strand to SEQ ID NO: 1217578
uaaaugccuaggaagagac

SEQ ID NO: 1217580 - RNA, 19 nt, Artificial Sequence
  Description of Artificial Sequence: Synthetic oligonucleotide
  Sense strand starting at position 3485 of SEQ ID NO: 917211
auaauuagaugggcucaua

SEQ ID NO: 1217581 - RNA, 19 nt, Artificial Sequence
  Description of Artificial Sequence: Synthetic oligonucleotide
  Antisense strand to SEQ ID NO: 1217580
uaugagcccaucuaauuau

SEQ ID NO: 1217582 - RNA, 19 nt, Artificial Sequence
  Description of Artificial Sequence: Synthetic oligonucleotide
  Sense strand starting at position 3495 of SEQ ID NO: 917211
gggcucauaccguaaauac

SEQ ID NO: 1217583 - RNA, 19 nt, Artificial Sequence
  Description of Artificial Sequence: Synthetic oligonucleotide
  Antisense strand to SEQ ID NO: 1217582
guauuuacgguaugagccc

SEQ ID NO: 1217584 - RNA, 19 nt, Artificial Sequence
  Description of Artificial Sequence: Synthetic oligonucleotide
  Sense strand starting at position 3586 of SEQ ID NO: 917211
agucuuuaaugacugcaau

SEQ ID NO: 1217585 - RNA, 19 nt, Artificial Sequence
  Description of Artificial Sequence: Synthetic oligonucleotide
  Antisense strand to SEQ ID NO: 1217584
auugcagucauuaaagacu

SEQ ID NO: 1217586 - RNA, 19 nt, Artificial Sequence
  Description of Artificial Sequence: Synthetic oligonucleotide
  Sense strand starting at position 3904 of SEQ ID NO: 917212
ugagguucucuuuagaauu

SEQ ID NO: 1217587 - RNA, 19 nt, Artificial Sequence
  Description of Artificial Sequence: Synthetic oligonucleotide
  Antisense strand to SEQ ID NO: 1217586
aauucuaaagagaaccuca

SEQ ID NO: 1217588 - RNA, 19 nt, Artificial Sequence
  Description of Artificial Sequence: Synthetic oligonucleotide
  Sense strand starting at position 230 of SEQ ID NO: 917212
guguguuaaccauaaacua

SEQ ID NO: 1217589 - RNA, 19 nt, Artificial Sequence
  Description of Artificial Sequence: Synthetic oligonucleotide
  Antisense strand to SEQ ID NO: 1217588
uaguuuaugguuaacacac

SEQ ID NO: 1217590 - RNA, 19 nt, Artificial Sequence
  Description of Artificial Sequence: Synthetic oligonucleotide
  Sense strand starting at position 353 of SEQ ID NO: 917212
gcgucucuccuccaggaau

SEQ ID NO: 1217591 - RNA, 19 nt, Artificial Sequence
  Description of Artificial Sequence: Synthetic oligonucleotide
  Antisense strand to SEQ ID NO: 1217590
auuccuggaggagagacgc

SEQ ID NO: 1217592 - RNA, 19 nt, Artificial Sequence
  Description of Artificial Sequence: Synthetic oligonucleotide
  Sense strand starting at position 355 of SEQ ID NO: 917212
gucucuccuccaggaauca

SEQ ID NO: 1217593 - RNA, 19 nt, Artificial Sequence
  Description of Artificial Sequence: Synthetic oligonucleotide
  Antisense strand to SEQ ID NO: 1217592
ugauuccuggaggagagac

SEQ ID NO: 1217594 - RNA, 19 nt, Artificial Sequence
  Description of Artificial Sequence: Synthetic oligonucleotide
  Sense strand starting at position 591 of SEQ ID NO: 917212
auguuacagcagugaaaga

SEQ ID NO: 1217595 - RNA, 19 nt, Artificial Sequence
  Description of Artificial Sequence: Synthetic oligonucleotide
  Antisense strand to SEQ ID NO: 1217594
ucuuucacugcuguaacau

SEQ ID NO: 1217596 - RNA, 19 nt, Artificial Sequence
  Description of Artificial Sequence: Synthetic oligonucleotide
  Sense strand starting at position 592 of SEQ ID NO: 917212
uguuacagcagugaaagau

SEQ ID NO: 1217597 - RNA, 19 nt, Artificial Sequence
  Description of Artificial Sequence: Synthetic oligonucleotide
  Antisense strand to SEQ ID NO: 1217596
aucuuucacugcuguaaca

SEQ ID NO: 1217598 - RNA, 19 nt, Artificial Sequence
  Description of Artificial Sequence: Synthetic oligonucleotide
  Sense strand starting at position 636 of SEQ ID NO: 917212
ggaguguaucugggugaag

SEQ ID NO: 1217599 - RNA, 19 nt, Artificial Sequence
  Description of Artificial Sequence: Synthetic oligonucleotide
  Antisense strand to SEQ ID NO: 1217598
cuucacccagauacacucc

SEQ ID NO: 1217600 - RNA, 19 nt, Artificial Sequence
  Description of Artificial Sequence: Synthetic oligonucleotide
  Sense strand starting at position 637 of SEQ ID NO: 917212
gaguguaucugggugaaga

SEQ ID NO: 1217601 - RNA, 19 nt, Artificial Sequence
  Description of Artificial Sequence: Synthetic oligonucleotide
  Antisense strand to SEQ ID NO: 1217600
ucuucacccagauacacuc

SEQ ID NO: 1217602 - RNA, 19 nt, Artificial Sequence
  Description of Artificial Sequence: Synthetic oligonucleotide
  Sense strand starting at position 638 of SEQ ID NO: 917212
aguguaucugggugaagaa

SEQ ID NO: 1217603 - RNA, 19 nt, Artificial Sequence
  Description of Artificial Sequence: Synthetic oligonucleotide
  Antisense strand to SEQ ID NO: 1217602
uucuucacccagauacacu

SEQ ID NO: 1217604 - RNA, 19 nt, Artificial Sequence
  Description of Artificial Sequence: Synthetic oligonucleotide
  Sense strand starting at position 639 of SEQ ID NO: 917212
guguaucugggugaagaag

SEQ ID NO: 1217605 - RNA, 19 nt, Artificial Sequence
  Description of Artificial Sequence: Synthetic oligonucleotide
  Antisense strand to SEQ ID NO: 1217604
cuucuucacccagauacac

SEQ ID NO: 1217606 - RNA, 19 nt, Artificial Sequence
  Description of Artificial Sequence: Synthetic oligonucleotide
  Sense strand starting at position 674 of SEQ ID NO: 917212
uacagugagacgcagagau

SEQ ID NO: 1217607 - RNA, 19 nt, Artificial Sequence
  Description of Artificial Sequence: Synthetic oligonucleotide
  Antisense strand to SEQ ID NO: 1217606
aucucugcgucucacugua

SEQ ID NO: 1217608 - RNA, 19 nt, Artificial Sequence
  Description of Artificial Sequence: Synthetic oligonucleotide
  Sense strand starting at position 1882 of SEQ ID NO: 917212
gcuggaagccugugugagu

SEQ ID NO: 1217609 - RNA, 19 nt, Artificial Sequence
  Description of Artificial Sequence: Synthetic oligonucleotide
  Antisense strand to SEQ ID NO: 1217608
acucacacaggcuuccagc

SEQ ID NO: 1217610 - RNA, 19 nt, Artificial Sequence
  Description of Artificial Sequence: Synthetic oligonucleotide
  Sense strand starting at position 2130 of SEQ ID NO: 917212
cgcgugucucgcuuggaga

SEQ ID NO: 1217611 - RNA, 19 nt, Artificial Sequence
  Description of Artificial Sequence: Synthetic oligonucleotide
  Antisense strand to SEQ ID NO: 1217610
ucuccaagcgagacacgcg

SEQ ID NO: 1217612 - RNA, 19 nt, Artificial Sequence
  Description of Artificial Sequence: Synthetic oligonucleotide
  Sense strand starting at position 2475 of SEQ ID NO: 917212
gggcguguuacaggauugu

SEQ ID NO: 1217613 - RNA, 19 nt, Artificial Sequence
  Description of Artificial Sequence: Synthetic oligonucleotide
  Antisense strand to SEQ ID NO: 1217612
acaauccuguaacacgccc

SEQ ID NO: 1217614 - RNA, 19 nt, Artificial Sequence
  Description of Artificial Sequence: Synthetic oligonucleotide
  Sense strand starting at position 2674 of SEQ ID NO: 917212
acccacuucccagguaaga

SEQ ID NO: 1217615 - RNA, 19 nt, Artificial Sequence
  Description of Artificial Sequence: Synthetic oligonucleotide
  Antisense strand to SEQ ID NO: 1217614
ucuuaccugggaagugggu

SEQ ID NO: 1217616 - RNA, 19 nt, Artificial Sequence
  Description of Artificial Sequence: Synthetic oligonucleotide
  Sense strand starting at position 2699 of SEQ ID NO: 917212
gccuccucuuuguuaggau

SEQ ID NO: 1217617 - RNA, 19 nt, Artificial Sequence
  Description of Artificial Sequence: Synthetic oligonucleotide
  Antisense strand to SEQ ID NO: 1217616
auccuaacaaagaggaggc

SEQ ID NO: 1217618 - RNA, 19 nt, Artificial Sequence
  Description of Artificial Sequence: Synthetic oligonucleotide
  Sense strand starting at position 2742 of SEQ ID NO: 917212
agcagugccuccuuagagu

SEQ ID NO: 1217619 - RNA, 19 nt, Artificial Sequence
  Description of Artificial Sequence: Synthetic oligonucleotide
  Antisense strand to SEQ ID NO: 1217618
acucuaaggaggcacugcu

SEQ ID NO: 1217620 - RNA, 19 nt, Artificial Sequence
  Description of Artificial Sequence: Synthetic oligonucleotide
  Sense strand starting at position 2757 of SEQ ID NO: 917212
gagucaggcucguccaaga

SEQ ID NO: 1217621 - RNA, 19 nt, Artificial Sequence
  Description of Artificial Sequence: Synthetic oligonucleotide
  Antisense strand to SEQ ID NO: 1217620
ucuuggacgagccugacuc

SEQ ID NO: 1217622 - RNA, 19 nt, Artificial Sequence
  Description of Artificial Sequence: Synthetic oligonucleotide
  Sense strand starting at position 2889 of SEQ ID NO: 917212
acagauauauugucuuagu

SEQ ID NO: 1217623 - RNA, 19 nt, Artificial Sequence
  Description of Artificial Sequence: Synthetic oligonucleotide
  Antisense strand to SEQ ID NO: 1217622
acuaagacaauauaucugu

SEQ ID NO: 1217624 - RNA, 19 nt, Artificial Sequence
  Description of Artificial Sequence: Synthetic oligonucleotide
  Sense strand starting at position 2929 of SEQ ID NO: 917212
uuuaaauucugagugggau

SEQ ID NO: 1217625 - RNA, 19 nt, Artificial Sequence
  Description of Artificial Sequence: Synthetic oligonucleotide
  Antisense strand to SEQ ID NO: 1217624
aucccacucagaauuuaaa

SEQ ID NO: 1217626 - RNA, 19 nt, Artificial Sequence
  Description of Artificial Sequence: Synthetic oligonucleotide
  Sense strand starting at position 2930 of SEQ ID NO: 917212
uuaaauucugagugggauu

SEQ ID NO: 1217627 - RNA, 19 nt, Artificial Sequence
  Description of Artificial Sequence: Synthetic oligonucleotide
  Antisense strand to SEQ ID NO: 1217626
aaucccacucagaauuuaa

SEQ ID NO: 1217628 - RNA, 19 nt, Artificial Sequence
  Description of Artificial Sequence: Synthetic oligonucleotide
  Sense strand starting at position 2974 of SEQ ID NO: 917212
ggucguaaggucuggguaa

SEQ ID NO: 1217629 - RNA, 19 nt, Artificial Sequence
  Description of Artificial Sequence: Synthetic oligonucleotide
  Antisense strand to SEQ ID NO: 1217628
uuacccagaccuuacgacc

SEQ ID NO: 1217630 - RNA, 19 nt, Artificial Sequence
  Description of Artificial Sequence: Synthetic oligonucleotide
  Sense strand starting at position 2976 of SEQ ID NO: 917212
ucguaaggucuggguaaua

SEQ ID NO: 1217631 - RNA, 19 nt, Artificial Sequence
  Description of Artificial Sequence: Synthetic oligonucleotide
  Antisense strand to SEQ ID NO: 1217630
uauuacccagaccuuacga

SEQ ID NO: 1217632 - RNA, 19 nt, Artificial Sequence
  Description of Artificial Sequence: Synthetic oligonucleotide
  Sense strand starting at position 3024 of SEQ ID NO: 917212
caaugcagggauuguguuu

SEQ ID NO: 1217633 - RNA, 19 nt, Artificial Sequence
  Description of Artificial Sequence: Synthetic oligonucleotide
  Antisense strand to SEQ ID NO: 1217632
aaacacaaucccugcauug

SEQ ID NO: 1217634 - RNA, 19 nt, Artificial Sequence
  Description of Artificial Sequence: Synthetic oligonucleotide
  Sense strand starting at position 3054 of SEQ ID NO: 917212
gcaugccuuccagugcuua

SEQ ID NO: 1217635 - RNA, 19 nt, Artificial Sequence
  Description of Artificial Sequence: Synthetic oligonucleotide
  Antisense strand to SEQ ID NO: 1217634
uaagcacuggaaggcaugc

SEQ ID NO: 1217636 - RNA, 19 nt, Artificial Sequence
  Description of Artificial Sequence: Synthetic oligonucleotide
  Sense strand starting at position 3059 of SEQ ID NO: 917212
ccuuccagugcuuagcaua

SEQ ID NO: 1217637 - RNA, 19 nt, Artificial Sequence
  Description of Artificial Sequence: Synthetic oligonucleotide
  Antisense strand to SEQ ID NO: 1217636
uaugcuaagcacuggaagg

SEQ ID NO: 1217638 - RNA, 19 nt, Artificial Sequence
  Description of Artificial Sequence: Synthetic oligonucleotide
  Sense strand starting at position 3072 of SEQ ID NO: 917212
agcauaguacucuguacuu

SEQ ID NO: 1217639 - RNA, 19 nt, Artificial Sequence
  Description of Artificial Sequence: Synthetic oligonucleotide
  Antisense strand to SEQ ID NO: 1217638
aaguacagaguacuaugcu

SEQ ID NO: 1217640 - RNA, 19 nt, Artificial Sequence
  Description of Artificial Sequence: Synthetic oligonucleotide
  Sense strand starting at position 3079 of SEQ ID NO: 917212
uacucuguacuuugugagu

SEQ ID NO: 1217641 - RNA, 19 nt, Artificial Sequence
  Description of Artificial Sequence: Synthetic oligonucleotide
  Antisense strand to SEQ ID NO: 1217640
acucacaaaguacagagua

SEQ ID NO: 1217642 - RNA, 19 nt, Artificial Sequence
  Description of Artificial Sequence: Synthetic oligonucleotide
  Sense strand starting at position 3088 of SEQ ID NO: 917212
cuuugugaguucccuguaa

SEQ ID NO: 1217643 - RNA, 19 nt, Artificial Sequence
  Description of Artificial Sequence: Synthetic oligonucleotide
  Antisense strand to SEQ ID NO: 1217642
uuacagggaacucacaaag

SEQ ID NO: 1217644 - RNA, 19 nt, Artificial Sequence
  Description of Artificial Sequence: Synthetic oligonucleotide
  Sense strand starting at position 3090 of SEQ ID NO: 917212
uugugaguucccuguaaau

SEQ ID NO: 1217645 - RNA, 19 nt, Artificial Sequence
  Description of Artificial Sequence: Synthetic oligonucleotide
  Antisense strand to SEQ ID NO: 1217644
auuuacagggaacucacaa

SEQ ID NO: 1217646 - RNA, 19 nt, Artificial Sequence
  Description of Artificial Sequence: Synthetic oligonucleotide
  Sense strand starting at position 3092 of SEQ ID NO: 917212
gugaguucccuguaaaugu

SEQ ID NO: 1217647 - RNA, 19 nt, Artificial Sequence
  Description of Artificial Sequence: Synthetic oligonucleotide
  Antisense strand to SEQ ID NO: 1217646
acauuuacagggaacucac

SEQ ID NO: 1217648 - RNA, 19 nt, Artificial Sequence
  Description of Artificial Sequence: Synthetic oligonucleotide
  Sense strand starting at position 3167 of SEQ ID NO: 917212
cugggaaagucauuaccac

SEQ ID NO: 1217649 - RNA, 19 nt, Artificial Sequence
  Description of Artificial Sequence: Synthetic oligonucleotide
  Antisense strand to SEQ ID NO: 1217648
gugguaaugacuuucccag

SEQ ID NO: 1217650 - RNA, 19 nt, Artificial Sequence
  Description of Artificial Sequence: Synthetic oligonucleotide
  Sense strand starting at position 3187 of SEQ ID NO: 917212
ccacuaggcuugccugauu

SEQ ID NO: 1217651 - RNA, 19 nt, Artificial Sequence
  Description of Artificial Sequence: Synthetic oligonucleotide
  Antisense strand to SEQ ID NO: 1217650
aaucaggcaagccuagugg

SEQ ID NO: 1217652 - RNA, 19 nt, Artificial Sequence
  Description of Artificial Sequence: Synthetic oligonucleotide
  Sense strand starting at position 3367 of SEQ ID NO: 917212
ggccaaagcucagaaccua

SEQ ID NO: 1217653 - RNA, 19 nt, Artificial Sequence
  Description of Artificial Sequence: Synthetic oligonucleotide
  Antisense strand to SEQ ID NO: 1217652
uagguucugagcuuuggcc

SEQ ID NO: 1217654 - RNA, 19 nt, Artificial Sequence
  Description of Artificial Sequence: Synthetic oligonucleotide
  Sense strand starting at position 3396 of SEQ ID NO: 917212
augugaaagucaguguuca

SEQ ID NO: 1217655 - RNA, 19 nt, Artificial Sequence
  Description of Artificial Sequence: Synthetic oligonucleotide
  Antisense strand to SEQ ID NO: 1217654
ugaacacugacuuucacau

SEQ ID NO: 1217656 - RNA, 19 nt, Artificial Sequence
  Description of Artificial Sequence: Synthetic oligonucleotide
  Sense strand starting at position 3397 of SEQ ID NO: 917212
ugugaaagucaguguucac

SEQ ID NO: 1217657 - RNA, 19 nt, Artificial Sequence
  Description of Artificial Sequence: Synthetic oligonucleotide
  Antisense strand to SEQ ID NO: 1217656
gugaacacugacuuucaca

SEQ ID NO: 1217658 - RNA, 19 nt, Artificial Sequence
  Description of Artificial Sequence: Synthetic oligonucleotide
  Sense strand starting at position 3404 of SEQ ID NO: 917212
gucaguguucaccagcagu

SEQ ID NO: 1217659 - RNA, 19 nt, Artificial Sequence
  Description of Artificial Sequence: Synthetic oligonucleotide
  Antisense strand to SEQ ID NO: 1217658
acugcuggugaacacugac

SEQ ID NO: 1217660 - RNA, 19 nt, Artificial Sequence
  Description of Artificial Sequence: Synthetic oligonucleotide
  Sense strand starting at position 3827 of SEQ ID NO: 917212
ucuaauagcuuaucaggua

SEQ ID NO: 1217661 - RNA, 19 nt, Artificial Sequence
  Description of Artificial Sequence: Synthetic oligonucleotide
  Antisense strand to SEQ ID NO: 1217660
uaccugauaagcuauuaga

SEQ ID NO: 1217662 - RNA, 19 nt, Artificial Sequence
  Description of Artificial Sequence: Synthetic oligonucleotide
  Sense strand starting at position 3856 of SEQ ID NO: 917212
uccuguaaagaguaguguu

SEQ ID NO: 1217663 - RNA, 19 nt, Artificial Sequence
  Description of Artificial Sequence: Synthetic oligonucleotide
  Antisense strand to SEQ ID NO: 1217662
aacacuacucuuuacagga

SEQ ID NO: 1217664 - RNA, 19 nt, Artificial Sequence
  Description of Artificial Sequence: Synthetic oligonucleotide
  Sense strand starting at position 3969 of SEQ ID NO: 917212
cuacaaucaucgucuuaga

SEQ ID NO: 1217665 - RNA, 19 nt, Artificial Sequence
  Description of Artificial Sequence: Synthetic oligonucleotide
  Antisense strand to SEQ ID NO: 1217664
ucuaagacgaugauuguag

SEQ ID NO: 1217666 - RNA, 19 nt, Artificial Sequence
  Description of Artificial Sequence: Synthetic oligonucleotide
  Sense strand starting at position 3978 of SEQ ID NO: 917212
ucgucuuagaagcagaagu

SEQ ID NO: 1217667 - RNA, 19 nt, Artificial Sequence
  Description of Artificial Sequence: Synthetic oligonucleotide
  Antisense strand to SEQ ID NO: 1217666
acuucugcuucuaagacga

SEQ ID NO: 1217668 - RNA, 19 nt, Artificial Sequence
  Description of Artificial Sequence: Synthetic oligonucleotide
  Sense strand starting at position 3978 of SEQ ID NO: 917213
ucgucuuagaagcagaagu

SEQ ID NO: 1217669 - RNA, 19 nt, Artificial Sequence
  Description of Artificial Sequence: Synthetic oligonucleotide
  Antisense strand to SEQ ID NO: 1217668
acuucugcuucuaagacga

SEQ ID NO: 1217670 - RNA, 19 nt, Artificial Sequence
  Description of Artificial Sequence: Synthetic oligonucleotide
  Sense strand starting at position 26 of SEQ ID NO: 917213
gguauuaaggccuggauaa

SEQ ID NO: 1217671 - RNA, 19 nt, Artificial Sequence
  Description of Artificial Sequence: Synthetic oligonucleotide
  Antisense strand to SEQ ID NO: 1217670
uuauccaggccuuaauacc

SEQ ID NO: 1217672 - RNA, 19 nt, Artificial Sequence
  Description of Artificial Sequence: Synthetic oligonucleotide
  Sense strand starting at position 27 of SEQ ID NO: 917213
guauuaaggccuggauaac

SEQ ID NO: 1217673 - RNA, 19 nt, Artificial Sequence
  Description of Artificial Sequence: Synthetic oligonucleotide
  Antisense strand to SEQ ID NO: 1217672
guuauccaggccuuaauac

SEQ ID NO: 1217674 - RNA, 19 nt, Artificial Sequence
  Description of Artificial Sequence: Synthetic oligonucleotide
  Sense strand starting at position 59 of SEQ ID NO: 917213
gccucuuucugagcaauuu

SEQ ID NO: 1217675 - RNA, 19 nt, Artificial Sequence
  Description of Artificial Sequence: Synthetic oligonucleotide
  Antisense strand to SEQ ID NO: 1217674
aaauugcucagaaagaggc

SEQ ID NO: 1217676 - RNA, 19 nt, Artificial Sequence
  Description of Artificial Sequence: Synthetic oligonucleotide
  Sense strand starting at position 84 of SEQ ID NO: 917213
gcaagauuccaggguaauu

SEQ ID NO: 1217677 - RNA, 19 nt, Artificial Sequence
  Description of Artificial Sequence: Synthetic oligonucleotide
  Antisense strand to SEQ ID NO: 1217676
aauuacccuggaaucuugc

SEQ ID NO: 1217678 - RNA, 19 nt, Artificial Sequence
  Description of Artificial Sequence: Synthetic oligonucleotide
  Sense strand starting at position 135 of SEQ ID NO: 917213
auacuuaugcgaugauaug

SEQ ID NO: 1217679 - RNA, 19 nt, Artificial Sequence
  Description of Artificial Sequence: Synthetic oligonucleotide
  Antisense strand to SEQ ID NO: 1217678
cauaucaucgcauaaguau

SEQ ID NO: 1217680 - RNA, 19 nt, Artificial Sequence
  Description of Artificial Sequence: Synthetic oligonucleotide
  Sense strand starting at position 136 of SEQ ID NO: 917213
uacuuaugcgaugauauga

SEQ ID NO: 1217681 - RNA, 19 nt, Artificial Sequence
  Description of Artificial Sequence: Synthetic oligonucleotide
  Antisense strand to SEQ ID NO: 1217680
ucauaucaucgcauaagua

SEQ ID NO: 1217682 - RNA, 19 nt, Artificial Sequence
  Description of Artificial Sequence: Synthetic oligonucleotide
  Sense strand starting at position 159 of SEQ ID NO: 917213
agaaauaaaugguuguauc

SEQ ID NO: 1217683 - RNA, 19 nt, Artificial Sequence
  Description of Artificial Sequence: Synthetic oligonucleotide
  Antisense strand to SEQ ID NO: 1217682
gauacaaccauuuauuucu

SEQ ID NO: 1217684 - RNA, 19 nt, Artificial Sequence
  Description of Artificial Sequence: Synthetic oligonucleotide
  Sense strand starting at position 160 of SEQ ID NO: 917213
gaaauaaaugguuguaucu

SEQ ID NO: 1217685 - RNA, 19 nt, Artificial Sequence
  Description of Artificial Sequence: Synthetic oligonucleotide
  Antisense strand to SEQ ID NO: 1217684
agauacaaccauuuauuuc

SEQ ID NO: 1217686 - RNA, 19 nt, Artificial Sequence
  Description of Artificial Sequence: Synthetic oligonucleotide
  Sense strand starting at position 295 of SEQ ID NO: 917213
auacguggguuacuugaaa

SEQ ID NO: 1217687 - RNA, 19 nt, Artificial Sequence
  Description of Artificial Sequence: Synthetic oligonucleotide
  Antisense strand to SEQ ID NO: 1217686
uuucaaguaacccacguau

SEQ ID NO: 1217688 - RNA, 19 nt, Artificial Sequence
  Description of Artificial Sequence: Synthetic oligonucleotide
  Sense strand starting at position 336 of SEQ ID NO: 917213
gcgagacacuaauuauucu

SEQ ID NO: 1217689 - RNA, 19 nt, Artificial Sequence
  Description of Artificial Sequence: Synthetic oligonucleotide
  Antisense strand to SEQ ID NO: 1217688
agaauaauuagugucucgc

SEQ ID NO: 1217690 - RNA, 19 nt, Artificial Sequence
  Description of Artificial Sequence: Synthetic oligonucleotide
  Sense strand starting at position 413 of SEQ ID NO: 917213
ggguaaaccuaagcuaaau

SEQ ID NO: 1217691 - RNA, 19 nt, Artificial Sequence
  Description of Artificial Sequence: Synthetic oligonucleotide
  Antisense strand to SEQ ID NO: 1217690
auuuagcuuagguuuaccc

SEQ ID NO: 1217692 - RNA, 19 nt, Artificial Sequence
  Description of Artificial Sequence: Synthetic oligonucleotide
  Sense strand starting at position 436 of SEQ ID NO: 917213
auauuaaaggccugguacu

SEQ ID NO: 1217693 - RNA, 19 nt, Artificial Sequence
  Description of Artificial Sequence: Synthetic oligonucleotide
  Antisense strand to SEQ ID NO: 1217692
aguaccaggccuuuaauau

SEQ ID NO: 1217694 - RNA, 19 nt, Artificial Sequence
  Description of Artificial Sequence: Synthetic oligonucleotide
  Sense strand starting at position 635 of SEQ ID NO: 917213
ugugauaaaccauacuguu

SEQ ID NO: 1217695 - RNA, 19 nt, Artificial Sequence
  Description of Artificial Sequence: Synthetic oligonucleotide
  Antisense strand to SEQ ID NO: 1217694
aacaguaugguuuaucaca

SEQ ID NO: 1217696 - RNA, 19 nt, Artificial Sequence
  Description of Artificial Sequence: Synthetic oligonucleotide
  Sense strand starting at position 644 of SEQ ID NO: 917213
ccauacuguugaguuaaag

SEQ ID NO: 1217697 - RNA, 19 nt, Artificial Sequence
  Description of Artificial Sequence: Synthetic oligonucleotide
  Antisense strand to SEQ ID NO: 1217696
cuuuaacucaacaguaugg

SEQ ID NO: 1217698 - RNA, 19 nt, Artificial Sequence
  Description of Artificial Sequence: Synthetic oligonucleotide
  Sense strand starting at position 664 of SEQ ID NO: 917213
ucauuccauuggcuagaaa

SEQ ID NO: 1217699 - RNA, 19 nt, Artificial Sequence
  Description of Artificial Sequence: Synthetic oligonucleotide
  Antisense strand to SEQ ID NO: 1217698
uuucuagccaauggaauga

SEQ ID NO: 1217700 - RNA, 19 nt, Artificial Sequence
  Description of Artificial Sequence: Synthetic oligonucleotide
  Sense strand starting at position 704 of SEQ ID NO: 917213
uaauaaauguuucccggau

SEQ ID NO: 1217701 - RNA, 19 nt, Artificial Sequence
  Description of Artificial Sequence: Synthetic oligonucleotide
  Antisense strand to SEQ ID NO: 1217700
auccgggaaacauuuauua

SEQ ID NO: 1217702 - RNA, 19 nt, Artificial Sequence
  Description of Artificial Sequence: Synthetic oligonucleotide
  Sense strand starting at position 705 of SEQ ID NO: 917213
aauaaauguuucccggaua

SEQ ID NO: 1217703 - RNA, 19 nt, Artificial Sequence
  Description of Artificial Sequence: Synthetic oligonucleotide
  Antisense strand to SEQ ID NO: 1217702
uauccgggaaacauuuauu

SEQ ID NO: 1217704 - RNA, 19 nt, Artificial Sequence
  Description of Artificial Sequence: Synthetic oligonucleotide
  Sense strand starting at position 708 of SEQ ID NO: 917213
aaauguuucccggauacuc

SEQ ID NO: 1217705 - RNA, 19 nt, Artificial Sequence
  Description of Artificial Sequence: Synthetic oligonucleotide
  Antisense strand to SEQ ID NO: 1217704
gaguauccgggaaacauuu

SEQ ID NO: 1217706 - RNA, 19 nt, Artificial Sequence
  Description of Artificial Sequence: Synthetic oligonucleotide
  Sense strand starting at position 808 of SEQ ID NO: 917213
gagguacuauggucacuca

SEQ ID NO: 1217707 - RNA, 19 nt, Artificial Sequence
  Description of Artificial Sequence: Synthetic oligonucleotide
  Antisense strand to SEQ ID NO: 1217706
ugagugaccauaguaccuc

SEQ ID NO: 1217708 - RNA, 19 nt, Artificial Sequence
  Description of Artificial Sequence: Synthetic oligonucleotide
  Sense strand starting at position 984 of SEQ ID NO: 917213
aguaauuccguuuaggaca

SEQ ID NO: 1217709 - RNA, 19 nt, Artificial Sequence
  Description of Artificial Sequence: Synthetic oligonucleotide
  Antisense strand to SEQ ID NO: 1217708
uguccuaaacggaauuacu

SEQ ID NO: 1217710 - RNA, 19 nt, Artificial Sequence
  Description of Artificial Sequence: Synthetic oligonucleotide
  Sense strand starting at position 1368 of SEQ ID NO: 917213
guaugaguucuggagauac

SEQ ID NO: 1217711 - RNA, 19 nt, Artificial Sequence
  Description of Artificial Sequence: Synthetic oligonucleotide
  Antisense strand to SEQ ID NO: 1217710
guaucuccagaacucauac

SEQ ID NO: 1217712 - RNA, 19 nt, Artificial Sequence
  Description of Artificial Sequence: Synthetic oligonucleotide
  Sense strand starting at position 1471 of SEQ ID NO: 917213
aaaguaguauuccuggaag

SEQ ID NO: 1217713 - RNA, 19 nt, Artificial Sequence
  Description of Artificial Sequence: Synthetic oligonucleotide
  Antisense strand to SEQ ID NO: 1217712
cuuccaggaauacuacuuu

SEQ ID NO: 1217714 - RNA, 19 nt, Artificial Sequence
  Description of Artificial Sequence: Synthetic oligonucleotide
  Sense strand starting at position 1473 of SEQ ID NO: 917213
aguaguauuccuggaagga

SEQ ID NO: 1217715 - RNA, 19 nt, Artificial Sequence
  Description of Artificial Sequence: Synthetic oligonucleotide
  Antisense strand to SEQ ID NO: 1217714
uccuuccaggaauacuacu

SEQ ID NO: 1217716 - RNA, 19 nt, Artificial Sequence
  Description of Artificial Sequence: Synthetic oligonucleotide
  Sense strand starting at position 1498 of SEQ ID NO: 917213
cugguuauuuaccaaagga

SEQ ID NO: 1217717 - RNA, 19 nt, Artificial Sequence
  Description of Artificial Sequence: Synthetic oligonucleotide
  Antisense strand to SEQ ID NO: 1217716
uccuuugguaaauaaccag

SEQ ID NO: 1217718 - RNA, 19 nt, Artificial Sequence
  Description of Artificial Sequence: Synthetic oligonucleotide
  Sense strand starting at position 1948 of SEQ ID NO: 917213
ggacgcuuagcgagucuca

SEQ ID NO: 1217719 - RNA, 19 nt, Artificial Sequence
  Description of Artificial Sequence: Synthetic oligonucleotide
  Antisense strand to SEQ ID NO: 1217718
ugagacucgcuaagcgucc

SEQ ID NO: 1217720 - RNA, 19 nt, Artificial Sequence
  Description of Artificial Sequence: Synthetic oligonucleotide
  Sense strand starting at position 1958 of SEQ ID NO: 917213
cgagucucaagaugggauu

SEQ ID NO: 1217721 - RNA, 19 nt, Artificial Sequence
  Description of Artificial Sequence: Synthetic oligonucleotide
  Antisense strand to SEQ ID NO: 1217720
aaucccaucuugagacucg

SEQ ID NO: 1217722 - RNA, 19 nt, Artificial Sequence
  Description of Artificial Sequence: Synthetic oligonucleotide
  Sense strand starting at position 2224 of SEQ ID NO: 917213
agcgauuagcccgcagagu

SEQ ID NO: 1217723 - RNA, 19 nt, Artificial Sequence
  Description of Artificial Sequence: Synthetic oligonucleotide
  Antisense strand to SEQ ID NO: 1217722
acucugcgggcuaaucgcu

SEQ ID NO: 1217724 - RNA, 19 nt, Artificial Sequence
  Description of Artificial Sequence: Synthetic oligonucleotide
  Sense strand starting at position 2226 of SEQ ID NO: 917213
cgauuagcccgcagaguga

SEQ ID NO: 1217725 - RNA, 19 nt, Artificial Sequence
  Description of Artificial Sequence: Synthetic oligonucleotide
  Antisense strand to SEQ ID NO: 1217724
ucacucugcgggcuaaucg

SEQ ID NO: 1217726 - RNA, 19 nt, Artificial Sequence
  Description of Artificial Sequence: Synthetic oligonucleotide
  Sense strand starting at position 2264 of SEQ ID NO: 917213
uugagaaacuguuuaacag

SEQ ID NO: 1217727 - RNA, 19 nt, Artificial Sequence
  Description of Artificial Sequence: Synthetic oligonucleotide
  Antisense strand to SEQ ID NO: 1217726
cuguuaaacaguuucucaa

SEQ ID NO: 1217728 - RNA, 19 nt, Artificial Sequence
  Description of Artificial Sequence: Synthetic oligonucleotide
  Sense strand starting at position 2306 of SEQ ID NO: 917213
cuggauauuugagacugua

SEQ ID NO: 1217729 - RNA, 19 nt, Artificial Sequence
  Description of Artificial Sequence: Synthetic oligonucleotide
  Antisense strand to SEQ ID NO: 1217728
uacagucucaaauauccag

SEQ ID NO: 1217730 - RNA, 19 nt, Artificial Sequence
  Description of Artificial Sequence: Synthetic oligonucleotide
  Sense strand starting at position 2514 of SEQ ID NO: 917213
agacaugauucuccaggca

SEQ ID NO: 1217731 - RNA, 19 nt, Artificial Sequence
  Description of Artificial Sequence: Synthetic oligonucleotide
  Antisense strand to SEQ ID NO: 1217730
ugccuggagaaucaugucu

SEQ ID NO: 1217732 - RNA, 19 nt, Artificial Sequence
  Description of Artificial Sequence: Synthetic oligonucleotide
  Sense strand starting at position 2535 of SEQ ID NO: 917213
cuugcuaaguaauugacua

SEQ ID NO: 1217733 - RNA, 19 nt, Artificial Sequence
  Description of Artificial Sequence: Synthetic oligonucleotide
  Antisense strand to SEQ ID NO: 1217732
uagucaauuacuuagcaag

SEQ ID NO: 1217734 - RNA, 19 nt, Artificial Sequence
  Description of Artificial Sequence: Synthetic oligonucleotide
  Sense strand starting at position 2548 of SEQ ID NO: 917213
ugacuagacauucgagaac

SEQ ID NO: 1217735 - RNA, 19 nt, Artificial Sequence
  Description of Artificial Sequence: Synthetic oligonucleotide
  Antisense strand to SEQ ID NO: 1217734
guucucgaaugucuaguca

SEQ ID NO: 1217736 - RNA, 19 nt, Artificial Sequence
  Description of Artificial Sequence: Synthetic oligonucleotide
  Sense strand starting at position 2789 of SEQ ID NO: 917213
gcauucuaggaguauccua

SEQ ID NO: 1217737 - RNA, 19 nt, Artificial Sequence
  Description of Artificial Sequence: Synthetic oligonucleotide
  Antisense strand to SEQ ID NO: 1217736
uaggauacuccuagaaugc

SEQ ID NO: 1217738 - RNA, 19 nt, Artificial Sequence
  Description of Artificial Sequence: Synthetic oligonucleotide
  Sense strand starting at position 2886 of SEQ ID NO: 917213
ggauuagcccucugaguaa

SEQ ID NO: 1217739 - RNA, 19 nt, Artificial Sequence
  Description of Artificial Sequence: Synthetic oligonucleotide
  Antisense strand to SEQ ID NO: 1217738
uuacucagagggcuaaucc

SEQ ID NO: 1217740 - RNA, 19 nt, Artificial Sequence
  Description of Artificial Sequence: Synthetic oligonucleotide
  Sense strand starting at position 2998 of SEQ ID NO: 917213
ugacaugguguguacuuaa

SEQ ID NO: 1217741 - RNA, 19 nt, Artificial Sequence
  Description of Artificial Sequence: Synthetic oligonucleotide
  Antisense strand to SEQ ID NO: 1217740
uuaaguacacaccauguca

SEQ ID NO: 1217742 - RNA, 19 nt, Artificial Sequence
  Description of Artificial Sequence: Synthetic oligonucleotide
  Sense strand starting at position 3095 of SEQ ID NO: 917213
auuauuggugcuuagaaca

SEQ ID NO: 1217743 - RNA, 19 nt, Artificial Sequence
  Description of Artificial Sequence: Synthetic oligonucleotide
  Antisense strand to SEQ ID NO: 1217742
uguucuaagcaccaauaau

SEQ ID NO: 1217744 - RNA, 19 nt, Artificial Sequence
  Description of Artificial Sequence: Synthetic oligonucleotide
  Sense strand starting at position 3126 of SEQ ID NO: 917213
cagguuugauagcuaauga

SEQ ID NO: 1217745 - RNA, 19 nt, Artificial Sequence
  Description of Artificial Sequence: Synthetic oligonucleotide
  Antisense strand to SEQ ID NO: 1217744
ucauuagcuaucaaaccug

SEQ ID NO: 1217746 - RNA, 19 nt, Artificial Sequence
  Description of Artificial Sequence: Synthetic oligonucleotide
  Sense strand starting at position 3642 of SEQ ID NO: 917213
uagggcaguuacucaauaa

SEQ ID NO: 1217747 - RNA, 19 nt, Artificial Sequence
  Description of Artificial Sequence: Synthetic oligonucleotide
  Antisense strand to SEQ ID NO: 1217746
uuauugaguaacugcccua

SEQ ID NO: 1217748 - RNA, 19 nt, Artificial Sequence
  Description of Artificial Sequence: Synthetic oligonucleotide
  Sense strand starting at position 3679 of SEQ ID NO: 917213
agcuucuaacaaugugaaa

SEQ ID NO: 1217749 - RNA, 19 nt, Artificial Sequence
  Description of Artificial Sequence: Synthetic oligonucleotide
  Antisense strand to SEQ ID NO: 1217748
uuucacauuguuagaagcu

SEQ ID NO: 1217750 - RNA, 19 nt, Artificial Sequence
  Description of Artificial Sequence: Synthetic oligonucleotide
  Sense strand starting at position 3679 of SEQ ID NO: 917214
agcuucuaacaaugugaaa

SEQ ID NO: 1217751 - RNA, 19 nt, Artificial Sequence
  Description of Artificial Sequence: Synthetic oligonucleotide
  Antisense strand to SEQ ID NO: 1217750
uuucacauuguuagaagcu

SEQ ID NO: 1217752 - RNA, 19 nt, Artificial Sequence
  Description of Artificial Sequence: Synthetic oligonucleotide
  Sense strand starting at position 7 of SEQ ID NO: 917214
ugaucuaaaucuuugcuga

SEQ ID NO: 1217753 - RNA, 19 nt, Artificial Sequence
  Description of Artificial Sequence: Synthetic oligonucleotide
  Antisense strand to SEQ ID NO: 1217752
ucagcaaagauuuagauca

SEQ ID NO: 1217754 - RNA, 19 nt, Artificial Sequence
  Description of Artificial Sequence: Synthetic oligonucleotide
  Sense strand starting at position 9 of SEQ ID NO: 917214
aucuaaaucuuugcugaag

SEQ ID NO: 1217755 - RNA, 19 nt, Artificial Sequence
  Description of Artificial Sequence: Synthetic oligonucleotide
  Antisense strand to SEQ ID NO: 1217754
cuucagcaaagauuuagau

SEQ ID NO: 1217756 - RNA, 19 nt, Artificial Sequence
  Description of Artificial Sequence: Synthetic oligonucleotide
  Sense strand starting at position 10 of SEQ ID NO: 917214
ucuaaaucuuugcugaagu

SEQ ID NO: 1217757 - RNA, 19 nt, Artificial Sequence
  Description of Artificial Sequence: Synthetic oligonucleotide
  Antisense strand to SEQ ID NO: 1217756
acuucagcaaagauuuaga

SEQ ID NO: 1217758 - RNA, 19 nt, Artificial Sequence
  Description of Artificial Sequence: Synthetic oligonucleotide
  Sense strand starting at position 81 of SEQ ID NO: 917214
aucuuuagacugcaaugau

SEQ ID NO: 1217759 - RNA, 19 nt, Artificial Sequence
  Description of Artificial Sequence: Synthetic oligonucleotide
  Antisense strand to SEQ ID NO: 1217758
aucauugcagucuaaagau

SEQ ID NO: 1217760 - RNA, 19 nt, Artificial Sequence
  Description of Artificial Sequence: Synthetic oligonucleotide
  Sense strand starting at position 84 of SEQ ID NO: 917214
uuuagacugcaaugauacu

SEQ ID NO: 1217761 - RNA, 19 nt, Artificial Sequence
  Description of Artificial Sequence: Synthetic oligonucleotide
  Antisense strand to SEQ ID NO: 1217760
aguaucauugcagucuaaa

SEQ ID NO: 1217762 - RNA, 19 nt, Artificial Sequence
  Description of Artificial Sequence: Synthetic oligonucleotide
  Sense strand starting at position 355 of SEQ ID NO: 917214
cagggauuccuuugcugaa

SEQ ID NO: 1217763 - RNA, 19 nt, Artificial Sequence
  Description of Artificial Sequence: Synthetic oligonucleotide
  Antisense strand to SEQ ID NO: 1217762
uucagcaaaggaaucccug

SEQ ID NO: 1217764 - RNA, 19 nt, Artificial Sequence
  Description of Artificial Sequence: Synthetic oligonucleotide
  Sense strand starting at position 356 of SEQ ID NO: 917214
agggauuccuuugcugaac

SEQ ID NO: 1217765 - RNA, 19 nt, Artificial Sequence
  Description of Artificial Sequence: Synthetic oligonucleotide
  Antisense strand to SEQ ID NO: 1217764
guucagcaaaggaaucccu

SEQ ID NO: 1217766 - RNA, 19 nt, Artificial Sequence
  Description of Artificial Sequence: Synthetic oligonucleotide
  Sense strand starting at position 501 of SEQ ID NO: 917214
accagauucugagccagaa

SEQ ID NO: 1217767 - RNA, 19 nt, Artificial Sequence
  Description of Artificial Sequence: Synthetic oligonucleotide
  Antisense strand to SEQ ID NO: 1217766
uucuggcucagaaucuggu

SEQ ID NO: 1217768 - RNA, 19 nt, Artificial Sequence
  Description of Artificial Sequence: Synthetic oligonucleotide
  Sense strand starting at position 751 of SEQ ID NO: 917214
aaacuaaucgucgaagucu

SEQ ID NO: 1217769 - RNA, 19 nt, Artificial Sequence
  Description of Artificial Sequence: Synthetic oligonucleotide
  Antisense strand to SEQ ID NO: 1217768
agacuucgacgauuaguuu

SEQ ID NO: 1217770 - RNA, 19 nt, Artificial Sequence
  Description of Artificial Sequence: Synthetic oligonucleotide
  Sense strand starting at position 872 of SEQ ID NO: 917214
auuccaauccuguguguag

SEQ ID NO: 1217771 - RNA, 19 nt, Artificial Sequence
  Description of Artificial Sequence: Synthetic oligonucleotide
  Antisense strand to SEQ ID NO: 1217770
cuacacacaggauuggaau

SEQ ID NO: 1217772 - RNA, 19 nt, Artificial Sequence
  Description of Artificial Sequence: Synthetic oligonucleotide
  Sense strand starting at position 873 of SEQ ID NO: 917214
uuccaauccuguguguaga

SEQ ID NO: 1217773 - RNA, 19 nt, Artificial Sequence
  Description of Artificial Sequence: Synthetic oligonucleotide
  Antisense strand to SEQ ID NO: 1217772
ucuacacacaggauuggaa

SEQ ID NO: 1217774 - RNA, 19 nt, Artificial Sequence
  Description of Artificial Sequence: Synthetic oligonucleotide
  Sense strand starting at position 874 of SEQ ID NO: 917214
uccaauccuguguguagau

SEQ ID NO: 1217775 - RNA, 19 nt, Artificial Sequence
  Description of Artificial Sequence: Synthetic oligonucleotide
  Antisense strand to SEQ ID NO: 1217774
aucuacacacaggauugga

SEQ ID NO: 1217776 - RNA, 19 nt, Artificial Sequence
  Description of Artificial Sequence: Synthetic oligonucleotide
  Sense strand starting at position 875 of SEQ ID NO: 917214
ccaauccuguguguagaua

SEQ ID NO: 1217777 - RNA, 19 nt, Artificial Sequence
  Description of Artificial Sequence: Synthetic oligonucleotide
  Antisense strand to SEQ ID NO: 1217776
uaucuacacacaggauugg

SEQ ID NO: 1217778 - RNA, 19 nt, Artificial Sequence
  Description of Artificial Sequence: Synthetic oligonucleotide
  Sense strand starting at position 906 of SEQ ID NO: 917214
cuacuuugcagaugagaga

SEQ ID NO: 1217779 - RNA, 19 nt, Artificial Sequence
  Description of Artificial Sequence: Synthetic oligonucleotide
  Antisense strand to SEQ ID NO: 1217778
ucucucaucugcaaaguag

SEQ ID NO: 1217780 - RNA, 19 nt, Artificial Sequence
  Description of Artificial Sequence: Synthetic oligonucleotide
  Sense strand starting at position 1164 of SEQ ID NO: 917214
cauugcauucggcauuaca

SEQ ID NO: 1217781 - RNA, 19 nt, Artificial Sequence
  Description of Artificial Sequence: Synthetic oligonucleotide
  Antisense strand to SEQ ID NO: 1217780
uguaaugccgaaugcaaug

SEQ ID NO: 1217782 - RNA, 19 nt, Artificial Sequence
  Description of Artificial Sequence: Synthetic oligonucleotide
  Sense strand starting at position 1167 of SEQ ID NO: 917214
ugcauucggcauuacaagu

SEQ ID NO: 1217783 - RNA, 19 nt, Artificial Sequence
  Description of Artificial Sequence: Synthetic oligonucleotide
  Antisense strand to SEQ ID NO: 1217782
acuuguaaugccgaaugca

SEQ ID NO: 1217784 - RNA, 19 nt, Artificial Sequence
  Description of Artificial Sequence: Synthetic oligonucleotide
  Sense strand starting at position 1173 of SEQ ID NO: 917214
cggcauuacaaguaagcua

SEQ ID NO: 1217785 - RNA, 19 nt, Artificial Sequence
  Description of Artificial Sequence: Synthetic oligonucleotide
  Antisense strand to SEQ ID NO: 1217784
uagcuuacuuguaaugccg

SEQ ID NO: 1217786 - RNA, 19 nt, Artificial Sequence
  Description of Artificial Sequence: Synthetic oligonucleotide
  Sense strand starting at position 1212 of SEQ ID NO: 917214
ggaaguggguaguuuauau

SEQ ID NO: 1217787 - RNA, 19 nt, Artificial Sequence
  Description of Artificial Sequence: Synthetic oligonucleotide
  Antisense strand to SEQ ID NO: 1217786
auauaaacuacccacuucc

SEQ ID NO: 1217788 - RNA, 19 nt, Artificial Sequence
  Description of Artificial Sequence: Synthetic oligonucleotide
  Sense strand starting at position 1219 of SEQ ID NO: 917214
gguaguuuauaugcaaaua

SEQ ID NO: 1217789 - RNA, 19 nt, Artificial Sequence
  Description of Artificial Sequence: Synthetic oligonucleotide
  Antisense strand to SEQ ID NO: 1217788
uauuugcauauaaacuacc

SEQ ID NO: 1217790 - RNA, 19 nt, Artificial Sequence
  Description of Artificial Sequence: Synthetic oligonucleotide
  Sense strand starting at position 1265 of SEQ ID NO: 917214
gaacuugaacaucguggua

SEQ ID NO: 1217791 - RNA, 19 nt, Artificial Sequence
  Description of Artificial Sequence: Synthetic oligonucleotide
  Antisense strand to SEQ ID NO: 1217790
uaccacgauguucaaguuc

SEQ ID NO: 1217792 - RNA, 19 nt, Artificial Sequence
  Description of Artificial Sequence: Synthetic oligonucleotide
  Sense strand starting at position 1325 of SEQ ID NO: 917214
ggacgacuguacuuagaaa

SEQ ID NO: 1217793 - RNA, 19 nt, Artificial Sequence
  Description of Artificial Sequence: Synthetic oligonucleotide
  Antisense strand to SEQ ID NO: 1217792
uuucuaaguacagucgucc

SEQ ID NO: 1217794 - RNA, 19 nt, Artificial Sequence
  Description of Artificial Sequence: Synthetic oligonucleotide
  Sense strand starting at position 2053 of SEQ ID NO: 917214
ccgcacaugacguauauuu

SEQ ID NO: 1217795 - RNA, 19 nt, Artificial Sequence
  Description of Artificial Sequence: Synthetic oligonucleotide
  Antisense strand to SEQ ID NO: 1217794
aaauauacgucaugugcgg

SEQ ID NO: 1217796 - RNA, 19 nt, Artificial Sequence
  Description of Artificial Sequence: Synthetic oligonucleotide
  Sense strand starting at position 2155 of SEQ ID NO: 917214
uccugaaggcguuaagcau

SEQ ID NO: 1217797 - RNA, 19 nt, Artificial Sequence
  Description of Artificial Sequence: Synthetic oligonucleotide
  Antisense strand to SEQ ID NO: 1217796
augcuuaacgccuucagga

SEQ ID NO: 1217798 - RNA, 19 nt, Artificial Sequence
  Description of Artificial Sequence: Synthetic oligonucleotide
  Sense strand starting at position 2367 of SEQ ID NO: 917214
caccacuaugcuuggcgaa

SEQ ID NO: 1217799 - RNA, 19 nt, Artificial Sequence
  Description of Artificial Sequence: Synthetic oligonucleotide
  Antisense strand to SEQ ID NO: 1217798
uucgccaagcauaguggug

SEQ ID NO: 1217800 - RNA, 19 nt, Artificial Sequence
  Description of Artificial Sequence: Synthetic oligonucleotide
  Sense strand starting at position 2368 of SEQ ID NO: 917214
accacuaugcuuggcgaau

SEQ ID NO: 1217801 - RNA, 19 nt, Artificial Sequence
  Description of Artificial Sequence: Synthetic oligonucleotide
  Antisense strand to SEQ ID NO: 1217800
auucgccaagcauaguggu

SEQ ID NO: 1217802 - RNA, 19 nt, Artificial Sequence
  Description of Artificial Sequence: Synthetic oligonucleotide
  Sense strand starting at position 2482 of SEQ ID NO: 917214
gugugaagauacuuaacac

SEQ ID NO: 1217803 - RNA, 19 nt, Artificial Sequence
  Description of Artificial Sequence: Synthetic oligonucleotide
  Antisense strand to SEQ ID NO: 1217802
guguuaaguaucuucacac

SEQ ID NO: 1217804 - RNA, 19 nt, Artificial Sequence
  Description of Artificial Sequence: Synthetic oligonucleotide
  Sense strand starting at position 2578 of SEQ ID NO: 917214
gcacguaguaacuaaagaa

SEQ ID NO: 1217805 - RNA, 19 nt, Artificial Sequence
  Description of Artificial Sequence: Synthetic oligonucleotide
  Antisense strand to SEQ ID NO: 1217804
uucuuuaguuacuacgugc

SEQ ID NO: 1217806 - RNA, 19 nt, Artificial Sequence
  Description of Artificial Sequence: Synthetic oligonucleotide
  Sense strand starting at position 2863 of SEQ ID NO: 917214
guacuuacauauguugauu

SEQ ID NO: 1217807 - RNA, 19 nt, Artificial Sequence
  Description of Artificial Sequence: Synthetic oligonucleotide
  Antisense strand to SEQ ID NO: 1217806
aaucaacauauguaaguac

SEQ ID NO: 1217808 - RNA, 19 nt, Artificial Sequence
  Description of Artificial Sequence: Synthetic oligonucleotide
  Sense strand starting at position 3059 of SEQ ID NO: 917214
cuugacauauaguuuaguu

SEQ ID NO: 1217809 - RNA, 19 nt, Artificial Sequence
  Description of Artificial Sequence: Synthetic oligonucleotide
  Antisense strand to SEQ ID NO: 1217808
aacuaaacuauaugucaag

SEQ ID NO: 1217810 - RNA, 19 nt, Artificial Sequence
  Description of Artificial Sequence: Synthetic oligonucleotide
  Sense strand starting at position 3105 of SEQ ID NO: 917214
cgcggcuuguagaucagaa

SEQ ID NO: 1217811 - RNA, 19 nt, Artificial Sequence
  Description of Artificial Sequence: Synthetic oligonucleotide
  Antisense strand to SEQ ID NO: 1217810
uucugaucuacaagccgcg

SEQ ID NO: 1217812 - RNA, 19 nt, Artificial Sequence
  Description of Artificial Sequence: Synthetic oligonucleotide
  Sense strand starting at position 3212 of SEQ ID NO: 917214
ucacuaugguguuuagcau

SEQ ID NO: 1217813 - RNA, 19 nt, Artificial Sequence
  Description of Artificial Sequence: Synthetic oligonucleotide
  Antisense strand to SEQ ID NO: 1217812
augcuaaacaccauaguga

SEQ ID NO: 1217814 - RNA, 19 nt, Artificial Sequence
  Description of Artificial Sequence: Synthetic oligonucleotide
  Sense strand starting at position 3221 of SEQ ID NO: 917214
uguuuagcaucccugaagu

SEQ ID NO: 1217815 - RNA, 19 nt, Artificial Sequence
  Description of Artificial Sequence: Synthetic oligonucleotide
  Antisense strand to SEQ ID NO: 1217814
acuucagggaugcuaaaca

SEQ ID NO: 1217816 - RNA, 19 nt, Artificial Sequence
  Description of Artificial Sequence: Synthetic oligonucleotide
  Sense strand starting at position 3223 of SEQ ID NO: 917214
uuuagcaucccugaaguca

SEQ ID NO: 1217817 - RNA, 19 nt, Artificial Sequence
  Description of Artificial Sequence: Synthetic oligonucleotide
  Antisense strand to SEQ ID NO: 1217816
ugacuucagggaugcuaaa

SEQ ID NO: 1217818 - RNA, 19 nt, Artificial Sequence
  Description of Artificial Sequence: Synthetic oligonucleotide
  Sense strand starting at position 3256 of SEQ ID NO: 917214
uugugucuccaucaguaau

SEQ ID NO: 1217819 - RNA, 19 nt, Artificial Sequence
  Description of Artificial Sequence: Synthetic oligonucleotide
  Antisense strand to SEQ ID NO: 1217818
auuacugauggagacacaa

SEQ ID NO: 1217820 - RNA, 19 nt, Artificial Sequence
  Description of Artificial Sequence: Synthetic oligonucleotide
  Sense strand starting at position 3258 of SEQ ID NO: 917214
gugucuccaucaguaauca

SEQ ID NO: 1217821 - RNA, 19 nt, Artificial Sequence
  Description of Artificial Sequence: Synthetic oligonucleotide
  Antisense strand to SEQ ID NO: 1217820
ugauuacugauggagacac

SEQ ID NO: 1217822 - RNA, 19 nt, Artificial Sequence
  Description of Artificial Sequence: Synthetic oligonucleotide
  Sense strand starting at position 3266 of SEQ ID NO: 917214
aucaguaaucagggcauaa

SEQ ID NO: 1217823 - RNA, 19 nt, Artificial Sequence
  Description of Artificial Sequence: Synthetic oligonucleotide
  Antisense strand to SEQ ID NO: 1217822
uuaugcccugauuacugau

SEQ ID NO: 1217824 - RNA, 19 nt, Artificial Sequence
  Description of Artificial Sequence: Synthetic oligonucleotide
  Sense strand starting at position 3305 of SEQ ID NO: 917214
guaaguauucaagguguua

SEQ ID NO: 1217825 - RNA, 19 nt, Artificial Sequence
  Description of Artificial Sequence: Synthetic oligonucleotide
  Antisense strand to SEQ ID NO: 1217824
uaacaccuugaauacuuac

SEQ ID NO: 1217826 - RNA, 19 nt, Artificial Sequence
  Description of Artificial Sequence: Synthetic oligonucleotide
  Sense strand starting at position 3758 of SEQ ID NO: 917214
ccgugcuccguggagaaau

SEQ ID NO: 1217827 - RNA, 19 nt, Artificial Sequence
  Description of Artificial Sequence: Synthetic oligonucleotide
  Antisense strand to SEQ ID NO: 1217826
auuucuccacggagcacgg

SEQ ID NO: 1217828 - RNA, 19 nt, Artificial Sequence
  Description of Artificial Sequence: Synthetic oligonucleotide
  Sense strand starting at position 3796 of SEQ ID NO: 917214
uucuaugcucaauaagaug

SEQ ID NO: 1217829 - RNA, 19 nt, Artificial Sequence
  Description of Artificial Sequence: Synthetic oligonucleotide
  Antisense strand to SEQ ID NO: 1217828
caucuuauugagcauagaa

SEQ ID NO: 1217830 - RNA, 19 nt, Artificial Sequence
  Description of Artificial Sequence: Synthetic oligonucleotide
  Sense strand starting at position 3916 of SEQ ID NO: 917215
cccagaaacuguucccagu

SEQ ID NO: 1217831 - RNA, 19 nt, Artificial Sequence
  Description of Artificial Sequence: Synthetic oligonucleotide
  Antisense strand to SEQ ID NO: 1217830
acugggaacaguuucuggg

SEQ ID NO: 1217832 - RNA, 19 nt, Artificial Sequence
  Description of Artificial Sequence: Synthetic oligonucleotide
  Sense strand starting at position 8 of SEQ ID NO: 917215
cagaauaagcuguguuauu

SEQ ID NO: 1217833 - RNA, 19 nt, Artificial Sequence
  Description of Artificial Sequence: Synthetic oligonucleotide
  Antisense strand to SEQ ID NO: 1217832
aauaacacagcuuauucug

SEQ ID NO: 1217834 - RNA, 19 nt, Artificial Sequence
  Description of Artificial Sequence: Synthetic oligonucleotide
  Sense strand starting at position 9 of SEQ ID NO: 917215
agaauaagcuguguuauua

SEQ ID NO: 1217835 - RNA, 19 nt, Artificial Sequence
  Description of Artificial Sequence: Synthetic oligonucleotide
  Antisense strand to SEQ ID NO: 1217834
uaauaacacagcuuauucu

SEQ ID NO: 1217836 - RNA, 19 nt, Artificial Sequence
  Description of Artificial Sequence: Synthetic oligonucleotide
  Sense strand starting at position 65 of SEQ ID NO: 917215
auaggcaaauguuucuaua

SEQ ID NO: 1217837 - RNA, 19 nt, Artificial Sequence
  Description of Artificial Sequence: Synthetic oligonucleotide
  Antisense strand to SEQ ID NO: 1217836
uauagaaacauuugccuau

SEQ ID NO: 1217838 - RNA, 19 nt, Artificial Sequence
  Description of Artificial Sequence: Synthetic oligonucleotide
  Sense strand starting at position 67 of SEQ ID NO: 917215
aggcaaauguuucuauaca

SEQ ID NO: 1217839 - RNA, 19 nt, Artificial Sequence
  Description of Artificial Sequence: Synthetic oligonucleotide
  Antisense strand to SEQ ID NO: 1217838
uguauagaaacauuugccu

SEQ ID NO: 1217840 - RNA, 19 nt, Artificial Sequence
  Description of Artificial Sequence: Synthetic oligonucleotide
  Sense strand starting at position 182 of SEQ ID NO: 917215
acagauucuuggcugaggu

SEQ ID NO: 1217841 - RNA, 19 nt, Artificial Sequence
  Description of Artificial Sequence: Synthetic oligonucleotide
  Antisense strand to SEQ ID NO: 1217840
accucagccaagaaucugu

SEQ ID NO: 1217842 - RNA, 19 nt, Artificial Sequence
  Description of Artificial Sequence: Synthetic oligonucleotide
  Sense strand starting at position 228 of SEQ ID NO: 917215
gggucugucuuagcaggau

SEQ ID NO: 1217843 - RNA, 19 nt, Artificial Sequence
  Description of Artificial Sequence: Synthetic oligonucleotide
  Antisense strand to SEQ ID NO: 1217842
auccugcuaagacagaccc

SEQ ID NO: 1217844 - RNA, 19 nt, Artificial Sequence
  Description of Artificial Sequence: Synthetic oligonucleotide
  Sense strand starting at position 231 of SEQ ID NO: 917215
ucugucuuagcaggauaca

SEQ ID NO: 1217845 - RNA, 19 nt, Artificial Sequence
  Description of Artificial Sequence: Synthetic oligonucleotide
  Antisense strand to SEQ ID NO: 1217844
uguauccugcuaagacaga

SEQ ID NO: 1217846 - RNA, 19 nt, Artificial Sequence
  Description of Artificial Sequence: Synthetic oligonucleotide
  Sense strand starting at position 232 of SEQ ID NO: 917215
cugucuuagcaggauacau

SEQ ID NO: 1217847 - RNA, 19 nt, Artificial Sequence
  Description of Artificial Sequence: Synthetic oligonucleotide
  Antisense strand to SEQ ID NO: 1217846
auguauccugcuaagacag

SEQ ID NO: 1217848 - RNA, 19 nt, Artificial Sequence
  Description of Artificial Sequence: Synthetic oligonucleotide
  Sense strand starting at position 234 of SEQ ID NO: 917215
gucuuagcaggauacauca

SEQ ID NO: 1217849 - RNA, 19 nt, Artificial Sequence
  Description of Artificial Sequence: Synthetic oligonucleotide
  Antisense strand to SEQ ID NO: 1217848
ugauguauccugcuaagac

SEQ ID NO: 1217850 - RNA, 19 nt, Artificial Sequence
  Description of Artificial Sequence: Synthetic oligonucleotide
  Sense strand starting at position 692 of SEQ ID NO: 917215
ggauguggaucgaauggau

SEQ ID NO: 1217851 - RNA, 19 nt, Artificial Sequence
  Description of Artificial Sequence: Synthetic oligonucleotide
  Antisense strand to SEQ ID NO: 1217850
auccauucgauccacaucc

SEQ ID NO: 1217852 - RNA, 19 nt, Artificial Sequence
  Description of Artificial Sequence: Synthetic oligonucleotide
  Sense strand starting at position 695 of SEQ ID NO: 917215
uguggaucgaauggaugau

SEQ ID NO: 1217853 - RNA, 19 nt, Artificial Sequence
  Description of Artificial Sequence: Synthetic oligonucleotide
  Antisense strand to SEQ ID NO: 1217852
aucauccauucgauccaca

SEQ ID NO: 1217854 - RNA, 19 nt, Artificial Sequence
  Description of Artificial Sequence: Synthetic oligonucleotide
  Sense strand starting at position 749 of SEQ ID NO: 917215
aaaugaaauuucugguuug

SEQ ID NO: 1217855 - RNA, 19 nt, Artificial Sequence
  Description of Artificial Sequence: Synthetic oligonucleotide
  Antisense strand to SEQ ID NO: 1217854
caaaccagaaauuucauuu

SEQ ID NO: 1217856 - RNA, 19 nt, Artificial Sequence
  Description of Artificial Sequence: Synthetic oligonucleotide
  Sense strand starting at position 824 of SEQ ID NO: 917215
augaguuaugggugggcua

SEQ ID NO: 1217857 - RNA, 19 nt, Artificial Sequence
  Description of Artificial Sequence: Synthetic oligonucleotide
  Antisense strand to SEQ ID NO: 1217856
uagcccacccauaacucau

SEQ ID NO: 1217858 - RNA, 19 nt, Artificial Sequence
  Description of Artificial Sequence: Synthetic oligonucleotide
  Sense strand starting at position 825 of SEQ ID NO: 917215
ugaguuaugggugggcuaa

SEQ ID NO: 1217859 - RNA, 19 nt, Artificial Sequence
  Description of Artificial Sequence: Synthetic oligonucleotide
  Antisense strand to SEQ ID NO: 1217858
uuagcccacccauaacuca

SEQ ID NO: 1217860 - RNA, 19 nt, Artificial Sequence
  Description of Artificial Sequence: Synthetic oligonucleotide
  Sense strand starting at position 826 of SEQ ID NO: 917215
gaguuaugggugggcuaag

SEQ ID NO: 1217861 - RNA, 19 nt, Artificial Sequence
  Description of Artificial Sequence: Synthetic oligonucleotide
  Antisense strand to SEQ ID NO: 1217860
cuuagcccacccauaacuc

SEQ ID NO: 1217862 - RNA, 19 nt, Artificial Sequence
  Description of Artificial Sequence: Synthetic oligonucleotide
  Sense strand starting at position 827 of SEQ ID NO: 917215
aguuaugggugggcuaaga

SEQ ID NO: 1217863 - RNA, 19 nt, Artificial Sequence
  Description of Artificial Sequence: Synthetic oligonucleotide
  Antisense strand to SEQ ID NO: 1217862
ucuuagcccacccauaacu

SEQ ID NO: 1217864 - RNA, 19 nt, Artificial Sequence
  Description of Artificial Sequence: Synthetic oligonucleotide
  Sense strand starting at position 1002 of SEQ ID NO: 917215
uguguucuuguugcuguua

SEQ ID NO: 1217865 - RNA, 19 nt, Artificial Sequence
  Description of Artificial Sequence: Synthetic oligonucleotide
  Antisense strand to SEQ ID NO: 1217864
uaacagcaacaagaacaca

SEQ ID NO: 1217866 - RNA, 19 nt, Artificial Sequence
  Description of Artificial Sequence: Synthetic oligonucleotide
  Sense strand starting at position 1005 of SEQ ID NO: 917215
guucuuguugcuguuauca

SEQ ID NO: 1217867 - RNA, 19 nt, Artificial Sequence
  Description of Artificial Sequence: Synthetic oligonucleotide
  Antisense strand to SEQ ID NO: 1217866
ugauaacagcaacaagaac

SEQ ID NO: 1217868 - RNA, 19 nt, Artificial Sequence
  Description of Artificial Sequence: Synthetic oligonucleotide
  Sense strand starting at position 1050 of SEQ ID NO: 917215
ucauuaacuugugugauuc

SEQ ID NO: 1217869 - RNA, 19 nt, Artificial Sequence
  Description of Artificial Sequence: Synthetic oligonucleotide
  Antisense strand to SEQ ID NO: 1217868
gaaucacacaaguuaauga

SEQ ID NO: 1217870 - RNA, 19 nt, Artificial Sequence
  Description of Artificial Sequence: Synthetic oligonucleotide
  Sense strand starting at position 1060 of SEQ ID NO: 917215
gugugauucuuggcugaag

SEQ ID NO: 1217871 - RNA, 19 nt, Artificial Sequence
  Description of Artificial Sequence: Synthetic oligonucleotide
  Antisense strand to SEQ ID NO: 1217870
cuucagccaagaaucacac

SEQ ID NO: 1217872 - RNA, 19 nt, Artificial Sequence
  Description of Artificial Sequence: Synthetic oligonucleotide
  Sense strand starting at position 1063 of SEQ ID NO: 917215
ugauucuuggcugaagucu

SEQ ID NO: 1217873 - RNA, 19 nt, Artificial Sequence
  Description of Artificial Sequence: Synthetic oligonucleotide
  Antisense strand to SEQ ID NO: 1217872
agacuucagccaagaauca

SEQ ID NO: 1217874 - RNA, 19 nt, Artificial Sequence
  Description of Artificial Sequence: Synthetic oligonucleotide
  Sense strand starting at position 1112 of SEQ ID NO: 917215
ugaccuacuucugugaauu

SEQ ID NO: 1217875 - RNA, 19 nt, Artificial Sequence
  Description of Artificial Sequence: Synthetic oligonucleotide
  Antisense strand to SEQ ID NO: 1217874
aauucacagaaguagguca

SEQ ID NO: 1217876 - RNA, 19 nt, Artificial Sequence
  Description of Artificial Sequence: Synthetic oligonucleotide
  Sense strand starting at position 1220 of SEQ ID NO: 917215
gaccaaucagugcaguguu

SEQ ID NO: 1217877 - RNA, 19 nt, Artificial Sequence
  Description of Artificial Sequence: Synthetic oligonucleotide
  Antisense strand to SEQ ID NO: 1217876
aacacugcacugauugguc

SEQ ID NO: 1217878 - RNA, 19 nt, Artificial Sequence
  Description of Artificial Sequence: Synthetic oligonucleotide
  Sense strand starting at position 1233 of SEQ ID NO: 917215
aguguuuagcacuauagac

SEQ ID NO: 1217879 - RNA, 19 nt, Artificial Sequence
  Description of Artificial Sequence: Synthetic oligonucleotide
  Antisense strand to SEQ ID NO: 1217878
gucuauagugcuaaacacu

SEQ ID NO: 1217880 - RNA, 19 nt, Artificial Sequence
  Description of Artificial Sequence: Synthetic oligonucleotide
  Sense strand starting at position 1338 of SEQ ID NO: 917215
gggugacuuugagccauca

SEQ ID NO: 1217881 - RNA, 19 nt, Artificial Sequence
  Description of Artificial Sequence: Synthetic oligonucleotide
  Antisense strand to SEQ ID NO: 1217880
ugauggcucaaagucaccc

SEQ ID NO: 1217882 - RNA, 19 nt, Artificial Sequence
  Description of Artificial Sequence: Synthetic oligonucleotide
  Sense strand starting at position 1720 of SEQ ID NO: 917215
ggucgaagcagaugucaga

SEQ ID NO: 1217883 - RNA, 19 nt, Artificial Sequence
  Description of Artificial Sequence: Synthetic oligonucleotide
  Antisense strand to SEQ ID NO: 1217882
ucugacaucugcuucgacc

SEQ ID NO: 1217884 - RNA, 19 nt, Artificial Sequence
  Description of Artificial Sequence: Synthetic oligonucleotide
  Sense strand starting at position 1781 of SEQ ID NO: 917215
aaagaagucuauguacuug

SEQ ID NO: 1217885 - RNA, 19 nt, Artificial Sequence
  Description of Artificial Sequence: Synthetic oligonucleotide
  Antisense strand to SEQ ID NO: 1217884
caaguacauagacuucuuu

SEQ ID NO: 1217886 - RNA, 19 nt, Artificial Sequence
  Description of Artificial Sequence: Synthetic oligonucleotide
  Sense strand starting at position 2075 of SEQ ID NO: 917215
ggagaauucuaagccucug

SEQ ID NO: 1217887 - RNA, 19 nt, Artificial Sequence
  Description of Artificial Sequence: Synthetic oligonucleotide
  Antisense strand to SEQ ID NO: 1217886
cagaggcuuagaauucucc

SEQ ID NO: 1217888 - RNA, 19 nt, Artificial Sequence
  Description of Artificial Sequence: Synthetic oligonucleotide
  Sense strand starting at position 2228 of SEQ ID NO: 917215
gggauuguguuucccugaa

SEQ ID NO: 1217889 - RNA, 19 nt, Artificial Sequence
  Description of Artificial Sequence: Synthetic oligonucleotide
  Antisense strand to SEQ ID NO: 1217888
uucagggaaacacaauccc

SEQ ID NO: 1217890 - RNA, 19 nt, Artificial Sequence
  Description of Artificial Sequence: Synthetic oligonucleotide
  Sense strand starting at position 2230 of SEQ ID NO: 917215
gauuguguuucccugaaug

SEQ ID NO: 1217891 - RNA, 19 nt, Artificial Sequence
  Description of Artificial Sequence: Synthetic oligonucleotide
  Antisense strand to SEQ ID NO: 1217890
cauucagggaaacacaauc

SEQ ID NO: 1217892 - RNA, 19 nt, Artificial Sequence
  Description of Artificial Sequence: Synthetic oligonucleotide
  Sense strand starting at position 2232 of SEQ ID NO: 917215
uuguguuucccugaaugga

SEQ ID NO: 1217893 - RNA, 19 nt, Artificial Sequence
  Description of Artificial Sequence: Synthetic oligonucleotide
  Antisense strand to SEQ ID NO: 1217892
uccauucagggaaacacaa

SEQ ID NO: 1217894 - RNA, 19 nt, Artificial Sequence
  Description of Artificial Sequence: Synthetic oligonucleotide
  Sense strand starting at position 2441 of SEQ ID NO: 917215
gggccaaggguuggagaaa

SEQ ID NO: 1217895 - RNA, 19 nt, Artificial Sequence
  Description of Artificial Sequence: Synthetic oligonucleotide
  Antisense strand to SEQ ID NO: 1217894
uuucuccaacccuuggccc

SEQ ID NO: 1217896 - RNA, 19 nt, Artificial Sequence
  Description of Artificial Sequence: Synthetic oligonucleotide
  Sense strand starting at position 2453 of SEQ ID NO: 917215
ggagaaagcugaguuccca

SEQ ID NO: 1217897 - RNA, 19 nt, Artificial Sequence
  Description of Artificial Sequence: Synthetic oligonucleotide
  Antisense strand to SEQ ID NO: 1217896
ugggaacucagcuuucucc

SEQ ID NO: 1217898 - RNA, 19 nt, Artificial Sequence
  Description of Artificial Sequence: Synthetic oligonucleotide
  Sense strand starting at position 2568 of SEQ ID NO: 917215
ucaguugucacagagguuu

SEQ ID NO: 1217899 - RNA, 19 nt, Artificial Sequence
  Description of Artificial Sequence: Synthetic oligonucleotide
  Antisense strand to SEQ ID NO: 1217898
aaaccucugugacaacuga

SEQ ID NO: 1217900 - RNA, 19 nt, Artificial Sequence
  Description of Artificial Sequence: Synthetic oligonucleotide
  Sense strand starting at position 2592 of SEQ ID NO: 917215
ggaccucagucuuugaagu

SEQ ID NO: 1217901 - RNA, 19 nt, Artificial Sequence
  Description of Artificial Sequence: Synthetic oligonucleotide
  Antisense strand to SEQ ID NO: 1217900
acuucaaagacugaggucc

SEQ ID NO: 1217902 - RNA, 19 nt, Artificial Sequence
  Description of Artificial Sequence: Synthetic oligonucleotide
  Sense strand starting at position 3381 of SEQ ID NO: 917215
ucuaaagagcagugaugau

SEQ ID NO: 1217903 - RNA, 19 nt, Artificial Sequence
  Description of Artificial Sequence: Synthetic oligonucleotide
  Antisense strand to SEQ ID NO: 1217902
aucaucacugcucuuuaga

SEQ ID NO: 1217904 - RNA, 19 nt, Artificial Sequence
  Description of Artificial Sequence: Synthetic oligonucleotide
  Sense strand starting at position 3415 of SEQ ID NO: 917215
cguuucuuggccgcauaaa

SEQ ID NO: 1217905 - RNA, 19 nt, Artificial Sequence
  Description of Artificial Sequence: Synthetic oligonucleotide
  Antisense strand to SEQ ID NO: 1217904
uuuaugcggccaagaaacg

SEQ ID NO: 1217906 - RNA, 19 nt, Artificial Sequence
  Description of Artificial Sequence: Synthetic oligonucleotide
  Sense strand starting at position 3538 of SEQ ID NO: 917215
gcccuugucggauggauag

SEQ ID NO: 1217907 - RNA, 19 nt, Artificial Sequence
  Description of Artificial Sequence: Synthetic oligonucleotide
  Antisense strand to SEQ ID NO: 1217906
cuauccauccgacaagggc

SEQ ID NO: 1217908 - RNA, 19 nt, Artificial Sequence
  Description of Artificial Sequence: Synthetic oligonucleotide
  Sense strand starting at position 3689 of SEQ ID NO: 917215
gguguagccauggagucuu

SEQ ID NO: 1217909 - RNA, 19 nt, Artificial Sequence
  Description of Artificial Sequence: Synthetic oligonucleotide
  Antisense strand to SEQ ID NO: 1217908
aagacuccauggcuacacc

SEQ ID NO: 1217910 - RNA, 19 nt, Artificial Sequence
  Description of Artificial Sequence: Synthetic oligonucleotide
  Sense strand starting at position 3697 of SEQ ID NO: 917216
cauggagucuuugccuaug

SEQ ID NO: 1217911 - RNA, 19 nt, Artificial Sequence
  Description of Artificial Sequence: Synthetic oligonucleotide
  Antisense strand to SEQ ID NO: 1217910
cauaggcaaagacuccaug

SEQ ID NO: 1217912 - RNA, 19 nt, Artificial Sequence
  Description of Artificial Sequence: Synthetic oligonucleotide
  Sense strand starting at position 9 of SEQ ID NO: 917216
cgaucaauccugcaugaaa

SEQ ID NO: 1217913 - RNA, 19 nt, Artificial Sequence
  Description of Artificial Sequence: Synthetic oligonucleotide
  Antisense strand to SEQ ID NO: 1217912
uuucaugcaggauugaucg

SEQ ID NO: 1217914 - RNA, 19 nt, Artificial Sequence
  Description of Artificial Sequence: Synthetic oligonucleotide
  Sense strand starting at position 193 of SEQ ID NO: 917216
uguguauuucaguaguguu

SEQ ID NO: 1217915 - RNA, 19 nt, Artificial Sequence
  Description of Artificial Sequence: Synthetic oligonucleotide
  Antisense strand to SEQ ID NO: 1217914
aacacuacugaaauacaca

SEQ ID NO: 1217916 - RNA, 19 nt, Artificial Sequence
  Description of Artificial Sequence: Synthetic oligonucleotide
  Sense strand starting at position 203 of SEQ ID NO: 917216
aguaguguuaaguauccau

SEQ ID NO: 1217917 - RNA, 19 nt, Artificial Sequence
  Description of Artificial Sequence: Synthetic oligonucleotide
  Antisense strand to SEQ ID NO: 1217916
auggauacuuaacacuacu

SEQ ID NO: 1217918 - RNA, 19 nt, Artificial Sequence
  Description of Artificial Sequence: Synthetic oligonucleotide
  Sense strand starting at position 206 of SEQ ID NO: 917216
aguguuaaguauccauuag

SEQ ID NO: 1217919 - RNA, 19 nt, Artificial Sequence
  Description of Artificial Sequence: Synthetic oligonucleotide
  Antisense strand to SEQ ID NO: 1217918
cuaauggauacuuaacacu

SEQ ID NO: 1217920 - RNA, 19 nt, Artificial Sequence
  Description of Artificial Sequence: Synthetic oligonucleotide
  Sense strand starting at position 210 of SEQ ID NO: 917216
uuaaguauccauuagucau

SEQ ID NO: 1217921 - RNA, 19 nt, Artificial Sequence
  Description of Artificial Sequence: Synthetic oligonucleotide
  Antisense strand to SEQ ID NO: 1217920
augacuaauggauacuuaa

SEQ ID NO: 1217922 - RNA, 19 nt, Artificial Sequence
  Description of Artificial Sequence: Synthetic oligonucleotide
  Sense strand starting at position 239 of SEQ ID NO: 917216
gcaguucgccagcucacaa

SEQ ID NO: 1217923 - RNA, 19 nt, Artificial Sequence
  Description of Artificial Sequence: Synthetic oligonucleotide
  Antisense strand to SEQ ID NO: 1217922
uugugagcuggcgaacugc

SEQ ID NO: 1217924 - RNA, 19 nt, Artificial Sequence
  Description of Artificial Sequence: Synthetic oligonucleotide
  Sense strand starting at position 305 of SEQ ID NO: 917216
ggagacuacuaaucccuuu

SEQ ID NO: 1217925 - RNA, 19 nt, Artificial Sequence
  Description of Artificial Sequence: Synthetic oligonucleotide
  Antisense strand to SEQ ID NO: 1217924
aaagggauuaguagucucc

SEQ ID NO: 1217926 - RNA, 19 nt, Artificial Sequence
  Description of Artificial Sequence: Synthetic oligonucleotide
  Sense strand starting at position 369 of SEQ ID NO: 917216
agaccauguuaauuguaca

SEQ ID NO: 1217927 - RNA, 19 nt, Artificial Sequence
  Description of Artificial Sequence: Synthetic oligonucleotide
  Antisense strand to SEQ ID NO: 1217926
uguacaauuaacauggucu

SEQ ID NO: 1217928 - RNA, 19 nt, Artificial Sequence
  Description of Artificial Sequence: Synthetic oligonucleotide
  Sense strand starting at position 861 of SEQ ID NO: 917216
auaauuuggucccagauua

SEQ ID NO: 1217929 - RNA, 19 nt, Artificial Sequence
  Description of Artificial Sequence: Synthetic oligonucleotide
  Antisense strand to SEQ ID NO: 1217928
uaaucugggaccaaauuau

SEQ ID NO: 1217930 - RNA, 19 nt, Artificial Sequence
  Description of Artificial Sequence: Synthetic oligonucleotide
  Sense strand starting at position 977 of SEQ ID NO: 917216
acgguacaaugguuucaga

SEQ ID NO: 1217931 - RNA, 19 nt, Artificial Sequence
  Description of Artificial Sequence: Synthetic oligonucleotide
  Antisense strand to SEQ ID NO: 1217930
ucugaaaccauuguaccgu

SEQ ID NO: 1217932 - RNA, 19 nt, Artificial Sequence
  Description of Artificial Sequence: Synthetic oligonucleotide
  Sense strand starting at position 1118 of SEQ ID NO: 917216
auaucaauuugauaggguu

SEQ ID NO: 1217933 - RNA, 19 nt, Artificial Sequence
  Description of Artificial Sequence: Synthetic oligonucleotide
  Antisense strand to SEQ ID NO: 1217932
aacccuaucaaauugauau

SEQ ID NO: 1217934 - RNA, 19 nt, Artificial Sequence
  Description of Artificial Sequence: Synthetic oligonucleotide
  Sense strand starting at position 1131 of SEQ ID NO: 917216
aggguugcucugggaauua

SEQ ID NO: 1217935 - RNA, 19 nt, Artificial Sequence
  Description of Artificial Sequence: Synthetic oligonucleotide
  Antisense strand to SEQ ID NO: 1217934
uaauucccagagcaacccu

SEQ ID NO: 1217936 - RNA, 19 nt, Artificial Sequence
  Description of Artificial Sequence: Synthetic oligonucleotide
  Sense strand starting at position 1556 of SEQ ID NO: 917216
cuaggaaagucuuucugaa

SEQ ID NO: 1217937 - RNA, 19 nt, Artificial Sequence
  Description of Artificial Sequence: Synthetic oligonucleotide
  Antisense strand to SEQ ID NO: 1217936
uucagaaagacuuuccuag

SEQ ID NO: 1217938 - RNA, 19 nt, Artificial Sequence
  Description of Artificial Sequence: Synthetic oligonucleotide
  Sense strand starting at position 1558 of SEQ ID NO: 917216
aggaaagucuuucugaaca

SEQ ID NO: 1217939 - RNA, 19 nt, Artificial Sequence
  Description of Artificial Sequence: Synthetic oligonucleotide
  Antisense strand to SEQ ID NO: 1217938
uguucagaaagacuuuccu

SEQ ID NO: 1217940 - RNA, 19 nt, Artificial Sequence
  Description of Artificial Sequence: Synthetic oligonucleotide
  Sense strand starting at position 2203 of SEQ ID NO: 917216
ugcucagacucuucccaga

SEQ ID NO: 1217941 - RNA, 19 nt, Artificial Sequence
  Description of Artificial Sequence: Synthetic oligonucleotide
  Antisense strand to SEQ ID NO: 1217940
ucugggaagagucugagca

SEQ ID NO: 1217942 - RNA, 19 nt, Artificial Sequence
  Description of Artificial Sequence: Synthetic oligonucleotide
  Sense strand starting at position 2266 of SEQ ID NO: 917216
uucgcuuaacucgugcaga

SEQ ID NO: 1217943 - RNA, 19 nt, Artificial Sequence
  Description of Artificial Sequence: Synthetic oligonucleotide
  Antisense strand to SEQ ID NO: 1217942
ucugcacgaguuaagcgaa

SEQ ID NO: 1217944 - RNA, 19 nt, Artificial Sequence
  Description of Artificial Sequence: Synthetic oligonucleotide
  Sense strand starting at position 2293 of SEQ ID NO: 917216
gugucacuuauguagaaac

SEQ ID NO: 1217945 - RNA, 19 nt, Artificial Sequence
  Description of Artificial Sequence: Synthetic oligonucleotide
  Antisense strand to SEQ ID NO: 1217944
guuucuacauaagugacac

SEQ ID NO: 1217946 - RNA, 19 nt, Artificial Sequence
  Description of Artificial Sequence: Synthetic oligonucleotide
  Sense strand starting at position 2295 of SEQ ID NO: 917216
gucacuuauguagaaacua

SEQ ID NO: 1217947 - RNA, 19 nt, Artificial Sequence
  Description of Artificial Sequence: Synthetic oligonucleotide
  Antisense strand to SEQ ID NO: 1217946
uaguuucuacauaagugac

SEQ ID NO: 1217948 - RNA, 19 nt, Artificial Sequence
  Description of Artificial Sequence: Synthetic oligonucleotide
  Sense strand starting at position 2372 of SEQ ID NO: 917216
gguagcuugaguuaaacaa

SEQ ID NO: 1217949 - RNA, 19 nt, Artificial Sequence
  Description of Artificial Sequence: Synthetic oligonucleotide
  Antisense strand to SEQ ID NO: 1217948
uuguuuaacucaagcuacc

SEQ ID NO: 1217950 - RNA, 19 nt, Artificial Sequence
  Description of Artificial Sequence: Synthetic oligonucleotide
  Sense strand starting at position 2545 of SEQ ID NO: 917216
aagcaaacuguugagugua

SEQ ID NO: 1217951 - RNA, 19 nt, Artificial Sequence
  Description of Artificial Sequence: Synthetic oligonucleotide
  Antisense strand to SEQ ID NO: 1217950
uacacucaacaguuugcuu

SEQ ID NO: 1217952 - RNA, 19 nt, Artificial Sequence
  Description of Artificial Sequence: Synthetic oligonucleotide
  Sense strand starting at position 2623 of SEQ ID NO: 917216
uuagacugacauuguaaau

SEQ ID NO: 1217953 - RNA, 19 nt, Artificial Sequence
  Description of Artificial Sequence: Synthetic oligonucleotide
  Antisense strand to SEQ ID NO: 1217952
auuuacaaugucagucuaa

SEQ ID NO: 1217954 - RNA, 19 nt, Artificial Sequence
  Description of Artificial Sequence: Synthetic oligonucleotide
  Sense strand starting at position 2767 of SEQ ID NO: 917216
ggaauugggcccugcaaau

SEQ ID NO: 1217955 - RNA, 19 nt, Artificial Sequence
  Description of Artificial Sequence: Synthetic oligonucleotide
  Antisense strand to SEQ ID NO: 1217954
auuugcagggcccaauucc

SEQ ID NO: 1217956 - RNA, 19 nt, Artificial Sequence
  Description of Artificial Sequence: Synthetic oligonucleotide
  Sense strand starting at position 2791 of SEQ ID NO: 917216
agcuaugggagcugacuua

SEQ ID NO: 1217957 - RNA, 19 nt, Artificial Sequence
  Description of Artificial Sequence: Synthetic oligonucleotide
  Antisense strand to SEQ ID NO: 1217956
uaagucagcucccauagcu

SEQ ID NO: 1217958 - RNA, 19 nt, Artificial Sequence
  Description of Artificial Sequence: Synthetic oligonucleotide
  Sense strand starting at position 2800 of SEQ ID NO: 917216
agcugacuuaaguauggau

SEQ ID NO: 1217959 - RNA, 19 nt, Artificial Sequence
  Description of Artificial Sequence: Synthetic oligonucleotide
  Antisense strand to SEQ ID NO: 1217958
auccauacuuaagucagcu

SEQ ID NO: 1217960 - RNA, 19 nt, Artificial Sequence
  Description of Artificial Sequence: Synthetic oligonucleotide
  Sense strand starting at position 2802 of SEQ ID NO: 917216
cugacuuaaguauggauga

SEQ ID NO: 1217961 - RNA, 19 nt, Artificial Sequence
  Description of Artificial Sequence: Synthetic oligonucleotide
  Antisense strand to SEQ ID NO: 1217960
ucauccauacuuaagucag

SEQ ID NO: 1217962 - RNA, 19 nt, Artificial Sequence
  Description of Artificial Sequence: Synthetic oligonucleotide
  Sense strand starting at position 2878 of SEQ ID NO: 917216
cauagugaucuuuggacua

SEQ ID NO: 1217963 - RNA, 19 nt, Artificial Sequence
  Description of Artificial Sequence: Synthetic oligonucleotide
  Antisense strand to SEQ ID NO: 1217962
uaguccaaagaucacuaug

SEQ ID NO: 1217964 - RNA, 19 nt, Artificial Sequence
  Description of Artificial Sequence: Synthetic oligonucleotide
  Sense strand starting at position 2918 of SEQ ID NO: 917216
uguggaucaauuggaacuu

SEQ ID NO: 1217965 - RNA, 19 nt, Artificial Sequence
  Description of Artificial Sequence: Synthetic oligonucleotide
  Antisense strand to SEQ ID NO: 1217964
aaguuccaauugauccaca

SEQ ID NO: 1217966 - RNA, 19 nt, Artificial Sequence
  Description of Artificial Sequence: Synthetic oligonucleotide
  Sense strand starting at position 2976 of SEQ ID NO: 917216
uugagaaagcauugaagua

SEQ ID NO: 1217967 - RNA, 19 nt, Artificial Sequence
  Description of Artificial Sequence: Synthetic oligonucleotide
  Antisense strand to SEQ ID NO: 1217966
uacuucaaugcuuucucaa

SEQ ID NO: 1217968 - RNA, 19 nt, Artificial Sequence
  Description of Artificial Sequence: Synthetic oligonucleotide
  Sense strand starting at position 3202 of SEQ ID NO: 917216
ugugaaguucuuuacuaaa

SEQ ID NO: 1217969 - RNA, 19 nt, Artificial Sequence
  Description of Artificial Sequence: Synthetic oligonucleotide
  Antisense strand to SEQ ID NO: 1217968
uuuaguaaagaacuucaca

SEQ ID NO: 1217970 - RNA, 19 nt, Artificial Sequence
  Description of Artificial Sequence: Synthetic oligonucleotide
  Sense strand starting at position 3219 of SEQ ID NO: 917216
aaggguucuugugugaaua

SEQ ID NO: 1217971 - RNA, 19 nt, Artificial Sequence
  Description of Artificial Sequence: Synthetic oligonucleotide
  Antisense strand to SEQ ID NO: 1217970
uauucacacaagaacccuu

SEQ ID NO: 1217972 - RNA, 19 nt, Artificial Sequence
  Description of Artificial Sequence: Synthetic oligonucleotide
  Sense strand starting at position 3229 of SEQ ID NO: 917216
gugugaauacaaugugaga

SEQ ID NO: 1217973 - RNA, 19 nt, Artificial Sequence
  Description of Artificial Sequence: Synthetic oligonucleotide
  Antisense strand to SEQ ID NO: 1217972
ucucacauuguauucacac

SEQ ID NO: 1217974 - RNA, 19 nt, Artificial Sequence
  Description of Artificial Sequence: Synthetic oligonucleotide
  Sense strand starting at position 3231 of SEQ ID NO: 917216
gugaauacaaugugagaau

SEQ ID NO: 1217975 - RNA, 19 nt, Artificial Sequence
  Description of Artificial Sequence: Synthetic oligonucleotide
  Antisense strand to SEQ ID NO: 1217974
auucucacauuguauucac

SEQ ID NO: 1217976 - RNA, 19 nt, Artificial Sequence
  Description of Artificial Sequence: Synthetic oligonucleotide
  Sense strand starting at position 3476 of SEQ ID NO: 917216
aaauguguggcugagagga

SEQ ID NO: 1217977 - RNA, 19 nt, Artificial Sequence
  Description of Artificial Sequence: Synthetic oligonucleotide
  Antisense strand to SEQ ID NO: 1217976
uccucucagccacacauuu

SEQ ID NO: 1217978 - RNA, 19 nt, Artificial Sequence
  Description of Artificial Sequence: Synthetic oligonucleotide
  Sense strand starting at position 3499 of SEQ ID NO: 917216
ggacucuugguuugaacua

SEQ ID NO: 1217979 - RNA, 19 nt, Artificial Sequence
  Description of Artificial Sequence: Synthetic oligonucleotide
  Antisense strand to SEQ ID NO: 1217978
uaguucaaaccaagagucc

SEQ ID NO: 1217980 - RNA, 19 nt, Artificial Sequence
  Description of Artificial Sequence: Synthetic oligonucleotide
  Sense strand starting at position 3546 of SEQ ID NO: 917216
gcaauaaagggaugcaaua

SEQ ID NO: 1217981 - RNA, 19 nt, Artificial Sequence
  Description of Artificial Sequence: Synthetic oligonucleotide
  Antisense strand to SEQ ID NO: 1217980
uauugcaucccuuuauugc

SEQ ID NO: 1217982 - RNA, 19 nt, Artificial Sequence
  Description of Artificial Sequence: Synthetic oligonucleotide
  Sense strand starting at position 3585 of SEQ ID NO: 917216
auacuugaagccuguaaga

SEQ ID NO: 1217983 - RNA, 19 nt, Artificial Sequence
  Description of Artificial Sequence: Synthetic oligonucleotide
  Antisense strand to SEQ ID NO: 1217982
ucuuacaggcuucaaguau

SEQ ID NO: 1217984 - RNA, 19 nt, Artificial Sequence
  Description of Artificial Sequence: Synthetic oligonucleotide
  Sense strand starting at position 3835 of SEQ ID NO: 917216
accaucaugguguaauuau

SEQ ID NO: 1217985 - RNA, 19 nt, Artificial Sequence
  Description of Artificial Sequence: Synthetic oligonucleotide
  Antisense strand to SEQ ID NO: 1217984
auaauuacaccaugauggu

SEQ ID NO: 1217986 - RNA, 19 nt, Artificial Sequence
  Description of Artificial Sequence: Synthetic oligonucleotide
  Sense strand starting at position 3842 of SEQ ID NO: 917216
ugguguaauuaucuuccaa

SEQ ID NO: 1217987 - RNA, 19 nt, Artificial Sequence
  Description of Artificial Sequence: Synthetic oligonucleotide
  Antisense strand to SEQ ID NO: 1217986
uuggaagauaauuacacca

SEQ ID NO: 1217988 - RNA, 19 nt, Artificial Sequence
  Description of Artificial Sequence: Synthetic oligonucleotide
  Sense strand starting at position 3844 of SEQ ID NO: 917216
guguaauuaucuuccaaag

SEQ ID NO: 1217989 - RNA, 19 nt, Artificial Sequence
  Description of Artificial Sequence: Synthetic oligonucleotide
  Antisense strand to SEQ ID NO: 1217988
cuuuggaagauaauuacac

SEQ ID NO: 1217990 - RNA, 19 nt, Artificial Sequence
  Description of Artificial Sequence: Synthetic oligonucleotide
  Sense strand starting at position 3876 of SEQ ID NO: 917217
auaccaucacguuaaggau

SEQ ID NO: 1217991 - RNA, 19 nt, Artificial Sequence
  Description of Artificial Sequence: Synthetic oligonucleotide
  Antisense strand to SEQ ID NO: 1217990
auccuuaacgugaugguau

SEQ ID NO: 1217992 - RNA, 19 nt, Artificial Sequence
  Description of Artificial Sequence: Synthetic oligonucleotide
  Sense strand starting at position 184 of SEQ ID NO: 917217
aaagcagcucguuaucaaa

SEQ ID NO: 1217993 - RNA, 19 nt, Artificial Sequence
  Description of Artificial Sequence: Synthetic oligonucleotide
  Antisense strand to SEQ ID NO: 1217992
uuugauaacgagcugcuuu

SEQ ID NO: 1217994 - RNA, 19 nt, Artificial Sequence
  Description of Artificial Sequence: Synthetic oligonucleotide
  Sense strand starting at position 336 of SEQ ID NO: 917217
caaagaucuuaaguguggu

SEQ ID NO: 1217995 - RNA, 19 nt, Artificial Sequence
  Description of Artificial Sequence: Synthetic oligonucleotide
  Antisense strand to SEQ ID NO: 1217994
accacacuuaagaucuuug

SEQ ID NO: 1217996 - RNA, 19 nt, Artificial Sequence
  Description of Artificial Sequence: Synthetic oligonucleotide
  Sense strand starting at position 339 of SEQ ID NO: 917217
agaucuuaaguguggugau

SEQ ID NO: 1217997 - RNA, 19 nt, Artificial Sequence
  Description of Artificial Sequence: Synthetic oligonucleotide
  Antisense strand to SEQ ID NO: 1217996
aucaccacacuuaagaucu

SEQ ID NO: 1217998 - RNA, 19 nt, Artificial Sequence
  Description of Artificial Sequence: Synthetic oligonucleotide
  Sense strand starting at position 352 of SEQ ID NO: 917217
ggugaugcagcauaaaucu

SEQ ID NO: 1217999 - RNA, 19 nt, Artificial Sequence
  Description of Artificial Sequence: Synthetic oligonucleotide
  Antisense strand to SEQ ID NO: 1217998
agauuuaugcugcaucacc

SEQ ID NO: 1218000 - RNA, 19 nt, Artificial Sequence
  Description of Artificial Sequence: Synthetic oligonucleotide
  Sense strand starting at position 445 of SEQ ID NO: 917217
uuaacucugccauaaacga

SEQ ID NO: 1218001 - RNA, 19 nt, Artificial Sequence
  Description of Artificial Sequence: Synthetic oligonucleotide
  Antisense strand to SEQ ID NO: 1218000
ucguuuauggcagaguuaa

SEQ ID NO: 1218002 - RNA, 19 nt, Artificial Sequence
  Description of Artificial Sequence: Synthetic oligonucleotide
  Sense strand starting at position 463 of SEQ ID NO: 917217
auuagaagauuggcgucua

SEQ ID NO: 1218003 - RNA, 19 nt, Artificial Sequence
  Description of Artificial Sequence: Synthetic oligonucleotide
  Antisense strand to SEQ ID NO: 1218002
uagacgccaaucuucuaau

SEQ ID NO: 1218004 - RNA, 19 nt, Artificial Sequence
  Description of Artificial Sequence: Synthetic oligonucleotide
  Sense strand starting at position 562 of SEQ ID NO: 917217
gagugaucuagugaucaug

SEQ ID NO: 1218005 - RNA, 19 nt, Artificial Sequence
  Description of Artificial Sequence: Synthetic oligonucleotide
  Antisense strand to SEQ ID NO: 1218004
caugaucacuagaucacuc

SEQ ID NO: 1218006 - RNA, 19 nt, Artificial Sequence
  Description of Artificial Sequence: Synthetic oligonucleotide
  Sense strand starting at position 564 of SEQ ID NO: 917217
gugaucuagugaucaugaa

SEQ ID NO: 1218007 - RNA, 19 nt, Artificial Sequence
  Description of Artificial Sequence: Synthetic oligonucleotide
  Antisense strand to SEQ ID NO: 1218006
uucaugaucacuagaucac

SEQ ID NO: 1218008 - RNA, 19 nt, Artificial Sequence
  Description of Artificial Sequence: Synthetic oligonucleotide
  Sense strand starting at position 601 of SEQ ID NO: 917217
ucuagugaucaugaauagu

SEQ ID NO: 1218009 - RNA, 19 nt, Artificial Sequence
  Description of Artificial Sequence: Synthetic oligonucleotide
  Antisense strand to SEQ ID NO: 1218008
acuauucaugaucacuaga

SEQ ID NO: 1218010 - RNA, 19 nt, Artificial Sequence
  Description of Artificial Sequence: Synthetic oligonucleotide
  Sense strand starting at position 676 of SEQ ID NO: 917217
agugaaauuuagcauauuc

SEQ ID NO: 1218011 - RNA, 19 nt, Artificial Sequence
  Description of Artificial Sequence: Synthetic oligonucleotide
  Antisense strand to SEQ ID NO: 1218010
gaauaugcuaaauuucacu

SEQ ID NO: 1218012 - RNA, 19 nt, Artificial Sequence
  Description of Artificial Sequence: Synthetic oligonucleotide
  Sense strand starting at position 700 of SEQ ID NO: 917217
uuaugacuguaagcaauaa

SEQ ID NO: 1218013 - RNA, 19 nt, Artificial Sequence
  Description of Artificial Sequence: Synthetic oligonucleotide
  Antisense strand to SEQ ID NO: 1218012
uuauugcuuacagucauaa

SEQ ID NO: 1218014 - RNA, 19 nt, Artificial Sequence
  Description of Artificial Sequence: Synthetic oligonucleotide
  Sense strand starting at position 711 of SEQ ID NO: 917217
agcaauaagccauaguaac

SEQ ID NO: 1218015 - RNA, 19 nt, Artificial Sequence
  Description of Artificial Sequence: Synthetic oligonucleotide
  Antisense strand to SEQ ID NO: 1218014
guuacuauggcuuauugcu

SEQ ID NO: 1218016 - RNA, 19 nt, Artificial Sequence
  Description of Artificial Sequence: Synthetic oligonucleotide
  Sense strand starting at position 825 of SEQ ID NO: 917217
uuugaaaucccaggaguua

SEQ ID NO: 1218017 - RNA, 19 nt, Artificial Sequence
  Description of Artificial Sequence: Synthetic oligonucleotide
  Antisense strand to SEQ ID NO: 1218016
uaacuccugggauuucaaa

SEQ ID NO: 1218018 - RNA, 19 nt, Artificial Sequence
  Description of Artificial Sequence: Synthetic oligonucleotide
  Sense strand starting at position 858 of SEQ ID NO: 917217
acuagaucuuguuuacgaa

SEQ ID NO: 1218019 - RNA, 19 nt, Artificial Sequence
  Description of Artificial Sequence: Synthetic oligonucleotide
  Antisense strand to SEQ ID NO: 1218018
uucguaaacaagaucuagu

SEQ ID NO: 1218020 - RNA, 19 nt, Artificial Sequence
  Description of Artificial Sequence: Synthetic oligonucleotide
  Sense strand starting at position 859 of SEQ ID NO: 917217
cuagaucuuguuuacgaag

SEQ ID NO: 1218021 - RNA, 19 nt, Artificial Sequence
  Description of Artificial Sequence: Synthetic oligonucleotide
  Antisense strand to SEQ ID NO: 1218020
cuucguaaacaagaucuag

SEQ ID NO: 1218022 - RNA, 19 nt, Artificial Sequence
  Description of Artificial Sequence: Synthetic oligonucleotide
  Sense strand starting at position 865 of SEQ ID NO: 917217
cuuguuuacgaagguuaau

SEQ ID NO: 1218023 - RNA, 19 nt, Artificial Sequence
  Description of Artificial Sequence: Synthetic oligonucleotide
  Antisense strand to SEQ ID NO: 1218022
auuaaccuucguaaacaag

SEQ ID NO: 1218024 - RNA, 19 nt, Artificial Sequence
  Description of Artificial Sequence: Synthetic oligonucleotide
  Sense strand starting at position 911 of SEQ ID NO: 917217
ucgugucuucggaguuuau

SEQ ID NO: 1218025 - RNA, 19 nt, Artificial Sequence
  Description of Artificial Sequence: Synthetic oligonucleotide
  Antisense strand to SEQ ID NO: 1218024
auaaacuccgaagacacga

SEQ ID NO: 1218026 - RNA, 19 nt, Artificial Sequence
  Description of Artificial Sequence: Synthetic oligonucleotide
  Sense strand starting at position 920 of SEQ ID NO: 917217
cggaguuuauacucauaga

SEQ ID NO: 1218027 - RNA, 19 nt, Artificial Sequence
  Description of Artificial Sequence: Synthetic oligonucleotide
  Antisense strand to SEQ ID NO: 1218026
ucuaugaguauaaacuccg

SEQ ID NO: 1218028 - RNA, 19 nt, Artificial Sequence
  Description of Artificial Sequence: Synthetic oligonucleotide
  Sense strand starting at position 1100 of SEQ ID NO: 917217
gugguucugaugcaacaau

SEQ ID NO: 1218029 - RNA, 19 nt, Artificial Sequence
  Description of Artificial Sequence: Synthetic oligonucleotide
  Antisense strand to SEQ ID NO: 1218028
auuguugcaucagaaccac

SEQ ID NO: 1218030 - RNA, 19 nt, Artificial Sequence
  Description of Artificial Sequence: Synthetic oligonucleotide
  Sense strand starting at position 1110 of SEQ ID NO: 917217
ugcaacaaucuugauugau

SEQ ID NO: 1218031 - RNA, 19 nt, Artificial Sequence
  Description of Artificial Sequence: Synthetic oligonucleotide
  Antisense strand to SEQ ID NO: 1218030
aucaaucaagauuguugca

SEQ ID NO: 1218032 - RNA, 19 nt, Artificial Sequence
  Description of Artificial Sequence: Synthetic oligonucleotide
  Sense strand starting at position 1432 of SEQ ID NO: 917217
acaacuaugucuccuggga

SEQ ID NO: 1218033 - RNA, 19 nt, Artificial Sequence
  Description of Artificial Sequence: Synthetic oligonucleotide
  Antisense strand to SEQ ID NO: 1218032
ucccaggagacauaguugu

SEQ ID NO: 1218034 - RNA, 19 nt, Artificial Sequence
  Description of Artificial Sequence: Synthetic oligonucleotide
  Sense strand starting at position 1990 of SEQ ID NO: 917217
ggugcugugacucagaaua

SEQ ID NO: 1218035 - RNA, 19 nt, Artificial Sequence
  Description of Artificial Sequence: Synthetic oligonucleotide
  Antisense strand to SEQ ID NO: 1218034
uauucugagucacagcacc

SEQ ID NO: 1218036 - RNA, 19 nt, Artificial Sequence
  Description of Artificial Sequence: Synthetic oligonucleotide
  Sense strand starting at position 2034 of SEQ ID NO: 917217
guuucuagcgcagaaucaa

SEQ ID NO: 1218037 - RNA, 19 nt, Artificial Sequence
  Description of Artificial Sequence: Synthetic oligonucleotide
  Antisense strand to SEQ ID NO: 1218036
uugauucugcgcuagaaac

SEQ ID NO: 1218038 - RNA, 19 nt, Artificial Sequence
  Description of Artificial Sequence: Synthetic oligonucleotide
  Sense strand starting at position 2475 of SEQ ID NO: 917217
ggccgagaaaccugaacuu

SEQ ID NO: 1218039 - RNA, 19 nt, Artificial Sequence
  Description of Artificial Sequence: Synthetic oligonucleotide
  Antisense strand to SEQ ID NO: 1218038
aaguucagguuucucggcc

SEQ ID NO: 1218040 - RNA, 19 nt, Artificial Sequence
  Description of Artificial Sequence: Synthetic oligonucleotide
  Sense strand starting at position 2648 of SEQ ID NO: 917217
auuugaaugucugauaaac

SEQ ID NO: 1218041 - RNA, 19 nt, Artificial Sequence
  Description of Artificial Sequence: Synthetic oligonucleotide
  Antisense strand to SEQ ID NO: 1218040
guuuaucagacauucaaau

SEQ ID NO: 1218042 - RNA, 19 nt, Artificial Sequence
  Description of Artificial Sequence: Synthetic oligonucleotide
  Sense strand starting at position 2738 of SEQ ID NO: 917217
ccaaauagagcaugcaauu

SEQ ID NO: 1218043 - RNA, 19 nt, Artificial Sequence
  Description of Artificial Sequence: Synthetic oligonucleotide
  Antisense strand to SEQ ID NO: 1218042
aauugcaugcucuauuugg

SEQ ID NO: 1218044 - RNA, 19 nt, Artificial Sequence
  Description of Artificial Sequence: Synthetic oligonucleotide
  Sense strand starting at position 2937 of SEQ ID NO: 917217
ggaugagucguaugguaug

SEQ ID NO: 1218045 - RNA, 19 nt, Artificial Sequence
  Description of Artificial Sequence: Synthetic oligonucleotide
  Antisense strand to SEQ ID NO: 1218044
cauaccauacgacucaucc

SEQ ID NO: 1218046 - RNA, 19 nt, Artificial Sequence
  Description of Artificial Sequence: Synthetic oligonucleotide
  Sense strand starting at position 2948 of SEQ ID NO: 917217
augguauguggcuaucuua

SEQ ID NO: 1218047 - RNA, 19 nt, Artificial Sequence
  Description of Artificial Sequence: Synthetic oligonucleotide
  Antisense strand to SEQ ID NO: 1218046
uaagauagccacauaccau

SEQ ID NO: 1218048 - RNA, 19 nt, Artificial Sequence
  Description of Artificial Sequence: Synthetic oligonucleotide
  Sense strand starting at position 3019 of SEQ ID NO: 917217
agacgucuugcauacuuga

SEQ ID NO: 1218049 - RNA, 19 nt, Artificial Sequence
  Description of Artificial Sequence: Synthetic oligonucleotide
  Antisense strand to SEQ ID NO: 1218048
ucaaguaugcaagacgucu

SEQ ID NO: 1218050 - RNA, 19 nt, Artificial Sequence
  Description of Artificial Sequence: Synthetic oligonucleotide
  Sense strand starting at position 3298 of SEQ ID NO: 917217
ccucguacuggugagaaca

SEQ ID NO: 1218051 - RNA, 19 nt, Artificial Sequence
  Description of Artificial Sequence: Synthetic oligonucleotide
  Antisense strand to SEQ ID NO: 1218050
uguucucaccaguacgagg

SEQ ID NO: 1218052 - RNA, 19 nt, Artificial Sequence
  Description of Artificial Sequence: Synthetic oligonucleotide
  Sense strand starting at position 3393 of SEQ ID NO: 917217
cuaccaguucucggagaag

SEQ ID NO: 1218053 - RNA, 19 nt, Artificial Sequence
  Description of Artificial Sequence: Synthetic oligonucleotide
  Antisense strand to SEQ ID NO: 1218052
cuucuccgagaacugguag

SEQ ID NO: 1218054 - RNA, 19 nt, Artificial Sequence
  Description of Artificial Sequence: Synthetic oligonucleotide
  Sense strand starting at position 3437 of SEQ ID NO: 917217
auuccugaccucggaguuu

SEQ ID NO: 1218055 - RNA, 19 nt, Artificial Sequence
  Description of Artificial Sequence: Synthetic oligonucleotide
  Antisense strand to SEQ ID NO: 1218054
aaacuccgaggucaggaau

SEQ ID NO: 1218056 - RNA, 19 nt, Artificial Sequence
  Description of Artificial Sequence: Synthetic oligonucleotide
  Sense strand starting at position 3476 of SEQ ID NO: 917217
uucuucgguucuuuaauuu

SEQ ID NO: 1218057 - RNA, 19 nt, Artificial Sequence
  Description of Artificial Sequence: Synthetic oligonucleotide
  Antisense strand to SEQ ID NO: 1218056
aaauuaaagaaccgaagaa

SEQ ID NO: 1218058 - RNA, 19 nt, Artificial Sequence
  Description of Artificial Sequence: Synthetic oligonucleotide
  Sense strand starting at position 3520 of SEQ ID NO: 917217
ugcucagagacuuguaagu

SEQ ID NO: 1218059 - RNA, 19 nt, Artificial Sequence
  Description of Artificial Sequence: Synthetic oligonucleotide
  Antisense strand to SEQ ID NO: 1218058
acuuacaagucucugagca

SEQ ID NO: 1218060 - RNA, 19 nt, Artificial Sequence
  Description of Artificial Sequence: Synthetic oligonucleotide
  Sense strand starting at position 3571 of SEQ ID NO: 917217
gcaucaucgccgcuuccau

SEQ ID NO: 1218061 - RNA, 19 nt, Artificial Sequence
  Description of Artificial Sequence: Synthetic oligonucleotide
  Antisense strand to SEQ ID NO: 1218060
auggaagcggcgaugaugc

SEQ ID NO: 1218062 - RNA, 19 nt, Artificial Sequence
  Description of Artificial Sequence: Synthetic oligonucleotide
  Sense strand starting at position 3737 of SEQ ID NO: 917217
ggcugaugugguuaagcaa

SEQ ID NO: 1218063 - RNA, 19 nt, Artificial Sequence
  Description of Artificial Sequence: Synthetic oligonucleotide
  Antisense strand to SEQ ID NO: 1218062
uugcuuaaccacaucagcc

SEQ ID NO: 1218064 - RNA, 19 nt, Artificial Sequence
  Description of Artificial Sequence: Synthetic oligonucleotide
  Sense strand starting at position 3740 of SEQ ID NO: 917217
ugaugugguuaagcaaaua

SEQ ID NO: 1218065 - RNA, 19 nt, Artificial Sequence
  Description of Artificial Sequence: Synthetic oligonucleotide
  Antisense strand to SEQ ID NO: 1218064
uauuugcuuaaccacauca

SEQ ID NO: 1218066 - RNA, 19 nt, Artificial Sequence
  Description of Artificial Sequence: Synthetic oligonucleotide
  Sense strand starting at position 3797 of SEQ ID NO: 917217
ugggaauaaaugcguggau

SEQ ID NO: 1218067 - RNA, 19 nt, Artificial Sequence
  Description of Artificial Sequence: Synthetic oligonucleotide
  Antisense strand to SEQ ID NO: 1218066
auccacgcauuuauuccca

SEQ ID NO: 1218068 - RNA, 19 nt, Artificial Sequence
  Description of Artificial Sequence: Synthetic oligonucleotide
  Sense strand starting at position 3800 of SEQ ID NO: 917217
gaauaaaugcguggaucga

SEQ ID NO: 1218069 - RNA, 19 nt, Artificial Sequence
  Description of Artificial Sequence: Synthetic oligonucleotide
  Antisense strand to SEQ ID NO: 1218068
ucgauccacgcauuuauuc

SEQ ID NO: 1218070 - RNA, 19 nt, Artificial Sequence
  Description of Artificial Sequence: Synthetic oligonucleotide
  Sense strand starting at position 3801 of SEQ ID NO: 917218
aauaaaugcguggaucgau

SEQ ID NO: 1218071 - RNA, 19 nt, Artificial Sequence
  Description of Artificial Sequence: Synthetic oligonucleotide
  Antisense strand to SEQ ID NO: 1218070
aucgauccacgcauuuauu

SEQ ID NO: 1218072 - RNA, 19 nt, Artificial Sequence
  Description of Artificial Sequence: Synthetic oligonucleotide
  Sense strand starting at position 91 of SEQ ID NO: 917218
agaagaacuuccgugacug

SEQ ID NO: 1218073 - RNA, 19 nt, Artificial Sequence
  Description of Artificial Sequence: Synthetic oligonucleotide
  Antisense strand to SEQ ID NO: 1218072
cagucacggaaguucuucu

SEQ ID NO: 1218074 - RNA, 19 nt, Artificial Sequence
  Description of Artificial Sequence: Synthetic oligonucleotide
  Sense strand starting at position 114 of SEQ ID NO: 917218
gacagcugugcucguuuaa

SEQ ID NO: 1218075 - RNA, 19 nt, Artificial Sequence
  Description of Artificial Sequence: Synthetic oligonucleotide
  Antisense strand to SEQ ID NO: 1218074
uuaaacgagcacagcuguc

SEQ ID NO: 1218076 - RNA, 19 nt, Artificial Sequence
  Description of Artificial Sequence: Synthetic oligonucleotide
  Sense strand starting at position 115 of SEQ ID NO: 917218
acagcugugcucguuuaaa

SEQ ID NO: 1218077 - RNA, 19 nt, Artificial Sequence
  Description of Artificial Sequence: Synthetic oligonucleotide
  Antisense strand to SEQ ID NO: 1218076
uuuaaacgagcacagcugu

SEQ ID NO: 1218078 - RNA, 19 nt, Artificial Sequence
  Description of Artificial Sequence: Synthetic oligonucleotide
  Sense strand starting at position 148 of SEQ ID NO: 917218
ugcugugcgcauucugauu

SEQ ID NO: 1218079 - RNA, 19 nt, Artificial Sequence
  Description of Artificial Sequence: Synthetic oligonucleotide
  Antisense strand to SEQ ID NO: 1218078
aaucagaaugcgcacagca

SEQ ID NO: 1218080 - RNA, 19 nt, Artificial Sequence
  Description of Artificial Sequence: Synthetic oligonucleotide
  Sense strand starting at position 477 of SEQ ID NO: 917218
ccaccaggacucugcauaa

SEQ ID NO: 1218081 - RNA, 19 nt, Artificial Sequence
  Description of Artificial Sequence: Synthetic oligonucleotide
  Antisense strand to SEQ ID NO: 1218080
uuaugcagaguccuggugg

SEQ ID NO: 1218082 - RNA, 19 nt, Artificial Sequence
  Description of Artificial Sequence: Synthetic oligonucleotide
  Sense strand starting at position 556 of SEQ ID NO: 917218
cucugcuucuucccaggaa

SEQ ID NO: 1218083 - RNA, 19 nt, Artificial Sequence
  Description of Artificial Sequence: Synthetic oligonucleotide
  Antisense strand to SEQ ID NO: 1218082
uuccugggaagaagcagag

SEQ ID NO: 1218084 - RNA, 19 nt, Artificial Sequence
  Description of Artificial Sequence: Synthetic oligonucleotide
  Sense strand starting at position 685 of SEQ ID NO: 917218
gagcauuccggcugcagaa

SEQ ID NO: 1218085 - RNA, 19 nt, Artificial Sequence
  Description of Artificial Sequence: Synthetic oligonucleotide
  Antisense strand to SEQ ID NO: 1218084
uucugcagccggaaugcuc

SEQ ID NO: 1218086 - RNA, 19 nt, Artificial Sequence
  Description of Artificial Sequence: Synthetic oligonucleotide
  Sense strand starting at position 687 of SEQ ID NO: 917218
gcauuccggcugcagaauu

SEQ ID NO: 1218087 - RNA, 19 nt, Artificial Sequence
  Description of Artificial Sequence: Synthetic oligonucleotide
  Antisense strand to SEQ ID NO: 1218086
aauucugcagccggaaugc

SEQ ID NO: 1218088 - RNA, 19 nt, Artificial Sequence
  Description of Artificial Sequence: Synthetic oligonucleotide
  Sense strand starting at position 709 of SEQ ID NO: 917218
uaccaauucgcggaagcau

SEQ ID NO: 1218089 - RNA, 19 nt, Artificial Sequence
  Description of Artificial Sequence: Synthetic oligonucleotide
  Antisense strand to SEQ ID NO: 1218088
augcuuccgcgaauuggua

SEQ ID NO: 1218090 - RNA, 19 nt, Artificial Sequence
  Description of Artificial Sequence: Synthetic oligonucleotide
  Sense strand starting at position 718 of SEQ ID NO: 917218
gcggaagcaucugucuguu

SEQ ID NO: 1218091 - RNA, 19 nt, Artificial Sequence
  Description of Artificial Sequence: Synthetic oligonucleotide
  Antisense strand to SEQ ID NO: 1218090
aacagacagaugcuuccgc

SEQ ID NO: 1218092 - RNA, 19 nt, Artificial Sequence
  Description of Artificial Sequence: Synthetic oligonucleotide
  Sense strand starting at position 724 of SEQ ID NO: 917218
gcaucugucuguuugcaga

SEQ ID NO: 1218093 - RNA, 19 nt, Artificial Sequence
  Description of Artificial Sequence: Synthetic oligonucleotide
  Antisense strand to SEQ ID NO: 1218092
ucugcaaacagacagaugc

SEQ ID NO: 1218094 - RNA, 19 nt, Artificial Sequence
  Description of Artificial Sequence: Synthetic oligonucleotide
  Sense strand starting at position 743 of SEQ ID NO: 917218
guagcuuugcugucgauga

SEQ ID NO: 1218095 - RNA, 19 nt, Artificial Sequence
  Description of Artificial Sequence: Synthetic oligonucleotide
  Antisense strand to SEQ ID NO: 1218094
ucaucgacagcaaagcuac

SEQ ID NO: 1218096 - RNA, 19 nt, Artificial Sequence
  Description of Artificial Sequence: Synthetic oligonucleotide
  Sense strand starting at position 1007 of SEQ ID NO: 917218
gugugaugugacuggagcu

SEQ ID NO: 1218097 - RNA, 19 nt, Artificial Sequence
  Description of Artificial Sequence: Synthetic oligonucleotide
  Antisense strand to SEQ ID NO: 1218096
agcuccagucacaucacac

SEQ ID NO: 1218098 - RNA, 19 nt, Artificial Sequence
  Description of Artificial Sequence: Synthetic oligonucleotide
  Sense strand starting at position 1045 of SEQ ID NO: 917218
ggccguuuaggucagugau

SEQ ID NO: 1218099 - RNA, 19 nt, Artificial Sequence
  Description of Artificial Sequence: Synthetic oligonucleotide
  Antisense strand to SEQ ID NO: 1218098
aucacugaccuaaacggcc

SEQ ID NO: 1218100 - RNA, 19 nt, Artificial Sequence
  Description of Artificial Sequence: Synthetic oligonucleotide
  Sense strand starting at position 1046 of SEQ ID NO: 917218
gccguuuaggucagugaug

SEQ ID NO: 1218101 - RNA, 19 nt, Artificial Sequence
  Description of Artificial Sequence: Synthetic oligonucleotide
  Antisense strand to SEQ ID NO: 1218100
caucacugaccuaaacggc

SEQ ID NO: 1218102 - RNA, 19 nt, Artificial Sequence
  Description of Artificial Sequence: Synthetic oligonucleotide
  Sense strand starting at position 1048 of SEQ ID NO: 917218
cguuuaggucagugaugca

SEQ ID NO: 1218103 - RNA, 19 nt, Artificial Sequence
  Description of Artificial Sequence: Synthetic oligonucleotide
  Antisense strand to SEQ ID NO: 1218102
ugcaucacugaccuaaacg

SEQ ID NO: 1218104 - RNA, 19 nt, Artificial Sequence
  Description of Artificial Sequence: Synthetic oligonucleotide
  Sense strand starting at position 1190 of SEQ ID NO: 917218
ccacuuuguccaggaugca

SEQ ID NO: 1218105 - RNA, 19 nt, Artificial Sequence
  Description of Artificial Sequence: Synthetic oligonucleotide
  Antisense strand to SEQ ID NO: 1218104
ugcauccuggacaaagugg

SEQ ID NO: 1218106 - RNA, 19 nt, Artificial Sequence
  Description of Artificial Sequence: Synthetic oligonucleotide
  Sense strand starting at position 1191 of SEQ ID NO: 917218
cacuuuguccaggaugcaa

SEQ ID NO: 1218107 - RNA, 19 nt, Artificial Sequence
  Description of Artificial Sequence: Synthetic oligonucleotide
  Antisense strand to SEQ ID NO: 1218106
uugcauccuggacaaagug

SEQ ID NO: 1218108 - RNA, 19 nt, Artificial Sequence
  Description of Artificial Sequence: Synthetic oligonucleotide
  Sense strand starting at position 1626 of SEQ ID NO: 917218
ugacucuguccuuguguuu

SEQ ID NO: 1218109 - RNA, 19 nt, Artificial Sequence
  Description of Artificial Sequence: Synthetic oligonucleotide
  Antisense strand to SEQ ID NO: 1218108
aaacacaaggacagaguca

SEQ ID NO: 1218110 - RNA, 19 nt, Artificial Sequence
  Description of Artificial Sequence: Synthetic oligonucleotide
  Sense strand starting at position 2206 of SEQ ID NO: 917218
gggacuuucuguucuaaga

SEQ ID NO: 1218111 - RNA, 19 nt, Artificial Sequence
  Description of Artificial Sequence: Synthetic oligonucleotide
  Antisense strand to SEQ ID NO: 1218110
ucuuagaacagaaaguccc

SEQ ID NO: 1218112 - RNA, 19 nt, Artificial Sequence
  Description of Artificial Sequence: Synthetic oligonucleotide
  Sense strand starting at position 2252 of SEQ ID NO: 917218
guaguuuccagauguuuac

SEQ ID NO: 1218113 - RNA, 19 nt, Artificial Sequence
  Description of Artificial Sequence: Synthetic oligonucleotide
  Antisense strand to SEQ ID NO: 1218112
guaaacaucuggaaacuac

SEQ ID NO: 1218114 - RNA, 19 nt, Artificial Sequence
  Description of Artificial Sequence: Synthetic oligonucleotide
  Sense strand starting at position 2255 of SEQ ID NO: 917218
guuuccagauguuuacauu

SEQ ID NO: 1218115 - RNA, 19 nt, Artificial Sequence
  Description of Artificial Sequence: Synthetic oligonucleotide
  Antisense strand to SEQ ID NO: 1218114
aauguaaacaucuggaaac

SEQ ID NO: 1218116 - RNA, 19 nt, Artificial Sequence
  Description of Artificial Sequence: Synthetic oligonucleotide
  Sense strand starting at position 2599 of SEQ ID NO: 917218
gugaccuucccgugaccau

SEQ ID NO: 1218117 - RNA, 19 nt, Artificial Sequence
  Description of Artificial Sequence: Synthetic oligonucleotide
  Antisense strand to SEQ ID NO: 1218116
auggucacgggaaggucac

SEQ ID NO: 1218118 - RNA, 19 nt, Artificial Sequence
  Description of Artificial Sequence: Synthetic oligonucleotide
  Sense strand starting at position 2700 of SEQ ID NO: 917218
gcucguucuccagugcaga

SEQ ID NO: 1218119 - RNA, 19 nt, Artificial Sequence
  Description of Artificial Sequence: Synthetic oligonucleotide
  Antisense strand to SEQ ID NO: 1218118
ucugcacuggagaacgagc

SEQ ID NO: 1218120 - RNA, 19 nt, Artificial Sequence
  Description of Artificial Sequence: Synthetic oligonucleotide
  Sense strand starting at position 2701 of SEQ ID NO: 917218
cucguucuccagugcagaa

SEQ ID NO: 1218121 - RNA, 19 nt, Artificial Sequence
  Description of Artificial Sequence: Synthetic oligonucleotide
  Antisense strand to SEQ ID NO: 1218120
uucugcacuggagaacgag

SEQ ID NO: 1218122 - RNA, 19 nt, Artificial Sequence
  Description of Artificial Sequence: Synthetic oligonucleotide
  Sense strand starting at position 2738 of SEQ ID NO: 917218
cugagugucucugcucaau

SEQ ID NO: 1218123 - RNA, 19 nt, Artificial Sequence
  Description of Artificial Sequence: Synthetic oligonucleotide
  Antisense strand to SEQ ID NO: 1218122
auugagcagagacacucag

SEQ ID NO: 1218124 - RNA, 19 nt, Artificial Sequence
  Description of Artificial Sequence: Synthetic oligonucleotide
  Sense strand starting at position 2750 of SEQ ID NO: 917218
gcucaauggcugugggagu

SEQ ID NO: 1218125 - RNA, 19 nt, Artificial Sequence
  Description of Artificial Sequence: Synthetic oligonucleotide
  Antisense strand to SEQ ID NO: 1218124
acucccacagccauugagc

SEQ ID NO: 1218126 - RNA, 19 nt, Artificial Sequence
  Description of Artificial Sequence: Synthetic oligonucleotide
  Sense strand starting at position 2819 of SEQ ID NO: 917218
ggucuaaagcuuggccagu

SEQ ID NO: 1218127 - RNA, 19 nt, Artificial Sequence
  Description of Artificial Sequence: Synthetic oligonucleotide
  Antisense strand to SEQ ID NO: 1218126
acuggccaagcuuuagacc

SEQ ID NO: 1218128 - RNA, 19 nt, Artificial Sequence
  Description of Artificial Sequence: Synthetic oligonucleotide
  Sense strand starting at position 2975 of SEQ ID NO: 917218
gcacacauugugcgucauu

SEQ ID NO: 1218129 - RNA, 19 nt, Artificial Sequence
  Description of Artificial Sequence: Synthetic oligonucleotide
  Antisense strand to SEQ ID NO: 1218128
aaugacgcacaaugugugc

SEQ ID NO: 1218130 - RNA, 19 nt, Artificial Sequence
  Description of Artificial Sequence: Synthetic oligonucleotide
  Sense strand starting at position 2977 of SEQ ID NO: 917218
acacauugugcgucauugu

SEQ ID NO: 1218131 - RNA, 19 nt, Artificial Sequence
  Description of Artificial Sequence: Synthetic oligonucleotide
  Antisense strand to SEQ ID NO: 1218130
acaaugacgcacaaugugu

SEQ ID NO: 1218132 - RNA, 19 nt, Artificial Sequence
  Description of Artificial Sequence: Synthetic oligonucleotide
  Sense strand starting at position 3096 of SEQ ID NO: 917218
acagccugguccucugaga

SEQ ID NO: 1218133 - RNA, 19 nt, Artificial Sequence
  Description of Artificial Sequence: Synthetic oligonucleotide
  Antisense strand to SEQ ID NO: 1218132
ucucagaggaccaggcugu

SEQ ID NO: 1218134 - RNA, 19 nt, Artificial Sequence
  Description of Artificial Sequence: Synthetic oligonucleotide
  Sense strand starting at position 3253 of SEQ ID NO: 917218
agucuuugucaucaaugcu

SEQ ID NO: 1218135 - RNA, 19 nt, Artificial Sequence
  Description of Artificial Sequence: Synthetic oligonucleotide
  Antisense strand to SEQ ID NO: 1218134
agcauugaugacaaagacu

SEQ ID NO: 1218136 - RNA, 19 nt, Artificial Sequence
  Description of Artificial Sequence: Synthetic oligonucleotide
  Sense strand starting at position 3400 of SEQ ID NO: 917218
uggcacgucccauaugaaa

SEQ ID NO: 1218137 - RNA, 19 nt, Artificial Sequence
  Description of Artificial Sequence: Synthetic oligonucleotide
  Antisense strand to SEQ ID NO: 1218136
uuucauaugggacgugcca

SEQ ID NO: 1218138 - RNA, 19 nt, Artificial Sequence
  Description of Artificial Sequence: Synthetic oligonucleotide
  Sense strand starting at position 3627 of SEQ ID NO: 917218
gcuucuucccaggaagagu

SEQ ID NO: 1218139 - RNA, 19 nt, Artificial Sequence
  Description of Artificial Sequence: Synthetic oligonucleotide
  Antisense strand to SEQ ID NO: 1218138
acucuuccugggaagaagc

SEQ ID NO: 1218140 - RNA, 19 nt, Artificial Sequence
  Description of Artificial Sequence: Synthetic oligonucleotide
  Sense strand starting at position 3720 of SEQ ID NO: 917218
cgggcauucugguugcaga

SEQ ID NO: 1218141 - RNA, 19 nt, Artificial Sequence
  Description of Artificial Sequence: Synthetic oligonucleotide
  Antisense strand to SEQ ID NO: 1218140
ucugcaaccagaaugcccg

SEQ ID NO: 1218142 - RNA, 19 nt, Artificial Sequence
  Description of Artificial Sequence: Synthetic oligonucleotide
  Sense strand starting at position 3721 of SEQ ID NO: 917218
gggcauucugguugcagaa

SEQ ID NO: 1218143 - RNA, 19 nt, Artificial Sequence
  Description of Artificial Sequence: Synthetic oligonucleotide
  Antisense strand to SEQ ID NO: 1218142
uucugcaaccagaaugccc

SEQ ID NO: 1218144 - RNA, 19 nt, Artificial Sequence
  Description of Artificial Sequence: Synthetic oligonucleotide
  Sense strand starting at position 3756 of SEQ ID NO: 917218
ugaagcaucugucugcaga

SEQ ID NO: 1218145 - RNA, 19 nt, Artificial Sequence
  Description of Artificial Sequence: Synthetic oligonucleotide
  Antisense strand to SEQ ID NO: 1218144
ucugcagacagaugcuuca

SEQ ID NO: 1218146 - RNA, 19 nt, Artificial Sequence
  Description of Artificial Sequence: Synthetic oligonucleotide
  Sense strand starting at position 3757 of SEQ ID NO: 917218
gaagcaucugucugcagag

SEQ ID NO: 1218147 - RNA, 19 nt, Artificial Sequence
  Description of Artificial Sequence: Synthetic oligonucleotide
  Antisense strand to SEQ ID NO: 1218146
cucugcagacagaugcuuc

SEQ ID NO: 1218148 - RNA, 19 nt, Artificial Sequence
  Description of Artificial Sequence: Synthetic oligonucleotide
  Sense strand starting at position 3758 of SEQ ID NO: 917218
aagcaucugucugcagagu

SEQ ID NO: 1218149 - RNA, 19 nt, Artificial Sequence
  Description of Artificial Sequence: Synthetic oligonucleotide
  Antisense strand to SEQ ID NO: 1218148
acucugcagacagaugcuu

SEQ ID NO: 1218150 - RNA, 19 nt, Artificial Sequence
  Description of Artificial Sequence: Synthetic oligonucleotide
  Sense strand starting at position 3775 of SEQ ID NO: 917219
guggcuuugcugucgauga

SEQ ID NO: 1218151 - RNA, 19 nt, Artificial Sequence
  Description of Artificial Sequence: Synthetic oligonucleotide
  Antisense strand to SEQ ID NO: 1218150
ucaucgacagcaaagccac

SEQ ID NO: 1218152 - RNA, 19 nt, Artificial Sequence
  Description of Artificial Sequence: Synthetic oligonucleotide
  Sense strand starting at position 649 of SEQ ID NO: 917219
acacgauuaucuggaagga

SEQ ID NO: 1218153 - RNA, 19 nt, Artificial Sequence
  Description of Artificial Sequence: Synthetic oligonucleotide
  Antisense strand to SEQ ID NO: 1218152
uccuuccagauaaucgugu

SEQ ID NO: 1218154 - RNA, 19 nt, Artificial Sequence
  Description of Artificial Sequence: Synthetic oligonucleotide
  Sense strand starting at position 1591 of SEQ ID NO: 917219
gcgcuuguccgaccucaca

SEQ ID NO: 1218155 - RNA, 19 nt, Artificial Sequence
  Description of Artificial Sequence: Synthetic oligonucleotide
  Antisense strand to SEQ ID NO: 1218154
ugugaggucggacaagcgc

SEQ ID NO: 1218156 - RNA, 19 nt, Artificial Sequence
  Description of Artificial Sequence: Synthetic oligonucleotide
  Sense strand starting at position 1717 of SEQ ID NO: 917219
ggaugcugguuucuagaag

SEQ ID NO: 1218157 - RNA, 19 nt, Artificial Sequence
  Description of Artificial Sequence: Synthetic oligonucleotide
  Antisense strand to SEQ ID NO: 1218156
cuucuagaaaccagcaucc

SEQ ID NO: 1218158 - RNA, 19 nt, Artificial Sequence
  Description of Artificial Sequence: Synthetic oligonucleotide
  Sense strand starting at position 1848 of SEQ ID NO: 917219
ccaccaaguuuauggagaa

SEQ ID NO: 1218159 - RNA, 19 nt, Artificial Sequence
  Description of Artificial Sequence: Synthetic oligonucleotide
  Antisense strand to SEQ ID NO: 1218158
uucuccauaaacuuggugg

SEQ ID NO: 1218160 - RNA, 19 nt, Artificial Sequence
  Description of Artificial Sequence: Synthetic oligonucleotide
  Sense strand starting at position 1849 of SEQ ID NO: 917219
caccaaguuuauggagaaa

SEQ ID NO: 1218161 - RNA, 19 nt, Artificial Sequence
  Description of Artificial Sequence: Synthetic oligonucleotide
  Antisense strand to SEQ ID NO: 1218160
uuucuccauaaacuuggug

SEQ ID NO: 1218162 - RNA, 19 nt, Artificial Sequence
  Description of Artificial Sequence: Synthetic oligonucleotide
  Sense strand starting at position 2269 of SEQ ID NO: 917219
ccuaauguaaguugggaaa

SEQ ID NO: 1218163 - RNA, 19 nt, Artificial Sequence
  Description of Artificial Sequence: Synthetic oligonucleotide
  Antisense strand to SEQ ID NO: 1218162
uuucccaacuuacauuagg

SEQ ID NO: 1218164 - RNA, 19 nt, Artificial Sequence
  Description of Artificial Sequence: Synthetic oligonucleotide
  Sense strand starting at position 2271 of SEQ ID NO: 917219
uaauguaaguugggaaaca

SEQ ID NO: 1218165 - RNA, 19 nt, Artificial Sequence
  Description of Artificial Sequence: Synthetic oligonucleotide
  Antisense strand to SEQ ID NO: 1218164
uguuucccaacuuacauua

SEQ ID NO: 1218166 - RNA, 19 nt, Artificial Sequence
  Description of Artificial Sequence: Synthetic oligonucleotide
  Sense strand starting at position 2319 of SEQ ID NO: 917219
auagcaaucaugcgaguca

SEQ ID NO: 1218167 - RNA, 19 nt, Artificial Sequence
  Description of Artificial Sequence: Synthetic oligonucleotide
  Antisense strand to SEQ ID NO: 1218166
ugacucgcaugauugcuau

SEQ ID NO: 1218168 - RNA, 19 nt, Artificial Sequence
  Description of Artificial Sequence: Synthetic oligonucleotide
  Sense strand starting at position 2320 of SEQ ID NO: 917219
uagcaaucaugcgagucaa

SEQ ID NO: 1218169 - RNA, 19 nt, Artificial Sequence
  Description of Artificial Sequence: Synthetic oligonucleotide
  Antisense strand to SEQ ID NO: 1218168
uugacucgcaugauugcua

SEQ ID NO: 1218170 - RNA, 19 nt, Artificial Sequence
  Description of Artificial Sequence: Synthetic oligonucleotide
  Sense strand starting at position 2331 of SEQ ID NO: 917219
cgagucaaaucucaagacu

SEQ ID NO: 1218171 - RNA, 19 nt, Artificial Sequence
  Description of Artificial Sequence: Synthetic oligonucleotide
  Antisense strand to SEQ ID NO: 1218170
agucuugagauuugacucg

SEQ ID NO: 1218172 - RNA, 19 nt, Artificial Sequence
  Description of Artificial Sequence: Synthetic oligonucleotide
  Sense strand starting at position 2334 of SEQ ID NO: 917219
gucaaaucucaagacugua

SEQ ID NO: 1218173 - RNA, 19 nt, Artificial Sequence
  Description of Artificial Sequence: Synthetic oligonucleotide
  Antisense strand to SEQ ID NO: 1218172
uacagucuugagauuugac

SEQ ID NO: 1218174 - RNA, 19 nt, Artificial Sequence
  Description of Artificial Sequence: Synthetic oligonucleotide
  Sense strand starting at position 2348 of SEQ ID NO: 917219
cuguaucuuggguguggau

SEQ ID NO: 1218175 - RNA, 19 nt, Artificial Sequence
  Description of Artificial Sequence: Synthetic oligonucleotide
  Antisense strand to SEQ ID NO: 1218174
auccacacccaagauacag

SEQ ID NO: 1218176 - RNA, 19 nt, Artificial Sequence
  Description of Artificial Sequence: Synthetic oligonucleotide
  Sense strand starting at position 2418 of SEQ ID NO: 917219
aagggaggcugguuucuua

SEQ ID NO: 1218177 - RNA, 19 nt, Artificial Sequence
  Description of Artificial Sequence: Synthetic oligonucleotide
  Antisense strand to SEQ ID NO: 1218176
uaagaaaccagccucccuu

SEQ ID NO: 1218178 - RNA, 19 nt, Artificial Sequence
  Description of Artificial Sequence: Synthetic oligonucleotide
  Sense strand starting at position 2427 of SEQ ID NO: 917219
ugguuucuuaggugagcca

SEQ ID NO: 1218179 - RNA, 19 nt, Artificial Sequence
  Description of Artificial Sequence: Synthetic oligonucleotide
  Antisense strand to SEQ ID NO: 1218178
uggcucaccuaagaaacca

SEQ ID NO: 1218180 - RNA, 19 nt, Artificial Sequence
  Description of Artificial Sequence: Synthetic oligonucleotide
  Sense strand starting at position 2456 of SEQ ID NO: 917219
cugagaagugccgggaaua

SEQ ID NO: 1218181 - RNA, 19 nt, Artificial Sequence
  Description of Artificial Sequence: Synthetic oligonucleotide
  Antisense strand to SEQ ID NO: 1218180
uauucccggcacuucucag

SEQ ID NO: 1218182 - RNA, 19 nt, Artificial Sequence
  Description of Artificial Sequence: Synthetic oligonucleotide
  Sense strand starting at position 2457 of SEQ ID NO: 917219
ugagaagugccgggaauag

SEQ ID NO: 1218183 - RNA, 19 nt, Artificial Sequence
  Description of Artificial Sequence: Synthetic oligonucleotide
  Antisense strand to SEQ ID NO: 1218182
cuauucccggcacuucuca

SEQ ID NO: 1218184 - RNA, 19 nt, Artificial Sequence
  Description of Artificial Sequence: Synthetic oligonucleotide
  Sense strand starting at position 2475 of SEQ ID NO: 917219
ggaucauucuggcccugag

SEQ ID NO: 1218185 - RNA, 19 nt, Artificial Sequence
  Description of Artificial Sequence: Synthetic oligonucleotide
  Antisense strand to SEQ ID NO: 1218184
cucagggccagaaugaucc

SEQ ID NO: 1218186 - RNA, 19 nt, Artificial Sequence
  Description of Artificial Sequence: Synthetic oligonucleotide
  Sense strand starting at position 2962 of SEQ ID NO: 917219
gacugaggguucucagaau

SEQ ID NO: 1218187 - RNA, 19 nt, Artificial Sequence
  Description of Artificial Sequence: Synthetic oligonucleotide
  Antisense strand to SEQ ID NO: 1218186
auucugagaacccucaguc

SEQ ID NO: 1218188 - RNA, 19 nt, Artificial Sequence
  Description of Artificial Sequence: Synthetic oligonucleotide
  Sense strand starting at position 2968 of SEQ ID NO: 917219
ggguucucagaauguggaa

SEQ ID NO: 1218189 - RNA, 19 nt, Artificial Sequence
  Description of Artificial Sequence: Synthetic oligonucleotide
  Antisense strand to SEQ ID NO: 1218188
uuccacauucugagaaccc

SEQ ID NO: 1218190 - RNA, 19 nt, Artificial Sequence
  Description of Artificial Sequence: Synthetic oligonucleotide
  Sense strand starting at position 3066 of SEQ ID NO: 917219
cagggaguauccuccaugu

SEQ ID NO: 1218191 - RNA, 19 nt, Artificial Sequence
  Description of Artificial Sequence: Synthetic oligonucleotide
  Antisense strand to SEQ ID NO: 1218190
acauggaggauacucccug

SEQ ID NO: 1218192 - RNA, 19 nt, Artificial Sequence
  Description of Artificial Sequence: Synthetic oligonucleotide
  Sense strand starting at position 3068 of SEQ ID NO: 917219
gggaguauccuccauguga

SEQ ID NO: 1218193 - RNA, 19 nt, Artificial Sequence
  Description of Artificial Sequence: Synthetic oligonucleotide
  Antisense strand to SEQ ID NO: 1218192
ucacauggaggauacuccc

SEQ ID NO: 1218194 - RNA, 19 nt, Artificial Sequence
  Description of Artificial Sequence: Synthetic oligonucleotide
  Sense strand starting at position 3070 of SEQ ID NO: 917219
gaguauccuccaugugaac

SEQ ID NO: 1218195 - RNA, 19 nt, Artificial Sequence
  Description of Artificial Sequence: Synthetic oligonucleotide
  Antisense strand to SEQ ID NO: 1218194
guucacauggaggauacuc

SEQ ID NO: 1218196 - RNA, 19 nt, Artificial Sequence
  Description of Artificial Sequence: Synthetic oligonucleotide
  Sense strand starting at position 3098 of SEQ ID NO: 917219
gcugaugacuucuuuggaa

SEQ ID NO: 1218197 - RNA, 19 nt, Artificial Sequence
  Description of Artificial Sequence: Synthetic oligonucleotide
  Antisense strand to SEQ ID NO: 1218196
uuccaaagaagucaucagc

SEQ ID NO: 1218198 - RNA, 19 nt, Artificial Sequence
  Description of Artificial Sequence: Synthetic oligonucleotide
  Sense strand starting at position 3101 of SEQ ID NO: 917219
gaugacuucuuuggaagcu

SEQ ID NO: 1218199 - RNA, 19 nt, Artificial Sequence
  Description of Artificial Sequence: Synthetic oligonucleotide
  Antisense strand to SEQ ID NO: 1218198
agcuuccaaagaagucauc

SEQ ID NO: 1218200 - RNA, 19 nt, Artificial Sequence
  Description of Artificial Sequence: Synthetic oligonucleotide
  Sense strand starting at position 3151 of SEQ ID NO: 917219
ggaggugauuccuucccaa

SEQ ID NO: 1218201 - RNA, 19 nt, Artificial Sequence
  Description of Artificial Sequence: Synthetic oligonucleotide
  Antisense strand to SEQ ID NO: 1218200
uugggaaggaaucaccucc

SEQ ID NO: 1218202 - RNA, 19 nt, Artificial Sequence
  Description of Artificial Sequence: Synthetic oligonucleotide
  Sense strand starting at position 3154 of SEQ ID NO: 917219
ggugauuccuucccaacag

SEQ ID NO: 1218203 - RNA, 19 nt, Artificial Sequence
  Description of Artificial Sequence: Synthetic oligonucleotide
  Antisense strand to SEQ ID NO: 1218202
cuguugggaaggaaucacc

SEQ ID NO: 1218204 - RNA, 19 nt, Artificial Sequence
  Description of Artificial Sequence: Synthetic oligonucleotide
  Sense strand starting at position 3346 of SEQ ID NO: 917219
uaucgaucccagggagauc

SEQ ID NO: 1218205 - RNA, 19 nt, Artificial Sequence
  Description of Artificial Sequence: Synthetic oligonucleotide
  Antisense strand to SEQ ID NO: 1218204
gaucucccugggaucgaua

SEQ ID NO: 1218206 - RNA, 19 nt, Artificial Sequence
  Description of Artificial Sequence: Synthetic oligonucleotide
  Sense strand starting at position 3358 of SEQ ID NO: 917219
ggagaucgcuuacaaagua

SEQ ID NO: 1218207 - RNA, 19 nt, Artificial Sequence
  Description of Artificial Sequence: Synthetic oligonucleotide
  Antisense strand to SEQ ID NO: 1218206
uacuuuguaagcgaucucc

SEQ ID NO: 1218208 - RNA, 19 nt, Artificial Sequence
  Description of Artificial Sequence: Synthetic oligonucleotide
  Sense strand starting at position 3374 of SEQ ID NO: 917219
guagcugcuccgucuggaa

SEQ ID NO: 1218209 - RNA, 19 nt, Artificial Sequence
  Description of Artificial Sequence: Synthetic oligonucleotide
  Antisense strand to SEQ ID NO: 1218208
uuccagacggagcagcuac

SEQ ID NO: 1218210 - RNA, 19 nt, Artificial Sequence
  Description of Artificial Sequence: Synthetic oligonucleotide
  Sense strand starting at position 3376 of SEQ ID NO: 917219
agcugcuccgucuggaaua

SEQ ID NO: 1218211 - RNA, 19 nt, Artificial Sequence
  Description of Artificial Sequence: Synthetic oligonucleotide
  Antisense strand to SEQ ID NO: 1218210
uauuccagacggagcagcu

SEQ ID NO: 1218212 - RNA, 19 nt, Artificial Sequence
  Description of Artificial Sequence: Synthetic oligonucleotide
  Sense strand starting at position 3377 of SEQ ID NO: 917219
gcugcuccgucuggaauaa

SEQ ID NO: 1218213 - RNA, 19 nt, Artificial Sequence
  Description of Artificial Sequence: Synthetic oligonucleotide
  Antisense strand to SEQ ID NO: 1218212
uuauuccagacggagcagc

SEQ ID NO: 1218214 - RNA, 19 nt, Artificial Sequence
  Description of Artificial Sequence: Synthetic oligonucleotide
  Sense strand starting at position 3378 of SEQ ID NO: 917219
cugcuccgucuggaauaaa

SEQ ID NO: 1218215 - RNA, 19 nt, Artificial Sequence
  Description of Artificial Sequence: Synthetic oligonucleotide
  Antisense strand to SEQ ID NO: 1218214
uuuauuccagacggagcag

SEQ ID NO: 1218216 - RNA, 19 nt, Artificial Sequence
  Description of Artificial Sequence: Synthetic oligonucleotide
  Sense strand starting at position 3813 of SEQ ID NO: 917219
ugguguggguccuugagga

SEQ ID NO: 1218217 - RNA, 19 nt, Artificial Sequence
  Description of Artificial Sequence: Synthetic oligonucleotide
  Antisense strand to SEQ ID NO: 1218216
uccucaaggacccacacca

SEQ ID NO: 1218218 - RNA, 19 nt, Artificial Sequence
  Description of Artificial Sequence: Synthetic oligonucleotide
  Sense strand starting at position 3813 of SEQ ID NO: 917220
ugguguggguccuugagga

SEQ ID NO: 1218219 - RNA, 19 nt, Artificial Sequence
  Description of Artificial Sequence: Synthetic oligonucleotide
  Antisense strand to SEQ ID NO: 1218218
uccucaaggacccacacca

SEQ ID NO: 1218220 - RNA, 19 nt, Artificial Sequence
  Description of Artificial Sequence: Synthetic oligonucleotide
  Sense strand starting at position 145 of SEQ ID NO: 917220
ggccaagaauucuuuaaac

SEQ ID NO: 1218221 - RNA, 19 nt, Artificial Sequence
  Description of Artificial Sequence: Synthetic oligonucleotide
  Antisense strand to SEQ ID NO: 1218220
guuuaaagaauucuuggcc

SEQ ID NO: 1218222 - RNA, 19 nt, Artificial Sequence
  Description of Artificial Sequence: Synthetic oligonucleotide
  Sense strand starting at position 365 of SEQ ID NO: 917220
aggugaguucugcaaauug

SEQ ID NO: 1218223 - RNA, 19 nt, Artificial Sequence
  Description of Artificial Sequence: Synthetic oligonucleotide
  Antisense strand to SEQ ID NO: 1218222
caauuugcagaacucaccu

SEQ ID NO: 1218224 - RNA, 19 nt, Artificial Sequence
  Description of Artificial Sequence: Synthetic oligonucleotide
  Sense strand starting at position 392 of SEQ ID NO: 917220
uagacuagugaaugcuuua

SEQ ID NO: 1218225 - RNA, 19 nt, Artificial Sequence
  Description of Artificial Sequence: Synthetic oligonucleotide
  Antisense strand to SEQ ID NO: 1218224
uaaagcauucacuagucua

SEQ ID NO: 1218226 - RNA, 19 nt, Artificial Sequence
  Description of Artificial Sequence: Synthetic oligonucleotide
  Sense strand starting at position 597 of SEQ ID NO: 917220
gggugcuguagagagcuau

SEQ ID NO: 1218227 - RNA, 19 nt, Artificial Sequence
  Description of Artificial Sequence: Synthetic oligonucleotide
  Antisense strand to SEQ ID NO: 1218226
auagcucucuacagcaccc

SEQ ID NO: 1218228 - RNA, 19 nt, Artificial Sequence
  Description of Artificial Sequence: Synthetic oligonucleotide
  Sense strand starting at position 601 of SEQ ID NO: 917220
gcuguagagagcuaugaau

SEQ ID NO: 1218229 - RNA, 19 nt, Artificial Sequence
  Description of Artificial Sequence: Synthetic oligonucleotide
  Antisense strand to SEQ ID NO: 1218228
auucauagcucucuacagc

SEQ ID NO: 1218230 - RNA, 19 nt, Artificial Sequence
  Description of Artificial Sequence: Synthetic oligonucleotide
  Sense strand starting at position 603 of SEQ ID NO: 917220
uguagagagcuaugaauaa

SEQ ID NO: 1218231 - RNA, 19 nt, Artificial Sequence
  Description of Artificial Sequence: Synthetic oligonucleotide
  Antisense strand to SEQ ID NO: 1218230
uuauucauagcucucuaca

SEQ ID NO: 1218232 - RNA, 19 nt, Artificial Sequence
  Description of Artificial Sequence: Synthetic oligonucleotide
  Sense strand starting at position 652 of SEQ ID NO: 917220
gugaaugcccuagggagua

SEQ ID NO: 1218233 - RNA, 19 nt, Artificial Sequence
  Description of Artificial Sequence: Synthetic oligonucleotide
  Antisense strand to SEQ ID NO: 1218232
uacucccuagggcauucac

SEQ ID NO: 1218234 - RNA, 19 nt, Artificial Sequence
  Description of Artificial Sequence: Synthetic oligonucleotide
  Sense strand starting at position 676 of SEQ ID NO: 917220
ccgcauuugggcuaggagu

SEQ ID NO: 1218235 - RNA, 19 nt, Artificial Sequence
  Description of Artificial Sequence: Synthetic oligonucleotide
  Antisense strand to SEQ ID NO: 1218234
acuccuagcccaaaugcgg

SEQ ID NO: 1218236 - RNA, 19 nt, Artificial Sequence
  Description of Artificial Sequence: Synthetic oligonucleotide
  Sense strand starting at position 791 of SEQ ID NO: 917220
uugccaaauccugagauua

SEQ ID NO: 1218237 - RNA, 19 nt, Artificial Sequence
  Description of Artificial Sequence: Synthetic oligonucleotide
  Antisense strand to SEQ ID NO: 1218236
uaaucucaggauuuggcaa

SEQ ID NO: 1218238 - RNA, 19 nt, Artificial Sequence
  Description of Artificial Sequence: Synthetic oligonucleotide
  Sense strand starting at position 838 of SEQ ID NO: 917220
ugaggcuuucuguagucua

SEQ ID NO: 1218239 - RNA, 19 nt, Artificial Sequence
  Description of Artificial Sequence: Synthetic oligonucleotide
  Antisense strand to SEQ ID NO: 1218238
uagacuacagaaagccuca

SEQ ID NO: 1218240 - RNA, 19 nt, Artificial Sequence
  Description of Artificial Sequence: Synthetic oligonucleotide
  Sense strand starting at position 943 of SEQ ID NO: 917220
gcugacucugcacaggaaa

SEQ ID NO: 1218241 - RNA, 19 nt, Artificial Sequence
  Description of Artificial Sequence: Synthetic oligonucleotide
  Antisense strand to SEQ ID NO: 1218240
uuuccugugcagagucagc

SEQ ID NO: 1218242 - RNA, 19 nt, Artificial Sequence
  Description of Artificial Sequence: Synthetic oligonucleotide
  Sense strand starting at position 1067 of SEQ ID NO: 917220
cuaauuagucuccaaaggu

SEQ ID NO: 1218243 - RNA, 19 nt, Artificial Sequence
  Description of Artificial Sequence: Synthetic oligonucleotide
  Antisense strand to SEQ ID NO: 1218242
accuuuggagacuaauuag

SEQ ID NO: 1218244 - RNA, 19 nt, Artificial Sequence
  Description of Artificial Sequence: Synthetic oligonucleotide
  Sense strand starting at position 1216 of SEQ ID NO: 917220
ugcacuuagaggugaggaa

SEQ ID NO: 1218245 - RNA, 19 nt, Artificial Sequence
  Description of Artificial Sequence: Synthetic oligonucleotide
  Antisense strand to SEQ ID NO: 1218244
uuccucaccucuaagugca

SEQ ID NO: 1218246 - RNA, 19 nt, Artificial Sequence
  Description of Artificial Sequence: Synthetic oligonucleotide
  Sense strand starting at position 1268 of SEQ ID NO: 917220
cucggcagcacagauuaaa

SEQ ID NO: 1218247 - RNA, 19 nt, Artificial Sequence
  Description of Artificial Sequence: Synthetic oligonucleotide
  Antisense strand to SEQ ID NO: 1218246
uuuaaucugugcugccgag

SEQ ID NO: 1218248 - RNA, 19 nt, Artificial Sequence
  Description of Artificial Sequence: Synthetic oligonucleotide
  Sense strand starting at position 1281 of SEQ ID NO: 917220
auuaaagucccacgaugaa

SEQ ID NO: 1218249 - RNA, 19 nt, Artificial Sequence
  Description of Artificial Sequence: Synthetic oligonucleotide
  Antisense strand to SEQ ID NO: 1218248
uucaucgugggacuuuaau

SEQ ID NO: 1218250 - RNA, 19 nt, Artificial Sequence
  Description of Artificial Sequence: Synthetic oligonucleotide
  Sense strand starting at position 2486 of SEQ ID NO: 917220
uucuuauaguuucugaaga

SEQ ID NO: 1218251 - RNA, 19 nt, Artificial Sequence
  Description of Artificial Sequence: Synthetic oligonucleotide
  Antisense strand to SEQ ID NO: 1218250
ucuucagaaacuauaagaa

SEQ ID NO: 1218252 - RNA, 19 nt, Artificial Sequence
  Description of Artificial Sequence: Synthetic oligonucleotide
  Sense strand starting at position 2499 of SEQ ID NO: 917220
ugaagaauugcugacgcca

SEQ ID NO: 1218253 - RNA, 19 nt, Artificial Sequence
  Description of Artificial Sequence: Synthetic oligonucleotide
  Antisense strand to SEQ ID NO: 1218252
uggcgucagcaauucuuca

SEQ ID NO: 1218254 - RNA, 19 nt, Artificial Sequence
  Description of Artificial Sequence: Synthetic oligonucleotide
  Sense strand starting at position 2574 of SEQ ID NO: 917220
gccaguuuacaauaggugu

SEQ ID NO: 1218255 - RNA, 19 nt, Artificial Sequence
  Description of Artificial Sequence: Synthetic oligonucleotide
  Antisense strand to SEQ ID NO: 1218254
acaccuauuguaaacuggc

SEQ ID NO: 1218256 - RNA, 19 nt, Artificial Sequence
  Description of Artificial Sequence: Synthetic oligonucleotide
  Sense strand starting at position 2639 of SEQ ID NO: 917220
uuuaaagagcauugaauga

SEQ ID NO: 1218257 - RNA, 19 nt, Artificial Sequence
  Description of Artificial Sequence: Synthetic oligonucleotide
  Antisense strand to SEQ ID NO: 1218256
ucauucaaugcucuuuaaa

SEQ ID NO: 1218258 - RNA, 19 nt, Artificial Sequence
  Description of Artificial Sequence: Synthetic oligonucleotide
  Sense strand starting at position 2690 of SEQ ID NO: 917220
auaaccuuagggugaguua

SEQ ID NO: 1218259 - RNA, 19 nt, Artificial Sequence
  Description of Artificial Sequence: Synthetic oligonucleotide
  Antisense strand to SEQ ID NO: 1218258
uaacucacccuaagguuau

SEQ ID NO: 1218260 - RNA, 19 nt, Artificial Sequence
  Description of Artificial Sequence: Synthetic oligonucleotide
  Sense strand starting at position 2699 of SEQ ID NO: 917220
gggugaguuaaugaucgcu

SEQ ID NO: 1218261 - RNA, 19 nt, Artificial Sequence
  Description of Artificial Sequence: Synthetic oligonucleotide
  Antisense strand to SEQ ID NO: 1218260
agcgaucauuaacucaccc

SEQ ID NO: 1218262 - RNA, 19 nt, Artificial Sequence
  Description of Artificial Sequence: Synthetic oligonucleotide
  Sense strand starting at position 2705 of SEQ ID NO: 917220
guuaaugaucgcuauugga

SEQ ID NO: 1218263 - RNA, 19 nt, Artificial Sequence
  Description of Artificial Sequence: Synthetic oligonucleotide
  Antisense strand to SEQ ID NO: 1218262
uccaauagcgaucauuaac

SEQ ID NO: 1218264 - RNA, 19 nt, Artificial Sequence
  Description of Artificial Sequence: Synthetic oligonucleotide
  Sense strand starting at position 2733 of SEQ ID NO: 917220
cuccuauuaggagggugaa

SEQ ID NO: 1218265 - RNA, 19 nt, Artificial Sequence
  Description of Artificial Sequence: Synthetic oligonucleotide
  Antisense strand to SEQ ID NO: 1218264
uucacccuccuaauaggag

SEQ ID NO: 1218266 - RNA, 19 nt, Artificial Sequence
  Description of Artificial Sequence: Synthetic oligonucleotide
  Sense strand starting at position 2835 of SEQ ID NO: 917220
gaggaauuguccuuacuga

SEQ ID NO: 1218267 - RNA, 19 nt, Artificial Sequence
  Description of Artificial Sequence: Synthetic oligonucleotide
  Antisense strand to SEQ ID NO: 1218266
ucaguaaggacaauuccuc

SEQ ID NO: 1218268 - RNA, 19 nt, Artificial Sequence
  Description of Artificial Sequence: Synthetic oligonucleotide
  Sense strand starting at position 2842 of SEQ ID NO: 917220
uguccuuacugagccuaaa

SEQ ID NO: 1218269 - RNA, 19 nt, Artificial Sequence
  Description of Artificial Sequence: Synthetic oligonucleotide
  Antisense strand to SEQ ID NO: 1218268
uuuaggcucaguaaggaca

SEQ ID NO: 1218270 - RNA, 19 nt, Artificial Sequence
  Description of Artificial Sequence: Synthetic oligonucleotide
  Sense strand starting at position 2885 of SEQ ID NO: 917220
ggacauauuggugggcauu

SEQ ID NO: 1218271 - RNA, 19 nt, Artificial Sequence
  Description of Artificial Sequence: Synthetic oligonucleotide
  Antisense strand to SEQ ID NO: 1218270
aaugcccaccaauaugucc

SEQ ID NO: 1218272 - RNA, 19 nt, Artificial Sequence
  Description of Artificial Sequence: Synthetic oligonucleotide
  Sense strand starting at position 2886 of SEQ ID NO: 917220
gacauauuggugggcauua

SEQ ID NO: 1218273 - RNA, 19 nt, Artificial Sequence
  Description of Artificial Sequence: Synthetic oligonucleotide
  Antisense strand to SEQ ID NO: 1218272
uaaugcccaccaauauguc

SEQ ID NO: 1218274 - RNA, 19 nt, Artificial Sequence
  Description of Artificial Sequence: Synthetic oligonucleotide
  Sense strand starting at position 2895 of SEQ ID NO: 917220
gugggcauuagcugaaaga

SEQ ID NO: 1218275 - RNA, 19 nt, Artificial Sequence
  Description of Artificial Sequence: Synthetic oligonucleotide
  Antisense strand to SEQ ID NO: 1218274
ucuuucagcuaaugcccac

SEQ ID NO: 1218276 - RNA, 19 nt, Artificial Sequence
  Description of Artificial Sequence: Synthetic oligonucleotide
  Sense strand starting at position 2921 of SEQ ID NO: 917220
gugccaguucuucaaggga

SEQ ID NO: 1218277 - RNA, 19 nt, Artificial Sequence
  Description of Artificial Sequence: Synthetic oligonucleotide
  Antisense strand to SEQ ID NO: 1218276
ucccuugaagaacuggcac

SEQ ID NO: 1218278 - RNA, 19 nt, Artificial Sequence
  Description of Artificial Sequence: Synthetic oligonucleotide
  Sense strand starting at position 2973 of SEQ ID NO: 917220
gagggaaccugccuuuauu

SEQ ID NO: 1218279 - RNA, 19 nt, Artificial Sequence
  Description of Artificial Sequence: Synthetic oligonucleotide
  Antisense strand to SEQ ID NO: 1218278
aauaaaggcagguucccuc

SEQ ID NO: 1218280 - RNA, 19 nt, Artificial Sequence
  Description of Artificial Sequence: Synthetic oligonucleotide
  Sense strand starting at position 2983 of SEQ ID NO: 917220
gccuuuauuuacucugugu

SEQ ID NO: 1218281 - RNA, 19 nt, Artificial Sequence
  Description of Artificial Sequence: Synthetic oligonucleotide
  Antisense strand to SEQ ID NO: 1218280
acacagaguaaauaaaggc

SEQ ID NO: 1218282 - RNA, 19 nt, Artificial Sequence
  Description of Artificial Sequence: Synthetic oligonucleotide
  Sense strand starting at position 2991 of SEQ ID NO: 917220
uuacucugugugggaacaa

SEQ ID NO: 1218283 - RNA, 19 nt, Artificial Sequence
  Description of Artificial Sequence: Synthetic oligonucleotide
  Antisense strand to SEQ ID NO: 1218282
uuguucccacacagaguaa

SEQ ID NO: 1218284 - RNA, 19 nt, Artificial Sequence
  Description of Artificial Sequence: Synthetic oligonucleotide
  Sense strand starting at position 3036 of SEQ ID NO: 917220
agggaagugcugugaaaca

SEQ ID NO: 1218285 - RNA, 19 nt, Artificial Sequence
  Description of Artificial Sequence: Synthetic oligonucleotide
  Antisense strand to SEQ ID NO: 1218284
uguuucacagcacuucccu

SEQ ID NO: 1218286 - RNA, 19 nt, Artificial Sequence
  Description of Artificial Sequence: Synthetic oligonucleotide
  Sense strand starting at position 3207 of SEQ ID NO: 917220
ccaguuguauccucaggaa

SEQ ID NO: 1218287 - RNA, 19 nt, Artificial Sequence
  Description of Artificial Sequence: Synthetic oligonucleotide
  Antisense strand to SEQ ID NO: 1218286
uuccugaggauacaacugg

SEQ ID NO: 1218288 - RNA, 19 nt, Artificial Sequence
  Description of Artificial Sequence: Synthetic oligonucleotide
  Sense strand starting at position 3259 of SEQ ID NO: 917220
gugaaaucagcaugacuuu

SEQ ID NO: 1218289 - RNA, 19 nt, Artificial Sequence
  Description of Artificial Sequence: Synthetic oligonucleotide
  Antisense strand to SEQ ID NO: 1218288
aaagucaugcugauuucac

SEQ ID NO: 1218290 - RNA, 19 nt, Artificial Sequence
  Description of Artificial Sequence: Synthetic oligonucleotide
  Sense strand starting at position 3436 of SEQ ID NO: 917220
ucaucauuggcauagcagu

SEQ ID NO: 1218291 - RNA, 19 nt, Artificial Sequence
  Description of Artificial Sequence: Synthetic oligonucleotide
  Antisense strand to SEQ ID NO: 1218290
acugcuaugccaaugauga

SEQ ID NO: 1218292 - RNA, 19 nt, Artificial Sequence
  Description of Artificial Sequence: Synthetic oligonucleotide
  Sense strand starting at position 3459 of SEQ ID NO: 917220
uggcaacucagugaugcau

SEQ ID NO: 1218293 - RNA, 19 nt, Artificial Sequence
  Description of Artificial Sequence: Synthetic oligonucleotide
  Antisense strand to SEQ ID NO: 1218292
augcaucacugaguugcca

SEQ ID NO: 1218294 - RNA, 19 nt, Artificial Sequence
  Description of Artificial Sequence: Synthetic oligonucleotide
  Sense strand starting at position 3494 of SEQ ID NO: 917220
aagcuugaacgguaucacu

SEQ ID NO: 1218295 - RNA, 19 nt, Artificial Sequence
  Description of Artificial Sequence: Synthetic oligonucleotide
  Antisense strand to SEQ ID NO: 1218294
agugauaccguucaagcuu

SEQ ID NO: 1218296 - RNA, 19 nt, Artificial Sequence
  Description of Artificial Sequence: Synthetic oligonucleotide
  Sense strand starting at position 3502 of SEQ ID NO: 917220
acgguaucacuguauucua

SEQ ID NO: 1218297 - RNA, 19 nt, Artificial Sequence
  Description of Artificial Sequence: Synthetic oligonucleotide
  Antisense strand to SEQ ID NO: 1218296
uagaauacagugauaccgu

SEQ ID NO: 1218298 - RNA, 19 nt, Artificial Sequence
  Description of Artificial Sequence: Synthetic oligonucleotide
  Sense strand starting at position 3917 of SEQ ID NO: 917220
aagugaucacugcagggua

SEQ ID NO: 1218299 - RNA, 19 nt, Artificial Sequence
  Description of Artificial Sequence: Synthetic oligonucleotide
  Antisense strand to SEQ ID NO: 1218298
uacccugcagugaucacuu

SEQ ID NO: 1218300 - RNA, 19 nt, Artificial Sequence
  Description of Artificial Sequence: Synthetic oligonucleotide
  Sense strand starting at position 3917 of SEQ ID NO: 917221
aagugaucacugcagggua

SEQ ID NO: 1218301 - RNA, 19 nt, Artificial Sequence
  Description of Artificial Sequence: Synthetic oligonucleotide
  Antisense strand to SEQ ID NO: 1218300
uacccugcagugaucacuu

SEQ ID NO: 1218302 - RNA, 19 nt, Artificial Sequence
  Description of Artificial Sequence: Synthetic oligonucleotide
  Sense strand starting at position 109 of SEQ ID NO: 917221
acuuaaugaugucacuaug

SEQ ID NO: 1218303 - RNA, 19 nt, Artificial Sequence
  Description of Artificial Sequence: Synthetic oligonucleotide
  Antisense strand to SEQ ID NO: 1218302
cauagugacaucauuaagu

SEQ ID NO: 1218304 - RNA, 19 nt, Artificial Sequence
  Description of Artificial Sequence: Synthetic oligonucleotide
  Sense strand starting at position 140 of SEQ ID NO: 917221
ugugcagaucuauauugca

SEQ ID NO: 1218305 - RNA, 19 nt, Artificial Sequence
  Description of Artificial Sequence: Synthetic oligonucleotide
  Antisense strand to SEQ ID NO: 1218304
ugcaauauagaucugcaca

SEQ ID NO: 1218306 - RNA, 19 nt, Artificial Sequence
  Description of Artificial Sequence: Synthetic oligonucleotide
  Sense strand starting at position 187 of SEQ ID NO: 917221
ugacuuuaccugugagcau

SEQ ID NO: 1218307 - RNA, 19 nt, Artificial Sequence
  Description of Artificial Sequence: Synthetic oligonucleotide
  Antisense strand to SEQ ID NO: 1218306
augcucacagguaaaguca

SEQ ID NO: 1218308 - RNA, 19 nt, Artificial Sequence
  Description of Artificial Sequence: Synthetic oligonucleotide
  Sense strand starting at position 209 of SEQ ID NO: 917221
ugugcagucucauugcuau

SEQ ID NO: 1218309 - RNA, 19 nt, Artificial Sequence
  Description of Artificial Sequence: Synthetic oligonucleotide
  Antisense strand to SEQ ID NO: 1218308
auagcaaugagacugcaca

SEQ ID NO: 1218310 - RNA, 19 nt, Artificial Sequence
  Description of Artificial Sequence: Synthetic oligonucleotide
  Sense strand starting at position 281 of SEQ ID NO: 917221
gagccaacugcaugaaugu

SEQ ID NO: 1218311 - RNA, 19 nt, Artificial Sequence
  Description of Artificial Sequence: Synthetic oligonucleotide
  Antisense strand to SEQ ID NO: 1218310
acauucaugcaguuggcuc

SEQ ID NO: 1218312 - RNA, 19 nt, Artificial Sequence
  Description of Artificial Sequence: Synthetic oligonucleotide
  Sense strand starting at position 317 of SEQ ID NO: 917221
ccagcuugauuaucucaga

SEQ ID NO: 1218313 - RNA, 19 nt, Artificial Sequence
  Description of Artificial Sequence: Synthetic oligonucleotide
  Antisense strand to SEQ ID NO: 1218312
ucugagauaaucaagcugg

SEQ ID NO: 1218314 - RNA, 19 nt, Artificial Sequence
  Description of Artificial Sequence: Synthetic oligonucleotide
  Sense strand starting at position 394 of SEQ ID NO: 917221
ccagcaauccaccagguau

SEQ ID NO: 1218315 - RNA, 19 nt, Artificial Sequence
  Description of Artificial Sequence: Synthetic oligonucleotide
  Antisense strand to SEQ ID NO: 1218314
auaccugguggauugcugg

SEQ ID NO: 1218316 - RNA, 19 nt, Artificial Sequence
  Description of Artificial Sequence: Synthetic oligonucleotide
  Sense strand starting at position 597 of SEQ ID NO: 917221
cgaguacuccuccgacugu

SEQ ID NO: 1218317 - RNA, 19 nt, Artificial Sequence
  Description of Artificial Sequence: Synthetic oligonucleotide
  Antisense strand to SEQ ID NO: 1218316
acagucggaggaguacucg

SEQ ID NO: 1218318 - RNA, 19 nt, Artificial Sequence
  Description of Artificial Sequence: Synthetic oligonucleotide
  Sense strand starting at position 603 of SEQ ID NO: 917221
cuccuccgacuguaaauau

SEQ ID NO: 1218319 - RNA, 19 nt, Artificial Sequence
  Description of Artificial Sequence: Synthetic oligonucleotide
  Antisense strand to SEQ ID NO: 1218318
auauuuacagucggaggag

SEQ ID NO: 1218320 - RNA, 19 nt, Artificial Sequence
  Description of Artificial Sequence: Synthetic oligonucleotide
  Sense strand starting at position 658 of SEQ ID NO: 917221
ugagcaugguggucauagu

SEQ ID NO: 1218321 - RNA, 19 nt, Artificial Sequence
  Description of Artificial Sequence: Synthetic oligonucleotide
  Antisense strand to SEQ ID NO: 1218320
acuaugaccaccaugcuca

SEQ ID NO: 1218322 - RNA, 19 nt, Artificial Sequence
  Description of Artificial Sequence: Synthetic oligonucleotide
  Sense strand starting at position 755 of SEQ ID NO: 917221
aaguguugggacuggacaa

SEQ ID NO: 1218323 - RNA, 19 nt, Artificial Sequence
  Description of Artificial Sequence: Synthetic oligonucleotide
  Antisense strand to SEQ ID NO: 1218322
uuguccagucccaacacuu

SEQ ID NO: 1218324 - RNA, 19 nt, Artificial Sequence
  Description of Artificial Sequence: Synthetic oligonucleotide
  Sense strand starting at position 787 of SEQ ID NO: 917221
ucccaaaguguguaggaau

SEQ ID NO: 1218325 - RNA, 19 nt, Artificial Sequence
  Description of Artificial Sequence: Synthetic oligonucleotide
  Antisense strand to SEQ ID NO: 1218324
auuccuacacacuuuggga

SEQ ID NO: 1218326 - RNA, 19 nt, Artificial Sequence
  Description of Artificial Sequence: Synthetic oligonucleotide
  Sense strand starting at position 847 of SEQ ID NO: 917221
gugggaugcuugcuccuca

SEQ ID NO: 1218327 - RNA, 19 nt, Artificial Sequence
  Description of Artificial Sequence: Synthetic oligonucleotide
  Antisense strand to SEQ ID NO: 1218326
ugaggagcaagcaucccac

SEQ ID NO: 1218328 - RNA, 19 nt, Artificial Sequence
  Description of Artificial Sequence: Synthetic oligonucleotide
  Sense strand starting at position 924 of SEQ ID NO: 917221
cgcauucuccaccgugaag

SEQ ID NO: 1218329 - RNA, 19 nt, Artificial Sequence
  Description of Artificial Sequence: Synthetic oligonucleotide
  Antisense strand to SEQ ID NO: 1218328
cuucacgguggagaaugcg

SEQ ID NO: 1218330 - RNA, 19 nt, Artificial Sequence
  Description of Artificial Sequence: Synthetic oligonucleotide
  Sense strand starting at position 997 of SEQ ID NO: 917221
uuggcagaguuuccuagaa

SEQ ID NO: 1218331 - RNA, 19 nt, Artificial Sequence
  Description of Artificial Sequence: Synthetic oligonucleotide
  Antisense strand to SEQ ID NO: 1218330
uucuaggaaacucugccaa

SEQ ID NO: 1218332 - RNA, 19 nt, Artificial Sequence
  Description of Artificial Sequence: Synthetic oligonucleotide
  Sense strand starting at position 1448 of SEQ ID NO: 917221
cgucauacugccgacacau

SEQ ID NO: 1218333 - RNA, 19 nt, Artificial Sequence
  Description of Artificial Sequence: Synthetic oligonucleotide
  Antisense strand to SEQ ID NO: 1218332
augugucggcaguaugacg

SEQ ID NO: 1218334 - RNA, 19 nt, Artificial Sequence
  Description of Artificial Sequence: Synthetic oligonucleotide
  Sense strand starting at position 1537 of SEQ ID NO: 917221
gugucaccacaauaugcau

SEQ ID NO: 1218335 - RNA, 19 nt, Artificial Sequence
  Description of Artificial Sequence: Synthetic oligonucleotide
  Antisense strand to SEQ ID NO: 1218334
augcauauuguggugacac

SEQ ID NO: 1218336 - RNA, 19 nt, Artificial Sequence
  Description of Artificial Sequence: Synthetic oligonucleotide
  Sense strand starting at position 1725 of SEQ ID NO: 917221
aggucugacuugcuuccua

SEQ ID NO: 1218337 - RNA, 19 nt, Artificial Sequence
  Description of Artificial Sequence: Synthetic oligonucleotide
  Antisense strand to SEQ ID NO: 1218336
uaggaagcaagucagaccu

SEQ ID NO: 1218338 - RNA, 19 nt, Artificial Sequence
  Description of Artificial Sequence: Synthetic oligonucleotide
  Sense strand starting at position 2357 of SEQ ID NO: 917221
caucuucguccuggagaaa

SEQ ID NO: 1218339 - RNA, 19 nt, Artificial Sequence
  Description of Artificial Sequence: Synthetic oligonucleotide
  Antisense strand to SEQ ID NO: 1218338
uuucuccaggacgaagaug

SEQ ID NO: 1218340 - RNA, 19 nt, Artificial Sequence
  Description of Artificial Sequence: Synthetic oligonucleotide
  Sense strand starting at position 2709 of SEQ ID NO: 917221
ggcagaggucucuacuggu

SEQ ID NO: 1218341 - RNA, 19 nt, Artificial Sequence
  Description of Artificial Sequence: Synthetic oligonucleotide
  Antisense strand to SEQ ID NO: 1218340
accaguagagaccucugcc

SEQ ID NO: 1218342 - RNA, 19 nt, Artificial Sequence
  Description of Artificial Sequence: Synthetic oligonucleotide
  Sense strand starting at position 2737 of SEQ ID NO: 917221
ugggcagaguccucucaac

SEQ ID NO: 1218343 - RNA, 19 nt, Artificial Sequence
  Description of Artificial Sequence: Synthetic oligonucleotide
  Antisense strand to SEQ ID NO: 1218342
guugagaggacucugccca

SEQ ID NO: 1218344 - RNA, 19 nt, Artificial Sequence
  Description of Artificial Sequence: Synthetic oligonucleotide
  Sense strand starting at position 2802 of SEQ ID NO: 917221
gcucgaauuggcuagagga

SEQ ID NO: 1218345 - RNA, 19 nt, Artificial Sequence
  Description of Artificial Sequence: Synthetic oligonucleotide
  Antisense strand to SEQ ID NO: 1218344
uccucuagccaauucgagc

SEQ ID NO: 1218346 - RNA, 19 nt, Artificial Sequence
  Description of Artificial Sequence: Synthetic oligonucleotide
  Sense strand starting at position 2893 of SEQ ID NO: 917221
gcaguuauuccguccugcu

SEQ ID NO: 1218347 - RNA, 19 nt, Artificial Sequence
  Description of Artificial Sequence: Synthetic oligonucleotide
  Antisense strand to SEQ ID NO: 1218346
agcaggacggaauaacugc

SEQ ID NO: 1218348 - RNA, 19 nt, Artificial Sequence
  Description of Artificial Sequence: Synthetic oligonucleotide
  Sense strand starting at position 2910 of SEQ ID NO: 917221
cugugugacacgggagaau

SEQ ID NO: 1218349 - RNA, 19 nt, Artificial Sequence
  Description of Artificial Sequence: Synthetic oligonucleotide
  Antisense strand to SEQ ID NO: 1218348
auucucccgugucacacag

SEQ ID NO: 1218350 - RNA, 19 nt, Artificial Sequence
  Description of Artificial Sequence: Synthetic oligonucleotide
  Sense strand starting at position 3035 of SEQ ID NO: 917221
cucauagagucuuaggaag

SEQ ID NO: 1218351 - RNA, 19 nt, Artificial Sequence
  Description of Artificial Sequence: Synthetic oligonucleotide
  Antisense strand to SEQ ID NO: 1218350
cuuccuaagacucuaugag

SEQ ID NO: 1218352 - RNA, 19 nt, Artificial Sequence
  Description of Artificial Sequence: Synthetic oligonucleotide
  Sense strand starting at position 3037 of SEQ ID NO: 917221
cauagagucuuaggaagaa

SEQ ID NO: 1218353 - RNA, 19 nt, Artificial Sequence
  Description of Artificial Sequence: Synthetic oligonucleotide
  Antisense strand to SEQ ID NO: 1218352
uucuuccuaagacucuaug

SEQ ID NO: 1218354 - RNA, 19 nt, Artificial Sequence
  Description of Artificial Sequence: Synthetic oligonucleotide
  Sense strand starting at position 3293 of SEQ ID NO: 917221
uagcguuggcucucggagu

SEQ ID NO: 1218355 - RNA, 19 nt, Artificial Sequence
  Description of Artificial Sequence: Synthetic oligonucleotide
  Antisense strand to SEQ ID NO: 1218354
acuccgagagccaacgcua

SEQ ID NO: 1218356 - RNA, 19 nt, Artificial Sequence
  Description of Artificial Sequence: Synthetic oligonucleotide
  Sense strand starting at position 3403 of SEQ ID NO: 917221
cuccuuugaucugaagauc

SEQ ID NO: 1218357 - RNA, 19 nt, Artificial Sequence
  Description of Artificial Sequence: Synthetic oligonucleotide
  Antisense strand to SEQ ID NO: 1218356
gaucuucagaucaaaggag

SEQ ID NO: 1218358 - RNA, 19 nt, Artificial Sequence
  Description of Artificial Sequence: Synthetic oligonucleotide
  Sense strand starting at position 3633 of SEQ ID NO: 917221
ggugaccucuuucuaagua

SEQ ID NO: 1218359 - RNA, 19 nt, Artificial Sequence
  Description of Artificial Sequence: Synthetic oligonucleotide
  Antisense strand to SEQ ID NO: 1218358
uacuuagaaagaggucacc

SEQ ID NO: 1218360 - RNA, 19 nt, Artificial Sequence
  Description of Artificial Sequence: Synthetic oligonucleotide
  Sense strand starting at position 3895 of SEQ ID NO: 917221
cuguuugauggcugguuua

SEQ ID NO: 1218361 - RNA, 19 nt, Artificial Sequence
  Description of Artificial Sequence: Synthetic oligonucleotide
  Antisense strand to SEQ ID NO: 1218360
uaaaccagccaucaaacag

SEQ ID NO: 1218362 - RNA, 19 nt, Artificial Sequence
  Description of Artificial Sequence: Synthetic oligonucleotide
  Sense strand starting at position 3908 of SEQ ID NO: 917221
gguuuacucaagugucaug

SEQ ID NO: 1218363 - RNA, 19 nt, Artificial Sequence
  Description of Artificial Sequence: Synthetic oligonucleotide
  Antisense strand to SEQ ID NO: 1218362
caugacacuugaguaaacc

SEQ ID NO: 1218364 - RNA, 19 nt, Artificial Sequence
  Description of Artificial Sequence: Synthetic oligonucleotide
  Sense strand starting at position 3915 of SEQ ID NO: 917221
ucaagugucauguaguguu

SEQ ID NO: 1218365 - RNA, 19 nt, Artificial Sequence
  Description of Artificial Sequence: Synthetic oligonucleotide
  Antisense strand to SEQ ID NO: 1218364
aacacuacaugacacuuga

SEQ ID NO: 1218366 - RNA, 19 nt, Artificial Sequence
  Description of Artificial Sequence: Synthetic oligonucleotide
  Sense strand starting at position 3937 of SEQ ID NO: 917221
aaagacgauuuguguaagu

SEQ ID NO: 1218367 - RNA, 19 nt, Artificial Sequence
  Description of Artificial Sequence: Synthetic oligonucleotide
  Antisense strand to SEQ ID NO: 1218366
acuuacacaaaucgucuuu

SEQ ID NO: 1218368 - RNA, 19 nt, Artificial Sequence
  Description of Artificial Sequence: Synthetic oligonucleotide
  Sense strand starting at position 3942 of SEQ ID NO: 917221
cgauuuguguaaguagauc

SEQ ID NO: 1218369 - RNA, 19 nt, Artificial Sequence
  Description of Artificial Sequence: Synthetic oligonucleotide
  Antisense strand to SEQ ID NO: 1218368
gaucuacuuacacaaaucg

SEQ ID NO: 1218370 - RNA, 19 nt, Artificial Sequence
  Description of Artificial Sequence: Synthetic oligonucleotide
  Sense strand starting at position 3948 of SEQ ID NO: 917221
guguaaguagaucauucua

SEQ ID NO: 1218371 - RNA, 19 nt, Artificial Sequence
  Description of Artificial Sequence: Synthetic oligonucleotide
  Antisense strand to SEQ ID NO: 1218370
uagaaugaucuacuuacac

SEQ ID NO: 1218372 - RNA, 19 nt, Artificial Sequence
  Description of Artificial Sequence: Synthetic oligonucleotide
  Sense strand starting at position 3950 of SEQ ID NO: 917221
guaaguagaucauucuagu

SEQ ID NO: 1218373 - RNA, 19 nt, Artificial Sequence
  Description of Artificial Sequence: Synthetic oligonucleotide
  Antisense strand to SEQ ID NO: 1218372
acuagaaugaucuacuuac

SEQ ID NO: 1218374 - RNA, 19 nt, Artificial Sequence
  Description of Artificial Sequence: Synthetic oligonucleotide
  Sense strand starting at position 3959 of SEQ ID NO: 917221
ucauucuaguacuuucgau

SEQ ID NO: 1218375 - RNA, 19 nt, Artificial Sequence
  Description of Artificial Sequence: Synthetic oligonucleotide
  Antisense strand to SEQ ID NO: 1218374
aucgaaaguacuagaauga

SEQ ID NO: 1218376 - RNA, 19 nt, Artificial Sequence
  Description of Artificial Sequence: Synthetic oligonucleotide
  Sense strand starting at position 3971 of SEQ ID NO: 917221
uuucgauuucaguguguug

SEQ ID NO: 1218377 - RNA, 19 nt, Artificial Sequence
  Description of Artificial Sequence: Synthetic oligonucleotide
  Antisense strand to SEQ ID NO: 1218376
caacacacugaaaucgaaa

SEQ ID NO: 1218378 - RNA, 19 nt, Artificial Sequence
  Description of Artificial Sequence: Synthetic oligonucleotide
  Sense strand starting at position 3973 of SEQ ID NO: 917221
ucgauuucaguguguugaa

SEQ ID NO: 1218379 - RNA, 19 nt, Artificial Sequence
  Description of Artificial Sequence: Synthetic oligonucleotide
  Antisense strand to SEQ ID NO: 1218378
uucaacacacugaaaucga

SEQ ID NO: 1218380 - RNA, 19 nt, Artificial Sequence
  Description of Artificial Sequence: Synthetic oligonucleotide
  Sense strand starting at position 3974 of SEQ ID NO: 917222
cgauuucaguguguugaau

SEQ ID NO: 1218381 - RNA, 19 nt, Artificial Sequence
  Description of Artificial Sequence: Synthetic oligonucleotide
  Antisense strand to SEQ ID NO: 1218380
auucaacacacugaaaucg

SEQ ID NO: 1218382 - RNA, 19 nt, Artificial Sequence
  Description of Artificial Sequence: Synthetic oligonucleotide
  Sense strand starting at position 13 of SEQ ID NO: 917222
aggauauguucauuggagc

SEQ ID NO: 1218383 - RNA, 19 nt, Artificial Sequence
  Description of Artificial Sequence: Synthetic oligonucleotide
  Antisense strand to SEQ ID NO: 1218382
gcuccaaugaacauauccu

SEQ ID NO: 1218384 - RNA, 19 nt, Artificial Sequence
  Description of Artificial Sequence: Synthetic oligonucleotide
  Sense strand starting at position 14 of SEQ ID NO: 917222
ggauauguucauuggagca

SEQ ID NO: 1218385 - RNA, 19 nt, Artificial Sequence
  Description of Artificial Sequence: Synthetic oligonucleotide
  Antisense strand to SEQ ID NO: 1218384
ugcuccaaugaacauaucc

SEQ ID NO: 1218386 - RNA, 19 nt, Artificial Sequence
  Description of Artificial Sequence: Synthetic oligonucleotide
  Sense strand starting at position 188 of SEQ ID NO: 917222
auuguuagcauuugguuga

SEQ ID NO: 1218387 - RNA, 19 nt, Artificial Sequence
  Description of Artificial Sequence: Synthetic oligonucleotide
  Antisense strand to SEQ ID NO: 1218386
ucaaccaaaugcuaacaau

SEQ ID NO: 1218388 - RNA, 19 nt, Artificial Sequence
  Description of Artificial Sequence: Synthetic oligonucleotide
  Sense strand starting at position 559 of SEQ ID NO: 917222
uguacauuguguguaauuu

SEQ ID NO: 1218389 - RNA, 19 nt, Artificial Sequence
  Description of Artificial Sequence: Synthetic oligonucleotide
  Antisense strand to SEQ ID NO: 1218388
aaauuacacacaauguaca

SEQ ID NO: 1218390 - RNA, 19 nt, Artificial Sequence
  Description of Artificial Sequence: Synthetic oligonucleotide
  Sense strand starting at position 890 of SEQ ID NO: 917222
auuggaauagguugccaaa

SEQ ID NO: 1218391 - RNA, 19 nt, Artificial Sequence
  Description of Artificial Sequence: Synthetic oligonucleotide
  Antisense strand to SEQ ID NO: 1218390
uuuggcaaccuauuccaau

SEQ ID NO: 1218392 - RNA, 19 nt, Artificial Sequence
  Description of Artificial Sequence: Synthetic oligonucleotide
  Sense strand starting at position 915 of SEQ ID NO: 917222
agugcaaacccagaguauu

SEQ ID NO: 1218393 - RNA, 19 nt, Artificial Sequence
  Description of Artificial Sequence: Synthetic oligonucleotide
  Antisense strand to SEQ ID NO: 1218392
aauacucuggguuugcacu

SEQ ID NO: 1218394 - RNA, 19 nt, Artificial Sequence
  Description of Artificial Sequence: Synthetic oligonucleotide
  Sense strand starting at position 964 of SEQ ID NO: 917222
agcagugugaauuacugaa

SEQ ID NO: 1218395 - RNA, 19 nt, Artificial Sequence
  Description of Artificial Sequence: Synthetic oligonucleotide
  Antisense strand to SEQ ID NO: 1218394
uucaguaauucacacugcu

SEQ ID NO: 1218396 - RNA, 19 nt, Artificial Sequence
  Description of Artificial Sequence: Synthetic oligonucleotide
  Sense strand starting at position 1055 of SEQ ID NO: 917222
cacguauauuaacugaaga

SEQ ID NO: 1218397 - RNA, 19 nt, Artificial Sequence
  Description of Artificial Sequence: Synthetic oligonucleotide
  Antisense strand to SEQ ID NO: 1218396
ucuucaguuaauauacgug

SEQ ID NO: 1218398 - RNA, 19 nt, Artificial Sequence
  Description of Artificial Sequence: Synthetic oligonucleotide
  Sense strand starting at position 1093 of SEQ ID NO: 917222
cuguauggccuuuagaacu

SEQ ID NO: 1218399 - RNA, 19 nt, Artificial Sequence
  Description of Artificial Sequence: Synthetic oligonucleotide
  Antisense strand to SEQ ID NO: 1218398
aguucuaaaggccauacag

SEQ ID NO: 1218400 - RNA, 19 nt, Artificial Sequence
  Description of Artificial Sequence: Synthetic oligonucleotide
  Sense strand starting at position 1323 of SEQ ID NO: 917222
augcuuaaggaguauugua

SEQ ID NO: 1218401 - RNA, 19 nt, Artificial Sequence
  Description of Artificial Sequence: Synthetic oligonucleotide
  Antisense strand to SEQ ID NO: 1218400
uacaauacuccuuaagcau

SEQ ID NO: 1218402 - RNA, 19 nt, Artificial Sequence
  Description of Artificial Sequence: Synthetic oligonucleotide
  Sense strand starting at position 1337 of SEQ ID NO: 917222
uuguaauacauguggagac

SEQ ID NO: 1218403 - RNA, 19 nt, Artificial Sequence
  Description of Artificial Sequence: Synthetic oligonucleotide
  Antisense strand to SEQ ID NO: 1218402
gucuccacauguauuacaa

SEQ ID NO: 1218404 - RNA, 19 nt, Artificial Sequence
  Description of Artificial Sequence: Synthetic oligonucleotide
  Sense strand starting at position 1350 of SEQ ID NO: 917222
ggagacugauuugaguuca

SEQ ID NO: 1218405 - RNA, 19 nt, Artificial Sequence
  Description of Artificial Sequence: Synthetic oligonucleotide
  Antisense strand to SEQ ID NO: 1218404
ugaacucaaaucagucucc

SEQ ID NO: 1218406 - RNA, 19 nt, Artificial Sequence
  Description of Artificial Sequence: Synthetic oligonucleotide
  Sense strand starting at position 1377 of SEQ ID NO: 917222
agguuccauucuuccagaa

SEQ ID NO: 1218407 - RNA, 19 nt, Artificial Sequence
  Description of Artificial Sequence: Synthetic oligonucleotide
  Antisense strand to SEQ ID NO: 1218406
uucuggaagaauggaaccu

SEQ ID NO: 1218408 - RNA, 19 nt, Artificial Sequence
  Description of Artificial Sequence: Synthetic oligonucleotide
  Sense strand starting at position 1432 of SEQ ID NO: 917222
guguguacuguuucugcua

SEQ ID NO: 1218409 - RNA, 19 nt, Artificial Sequence
  Description of Artificial Sequence: Synthetic oligonucleotide
  Antisense strand to SEQ ID NO: 1218408
uagcagaaacaguacacac

SEQ ID NO: 1218410 - RNA, 19 nt, Artificial Sequence
  Description of Artificial Sequence: Synthetic oligonucleotide
  Sense strand starting at position 2231 of SEQ ID NO: 917222
ggcaaugggccaugacaua

SEQ ID NO: 1218411 - RNA, 19 nt, Artificial Sequence
  Description of Artificial Sequence: Synthetic oligonucleotide
  Antisense strand to SEQ ID NO: 1218410
uaugucauggcccauugcc

SEQ ID NO: 1218412 - RNA, 19 nt, Artificial Sequence
  Description of Artificial Sequence: Synthetic oligonucleotide
  Sense strand starting at position 2287 of SEQ ID NO: 917222
cauugcucaggaugaugaa

SEQ ID NO: 1218413 - RNA, 19 nt, Artificial Sequence
  Description of Artificial Sequence: Synthetic oligonucleotide
  Antisense strand to SEQ ID NO: 1218412
uucaucauccugagcaaug

SEQ ID NO: 1218414 - RNA, 19 nt, Artificial Sequence
  Description of Artificial Sequence: Synthetic oligonucleotide
  Sense strand starting at position 2334 of SEQ ID NO: 917222
gcaugaauuugccuguggu

SEQ ID NO: 1218415 - RNA, 19 nt, Artificial Sequence
  Description of Artificial Sequence: Synthetic oligonucleotide
  Antisense strand to SEQ ID NO: 1218414
accacaggcaaauucaugc

SEQ ID NO: 1218416 - RNA, 19 nt, Artificial Sequence
  Description of Artificial Sequence: Synthetic oligonucleotide
  Sense strand starting at position 2335 of SEQ ID NO: 917222
caugaauuugccuguggua

SEQ ID NO: 1218417 - RNA, 19 nt, Artificial Sequence
  Description of Artificial Sequence: Synthetic oligonucleotide
  Antisense strand to SEQ ID NO: 1218416
uaccacaggcaaauucaug

SEQ ID NO: 1218418 - RNA, 19 nt, Artificial Sequence
  Description of Artificial Sequence: Synthetic oligonucleotide
  Sense strand starting at position 2337 of SEQ ID NO: 917222
ugaauuugccugugguaac

SEQ ID NO: 1218419 - RNA, 19 nt, Artificial Sequence
  Description of Artificial Sequence: Synthetic oligonucleotide
  Antisense strand to SEQ ID NO: 1218418
guuaccacaggcaaauuca

SEQ ID NO: 1218420 - RNA, 19 nt, Artificial Sequence
  Description of Artificial Sequence: Synthetic oligonucleotide
  Sense strand starting at position 2347 of SEQ ID NO: 917222
ugugguaaccuaugaaauu

SEQ ID NO: 1218421 - RNA, 19 nt, Artificial Sequence
  Description of Artificial Sequence: Synthetic oligonucleotide
  Antisense strand to SEQ ID NO: 1218420
aauuucauagguuaccaca

SEQ ID NO: 1218422 - RNA, 19 nt, Artificial Sequence
  Description of Artificial Sequence: Synthetic oligonucleotide
  Sense strand starting at position 2438 of SEQ ID NO: 917222
agaggcuacauaugaugau

SEQ ID NO: 1218423 - RNA, 19 nt, Artificial Sequence
  Description of Artificial Sequence: Synthetic oligonucleotide
  Antisense strand to SEQ ID NO: 1218422
aucaucauauguagccucu

SEQ ID NO: 1218424 - RNA, 19 nt, Artificial Sequence
  Description of Artificial Sequence: Synthetic oligonucleotide
  Sense strand starting at position 2507 of SEQ ID NO: 917222
cugugauagcauuauucua

SEQ ID NO: 1218425 - RNA, 19 nt, Artificial Sequence
  Description of Artificial Sequence: Synthetic oligonucleotide
  Antisense strand to SEQ ID NO: 1218424
uagaauaaugcuaucacag

SEQ ID NO: 1218426 - RNA, 19 nt, Artificial Sequence
  Description of Artificial Sequence: Synthetic oligonucleotide
  Sense strand starting at position 2565 of SEQ ID NO: 917222
ccagcuuaucugcaaagau

SEQ ID NO: 1218427 - RNA, 19 nt, Artificial Sequence
  Description of Artificial Sequence: Synthetic oligonucleotide
  Antisense strand to SEQ ID NO: 1218426
aucuuugcagauaagcugg

SEQ ID NO: 1218428 - RNA, 19 nt, Artificial Sequence
  Description of Artificial Sequence: Synthetic oligonucleotide
  Sense strand starting at position 2685 of SEQ ID NO: 917222
ugaaucauaugccuuaaag

SEQ ID NO: 1218429 - RNA, 19 nt, Artificial Sequence
  Description of Artificial Sequence: Synthetic oligonucleotide
  Antisense strand to SEQ ID NO: 1218428
cuuuaaggcauaugauuca

SEQ ID NO: 1218430 - RNA, 19 nt, Artificial Sequence
  Description of Artificial Sequence: Synthetic oligonucleotide
  Sense strand starting at position 2758 of SEQ ID NO: 917222
ugcagaccuccugggaaau

SEQ ID NO: 1218431 - RNA, 19 nt, Artificial Sequence
  Description of Artificial Sequence: Synthetic oligonucleotide
  Antisense strand to SEQ ID NO: 1218430
auuucccaggaggucugca

SEQ ID NO: 1218432 - RNA, 19 nt, Artificial Sequence
  Description of Artificial Sequence: Synthetic oligonucleotide
  Sense strand starting at position 2759 of SEQ ID NO: 917222
gcagaccuccugggaaaua

SEQ ID NO: 1218433 - RNA, 19 nt, Artificial Sequence
  Description of Artificial Sequence: Synthetic oligonucleotide
  Antisense strand to SEQ ID NO: 1218432
uauuucccaggaggucugc

SEQ ID NO: 1218434 - RNA, 19 nt, Artificial Sequence
  Description of Artificial Sequence: Synthetic oligonucleotide
  Sense strand starting at position 2832 of SEQ ID NO: 917222
cuggaucugagagguugau

SEQ ID NO: 1218435 - RNA, 19 nt, Artificial Sequence
  Description of Artificial Sequence: Synthetic oligonucleotide
  Antisense strand to SEQ ID NO: 1218434
aucaaccucucagauccag

SEQ ID NO: 1218436 - RNA, 19 nt, Artificial Sequence
  Description of Artificial Sequence: Synthetic oligonucleotide
  Sense strand starting at position 2841 of SEQ ID NO: 917222
agagguugaugauucuuua

SEQ ID NO: 1218437 - RNA, 19 nt, Artificial Sequence
  Description of Artificial Sequence: Synthetic oligonucleotide
  Antisense strand to SEQ ID NO: 1218436
uaaagaaucaucaaccucu

SEQ ID NO: 1218438 - RNA, 19 nt, Artificial Sequence
  Description of Artificial Sequence: Synthetic oligonucleotide
  Sense strand starting at position 2844 of SEQ ID NO: 917222
gguugaugauucuuuacca

SEQ ID NO: 1218439 - RNA, 19 nt, Artificial Sequence
  Description of Artificial Sequence: Synthetic oligonucleotide
  Antisense strand to SEQ ID NO: 1218438
ugguaaagaaucaucaacc

SEQ ID NO: 1218440 - RNA, 19 nt, Artificial Sequence
  Description of Artificial Sequence: Synthetic oligonucleotide
  Sense strand starting at position 2845 of SEQ ID NO: 917222
guugaugauucuuuaccaa

SEQ ID NO: 1218441 - RNA, 19 nt, Artificial Sequence
  Description of Artificial Sequence: Synthetic oligonucleotide
  Antisense strand to SEQ ID NO: 1218440
uugguaaagaaucaucaac

SEQ ID NO: 1218442 - RNA, 19 nt, Artificial Sequence
  Description of Artificial Sequence: Synthetic oligonucleotide
  Sense strand starting at position 2885 of SEQ ID NO: 917222
cagaguugacauugucaau

SEQ ID NO: 1218443 - RNA, 19 nt, Artificial Sequence
  Description of Artificial Sequence: Synthetic oligonucleotide
  Antisense strand to SEQ ID NO: 1218442
auugacaaugucaacucug

SEQ ID NO: 1218444 - RNA, 19 nt, Artificial Sequence
  Description of Artificial Sequence: Synthetic oligonucleotide
  Sense strand starting at position 3036 of SEQ ID NO: 917222
acagaucuguguuugacag

SEQ ID NO: 1218445 - RNA, 19 nt, Artificial Sequence
  Description of Artificial Sequence: Synthetic oligonucleotide
  Antisense strand to SEQ ID NO: 1218444
cugucaaacacagaucugu

SEQ ID NO: 1218446 - RNA, 19 nt, Artificial Sequence
  Description of Artificial Sequence: Synthetic oligonucleotide
  Sense strand starting at position 3037 of SEQ ID NO: 917222
cagaucuguguuugacaga

SEQ ID NO: 1218447 - RNA, 19 nt, Artificial Sequence
  Description of Artificial Sequence: Synthetic oligonucleotide
  Antisense strand to SEQ ID NO: 1218446
ucugucaaacacagaucug

SEQ ID NO: 1218448 - RNA, 19 nt, Artificial Sequence
  Description of Artificial Sequence: Synthetic oligonucleotide
  Sense strand starting at position 3065 of SEQ ID NO: 917222
auguaaggaaucuguuaug

SEQ ID NO: 1218449 - RNA, 19 nt, Artificial Sequence
  Description of Artificial Sequence: Synthetic oligonucleotide
  Antisense strand to SEQ ID NO: 1218448
cauaacagauuccuuacau

SEQ ID NO: 1218450 - RNA, 19 nt, Artificial Sequence
  Description of Artificial Sequence: Synthetic oligonucleotide
  Sense strand starting at position 3120 of SEQ ID NO: 917222
ggguuagguuauccaagga

SEQ ID NO: 1218451 - RNA, 19 nt, Artificial Sequence
  Description of Artificial Sequence: Synthetic oligonucleotide
  Antisense strand to SEQ ID NO: 1218450
uccuuggauaaccuaaccc

SEQ ID NO: 1218452 - RNA, 19 nt, Artificial Sequence
  Description of Artificial Sequence: Synthetic oligonucleotide
  Sense strand starting at position 3150 of SEQ ID NO: 917222
acuaaacugugauugcaca

SEQ ID NO: 1218453 - RNA, 19 nt, Artificial Sequence
  Description of Artificial Sequence: Synthetic oligonucleotide
  Antisense strand to SEQ ID NO: 1218452
ugugcaaucacaguuuagu

SEQ ID NO: 1218454 - RNA, 19 nt, Artificial Sequence
  Description of Artificial Sequence: Synthetic oligonucleotide
  Sense strand starting at position 3645 of SEQ ID NO: 917222
acagucaauguuuaccuaa

SEQ ID NO: 1218455 - RNA, 19 nt, Artificial Sequence
  Description of Artificial Sequence: Synthetic oligonucleotide
  Antisense strand to SEQ ID NO: 1218454
uuagguaaacauugacugu

SEQ ID NO: 1218456 - RNA, 19 nt, Artificial Sequence
  Description of Artificial Sequence: Synthetic oligonucleotide
  Sense strand starting at position 3647 of SEQ ID NO: 917222
agucaauguuuaccuaaca

SEQ ID NO: 1218457 - RNA, 19 nt, Artificial Sequence
  Description of Artificial Sequence: Synthetic oligonucleotide
  Antisense strand to SEQ ID NO: 1218456
uguuagguaaacauugacu

SEQ ID NO: 1218458 - RNA, 19 nt, Artificial Sequence
  Description of Artificial Sequence: Synthetic oligonucleotide
  Sense strand starting at position 3780 of SEQ ID NO: 917222
gggaguaaugcauauccua

SEQ ID NO: 1218459 - RNA, 19 nt, Artificial Sequence
  Description of Artificial Sequence: Synthetic oligonucleotide
  Antisense strand to SEQ ID NO: 1218458
uaggauaugcauuacuccc

SEQ ID NO: 1218460 - RNA, 19 nt, Artificial Sequence
  Description of Artificial Sequence: Synthetic oligonucleotide
  Sense strand starting at position 3917 of SEQ ID NO: 917223
ugucaacuauuaguagaaa

SEQ ID NO: 1218461 - RNA, 19 nt, Artificial Sequence
  Description of Artificial Sequence: Synthetic oligonucleotide
  Antisense strand to SEQ ID NO: 1218460
uuucuacuaauaguugaca

SEQ ID NO: 1218462 - RNA, 19 nt, Artificial Sequence
  Description of Artificial Sequence: Synthetic oligonucleotide
  Sense strand starting at position 101 of SEQ ID NO: 917223
ugccuugcugcagaacgau

SEQ ID NO: 1218463 - RNA, 19 nt, Artificial Sequence
  Description of Artificial Sequence: Synthetic oligonucleotide
  Antisense strand to SEQ ID NO: 1218462
aucguucugcagcaaggca

SEQ ID NO: 1218464 - RNA, 19 nt, Artificial Sequence
  Description of Artificial Sequence: Synthetic oligonucleotide
  Sense strand starting at position 114 of SEQ ID NO: 917223
aacgaugcugcaggaauau

SEQ ID NO: 1218465 - RNA, 19 nt, Artificial Sequence
  Description of Artificial Sequence: Synthetic oligonucleotide
  Antisense strand to SEQ ID NO: 1218464
auauuccugcagcaucguu

SEQ ID NO: 1218466 - RNA, 19 nt, Artificial Sequence
  Description of Artificial Sequence: Synthetic oligonucleotide
  Sense strand starting at position 132 of SEQ ID NO: 917223
uaaagugagccaugugcua

SEQ ID NO: 1218467 - RNA, 19 nt, Artificial Sequence
  Description of Artificial Sequence: Synthetic oligonucleotide
  Antisense strand to SEQ ID NO: 1218466
uagcacauggcucacuuua

SEQ ID NO: 1218468 - RNA, 19 nt, Artificial Sequence
  Description of Artificial Sequence: Synthetic oligonucleotide
  Sense strand starting at position 210 of SEQ ID NO: 917223
ccgaaagacugagaauaaa

SEQ ID NO: 1218469 - RNA, 19 nt, Artificial Sequence
  Description of Artificial Sequence: Synthetic oligonucleotide
  Antisense strand to SEQ ID NO: 1218468
uuuauucucagucuuucgg

SEQ ID NO: 1218470 - RNA, 19 nt, Artificial Sequence
  Description of Artificial Sequence: Synthetic oligonucleotide
  Sense strand starting at position 233 of SEQ ID NO: 917223
cuacgagaacacuguggaa

SEQ ID NO: 1218471 - RNA, 19 nt, Artificial Sequence
  Description of Artificial Sequence: Synthetic oligonucleotide
  Antisense strand to SEQ ID NO: 1218470
uuccacaguguucucguag

SEQ ID NO: 1218472 - RNA, 19 nt, Artificial Sequence
  Description of Artificial Sequence: Synthetic oligonucleotide
  Sense strand starting at position 289 of SEQ ID NO: 917223
uccuaaagucuccggaaca

SEQ ID NO: 1218473 - RNA, 19 nt, Artificial Sequence
  Description of Artificial Sequence: Synthetic oligonucleotide
  Antisense strand to SEQ ID NO: 1218472
uguuccggagacuuuagga

SEQ ID NO: 1218474 - RNA, 19 nt, Artificial Sequence
  Description of Artificial Sequence: Synthetic oligonucleotide
  Sense strand starting at position 325 of SEQ ID NO: 917223
ggcaacucucccuaaagcu

SEQ ID NO: 1218475 - RNA, 19 nt, Artificial Sequence
  Description of Artificial Sequence: Synthetic oligonucleotide
  Antisense strand to SEQ ID NO: 1218474
agcuuuagggagaguugcc

SEQ ID NO: 1218476 - RNA, 19 nt, Artificial Sequence
  Description of Artificial Sequence: Synthetic oligonucleotide
  Sense strand starting at position 348 of SEQ ID NO: 917223
ggaccagaaagauguuucu

SEQ ID NO: 1218477 - RNA, 19 nt, Artificial Sequence
  Description of Artificial Sequence: Synthetic oligonucleotide
  Antisense strand to SEQ ID NO: 1218476
agaaacaucuuucuggucc

SEQ ID NO: 1218478 - RNA, 19 nt, Artificial Sequence
  Description of Artificial Sequence: Synthetic oligonucleotide
  Sense strand starting at position 410 of SEQ ID NO: 917223
gcuggaggauguucugaaa

SEQ ID NO: 1218479 - RNA, 19 nt, Artificial Sequence
  Description of Artificial Sequence: Synthetic oligonucleotide
  Antisense strand to SEQ ID NO: 1218478
uuucagaacauccuccagc

SEQ ID NO: 1218480 - RNA, 19 nt, Artificial Sequence
  Description of Artificial Sequence: Synthetic oligonucleotide
  Sense strand starting at position 413 of SEQ ID NO: 917223
ggaggauguucugaaaugg

SEQ ID NO: 1218481 - RNA, 19 nt, Artificial Sequence
  Description of Artificial Sequence: Synthetic oligonucleotide
  Antisense strand to SEQ ID NO: 1218480
ccauuucagaacauccucc

SEQ ID NO: 1218482 - RNA, 19 nt, Artificial Sequence
  Description of Artificial Sequence: Synthetic oligonucleotide
  Sense strand starting at position 485 of SEQ ID NO: 917223
aggguuuggcucugaagau

SEQ ID NO: 1218483 - RNA, 19 nt, Artificial Sequence
  Description of Artificial Sequence: Synthetic oligonucleotide
  Antisense strand to SEQ ID NO: 1218482
aucuucagagccaaacccu

SEQ ID NO: 1218484 - RNA, 19 nt, Artificial Sequence
  Description of Artificial Sequence: Synthetic oligonucleotide
  Sense strand starting at position 498 of SEQ ID NO: 917223
gaagauguugccuacugga

SEQ ID NO: 1218485 - RNA, 19 nt, Artificial Sequence
  Description of Artificial Sequence: Synthetic oligonucleotide
  Antisense strand to SEQ ID NO: 1218484
uccaguaggcaacaucuuc

SEQ ID NO: 1218486 - RNA, 19 nt, Artificial Sequence
  Description of Artificial Sequence: Synthetic oligonucleotide
  Sense strand starting at position 560 of SEQ ID NO: 917223
ggcggucaaaccugguaaa

SEQ ID NO: 1218487 - RNA, 19 nt, Artificial Sequence
  Description of Artificial Sequence: Synthetic oligonucleotide
  Antisense strand to SEQ ID NO: 1218486
uuuaccagguuugaccgcc

SEQ ID NO: 1218488 - RNA, 19 nt, Artificial Sequence
  Description of Artificial Sequence: Synthetic oligonucleotide
  Sense strand starting at position 670 of SEQ ID NO: 917223
cugcuaaacuguuccagau

SEQ ID NO: 1218489 - RNA, 19 nt, Artificial Sequence
  Description of Artificial Sequence: Synthetic oligonucleotide
  Antisense strand to SEQ ID NO: 1218488
aucuggaacaguuuagcag

SEQ ID NO: 1218490 - RNA, 19 nt, Artificial Sequence
  Description of Artificial Sequence: Synthetic oligonucleotide
  Sense strand starting at position 961 of SEQ ID NO: 917223
aucagaaguuguuuggaaa

SEQ ID NO: 1218491 - RNA, 19 nt, Artificial Sequence
  Description of Artificial Sequence: Synthetic oligonucleotide
  Antisense strand to SEQ ID NO: 1218490
uuuccaaacaacuucugau

SEQ ID NO: 1218492 - RNA, 19 nt, Artificial Sequence
  Description of Artificial Sequence: Synthetic oligonucleotide
  Sense strand starting at position 962 of SEQ ID NO: 917223
ucagaaguuguuuggaaau

SEQ ID NO: 1218493 - RNA, 19 nt, Artificial Sequence
  Description of Artificial Sequence: Synthetic oligonucleotide
  Antisense strand to SEQ ID NO: 1218492
auuuccaaacaacuucuga

SEQ ID NO: 1218494 - RNA, 19 nt, Artificial Sequence
  Description of Artificial Sequence: Synthetic oligonucleotide
  Sense strand starting at position 974 of SEQ ID NO: 917223
uggaaauacucgccgcaaa

SEQ ID NO: 1218495 - RNA, 19 nt, Artificial Sequence
  Description of Artificial Sequence: Synthetic oligonucleotide
  Antisense strand to SEQ ID NO: 1218494
uuugcggcgaguauuucca

SEQ ID NO: 1218496 - RNA, 19 nt, Artificial Sequence
  Description of Artificial Sequence: Synthetic oligonucleotide
  Sense strand starting at position 975 of SEQ ID NO: 917223
ggaaauacucgccgcaaag

SEQ ID NO: 1218497 - RNA, 19 nt, Artificial Sequence
  Description of Artificial Sequence: Synthetic oligonucleotide
  Antisense strand to SEQ ID NO: 1218496
cuuugcggcgaguauuucc

SEQ ID NO: 1218498 - RNA, 19 nt, Artificial Sequence
  Description of Artificial Sequence: Synthetic oligonucleotide
  Sense strand starting at position 2600 of SEQ ID NO: 917223
gagcgaaucccaugacagu

SEQ ID NO: 1218499 - RNA, 19 nt, Artificial Sequence
  Description of Artificial Sequence: Synthetic oligonucleotide
  Antisense strand to SEQ ID NO: 1218498
acugucaugggauucgcuc

SEQ ID NO: 1218500 - RNA, 19 nt, Artificial Sequence
  Description of Artificial Sequence: Synthetic oligonucleotide
  Sense strand starting at position 2601 of SEQ ID NO: 917223
agcgaaucccaugacaguu

SEQ ID NO: 1218501 - RNA, 19 nt, Artificial Sequence
  Description of Artificial Sequence: Synthetic oligonucleotide
  Antisense strand to SEQ ID NO: 1218500
aacugucaugggauucgcu

SEQ ID NO: 1218502 - RNA, 19 nt, Artificial Sequence
  Description of Artificial Sequence: Synthetic oligonucleotide
  Sense strand starting at position 2962 of SEQ ID NO: 917223
ggaguucccugaccucaga

SEQ ID NO: 1218503 - RNA, 19 nt, Artificial Sequence
  Description of Artificial Sequence: Synthetic oligonucleotide
  Antisense strand to SEQ ID NO: 1218502
ucugaggucagggaacucc

SEQ ID NO: 1218504 - RNA, 19 nt, Artificial Sequence
  Description of Artificial Sequence: Synthetic oligonucleotide
  Sense strand starting at position 3145 of SEQ ID NO: 917223
auguaauacuugcagauuu

SEQ ID NO: 1218505 - RNA, 19 nt, Artificial Sequence
  Description of Artificial Sequence: Synthetic oligonucleotide
  Antisense strand to SEQ ID NO: 1218504
aaaucugcaaguauuacau

SEQ ID NO: 1218506 - RNA, 19 nt, Artificial Sequence
  Description of Artificial Sequence: Synthetic oligonucleotide
  Sense strand starting at position 3155 of SEQ ID NO: 917223
ugcagauuugguggucugu

SEQ ID NO: 1218507 - RNA, 19 nt, Artificial Sequence
  Description of Artificial Sequence: Synthetic oligonucleotide
  Antisense strand to SEQ ID NO: 1218506
acagaccaccaaaucugca

SEQ ID NO: 1218508 - RNA, 19 nt, Artificial Sequence
  Description of Artificial Sequence: Synthetic oligonucleotide
  Sense strand starting at position 3164 of SEQ ID NO: 917223
gguggucugugguugaaga

SEQ ID NO: 1218509 - RNA, 19 nt, Artificial Sequence
  Description of Artificial Sequence: Synthetic oligonucleotide
  Antisense strand to SEQ ID NO: 1218508
ucuucaaccacagaccacc

SEQ ID NO: 1218510 - RNA, 19 nt, Artificial Sequence
  Description of Artificial Sequence: Synthetic oligonucleotide
  Sense strand starting at position 3166 of SEQ ID NO: 917223
uggucugugguugaagaga

SEQ ID NO: 1218511 - RNA, 19 nt, Artificial Sequence
  Description of Artificial Sequence: Synthetic oligonucleotide
  Antisense strand to SEQ ID NO: 1218510
ucucuucaaccacagacca

SEQ ID NO: 1218512 - RNA, 19 nt, Artificial Sequence
  Description of Artificial Sequence: Synthetic oligonucleotide
  Sense strand starting at position 3183 of SEQ ID NO: 917223
gaagaaaugguggguuuga

SEQ ID NO: 1218513 - RNA, 19 nt, Artificial Sequence
  Description of Artificial Sequence: Synthetic oligonucleotide
  Antisense strand to SEQ ID NO: 1218512
ucaaacccaccauuucuuc

SEQ ID NO: 1218514 - RNA, 19 nt, Artificial Sequence
  Description of Artificial Sequence: Synthetic oligonucleotide
  Sense strand starting at position 3227 of SEQ ID NO: 917223
cugugugucacagaucaga

SEQ ID NO: 1218515 - RNA, 19 nt, Artificial Sequence
  Description of Artificial Sequence: Synthetic oligonucleotide
  Antisense strand to SEQ ID NO: 1218514
ucugaucugugacacacag

SEQ ID NO: 1218516 - RNA, 19 nt, Artificial Sequence
  Description of Artificial Sequence: Synthetic oligonucleotide
  Sense strand starting at position 3255 of SEQ ID NO: 917223
gcucgugauucucuaagug

SEQ ID NO: 1218517 - RNA, 19 nt, Artificial Sequence
  Description of Artificial Sequence: Synthetic oligonucleotide
  Antisense strand to SEQ ID NO: 1218516
cacuuagagaaucacgagc

SEQ ID NO: 1218518 - RNA, 19 nt, Artificial Sequence
  Description of Artificial Sequence: Synthetic oligonucleotide
  Sense strand starting at position 3260 of SEQ ID NO: 917223
ugauucucuaagugugguu

SEQ ID NO: 1218519 - RNA, 19 nt, Artificial Sequence
  Description of Artificial Sequence: Synthetic oligonucleotide
  Antisense strand to SEQ ID NO: 1218518
aaccacacuuagagaauca

SEQ ID NO: 1218520 - RNA, 19 nt, Artificial Sequence
  Description of Artificial Sequence: Synthetic oligonucleotide
  Sense strand starting at position 3518 of SEQ ID NO: 917223
ggaggaucacaguguuagg

SEQ ID NO: 1218521 - RNA, 19 nt, Artificial Sequence
  Description of Artificial Sequence: Synthetic oligonucleotide
  Antisense strand to SEQ ID NO: 1218520
ccuaacacugugauccucc

SEQ ID NO: 1218522 - RNA, 19 nt, Artificial Sequence
  Description of Artificial Sequence: Synthetic oligonucleotide
  Sense strand starting at position 3555 of SEQ ID NO: 917223
auggaaucaucugcgauua

SEQ ID NO: 1218523 - RNA, 19 nt, Artificial Sequence
  Description of Artificial Sequence: Synthetic oligonucleotide
  Antisense strand to SEQ ID NO: 1218522
uaaucgcagaugauuccau

SEQ ID NO: 1218524 - RNA, 19 nt, Artificial Sequence
  Description of Artificial Sequence: Synthetic oligonucleotide
  Sense strand starting at position 3556 of SEQ ID NO: 917223
uggaaucaucugcgauuaa

SEQ ID NO: 1218525 - RNA, 19 nt, Artificial Sequence
  Description of Artificial Sequence: Synthetic oligonucleotide
  Antisense strand to SEQ ID NO: 1218524
uuaaucgcagaugauucca

SEQ ID NO: 1218526 - RNA, 19 nt, Artificial Sequence
  Description of Artificial Sequence: Synthetic oligonucleotide
  Sense strand starting at position 3632 of SEQ ID NO: 917223
aguaaaguuccgcagguga

SEQ ID NO: 1218527 - RNA, 19 nt, Artificial Sequence
  Description of Artificial Sequence: Synthetic oligonucleotide
  Antisense strand to SEQ ID NO: 1218526
ucaccugcggaacuuuacu

SEQ ID NO: 1218528 - RNA, 19 nt, Artificial Sequence
  Description of Artificial Sequence: Synthetic oligonucleotide
  Sense strand starting at position 3634 of SEQ ID NO: 917223
uaaaguuccgcaggugauu

SEQ ID NO: 1218529 - RNA, 19 nt, Artificial Sequence
  Description of Artificial Sequence: Synthetic oligonucleotide
  Antisense strand to SEQ ID NO: 1218528
aaucaccugcggaacuuua

SEQ ID NO: 1218530 - RNA, 19 nt, Artificial Sequence
  Description of Artificial Sequence: Synthetic oligonucleotide
  Sense strand starting at position 3724 of SEQ ID NO: 917223
cagggaaucuuguuggaau

SEQ ID NO: 1218531 - RNA, 19 nt, Artificial Sequence
  Description of Artificial Sequence: Synthetic oligonucleotide
  Antisense strand to SEQ ID NO: 1218530
auuccaacaagauucccug

SEQ ID NO: 1218532 - RNA, 19 nt, Artificial Sequence
  Description of Artificial Sequence: Synthetic oligonucleotide
  Sense strand starting at position 3762 of SEQ ID NO: 917223
gucugagacuguuucuaac

SEQ ID NO: 1218533 - RNA, 19 nt, Artificial Sequence
  Description of Artificial Sequence: Synthetic oligonucleotide
  Antisense strand to SEQ ID NO: 1218532
guuagaaacagucucagac

SEQ ID NO: 1218534 - RNA, 19 nt, Artificial Sequence
  Description of Artificial Sequence: Synthetic oligonucleotide
  Sense strand starting at position 3764 of SEQ ID NO: 917223
cugagacuguuucuaacaa

SEQ ID NO: 1218535 - RNA, 19 nt, Artificial Sequence
  Description of Artificial Sequence: Synthetic oligonucleotide
  Antisense strand to SEQ ID NO: 1218534
uuguuagaaacagucucag

SEQ ID NO: 1218536 - RNA, 19 nt, Artificial Sequence
  Description of Artificial Sequence: Synthetic oligonucleotide
  Sense strand starting at position 3765 of SEQ ID NO: 917223
ugagacuguuucuaacaag

SEQ ID NO: 1218537 - RNA, 19 nt, Artificial Sequence
  Description of Artificial Sequence: Synthetic oligonucleotide
  Antisense strand to SEQ ID NO: 1218536
cuuguuagaaacagucuca

SEQ ID NO: 1218538 - RNA, 19 nt, Artificial Sequence
  Description of Artificial Sequence: Synthetic oligonucleotide
  Sense strand starting at position 3824 of SEQ ID NO: 917223
agcaaagugcuaugucaua

SEQ ID NO: 1218539 - RNA, 19 nt, Artificial Sequence
  Description of Artificial Sequence: Synthetic oligonucleotide
  Antisense strand to SEQ ID NO: 1218538
uaugacauagcacuuugcu

SEQ ID NO: 1218540 - RNA, 19 nt, Artificial Sequence
  Description of Artificial Sequence: Synthetic oligonucleotide
  Sense strand starting at position 3935 of SEQ ID NO: 917224
aggucaggaacuuguaaac

SEQ ID NO: 1218541 - RNA, 19 nt, Artificial Sequence
  Description of Artificial Sequence: Synthetic oligonucleotide
  Antisense strand to SEQ ID NO: 1218540
guuuacaaguuccugaccu

SEQ ID NO: 1218542 - RNA, 19 nt, Artificial Sequence
  Description of Artificial Sequence: Synthetic oligonucleotide
  Sense strand starting at position 24 of SEQ ID NO: 917224
ggcggucaaaccugguaaa

SEQ ID NO: 1218543 - RNA, 19 nt, Artificial Sequence
  Description of Artificial Sequence: Synthetic oligonucleotide
  Antisense strand to SEQ ID NO: 1218542
uuuaccagguuugaccgcc

SEQ ID NO: 1218544 - RNA, 19 nt, Artificial Sequence
  Description of Artificial Sequence: Synthetic oligonucleotide
  Sense strand starting at position 27 of SEQ ID NO: 917224
ggucaaaccugguaaacug

SEQ ID NO: 1218545 - RNA, 19 nt, Artificial Sequence
  Description of Artificial Sequence: Synthetic oligonucleotide
  Antisense strand to SEQ ID NO: 1218544
caguuuaccagguuugacc

SEQ ID NO: 1218546 - RNA, 19 nt, Artificial Sequence
  Description of Artificial Sequence: Synthetic oligonucleotide
  Sense strand starting at position 134 of SEQ ID NO: 917224
cugcuaaacuguuccagau

SEQ ID NO: 1218547 - RNA, 19 nt, Artificial Sequence
  Description of Artificial Sequence: Synthetic oligonucleotide
  Antisense strand to SEQ ID NO: 1218546
aucuggaacaguuuagcag

SEQ ID NO: 1218548 - RNA, 19 nt, Artificial Sequence
  Description of Artificial Sequence: Synthetic oligonucleotide
  Sense strand starting at position 425 of SEQ ID NO: 917224
aucagaaguuguuuggaaa

SEQ ID NO: 1218549 - RNA, 19 nt, Artificial Sequence
  Description of Artificial Sequence: Synthetic oligonucleotide
  Antisense strand to SEQ ID NO: 1218548
uuuccaaacaacuucugau

SEQ ID NO: 1218550 - RNA, 19 nt, Artificial Sequence
  Description of Artificial Sequence: Synthetic oligonucleotide
  Sense strand starting at position 426 of SEQ ID NO: 917224
ucagaaguuguuuggaaau

SEQ ID NO: 1218551 - RNA, 19 nt, Artificial Sequence
  Description of Artificial Sequence: Synthetic oligonucleotide
  Antisense strand to SEQ ID NO: 1218550
auuuccaaacaacuucuga

SEQ ID NO: 1218552 - RNA, 19 nt, Artificial Sequence
  Description of Artificial Sequence: Synthetic oligonucleotide
  Sense strand starting at position 428 of SEQ ID NO: 917224
agaaguuguuuggaaauac

SEQ ID NO: 1218553 - RNA, 19 nt, Artificial Sequence
  Description of Artificial Sequence: Synthetic oligonucleotide
  Antisense strand to SEQ ID NO: 1218552
guauuuccaaacaacuucu

SEQ ID NO: 1218554 - RNA, 19 nt, Artificial Sequence
  Description of Artificial Sequence: Synthetic oligonucleotide
  Sense strand starting at position 438 of SEQ ID NO: 917224
uggaaauacucgccgcaaa

SEQ ID NO: 1218555 - RNA, 19 nt, Artificial Sequence
  Description of Artificial Sequence: Synthetic oligonucleotide
  Antisense strand to SEQ ID NO: 1218554
uuugcggcgaguauuucca

SEQ ID NO: 1218556 - RNA, 19 nt, Artificial Sequence
  Description of Artificial Sequence: Synthetic oligonucleotide
  Sense strand starting at position 439 of SEQ ID NO: 917224
ggaaauacucgccgcaaag

SEQ ID NO: 1218557 - RNA, 19 nt, Artificial Sequence
  Description of Artificial Sequence: Synthetic oligonucleotide
  Antisense strand to SEQ ID NO: 1218556
cuuugcggcgaguauuucc

SEQ ID NO: 1218558 - RNA, 19 nt, Artificial Sequence
  Description of Artificial Sequence: Synthetic oligonucleotide
  Sense strand starting at position 456 of SEQ ID NO: 917224
agcaaucuguccuuugcuu

SEQ ID NO: 1218559 - RNA, 19 nt, Artificial Sequence
  Description of Artificial Sequence: Synthetic oligonucleotide
  Antisense strand to SEQ ID NO: 1218558
aagcaaaggacagauugcu

SEQ ID NO: 1218560 - RNA, 19 nt, Artificial Sequence
  Description of Artificial Sequence: Synthetic oligonucleotide
  Sense strand starting at position 2064 of SEQ ID NO: 917224
gagcgaaucccaugacagu

SEQ ID NO: 1218561 - RNA, 19 nt, Artificial Sequence
  Description of Artificial Sequence: Synthetic oligonucleotide
  Antisense strand to SEQ ID NO: 1218560
acugucaugggauucgcuc

SEQ ID NO: 1218562 - RNA, 19 nt, Artificial Sequence
  Description of Artificial Sequence: Synthetic oligonucleotide
  Sense strand starting at position 2065 of SEQ ID NO: 917224
agcgaaucccaugacaguu

SEQ ID NO: 1218563 - RNA, 19 nt, Artificial Sequence
  Description of Artificial Sequence: Synthetic oligonucleotide
  Antisense strand to SEQ ID NO: 1218562
aacugucaugggauucgcu

SEQ ID NO: 1218564 - RNA, 19 nt, Artificial Sequence
  Description of Artificial Sequence: Synthetic oligonucleotide
  Sense strand starting at position 2426 of SEQ ID NO: 917224
ggaguucccugaccucaga

SEQ ID NO: 1218565 - RNA, 19 nt, Artificial Sequence
  Description of Artificial Sequence: Synthetic oligonucleotide
  Antisense strand to SEQ ID NO: 1218564
ucugaggucagggaacucc

SEQ ID NO: 1218566 - RNA, 19 nt, Artificial Sequence
  Description of Artificial Sequence: Synthetic oligonucleotide
  Sense strand starting at position 2609 of SEQ ID NO: 917224
auguaauacuugcagauuu

SEQ ID NO: 1218567 - RNA, 19 nt, Artificial Sequence
  Description of Artificial Sequence: Synthetic oligonucleotide
  Antisense strand to SEQ ID NO: 1218566
aaaucugcaaguauuacau

SEQ ID NO: 1218568 - RNA, 19 nt, Artificial Sequence
  Description of Artificial Sequence: Synthetic oligonucleotide
  Sense strand starting at position 2619 of SEQ ID NO: 917224
ugcagauuugguggucugu

SEQ ID NO: 1218569 - RNA, 19 nt, Artificial Sequence
  Description of Artificial Sequence: Synthetic oligonucleotide
  Antisense strand to SEQ ID NO: 1218568
acagaccaccaaaucugca

SEQ ID NO: 1218570 - RNA, 19 nt, Artificial Sequence
  Description of Artificial Sequence: Synthetic oligonucleotide
  Sense strand starting at position 2628 of SEQ ID NO: 917224
gguggucugugguugaaga

SEQ ID NO: 1218571 - RNA, 19 nt, Artificial Sequence
  Description of Artificial Sequence: Synthetic oligonucleotide
  Antisense strand to SEQ ID NO: 1218570
ucuucaaccacagaccacc

SEQ ID NO: 1218572 - RNA, 19 nt, Artificial Sequence
  Description of Artificial Sequence: Synthetic oligonucleotide
  Sense strand starting at position 2630 of SEQ ID NO: 917224
uggucugugguugaagaga

SEQ ID NO: 1218573 - RNA, 19 nt, Artificial Sequence
  Description of Artificial Sequence: Synthetic oligonucleotide
  Antisense strand to SEQ ID NO: 1218572
ucucuucaaccacagacca

SEQ ID NO: 1218574 - RNA, 19 nt, Artificial Sequence
  Description of Artificial Sequence: Synthetic oligonucleotide
  Sense strand starting at position 2647 of SEQ ID NO: 917224
gaagaaaugguggguuuga

SEQ ID NO: 1218575 - RNA, 19 nt, Artificial Sequence
  Description of Artificial Sequence: Synthetic oligonucleotide
  Antisense strand to SEQ ID NO: 1218574
ucaaacccaccauuucuuc

SEQ ID NO: 1218576 - RNA, 19 nt, Artificial Sequence
  Description of Artificial Sequence: Synthetic oligonucleotide
  Sense strand starting at position 2691 of SEQ ID NO: 917224
cugugugucacagaucaga

SEQ ID NO: 1218577 - RNA, 19 nt, Artificial Sequence
  Description of Artificial Sequence: Synthetic oligonucleotide
  Antisense strand to SEQ ID NO: 1218576
ucugaucugugacacacag

SEQ ID NO: 1218578 - RNA, 19 nt, Artificial Sequence
  Description of Artificial Sequence: Synthetic oligonucleotide
  Sense strand starting at position 2719 of SEQ ID NO: 917224
gcucgugauucucuaagug

SEQ ID NO: 1218579 - RNA, 19 nt, Artificial Sequence
  Description of Artificial Sequence: Synthetic oligonucleotide
  Antisense strand to SEQ ID NO: 1218578
cacuuagagaaucacgagc

SEQ ID NO: 1218580 - RNA, 19 nt, Artificial Sequence
  Description of Artificial Sequence: Synthetic oligonucleotide
  Sense strand starting at position 2724 of SEQ ID NO: 917224
ugauucucuaagugugguu

SEQ ID NO: 1218581 - RNA, 19 nt, Artificial Sequence
  Description of Artificial Sequence: Synthetic oligonucleotide
  Antisense strand to SEQ ID NO: 1218580
aaccacacuuagagaauca

SEQ ID NO: 1218582 - RNA, 19 nt, Artificial Sequence
  Description of Artificial Sequence: Synthetic oligonucleotide
  Sense strand starting at position 2982 of SEQ ID NO: 917224
ggaggaucacaguguuagg

SEQ ID NO: 1218583 - RNA, 19 nt, Artificial Sequence
  Description of Artificial Sequence: Synthetic oligonucleotide
  Antisense strand to SEQ ID NO: 1218582
ccuaacacugugauccucc

SEQ ID NO: 1218584 - RNA, 19 nt, Artificial Sequence
  Description of Artificial Sequence: Synthetic oligonucleotide
  Sense strand starting at position 2985 of SEQ ID NO: 917224
ggaucacaguguuaggaca

SEQ ID NO: 1218585 - RNA, 19 nt, Artificial Sequence
  Description of Artificial Sequence: Synthetic oligonucleotide
  Antisense strand to SEQ ID NO: 1218584
uguccuaacacugugaucc

SEQ ID NO: 1218586 - RNA, 19 nt, Artificial Sequence
  Description of Artificial Sequence: Synthetic oligonucleotide
  Sense strand starting at position 3019 of SEQ ID NO: 917224
auggaaucaucugcgauua

SEQ ID NO: 1218587 - RNA, 19 nt, Artificial Sequence
  Description of Artificial Sequence: Synthetic oligonucleotide
  Antisense strand to SEQ ID NO: 1218586
uaaucgcagaugauuccau

SEQ ID NO: 1218588 - RNA, 19 nt, Artificial Sequence
  Description of Artificial Sequence: Synthetic oligonucleotide
  Sense strand starting at position 3020 of SEQ ID NO: 917224
uggaaucaucugcgauuaa

SEQ ID NO: 1218589 - RNA, 19 nt, Artificial Sequence
  Description of Artificial Sequence: Synthetic oligonucleotide
  Antisense strand to SEQ ID NO: 1218588
uuaaucgcagaugauucca

SEQ ID NO: 1218590 - RNA, 19 nt, Artificial Sequence
  Description of Artificial Sequence: Synthetic oligonucleotide
  Sense strand starting at position 3096 of SEQ ID NO: 917224
aguaaaguuccgcagguga

SEQ ID NO: 1218591 - RNA, 19 nt, Artificial Sequence
  Description of Artificial Sequence: Synthetic oligonucleotide
  Antisense strand to SEQ ID NO: 1218590
ucaccugcggaacuuuacu

SEQ ID NO: 1218592 - RNA, 19 nt, Artificial Sequence
  Description of Artificial Sequence: Synthetic oligonucleotide
  Sense strand starting at position 3098 of SEQ ID NO: 917224
uaaaguuccgcaggugauu

SEQ ID NO: 1218593 - RNA, 19 nt, Artificial Sequence
  Description of Artificial Sequence: Synthetic oligonucleotide
  Antisense strand to SEQ ID NO: 1218592
aaucaccugcggaacuuua

SEQ ID NO: 1218594 - RNA, 19 nt, Artificial Sequence
  Description of Artificial Sequence: Synthetic oligonucleotide
  Sense strand starting at position 3188 of SEQ ID NO: 917224
cagggaaucuuguuggaau

SEQ ID NO: 1218595 - RNA, 19 nt, Artificial Sequence
  Description of Artificial Sequence: Synthetic oligonucleotide
  Antisense strand to SEQ ID NO: 1218594
auuccaacaagauucccug

SEQ ID NO: 1218596 - RNA, 19 nt, Artificial Sequence
  Description of Artificial Sequence: Synthetic oligonucleotide
  Sense strand starting at position 3226 of SEQ ID NO: 917224
gucugagacuguuucuaac

SEQ ID NO: 1218597 - RNA, 19 nt, Artificial Sequence
  Description of Artificial Sequence: Synthetic oligonucleotide
  Antisense strand to SEQ ID NO: 1218596
guuagaaacagucucagac

SEQ ID NO: 1218598 - RNA, 19 nt, Artificial Sequence
  Description of Artificial Sequence: Synthetic oligonucleotide
  Sense strand starting at position 3228 of SEQ ID NO: 917224
cugagacuguuucuaacaa

SEQ ID NO: 1218599 - RNA, 19 nt, Artificial Sequence
  Description of Artificial Sequence: Synthetic oligonucleotide
  Antisense strand to SEQ ID NO: 1218598
uuguuagaaacagucucag

SEQ ID NO: 1218600 - RNA, 19 nt, Artificial Sequence
  Description of Artificial Sequence: Synthetic oligonucleotide
  Sense strand starting at position 3229 of SEQ ID NO: 917224
ugagacuguuucuaacaag

SEQ ID NO: 1218601 - RNA, 19 nt, Artificial Sequence
  Description of Artificial Sequence: Synthetic oligonucleotide
  Antisense strand to SEQ ID NO: 1218600
cuuguuagaaacagucuca

SEQ ID NO: 1218602 - RNA, 19 nt, Artificial Sequence
  Description of Artificial Sequence: Synthetic oligonucleotide
  Sense strand starting at position 3255 of SEQ ID NO: 917224
guguuacuugcugguccaa

SEQ ID NO: 1218603 - RNA, 19 nt, Artificial Sequence
  Description of Artificial Sequence: Synthetic oligonucleotide
  Antisense strand to SEQ ID NO: 1218602
uuggaccagcaaguaacac

SEQ ID NO: 1218604 - RNA, 19 nt, Artificial Sequence
  Description of Artificial Sequence: Synthetic oligonucleotide
  Sense strand starting at position 3288 of SEQ ID NO: 917224
agcaaagugcuaugucaua

SEQ ID NO: 1218605 - RNA, 19 nt, Artificial Sequence
  Description of Artificial Sequence: Synthetic oligonucleotide
  Antisense strand to SEQ ID NO: 1218604
uaugacauagcacuuugcu

SEQ ID NO: 1218606 - RNA, 19 nt, Artificial Sequence
  Description of Artificial Sequence: Synthetic oligonucleotide
  Sense strand starting at position 3399 of SEQ ID NO: 917224
aggucaggaacuuguaaac

SEQ ID NO: 1218607 - RNA, 19 nt, Artificial Sequence
  Description of Artificial Sequence: Synthetic oligonucleotide
  Antisense strand to SEQ ID NO: 1218606
guuuacaaguuccugaccu

SEQ ID NO: 1218608 - RNA, 19 nt, Artificial Sequence
  Description of Artificial Sequence: Synthetic oligonucleotide
  Sense strand starting at position 3690 of SEQ ID NO: 917224
agucacucucuuugcaaga

SEQ ID NO: 1218609 - RNA, 19 nt, Artificial Sequence
  Description of Artificial Sequence: Synthetic oligonucleotide
  Antisense strand to SEQ ID NO: 1218608
ucuugcaaagagagugacu

SEQ ID NO: 1218610 - RNA, 19 nt, Artificial Sequence
  Description of Artificial Sequence: Synthetic oligonucleotide
  Sense strand starting at position 3743 of SEQ ID NO: 917224
uagucuuuguaugucuaga

SEQ ID NO: 1218611 - RNA, 19 nt, Artificial Sequence
  Description of Artificial Sequence: Synthetic oligonucleotide
  Antisense strand to SEQ ID NO: 1218610
ucuagacauacaaagacua

SEQ ID NO: 1218612 - RNA, 19 nt, Artificial Sequence
  Description of Artificial Sequence: Synthetic oligonucleotide
  Sense strand starting at position 3745 of SEQ ID NO: 917224
gucuuuguaugucuagaau

SEQ ID NO: 1218613 - RNA, 19 nt, Artificial Sequence
  Description of Artificial Sequence: Synthetic oligonucleotide
  Antisense strand to SEQ ID NO: 1218612
auucuagacauacaaagac

SEQ ID NO: 1218614 - RNA, 19 nt, Artificial Sequence
  Description of Artificial Sequence: Synthetic oligonucleotide
  Sense strand starting at position 3748 of SEQ ID NO: 917224
uuuguaugucuagaauuag

SEQ ID NO: 1218615 - RNA, 19 nt, Artificial Sequence
  Description of Artificial Sequence: Synthetic oligonucleotide
  Antisense strand to SEQ ID NO: 1218614
cuaauucuagacauacaaa

SEQ ID NO: 1218616 - RNA, 19 nt, Artificial Sequence
  Description of Artificial Sequence: Synthetic oligonucleotide
  Sense strand starting at position 3764 of SEQ ID NO: 917224
uagauuuaguugugaucuu

SEQ ID NO: 1218617 - RNA, 19 nt, Artificial Sequence
  Description of Artificial Sequence: Synthetic oligonucleotide
  Antisense strand to SEQ ID NO: 1218616
aagaucacaacuaaaucua

SEQ ID NO: 1218618 - RNA, 19 nt, Artificial Sequence
  Description of Artificial Sequence: Synthetic oligonucleotide
  Sense strand starting at position 3765 of SEQ ID NO: 917224
agauuuaguugugaucuua

SEQ ID NO: 1218619 - RNA, 19 nt, Artificial Sequence
  Description of Artificial Sequence: Synthetic oligonucleotide
  Antisense strand to SEQ ID NO: 1218618
uaagaucacaacuaaaucu

SEQ ID NO: 1218620 - RNA, 19 nt, Artificial Sequence
  Description of Artificial Sequence: Synthetic oligonucleotide
  Sense strand starting at position 3872 of SEQ ID NO: 917223
uaucaacauuugugaaggu

SEQ ID NO: 1218621 - RNA, 19 nt, Artificial Sequence
  Description of Artificial Sequence: Synthetic oligonucleotide
  Antisense strand to SEQ ID NO: 1218620
accuucacaaauguugaua

SEQ ID NO: 1218622 - RNA, 19 nt, Artificial Sequence
  Description of Artificial Sequence: Synthetic oligonucleotide
  Sense strand starting at position 3935 of SEQ ID NO: 917225
aggucaggaacuuguaaac

SEQ ID NO: 1218623 - RNA, 19 nt, Artificial Sequence
  Description of Artificial Sequence: Synthetic oligonucleotide
  Antisense strand to SEQ ID NO: 1218622
guuuacaaguuccugaccu

SEQ ID NO: 1218624 - RNA, 19 nt, Artificial Sequence
  Description of Artificial Sequence: Synthetic oligonucleotide
  Sense strand starting at position 65 of SEQ ID NO: 917225
gcaguuuaauuuccugcaa

SEQ ID NO: 1218625 - RNA, 19 nt, Artificial Sequence
  Description of Artificial Sequence: Synthetic oligonucleotide
  Antisense strand to SEQ ID NO: 1218624
uugcaggaaauuaaacugc

SEQ ID NO: 1218626 - RNA, 19 nt, Artificial Sequence
  Description of Artificial Sequence: Synthetic oligonucleotide
  Sense strand starting at position 214 of SEQ ID NO: 917225
gugaacuaacucuauguuc

SEQ ID NO: 1218627 - RNA, 19 nt, Artificial Sequence
  Description of Artificial Sequence: Synthetic oligonucleotide
  Antisense strand to SEQ ID NO: 1218626
gaacauagaguuaguucac

SEQ ID NO: 1218628 - RNA, 19 nt, Artificial Sequence
  Description of Artificial Sequence: Synthetic oligonucleotide
  Sense strand starting at position 621 of SEQ ID NO: 917225
gcucauuuguaguuaacuc

SEQ ID NO: 1218629 - RNA, 19 nt, Artificial Sequence
  Description of Artificial Sequence: Synthetic oligonucleotide
  Antisense strand to SEQ ID NO: 1218628
gaguuaacuacaaaugagc

SEQ ID NO: 1218630 - RNA, 19 nt, Artificial Sequence
  Description of Artificial Sequence: Synthetic oligonucleotide
  Sense strand starting at position 700 of SEQ ID NO: 917225
auaugcauucuuuggcuga

SEQ ID NO: 1218631 - RNA, 19 nt, Artificial Sequence
  Description of Artificial Sequence: Synthetic oligonucleotide
  Antisense strand to SEQ ID NO: 1218630
ucagccaaagaaugcauau

SEQ ID NO: 1218632 - RNA, 19 nt, Artificial Sequence
  Description of Artificial Sequence: Synthetic oligonucleotide
  Sense strand starting at position 704 of SEQ ID NO: 917225
gcauucuuuggcugaacua

SEQ ID NO: 1218633 - RNA, 19 nt, Artificial Sequence
  Description of Artificial Sequence: Synthetic oligonucleotide
  Antisense strand to SEQ ID NO: 1218632
uaguucagccaaagaaugc

SEQ ID NO: 1218634 - RNA, 19 nt, Artificial Sequence
  Description of Artificial Sequence: Synthetic oligonucleotide
  Sense strand starting at position 920 of SEQ ID NO: 917225
gggucacucaacuggauau

SEQ ID NO: 1218635 - RNA, 19 nt, Artificial Sequence
  Description of Artificial Sequence: Synthetic oligonucleotide
  Antisense strand to SEQ ID NO: 1218634
auauccaguugagugaccc

SEQ ID NO: 1218636 - RNA, 19 nt, Artificial Sequence
  Description of Artificial Sequence: Synthetic oligonucleotide
  Sense strand starting at position 932 of SEQ ID NO: 917225
uggauaucauuagcaacga

SEQ ID NO: 1218637 - RNA, 19 nt, Artificial Sequence
  Description of Artificial Sequence: Synthetic oligonucleotide
  Antisense strand to SEQ ID NO: 1218636
ucguugcuaaugauaucca

SEQ ID NO: 1218638 - RNA, 19 nt, Artificial Sequence
  Description of Artificial Sequence: Synthetic oligonucleotide
  Sense strand starting at position 972 of SEQ ID NO: 917225
caccucucagcuuggagau

SEQ ID NO: 1218639 - RNA, 19 nt, Artificial Sequence
  Description of Artificial Sequence: Synthetic oligonucleotide
  Antisense strand to SEQ ID NO: 1218638
aucuccaagcugagaggug

SEQ ID NO: 1218640 - RNA, 19 nt, Artificial Sequence
  Description of Artificial Sequence: Synthetic oligonucleotide
  Sense strand starting at position 973 of SEQ ID NO: 917225
accucucagcuuggagaua

SEQ ID NO: 1218641 - RNA, 19 nt, Artificial Sequence
  Description of Artificial Sequence: Synthetic oligonucleotide
  Antisense strand to SEQ ID NO: 1218640
uaucuccaagcugagaggu

SEQ ID NO: 1218642 - RNA, 19 nt, Artificial Sequence
  Description of Artificial Sequence: Synthetic oligonucleotide
  Sense strand starting at position 2223 of SEQ ID NO: 917225
agagacuaucuguggcuga

SEQ ID NO: 1218643 - RNA, 19 nt, Artificial Sequence
  Description of Artificial Sequence: Synthetic oligonucleotide
  Antisense strand to SEQ ID NO: 1218642
ucagccacagauagucucu

SEQ ID NO: 1218644 - RNA, 19 nt, Artificial Sequence
  Description of Artificial Sequence: Synthetic oligonucleotide
  Sense strand starting at position 2226 of SEQ ID NO: 917225
gacuaucuguggcugaaac

SEQ ID NO: 1218645 - RNA, 19 nt, Artificial Sequence
  Description of Artificial Sequence: Synthetic oligonucleotide
  Antisense strand to SEQ ID NO: 1218644
guuucagccacagauaguc

SEQ ID NO: 1218646 - RNA, 19 nt, Artificial Sequence
  Description of Artificial Sequence: Synthetic oligonucleotide
  Sense strand starting at position 2227 of SEQ ID NO: 917225
acuaucuguggcugaaacu

SEQ ID NO: 1218647 - RNA, 19 nt, Artificial Sequence
  Description of Artificial Sequence: Synthetic oligonucleotide
  Antisense strand to SEQ ID NO: 1218646
aguuucagccacagauagu

SEQ ID NO: 1218648 - RNA, 19 nt, Artificial Sequence
  Description of Artificial Sequence: Synthetic oligonucleotide
  Sense strand starting at position 2338 of SEQ ID NO: 917225
gccugaaaccgaggaguua

SEQ ID NO: 1218649 - RNA, 19 nt, Artificial Sequence
  Description of Artificial Sequence: Synthetic oligonucleotide
  Antisense strand to SEQ ID NO: 1218648
uaacuccucgguuucaggc

SEQ ID NO: 1218650 - RNA, 19 nt, Artificial Sequence
  Description of Artificial Sequence: Synthetic oligonucleotide
  Sense strand starting at position 2355 of SEQ ID NO: 917225
uaaauacagucuccgaaga

SEQ ID NO: 1218651 - RNA, 19 nt, Artificial Sequence
  Description of Artificial Sequence: Synthetic oligonucleotide
  Antisense strand to SEQ ID NO: 1218650
ucuucggagacuguauuua

SEQ ID NO: 1218652 - RNA, 19 nt, Artificial Sequence
  Description of Artificial Sequence: Synthetic oligonucleotide
  Sense strand starting at position 2375 of SEQ ID NO: 917225
ccgcgcaucgaugugcaua

SEQ ID NO: 1218653 - RNA, 19 nt, Artificial Sequence
  Description of Artificial Sequence: Synthetic oligonucleotide
  Antisense strand to SEQ ID NO: 1218652
uaugcacaucgaugcgcgg

SEQ ID NO: 1218654 - RNA, 19 nt, Artificial Sequence
  Description of Artificial Sequence: Synthetic oligonucleotide
  Sense strand starting at position 2437 of SEQ ID NO: 917225
gaguauuaacgcugggauu

SEQ ID NO: 1218655 - RNA, 19 nt, Artificial Sequence
  Description of Artificial Sequence: Synthetic oligonucleotide
  Antisense strand to SEQ ID NO: 1218654
aaucccagcguuaauacuc

SEQ ID NO: 1218656 - RNA, 19 nt, Artificial Sequence
  Description of Artificial Sequence: Synthetic oligonucleotide
  Sense strand starting at position 2438 of SEQ ID NO: 917225
aguauuaacgcugggauug

SEQ ID NO: 1218657 - RNA, 19 nt, Artificial Sequence
  Description of Artificial Sequence: Synthetic oligonucleotide
  Antisense strand to SEQ ID NO: 1218656
caaucccagcguuaauacu

SEQ ID NO: 1218658 - RNA, 19 nt, Artificial Sequence
  Description of Artificial Sequence: Synthetic oligonucleotide
  Sense strand starting at position 2565 of SEQ ID NO: 917225
uccugaaauuuguaaauag

SEQ ID NO: 1218659 - RNA, 19 nt, Artificial Sequence
  Description of Artificial Sequence: Synthetic oligonucleotide
  Antisense strand to SEQ ID NO: 1218658
cuauuuacaaauuucagga

SEQ ID NO: 1218660 - RNA, 19 nt, Artificial Sequence
  Description of Artificial Sequence: Synthetic oligonucleotide
  Sense strand starting at position 2751 of SEQ ID NO: 917225
ggugcaauaucauuaaguu

SEQ ID NO: 1218661 - RNA, 19 nt, Artificial Sequence
  Description of Artificial Sequence: Synthetic oligonucleotide
  Antisense strand to SEQ ID NO: 1218660
aacuuaaugauauugcacc

SEQ ID NO: 1218662 - RNA, 19 nt, Artificial Sequence
  Description of Artificial Sequence: Synthetic oligonucleotide
  Sense strand starting at position 2752 of SEQ ID NO: 917225
gugcaauaucauuaaguug

SEQ ID NO: 1218663 - RNA, 19 nt, Artificial Sequence
  Description of Artificial Sequence: Synthetic oligonucleotide
  Antisense strand to SEQ ID NO: 1218662
caacuuaaugauauugcac

SEQ ID NO: 1218664 - RNA, 19 nt, Artificial Sequence
  Description of Artificial Sequence: Synthetic oligonucleotide
  Sense strand starting at position 2931 of SEQ ID NO: 917225
ggaagccauguauaaaguu

SEQ ID NO: 1218665 - RNA, 19 nt, Artificial Sequence
  Description of Artificial Sequence: Synthetic oligonucleotide
  Antisense strand to SEQ ID NO: 1218664
aacuuuauacauggcuucc

SEQ ID NO: 1218666 - RNA, 19 nt, Artificial Sequence
  Description of Artificial Sequence: Synthetic oligonucleotide
  Sense strand starting at position 2943 of SEQ ID NO: 917225
uaaaguuacgucgaaguuc

SEQ ID NO: 1218667 - RNA, 19 nt, Artificial Sequence
  Description of Artificial Sequence: Synthetic oligonucleotide
  Antisense strand to SEQ ID NO: 1218666
gaacuucgacguaacuuua

SEQ ID NO: 1218668 - RNA, 19 nt, Artificial Sequence
  Description of Artificial Sequence: Synthetic oligonucleotide
  Sense strand starting at position 2973 of SEQ ID NO: 917225
aggagugguacaggcuuau

SEQ ID NO: 1218669 - RNA, 19 nt, Artificial Sequence
  Description of Artificial Sequence: Synthetic oligonucleotide
  Antisense strand to SEQ ID NO: 1218668
auaagccuguaccacuccu

SEQ ID NO: 1218670 - RNA, 19 nt, Artificial Sequence
  Description of Artificial Sequence: Synthetic oligonucleotide
  Sense strand starting at position 2982 of SEQ ID NO: 917225
acaggcuuaugucuguaau

SEQ ID NO: 1218671 - RNA, 19 nt, Artificial Sequence
  Description of Artificial Sequence: Synthetic oligonucleotide
  Antisense strand to SEQ ID NO: 1218670
auuacagacauaagccugu

SEQ ID NO: 1218672 - RNA, 19 nt, Artificial Sequence
  Description of Artificial Sequence: Synthetic oligonucleotide
  Sense strand starting at position 3031 of SEQ ID NO: 917225
guugcuuguggucaagaau

SEQ ID NO: 1218673 - RNA, 19 nt, Artificial Sequence
  Description of Artificial Sequence: Synthetic oligonucleotide
  Antisense strand to SEQ ID NO: 1218672
auucuugaccacaagcaac

SEQ ID NO: 1218674 - RNA, 19 nt, Artificial Sequence
  Description of Artificial Sequence: Synthetic oligonucleotide
  Sense strand starting at position 3065 of SEQ ID NO: 917225
gcaauauguccagacucuu

SEQ ID NO: 1218675 - RNA, 19 nt, Artificial Sequence
  Description of Artificial Sequence: Synthetic oligonucleotide
  Antisense strand to SEQ ID NO: 1218674
aagagucuggacauauugc

SEQ ID NO: 1218676 - RNA, 19 nt, Artificial Sequence
  Description of Artificial Sequence: Synthetic oligonucleotide
  Sense strand starting at position 3331 of SEQ ID NO: 917225
gcugucagaucacugaauc

SEQ ID NO: 1218677 - RNA, 19 nt, Artificial Sequence
  Description of Artificial Sequence: Synthetic oligonucleotide
  Antisense strand to SEQ ID NO: 1218676
gauucagugaucugacagc

SEQ ID NO: 1218678 - RNA, 19 nt, Artificial Sequence
  Description of Artificial Sequence: Synthetic oligonucleotide
  Sense strand starting at position 3332 of SEQ ID NO: 917225
cugucagaucacugaauca

SEQ ID NO: 1218679 - RNA, 19 nt, Artificial Sequence
  Description of Artificial Sequence: Synthetic oligonucleotide
  Antisense strand to SEQ ID NO: 1218678
ugauucagugaucugacag

SEQ ID NO: 1218680 - RNA, 19 nt, Artificial Sequence
  Description of Artificial Sequence: Synthetic oligonucleotide
  Sense strand starting at position 3363 of SEQ ID NO: 917225
ccucuaguagcauaagagu

SEQ ID NO: 1218681 - RNA, 19 nt, Artificial Sequence
  Description of Artificial Sequence: Synthetic oligonucleotide
  Antisense strand to SEQ ID NO: 1218680
acucuuaugcuacuagagg

SEQ ID NO: 1218682 - RNA, 19 nt, Artificial Sequence
  Description of Artificial Sequence: Synthetic oligonucleotide
  Sense strand starting at position 3369 of SEQ ID NO: 917225
guagcauaagaguguggau

SEQ ID NO: 1218683 - RNA, 19 nt, Artificial Sequence
  Description of Artificial Sequence: Synthetic oligonucleotide
  Antisense strand to SEQ ID NO: 1218682
auccacacucuuaugcuac

SEQ ID NO: 1218684 - RNA, 19 nt, Artificial Sequence
  Description of Artificial Sequence: Synthetic oligonucleotide
  Sense strand starting at position 3381 of SEQ ID NO: 917225
uguggauuugccugagcug

SEQ ID NO: 1218685 - RNA, 19 nt, Artificial Sequence
  Description of Artificial Sequence: Synthetic oligonucleotide
  Antisense strand to SEQ ID NO: 1218684
cagcucaggcaaauccaca

SEQ ID NO: 1218686 - RNA, 19 nt, Artificial Sequence
  Description of Artificial Sequence: Synthetic oligonucleotide
  Sense strand starting at position 3384 of SEQ ID NO: 917225
ggauuugccugagcugcaa

SEQ ID NO: 1218687 - RNA, 19 nt, Artificial Sequence
  Description of Artificial Sequence: Synthetic oligonucleotide
  Antisense strand to SEQ ID NO: 1218686
uugcagcucaggcaaaucc

SEQ ID NO: 1218688 - RNA, 19 nt, Artificial Sequence
  Description of Artificial Sequence: Synthetic oligonucleotide
  Sense strand starting at position 3416 of SEQ ID NO: 917225
cccucagugacuggaugau

SEQ ID NO: 1218689 - RNA, 19 nt, Artificial Sequence
  Description of Artificial Sequence: Synthetic oligonucleotide
  Antisense strand to SEQ ID NO: 1218688
aucauccagucacugaggg

SEQ ID NO: 1218690 - RNA, 19 nt, Artificial Sequence
  Description of Artificial Sequence: Synthetic oligonucleotide
  Sense strand starting at position 3576 of SEQ ID NO: 917225
augagcauagguugcauua

SEQ ID NO: 1218691 - RNA, 19 nt, Artificial Sequence
  Description of Artificial Sequence: Synthetic oligonucleotide
  Antisense strand to SEQ ID NO: 1218690
uaaugcaaccuaugcucau

SEQ ID NO: 1218692 - RNA, 19 nt, Artificial Sequence
  Description of Artificial Sequence: Synthetic oligonucleotide
  Sense strand starting at position 3608 of SEQ ID NO: 917225
ucacauuacgguuauauca

SEQ ID NO: 1218693 - RNA, 19 nt, Artificial Sequence
  Description of Artificial Sequence: Synthetic oligonucleotide
  Antisense strand to SEQ ID NO: 1218692
ugauauaaccguaauguga

SEQ ID NO: 1218694 - RNA, 19 nt, Artificial Sequence
  Description of Artificial Sequence: Synthetic oligonucleotide
  Sense strand starting at position 3794 of SEQ ID NO: 917225
uuuaaucagucaguacuua

SEQ ID NO: 1218695 - RNA, 19 nt, Artificial Sequence
  Description of Artificial Sequence: Synthetic oligonucleotide
  Antisense strand to SEQ ID NO: 1218694
uaaguacugacugauuaaa

SEQ ID NO: 1218696 - RNA, 19 nt, Artificial Sequence
  Description of Artificial Sequence: Synthetic oligonucleotide
  Sense strand starting at position 3795 of SEQ ID NO: 917225
uuaaucagucaguacuuau

SEQ ID NO: 1218697 - RNA, 19 nt, Artificial Sequence
  Description of Artificial Sequence: Synthetic oligonucleotide
  Antisense strand to SEQ ID NO: 1218696
auaaguacugacugauuaa

SEQ ID NO: 1218698 - RNA, 19 nt, Artificial Sequence
  Description of Artificial Sequence: Synthetic oligonucleotide
  Sense strand starting at position 3827 of SEQ ID NO: 917225
uuguaucaucaagaucagu

SEQ ID NO: 1218699 - RNA, 19 nt, Artificial Sequence
  Description of Artificial Sequence: Synthetic oligonucleotide
  Antisense strand to SEQ ID NO: 1218698
acugaucuugaugauacaa

SEQ ID NO: 1218700 - RNA, 19 nt, Artificial Sequence
  Description of Artificial Sequence: Synthetic oligonucleotide
  Sense strand starting at position 3832 of SEQ ID NO: 917225
ucaucaagaucaguggcau

SEQ ID NO: 1218701 - RNA, 19 nt, Artificial Sequence
  Description of Artificial Sequence: Synthetic oligonucleotide
  Antisense strand to SEQ ID NO: 1218700
augccacugaucuugauga

SEQ ID NO: 1218702 - RNA, 19 nt, Artificial Sequence
  Description of Artificial Sequence: Synthetic oligonucleotide
  Sense strand starting at position 3911 of SEQ ID NO: 917226
uacugacccuguuuggaau

SEQ ID NO: 1218703 - RNA, 19 nt, Artificial Sequence
  Description of Artificial Sequence: Synthetic oligonucleotide
  Antisense strand to SEQ ID NO: 1218702
auuccaaacagggucagua

SEQ ID NO: 1218704 - RNA, 19 nt, Artificial Sequence
  Description of Artificial Sequence: Synthetic oligonucleotide
  Sense strand starting at position 126 of SEQ ID NO: 917226
aagcuuauuuaguagauag

SEQ ID NO: 1218705 - RNA, 19 nt, Artificial Sequence
  Description of Artificial Sequence: Synthetic oligonucleotide
  Antisense strand to SEQ ID NO: 1218704
cuaucuacuaaauaagcuu

SEQ ID NO: 1218706 - RNA, 19 nt, Artificial Sequence
  Description of Artificial Sequence: Synthetic oligonucleotide
  Sense strand starting at position 171 of SEQ ID NO: 917226
ccaauuuggagcuguaugu

SEQ ID NO: 1218707 - RNA, 19 nt, Artificial Sequence
  Description of Artificial Sequence: Synthetic oligonucleotide
  Antisense strand to SEQ ID NO: 1218706
acauacagcuccaaauugg

SEQ ID NO: 1218708 - RNA, 19 nt, Artificial Sequence
  Description of Artificial Sequence: Synthetic oligonucleotide
  Sense strand starting at position 209 of SEQ ID NO: 917226
aagauagucuguuugauga

SEQ ID NO: 1218709 - RNA, 19 nt, Artificial Sequence
  Description of Artificial Sequence: Synthetic oligonucleotide
  Antisense strand to SEQ ID NO: 1218708
ucaucaaacagacuaucuu

SEQ ID NO: 1218710 - RNA, 19 nt, Artificial Sequence
  Description of Artificial Sequence: Synthetic oligonucleotide
  Sense strand starting at position 252 of SEQ ID NO: 917226
gucauaauagauugauccu

SEQ ID NO: 1218711 - RNA, 19 nt, Artificial Sequence
  Description of Artificial Sequence: Synthetic oligonucleotide
  Antisense strand to SEQ ID NO: 1218710
aggaucaaucuauuaugac

SEQ ID NO: 1218712 - RNA, 19 nt, Artificial Sequence
  Description of Artificial Sequence: Synthetic oligonucleotide
  Sense strand starting at position 258 of SEQ ID NO: 917226
auagauugauccuccgucu

SEQ ID NO: 1218713 - RNA, 19 nt, Artificial Sequence
  Description of Artificial Sequence: Synthetic oligonucleotide
  Antisense strand to SEQ ID NO: 1218712
agacggaggaucaaucuau

SEQ ID NO: 1218714 - RNA, 19 nt, Artificial Sequence
  Description of Artificial Sequence: Synthetic oligonucleotide
  Sense strand starting at position 273 of SEQ ID NO: 917226
gucuaucaacggugauuaa

SEQ ID NO: 1218715 - RNA, 19 nt, Artificial Sequence
  Description of Artificial Sequence: Synthetic oligonucleotide
  Antisense strand to SEQ ID NO: 1218714
uuaaucaccguugauagac

SEQ ID NO: 1218716 - RNA, 19 nt, Artificial Sequence
  Description of Artificial Sequence: Synthetic oligonucleotide
  Sense strand starting at position 327 of SEQ ID NO: 917226
ugaauaaggcucuaggcua

SEQ ID NO: 1218717 - RNA, 19 nt, Artificial Sequence
  Description of Artificial Sequence: Synthetic oligonucleotide
  Antisense strand to SEQ ID NO: 1218716
uagccuagagccuuauuca

SEQ ID NO: 1218718 - RNA, 19 nt, Artificial Sequence
  Description of Artificial Sequence: Synthetic oligonucleotide
  Sense strand starting at position 381 of SEQ ID NO: 917226
cuccuacacuggucugaaa

SEQ ID NO: 1218719 - RNA, 19 nt, Artificial Sequence
  Description of Artificial Sequence: Synthetic oligonucleotide
  Antisense strand to SEQ ID NO: 1218718
uuucagaccaguguaggag

SEQ ID NO: 1218720 - RNA, 19 nt, Artificial Sequence
  Description of Artificial Sequence: Synthetic oligonucleotide
  Sense strand starting at position 643 of SEQ ID NO: 917226
cgcacucacucuuugagaa

SEQ ID NO: 1218721 - RNA, 19 nt, Artificial Sequence
  Description of Artificial Sequence: Synthetic oligonucleotide
  Antisense strand to SEQ ID NO: 1218720
uucucaaagagugagugcg

SEQ ID NO: 1218722 - RNA, 19 nt, Artificial Sequence
  Description of Artificial Sequence: Synthetic oligonucleotide
  Sense strand starting at position 644 of SEQ ID NO: 917226
gcacucacucuuugagaaa

SEQ ID NO: 1218723 - RNA, 19 nt, Artificial Sequence
  Description of Artificial Sequence: Synthetic oligonucleotide
  Antisense strand to SEQ ID NO: 1218722
uuucucaaagagugagugc

SEQ ID NO: 1218724 - RNA, 19 nt, Artificial Sequence
  Description of Artificial Sequence: Synthetic oligonucleotide
  Sense strand starting at position 980 of SEQ ID NO: 917226
aaggucauccuagguacua

SEQ ID NO: 1218725 - RNA, 19 nt, Artificial Sequence
  Description of Artificial Sequence: Synthetic oligonucleotide
  Antisense strand to SEQ ID NO: 1218724
uaguaccuaggaugaccuu

SEQ ID NO: 1218726 - RNA, 19 nt, Artificial Sequence
  Description of Artificial Sequence: Synthetic oligonucleotide
  Sense strand starting at position 992 of SEQ ID NO: 917226
gguacuaguuucucaaaga

SEQ ID NO: 1218727 - RNA, 19 nt, Artificial Sequence
  Description of Artificial Sequence: Synthetic oligonucleotide
  Antisense strand to SEQ ID NO: 1218726
ucuuugagaaacuaguacc

SEQ ID NO: 1218728 - RNA, 19 nt, Artificial Sequence
  Description of Artificial Sequence: Synthetic oligonucleotide
  Sense strand starting at position 1018 of SEQ ID NO: 917226
guaguaagguaacuauucu

SEQ ID NO: 1218729 - RNA, 19 nt, Artificial Sequence
  Description of Artificial Sequence: Synthetic oligonucleotide
  Antisense strand to SEQ ID NO: 1218728
agaauaguuaccuuacuac

SEQ ID NO: 1218730 - RNA, 19 nt, Artificial Sequence
  Description of Artificial Sequence: Synthetic oligonucleotide
  Sense strand starting at position 1034 of SEQ ID NO: 917226
ucuagucaccuuuauauag

SEQ ID NO: 1218731 - RNA, 19 nt, Artificial Sequence
  Description of Artificial Sequence: Synthetic oligonucleotide
  Antisense strand to SEQ ID NO: 1218730
cuauauaaaggugacuaga

SEQ ID NO: 1218732 - RNA, 19 nt, Artificial Sequence
  Description of Artificial Sequence: Synthetic oligonucleotide
  Sense strand starting at position 1143 of SEQ ID NO: 917226
uucggauucuuucuuuaga

SEQ ID NO: 1218733 - RNA, 19 nt, Artificial Sequence
  Description of Artificial Sequence: Synthetic oligonucleotide
  Antisense strand to SEQ ID NO: 1218732
ucuaaagaaagaauccgaa

SEQ ID NO: 1218734 - RNA, 19 nt, Artificial Sequence
  Description of Artificial Sequence: Synthetic oligonucleotide
  Sense strand starting at position 1144 of SEQ ID NO: 917226
ucggauucuuucuuuagac

SEQ ID NO: 1218735 - RNA, 19 nt, Artificial Sequence
  Description of Artificial Sequence: Synthetic oligonucleotide
  Antisense strand to SEQ ID NO: 1218734
gucuaaagaaagaauccga

SEQ ID NO: 1218736 - RNA, 19 nt, Artificial Sequence
  Description of Artificial Sequence: Synthetic oligonucleotide
  Sense strand starting at position 1145 of SEQ ID NO: 917226
cggauucuuucuuuagacu

SEQ ID NO: 1218737 - RNA, 19 nt, Artificial Sequence
  Description of Artificial Sequence: Synthetic oligonucleotide
  Antisense strand to SEQ ID NO: 1218736
agucuaaagaaagaauccg

SEQ ID NO: 1218738 - RNA, 19 nt, Artificial Sequence
  Description of Artificial Sequence: Synthetic oligonucleotide
  Sense strand starting at position 1146 of SEQ ID NO: 917226
ggauucuuucuuuagacuc

SEQ ID NO: 1218739 - RNA, 19 nt, Artificial Sequence
  Description of Artificial Sequence: Synthetic oligonucleotide
  Antisense strand to SEQ ID NO: 1218738
gagucuaaagaaagaaucc

SEQ ID NO: 1218740 - RNA, 19 nt, Artificial Sequence
  Description of Artificial Sequence: Synthetic oligonucleotide
  Sense strand starting at position 1845 of SEQ ID NO: 917226
gcgcacuuuggagaagaua

SEQ ID NO: 1218741 - RNA, 19 nt, Artificial Sequence
  Description of Artificial Sequence: Synthetic oligonucleotide
  Antisense strand to SEQ ID NO: 1218740
uaucuucuccaaagugcgc

SEQ ID NO: 1218742 - RNA, 19 nt, Artificial Sequence
  Description of Artificial Sequence: Synthetic oligonucleotide
  Sense strand starting at position 2564 of SEQ ID NO: 917226
auugucaagugcuuuggaa

SEQ ID NO: 1218743 - RNA, 19 nt, Artificial Sequence
  Description of Artificial Sequence: Synthetic oligonucleotide
  Antisense strand to SEQ ID NO: 1218742
uuccaaagcacuugacaau

SEQ ID NO: 1218744 - RNA, 19 nt, Artificial Sequence
  Description of Artificial Sequence: Synthetic oligonucleotide
  Sense strand starting at position 2566 of SEQ ID NO: 917226
ugucaagugcuuuggaaau

SEQ ID NO: 1218745 - RNA, 19 nt, Artificial Sequence
  Description of Artificial Sequence: Synthetic oligonucleotide
  Antisense strand to SEQ ID NO: 1218744
auuuccaaagcacuugaca

SEQ ID NO: 1218746 - RNA, 19 nt, Artificial Sequence
  Description of Artificial Sequence: Synthetic oligonucleotide
  Sense strand starting at position 2614 of SEQ ID NO: 917226
ugagaucucuaaucaaacg

SEQ ID NO: 1218747 - RNA, 19 nt, Artificial Sequence
  Description of Artificial Sequence: Synthetic oligonucleotide
  Antisense strand to SEQ ID NO: 1218746
cguuugauuagagaucuca

SEQ ID NO: 1218748 - RNA, 19 nt, Artificial Sequence
  Description of Artificial Sequence: Synthetic oligonucleotide
  Sense strand starting at position 2741 of SEQ ID NO: 917226
aaagaaagcuaagauggau

SEQ ID NO: 1218749 - RNA, 19 nt, Artificial Sequence
  Description of Artificial Sequence: Synthetic oligonucleotide
  Antisense strand to SEQ ID NO: 1218748
auccaucuuagcuuucuuu

SEQ ID NO: 1218750 - RNA, 19 nt, Artificial Sequence
  Description of Artificial Sequence: Synthetic oligonucleotide
  Sense strand starting at position 3136 of SEQ ID NO: 917226
aggugugauuaagcgagau

SEQ ID NO: 1218751 - RNA, 19 nt, Artificial Sequence
  Description of Artificial Sequence: Synthetic oligonucleotide
  Antisense strand to SEQ ID NO: 1218750
aucucgcuuaaucacaccu

SEQ ID NO: 1218752 - RNA, 19 nt, Artificial Sequence
  Description of Artificial Sequence: Synthetic oligonucleotide
  Sense strand starting at position 3138 of SEQ ID NO: 917226
gugugauuaagcgagauag

SEQ ID NO: 1218753 - RNA, 19 nt, Artificial Sequence
  Description of Artificial Sequence: Synthetic oligonucleotide
  Antisense strand to SEQ ID NO: 1218752
cuaucucgcuuaaucacac

SEQ ID NO: 1218754 - RNA, 19 nt, Artificial Sequence
  Description of Artificial Sequence: Synthetic oligonucleotide
  Sense strand starting at position 3243 of SEQ ID NO: 917226
gauaaacgcccaggagaau

SEQ ID NO: 1218755 - RNA, 19 nt, Artificial Sequence
  Description of Artificial Sequence: Synthetic oligonucleotide
  Antisense strand to SEQ ID NO: 1218754
auucuccugggcguuuauc

SEQ ID NO: 1218756 - RNA, 19 nt, Artificial Sequence
  Description of Artificial Sequence: Synthetic oligonucleotide
  Sense strand starting at position 3307 of SEQ ID NO: 917226
acacuauuccagggacagu

SEQ ID NO: 1218757 - RNA, 19 nt, Artificial Sequence
  Description of Artificial Sequence: Synthetic oligonucleotide
  Antisense strand to SEQ ID NO: 1218756
acugucccuggaauagugu

SEQ ID NO: 1218758 - RNA, 19 nt, Artificial Sequence
  Description of Artificial Sequence: Synthetic oligonucleotide
  Sense strand starting at position 3388 of SEQ ID NO: 917226
aagcucugucagggagcaa

SEQ ID NO: 1218759 - RNA, 19 nt, Artificial Sequence
  Description of Artificial Sequence: Synthetic oligonucleotide
  Antisense strand to SEQ ID NO: 1218758
uugcucccugacagagcuu

SEQ ID NO: 1218760 - RNA, 19 nt, Artificial Sequence
  Description of Artificial Sequence: Synthetic oligonucleotide
  Sense strand starting at position 3389 of SEQ ID NO: 917226
agcucugucagggagcaaa

SEQ ID NO: 1218761 - RNA, 19 nt, Artificial Sequence
  Description of Artificial Sequence: Synthetic oligonucleotide
  Antisense strand to SEQ ID NO: 1218760
uuugcucccugacagagcu

SEQ ID NO: 1218762 - RNA, 19 nt, Artificial Sequence
  Description of Artificial Sequence: Synthetic oligonucleotide
  Sense strand starting at position 3409 of SEQ ID NO: 917226
ccaucugaacugugucuga

SEQ ID NO: 1218763 - RNA, 19 nt, Artificial Sequence
  Description of Artificial Sequence: Synthetic oligonucleotide
  Antisense strand to SEQ ID NO: 1218762
ucagacacaguucagaugg

SEQ ID NO: 1218764 - RNA, 19 nt, Artificial Sequence
  Description of Artificial Sequence: Synthetic oligonucleotide
  Sense strand starting at position 3412 of SEQ ID NO: 917226
ucugaacugugucugaaau

SEQ ID NO: 1218765 - RNA, 19 nt, Artificial Sequence
  Description of Artificial Sequence: Synthetic oligonucleotide
  Antisense strand to SEQ ID NO: 1218764
auuucagacacaguucaga

SEQ ID NO: 1218766 - RNA, 19 nt, Artificial Sequence
  Description of Artificial Sequence: Synthetic oligonucleotide
  Sense strand starting at position 3733 of SEQ ID NO: 917226
gaaagaaaugcucgaacua

SEQ ID NO: 1218767 - RNA, 19 nt, Artificial Sequence
  Description of Artificial Sequence: Synthetic oligonucleotide
  Antisense strand to SEQ ID NO: 1218766
uaguucgagcauuucuuuc

SEQ ID NO: 1218768 - RNA, 19 nt, Artificial Sequence
  Description of Artificial Sequence: Synthetic oligonucleotide
  Sense strand starting at position 3757 of SEQ ID NO: 917226
cuggaaauucagugugaag

SEQ ID NO: 1218769 - RNA, 19 nt, Artificial Sequence
  Description of Artificial Sequence: Synthetic oligonucleotide
  Antisense strand to SEQ ID NO: 1218768
cuucacacugaauuuccag

SEQ ID NO: 1218770 - RNA, 19 nt, Artificial Sequence
  Description of Artificial Sequence: Synthetic oligonucleotide
  Sense strand starting at position 3759 of SEQ ID NO: 917226
ggaaauucagugugaagca

SEQ ID NO: 1218771 - RNA, 19 nt, Artificial Sequence
  Description of Artificial Sequence: Synthetic oligonucleotide
  Antisense strand to SEQ ID NO: 1218770
ugcuucacacugaauuucc

SEQ ID NO: 1218772 - RNA, 19 nt, Artificial Sequence
  Description of Artificial Sequence: Synthetic oligonucleotide
  Sense strand starting at position 3784 of SEQ ID NO: 917226
agagauggcucacuuggua

SEQ ID NO: 1218773 - RNA, 19 nt, Artificial Sequence
  Description of Artificial Sequence: Synthetic oligonucleotide
  Antisense strand to SEQ ID NO: 1218772
uaccaagugagccaucucu

SEQ ID NO: 1218774 - RNA, 19 nt, Artificial Sequence
  Description of Artificial Sequence: Synthetic oligonucleotide
  Sense strand starting at position 3830 of SEQ ID NO: 917226
uccagugacugcuuuagag

SEQ ID NO: 1218775 - RNA, 19 nt, Artificial Sequence
  Description of Artificial Sequence: Synthetic oligonucleotide
  Antisense strand to SEQ ID NO: 1218774
cucuaaagcagucacugga

SEQ ID NO: 1218776 - RNA, 19 nt, Artificial Sequence
  Description of Artificial Sequence: Synthetic oligonucleotide
  Sense strand starting at position 3832 of SEQ ID NO: 917226
cagugacugcuuuagagcu

SEQ ID NO: 1218777 - RNA, 19 nt, Artificial Sequence
  Description of Artificial Sequence: Synthetic oligonucleotide
  Antisense strand to SEQ ID NO: 1218776
agcucuaaagcagucacug

SEQ ID NO: 1218778 - RNA, 19 nt, Artificial Sequence
  Description of Artificial Sequence: Synthetic oligonucleotide
  Sense strand starting at position 3838 of SEQ ID NO: 917226
cugcuuuagagcuggaaag

SEQ ID NO: 1218779 - RNA, 19 nt, Artificial Sequence
  Description of Artificial Sequence: Synthetic oligonucleotide
  Antisense strand to SEQ ID NO: 1218778
cuuuccagcucuaaagcag

SEQ ID NO: 1218780 - RNA, 19 nt, Artificial Sequence
  Description of Artificial Sequence: Synthetic oligonucleotide
  Sense strand starting at position 3839 of SEQ ID NO: 917226
ugcuuuagagcuggaaaga

SEQ ID NO: 1218781 - RNA, 19 nt, Artificial Sequence
  Description of Artificial Sequence: Synthetic oligonucleotide
  Antisense strand to SEQ ID NO: 1218780
ucuuuccagcucuaaagca

SEQ ID NO: 1218782 - RNA, 19 nt, Artificial Sequence
  Description of Artificial Sequence: Synthetic oligonucleotide
  Sense strand starting at position 3840 of SEQ ID NO: 917227
gcuuuagagcuggaaagag

SEQ ID NO: 1218783 - RNA, 19 nt, Artificial Sequence
  Description of Artificial Sequence: Synthetic oligonucleotide
  Antisense strand to SEQ ID NO: 1218782
cucuuuccagcucuaaagc

SEQ ID NO: 1218784 - RNA, 19 nt, Artificial Sequence
  Description of Artificial Sequence: Synthetic oligonucleotide
  Sense strand starting at position 8 of SEQ ID NO: 917227
ggugaauagaaacggugua

SEQ ID NO: 1218785 - RNA, 19 nt, Artificial Sequence
  Description of Artificial Sequence: Synthetic oligonucleotide
  Antisense strand to SEQ ID NO: 1218784
uacaccguuucuauucacc

SEQ ID NO: 1218786 - RNA, 19 nt, Artificial Sequence
  Description of Artificial Sequence: Synthetic oligonucleotide
  Sense strand starting at position 9 of SEQ ID NO: 917227
gugaauagaaacgguguaa

SEQ ID NO: 1218787 - RNA, 19 nt, Artificial Sequence
  Description of Artificial Sequence: Synthetic oligonucleotide
  Antisense strand to SEQ ID NO: 1218786
uuacaccguuucuauucac

SEQ ID NO: 1218788 - RNA, 19 nt, Artificial Sequence
  Description of Artificial Sequence: Synthetic oligonucleotide
  Sense strand starting at position 470 of SEQ ID NO: 917227
cguggagagccaugaucua

SEQ ID NO: 1218789 - RNA, 19 nt, Artificial Sequence
  Description of Artificial Sequence: Synthetic oligonucleotide
  Antisense strand to SEQ ID NO: 1218788
uagaucauggcucuccacg

SEQ ID NO: 1218790 - RNA, 19 nt, Artificial Sequence
  Description of Artificial Sequence: Synthetic oligonucleotide
  Sense strand starting at position 842 of SEQ ID NO: 917227
ugcauuucuuauguaaugu

SEQ ID NO: 1218791 - RNA, 19 nt, Artificial Sequence
  Description of Artificial Sequence: Synthetic oligonucleotide
  Antisense strand to SEQ ID NO: 1218790
acauuacauaagaaaugca

SEQ ID NO: 1218792 - RNA, 19 nt, Artificial Sequence
  Description of Artificial Sequence: Synthetic oligonucleotide
  Sense strand starting at position 876 of SEQ ID NO: 917227
guuggagcccuuuggaauc

SEQ ID NO: 1218793 - RNA, 19 nt, Artificial Sequence
  Description of Artificial Sequence: Synthetic oligonucleotide
  Antisense strand to SEQ ID NO: 1218792
gauuccaaagggcuccaac

SEQ ID NO: 1218794 - RNA, 19 nt, Artificial Sequence
  Description of Artificial Sequence: Synthetic oligonucleotide
  Sense strand starting at position 1232 of SEQ ID NO: 917227
gaucgugguggcgaauauu

SEQ ID NO: 1218795 - RNA, 19 nt, Artificial Sequence
  Description of Artificial Sequence: Synthetic oligonucleotide
  Antisense strand to SEQ ID NO: 1218794
aauauucgccaccacgauc

SEQ ID NO: 1218796 - RNA, 19 nt, Artificial Sequence
  Description of Artificial Sequence: Synthetic oligonucleotide
  Sense strand starting at position 1250 of SEQ ID NO: 917227
ugugcaagcuaaucagaaa

SEQ ID NO: 1218797 - RNA, 19 nt, Artificial Sequence
  Description of Artificial Sequence: Synthetic oligonucleotide
  Antisense strand to SEQ ID NO: 1218796
uuucugauuagcuugcaca

SEQ ID NO: 1218798 - RNA, 19 nt, Artificial Sequence
  Description of Artificial Sequence: Synthetic oligonucleotide
  Sense strand starting at position 1306 of SEQ ID NO: 917227
gaaccugcugcagaaguaa

SEQ ID NO: 1218799 - RNA, 19 nt, Artificial Sequence
  Description of Artificial Sequence: Synthetic oligonucleotide
  Antisense strand to SEQ ID NO: 1218798
uuacuucugcagcagguuc

SEQ ID NO: 1218800 - RNA, 19 nt, Artificial Sequence
  Description of Artificial Sequence: Synthetic oligonucleotide
  Sense strand starting at position 1628 of SEQ ID NO: 917227
gaucuagcucgaugagcaa

SEQ ID NO: 1218801 - RNA, 19 nt, Artificial Sequence
  Description of Artificial Sequence: Synthetic oligonucleotide
  Antisense strand to SEQ ID NO: 1218800
uugcucaucgagcuagauc

SEQ ID NO: 1218802 - RNA, 19 nt, Artificial Sequence
  Description of Artificial Sequence: Synthetic oligonucleotide
  Sense strand starting at position 1650 of SEQ ID NO: 917227
acagguuauuaugaggaaa

SEQ ID NO: 1218803 - RNA, 19 nt, Artificial Sequence
  Description of Artificial Sequence: Synthetic oligonucleotide
  Antisense strand to SEQ ID NO: 1218802
uuuccucauaauaaccugu

SEQ ID NO: 1218804 - RNA, 19 nt, Artificial Sequence
  Description of Artificial Sequence: Synthetic oligonucleotide
  Sense strand starting at position 1742 of SEQ ID NO: 917227
gcagcauaugcguuccuuu

SEQ ID NO: 1218805 - RNA, 19 nt, Artificial Sequence
  Description of Artificial Sequence: Synthetic oligonucleotide
  Antisense strand to SEQ ID NO: 1218804
aaaggaacgcauaugcugc

SEQ ID NO: 1218806 - RNA, 19 nt, Artificial Sequence
  Description of Artificial Sequence: Synthetic oligonucleotide
  Sense strand starting at position 1832 of SEQ ID NO: 917227
agaagagauccuugugguu

SEQ ID NO: 1218807 - RNA, 19 nt, Artificial Sequence
  Description of Artificial Sequence: Synthetic oligonucleotide
  Antisense strand to SEQ ID NO: 1218806
aaccacaaggaucucuucu

SEQ ID NO: 1218808 - RNA, 19 nt, Artificial Sequence
  Description of Artificial Sequence: Synthetic oligonucleotide
  Sense strand starting at position 1837 of SEQ ID NO: 917227
agauccuugugguugcaua

SEQ ID NO: 1218809 - RNA, 19 nt, Artificial Sequence
  Description of Artificial Sequence: Synthetic oligonucleotide
  Antisense strand to SEQ ID NO: 1218808
uaugcaaccacaaggaucu

SEQ ID NO: 1218810 - RNA, 19 nt, Artificial Sequence
  Description of Artificial Sequence: Synthetic oligonucleotide
  Sense strand starting at position 1838 of SEQ ID NO: 917227
gauccuugugguugcauaa

SEQ ID NO: 1218811 - RNA, 19 nt, Artificial Sequence
  Description of Artificial Sequence: Synthetic oligonucleotide
  Antisense strand to SEQ ID NO: 1218810
uuaugcaaccacaaggauc

SEQ ID NO: 1218812 - RNA, 19 nt, Artificial Sequence
  Description of Artificial Sequence: Synthetic oligonucleotide
  Sense strand starting at position 1865 of SEQ ID NO: 917227
ugaaaucaguucuccugaa

SEQ ID NO: 1218813 - RNA, 19 nt, Artificial Sequence
  Description of Artificial Sequence: Synthetic oligonucleotide
  Antisense strand to SEQ ID NO: 1218812
uucaggagaacugauuuca

SEQ ID NO: 1218814 - RNA, 19 nt, Artificial Sequence
  Description of Artificial Sequence: Synthetic oligonucleotide
  Sense strand starting at position 1910 of SEQ ID NO: 917227
aaacgauaauauuccggau

SEQ ID NO: 1218815 - RNA, 19 nt, Artificial Sequence
  Description of Artificial Sequence: Synthetic oligonucleotide
  Antisense strand to SEQ ID NO: 1218814
auccggaauauuaucguuu

SEQ ID NO: 1218816 - RNA, 19 nt, Artificial Sequence
  Description of Artificial Sequence: Synthetic oligonucleotide
  Sense strand starting at position 1956 of SEQ ID NO: 917227
guauauuucuuugagacuu

SEQ ID NO: 1218817 - RNA, 19 nt, Artificial Sequence
  Description of Artificial Sequence: Synthetic oligonucleotide
  Antisense strand to SEQ ID NO: 1218816
aagucucaaagaaauauac

SEQ ID NO: 1218818 - RNA, 19 nt, Artificial Sequence
  Description of Artificial Sequence: Synthetic oligonucleotide
  Sense strand starting at position 1964 of SEQ ID NO: 917227
cuuugagacuucucaguga

SEQ ID NO: 1218819 - RNA, 19 nt, Artificial Sequence
  Description of Artificial Sequence: Synthetic oligonucleotide
  Antisense strand to SEQ ID NO: 1218818
ucacugagaagucucaaag

SEQ ID NO: 1218820 - RNA, 19 nt, Artificial Sequence
  Description of Artificial Sequence: Synthetic oligonucleotide
  Sense strand starting at position 1967 of SEQ ID NO: 917227
ugagacuucucagugauug

SEQ ID NO: 1218821 - RNA, 19 nt, Artificial Sequence
  Description of Artificial Sequence: Synthetic oligonucleotide
  Antisense strand to SEQ ID NO: 1218820
caaucacugagaagucuca

SEQ ID NO: 1218822 - RNA, 19 nt, Artificial Sequence
  Description of Artificial Sequence: Synthetic oligonucleotide
  Sense strand starting at position 1968 of SEQ ID NO: 917227
gagacuucucagugauugu

SEQ ID NO: 1218823 - RNA, 19 nt, Artificial Sequence
  Description of Artificial Sequence: Synthetic oligonucleotide
  Antisense strand to SEQ ID NO: 1218822
acaaucacugagaagucuc

SEQ ID NO: 1218824 - RNA, 19 nt, Artificial Sequence
  Description of Artificial Sequence: Synthetic oligonucleotide
  Sense strand starting at position 2022 of SEQ ID NO: 917227
cgaucaccaccggauuauu

SEQ ID NO: 1218825 - RNA, 19 nt, Artificial Sequence
  Description of Artificial Sequence: Synthetic oligonucleotide
  Antisense strand to SEQ ID NO: 1218824
aauaauccgguggugaucg

SEQ ID NO: 1218826 - RNA, 19 nt, Artificial Sequence
  Description of Artificial Sequence: Synthetic oligonucleotide
  Sense strand starting at position 2178 of SEQ ID NO: 917227
acuugaucgcuaugaggau

SEQ ID NO: 1218827 - RNA, 19 nt, Artificial Sequence
  Description of Artificial Sequence: Synthetic oligonucleotide
  Antisense strand to SEQ ID NO: 1218826
auccucauagcgaucaagu

SEQ ID NO: 1218828 - RNA, 19 nt, Artificial Sequence
  Description of Artificial Sequence: Synthetic oligonucleotide
  Sense strand starting at position 2226 of SEQ ID NO: 917227
ucaucuuacugagagaaga

SEQ ID NO: 1218829 - RNA, 19 nt, Artificial Sequence
  Description of Artificial Sequence: Synthetic oligonucleotide
  Antisense strand to SEQ ID NO: 1218828
ucuucucucaguaagauga

SEQ ID NO: 1218830 - RNA, 19 nt, Artificial Sequence
  Description of Artificial Sequence: Synthetic oligonucleotide
  Sense strand starting at position 2234 of SEQ ID NO: 917227
cugagagaagacugccauu

SEQ ID NO: 1218831 - RNA, 19 nt, Artificial Sequence
  Description of Artificial Sequence: Synthetic oligonucleotide
  Antisense strand to SEQ ID NO: 1218830
aauggcagucuucucucag

SEQ ID NO: 1218832 - RNA, 19 nt, Artificial Sequence
  Description of Artificial Sequence: Synthetic oligonucleotide
  Sense strand starting at position 2446 of SEQ ID NO: 917227
gugggaucgguuugaaccu

SEQ ID NO: 1218833 - RNA, 19 nt, Artificial Sequence
  Description of Artificial Sequence: Synthetic oligonucleotide
  Antisense strand to SEQ ID NO: 1218832
agguucaaaccgaucccac

SEQ ID NO: 1218834 - RNA, 19 nt, Artificial Sequence
  Description of Artificial Sequence: Synthetic oligonucleotide
  Sense strand starting at position 2470 of SEQ ID NO: 917227
ucucaaucaccacgaagaa

SEQ ID NO: 1218835 - RNA, 19 nt, Artificial Sequence
  Description of Artificial Sequence: Synthetic oligonucleotide
  Antisense strand to SEQ ID NO: 1218834
uucuucguggugauugaga

SEQ ID NO: 1218836 - RNA, 19 nt, Artificial Sequence
  Description of Artificial Sequence: Synthetic oligonucleotide
  Sense strand starting at position 2534 of SEQ ID NO: 917227
gguagagagcgccacaaau

SEQ ID NO: 1218837 - RNA, 19 nt, Artificial Sequence
  Description of Artificial Sequence: Synthetic oligonucleotide
  Antisense strand to SEQ ID NO: 1218836
auuuguggcgcucucuacc

SEQ ID NO: 1218838 - RNA, 19 nt, Artificial Sequence
  Description of Artificial Sequence: Synthetic oligonucleotide
  Sense strand starting at position 2641 of SEQ ID NO: 917227
augugaguuacaggcauua

SEQ ID NO: 1218839 - RNA, 19 nt, Artificial Sequence
  Description of Artificial Sequence: Synthetic oligonucleotide
  Antisense strand to SEQ ID NO: 1218838
uaaugccuguaacucacau

SEQ ID NO: 1218840 - RNA, 19 nt, Artificial Sequence
  Description of Artificial Sequence: Synthetic oligonucleotide
  Sense strand starting at position 2643 of SEQ ID NO: 917227
gugaguuacaggcauuaga

SEQ ID NO: 1218841 - RNA, 19 nt, Artificial Sequence
  Description of Artificial Sequence: Synthetic oligonucleotide
  Antisense strand to SEQ ID NO: 1218840
ucuaaugccuguaacucac

SEQ ID NO: 1218842 - RNA, 19 nt, Artificial Sequence
  Description of Artificial Sequence: Synthetic oligonucleotide
  Sense strand starting at position 3331 of SEQ ID NO: 917227
aauaauugugcagaaaguc

SEQ ID NO: 1218843 - RNA, 19 nt, Artificial Sequence
  Description of Artificial Sequence: Synthetic oligonucleotide
  Antisense strand to SEQ ID NO: 1218842
gacuuucugcacaauuauu

SEQ ID NO: 1218844 - RNA, 19 nt, Artificial Sequence
  Description of Artificial Sequence: Synthetic oligonucleotide
  Sense strand starting at position 3340 of SEQ ID NO: 917227
gcagaaagucccugcuuaa

SEQ ID NO: 1218845 - RNA, 19 nt, Artificial Sequence
  Description of Artificial Sequence: Synthetic oligonucleotide
  Antisense strand to SEQ ID NO: 1218844
uuaagcagggacuuucugc

SEQ ID NO: 1218846 - RNA, 19 nt, Artificial Sequence
  Description of Artificial Sequence: Synthetic oligonucleotide
  Sense strand starting at position 3563 of SEQ ID NO: 917227
uuuauucuacuuggaggaa

SEQ ID NO: 1218847 - RNA, 19 nt, Artificial Sequence
  Description of Artificial Sequence: Synthetic oligonucleotide
  Antisense strand to SEQ ID NO: 1218846
uuccuccaaguagaauaaa

SEQ ID NO: 1218848 - RNA, 19 nt, Artificial Sequence
  Description of Artificial Sequence: Synthetic oligonucleotide
  Sense strand starting at position 3635 of SEQ ID NO: 917227
cagaguacccgcuacucaa

SEQ ID NO: 1218849 - RNA, 19 nt, Artificial Sequence
  Description of Artificial Sequence: Synthetic oligonucleotide
  Antisense strand to SEQ ID NO: 1218848
uugaguagcggguacucug

SEQ ID NO: 1218850 - RNA, 19 nt, Artificial Sequence
  Description of Artificial Sequence: Synthetic oligonucleotide
  Sense strand starting at position 3715 of SEQ ID NO: 917227
cucccauucucuguaggua

SEQ ID NO: 1218851 - RNA, 19 nt, Artificial Sequence
  Description of Artificial Sequence: Synthetic oligonucleotide
  Antisense strand to SEQ ID NO: 1218850
uaccuacagagaaugggag

SEQ ID NO: 1218852 - RNA, 19 nt, Artificial Sequence
  Description of Artificial Sequence: Synthetic oligonucleotide
  Sense strand starting at position 3716 of SEQ ID NO: 917227
ucccauucucuguagguaa

SEQ ID NO: 1218853 - RNA, 19 nt, Artificial Sequence
  Description of Artificial Sequence: Synthetic oligonucleotide
  Antisense strand to SEQ ID NO: 1218852
uuaccuacagagaauggga

SEQ ID NO: 1218854 - RNA, 19 nt, Artificial Sequence
  Description of Artificial Sequence: Synthetic oligonucleotide
  Sense strand starting at position 3718 of SEQ ID NO: 917227
ccauucucuguagguaaau

SEQ ID NO: 1218855 - RNA, 19 nt, Artificial Sequence
  Description of Artificial Sequence: Synthetic oligonucleotide
  Antisense strand to SEQ ID NO: 1218854
auuuaccuacagagaaugg

SEQ ID NO: 1218856 - RNA, 19 nt, Artificial Sequence
  Description of Artificial Sequence: Synthetic oligonucleotide
  Sense strand starting at position 3859 of SEQ ID NO: 917227
ccucuacugcaugguauau

SEQ ID NO: 1218857 - RNA, 19 nt, Artificial Sequence
  Description of Artificial Sequence: Synthetic oligonucleotide
  Antisense strand to SEQ ID NO: 1218856
auauaccaugcaguagagg

SEQ ID NO: 1218858 - RNA, 19 nt, Artificial Sequence
  Description of Artificial Sequence: Synthetic oligonucleotide
  Sense strand starting at position 3955 of SEQ ID NO: 917227
ucgacuaacuccuugauua

SEQ ID NO: 1218859 - RNA, 19 nt, Artificial Sequence
  Description of Artificial Sequence: Synthetic oligonucleotide
  Antisense strand to SEQ ID NO: 1218858
uaaucaaggaguuagucga

SEQ ID NO: 1218860 - RNA, 19 nt, Artificial Sequence
  Description of Artificial Sequence: Synthetic oligonucleotide
  Sense strand starting at position 3956 of SEQ ID NO: 917227
cgacuaacuccuugauuau

SEQ ID NO: 1218861 - RNA, 19 nt, Artificial Sequence
  Description of Artificial Sequence: Synthetic oligonucleotide
  Antisense strand to SEQ ID NO: 1218860
auaaucaaggaguuagucg

SEQ ID NO: 1218862 - RNA, 19 nt, Artificial Sequence
  Description of Artificial Sequence: Synthetic oligonucleotide
  Sense strand starting at position 3965 of SEQ ID NO: 917228
ccuugauuaucaguuguca

SEQ ID NO: 1218863 - RNA, 19 nt, Artificial Sequence
  Description of Artificial Sequence: Synthetic oligonucleotide
  Antisense strand to SEQ ID NO: 1218862
ugacaacugauaaucaagg

SEQ ID NO: 1218864 - RNA, 19 nt, Artificial Sequence
  Description of Artificial Sequence: Synthetic oligonucleotide
  Sense strand starting at position 190 of SEQ ID NO: 917228
ggcugcacacuauggaaau

SEQ ID NO: 1218865 - RNA, 19 nt, Artificial Sequence
  Description of Artificial Sequence: Synthetic oligonucleotide
  Antisense strand to SEQ ID NO: 1218864
auuuccauagugugcagcc

SEQ ID NO: 1218866 - RNA, 19 nt, Artificial Sequence
  Description of Artificial Sequence: Synthetic oligonucleotide
  Sense strand starting at position 219 of SEQ ID NO: 917228
agguuaucacuugauagcu

SEQ ID NO: 1218867 - RNA, 19 nt, Artificial Sequence
  Description of Artificial Sequence: Synthetic oligonucleotide
  Antisense strand to SEQ ID NO: 1218866
agcuaucaagugauaaccu

SEQ ID NO: 1218868 - RNA, 19 nt, Artificial Sequence
  Description of Artificial Sequence: Synthetic oligonucleotide
  Sense strand starting at position 431 of SEQ ID NO: 917228
uaguauacuuacuagagga

SEQ ID NO: 1218869 - RNA, 19 nt, Artificial Sequence
  Description of Artificial Sequence: Synthetic oligonucleotide
  Antisense strand to SEQ ID NO: 1218868
uccucuaguaaguauacua

SEQ ID NO: 1218870 - RNA, 19 nt, Artificial Sequence
  Description of Artificial Sequence: Synthetic oligonucleotide
  Sense strand starting at position 509 of SEQ ID NO: 917228
ugcauuaaguucuuaguag

SEQ ID NO: 1218871 - RNA, 19 nt, Artificial Sequence
  Description of Artificial Sequence: Synthetic oligonucleotide
  Antisense strand to SEQ ID NO: 1218870
cuacuaagaacuuaaugca

SEQ ID NO: 1218872 - RNA, 19 nt, Artificial Sequence
  Description of Artificial Sequence: Synthetic oligonucleotide
  Sense strand starting at position 516 of SEQ ID NO: 917228
aguucuuaguaguuaauga

SEQ ID NO: 1218873 - RNA, 19 nt, Artificial Sequence
  Description of Artificial Sequence: Synthetic oligonucleotide
  Antisense strand to SEQ ID NO: 1218872
ucauuaacuacuaagaacu

SEQ ID NO: 1218874 - RNA, 19 nt, Artificial Sequence
  Description of Artificial Sequence: Synthetic oligonucleotide
  Sense strand starting at position 517 of SEQ ID NO: 917228
guucuuaguaguuaaugau

SEQ ID NO: 1218875 - RNA, 19 nt, Artificial Sequence
  Description of Artificial Sequence: Synthetic oligonucleotide
  Antisense strand to SEQ ID NO: 1218874
aucauuaacuacuaagaac

SEQ ID NO: 1218876 - RNA, 19 nt, Artificial Sequence
  Description of Artificial Sequence: Synthetic oligonucleotide
  Sense strand starting at position 524 of SEQ ID NO: 917228
guaguuaaugauuaaagcu

SEQ ID NO: 1218877 - RNA, 19 nt, Artificial Sequence
  Description of Artificial Sequence: Synthetic oligonucleotide
  Antisense strand to SEQ ID NO: 1218876
agcuuuaaucauuaacuac

SEQ ID NO: 1218878 - RNA, 19 nt, Artificial Sequence
  Description of Artificial Sequence: Synthetic oligonucleotide
  Sense strand starting at position 577 of SEQ ID NO: 917228
uuccuaaacccguguaucu

SEQ ID NO: 1218879 - RNA, 19 nt, Artificial Sequence
  Description of Artificial Sequence: Synthetic oligonucleotide
  Antisense strand to SEQ ID NO: 1218878
agauacacggguuuaggaa

SEQ ID NO: 1218880 - RNA, 19 nt, Artificial Sequence
  Description of Artificial Sequence: Synthetic oligonucleotide
  Sense strand starting at position 607 of SEQ ID NO: 917228
acuggaaacuuguauuaua

SEQ ID NO: 1218881 - RNA, 19 nt, Artificial Sequence
  Description of Artificial Sequence: Synthetic oligonucleotide
  Antisense strand to SEQ ID NO: 1218880
uauaauacaaguuuccagu

SEQ ID NO: 1218882 - RNA, 19 nt, Artificial Sequence
  Description of Artificial Sequence: Synthetic oligonucleotide
  Sense strand starting at position 702 of SEQ ID NO: 917228
ucugcaauuccggaggcau

SEQ ID NO: 1218883 - RNA, 19 nt, Artificial Sequence
  Description of Artificial Sequence: Synthetic oligonucleotide
  Antisense strand to SEQ ID NO: 1218882
augccuccggaauugcaga

SEQ ID NO: 1218884 - RNA, 19 nt, Artificial Sequence
  Description of Artificial Sequence: Synthetic oligonucleotide
  Sense strand starting at position 704 of SEQ ID NO: 917228
ugcaauuccggaggcauuu

SEQ ID NO: 1218885 - RNA, 19 nt, Artificial Sequence
  Description of Artificial Sequence: Synthetic oligonucleotide
  Antisense strand to SEQ ID NO: 1218884
aaaugccuccggaauugca

SEQ ID NO: 1218886 - RNA, 19 nt, Artificial Sequence
  Description of Artificial Sequence: Synthetic oligonucleotide
  Sense strand starting at position 818 of SEQ ID NO: 917228
accaccuucuugguaguua

SEQ ID NO: 1218887 - RNA, 19 nt, Artificial Sequence
  Description of Artificial Sequence: Synthetic oligonucleotide
  Antisense strand to SEQ ID NO: 1218886
uaacuaccaagaagguggu

SEQ ID NO: 1218888 - RNA, 19 nt, Artificial Sequence
  Description of Artificial Sequence: Synthetic oligonucleotide
  Sense strand starting at position 822 of SEQ ID NO: 917228
ccuucuugguaguuauaau

SEQ ID NO: 1218889 - RNA, 19 nt, Artificial Sequence
  Description of Artificial Sequence: Synthetic oligonucleotide
  Antisense strand to SEQ ID NO: 1218888
auuauaacuaccaagaagg

SEQ ID NO: 1218890 - RNA, 19 nt, Artificial Sequence
  Description of Artificial Sequence: Synthetic oligonucleotide
  Sense strand starting at position 847 of SEQ ID NO: 917228
augucaucucauggacacu

SEQ ID NO: 1218891 - RNA, 19 nt, Artificial Sequence
  Description of Artificial Sequence: Synthetic oligonucleotide
  Antisense strand to SEQ ID NO: 1218890
aguguccaugagaugacau

SEQ ID NO: 1218892 - RNA, 19 nt, Artificial Sequence
  Description of Artificial Sequence: Synthetic oligonucleotide
  Sense strand starting at position 869 of SEQ ID NO: 917228
ggguuaaugguauaccuac

SEQ ID NO: 1218893 - RNA, 19 nt, Artificial Sequence
  Description of Artificial Sequence: Synthetic oligonucleotide
  Antisense strand to SEQ ID NO: 1218892
guagguauaccauuaaccc

SEQ ID NO: 1218894 - RNA, 19 nt, Artificial Sequence
  Description of Artificial Sequence: Synthetic oligonucleotide
  Sense strand starting at position 2014 of SEQ ID NO: 917228
ggcauugggcuggguuuaa

SEQ ID NO: 1218895 - RNA, 19 nt, Artificial Sequence
  Description of Artificial Sequence: Synthetic oligonucleotide
  Antisense strand to SEQ ID NO: 1218894
uuaaacccagcccaaugcc

SEQ ID NO: 1218896 - RNA, 19 nt, Artificial Sequence
  Description of Artificial Sequence: Synthetic oligonucleotide
  Sense strand starting at position 2218 of SEQ ID NO: 917228
ugagucucccgagacucaa

SEQ ID NO: 1218897 - RNA, 19 nt, Artificial Sequence
  Description of Artificial Sequence: Synthetic oligonucleotide
  Antisense strand to SEQ ID NO: 1218896
uugagucucgggagacuca

SEQ ID NO: 1218898 - RNA, 19 nt, Artificial Sequence
  Description of Artificial Sequence: Synthetic oligonucleotide
  Sense strand starting at position 2237 of SEQ ID NO: 917228
aguucuccugcagaauaga

SEQ ID NO: 1218899 - RNA, 19 nt, Artificial Sequence
  Description of Artificial Sequence: Synthetic oligonucleotide
  Antisense strand to SEQ ID NO: 1218898
ucuauucugcaggagaacu

SEQ ID NO: 1218900 - RNA, 19 nt, Artificial Sequence
  Description of Artificial Sequence: Synthetic oligonucleotide
  Sense strand starting at position 2250 of SEQ ID NO: 917228
aauagaagccgguaaccua

SEQ ID NO: 1218901 - RNA, 19 nt, Artificial Sequence
  Description of Artificial Sequence: Synthetic oligonucleotide
  Antisense strand to SEQ ID NO: 1218900
uagguuaccggcuucuauu

SEQ ID NO: 1218902 - RNA, 19 nt, Artificial Sequence
  Description of Artificial Sequence: Synthetic oligonucleotide
  Sense strand starting at position 2257 of SEQ ID NO: 917228
gccgguaaccuacaaucua

SEQ ID NO: 1218903 - RNA, 19 nt, Artificial Sequence
  Description of Artificial Sequence: Synthetic oligonucleotide
  Antisense strand to SEQ ID NO: 1218902
uagauuguagguuaccggc

SEQ ID NO: 1218904 - RNA, 19 nt, Artificial Sequence
  Description of Artificial Sequence: Synthetic oligonucleotide
  Sense strand starting at position 2304 of SEQ ID NO: 917228
gagugaaacugggaaacua

SEQ ID NO: 1218905 - RNA, 19 nt, Artificial Sequence
  Description of Artificial Sequence: Synthetic oligonucleotide
  Antisense strand to SEQ ID NO: 1218904
uaguuucccaguuucacuc

SEQ ID NO: 1218906 - RNA, 19 nt, Artificial Sequence
  Description of Artificial Sequence: Synthetic oligonucleotide
  Sense strand starting at position 2339 of SEQ ID NO: 917228
uguaaccuugcguuguauu

SEQ ID NO: 1218907 - RNA, 19 nt, Artificial Sequence
  Description of Artificial Sequence: Synthetic oligonucleotide
  Antisense strand to SEQ ID NO: 1218906
aauacaacgcaagguuaca

SEQ ID NO: 1218908 - RNA, 19 nt, Artificial Sequence
  Description of Artificial Sequence: Synthetic oligonucleotide
  Sense strand starting at position 2349 of SEQ ID NO: 917228
cguuguauuauagaauaug

SEQ ID NO: 1218909 - RNA, 19 nt, Artificial Sequence
  Description of Artificial Sequence: Synthetic oligonucleotide
  Antisense strand to SEQ ID NO: 1218908
cauauucuauaauacaacg

SEQ ID NO: 1218910 - RNA, 19 nt, Artificial Sequence
  Description of Artificial Sequence: Synthetic oligonucleotide
  Sense strand starting at position 2357 of SEQ ID NO: 917228
uauagaauaugacugaguu

SEQ ID NO: 1218911 - RNA, 19 nt, Artificial Sequence
  Description of Artificial Sequence: Synthetic oligonucleotide
  Antisense strand to SEQ ID NO: 1218910
aacucagucauauucuaua

SEQ ID NO: 1218912 - RNA, 19 nt, Artificial Sequence
  Description of Artificial Sequence: Synthetic oligonucleotide
  Sense strand starting at position 2423 of SEQ ID NO: 917228
auggcaguuucucuuccau

SEQ ID NO: 1218913 - RNA, 19 nt, Artificial Sequence
  Description of Artificial Sequence: Synthetic oligonucleotide
  Antisense strand to SEQ ID NO: 1218912
auggaagagaaacugccau

SEQ ID NO: 1218914 - RNA, 19 nt, Artificial Sequence
  Description of Artificial Sequence: Synthetic oligonucleotide
  Sense strand starting at position 2425 of SEQ ID NO: 917228
ggcaguuucucuuccauuc

SEQ ID NO: 1218915 - RNA, 19 nt, Artificial Sequence
  Description of Artificial Sequence: Synthetic oligonucleotide
  Antisense strand to SEQ ID NO: 1218914
gaauggaagagaaacugcc

SEQ ID NO: 1218916 - RNA, 19 nt, Artificial Sequence
  Description of Artificial Sequence: Synthetic oligonucleotide
  Sense strand starting at position 2735 of SEQ ID NO: 917228
gcgucuucucgcccucaaa

SEQ ID NO: 1218917 - RNA, 19 nt, Artificial Sequence
  Description of Artificial Sequence: Synthetic oligonucleotide
  Antisense strand to SEQ ID NO: 1218916
uuugagggcgagaagacgc

SEQ ID NO: 1218918 - RNA, 19 nt, Artificial Sequence
  Description of Artificial Sequence: Synthetic oligonucleotide
  Sense strand starting at position 3292 of SEQ ID NO: 917228
ggucaagauggugaaaguu

SEQ ID NO: 1218919 - RNA, 19 nt, Artificial Sequence
  Description of Artificial Sequence: Synthetic oligonucleotide
  Antisense strand to SEQ ID NO: 1218918
aacuuucaccaucuugacc

SEQ ID NO: 1218920 - RNA, 19 nt, Artificial Sequence
  Description of Artificial Sequence: Synthetic oligonucleotide
  Sense strand starting at position 3302 of SEQ ID NO: 917228
gugaaaguugccgagacuu

SEQ ID NO: 1218921 - RNA, 19 nt, Artificial Sequence
  Description of Artificial Sequence: Synthetic oligonucleotide
  Antisense strand to SEQ ID NO: 1218920
aagucucggcaacuuucac

SEQ ID NO: 1218922 - RNA, 19 nt, Artificial Sequence
  Description of Artificial Sequence: Synthetic oligonucleotide
  Sense strand starting at position 3304 of SEQ ID NO: 917228
gaaaguugccgagacuuga

SEQ ID NO: 1218923 - RNA, 19 nt, Artificial Sequence
  Description of Artificial Sequence: Synthetic oligonucleotide
  Antisense strand to SEQ ID NO: 1218922
ucaagucucggcaacuuuc

SEQ ID NO: 1218924 - RNA, 19 nt, Artificial Sequence
  Description of Artificial Sequence: Synthetic oligonucleotide
  Sense strand starting at position 3435 of SEQ ID NO: 917228
cgccuuaguagucagcuaa

SEQ ID NO: 1218925 - RNA, 19 nt, Artificial Sequence
  Description of Artificial Sequence: Synthetic oligonucleotide
  Antisense strand to SEQ ID NO: 1218924
uuagcugacuacuaaggcg

SEQ ID NO: 1218926 - RNA, 19 nt, Artificial Sequence
  Description of Artificial Sequence: Synthetic oligonucleotide
  Sense strand starting at position 3496 of SEQ ID NO: 917228
gagggcuucgccugaagac

SEQ ID NO: 1218927 - RNA, 19 nt, Artificial Sequence
  Description of Artificial Sequence: Synthetic oligonucleotide
  Antisense strand to SEQ ID NO: 1218926
gucuucaggcgaagcccuc

SEQ ID NO: 1218928 - RNA, 19 nt, Artificial Sequence
  Description of Artificial Sequence: Synthetic oligonucleotide
  Sense strand starting at position 3723 of SEQ ID NO: 917228
cuugcuuacguguuucuga

SEQ ID NO: 1218929 - RNA, 19 nt, Artificial Sequence
  Description of Artificial Sequence: Synthetic oligonucleotide
  Antisense strand to SEQ ID NO: 1218928
ucagaaacacguaagcaag

SEQ ID NO: 1218930 - RNA, 19 nt, Artificial Sequence
  Description of Artificial Sequence: Synthetic oligonucleotide
  Sense strand starting at position 3732 of SEQ ID NO: 917228
guguuucugaagcaugaga

SEQ ID NO: 1218931 - RNA, 19 nt, Artificial Sequence
  Description of Artificial Sequence: Synthetic oligonucleotide
  Antisense strand to SEQ ID NO: 1218930
ucucaugcuucagaaacac

SEQ ID NO: 1218932 - RNA, 19 nt, Artificial Sequence
  Description of Artificial Sequence: Synthetic oligonucleotide
  Sense strand starting at position 3798 of SEQ ID NO: 917228
gcgggcuuuaacguuaacu

SEQ ID NO: 1218933 - RNA, 19 nt, Artificial Sequence
  Description of Artificial Sequence: Synthetic oligonucleotide
  Antisense strand to SEQ ID NO: 1218932
aguuaacguuaaagcccgc

SEQ ID NO: 1218934 - RNA, 19 nt, Artificial Sequence
  Description of Artificial Sequence: Synthetic oligonucleotide
  Sense strand starting at position 3829 of SEQ ID NO: 917228
auacaagaagcuggguauu

SEQ ID NO: 1218935 - RNA, 19 nt, Artificial Sequence
  Description of Artificial Sequence: Synthetic oligonucleotide
  Antisense strand to SEQ ID NO: 1218934
aauacccagcuucuuguau

SEQ ID NO: 1218936 - RNA, 19 nt, Artificial Sequence
  Description of Artificial Sequence: Synthetic oligonucleotide
  Sense strand starting at position 3831 of SEQ ID NO: 917228
acaagaagcuggguauuaa

SEQ ID NO: 1218937 - RNA, 19 nt, Artificial Sequence
  Description of Artificial Sequence: Synthetic oligonucleotide
  Antisense strand to SEQ ID NO: 1218936
uuaauacccagcuucuugu

SEQ ID NO: 1218938 - RNA, 19 nt, Artificial Sequence
  Description of Artificial Sequence: Synthetic oligonucleotide
  Sense strand starting at position 3839 of SEQ ID NO: 917228
cuggguauuaagugucacu

SEQ ID NO: 1218939 - RNA, 19 nt, Artificial Sequence
  Description of Artificial Sequence: Synthetic oligonucleotide
  Antisense strand to SEQ ID NO: 1218938
agugacacuuaauacccag

SEQ ID NO: 1218940 - RNA, 19 nt, Artificial Sequence
  Description of Artificial Sequence: Synthetic oligonucleotide
  Sense strand starting at position 3881 of SEQ ID NO: 917228
cgcauuaaucuccgaggca

SEQ ID NO: 1218941 - RNA, 19 nt, Artificial Sequence
  Description of Artificial Sequence: Synthetic oligonucleotide
  Antisense strand to SEQ ID NO: 1218940
ugccucggagauuaaugcg

SEQ ID NO: 1218942 - RNA, 19 nt, Artificial Sequence
  Description of Artificial Sequence: Synthetic oligonucleotide
  Sense strand starting at position 3923 of SEQ ID NO: 917229
gggcguuccucgaccaguu

SEQ ID NO: 1218943 - RNA, 19 nt, Artificial Sequence
  Description of Artificial Sequence: Synthetic oligonucleotide
  Antisense strand to SEQ ID NO: 1218942
aacuggucgaggaacgccc

SEQ ID NO: 1218944 - RNA, 19 nt, Artificial Sequence
  Description of Artificial Sequence: Synthetic oligonucleotide
  Sense strand starting at position 84 of SEQ ID NO: 917229
uuacauaauagucgaguga

SEQ ID NO: 1218945 - RNA, 19 nt, Artificial Sequence
  Description of Artificial Sequence: Synthetic oligonucleotide
  Antisense strand to SEQ ID NO: 1218944
ucacucgacuauuauguaa

SEQ ID NO: 1218946 - RNA, 19 nt, Artificial Sequence
  Description of Artificial Sequence: Synthetic oligonucleotide
  Sense strand starting at position 88 of SEQ ID NO: 917229
auaauagucgagugaggua

SEQ ID NO: 1218947 - RNA, 19 nt, Artificial Sequence
  Description of Artificial Sequence: Synthetic oligonucleotide
  Antisense strand to SEQ ID NO: 1218946
uaccucacucgacuauuau

SEQ ID NO: 1218948 - RNA, 19 nt, Artificial Sequence
  Description of Artificial Sequence: Synthetic oligonucleotide
  Sense strand starting at position 227 of SEQ ID NO: 917229
uacagugaguucucagaag

SEQ ID NO: 1218949 - RNA, 19 nt, Artificial Sequence
  Description of Artificial Sequence: Synthetic oligonucleotide
  Antisense strand to SEQ ID NO: 1218948
cuucugagaacucacugua

SEQ ID NO: 1218950 - RNA, 19 nt, Artificial Sequence
  Description of Artificial Sequence: Synthetic oligonucleotide
  Sense strand starting at position 270 of SEQ ID NO: 917229
uuuaguaguuucuccaauc

SEQ ID NO: 1218951 - RNA, 19 nt, Artificial Sequence
  Description of Artificial Sequence: Synthetic oligonucleotide
  Antisense strand to SEQ ID NO: 1218950
gauuggagaaacuacuaaa

SEQ ID NO: 1218952 - RNA, 19 nt, Artificial Sequence
  Description of Artificial Sequence: Synthetic oligonucleotide
  Sense strand starting at position 271 of SEQ ID NO: 917229
uuaguaguuucuccaaucu

SEQ ID NO: 1218953 - RNA, 19 nt, Artificial Sequence
  Description of Artificial Sequence: Synthetic oligonucleotide
  Antisense strand to SEQ ID NO: 1218952
agauuggagaaacuacuaa

SEQ ID NO: 1218954 - RNA, 19 nt, Artificial Sequence
  Description of Artificial Sequence: Synthetic oligonucleotide
  Sense strand starting at position 292 of SEQ ID NO: 917229
uuggaacuauuacuuguua

SEQ ID NO: 1218955 - RNA, 19 nt, Artificial Sequence
  Description of Artificial Sequence: Synthetic oligonucleotide
  Antisense strand to SEQ ID NO: 1218954
uaacaaguaauaguuccaa

SEQ ID NO: 1218956 - RNA, 19 nt, Artificial Sequence
  Description of Artificial Sequence: Synthetic oligonucleotide
  Sense strand starting at position 300 of SEQ ID NO: 917229
auuacuuguuacuuggaaa

SEQ ID NO: 1218957 - RNA, 19 nt, Artificial Sequence
  Description of Artificial Sequence: Synthetic oligonucleotide
  Antisense strand to SEQ ID NO: 1218956
uuuccaaguaacaaguaau

SEQ ID NO: 1218958 - RNA, 19 nt, Artificial Sequence
  Description of Artificial Sequence: Synthetic oligonucleotide
  Sense strand starting at position 326 of SEQ ID NO: 917229
ucuaguuagucuucccacu

SEQ ID NO: 1218959 - RNA, 19 nt, Artificial Sequence
  Description of Artificial Sequence: Synthetic oligonucleotide
  Antisense strand to SEQ ID NO: 1218958
agugggaagacuaacuaga

SEQ ID NO: 1218960 - RNA, 19 nt, Artificial Sequence
  Description of Artificial Sequence: Synthetic oligonucleotide
  Sense strand starting at position 758 of SEQ ID NO: 917229
aaccacaucguuuggucaa

SEQ ID NO: 1218961 - RNA, 19 nt, Artificial Sequence
  Description of Artificial Sequence: Synthetic oligonucleotide
  Antisense strand to SEQ ID NO: 1218960
uugaccaaacgaugugguu

SEQ ID NO: 1218962 - RNA, 19 nt, Artificial Sequence
  Description of Artificial Sequence: Synthetic oligonucleotide
  Sense strand starting at position 807 of SEQ ID NO: 917229
aaaggcuaggcuuguaagu

SEQ ID NO: 1218963 - RNA, 19 nt, Artificial Sequence
  Description of Artificial Sequence: Synthetic oligonucleotide
  Antisense strand to SEQ ID NO: 1218962
acuuacaagccuagccuuu

SEQ ID NO: 1218964 - RNA, 19 nt, Artificial Sequence
  Description of Artificial Sequence: Synthetic oligonucleotide
  Sense strand starting at position 817 of SEQ ID NO: 917229
cuuguaagucaguaaguua

SEQ ID NO: 1218965 - RNA, 19 nt, Artificial Sequence
  Description of Artificial Sequence: Synthetic oligonucleotide
  Antisense strand to SEQ ID NO: 1218964
uaacuuacugacuuacaag

SEQ ID NO: 1218966 - RNA, 19 nt, Artificial Sequence
  Description of Artificial Sequence: Synthetic oligonucleotide
  Sense strand starting at position 1455 of SEQ ID NO: 917229
aggcgcucccucggagaaa

SEQ ID NO: 1218967 - RNA, 19 nt, Artificial Sequence
  Description of Artificial Sequence: Synthetic oligonucleotide
  Antisense strand to SEQ ID NO: 1218966
uuucuccgagggagcgccu

SEQ ID NO: 1218968 - RNA, 19 nt, Artificial Sequence
  Description of Artificial Sequence: Synthetic oligonucleotide
  Sense strand starting at position 2307 of SEQ ID NO: 917229
ucaggaaauccuugcagac

SEQ ID NO: 1218969 - RNA, 19 nt, Artificial Sequence
  Description of Artificial Sequence: Synthetic oligonucleotide
  Antisense strand to SEQ ID NO: 1218968
gucugcaaggauuuccuga

SEQ ID NO: 1218970 - RNA, 19 nt, Artificial Sequence
  Description of Artificial Sequence: Synthetic oligonucleotide
  Sense strand starting at position 2541 of SEQ ID NO: 917229
ucagacugucccgagaagu

SEQ ID NO: 1218971 - RNA, 19 nt, Artificial Sequence
  Description of Artificial Sequence: Synthetic oligonucleotide
  Antisense strand to SEQ ID NO: 1218970
acuucucgggacagucuga

SEQ ID NO: 1218972 - RNA, 19 nt, Artificial Sequence
  Description of Artificial Sequence: Synthetic oligonucleotide
  Sense strand starting at position 2718 of SEQ ID NO: 917229
gucauuuccucagucuucu

SEQ ID NO: 1218973 - RNA, 19 nt, Artificial Sequence
  Description of Artificial Sequence: Synthetic oligonucleotide
  Antisense strand to SEQ ID NO: 1218972
agaagacugaggaaaugac

SEQ ID NO: 1218974 - RNA, 19 nt, Artificial Sequence
  Description of Artificial Sequence: Synthetic oligonucleotide
  Sense strand starting at position 2730 of SEQ ID NO: 917229
gucuucugcuuccuagaag

SEQ ID NO: 1218975 - RNA, 19 nt, Artificial Sequence
  Description of Artificial Sequence: Synthetic oligonucleotide
  Antisense strand to SEQ ID NO: 1218974
cuucuaggaagcagaagac

SEQ ID NO: 1218976 - RNA, 19 nt, Artificial Sequence
  Description of Artificial Sequence: Synthetic oligonucleotide
  Sense strand starting at position 2733 of SEQ ID NO: 917229
uucugcuuccuagaagcaa

SEQ ID NO: 1218977 - RNA, 19 nt, Artificial Sequence
  Description of Artificial Sequence: Synthetic oligonucleotide
  Antisense strand to SEQ ID NO: 1218976
uugcuucuaggaagcagaa

SEQ ID NO: 1218978 - RNA, 19 nt, Artificial Sequence
  Description of Artificial Sequence: Synthetic oligonucleotide
  Sense strand starting at position 2781 of SEQ ID NO: 917229
aaagcugaggcgugaaacu

SEQ ID NO: 1218979 - RNA, 19 nt, Artificial Sequence
  Description of Artificial Sequence: Synthetic oligonucleotide
  Antisense strand to SEQ ID NO: 1218978
aguuucacgccucagcuuu

SEQ ID NO: 1218980 - RNA, 19 nt, Artificial Sequence
  Description of Artificial Sequence: Synthetic oligonucleotide
  Sense strand starting at position 2873 of SEQ ID NO: 917229
gcagcuugcuacucaagau

SEQ ID NO: 1218981 - RNA, 19 nt, Artificial Sequence
  Description of Artificial Sequence: Synthetic oligonucleotide
  Antisense strand to SEQ ID NO: 1218980
aucuugaguagcaagcugc

SEQ ID NO: 1218982 - RNA, 19 nt, Artificial Sequence
  Description of Artificial Sequence: Synthetic oligonucleotide
  Sense strand starting at position 2877 of SEQ ID NO: 917229
cuugcuacucaagaugagu

SEQ ID NO: 1218983 - RNA, 19 nt, Artificial Sequence
  Description of Artificial Sequence: Synthetic oligonucleotide
  Antisense strand to SEQ ID NO: 1218982
acucaucuugaguagcaag

SEQ ID NO: 1218984 - RNA, 19 nt, Artificial Sequence
  Description of Artificial Sequence: Synthetic oligonucleotide
  Sense strand starting at position 2879 of SEQ ID NO: 917229
ugcuacucaagaugaguga

SEQ ID NO: 1218985 - RNA, 19 nt, Artificial Sequence
  Description of Artificial Sequence: Synthetic oligonucleotide
  Antisense strand to SEQ ID NO: 1218984
ucacucaucuugaguagca

SEQ ID NO: 1218986 - RNA, 19 nt, Artificial Sequence
  Description of Artificial Sequence: Synthetic oligonucleotide
  Sense strand starting at position 2892 of SEQ ID NO: 917229
gagugacucugaccacaac

SEQ ID NO: 1218987 - RNA, 19 nt, Artificial Sequence
  Description of Artificial Sequence: Synthetic oligonucleotide
  Antisense strand to SEQ ID NO: 1218986
guuguggucagagucacuc

SEQ ID NO: 1218988 - RNA, 19 nt, Artificial Sequence
  Description of Artificial Sequence: Synthetic oligonucleotide
  Sense strand starting at position 2903 of SEQ ID NO: 917229
accacaaccggcugaaauu

SEQ ID NO: 1218989 - RNA, 19 nt, Artificial Sequence
  Description of Artificial Sequence: Synthetic oligonucleotide
  Antisense strand to SEQ ID NO: 1218988
aauuucagccgguuguggu

SEQ ID NO: 1218990 - RNA, 19 nt, Artificial Sequence
  Description of Artificial Sequence: Synthetic oligonucleotide
  Sense strand starting at position 2904 of SEQ ID NO: 917229
ccacaaccggcugaaauua

SEQ ID NO: 1218991 - RNA, 19 nt, Artificial Sequence
  Description of Artificial Sequence: Synthetic oligonucleotide
  Antisense strand to SEQ ID NO: 1218990
uaauuucagccgguugugg

SEQ ID NO: 1218992 - RNA, 19 nt, Artificial Sequence
  Description of Artificial Sequence: Synthetic oligonucleotide
  Sense strand starting at position 2929 of SEQ ID NO: 917229
ggcccuagaucauuugcua

SEQ ID NO: 1218993 - RNA, 19 nt, Artificial Sequence
  Description of Artificial Sequence: Synthetic oligonucleotide
  Antisense strand to SEQ ID NO: 1218992
uagcaaaugaucuagggcc

SEQ ID NO: 1218994 - RNA, 19 nt, Artificial Sequence
  Description of Artificial Sequence: Synthetic oligonucleotide
  Sense strand starting at position 2950 of SEQ ID NO: 917229
acacuaauuccacguuguu

SEQ ID NO: 1218995 - RNA, 19 nt, Artificial Sequence
  Description of Artificial Sequence: Synthetic oligonucleotide
  Antisense strand to SEQ ID NO: 1218994
aacaacguggaauuagugu

SEQ ID NO: 1218996 - RNA, 19 nt, Artificial Sequence
  Description of Artificial Sequence: Synthetic oligonucleotide
  Sense strand starting at position 2959 of SEQ ID NO: 917229
ccacguuguuccucaauua

SEQ ID NO: 1218997 - RNA, 19 nt, Artificial Sequence
  Description of Artificial Sequence: Synthetic oligonucleotide
  Antisense strand to SEQ ID NO: 1218996
uaauugaggaacaacgugg

SEQ ID NO: 1218998 - RNA, 19 nt, Artificial Sequence
  Description of Artificial Sequence: Synthetic oligonucleotide
  Sense strand starting at position 3027 of SEQ ID NO: 917229
ccagucuugucucuguaaa

SEQ ID NO: 1218999 - RNA, 19 nt, Artificial Sequence
  Description of Artificial Sequence: Synthetic oligonucleotide
  Antisense strand to SEQ ID NO: 1218998
uuuacagagacaagacugg

SEQ ID NO: 1219000 - RNA, 19 nt, Artificial Sequence
  Description of Artificial Sequence: Synthetic oligonucleotide
  Sense strand starting at position 3029 of SEQ ID NO: 917229
agucuugucucuguaaaua

SEQ ID NO: 1219001 - RNA, 19 nt, Artificial Sequence
  Description of Artificial Sequence: Synthetic oligonucleotide
  Antisense strand to SEQ ID NO: 1219000
uauuuacagagacaagacu

SEQ ID NO: 1219002 - RNA, 19 nt, Artificial Sequence
  Description of Artificial Sequence: Synthetic oligonucleotide
  Sense strand starting at position 3068 of SEQ ID NO: 917229
ccuauuggaacccgucaga

SEQ ID NO: 1219003 - RNA, 19 nt, Artificial Sequence
  Description of Artificial Sequence: Synthetic oligonucleotide
  Antisense strand to SEQ ID NO: 1219002
ucugacggguuccaauagg

SEQ ID NO: 1219004 - RNA, 19 nt, Artificial Sequence
  Description of Artificial Sequence: Synthetic oligonucleotide
  Sense strand starting at position 3077 of SEQ ID NO: 917229
acccgucagagggauguaa

SEQ ID NO: 1219005 - RNA, 19 nt, Artificial Sequence
  Description of Artificial Sequence: Synthetic oligonucleotide
  Antisense strand to SEQ ID NO: 1219004
uuacaucccucugacgggu

SEQ ID NO: 1219006 - RNA, 19 nt, Artificial Sequence
  Description of Artificial Sequence: Synthetic oligonucleotide
  Sense strand starting at position 3079 of SEQ ID NO: 917229
ccgucagagggauguaaua

SEQ ID NO: 1219007 - RNA, 19 nt, Artificial Sequence
  Description of Artificial Sequence: Synthetic oligonucleotide
  Antisense strand to SEQ ID NO: 1219006
uauuacaucccucugacgg

SEQ ID NO: 1219008 - RNA, 19 nt, Artificial Sequence
  Description of Artificial Sequence: Synthetic oligonucleotide
  Sense strand starting at position 3126 of SEQ ID NO: 917229
gccagagacucuuccugaa

SEQ ID NO: 1219009 - RNA, 19 nt, Artificial Sequence
  Description of Artificial Sequence: Synthetic oligonucleotide
  Antisense strand to SEQ ID NO: 1219008
uucaggaagagucucuggc

SEQ ID NO: 1219010 - RNA, 19 nt, Artificial Sequence
  Description of Artificial Sequence: Synthetic oligonucleotide
  Sense strand starting at position 3320 of SEQ ID NO: 917229
ggaagacugccggagucau

SEQ ID NO: 1219011 - RNA, 19 nt, Artificial Sequence
  Description of Artificial Sequence: Synthetic oligonucleotide
  Antisense strand to SEQ ID NO: 1219010
augacuccggcagucuucc

SEQ ID NO: 1219012 - RNA, 19 nt, Artificial Sequence
  Description of Artificial Sequence: Synthetic oligonucleotide
  Sense strand starting at position 3768 of SEQ ID NO: 917229
gguguuuaguccuccauca

SEQ ID NO: 1219013 - RNA, 19 nt, Artificial Sequence
  Description of Artificial Sequence: Synthetic oligonucleotide
  Antisense strand to SEQ ID NO: 1219012
ugauggaggacuaaacacc

SEQ ID NO: 1219014 - RNA, 19 nt, Artificial Sequence
  Description of Artificial Sequence: Synthetic oligonucleotide
  Sense strand starting at position 3778 of SEQ ID NO: 917229
ccuccaucagcucagagaa

SEQ ID NO: 1219015 - RNA, 19 nt, Artificial Sequence
  Description of Artificial Sequence: Synthetic oligonucleotide
  Antisense strand to SEQ ID NO: 1219014
uucucugagcugauggagg

SEQ ID NO: 1219016 - RNA, 19 nt, Artificial Sequence
  Description of Artificial Sequence: Synthetic oligonucleotide
  Sense strand starting at position 3804 of SEQ ID NO: 917229
cacauuuauuggcagggaa

SEQ ID NO: 1219017 - RNA, 19 nt, Artificial Sequence
  Description of Artificial Sequence: Synthetic oligonucleotide
  Antisense strand to SEQ ID NO: 1219016
uucccugccaauaaaugug

SEQ ID NO: 1219018 - RNA, 19 nt, Artificial Sequence
  Description of Artificial Sequence: Synthetic oligonucleotide
  Sense strand starting at position 3867 of SEQ ID NO: 917229
gggaaagugguccauagua

SEQ ID NO: 1219019 - RNA, 19 nt, Artificial Sequence
  Description of Artificial Sequence: Synthetic oligonucleotide
  Antisense strand to SEQ ID NO: 1219018
uacuauggaccacuuuccc

SEQ ID NO: 1219020 - RNA, 19 nt, Artificial Sequence
  Description of Artificial Sequence: Synthetic oligonucleotide
  Sense strand starting at position 3877 of SEQ ID NO: 917229
uccauaguaccauguacaa

SEQ ID NO: 1219021 - RNA, 19 nt, Artificial Sequence
  Description of Artificial Sequence: Synthetic oligonucleotide
  Antisense strand to SEQ ID NO: 1219020
uuguacaugguacuaugga

SEQ ID NO: 1219022 - RNA, 19 nt, Artificial Sequence
  Description of Artificial Sequence: Synthetic oligonucleotide
  Sense strand starting at position 3897 of SEQ ID NO: 917229
gguuuaauuugcuaauaca

SEQ ID NO: 1219023 - RNA, 19 nt, Artificial Sequence
  Description of Artificial Sequence: Synthetic oligonucleotide
  Antisense strand to SEQ ID NO: 1219022
uguauuagcaaauuaaacc

SEQ ID NO: 1219024 - RNA, 19 nt, Artificial Sequence
  Description of Artificial Sequence: Synthetic oligonucleotide
  Sense strand starting at position 3897 of SEQ ID NO: 917230
gguuuaauuugcuaauaca

SEQ ID NO: 1219025 - RNA, 19 nt, Artificial Sequence
  Description of Artificial Sequence: Synthetic oligonucleotide
  Antisense strand to SEQ ID NO: 1219024
uguauuagcaaauuaaacc

SEQ ID NO: 1219026 - RNA, 19 nt, Artificial Sequence
  Description of Artificial Sequence: Synthetic oligonucleotide
  Sense strand starting at position 23 of SEQ ID NO: 917230
ugggcauaauccuuuauac

SEQ ID NO: 1219027 - RNA, 19 nt, Artificial Sequence
  Description of Artificial Sequence: Synthetic oligonucleotide
  Antisense strand to SEQ ID NO: 1219026
guauaaaggauuaugccca

SEQ ID NO: 1219028 - RNA, 19 nt, Artificial Sequence
  Description of Artificial Sequence: Synthetic oligonucleotide
  Sense strand starting at position 25 of SEQ ID NO: 917230
ggcauaauccuuuauacug

SEQ ID NO: 1219029 - RNA, 19 nt, Artificial Sequence
  Description of Artificial Sequence: Synthetic oligonucleotide
  Antisense strand to SEQ ID NO: 1219028
caguauaaaggauuaugcc

SEQ ID NO: 1219030 - RNA, 19 nt, Artificial Sequence
  Description of Artificial Sequence: Synthetic oligonucleotide
  Sense strand starting at position 43 of SEQ ID NO: 917230
gguguuuauguccaccaua

SEQ ID NO: 1219031 - RNA, 19 nt, Artificial Sequence
  Description of Artificial Sequence: Synthetic oligonucleotide
  Antisense strand to SEQ ID NO: 1219030
uaugguggacauaaacacc

SEQ ID NO: 1219032 - RNA, 19 nt, Artificial Sequence
  Description of Artificial Sequence: Synthetic oligonucleotide
  Sense strand starting at position 46 of SEQ ID NO: 917230
guuuauguccaccauauau

SEQ ID NO: 1219033 - RNA, 19 nt, Artificial Sequence
  Description of Artificial Sequence: Synthetic oligonucleotide
  Antisense strand to SEQ ID NO: 1219032
auauaugguggacauaaac

SEQ ID NO: 1219034 - RNA, 19 nt, Artificial Sequence
  Description of Artificial Sequence: Synthetic oligonucleotide
  Sense strand starting at position 128 of SEQ ID NO: 917230
cgugaacauaauggauaaa

SEQ ID NO: 1219035 - RNA, 19 nt, Artificial Sequence
  Description of Artificial Sequence: Synthetic oligonucleotide
  Antisense strand to SEQ ID NO: 1219034
uuuauccauuauguucacg

SEQ ID NO: 1219036 - RNA, 19 nt, Artificial Sequence
  Description of Artificial Sequence: Synthetic oligonucleotide
  Sense strand starting at position 281 of SEQ ID NO: 917230
gaugguuugguuuacauga

SEQ ID NO: 1219037 - RNA, 19 nt, Artificial Sequence
  Description of Artificial Sequence: Synthetic oligonucleotide
  Antisense strand to SEQ ID NO: 1219036
ucauguaaaccaaaccauc

SEQ ID NO: 1219038 - RNA, 19 nt, Artificial Sequence
  Description of Artificial Sequence: Synthetic oligonucleotide
  Sense strand starting at position 321 of SEQ ID NO: 917230
aauccauggcaucagaagu

SEQ ID NO: 1219039 - RNA, 19 nt, Artificial Sequence
  Description of Artificial Sequence: Synthetic oligonucleotide
  Antisense strand to SEQ ID NO: 1219038
acuucugaugccauggauu

SEQ ID NO: 1219040 - RNA, 19 nt, Artificial Sequence
  Description of Artificial Sequence: Synthetic oligonucleotide
  Sense strand starting at position 408 of SEQ ID NO: 917230
gucugaucgugguuauuug

SEQ ID NO: 1219041 - RNA, 19 nt, Artificial Sequence
  Description of Artificial Sequence: Synthetic oligonucleotide
  Antisense strand to SEQ ID NO: 1219040
caaauaaccacgaucagac

SEQ ID NO: 1219042 - RNA, 19 nt, Artificial Sequence
  Description of Artificial Sequence: Synthetic oligonucleotide
  Sense strand starting at position 416 of SEQ ID NO: 917230
gugguuauuugggcacgua

SEQ ID NO: 1219043 - RNA, 19 nt, Artificial Sequence
  Description of Artificial Sequence: Synthetic oligonucleotide
  Antisense strand to SEQ ID NO: 1219042
uacgugcccaaauaaccac

SEQ ID NO: 1219044 - RNA, 19 nt, Artificial Sequence
  Description of Artificial Sequence: Synthetic oligonucleotide
  Sense strand starting at position 419 of SEQ ID NO: 917230
guuauuugggcacguacau

SEQ ID NO: 1219045 - RNA, 19 nt, Artificial Sequence
  Description of Artificial Sequence: Synthetic oligonucleotide
  Antisense strand to SEQ ID NO: 1219044
auguacgugcccaaauaac

SEQ ID NO: 1219046 - RNA, 19 nt, Artificial Sequence
  Description of Artificial Sequence: Synthetic oligonucleotide
  Sense strand starting at position 450 of SEQ ID NO: 917230
augaaauuguacucuuaag

SEQ ID NO: 1219047 - RNA, 19 nt, Artificial Sequence
  Description of Artificial Sequence: Synthetic oligonucleotide
  Antisense strand to SEQ ID NO: 1219046
cuuaagaguacaauuucau

SEQ ID NO: 1219048 - RNA, 19 nt, Artificial Sequence
  Description of Artificial Sequence: Synthetic oligonucleotide
  Sense strand starting at position 475 of SEQ ID NO: 917230
gcauauuuacugugugcca

SEQ ID NO: 1219049 - RNA, 19 nt, Artificial Sequence
  Description of Artificial Sequence: Synthetic oligonucleotide
  Antisense strand to SEQ ID NO: 1219048
uggcacacaguaaauaugc

SEQ ID NO: 1219050 - RNA, 19 nt, Artificial Sequence
  Description of Artificial Sequence: Synthetic oligonucleotide
  Sense strand starting at position 477 of SEQ ID NO: 917230
auauuuacugugugccaau

SEQ ID NO: 1219051 - RNA, 19 nt, Artificial Sequence
  Description of Artificial Sequence: Synthetic oligonucleotide
  Antisense strand to SEQ ID NO: 1219050
auuggcacacaguaaauau

SEQ ID NO: 1219052 - RNA, 19 nt, Artificial Sequence
  Description of Artificial Sequence: Synthetic oligonucleotide
  Sense strand starting at position 593 of SEQ ID NO: 917230
aguauugaugcuuauaccu

SEQ ID NO: 1219053 - RNA, 19 nt, Artificial Sequence
  Description of Artificial Sequence: Synthetic oligonucleotide
  Antisense strand to SEQ ID NO: 1219052
agguauaagcaucaauacu

SEQ ID NO: 1219054 - RNA, 19 nt, Artificial Sequence
  Description of Artificial Sequence: Synthetic oligonucleotide
  Sense strand starting at position 598 of SEQ ID NO: 917230
ugaugcuuauaccuuuaga

SEQ ID NO: 1219055 - RNA, 19 nt, Artificial Sequence
  Description of Artificial Sequence: Synthetic oligonucleotide
  Antisense strand to SEQ ID NO: 1219054
ucuaaagguauaagcauca

SEQ ID NO: 1219056 - RNA, 19 nt, Artificial Sequence
  Description of Artificial Sequence: Synthetic oligonucleotide
  Sense strand starting at position 601 of SEQ ID NO: 917230
ugcuuauaccuuuagaaag

SEQ ID NO: 1219057 - RNA, 19 nt, Artificial Sequence
  Description of Artificial Sequence: Synthetic oligonucleotide
  Antisense strand to SEQ ID NO: 1219056
cuuucuaaagguauaagca

SEQ ID NO: 1219058 - RNA, 19 nt, Artificial Sequence
  Description of Artificial Sequence: Synthetic oligonucleotide
  Sense strand starting at position 854 of SEQ ID NO: 917230
uggauauaauuccugcacu

SEQ ID NO: 1219059 - RNA, 19 nt, Artificial Sequence
  Description of Artificial Sequence: Synthetic oligonucleotide
  Antisense strand to SEQ ID NO: 1219058
agugcaggaauuauaucca

SEQ ID NO: 1219060 - RNA, 19 nt, Artificial Sequence
  Description of Artificial Sequence: Synthetic oligonucleotide
  Sense strand starting at position 1210 of SEQ ID NO: 917230
ggguuuaugccaggauaag

SEQ ID NO: 1219061 - RNA, 19 nt, Artificial Sequence
  Description of Artificial Sequence: Synthetic oligonucleotide
  Antisense strand to SEQ ID NO: 1219060
cuuauccuggcauaaaccc

SEQ ID NO: 1219062 - RNA, 19 nt, Artificial Sequence
  Description of Artificial Sequence: Synthetic oligonucleotide
  Sense strand starting at position 1341 of SEQ ID NO: 917230
aucguuauugaggaugacu

SEQ ID NO: 1219063 - RNA, 19 nt, Artificial Sequence
  Description of Artificial Sequence: Synthetic oligonucleotide
  Antisense strand to SEQ ID NO: 1219062
agucauccucaauaacgau

SEQ ID NO: 1219064 - RNA, 19 nt, Artificial Sequence
  Description of Artificial Sequence: Synthetic oligonucleotide
  Sense strand starting at position 1390 of SEQ ID NO: 917230
ccaucagaguucccuccau

SEQ ID NO: 1219065 - RNA, 19 nt, Artificial Sequence
  Description of Artificial Sequence: Synthetic oligonucleotide
  Antisense strand to SEQ ID NO: 1219064
auggagggaacucugaugg

SEQ ID NO: 1219066 - RNA, 19 nt, Artificial Sequence
  Description of Artificial Sequence: Synthetic oligonucleotide
  Sense strand starting at position 1447 of SEQ ID NO: 917230
aggugucuacaguauccaa

SEQ ID NO: 1219067 - RNA, 19 nt, Artificial Sequence
  Description of Artificial Sequence: Synthetic oligonucleotide
  Antisense strand to SEQ ID NO: 1219066
uuggauacuguagacaccu

SEQ ID NO: 1219068 - RNA, 19 nt, Artificial Sequence
  Description of Artificial Sequence: Synthetic oligonucleotide
  Sense strand starting at position 2440 of SEQ ID NO: 917230
cgagcauuccauuaagaac

SEQ ID NO: 1219069 - RNA, 19 nt, Artificial Sequence
  Description of Artificial Sequence: Synthetic oligonucleotide
  Antisense strand to SEQ ID NO: 1219068
guucuuaauggaaugcucg

SEQ ID NO: 1219070 - RNA, 19 nt, Artificial Sequence
  Description of Artificial Sequence: Synthetic oligonucleotide
  Sense strand starting at position 2466 of SEQ ID NO: 917230
uucuuaauuguggacugau

SEQ ID NO: 1219071 - RNA, 19 nt, Artificial Sequence
  Description of Artificial Sequence: Synthetic oligonucleotide
  Antisense strand to SEQ ID NO: 1219070
aucaguccacaauuaagaa

SEQ ID NO: 1219072 - RNA, 19 nt, Artificial Sequence
  Description of Artificial Sequence: Synthetic oligonucleotide
  Sense strand starting at position 2479 of SEQ ID NO: 917230
acugauuuccuuugucucu

SEQ ID NO: 1219073 - RNA, 19 nt, Artificial Sequence
  Description of Artificial Sequence: Synthetic oligonucleotide
  Antisense strand to SEQ ID NO: 1219072
agagacaaaggaaaucagu

SEQ ID NO: 1219074 - RNA, 19 nt, Artificial Sequence
  Description of Artificial Sequence: Synthetic oligonucleotide
  Sense strand starting at position 2646 of SEQ ID NO: 917230
gaaucauccgcucaauagu

SEQ ID NO: 1219075 - RNA, 19 nt, Artificial Sequence
  Description of Artificial Sequence: Synthetic oligonucleotide
  Antisense strand to SEQ ID NO: 1219074
acuauugagcggaugauuc

SEQ ID NO: 1219076 - RNA, 19 nt, Artificial Sequence
  Description of Artificial Sequence: Synthetic oligonucleotide
  Sense strand starting at position 2715 of SEQ ID NO: 917230
uuugcaauaaguugaggau

SEQ ID NO: 1219077 - RNA, 19 nt, Artificial Sequence
  Description of Artificial Sequence: Synthetic oligonucleotide
  Antisense strand to SEQ ID NO: 1219076
auccucaacuuauugcaaa

SEQ ID NO: 1219078 - RNA, 19 nt, Artificial Sequence
  Description of Artificial Sequence: Synthetic oligonucleotide
  Sense strand starting at position 2716 of SEQ ID NO: 917230
uugcaauaaguugaggauu

SEQ ID NO: 1219079 - RNA, 19 nt, Artificial Sequence
  Description of Artificial Sequence: Synthetic oligonucleotide
  Antisense strand to SEQ ID NO: 1219078
aauccucaacuuauugcaa

SEQ ID NO: 1219080 - RNA, 19 nt, Artificial Sequence
  Description of Artificial Sequence: Synthetic oligonucleotide
  Sense strand starting at position 2950 of SEQ ID NO: 917230
uuagauguugucuacagua

SEQ ID NO: 1219081 - RNA, 19 nt, Artificial Sequence
  Description of Artificial Sequence: Synthetic oligonucleotide
  Antisense strand to SEQ ID NO: 1219080
uacuguagacaacaucuaa

SEQ ID NO: 1219082 - RNA, 19 nt, Artificial Sequence
  Description of Artificial Sequence: Synthetic oligonucleotide
  Sense strand starting at position 2952 of SEQ ID NO: 917230
agauguugucuacaguaca

SEQ ID NO: 1219083 - RNA, 19 nt, Artificial Sequence
  Description of Artificial Sequence: Synthetic oligonucleotide
  Antisense strand to SEQ ID NO: 1219082
uguacuguagacaacaucu

SEQ ID NO: 1219084 - RNA, 19 nt, Artificial Sequence
  Description of Artificial Sequence: Synthetic oligonucleotide
  Sense strand starting at position 2955 of SEQ ID NO: 917230
uguugucuacaguacaaua

SEQ ID NO: 1219085 - RNA, 19 nt, Artificial Sequence
  Description of Artificial Sequence: Synthetic oligonucleotide
  Antisense strand to SEQ ID NO: 1219084
uauuguacuguagacaaca

SEQ ID NO: 1219086 - RNA, 19 nt, Artificial Sequence
  Description of Artificial Sequence: Synthetic oligonucleotide
  Sense strand starting at position 2957 of SEQ ID NO: 917230
uugucuacaguacaauaau

SEQ ID NO: 1219087 - RNA, 19 nt, Artificial Sequence
  Description of Artificial Sequence: Synthetic oligonucleotide
  Antisense strand to SEQ ID NO: 1219086
auuauuguacuguagacaa

SEQ ID NO: 1219088 - RNA, 19 nt, Artificial Sequence
  Description of Artificial Sequence: Synthetic oligonucleotide
  Sense strand starting at position 3002 of SEQ ID NO: 917230
uuuagaagugucuaccaug

SEQ ID NO: 1219089 - RNA, 19 nt, Artificial Sequence
  Description of Artificial Sequence: Synthetic oligonucleotide
  Antisense strand to SEQ ID NO: 1219088
caugguagacacuucuaaa

SEQ ID NO: 1219090 - RNA, 19 nt, Artificial Sequence
  Description of Artificial Sequence: Synthetic oligonucleotide
  Sense strand starting at position 3086 of SEQ ID NO: 917230
uuccauuucuggccaugua

SEQ ID NO: 1219091 - RNA, 19 nt, Artificial Sequence
  Description of Artificial Sequence: Synthetic oligonucleotide
  Antisense strand to SEQ ID NO: 1219090
uacauggccagaaauggaa

SEQ ID NO: 1219092 - RNA, 19 nt, Artificial Sequence
  Description of Artificial Sequence: Synthetic oligonucleotide
  Sense strand starting at position 3152 of SEQ ID NO: 917230
uguugaaagcagcauuauu

SEQ ID NO: 1219093 - RNA, 19 nt, Artificial Sequence
  Description of Artificial Sequence: Synthetic oligonucleotide
  Antisense strand to SEQ ID NO: 1219092
aauaaugcugcuuucaaca

SEQ ID NO: 1219094 - RNA, 19 nt, Artificial Sequence
  Description of Artificial Sequence: Synthetic oligonucleotide
  Sense strand starting at position 3208 of SEQ ID NO: 917230
acagaugaaugauaaacaa

SEQ ID NO: 1219095 - RNA, 19 nt, Artificial Sequence
  Description of Artificial Sequence: Synthetic oligonucleotide
  Antisense strand to SEQ ID NO: 1219094
uuguuuaucauucaucugu

SEQ ID NO: 1219096 - RNA, 19 nt, Artificial Sequence
  Description of Artificial Sequence: Synthetic oligonucleotide
  Sense strand starting at position 3237 of SEQ ID NO: 917230
uauacauacgacugaguau

SEQ ID NO: 1219097 - RNA, 19 nt, Artificial Sequence
  Description of Artificial Sequence: Synthetic oligonucleotide
  Antisense strand to SEQ ID NO: 1219096
auacucagucguauguaua

SEQ ID NO: 1219098 - RNA, 19 nt, Artificial Sequence
  Description of Artificial Sequence: Synthetic oligonucleotide
  Sense strand starting at position 3431 of SEQ ID NO: 917230
ggagccaguguuuaaugga

SEQ ID NO: 1219099 - RNA, 19 nt, Artificial Sequence
  Description of Artificial Sequence: Synthetic oligonucleotide
  Antisense strand to SEQ ID NO: 1219098
uccauuaaacacuggcucc

SEQ ID NO: 1219100 - RNA, 19 nt, Artificial Sequence
  Description of Artificial Sequence: Synthetic oligonucleotide
  Sense strand starting at position 3467 of SEQ ID NO: 917230
gcaagaugagcagaguucu

SEQ ID NO: 1219101 - RNA, 19 nt, Artificial Sequence
  Description of Artificial Sequence: Synthetic oligonucleotide
  Antisense strand to SEQ ID NO: 1219100
agaacucugcucaucuugc

SEQ ID NO: 1219102 - RNA, 19 nt, Artificial Sequence
  Description of Artificial Sequence: Synthetic oligonucleotide
  Sense strand starting at position 3512 of SEQ ID NO: 917230
uguacuuaacgcuacuaaa

SEQ ID NO: 1219103 - RNA, 19 nt, Artificial Sequence
  Description of Artificial Sequence: Synthetic oligonucleotide
  Antisense strand to SEQ ID NO: 1219102
uuuaguagcguuaaguaca

SEQ ID NO: 1219104 - RNA, 19 nt, Artificial Sequence
  Description of Artificial Sequence: Synthetic oligonucleotide
  Sense strand starting at position 3960 of SEQ ID NO: 917231
ugucuaccuuaggucagaa

SEQ ID NO: 1219105 - RNA, 19 nt, Artificial Sequence
  Description of Artificial Sequence: Synthetic oligonucleotide
  Antisense strand to SEQ ID NO: 1219104
uucugaccuaagguagaca

SEQ ID NO: 1219106 - RNA, 19 nt, Artificial Sequence
  Description of Artificial Sequence: Synthetic oligonucleotide
  Sense strand starting at position 177 of SEQ ID NO: 917231
cacuaacuggugugauuag

SEQ ID NO: 1219107 - RNA, 19 nt, Artificial Sequence
  Description of Artificial Sequence: Synthetic oligonucleotide
  Antisense strand to SEQ ID NO: 1219106
cuaaucacaccaguuagug

SEQ ID NO: 1219108 - RNA, 19 nt, Artificial Sequence
  Description of Artificial Sequence: Synthetic oligonucleotide
  Sense strand starting at position 199 of SEQ ID NO: 917231
gcaagauuaguaggcuaca

SEQ ID NO: 1219109 - RNA, 19 nt, Artificial Sequence
  Description of Artificial Sequence: Synthetic oligonucleotide
  Antisense strand to SEQ ID NO: 1219108
uguagccuacuaaucuugc

SEQ ID NO: 1219110 - RNA, 19 nt, Artificial Sequence
  Description of Artificial Sequence: Synthetic oligonucleotide
  Sense strand starting at position 200 of SEQ ID NO: 917231
caagauuaguaggcuacaa

SEQ ID NO: 1219111 - RNA, 19 nt, Artificial Sequence
  Description of Artificial Sequence: Synthetic oligonucleotide
  Antisense strand to SEQ ID NO: 1219110
uuguagccuacuaaucuug

SEQ ID NO: 1219112 - RNA, 19 nt, Artificial Sequence
  Description of Artificial Sequence: Synthetic oligonucleotide
  Sense strand starting at position 298 of SEQ ID NO: 917231
aucugucucagugaguacu

SEQ ID NO: 1219113 - RNA, 19 nt, Artificial Sequence
  Description of Artificial Sequence: Synthetic oligonucleotide
  Antisense strand to SEQ ID NO: 1219112
aguacucacugagacagau

SEQ ID NO: 1219114 - RNA, 19 nt, Artificial Sequence
  Description of Artificial Sequence: Synthetic oligonucleotide
  Sense strand starting at position 415 of SEQ ID NO: 917231
agaguuaguaaauacgcaa

SEQ ID NO: 1219115 - RNA, 19 nt, Artificial Sequence
  Description of Artificial Sequence: Synthetic oligonucleotide
  Antisense strand to SEQ ID NO: 1219114
uugcguauuuacuaacucu

SEQ ID NO: 1219116 - RNA, 19 nt, Artificial Sequence
  Description of Artificial Sequence: Synthetic oligonucleotide
  Sense strand starting at position 539 of SEQ ID NO: 917231
ugguaacagcauggugaua

SEQ ID NO: 1219117 - RNA, 19 nt, Artificial Sequence
  Description of Artificial Sequence: Synthetic oligonucleotide
  Antisense strand to SEQ ID NO: 1219116
uaucaccaugcuguuacca

SEQ ID NO: 1219118 - RNA, 19 nt, Artificial Sequence
  Description of Artificial Sequence: Synthetic oligonucleotide
  Sense strand starting at position 756 of SEQ ID NO: 917231
uuuaauagauggucagaca

SEQ ID NO: 1219119 - RNA, 19 nt, Artificial Sequence
  Description of Artificial Sequence: Synthetic oligonucleotide
  Antisense strand to SEQ ID NO: 1219118
ugucugaccaucuauuaaa

SEQ ID NO: 1219120 - RNA, 19 nt, Artificial Sequence
  Description of Artificial Sequence: Synthetic oligonucleotide
  Sense strand starting at position 892 of SEQ ID NO: 917231
acgcuaacaguugaauaaa

SEQ ID NO: 1219121 - RNA, 19 nt, Artificial Sequence
  Description of Artificial Sequence: Synthetic oligonucleotide
  Antisense strand to SEQ ID NO: 1219120
uuuauucaacuguuagcgu

SEQ ID NO: 1219122 - RNA, 19 nt, Artificial Sequence
  Description of Artificial Sequence: Synthetic oligonucleotide
  Sense strand starting at position 957 of SEQ ID NO: 917231
gcaaucugacagcgaaauu

SEQ ID NO: 1219123 - RNA, 19 nt, Artificial Sequence
  Description of Artificial Sequence: Synthetic oligonucleotide
  Antisense strand to SEQ ID NO: 1219122
aauuucgcugucagauugc

SEQ ID NO: 1219124 - RNA, 19 nt, Artificial Sequence
  Description of Artificial Sequence: Synthetic oligonucleotide
  Sense strand starting at position 2280 of SEQ ID NO: 917231
aguggaguuaauggagguu

SEQ ID NO: 1219125 - RNA, 19 nt, Artificial Sequence
  Description of Artificial Sequence: Synthetic oligonucleotide
  Antisense strand to SEQ ID NO: 1219124
aaccuccauuaacuccacu

SEQ ID NO: 1219126 - RNA, 19 nt, Artificial Sequence
  Description of Artificial Sequence: Synthetic oligonucleotide
  Sense strand starting at position 2429 of SEQ ID NO: 917231
cuaggaagccucugaaaug

SEQ ID NO: 1219127 - RNA, 19 nt, Artificial Sequence
  Description of Artificial Sequence: Synthetic oligonucleotide
  Antisense strand to SEQ ID NO: 1219126
cauuucagaggcuuccuag

SEQ ID NO: 1219128 - RNA, 19 nt, Artificial Sequence
  Description of Artificial Sequence: Synthetic oligonucleotide
  Sense strand starting at position 2440 of SEQ ID NO: 917231
cugaaaugggcuuggaagu

SEQ ID NO: 1219129 - RNA, 19 nt, Artificial Sequence
  Description of Artificial Sequence: Synthetic oligonucleotide
  Antisense strand to SEQ ID NO: 1219128
acuuccaagcccauuucag

SEQ ID NO: 1219130 - RNA, 19 nt, Artificial Sequence
  Description of Artificial Sequence: Synthetic oligonucleotide
  Sense strand starting at position 2441 of SEQ ID NO: 917231
ugaaaugggcuuggaaguu

SEQ ID NO: 1219131 - RNA, 19 nt, Artificial Sequence
  Description of Artificial Sequence: Synthetic oligonucleotide
  Antisense strand to SEQ ID NO: 1219130
aacuuccaagcccauuuca

SEQ ID NO: 1219132 - RNA, 19 nt, Artificial Sequence
  Description of Artificial Sequence: Synthetic oligonucleotide
  Sense strand starting at position 2453 of SEQ ID NO: 917231
ggaaguuucuaaucccaaa

SEQ ID NO: 1219133 - RNA, 19 nt, Artificial Sequence
  Description of Artificial Sequence: Synthetic oligonucleotide
  Antisense strand to SEQ ID NO: 1219132
uuugggauuagaaacuucc

SEQ ID NO: 1219134 - RNA, 19 nt, Artificial Sequence
  Description of Artificial Sequence: Synthetic oligonucleotide
  Sense strand starting at position 2668 of SEQ ID NO: 917231
gcaauaaugccugagggcu

SEQ ID NO: 1219135 - RNA, 19 nt, Artificial Sequence
  Description of Artificial Sequence: Synthetic oligonucleotide
  Antisense strand to SEQ ID NO: 1219134
agcccucaggcauuauugc

SEQ ID NO: 1219136 - RNA, 19 nt, Artificial Sequence
  Description of Artificial Sequence: Synthetic oligonucleotide
  Sense strand starting at position 2771 of SEQ ID NO: 917231
aauggugauggauguaaca

SEQ ID NO: 1219137 - RNA, 19 nt, Artificial Sequence
  Description of Artificial Sequence: Synthetic oligonucleotide
  Antisense strand to SEQ ID NO: 1219136
uguuacauccaucaccauu

SEQ ID NO: 1219138 - RNA, 19 nt, Artificial Sequence
  Description of Artificial Sequence: Synthetic oligonucleotide
  Sense strand starting at position 2885 of SEQ ID NO: 917231
gugauuauucucuauauuc

SEQ ID NO: 1219139 - RNA, 19 nt, Artificial Sequence
  Description of Artificial Sequence: Synthetic oligonucleotide
  Antisense strand to SEQ ID NO: 1219138
gaauauagagaauaaucac

SEQ ID NO: 1219140 - RNA, 19 nt, Artificial Sequence
  Description of Artificial Sequence: Synthetic oligonucleotide
  Sense strand starting at position 2935 of SEQ ID NO: 917231
guugauaacugacucucaa

SEQ ID NO: 1219141 - RNA, 19 nt, Artificial Sequence
  Description of Artificial Sequence: Synthetic oligonucleotide
  Antisense strand to SEQ ID NO: 1219140
uugagagucaguuaucaac

SEQ ID NO: 1219142 - RNA, 19 nt, Artificial Sequence
  Description of Artificial Sequence: Synthetic oligonucleotide
  Sense strand starting at position 2954 of SEQ ID NO: 917231
accgauaucuuggccauac

SEQ ID NO: 1219143 - RNA, 19 nt, Artificial Sequence
  Description of Artificial Sequence: Synthetic oligonucleotide
  Antisense strand to SEQ ID NO: 1219142
guauggccaagauaucggu

SEQ ID NO: 1219144 - RNA, 19 nt, Artificial Sequence
  Description of Artificial Sequence: Synthetic oligonucleotide
  Sense strand starting at position 2973 of SEQ ID NO: 917231
guuuaagucccagaggauu

SEQ ID NO: 1219145 - RNA, 19 nt, Artificial Sequence
  Description of Artificial Sequence: Synthetic oligonucleotide
  Antisense strand to SEQ ID NO: 1219144
aauccucugggacuuaaac

SEQ ID NO: 1219146 - RNA, 19 nt, Artificial Sequence
  Description of Artificial Sequence: Synthetic oligonucleotide
  Sense strand starting at position 3188 of SEQ ID NO: 917231
gcuccaggugaagauugau

SEQ ID NO: 1219147 - RNA, 19 nt, Artificial Sequence
  Description of Artificial Sequence: Synthetic oligonucleotide
  Antisense strand to SEQ ID NO: 1219146
aucaaucuucaccuggagc

SEQ ID NO: 1219148 - RNA, 19 nt, Artificial Sequence
  Description of Artificial Sequence: Synthetic oligonucleotide
  Sense strand starting at position 3196 of SEQ ID NO: 917231
ugaagauugaugggauguu

SEQ ID NO: 1219149 - RNA, 19 nt, Artificial Sequence
  Description of Artificial Sequence: Synthetic oligonucleotide
  Antisense strand to SEQ ID NO: 1219148
aacaucccaucaaucuuca

SEQ ID NO: 1219150 - RNA, 19 nt, Artificial Sequence
  Description of Artificial Sequence: Synthetic oligonucleotide
  Sense strand starting at position 3307 of SEQ ID NO: 917231
agaaguucuuucccuguga

SEQ ID NO: 1219151 - RNA, 19 nt, Artificial Sequence
  Description of Artificial Sequence: Synthetic oligonucleotide
  Antisense strand to SEQ ID NO: 1219150
ucacagggaaagaacuucu

SEQ ID NO: 1219152 - RNA, 19 nt, Artificial Sequence
  Description of Artificial Sequence: Synthetic oligonucleotide
  Sense strand starting at position 3308 of SEQ ID NO: 917231
gaaguucuuucccugugag

SEQ ID NO: 1219153 - RNA, 19 nt, Artificial Sequence
  Description of Artificial Sequence: Synthetic oligonucleotide
  Antisense strand to SEQ ID NO: 1219152
cucacagggaaagaacuuc

SEQ ID NO: 1219154 - RNA, 19 nt, Artificial Sequence
  Description of Artificial Sequence: Synthetic oligonucleotide
  Sense strand starting at position 3309 of SEQ ID NO: 917231
aaguucuuucccugugaga

SEQ ID NO: 1219155 - RNA, 19 nt, Artificial Sequence
  Description of Artificial Sequence: Synthetic oligonucleotide
  Antisense strand to SEQ ID NO: 1219154
ucucacagggaaagaacuu

SEQ ID NO: 1219156 - RNA, 19 nt, Artificial Sequence
  Description of Artificial Sequence: Synthetic oligonucleotide
  Sense strand starting at position 3311 of SEQ ID NO: 917231
guucuuucccugugagaga

SEQ ID NO: 1219157 - RNA, 19 nt, Artificial Sequence
  Description of Artificial Sequence: Synthetic oligonucleotide
  Antisense strand to SEQ ID NO: 1219156
ucucucacagggaaagaac

SEQ ID NO: 1219158 - RNA, 19 nt, Artificial Sequence
  Description of Artificial Sequence: Synthetic oligonucleotide
  Sense strand starting at position 3316 of SEQ ID NO: 917231
uucccugugagagauguuu

SEQ ID NO: 1219159 - RNA, 19 nt, Artificial Sequence
  Description of Artificial Sequence: Synthetic oligonucleotide
  Antisense strand to SEQ ID NO: 1219158
aaacaucucucacagggaa

SEQ ID NO: 1219160 - RNA, 19 nt, Artificial Sequence
  Description of Artificial Sequence: Synthetic oligonucleotide
  Sense strand starting at position 3482 of SEQ ID NO: 917231
aacuaugcuuggucugaga

SEQ ID NO: 1219161 - RNA, 19 nt, Artificial Sequence
  Description of Artificial Sequence: Synthetic oligonucleotide
  Antisense strand to SEQ ID NO: 1219160
ucucagaccaagcauaguu

SEQ ID NO: 1219162 - RNA, 19 nt, Artificial Sequence
  Description of Artificial Sequence: Synthetic oligonucleotide
  Sense strand starting at position 3501 of SEQ ID NO: 917231
cuaagauagugguuuccaa

SEQ ID NO: 1219163 - RNA, 19 nt, Artificial Sequence
  Description of Artificial Sequence: Synthetic oligonucleotide
  Antisense strand to SEQ ID NO: 1219162
uuggaaaccacuaucuuag

SEQ ID NO: 1219164 - RNA, 19 nt, Artificial Sequence
  Description of Artificial Sequence: Synthetic oligonucleotide
  Sense strand starting at position 3608 of SEQ ID NO: 917231
uucugauuccuuuguccag

SEQ ID NO: 1219165 - RNA, 19 nt, Artificial Sequence
  Description of Artificial Sequence: Synthetic oligonucleotide
  Antisense strand to SEQ ID NO: 1219164
cuggacaaaggaaucagaa

SEQ ID NO: 1219166 - RNA, 19 nt, Artificial Sequence
  Description of Artificial Sequence: Synthetic oligonucleotide
  Sense strand starting at position 3679 of SEQ ID NO: 917231
gggacaugccuacauguaa

SEQ ID NO: 1219167 - RNA, 19 nt, Artificial Sequence
  Description of Artificial Sequence: Synthetic oligonucleotide
  Antisense strand to SEQ ID NO: 1219166
uuacauguaggcauguccc

SEQ ID NO: 1219168 - RNA, 19 nt, Artificial Sequence
  Description of Artificial Sequence: Synthetic oligonucleotide
  Sense strand starting at position 3706 of SEQ ID NO: 917231
uaaagaagaucagcuguuu

SEQ ID NO: 1219169 - RNA, 19 nt, Artificial Sequence
  Description of Artificial Sequence: Synthetic oligonucleotide
  Antisense strand to SEQ ID NO: 1219168
aaacagcugaucuucuuua

SEQ ID NO: 1219170 - RNA, 19 nt, Artificial Sequence
  Description of Artificial Sequence: Synthetic oligonucleotide
  Sense strand starting at position 3768 of SEQ ID NO: 917231
uagagauuguagucaauaa

SEQ ID NO: 1219171 - RNA, 19 nt, Artificial Sequence
  Description of Artificial Sequence: Synthetic oligonucleotide
  Antisense strand to SEQ ID NO: 1219170
uuauugacuacaaucucua

SEQ ID NO: 1219172 - RNA, 19 nt, Artificial Sequence
  Description of Artificial Sequence: Synthetic oligonucleotide
  Sense strand starting at position 3883 of SEQ ID NO: 917231
caguaugaguucucuggga

SEQ ID NO: 1219173 - RNA, 19 nt, Artificial Sequence
  Description of Artificial Sequence: Synthetic oligonucleotide
  Antisense strand to SEQ ID NO: 1219172
ucccagagaacucauacug

SEQ ID NO: 1219174 - RNA, 19 nt, Artificial Sequence
  Description of Artificial Sequence: Synthetic oligonucleotide
  Sense strand starting at position 3885 of SEQ ID NO: 917231
guaugaguucucugggaac

SEQ ID NO: 1219175 - RNA, 19 nt, Artificial Sequence
  Description of Artificial Sequence: Synthetic oligonucleotide
  Antisense strand to SEQ ID NO: 1219174
guucccagagaacucauac

SEQ ID NO: 1219176 - RNA, 19 nt, Artificial Sequence
  Description of Artificial Sequence: Synthetic oligonucleotide
  Sense strand starting at position 3887 of SEQ ID NO: 917231
augaguucucugggaacag

SEQ ID NO: 1219177 - RNA, 19 nt, Artificial Sequence
  Description of Artificial Sequence: Synthetic oligonucleotide
  Antisense strand to SEQ ID NO: 1219176
cuguucccagagaacucau

SEQ ID NO: 1219178 - RNA, 19 nt, Artificial Sequence
  Description of Artificial Sequence: Synthetic oligonucleotide
  Sense strand starting at position 3914 of SEQ ID NO: 917231
ucaagaaauuauguuggcu

SEQ ID NO: 1219179 - RNA, 19 nt, Artificial Sequence
  Description of Artificial Sequence: Synthetic oligonucleotide
  Antisense strand to SEQ ID NO: 1219178
agccaacauaauuucuuga

SEQ ID NO: 1219180 - RNA, 19 nt, Artificial Sequence
  Description of Artificial Sequence: Synthetic oligonucleotide
  Sense strand starting at position 3918 of SEQ ID NO: 917231
gaaauuauguuggcuuuga

SEQ ID NO: 1219181 - RNA, 19 nt, Artificial Sequence
  Description of Artificial Sequence: Synthetic oligonucleotide
  Antisense strand to SEQ ID NO: 1219180
ucaaagccaacauaauuuc

SEQ ID NO: 1219182 - RNA, 19 nt, Artificial Sequence
  Description of Artificial Sequence: Synthetic oligonucleotide
  Sense strand starting at position 3919 of SEQ ID NO: 917231
aaauuauguuggcuuugaa

SEQ ID NO: 1219183 - RNA, 19 nt, Artificial Sequence
  Description of Artificial Sequence: Synthetic oligonucleotide
  Antisense strand to SEQ ID NO: 1219182
uucaaagccaacauaauuu

SEQ ID NO: 1219184 - RNA, 19 nt, Artificial Sequence
  Description of Artificial Sequence: Synthetic oligonucleotide
  Sense strand starting at position 3922 of SEQ ID NO: 917232
uuauguuggcuuugaacaa

SEQ ID NO: 1219185 - RNA, 19 nt, Artificial Sequence
  Description of Artificial Sequence: Synthetic oligonucleotide
  Antisense strand to SEQ ID NO: 1219184
uuguucaaagccaacauaa

SEQ ID NO: 1219186 - RNA, 19 nt, Artificial Sequence
  Description of Artificial Sequence: Synthetic oligonucleotide
  Sense strand starting at position 3 of SEQ ID NO: 917232
uggaaaucaugugcauauc

SEQ ID NO: 1219187 - RNA, 19 nt, Artificial Sequence
  Description of Artificial Sequence: Synthetic oligonucleotide
  Antisense strand to SEQ ID NO: 1219186
gauaugcacaugauuucca

SEQ ID NO: 1219188 - RNA, 19 nt, Artificial Sequence
  Description of Artificial Sequence: Synthetic oligonucleotide
  Sense strand starting at position 315 of SEQ ID NO: 917232
aaggaugucucagcccuua

SEQ ID NO: 1219189 - RNA, 19 nt, Artificial Sequence
  Description of Artificial Sequence: Synthetic oligonucleotide
  Antisense strand to SEQ ID NO: 1219188
uaagggcugagacauccuu

SEQ ID NO: 1219190 - RNA, 19 nt, Artificial Sequence
  Description of Artificial Sequence: Synthetic oligonucleotide
  Sense strand starting at position 320 of SEQ ID NO: 917232
ugucucagcccuuagcuau

SEQ ID NO: 1219191 - RNA, 19 nt, Artificial Sequence
  Description of Artificial Sequence: Synthetic oligonucleotide
  Antisense strand to SEQ ID NO: 1219190
auagcuaagggcugagaca

SEQ ID NO: 1219192 - RNA, 19 nt, Artificial Sequence
  Description of Artificial Sequence: Synthetic oligonucleotide
  Sense strand starting at position 405 of SEQ ID NO: 917232
guagaaaugugacuaguaa

SEQ ID NO: 1219193 - RNA, 19 nt, Artificial Sequence
  Description of Artificial Sequence: Synthetic oligonucleotide
  Antisense strand to SEQ ID NO: 1219192
uuacuagucacauuucuac

SEQ ID NO: 1219194 - RNA, 19 nt, Artificial Sequence
  Description of Artificial Sequence: Synthetic oligonucleotide
  Sense strand starting at position 409 of SEQ ID NO: 917232
aaaugugacuaguaaagag

SEQ ID NO: 1219195 - RNA, 19 nt, Artificial Sequence
  Description of Artificial Sequence: Synthetic oligonucleotide
  Antisense strand to SEQ ID NO: 1219194
cucuuuacuagucacauuu

SEQ ID NO: 1219196 - RNA, 19 nt, Artificial Sequence
  Description of Artificial Sequence: Synthetic oligonucleotide
  Sense strand starting at position 419 of SEQ ID NO: 917232
aguaaagaguaaucauuac

SEQ ID NO: 1219197 - RNA, 19 nt, Artificial Sequence
  Description of Artificial Sequence: Synthetic oligonucleotide
  Antisense strand to SEQ ID NO: 1219196
guaaugauuacucuuuacu

SEQ ID NO: 1219198 - RNA, 19 nt, Artificial Sequence
  Description of Artificial Sequence: Synthetic oligonucleotide
  Sense strand starting at position 427 of SEQ ID NO: 917232
guaaucauuacaugugugu

SEQ ID NO: 1219199 - RNA, 19 nt, Artificial Sequence
  Description of Artificial Sequence: Synthetic oligonucleotide
  Antisense strand to SEQ ID NO: 1219198
acacacauguaaugauuac

SEQ ID NO: 1219200 - RNA, 19 nt, Artificial Sequence
  Description of Artificial Sequence: Synthetic oligonucleotide
  Sense strand starting at position 430 of SEQ ID NO: 917232
aucauuacauguguguuaa

SEQ ID NO: 1219201 - RNA, 19 nt, Artificial Sequence
  Description of Artificial Sequence: Synthetic oligonucleotide
  Antisense strand to SEQ ID NO: 1219200
uuaacacacauguaaugau

SEQ ID NO: 1219202 - RNA, 19 nt, Artificial Sequence
  Description of Artificial Sequence: Synthetic oligonucleotide
  Sense strand starting at position 431 of SEQ ID NO: 917232
ucauuacauguguguuaaa

SEQ ID NO: 1219203 - RNA, 19 nt, Artificial Sequence
  Description of Artificial Sequence: Synthetic oligonucleotide
  Antisense strand to SEQ ID NO: 1219202
uuuaacacacauguaauga

SEQ ID NO: 1219204 - RNA, 19 nt, Artificial Sequence
  Description of Artificial Sequence: Synthetic oligonucleotide
  Sense strand starting at position 510 of SEQ ID NO: 917232
agaagauaauccuagaaug

SEQ ID NO: 1219205 - RNA, 19 nt, Artificial Sequence
  Description of Artificial Sequence: Synthetic oligonucleotide
  Antisense strand to SEQ ID NO: 1219204
cauucuaggauuaucuucu

SEQ ID NO: 1219206 - RNA, 19 nt, Artificial Sequence
  Description of Artificial Sequence: Synthetic oligonucleotide
  Sense strand starting at position 580 of SEQ ID NO: 917232
uaugcuugacaguguuaac

SEQ ID NO: 1219207 - RNA, 19 nt, Artificial Sequence
  Description of Artificial Sequence: Synthetic oligonucleotide
  Antisense strand to SEQ ID NO: 1219206
guuaacacugucaagcaua

SEQ ID NO: 1219208 - RNA, 19 nt, Artificial Sequence
  Description of Artificial Sequence: Synthetic oligonucleotide
  Sense strand starting at position 694 of SEQ ID NO: 917232
guagccagccugggauaaa

SEQ ID NO: 1219209 - RNA, 19 nt, Artificial Sequence
  Description of Artificial Sequence: Synthetic oligonucleotide
  Antisense strand to SEQ ID NO: 1219208
uuuaucccaggcuggcuac

SEQ ID NO: 1219210 - RNA, 19 nt, Artificial Sequence
  Description of Artificial Sequence: Synthetic oligonucleotide
  Sense strand starting at position 874 of SEQ ID NO: 917232
cacuaacuggugugauuag

SEQ ID NO: 1219211 - RNA, 19 nt, Artificial Sequence
  Description of Artificial Sequence: Synthetic oligonucleotide
  Antisense strand to SEQ ID NO: 1219210
cuaaucacaccaguuagug

SEQ ID NO: 1219212 - RNA, 19 nt, Artificial Sequence
  Description of Artificial Sequence: Synthetic oligonucleotide
  Sense strand starting at position 896 of SEQ ID NO: 917232
gcaagauuaguaggcuaca

SEQ ID NO: 1219213 - RNA, 19 nt, Artificial Sequence
  Description of Artificial Sequence: Synthetic oligonucleotide
  Antisense strand to SEQ ID NO: 1219212
uguagccuacuaaucuugc

SEQ ID NO: 1219214 - RNA, 19 nt, Artificial Sequence
  Description of Artificial Sequence: Synthetic oligonucleotide
  Sense strand starting at position 897 of SEQ ID NO: 917232
caagauuaguaggcuacaa

SEQ ID NO: 1219215 - RNA, 19 nt, Artificial Sequence
  Description of Artificial Sequence: Synthetic oligonucleotide
  Antisense strand to SEQ ID NO: 1219214
uuguagccuacuaaucuug

SEQ ID NO: 1219216 - RNA, 19 nt, Artificial Sequence
  Description of Artificial Sequence: Synthetic oligonucleotide
  Sense strand starting at position 993 of SEQ ID NO: 917232
ccaucugucucagugagua

SEQ ID NO: 1219217 - RNA, 19 nt, Artificial Sequence
  Description of Artificial Sequence: Synthetic oligonucleotide
  Antisense strand to SEQ ID NO: 1219216
uacucacugagacagaugg

SEQ ID NO: 1219218 - RNA, 19 nt, Artificial Sequence
  Description of Artificial Sequence: Synthetic oligonucleotide
  Sense strand starting at position 995 of SEQ ID NO: 917232
aucugucucagugaguacu

SEQ ID NO: 1219219 - RNA, 19 nt, Artificial Sequence
  Description of Artificial Sequence: Synthetic oligonucleotide
  Antisense strand to SEQ ID NO: 1219218
aguacucacugagacagau

SEQ ID NO: 1219220 - RNA, 19 nt, Artificial Sequence
  Description of Artificial Sequence: Synthetic oligonucleotide
  Sense strand starting at position 1112 of SEQ ID NO: 917232
agaguuaguaaauacgcaa

SEQ ID NO: 1219221 - RNA, 19 nt, Artificial Sequence
  Description of Artificial Sequence: Synthetic oligonucleotide
  Antisense strand to SEQ ID NO: 1219220
uugcguauuuacuaacucu

SEQ ID NO: 1219222 - RNA, 19 nt, Artificial Sequence
  Description of Artificial Sequence: Synthetic oligonucleotide
  Sense strand starting at position 1177 of SEQ ID NO: 917232
uucguuucugccuaacaua

SEQ ID NO: 1219223 - RNA, 19 nt, Artificial Sequence
  Description of Artificial Sequence: Synthetic oligonucleotide
  Antisense strand to SEQ ID NO: 1219222
uauguuaggcagaaacgaa

SEQ ID NO: 1219224 - RNA, 19 nt, Artificial Sequence
  Description of Artificial Sequence: Synthetic oligonucleotide
  Sense strand starting at position 1236 of SEQ ID NO: 917232
ugguaacagcauggugaua

SEQ ID NO: 1219225 - RNA, 19 nt, Artificial Sequence
  Description of Artificial Sequence: Synthetic oligonucleotide
  Antisense strand to SEQ ID NO: 1219224
uaucaccaugcuguuacca

SEQ ID NO: 1219226 - RNA, 19 nt, Artificial Sequence
  Description of Artificial Sequence: Synthetic oligonucleotide
  Sense strand starting at position 1453 of SEQ ID NO: 917232
uuuaauagauggucagaca

SEQ ID NO: 1219227 - RNA, 19 nt, Artificial Sequence
  Description of Artificial Sequence: Synthetic oligonucleotide
  Antisense strand to SEQ ID NO: 1219226
ugucugaccaucuauuaaa

SEQ ID NO: 1219228 - RNA, 19 nt, Artificial Sequence
  Description of Artificial Sequence: Synthetic oligonucleotide
  Sense strand starting at position 1456 of SEQ ID NO: 917232
aauagauggucagacacaa

SEQ ID NO: 1219229 - RNA, 19 nt, Artificial Sequence
  Description of Artificial Sequence: Synthetic oligonucleotide
  Antisense strand to SEQ ID NO: 1219228
uugugucugaccaucuauu

SEQ ID NO: 1219230 - RNA, 19 nt, Artificial Sequence
  Description of Artificial Sequence: Synthetic oligonucleotide
  Sense strand starting at position 1589 of SEQ ID NO: 917232
acgcuaacaguugaauaaa

SEQ ID NO: 1219231 - RNA, 19 nt, Artificial Sequence
  Description of Artificial Sequence: Synthetic oligonucleotide
  Antisense strand to SEQ ID NO: 1219230
uuuauucaacuguuagcgu

SEQ ID NO: 1219232 - RNA, 19 nt, Artificial Sequence
  Description of Artificial Sequence: Synthetic oligonucleotide
  Sense strand starting at position 1654 of SEQ ID NO: 917232
gcaaucugacagcgaaauu

SEQ ID NO: 1219233 - RNA, 19 nt, Artificial Sequence
  Description of Artificial Sequence: Synthetic oligonucleotide
  Antisense strand to SEQ ID NO: 1219232
aauuucgcugucagauugc

SEQ ID NO: 1219234 - RNA, 19 nt, Artificial Sequence
  Description of Artificial Sequence: Synthetic oligonucleotide
  Sense strand starting at position 2977 of SEQ ID NO: 917232
aguggaguuaauggagguu

SEQ ID NO: 1219235 - RNA, 19 nt, Artificial Sequence
  Description of Artificial Sequence: Synthetic oligonucleotide
  Antisense strand to SEQ ID NO: 1219234
aaccuccauuaacuccacu

SEQ ID NO: 1219236 - RNA, 19 nt, Artificial Sequence
  Description of Artificial Sequence: Synthetic oligonucleotide
  Sense strand starting at position 3126 of SEQ ID NO: 917232
cuaggaagccucugaaaug

SEQ ID NO: 1219237 - RNA, 19 nt, Artificial Sequence
  Description of Artificial Sequence: Synthetic oligonucleotide
  Antisense strand to SEQ ID NO: 1219236
cauuucagaggcuuccuag

SEQ ID NO: 1219238 - RNA, 19 nt, Artificial Sequence
  Description of Artificial Sequence: Synthetic oligonucleotide
  Sense strand starting at position 3137 of SEQ ID NO: 917232
cugaaaugggcuuggaagu

SEQ ID NO: 1219239 - RNA, 19 nt, Artificial Sequence
  Description of Artificial Sequence: Synthetic oligonucleotide
  Antisense strand to SEQ ID NO: 1219238
acuuccaagcccauuucag

SEQ ID NO: 1219240 - RNA, 19 nt, Artificial Sequence
  Description of Artificial Sequence: Synthetic oligonucleotide
  Sense strand starting at position 3138 of SEQ ID NO: 917232
ugaaaugggcuuggaaguu

SEQ ID NO: 1219241 - RNA, 19 nt, Artificial Sequence
  Description of Artificial Sequence: Synthetic oligonucleotide
  Antisense strand to SEQ ID NO: 1219240
aacuuccaagcccauuuca

SEQ ID NO: 1219242 - RNA, 19 nt, Artificial Sequence
  Description of Artificial Sequence: Synthetic oligonucleotide
  Sense strand starting at position 3150 of SEQ ID NO: 917232
ggaaguuucuaaucccaaa

SEQ ID NO: 1219243 - RNA, 19 nt, Artificial Sequence
  Description of Artificial Sequence: Synthetic oligonucleotide
  Antisense strand to SEQ ID NO: 1219242
uuugggauuagaaacuucc

SEQ ID NO: 1219244 - RNA, 19 nt, Artificial Sequence
  Description of Artificial Sequence: Synthetic oligonucleotide
  Sense strand starting at position 3365 of SEQ ID NO: 917232
gcaauaaugccugagggcu

SEQ ID NO: 1219245 - RNA, 19 nt, Artificial Sequence
  Description of Artificial Sequence: Synthetic oligonucleotide
  Antisense strand to SEQ ID NO: 1219244
agcccucaggcauuauugc

SEQ ID NO: 1219246 - RNA, 19 nt, Artificial Sequence
  Description of Artificial Sequence: Synthetic oligonucleotide
  Sense strand starting at position 3468 of SEQ ID NO: 917232
aauggugauggauguaaca

SEQ ID NO: 1219247 - RNA, 19 nt, Artificial Sequence
  Description of Artificial Sequence: Synthetic oligonucleotide
  Antisense strand to SEQ ID NO: 1219246
uguuacauccaucaccauu

SEQ ID NO: 1219248 - RNA, 19 nt, Artificial Sequence
  Description of Artificial Sequence: Synthetic oligonucleotide
  Sense strand starting at position 3582 of SEQ ID NO: 917232
gugauuauucucuauauuc

SEQ ID NO: 1219249 - RNA, 19 nt, Artificial Sequence
  Description of Artificial Sequence: Synthetic oligonucleotide
  Antisense strand to SEQ ID NO: 1219248
gaauauagagaauaaucac

SEQ ID NO: 1219250 - RNA, 19 nt, Artificial Sequence
  Description of Artificial Sequence: Synthetic oligonucleotide
  Sense strand starting at position 3632 of SEQ ID NO: 917232
guugauaacugacucucaa

SEQ ID NO: 1219251 - RNA, 19 nt, Artificial Sequence
  Description of Artificial Sequence: Synthetic oligonucleotide
  Antisense strand to SEQ ID NO: 1219250
uugagagucaguuaucaac

SEQ ID NO: 1219252 - RNA, 19 nt, Artificial Sequence
  Description of Artificial Sequence: Synthetic oligonucleotide
  Sense strand starting at position 3651 of SEQ ID NO: 917232
accgauaucuuggccauac

SEQ ID NO: 1219253 - RNA, 19 nt, Artificial Sequence
  Description of Artificial Sequence: Synthetic oligonucleotide
  Antisense strand to SEQ ID NO: 1219252
guauggccaagauaucggu

SEQ ID NO: 1219254 - RNA, 19 nt, Artificial Sequence
  Description of Artificial Sequence: Synthetic oligonucleotide
  Sense strand starting at position 3653 of SEQ ID NO: 917232
cgauaucuuggccauacgu

SEQ ID NO: 1219255 - RNA, 19 nt, Artificial Sequence
  Description of Artificial Sequence: Synthetic oligonucleotide
  Antisense strand to SEQ ID NO: 1219254
acguauggccaagauaucg

SEQ ID NO: 1219256 - RNA, 19 nt, Artificial Sequence
  Description of Artificial Sequence: Synthetic oligonucleotide
  Sense strand starting at position 3670 of SEQ ID NO: 917232
guuuaagucccagaggauu

SEQ ID NO: 1219257 - RNA, 19 nt, Artificial Sequence
  Description of Artificial Sequence: Synthetic oligonucleotide
  Antisense strand to SEQ ID NO: 1219256
aauccucugggacuuaaac

SEQ ID NO: 1219258 - RNA, 19 nt, Artificial Sequence
  Description of Artificial Sequence: Synthetic oligonucleotide
  Sense strand starting at position 3686 of SEQ ID NO: 917232
auugcugcgguguauagaa

SEQ ID NO: 1219259 - RNA, 19 nt, Artificial Sequence
  Description of Artificial Sequence: Synthetic oligonucleotide
  Antisense strand to SEQ ID NO: 1219258
uucuauacaccgcagcaau

SEQ ID NO: 1219260 - RNA, 19 nt, Artificial Sequence
  Description of Artificial Sequence: Synthetic oligonucleotide
  Sense strand starting at position 3885 of SEQ ID NO: 917232
gcuccaggugaagauugau

SEQ ID NO: 1219261 - RNA, 19 nt, Artificial Sequence
  Description of Artificial Sequence: Synthetic oligonucleotide
  Antisense strand to SEQ ID NO: 1219260
aucaaucuucaccuggagc

SEQ ID NO: 1219262 - RNA, 19 nt, Artificial Sequence
  Description of Artificial Sequence: Synthetic oligonucleotide
  Sense strand starting at position 3893 of SEQ ID NO: 917232
ugaagauugaugggauguu

SEQ ID NO: 1219263 - RNA, 19 nt, Artificial Sequence
  Description of Artificial Sequence: Synthetic oligonucleotide
  Antisense strand to SEQ ID NO: 1219262
aacaucccaucaaucuuca

SEQ ID NO: 1219264 - RNA, 19 nt, Artificial Sequence
  Description of Artificial Sequence: Synthetic oligonucleotide
  Sense strand starting at position 3967 of SEQ ID NO: 917233
gugguaucuugagauauuu

SEQ ID NO: 1219265 - RNA, 19 nt, Artificial Sequence
  Description of Artificial Sequence: Synthetic oligonucleotide
  Antisense strand to SEQ ID NO: 1219264
aaauaucucaagauaccac

SEQ ID NO: 1219266 - RNA, 19 nt, Artificial Sequence
  Description of Artificial Sequence: Synthetic oligonucleotide
  Sense strand starting at position 539 of SEQ ID NO: 917233
gcagaaauuguacaugguu

SEQ ID NO: 1219267 - RNA, 19 nt, Artificial Sequence
  Description of Artificial Sequence: Synthetic oligonucleotide
  Antisense strand to SEQ ID NO: 1219266
aaccauguacaauuucugc

SEQ ID NO: 1219268 - RNA, 19 nt, Artificial Sequence
  Description of Artificial Sequence: Synthetic oligonucleotide
  Sense strand starting at position 541 of SEQ ID NO: 917233
agaaauuguacaugguuag

SEQ ID NO: 1219269 - RNA, 19 nt, Artificial Sequence
  Description of Artificial Sequence: Synthetic oligonucleotide
  Antisense strand to SEQ ID NO: 1219268
cuaaccauguacaauuucu

SEQ ID NO: 1219270 - RNA, 19 nt, Artificial Sequence
  Description of Artificial Sequence: Synthetic oligonucleotide
  Sense strand starting at position 542 of SEQ ID NO: 917233
gaaauuguacaugguuaga

SEQ ID NO: 1219271 - RNA, 19 nt, Artificial Sequence
  Description of Artificial Sequence: Synthetic oligonucleotide
  Antisense strand to SEQ ID NO: 1219270
ucuaaccauguacaauuuc

SEQ ID NO: 1219272 - RNA, 19 nt, Artificial Sequence
  Description of Artificial Sequence: Synthetic oligonucleotide
  Sense strand starting at position 544 of SEQ ID NO: 917233
aauuguacaugguuagauu

SEQ ID NO: 1219273 - RNA, 19 nt, Artificial Sequence
  Description of Artificial Sequence: Synthetic oligonucleotide
  Antisense strand to SEQ ID NO: 1219272
aaucuaaccauguacaauu

SEQ ID NO: 1219274 - RNA, 19 nt, Artificial Sequence
  Description of Artificial Sequence: Synthetic oligonucleotide
  Sense strand starting at position 975 of SEQ ID NO: 917233
aaguaucgauguuuagaac

SEQ ID NO: 1219275 - RNA, 19 nt, Artificial Sequence
  Description of Artificial Sequence: Synthetic oligonucleotide
  Antisense strand to SEQ ID NO: 1219274
guucuaaacaucgauacuu

SEQ ID NO: 1219276 - RNA, 19 nt, Artificial Sequence
  Description of Artificial Sequence: Synthetic oligonucleotide
  Sense strand starting at position 976 of SEQ ID NO: 917233
aguaucgauguuuagaacu

SEQ ID NO: 1219277 - RNA, 19 nt, Artificial Sequence
  Description of Artificial Sequence: Synthetic oligonucleotide
  Antisense strand to SEQ ID NO: 1219276
aguucuaaacaucgauacu

SEQ ID NO: 1219278 - RNA, 19 nt, Artificial Sequence
  Description of Artificial Sequence: Synthetic oligonucleotide
  Sense strand starting at position 1073 of SEQ ID NO: 917233
gauguaaauguuugauuag

SEQ ID NO: 1219279 - RNA, 19 nt, Artificial Sequence
  Description of Artificial Sequence: Synthetic oligonucleotide
  Antisense strand to SEQ ID NO: 1219278
cuaaucaaacauuuacauc

SEQ ID NO: 1219280 - RNA, 19 nt, Artificial Sequence
  Description of Artificial Sequence: Synthetic oligonucleotide
  Sense strand starting at position 1162 of SEQ ID NO: 917233
guaugcaaugagggagauu

SEQ ID NO: 1219281 - RNA, 19 nt, Artificial Sequence
  Description of Artificial Sequence: Synthetic oligonucleotide
  Antisense strand to SEQ ID NO: 1219280
aaucucccucauugcauac

SEQ ID NO: 1219282 - RNA, 19 nt, Artificial Sequence
  Description of Artificial Sequence: Synthetic oligonucleotide
  Sense strand starting at position 1235 of SEQ ID NO: 917233
guagcaauaccugacaaca

SEQ ID NO: 1219283 - RNA, 19 nt, Artificial Sequence
  Description of Artificial Sequence: Synthetic oligonucleotide
  Antisense strand to SEQ ID NO: 1219282
uguugucagguauugcuac

SEQ ID NO: 1219284 - RNA, 19 nt, Artificial Sequence
  Description of Artificial Sequence: Synthetic oligonucleotide
  Sense strand starting at position 1429 of SEQ ID NO: 917233
ugccaucacugacuuaaag

SEQ ID NO: 1219285 - RNA, 19 nt, Artificial Sequence
  Description of Artificial Sequence: Synthetic oligonucleotide
  Antisense strand to SEQ ID NO: 1219284
cuuuaagucagugauggca

SEQ ID NO: 1219286 - RNA, 19 nt, Artificial Sequence
  Description of Artificial Sequence: Synthetic oligonucleotide
  Sense strand starting at position 1697 of SEQ ID NO: 917233
auggaauauuccguggaau

SEQ ID NO: 1219287 - RNA, 19 nt, Artificial Sequence
  Description of Artificial Sequence: Synthetic oligonucleotide
  Antisense strand to SEQ ID NO: 1219286
auuccacggaauauuccau

SEQ ID NO: 1219288 - RNA, 19 nt, Artificial Sequence
  Description of Artificial Sequence: Synthetic oligonucleotide
  Sense strand starting at position 1698 of SEQ ID NO: 917233
uggaauauuccguggaaua

SEQ ID NO: 1219289 - RNA, 19 nt, Artificial Sequence
  Description of Artificial Sequence: Synthetic oligonucleotide
  Antisense strand to SEQ ID NO: 1219288
uauuccacggaauauucca

SEQ ID NO: 1219290 - RNA, 19 nt, Artificial Sequence
  Description of Artificial Sequence: Synthetic oligonucleotide
  Sense strand starting at position 1699 of SEQ ID NO: 917233
ggaauauuccguggaauac

SEQ ID NO: 1219291 - RNA, 19 nt, Artificial Sequence
  Description of Artificial Sequence: Synthetic oligonucleotide
  Antisense strand to SEQ ID NO: 1219290
guauuccacggaauauucc

SEQ ID NO: 1219292 - RNA, 19 nt, Artificial Sequence
  Description of Artificial Sequence: Synthetic oligonucleotide
  Sense strand starting at position 1787 of SEQ ID NO: 917233
uggcgaugauauuuagcau

SEQ ID NO: 1219293 - RNA, 19 nt, Artificial Sequence
  Description of Artificial Sequence: Synthetic oligonucleotide
  Antisense strand to SEQ ID NO: 1219292
augcuaaauaucaucgcca

SEQ ID NO: 1219294 - RNA, 19 nt, Artificial Sequence
  Description of Artificial Sequence: Synthetic oligonucleotide
  Sense strand starting at position 1822 of SEQ ID NO: 917233
acggcaugacuuuagauua

SEQ ID NO: 1219295 - RNA, 19 nt, Artificial Sequence
  Description of Artificial Sequence: Synthetic oligonucleotide
  Antisense strand to SEQ ID NO: 1219294
uaaucuaaagucaugccgu

SEQ ID NO: 1219296 - RNA, 19 nt, Artificial Sequence
  Description of Artificial Sequence: Synthetic oligonucleotide
  Sense strand starting at position 2023 of SEQ ID NO: 917233
agauccuuugaccgaguca

SEQ ID NO: 1219297 - RNA, 19 nt, Artificial Sequence
  Description of Artificial Sequence: Synthetic oligonucleotide
  Antisense strand to SEQ ID NO: 1219296
ugacucggucaaaggaucu

SEQ ID NO: 1219298 - RNA, 19 nt, Artificial Sequence
  Description of Artificial Sequence: Synthetic oligonucleotide
  Sense strand starting at position 2112 of SEQ ID NO: 917233
cuugcagcauuucugauau

SEQ ID NO: 1219299 - RNA, 19 nt, Artificial Sequence
  Description of Artificial Sequence: Synthetic oligonucleotide
  Antisense strand to SEQ ID NO: 1219298
auaucagaaaugcugcaag

SEQ ID NO: 1219300 - RNA, 19 nt, Artificial Sequence
  Description of Artificial Sequence: Synthetic oligonucleotide
  Sense strand starting at position 2376 of SEQ ID NO: 917233
ucugaaaugucauuguaua

SEQ ID NO: 1219301 - RNA, 19 nt, Artificial Sequence
  Description of Artificial Sequence: Synthetic oligonucleotide
  Antisense strand to SEQ ID NO: 1219300
uauacaaugacauuucaga

SEQ ID NO: 1219302 - RNA, 19 nt, Artificial Sequence
  Description of Artificial Sequence: Synthetic oligonucleotide
  Sense strand starting at position 2377 of SEQ ID NO: 917233
cugaaaugucauuguauaa

SEQ ID NO: 1219303 - RNA, 19 nt, Artificial Sequence
  Description of Artificial Sequence: Synthetic oligonucleotide
  Antisense strand to SEQ ID NO: 1219302
uuauacaaugacauuucag

SEQ ID NO: 1219304 - RNA, 19 nt, Artificial Sequence
  Description of Artificial Sequence: Synthetic oligonucleotide
  Sense strand starting at position 2381 of SEQ ID NO: 917233
aaugucauuguauaacgua

SEQ ID NO: 1219305 - RNA, 19 nt, Artificial Sequence
  Description of Artificial Sequence: Synthetic oligonucleotide
  Antisense strand to SEQ ID NO: 1219304
uacguuauacaaugacauu

SEQ ID NO: 1219306 - RNA, 19 nt, Artificial Sequence
  Description of Artificial Sequence: Synthetic oligonucleotide
  Sense strand starting at position 2461 of SEQ ID NO: 917233
agguuugauagacaugugu

SEQ ID NO: 1219307 - RNA, 19 nt, Artificial Sequence
  Description of Artificial Sequence: Synthetic oligonucleotide
  Antisense strand to SEQ ID NO: 1219306
acacaugucuaucaaaccu

SEQ ID NO: 1219308 - RNA, 19 nt, Artificial Sequence
  Description of Artificial Sequence: Synthetic oligonucleotide
  Sense strand starting at position 2468 of SEQ ID NO: 917233
auagacaugugucucaaag

SEQ ID NO: 1219309 - RNA, 19 nt, Artificial Sequence
  Description of Artificial Sequence: Synthetic oligonucleotide
  Antisense strand to SEQ ID NO: 1219308
cuuugagacacaugucuau

SEQ ID NO: 1219310 - RNA, 19 nt, Artificial Sequence
  Description of Artificial Sequence: Synthetic oligonucleotide
  Sense strand starting at position 2479 of SEQ ID NO: 917233
ucucaaaggugggauuuau

SEQ ID NO: 1219311 - RNA, 19 nt, Artificial Sequence
  Description of Artificial Sequence: Synthetic oligonucleotide
  Antisense strand to SEQ ID NO: 1219310
auaaaucccaccuuugaga

SEQ ID NO: 1219312 - RNA, 19 nt, Artificial Sequence
  Description of Artificial Sequence: Synthetic oligonucleotide
  Sense strand starting at position 2504 of SEQ ID NO: 917233
ggcuguuauuugccucuua

SEQ ID NO: 1219313 - RNA, 19 nt, Artificial Sequence
  Description of Artificial Sequence: Synthetic oligonucleotide
  Antisense strand to SEQ ID NO: 1219312
uaagaggcaaauaacagcc

SEQ ID NO: 1219314 - RNA, 19 nt, Artificial Sequence
  Description of Artificial Sequence: Synthetic oligonucleotide
  Sense strand starting at position 2505 of SEQ ID NO: 917233
gcuguuauuugccucuuaa

SEQ ID NO: 1219315 - RNA, 19 nt, Artificial Sequence
  Description of Artificial Sequence: Synthetic oligonucleotide
  Antisense strand to SEQ ID NO: 1219314
uuaagaggcaaauaacagc

SEQ ID NO: 1219316 - RNA, 19 nt, Artificial Sequence
  Description of Artificial Sequence: Synthetic oligonucleotide
  Sense strand starting at position 2671 of SEQ ID NO: 917233
agaguucucuauccaagaa

SEQ ID NO: 1219317 - RNA, 19 nt, Artificial Sequence
  Description of Artificial Sequence: Synthetic oligonucleotide
  Antisense strand to SEQ ID NO: 1219316
uucuuggauagagaacucu

SEQ ID NO: 1219318 - RNA, 19 nt, Artificial Sequence
  Description of Artificial Sequence: Synthetic oligonucleotide
  Sense strand starting at position 2710 of SEQ ID NO: 917233
gaccaaagauguccaguua

SEQ ID NO: 1219319 - RNA, 19 nt, Artificial Sequence
  Description of Artificial Sequence: Synthetic oligonucleotide
  Antisense strand to SEQ ID NO: 1219318
uaacuggacaucuuugguc

SEQ ID NO: 1219320 - RNA, 19 nt, Artificial Sequence
  Description of Artificial Sequence: Synthetic oligonucleotide
  Sense strand starting at position 2833 of SEQ ID NO: 917233
uaaugacagugguuuguaa

SEQ ID NO: 1219321 - RNA, 19 nt, Artificial Sequence
  Description of Artificial Sequence: Synthetic oligonucleotide
  Antisense strand to SEQ ID NO: 1219320
uuacaaaccacugucauua

SEQ ID NO: 1219322 - RNA, 19 nt, Artificial Sequence
  Description of Artificial Sequence: Synthetic oligonucleotide
  Sense strand starting at position 2835 of SEQ ID NO: 917233
augacagugguuuguaaca

SEQ ID NO: 1219323 - RNA, 19 nt, Artificial Sequence
  Description of Artificial Sequence: Synthetic oligonucleotide
  Antisense strand to SEQ ID NO: 1219322
uguuacaaaccacugucau

SEQ ID NO: 1219324 - RNA, 19 nt, Artificial Sequence
  Description of Artificial Sequence: Synthetic oligonucleotide
  Sense strand starting at position 2852 of SEQ ID NO: 917233
caaguuguacaguggaaag

SEQ ID NO: 1219325 - RNA, 19 nt, Artificial Sequence
  Description of Artificial Sequence: Synthetic oligonucleotide
  Antisense strand to SEQ ID NO: 1219324
cuuuccacuguacaacuug

SEQ ID NO: 1219326 - RNA, 19 nt, Artificial Sequence
  Description of Artificial Sequence: Synthetic oligonucleotide
  Sense strand starting at position 3033 of SEQ ID NO: 917233
caaguauauugguugauga

SEQ ID NO: 1219327 - RNA, 19 nt, Artificial Sequence
  Description of Artificial Sequence: Synthetic oligonucleotide
  Antisense strand to SEQ ID NO: 1219326
ucaucaaccaauauacuug

SEQ ID NO: 1219328 - RNA, 19 nt, Artificial Sequence
  Description of Artificial Sequence: Synthetic oligonucleotide
  Sense strand starting at position 3034 of SEQ ID NO: 917233
aaguauauugguugaugau

SEQ ID NO: 1219329 - RNA, 19 nt, Artificial Sequence
  Description of Artificial Sequence: Synthetic oligonucleotide
  Antisense strand to SEQ ID NO: 1219328
aucaucaaccaauauacuu

SEQ ID NO: 1219330 - RNA, 19 nt, Artificial Sequence
  Description of Artificial Sequence: Synthetic oligonucleotide
  Sense strand starting at position 3043 of SEQ ID NO: 917233
gguugaugauacucaguaa

SEQ ID NO: 1219331 - RNA, 19 nt, Artificial Sequence
  Description of Artificial Sequence: Synthetic oligonucleotide
  Antisense strand to SEQ ID NO: 1219330
uuacugaguaucaucaacc

SEQ ID NO: 1219332 - RNA, 19 nt, Artificial Sequence
  Description of Artificial Sequence: Synthetic oligonucleotide
  Sense strand starting at position 3407 of SEQ ID NO: 917233
acaguaagggccuauucuu

SEQ ID NO: 1219333 - RNA, 19 nt, Artificial Sequence
  Description of Artificial Sequence: Synthetic oligonucleotide
  Antisense strand to SEQ ID NO: 1219332
aagaauaggcccuuacugu

SEQ ID NO: 1219334 - RNA, 19 nt, Artificial Sequence
  Description of Artificial Sequence: Synthetic oligonucleotide
  Sense strand starting at position 3433 of SEQ ID NO: 917233
gggaaagguaauuguuaac

SEQ ID NO: 1219335 - RNA, 19 nt, Artificial Sequence
  Description of Artificial Sequence: Synthetic oligonucleotide
  Antisense strand to SEQ ID NO: 1219334
guuaacaauuaccuuuccc

SEQ ID NO: 1219336 - RNA, 19 nt, Artificial Sequence
  Description of Artificial Sequence: Synthetic oligonucleotide
  Sense strand starting at position 3708 of SEQ ID NO: 917233
uuaugcucacuagaaaguu

SEQ ID NO: 1219337 - RNA, 19 nt, Artificial Sequence
  Description of Artificial Sequence: Synthetic oligonucleotide
  Antisense strand to SEQ ID NO: 1219336
aacuuucuagugagcauaa

SEQ ID NO: 1219338 - RNA, 19 nt, Artificial Sequence
  Description of Artificial Sequence: Synthetic oligonucleotide
  Sense strand starting at position 3785 of SEQ ID NO: 917233
cuguguugccuugaaauga

SEQ ID NO: 1219339 - RNA, 19 nt, Artificial Sequence
  Description of Artificial Sequence: Synthetic oligonucleotide
  Antisense strand to SEQ ID NO: 1219338
ucauuucaaggcaacacag

SEQ ID NO: 1219340 - RNA, 19 nt, Artificial Sequence
  Description of Artificial Sequence: Synthetic oligonucleotide
  Sense strand starting at position 3955 of SEQ ID NO: 917233
ccuugagaucacggcauau

SEQ ID NO: 1219341 - RNA, 19 nt, Artificial Sequence
  Description of Artificial Sequence: Synthetic oligonucleotide
  Antisense strand to SEQ ID NO: 1219340
auaugccgugaucucaagg

SEQ ID NO: 1219342 - RNA, 19 nt, Artificial Sequence
  Description of Artificial Sequence: Synthetic oligonucleotide
  Sense strand starting at position 3957 of SEQ ID NO: 917233
uugagaucacggcauaugu

SEQ ID NO: 1219343 - RNA, 19 nt, Artificial Sequence
  Description of Artificial Sequence: Synthetic oligonucleotide
  Antisense strand to SEQ ID NO: 1219342
acauaugccgugaucucaa

SEQ ID NO: 1219344 - RNA, 19 nt, Artificial Sequence
  Description of Artificial Sequence: Synthetic oligonucleotide
  Sense strand starting at position 3965 of SEQ ID NO: 917234
acggcauaugugcauacaa

SEQ ID NO: 1219345 - RNA, 19 nt, Artificial Sequence
  Description of Artificial Sequence: Synthetic oligonucleotide
  Antisense strand to SEQ ID NO: 1219344
uuguaugcacauaugccgu

SEQ ID NO: 1219346 - RNA, 19 nt, Artificial Sequence
  Description of Artificial Sequence: Synthetic oligonucleotide
  Sense strand starting at position 58 of SEQ ID NO: 917234
gcagccucuguguuucuaa

SEQ ID NO: 1219347 - RNA, 19 nt, Artificial Sequence
  Description of Artificial Sequence: Synthetic oligonucleotide
  Antisense strand to SEQ ID NO: 1219346
uuagaaacacagaggcugc

SEQ ID NO: 1219348 - RNA, 19 nt, Artificial Sequence
  Description of Artificial Sequence: Synthetic oligonucleotide
  Sense strand starting at position 61 of SEQ ID NO: 917234
gccucuguguuucuaacua

SEQ ID NO: 1219349 - RNA, 19 nt, Artificial Sequence
  Description of Artificial Sequence: Synthetic oligonucleotide
  Antisense strand to SEQ ID NO: 1219348
uaguuagaaacacagaggc

SEQ ID NO: 1219350 - RNA, 19 nt, Artificial Sequence
  Description of Artificial Sequence: Synthetic oligonucleotide
  Sense strand starting at position 729 of SEQ ID NO: 917234
ggcgcacuuucuuuacuua

SEQ ID NO: 1219351 - RNA, 19 nt, Artificial Sequence
  Description of Artificial Sequence: Synthetic oligonucleotide
  Antisense strand to SEQ ID NO: 1219350
uaaguaaagaaagugcgcc

SEQ ID NO: 1219352 - RNA, 19 nt, Artificial Sequence
  Description of Artificial Sequence: Synthetic oligonucleotide
  Sense strand starting at position 732 of SEQ ID NO: 917234
gcacuuucuuuacuuaguu

SEQ ID NO: 1219353 - RNA, 19 nt, Artificial Sequence
  Description of Artificial Sequence: Synthetic oligonucleotide
  Antisense strand to SEQ ID NO: 1219352
aacuaaguaaagaaagugc

SEQ ID NO: 1219354 - RNA, 19 nt, Artificial Sequence
  Description of Artificial Sequence: Synthetic oligonucleotide
  Sense strand starting at position 1093 of SEQ ID NO: 917234
ucucgauggccuuggugau

SEQ ID NO: 1219355 - RNA, 19 nt, Artificial Sequence
  Description of Artificial Sequence: Synthetic oligonucleotide
  Antisense strand to SEQ ID NO: 1219354
aucaccaaggccaucgaga

SEQ ID NO: 1219356 - RNA, 19 nt, Artificial Sequence
  Description of Artificial Sequence: Synthetic oligonucleotide
  Sense strand starting at position 1390 of SEQ ID NO: 917234
agcucagguugcucaugaa

SEQ ID NO: 1219357 - RNA, 19 nt, Artificial Sequence
  Description of Artificial Sequence: Synthetic oligonucleotide
  Antisense strand to SEQ ID NO: 1219356
uucaugagcaaccugagcu

SEQ ID NO: 1219358 - RNA, 19 nt, Artificial Sequence
  Description of Artificial Sequence: Synthetic oligonucleotide
  Sense strand starting at position 1393 of SEQ ID NO: 917234
ucagguugcucaugaaguc

SEQ ID NO: 1219359 - RNA, 19 nt, Artificial Sequence
  Description of Artificial Sequence: Synthetic oligonucleotide
  Antisense strand to SEQ ID NO: 1219358
gacuucaugagcaaccuga

SEQ ID NO: 1219360 - RNA, 19 nt, Artificial Sequence
  Description of Artificial Sequence: Synthetic oligonucleotide
  Sense strand starting at position 1504 of SEQ ID NO: 917234
ccgaguuggacuggcuaaa

SEQ ID NO: 1219361 - RNA, 19 nt, Artificial Sequence
  Description of Artificial Sequence: Synthetic oligonucleotide
  Antisense strand to SEQ ID NO: 1219360
uuuagccaguccaacucgg

SEQ ID NO: 1219362 - RNA, 19 nt, Artificial Sequence
  Description of Artificial Sequence: Synthetic oligonucleotide
  Sense strand starting at position 1570 of SEQ ID NO: 917234
gcucgaaguccgggucgau

SEQ ID NO: 1219363 - RNA, 19 nt, Artificial Sequence
  Description of Artificial Sequence: Synthetic oligonucleotide
  Antisense strand to SEQ ID NO: 1219362
aucgacccggacuucgagc

SEQ ID NO: 1219364 - RNA, 19 nt, Artificial Sequence
  Description of Artificial Sequence: Synthetic oligonucleotide
  Sense strand starting at position 1698 of SEQ ID NO: 917234
aagggacgguccgagauuu

SEQ ID NO: 1219365 - RNA, 19 nt, Artificial Sequence
  Description of Artificial Sequence: Synthetic oligonucleotide
  Antisense strand to SEQ ID NO: 1219364
aaaucucggaccgucccuu

SEQ ID NO: 1219366 - RNA, 19 nt, Artificial Sequence
  Description of Artificial Sequence: Synthetic oligonucleotide
  Sense strand starting at position 2271 of SEQ ID NO: 917234
ucugguaauucucgagugu

SEQ ID NO: 1219367 - RNA, 19 nt, Artificial Sequence
  Description of Artificial Sequence: Synthetic oligonucleotide
  Antisense strand to SEQ ID NO: 1219366
acacucgagaauuaccaga

SEQ ID NO: 1219368 - RNA, 19 nt, Artificial Sequence
  Description of Artificial Sequence: Synthetic oligonucleotide
  Sense strand starting at position 2272 of SEQ ID NO: 917234
cugguaauucucgaguguu

SEQ ID NO: 1219369 - RNA, 19 nt, Artificial Sequence
  Description of Artificial Sequence: Synthetic oligonucleotide
  Antisense strand to SEQ ID NO: 1219368
aacacucgagaauuaccag

SEQ ID NO: 1219370 - RNA, 19 nt, Artificial Sequence
  Description of Artificial Sequence: Synthetic oligonucleotide
  Sense strand starting at position 2275 of SEQ ID NO: 917234
guaauucucgaguguuucu

SEQ ID NO: 1219371 - RNA, 19 nt, Artificial Sequence
  Description of Artificial Sequence: Synthetic oligonucleotide
  Antisense strand to SEQ ID NO: 1219370
agaaacacucgagaauuac

SEQ ID NO: 1219372 - RNA, 19 nt, Artificial Sequence
  Description of Artificial Sequence: Synthetic oligonucleotide
  Sense strand starting at position 2280 of SEQ ID NO: 917234
ucucgaguguuucugugau

SEQ ID NO: 1219373 - RNA, 19 nt, Artificial Sequence
  Description of Artificial Sequence: Synthetic oligonucleotide
  Antisense strand to SEQ ID NO: 1219372
aucacagaaacacucgaga

SEQ ID NO: 1219374 - RNA, 19 nt, Artificial Sequence
  Description of Artificial Sequence: Synthetic oligonucleotide
  Sense strand starting at position 2282 of SEQ ID NO: 917234
ucgaguguuucugugauuc

SEQ ID NO: 1219375 - RNA, 19 nt, Artificial Sequence
  Description of Artificial Sequence: Synthetic oligonucleotide
  Antisense strand to SEQ ID NO: 1219374
gaaucacagaaacacucga

SEQ ID NO: 1219376 - RNA, 19 nt, Artificial Sequence
  Description of Artificial Sequence: Synthetic oligonucleotide
  Sense strand starting at position 2284 of SEQ ID NO: 917234
gaguguuucugugauucuc

SEQ ID NO: 1219377 - RNA, 19 nt, Artificial Sequence
  Description of Artificial Sequence: Synthetic oligonucleotide
  Antisense strand to SEQ ID NO: 1219376
gagaaucacagaaacacuc

SEQ ID NO: 1219378 - RNA, 19 nt, Artificial Sequence
  Description of Artificial Sequence: Synthetic oligonucleotide
  Sense strand starting at position 2318 of SEQ ID NO: 917234
uuugauugcuaggaagcaa

SEQ ID NO: 1219379 - RNA, 19 nt, Artificial Sequence
  Description of Artificial Sequence: Synthetic oligonucleotide
  Antisense strand to SEQ ID NO: 1219378
uugcuuccuagcaaucaaa

SEQ ID NO: 1219380 - RNA, 19 nt, Artificial Sequence
  Description of Artificial Sequence: Synthetic oligonucleotide
  Sense strand starting at position 2354 of SEQ ID NO: 917234
ggcgacacuuuguuuacua

SEQ ID NO: 1219381 - RNA, 19 nt, Artificial Sequence
  Description of Artificial Sequence: Synthetic oligonucleotide
  Antisense strand to SEQ ID NO: 1219380
uaguaaacaaagugucgcc

SEQ ID NO: 1219382 - RNA, 19 nt, Artificial Sequence
  Description of Artificial Sequence: Synthetic oligonucleotide
  Sense strand starting at position 2355 of SEQ ID NO: 917234
gcgacacuuuguuuacuac

SEQ ID NO: 1219383 - RNA, 19 nt, Artificial Sequence
  Description of Artificial Sequence: Synthetic oligonucleotide
  Antisense strand to SEQ ID NO: 1219382
guaguaaacaaagugucgc

SEQ ID NO: 1219384 - RNA, 19 nt, Artificial Sequence
  Description of Artificial Sequence: Synthetic oligonucleotide
  Sense strand starting at position 2520 of SEQ ID NO: 917234
gaggaauucuacucaaucg

SEQ ID NO: 1219385 - RNA, 19 nt, Artificial Sequence
  Description of Artificial Sequence: Synthetic oligonucleotide
  Antisense strand to SEQ ID NO: 1219384
cgauugaguagaauuccuc

SEQ ID NO: 1219386 - RNA, 19 nt, Artificial Sequence
  Description of Artificial Sequence: Synthetic oligonucleotide
  Sense strand starting at position 2556 of SEQ ID NO: 917234
ccacgaugucuuugcugaa

SEQ ID NO: 1219387 - RNA, 19 nt, Artificial Sequence
  Description of Artificial Sequence: Synthetic oligonucleotide
  Antisense strand to SEQ ID NO: 1219386
uucagcaaagacaucgugg

SEQ ID NO: 1219388 - RNA, 19 nt, Artificial Sequence
  Description of Artificial Sequence: Synthetic oligonucleotide
  Sense strand starting at position 2559 of SEQ ID NO: 917234
cgaugucuuugcugaacga

SEQ ID NO: 1219389 - RNA, 19 nt, Artificial Sequence
  Description of Artificial Sequence: Synthetic oligonucleotide
  Antisense strand to SEQ ID NO: 1219388
ucguucagcaaagacaucg

SEQ ID NO: 1219390 - RNA, 19 nt, Artificial Sequence
  Description of Artificial Sequence: Synthetic oligonucleotide
  Sense strand starting at position 2878 of SEQ ID NO: 917234
gagauuaucuggccucccu

SEQ ID NO: 1219391 - RNA, 19 nt, Artificial Sequence
  Description of Artificial Sequence: Synthetic oligonucleotide
  Antisense strand to SEQ ID NO: 1219390
agggaggccagauaaucuc

SEQ ID NO: 1219392 - RNA, 19 nt, Artificial Sequence
  Description of Artificial Sequence: Synthetic oligonucleotide
  Sense strand starting at position 3094 of SEQ ID NO: 917234
acggaagugaucggguguu

SEQ ID NO: 1219393 - RNA, 19 nt, Artificial Sequence
  Description of Artificial Sequence: Synthetic oligonucleotide
  Antisense strand to SEQ ID NO: 1219392
aacacccgaucacuuccgu

SEQ ID NO: 1219394 - RNA, 19 nt, Artificial Sequence
  Description of Artificial Sequence: Synthetic oligonucleotide
  Sense strand starting at position 3095 of SEQ ID NO: 917234
cggaagugaucggguguua

SEQ ID NO: 1219395 - RNA, 19 nt, Artificial Sequence
  Description of Artificial Sequence: Synthetic oligonucleotide
  Antisense strand to SEQ ID NO: 1219394
uaacacccgaucacuuccg

SEQ ID NO: 1219396 - RNA, 19 nt, Artificial Sequence
  Description of Artificial Sequence: Synthetic oligonucleotide
  Sense strand starting at position 3100 of SEQ ID NO: 917234
gugaucggguguuaaguaa

SEQ ID NO: 1219397 - RNA, 19 nt, Artificial Sequence
  Description of Artificial Sequence: Synthetic oligonucleotide
  Antisense strand to SEQ ID NO: 1219396
uuacuuaacacccgaucac

SEQ ID NO: 1219398 - RNA, 19 nt, Artificial Sequence
  Description of Artificial Sequence: Synthetic oligonucleotide
  Sense strand starting at position 3175 of SEQ ID NO: 917234
cccaaauuccuugaggcua

SEQ ID NO: 1219399 - RNA, 19 nt, Artificial Sequence
  Description of Artificial Sequence: Synthetic oligonucleotide
  Antisense strand to SEQ ID NO: 1219398
uagccucaaggaauuuggg

SEQ ID NO: 1219400 - RNA, 19 nt, Artificial Sequence
  Description of Artificial Sequence: Synthetic oligonucleotide
  Sense strand starting at position 3259 of SEQ ID NO: 917234
aggacauccugucaaggau

SEQ ID NO: 1219401 - RNA, 19 nt, Artificial Sequence
  Description of Artificial Sequence: Synthetic oligonucleotide
  Antisense strand to SEQ ID NO: 1219400
auccuugacaggauguccu

SEQ ID NO: 1219402 - RNA, 19 nt, Artificial Sequence
  Description of Artificial Sequence: Synthetic oligonucleotide
  Sense strand starting at position 3284 of SEQ ID NO: 917234
ggccaaaggugggaagaua

SEQ ID NO: 1219403 - RNA, 19 nt, Artificial Sequence
  Description of Artificial Sequence: Synthetic oligonucleotide
  Antisense strand to SEQ ID NO: 1219402
uaucuucccaccuuuggcc

SEQ ID NO: 1219404 - RNA, 19 nt, Artificial Sequence
  Description of Artificial Sequence: Synthetic oligonucleotide
  Sense strand starting at position 3310 of SEQ ID NO: 917234
uugugucucaagcagaaga

SEQ ID NO: 1219405 - RNA, 19 nt, Artificial Sequence
  Description of Artificial Sequence: Synthetic oligonucleotide
  Antisense strand to SEQ ID NO: 1219404
ucuucugcuugagacacaa

SEQ ID NO: 1219406 - RNA, 19 nt, Artificial Sequence
  Description of Artificial Sequence: Synthetic oligonucleotide
  Sense strand starting at position 3312 of SEQ ID NO: 917234
gugucucaagcagaagaaa

SEQ ID NO: 1219407 - RNA, 19 nt, Artificial Sequence
  Description of Artificial Sequence: Synthetic oligonucleotide
  Antisense strand to SEQ ID NO: 1219406
uuucuucugcuugagacac

SEQ ID NO: 1219408 - RNA, 19 nt, Artificial Sequence
  Description of Artificial Sequence: Synthetic oligonucleotide
  Sense strand starting at position 3541 of SEQ ID NO: 917234
auuagucaguuggacaaga

SEQ ID NO: 1219409 - RNA, 19 nt, Artificial Sequence
  Description of Artificial Sequence: Synthetic oligonucleotide
  Antisense strand to SEQ ID NO: 1219408
ucuuguccaacugacuaau

SEQ ID NO: 1219410 - RNA, 19 nt, Artificial Sequence
  Description of Artificial Sequence: Synthetic oligonucleotide
  Sense strand starting at position 3655 of SEQ ID NO: 917234
uuuauauucucacuaucgu

SEQ ID NO: 1219411 - RNA, 19 nt, Artificial Sequence
  Description of Artificial Sequence: Synthetic oligonucleotide
  Antisense strand to SEQ ID NO: 1219410
acgauagugagaauauaaa

SEQ ID NO: 1219412 - RNA, 19 nt, Artificial Sequence
  Description of Artificial Sequence: Synthetic oligonucleotide
  Sense strand starting at position 3664 of SEQ ID NO: 917234
ucacuaucgucucucuagu

SEQ ID NO: 1219413 - RNA, 19 nt, Artificial Sequence
  Description of Artificial Sequence: Synthetic oligonucleotide
  Antisense strand to SEQ ID NO: 1219412
acuagagagacgauaguga

SEQ ID NO: 1219414 - RNA, 19 nt, Artificial Sequence
  Description of Artificial Sequence: Synthetic oligonucleotide
  Sense strand starting at position 3718 of SEQ ID NO: 917234
acagcuucuugcugauacu

SEQ ID NO: 1219415 - RNA, 19 nt, Artificial Sequence
  Description of Artificial Sequence: Synthetic oligonucleotide
  Antisense strand to SEQ ID NO: 1219414
aguaucagcaagaagcugu

SEQ ID NO: 1219416 - RNA, 19 nt, Artificial Sequence
  Description of Artificial Sequence: Synthetic oligonucleotide
  Sense strand starting at position 3755 of SEQ ID NO: 917234
gagcgugagccggauggau

SEQ ID NO: 1219417 - RNA, 19 nt, Artificial Sequence
  Description of Artificial Sequence: Synthetic oligonucleotide
  Antisense strand to SEQ ID NO: 1219416
auccauccggcucacgcuc

SEQ ID NO: 1219418 - RNA, 19 nt, Artificial Sequence
  Description of Artificial Sequence: Synthetic oligonucleotide
  Sense strand starting at position 3876 of SEQ ID NO: 917234
cucaguaacucagaugaug

SEQ ID NO: 1219419 - RNA, 19 nt, Artificial Sequence
  Description of Artificial Sequence: Synthetic oligonucleotide
  Antisense strand to SEQ ID NO: 1219418
caucaucugaguuacugag

SEQ ID NO: 1219420 - RNA, 19 nt, Artificial Sequence
  Description of Artificial Sequence: Synthetic oligonucleotide
  Sense strand starting at position 3884 of SEQ ID NO: 917235
cucagaugaugagcucaaa

SEQ ID NO: 1219421 - RNA, 19 nt, Artificial Sequence
  Description of Artificial Sequence: Synthetic oligonucleotide
  Antisense strand to SEQ ID NO: 1219420
uuugagcucaucaucugag

SEQ ID NO: 1219422 - RNA, 19 nt, Artificial Sequence
  Description of Artificial Sequence: Synthetic oligonucleotide
  Sense strand starting at position 2080 of SEQ ID NO: 917235
guaguaauuucugccaauc

SEQ ID NO: 1219423 - RNA, 19 nt, Artificial Sequence
  Description of Artificial Sequence: Synthetic oligonucleotide
  Antisense strand to SEQ ID NO: 1219422
gauuggcagaaauuacuac

SEQ ID NO: 1219424 - RNA, 19 nt, Artificial Sequence
  Description of Artificial Sequence: Synthetic oligonucleotide
  Sense strand starting at position 2151 of SEQ ID NO: 917235
gcaacagguuguccuggaa

SEQ ID NO: 1219425 - RNA, 19 nt, Artificial Sequence
  Description of Artificial Sequence: Synthetic oligonucleotide
  Antisense strand to SEQ ID NO: 1219424
uuccaggacaaccuguugc

SEQ ID NO: 1219426 - RNA, 19 nt, Artificial Sequence
  Description of Artificial Sequence: Synthetic oligonucleotide
  Sense strand starting at position 2154 of SEQ ID NO: 917235
acagguuguccuggaagug

SEQ ID NO: 1219427 - RNA, 19 nt, Artificial Sequence
  Description of Artificial Sequence: Synthetic oligonucleotide
  Antisense strand to SEQ ID NO: 1219426
cacuuccaggacaaccugu

SEQ ID NO: 1219428 - RNA, 19 nt, Artificial Sequence
  Description of Artificial Sequence: Synthetic oligonucleotide
  Sense strand starting at position 2155 of SEQ ID NO: 917235
cagguuguccuggaaguga

SEQ ID NO: 1219429 - RNA, 19 nt, Artificial Sequence
  Description of Artificial Sequence: Synthetic oligonucleotide
  Antisense strand to SEQ ID NO: 1219428
ucacuuccaggacaaccug

SEQ ID NO: 1219430 - RNA, 19 nt, Artificial Sequence
  Description of Artificial Sequence: Synthetic oligonucleotide
  Sense strand starting at position 2337 of SEQ ID NO: 917235
cgcccuagucaaugaaauc

SEQ ID NO: 1219431 - RNA, 19 nt, Artificial Sequence
  Description of Artificial Sequence: Synthetic oligonucleotide
  Antisense strand to SEQ ID NO: 1219430
gauuucauugacuagggcg

SEQ ID NO: 1219432 - RNA, 19 nt, Artificial Sequence
  Description of Artificial Sequence: Synthetic oligonucleotide
  Sense strand starting at position 2367 of SEQ ID NO: 917235
auggccauuucccaaggaa

SEQ ID NO: 1219433 - RNA, 19 nt, Artificial Sequence
  Description of Artificial Sequence: Synthetic oligonucleotide
  Antisense strand to SEQ ID NO: 1219432
uuccuugggaaauggccau

SEQ ID NO: 1219434 - RNA, 19 nt, Artificial Sequence
  Description of Artificial Sequence: Synthetic oligonucleotide
  Sense strand starting at position 2400 of SEQ ID NO: 917235
gggaaaguuagacgcaaug

SEQ ID NO: 1219435 - RNA, 19 nt, Artificial Sequence
  Description of Artificial Sequence: Synthetic oligonucleotide
  Antisense strand to SEQ ID NO: 1219434
cauugcgucuaacuuuccc

SEQ ID NO: 1219436 - RNA, 19 nt, Artificial Sequence
  Description of Artificial Sequence: Synthetic oligonucleotide
  Sense strand starting at position 2445 of SEQ ID NO: 917235
agcguuugagaagaaauuc

SEQ ID NO: 1219437 - RNA, 19 nt, Artificial Sequence
  Description of Artificial Sequence: Synthetic oligonucleotide
  Antisense strand to SEQ ID NO: 1219436
gaauuucuucucaaacgcu

SEQ ID NO: 1219438 - RNA, 19 nt, Artificial Sequence
  Description of Artificial Sequence: Synthetic oligonucleotide
  Sense strand starting at position 2558 of SEQ ID NO: 917235
ccuucuccucgugaauuac

SEQ ID NO: 1219439 - RNA, 19 nt, Artificial Sequence
  Description of Artificial Sequence: Synthetic oligonucleotide
  Antisense strand to SEQ ID NO: 1219438
guaauucacgaggagaagg

SEQ ID NO: 1219440 - RNA, 19 nt, Artificial Sequence
  Description of Artificial Sequence: Synthetic oligonucleotide
  Sense strand starting at position 2568 of SEQ ID NO: 917235
gugaauuacaaugggcaca

SEQ ID NO: 1219441 - RNA, 19 nt, Artificial Sequence
  Description of Artificial Sequence: Synthetic oligonucleotide
  Antisense strand to SEQ ID NO: 1219440
ugugcccauuguaauucac

SEQ ID NO: 1219442 - RNA, 19 nt, Artificial Sequence
  Description of Artificial Sequence: Synthetic oligonucleotide
  Sense strand starting at position 2657 of SEQ ID NO: 917235
gggcauuuggaaugcguga

SEQ ID NO: 1219443 - RNA, 19 nt, Artificial Sequence
  Description of Artificial Sequence: Synthetic oligonucleotide
  Antisense strand to SEQ ID NO: 1219442
ucacgcauuccaaaugccc

SEQ ID NO: 1219444 - RNA, 19 nt, Artificial Sequence
  Description of Artificial Sequence: Synthetic oligonucleotide
  Sense strand starting at position 2659 of SEQ ID NO: 917235
gcauuuggaaugcgugaga

SEQ ID NO: 1219445 - RNA, 19 nt, Artificial Sequence
  Description of Artificial Sequence: Synthetic oligonucleotide
  Antisense strand to SEQ ID NO: 1219444
ucucacgcauuccaaaugc

SEQ ID NO: 1219446 - RNA, 19 nt, Artificial Sequence
  Description of Artificial Sequence: Synthetic oligonucleotide
  Sense strand starting at position 2662 of SEQ ID NO: 917235
uuuggaaugcgugagaaau

SEQ ID NO: 1219447 - RNA, 19 nt, Artificial Sequence
  Description of Artificial Sequence: Synthetic oligonucleotide
  Antisense strand to SEQ ID NO: 1219446
auuucucacgcauuccaaa

SEQ ID NO: 1219448 - RNA, 19 nt, Artificial Sequence
  Description of Artificial Sequence: Synthetic oligonucleotide
  Sense strand starting at position 2691 of SEQ ID NO: 917235
cagaauugcuagucuugca

SEQ ID NO: 1219449 - RNA, 19 nt, Artificial Sequence
  Description of Artificial Sequence: Synthetic oligonucleotide
  Antisense strand to SEQ ID NO: 1219448
ugcaagacuagcaauucug

SEQ ID NO: 1219450 - RNA, 19 nt, Artificial Sequence
  Description of Artificial Sequence: Synthetic oligonucleotide
  Sense strand starting at position 2699 of SEQ ID NO: 917235
cuagucuugcaccaaagaa

SEQ ID NO: 1219451 - RNA, 19 nt, Artificial Sequence
  Description of Artificial Sequence: Synthetic oligonucleotide
  Antisense strand to SEQ ID NO: 1219450
uucuuuggugcaagacuag

SEQ ID NO: 1219452 - RNA, 19 nt, Artificial Sequence
  Description of Artificial Sequence: Synthetic oligonucleotide
  Sense strand starting at position 2768 of SEQ ID NO: 917235
gguagcugucauuagagac

SEQ ID NO: 1219453 - RNA, 19 nt, Artificial Sequence
  Description of Artificial Sequence: Synthetic oligonucleotide
  Antisense strand to SEQ ID NO: 1219452
gucucuaaugacagcuacc

SEQ ID NO: 1219454 - RNA, 19 nt, Artificial Sequence
  Description of Artificial Sequence: Synthetic oligonucleotide
  Sense strand starting at position 2794 of SEQ ID NO: 917235
uucucuucgcaguaauuag

SEQ ID NO: 1219455 - RNA, 19 nt, Artificial Sequence
  Description of Artificial Sequence: Synthetic oligonucleotide
  Antisense strand to SEQ ID NO: 1219454
cuaauuacugcgaagagaa

SEQ ID NO: 1219456 - RNA, 19 nt, Artificial Sequence
  Description of Artificial Sequence: Synthetic oligonucleotide
  Sense strand starting at position 2830 of SEQ ID NO: 917235
ucuacuugucagcaucaca

SEQ ID NO: 1219457 - RNA, 19 nt, Artificial Sequence
  Description of Artificial Sequence: Synthetic oligonucleotide
  Antisense strand to SEQ ID NO: 1219456
ugugaugcugacaaguaga

SEQ ID NO: 1219458 - RNA, 19 nt, Artificial Sequence
  Description of Artificial Sequence: Synthetic oligonucleotide
  Sense strand starting at position 2874 of SEQ ID NO: 917235
uaaauauccggagggcaca

SEQ ID NO: 1219459 - RNA, 19 nt, Artificial Sequence
  Description of Artificial Sequence: Synthetic oligonucleotide
  Antisense strand to SEQ ID NO: 1219458
ugugcccuccggauauuua

SEQ ID NO: 1219460 - RNA, 19 nt, Artificial Sequence
  Description of Artificial Sequence: Synthetic oligonucleotide
  Sense strand starting at position 2984 of SEQ ID NO: 917235
uguguagauucccuuucua

SEQ ID NO: 1219461 - RNA, 19 nt, Artificial Sequence
  Description of Artificial Sequence: Synthetic oligonucleotide
  Antisense strand to SEQ ID NO: 1219460
uagaaagggaaucuacaca

SEQ ID NO: 1219462 - RNA, 19 nt, Artificial Sequence
  Description of Artificial Sequence: Synthetic oligonucleotide
  Sense strand starting at position 3138 of SEQ ID NO: 917235
augcaaaucugauugcuaa

SEQ ID NO: 1219463 - RNA, 19 nt, Artificial Sequence
  Description of Artificial Sequence: Synthetic oligonucleotide
  Antisense strand to SEQ ID NO: 1219462
uuagcaaucagauuugcau

SEQ ID NO: 1219464 - RNA, 19 nt, Artificial Sequence
  Description of Artificial Sequence: Synthetic oligonucleotide
  Sense strand starting at position 3139 of SEQ ID NO: 917235
ugcaaaucugauugcuaac

SEQ ID NO: 1219465 - RNA, 19 nt, Artificial Sequence
  Description of Artificial Sequence: Synthetic oligonucleotide
  Antisense strand to SEQ ID NO: 1219464
guuagcaaucagauuugca

SEQ ID NO: 1219466 - RNA, 19 nt, Artificial Sequence
  Description of Artificial Sequence: Synthetic oligonucleotide
  Sense strand starting at position 3148 of SEQ ID NO: 917235
gauugcuaacaggagcaua

SEQ ID NO: 1219467 - RNA, 19 nt, Artificial Sequence
  Description of Artificial Sequence: Synthetic oligonucleotide
  Antisense strand to SEQ ID NO: 1219466
uaugcuccuguuagcaauc

SEQ ID NO: 1219468 - RNA, 19 nt, Artificial Sequence
  Description of Artificial Sequence: Synthetic oligonucleotide
  Sense strand starting at position 3159 of SEQ ID NO: 917235
ggagcauagaauuggagua

SEQ ID NO: 1219469 - RNA, 19 nt, Artificial Sequence
  Description of Artificial Sequence: Synthetic oligonucleotide
  Antisense strand to SEQ ID NO: 1219468
uacuccaauucuaugcucc

SEQ ID NO: 1219470 - RNA, 19 nt, Artificial Sequence
  Description of Artificial Sequence: Synthetic oligonucleotide
  Sense strand starting at position 3320 of SEQ ID NO: 917235
guaagaagugccuauccuu

SEQ ID NO: 1219471 - RNA, 19 nt, Artificial Sequence
  Description of Artificial Sequence: Synthetic oligonucleotide
  Antisense strand to SEQ ID NO: 1219470
aaggauaggcacuucuuac

SEQ ID NO: 1219472 - RNA, 19 nt, Artificial Sequence
  Description of Artificial Sequence: Synthetic oligonucleotide
  Sense strand starting at position 3383 of SEQ ID NO: 917235
uugauccuugcuugacaca

SEQ ID NO: 1219473 - RNA, 19 nt, Artificial Sequence
  Description of Artificial Sequence: Synthetic oligonucleotide
  Antisense strand to SEQ ID NO: 1219472
ugugucaagcaaggaucaa

SEQ ID NO: 1219474 - RNA, 19 nt, Artificial Sequence
  Description of Artificial Sequence: Synthetic oligonucleotide
  Sense strand starting at position 3441 of SEQ ID NO: 917235
auaaguauggcugggagau

SEQ ID NO: 1219475 - RNA, 19 nt, Artificial Sequence
  Description of Artificial Sequence: Synthetic oligonucleotide
  Antisense strand to SEQ ID NO: 1219474
aucucccagccauacuuau

SEQ ID NO: 1219476 - RNA, 19 nt, Artificial Sequence
  Description of Artificial Sequence: Synthetic oligonucleotide
  Sense strand starting at position 3442 of SEQ ID NO: 917235
uaaguauggcugggagaug

SEQ ID NO: 1219477 - RNA, 19 nt, Artificial Sequence
  Description of Artificial Sequence: Synthetic oligonucleotide
  Antisense strand to SEQ ID NO: 1219476
caucucccagccauacuua

SEQ ID NO: 1219478 - RNA, 19 nt, Artificial Sequence
  Description of Artificial Sequence: Synthetic oligonucleotide
  Sense strand starting at position 3483 of SEQ ID NO: 917235
uacugagugguguccguuu

SEQ ID NO: 1219479 - RNA, 19 nt, Artificial Sequence
  Description of Artificial Sequence: Synthetic oligonucleotide
  Antisense strand to SEQ ID NO: 1219478
aaacggacaccacucagua

SEQ ID NO: 1219480 - RNA, 19 nt, Artificial Sequence
  Description of Artificial Sequence: Synthetic oligonucleotide
  Sense strand starting at position 3494 of SEQ ID NO: 917235
guccguuuccaggaaucau

SEQ ID NO: 1219481 - RNA, 19 nt, Artificial Sequence
  Description of Artificial Sequence: Synthetic oligonucleotide
  Antisense strand to SEQ ID NO: 1219480
augauuccuggaaacggac

SEQ ID NO: 1219482 - RNA, 19 nt, Artificial Sequence
  Description of Artificial Sequence: Synthetic oligonucleotide
  Sense strand starting at position 3630 of SEQ ID NO: 917235
uaagauuauucugugugcu

SEQ ID NO: 1219483 - RNA, 19 nt, Artificial Sequence
  Description of Artificial Sequence: Synthetic oligonucleotide
  Antisense strand to SEQ ID NO: 1219482
agcacacagaauaaucuua

SEQ ID NO: 1219484 - RNA, 19 nt, Artificial Sequence
  Description of Artificial Sequence: Synthetic oligonucleotide
  Sense strand starting at position 3631 of SEQ ID NO: 917235
aagauuauucugugugcug

SEQ ID NO: 1219485 - RNA, 19 nt, Artificial Sequence
  Description of Artificial Sequence: Synthetic oligonucleotide
  Antisense strand to SEQ ID NO: 1219484
cagcacacagaauaaucuu

SEQ ID NO: 1219486 - RNA, 19 nt, Artificial Sequence
  Description of Artificial Sequence: Synthetic oligonucleotide
  Sense strand starting at position 3741 of SEQ ID NO: 917235
ggauguggcccuuacuuua

SEQ ID NO: 1219487 - RNA, 19 nt, Artificial Sequence
  Description of Artificial Sequence: Synthetic oligonucleotide
  Antisense strand to SEQ ID NO: 1219486
uaaaguaagggccacaucc

SEQ ID NO: 1219488 - RNA, 19 nt, Artificial Sequence
  Description of Artificial Sequence: Synthetic oligonucleotide
  Sense strand starting at position 3797 of SEQ ID NO: 917235
uuuccuauuugcuuuguca

SEQ ID NO: 1219489 - RNA, 19 nt, Artificial Sequence
  Description of Artificial Sequence: Synthetic oligonucleotide
  Antisense strand to SEQ ID NO: 1219488
ugacaaagcaaauaggaaa

SEQ ID NO: 1219490 - RNA, 19 nt, Artificial Sequence
  Description of Artificial Sequence: Synthetic oligonucleotide
  Sense strand starting at position 3799 of SEQ ID NO: 917235
uccuauuugcuuugucauu

SEQ ID NO: 1219491 - RNA, 19 nt, Artificial Sequence
  Description of Artificial Sequence: Synthetic oligonucleotide
  Antisense strand to SEQ ID NO: 1219490
aaugacaaagcaaauagga

SEQ ID NO: 1219492 - RNA, 19 nt, Artificial Sequence
  Description of Artificial Sequence: Synthetic oligonucleotide
  Sense strand starting at position 3800 of SEQ ID NO: 917235
ccuauuugcuuugucauua

SEQ ID NO: 1219493 - RNA, 19 nt, Artificial Sequence
  Description of Artificial Sequence: Synthetic oligonucleotide
  Antisense strand to SEQ ID NO: 1219492
uaaugacaaagcaaauagg

SEQ ID NO: 1219494 - RNA, 19 nt, Artificial Sequence
  Description of Artificial Sequence: Synthetic oligonucleotide
  Sense strand starting at position 3801 of SEQ ID NO: 917235
cuauuugcuuugucauuau

SEQ ID NO: 1219495 - RNA, 19 nt, Artificial Sequence
  Description of Artificial Sequence: Synthetic oligonucleotide
  Antisense strand to SEQ ID NO: 1219494
auaaugacaaagcaaauag

SEQ ID NO: 1219496 - RNA, 19 nt, Artificial Sequence
  Description of Artificial Sequence: Synthetic oligonucleotide
  Sense strand starting at position 3842 of SEQ ID NO: 917235
uuuauuaucgcauacagaa

SEQ ID NO: 1219497 - RNA, 19 nt, Artificial Sequence
  Description of Artificial Sequence: Synthetic oligonucleotide
  Antisense strand to SEQ ID NO: 1219496
uucuguaugcgauaauaaa

SEQ ID NO: 1219498 - RNA, 19 nt, Artificial Sequence
  Description of Artificial Sequence: Synthetic oligonucleotide
  Sense strand starting at position 3881 of SEQ ID NO: 917235
gggaaauucugcuauuucc

SEQ ID NO: 1219499 - RNA, 19 nt, Artificial Sequence
  Description of Artificial Sequence: Synthetic oligonucleotide
  Antisense strand to SEQ ID NO: 1219498
ggaaauagcagaauuuccc

SEQ ID NO: 1219500 - RNA, 19 nt, Artificial Sequence
  Description of Artificial Sequence: Synthetic oligonucleotide
  Sense strand starting at position 3978 of SEQ ID NO: 917236
ucaaauucugguugugugu

SEQ ID NO: 1219501 - RNA, 19 nt, Artificial Sequence
  Description of Artificial Sequence: Synthetic oligonucleotide
  Antisense strand to SEQ ID NO: 1219500
acacacaaccagaauuuga

SEQ ID NO: 1219502 - RNA, 19 nt, Artificial Sequence
  Description of Artificial Sequence: Synthetic oligonucleotide
  Sense strand starting at position 4 of SEQ ID NO: 917236
agaacacuguaugucaaau

SEQ ID NO: 1219503 - RNA, 19 nt, Artificial Sequence
  Description of Artificial Sequence: Synthetic oligonucleotide
  Antisense strand to SEQ ID NO: 1219502
auuugacauacaguguucu

SEQ ID NO: 1219504 - RNA, 19 nt, Artificial Sequence
  Description of Artificial Sequence: Synthetic oligonucleotide
  Sense strand starting at position 63 of SEQ ID NO: 917236
cauccuugaguguaaagua

SEQ ID NO: 1219505 - RNA, 19 nt, Artificial Sequence
  Description of Artificial Sequence: Synthetic oligonucleotide
  Antisense strand to SEQ ID NO: 1219504
uacuuuacacucaaggaug

SEQ ID NO: 1219506 - RNA, 19 nt, Artificial Sequence
  Description of Artificial Sequence: Synthetic oligonucleotide
  Sense strand starting at position 111 of SEQ ID NO: 917236
auuuauagcuaugacaagu

SEQ ID NO: 1219507 - RNA, 19 nt, Artificial Sequence
  Description of Artificial Sequence: Synthetic oligonucleotide
  Antisense strand to SEQ ID NO: 1219506
acuugucauagcuauaaau

SEQ ID NO: 1219508 - RNA, 19 nt, Artificial Sequence
  Description of Artificial Sequence: Synthetic oligonucleotide
  Sense strand starting at position 131 of SEQ ID NO: 917236
aagaaugcuguuugggcaa

SEQ ID NO: 1219509 - RNA, 19 nt, Artificial Sequence
  Description of Artificial Sequence: Synthetic oligonucleotide
  Antisense strand to SEQ ID NO: 1219508
uugcccaaacagcauucuu

SEQ ID NO: 1219510 - RNA, 19 nt, Artificial Sequence
  Description of Artificial Sequence: Synthetic oligonucleotide
  Sense strand starting at position 138 of SEQ ID NO: 917236
cuguuugggcaacaguauu

SEQ ID NO: 1219511 - RNA, 19 nt, Artificial Sequence
  Description of Artificial Sequence: Synthetic oligonucleotide
  Antisense strand to SEQ ID NO: 1219510
aauacuguugcccaaacag

SEQ ID NO: 1219512 - RNA, 19 nt, Artificial Sequence
  Description of Artificial Sequence: Synthetic oligonucleotide
  Sense strand starting at position 244 of SEQ ID NO: 917236
gguuucuauggauaucauu

SEQ ID NO: 1219513 - RNA, 19 nt, Artificial Sequence
  Description of Artificial Sequence: Synthetic oligonucleotide
  Antisense strand to SEQ ID NO: 1219512
aaugauauccauagaaacc

SEQ ID NO: 1219514 - RNA, 19 nt, Artificial Sequence
  Description of Artificial Sequence: Synthetic oligonucleotide
  Sense strand starting at position 266 of SEQ ID NO: 917236
agaugcacaucccugaaua

SEQ ID NO: 1219515 - RNA, 19 nt, Artificial Sequence
  Description of Artificial Sequence: Synthetic oligonucleotide
  Antisense strand to SEQ ID NO: 1219514
uauucagggaugugcaucu

SEQ ID NO: 1219516 - RNA, 19 nt, Artificial Sequence
  Description of Artificial Sequence: Synthetic oligonucleotide
  Sense strand starting at position 276 of SEQ ID NO: 917236
cccugaauaccuuaaggcu

SEQ ID NO: 1219517 - RNA, 19 nt, Artificial Sequence
  Description of Artificial Sequence: Synthetic oligonucleotide
  Antisense strand to SEQ ID NO: 1219516
agccuuaagguauucaggg

SEQ ID NO: 1219518 - RNA, 19 nt, Artificial Sequence
  Description of Artificial Sequence: Synthetic oligonucleotide
  Sense strand starting at position 385 of SEQ ID NO: 917236
ucauuuguguaggagacaa

SEQ ID NO: 1219519 - RNA, 19 nt, Artificial Sequence
  Description of Artificial Sequence: Synthetic oligonucleotide
  Antisense strand to SEQ ID NO: 1219518
uugucuccuacacaaauga

SEQ ID NO: 1219520 - RNA, 19 nt, Artificial Sequence
  Description of Artificial Sequence: Synthetic oligonucleotide
  Sense strand starting at position 407 of SEQ ID NO: 917236
aucacuagcucuuugagca

SEQ ID NO: 1219521 - RNA, 19 nt, Artificial Sequence
  Description of Artificial Sequence: Synthetic oligonucleotide
  Antisense strand to SEQ ID NO: 1219520
ugcucaaagagcuagugau

SEQ ID NO: 1219522 - RNA, 19 nt, Artificial Sequence
  Description of Artificial Sequence: Synthetic oligonucleotide
  Sense strand starting at position 426 of SEQ ID NO: 917236
cagguagguuaaucaguau

SEQ ID NO: 1219523 - RNA, 19 nt, Artificial Sequence
  Description of Artificial Sequence: Synthetic oligonucleotide
  Antisense strand to SEQ ID NO: 1219522
auacugauuaaccuaccug

SEQ ID NO: 1219524 - RNA, 19 nt, Artificial Sequence
  Description of Artificial Sequence: Synthetic oligonucleotide
  Sense strand starting at position 429 of SEQ ID NO: 917236
guagguuaaucaguaugca

SEQ ID NO: 1219525 - RNA, 19 nt, Artificial Sequence
  Description of Artificial Sequence: Synthetic oligonucleotide
  Antisense strand to SEQ ID NO: 1219524
ugcauacugauuaaccuac

SEQ ID NO: 1219526 - RNA, 19 nt, Artificial Sequence
  Description of Artificial Sequence: Synthetic oligonucleotide
  Sense strand starting at position 432 of SEQ ID NO: 917236
gguuaaucaguaugcacau

SEQ ID NO: 1219527 - RNA, 19 nt, Artificial Sequence
  Description of Artificial Sequence: Synthetic oligonucleotide
  Antisense strand to SEQ ID NO: 1219526
augugcauacugauuaacc

SEQ ID NO: 1219528 - RNA, 19 nt, Artificial Sequence
  Description of Artificial Sequence: Synthetic oligonucleotide
  Sense strand starting at position 433 of SEQ ID NO: 917236
guuaaucaguaugcacaua

SEQ ID NO: 1219529 - RNA, 19 nt, Artificial Sequence
  Description of Artificial Sequence: Synthetic oligonucleotide
  Antisense strand to SEQ ID NO: 1219528
uaugugcauacugauuaac

SEQ ID NO: 1219530 - RNA, 19 nt, Artificial Sequence
  Description of Artificial Sequence: Synthetic oligonucleotide
  Sense strand starting at position 511 of SEQ ID NO: 917236
guaauaccugcugaucuuu

SEQ ID NO: 1219531 - RNA, 19 nt, Artificial Sequence
  Description of Artificial Sequence: Synthetic oligonucleotide
  Antisense strand to SEQ ID NO: 1219530
aaagaucagcagguauuac

SEQ ID NO: 1219532 - RNA, 19 nt, Artificial Sequence
  Description of Artificial Sequence: Synthetic oligonucleotide
  Sense strand starting at position 602 of SEQ ID NO: 917236
ggcaucauugaucaccuga

SEQ ID NO: 1219533 - RNA, 19 nt, Artificial Sequence
  Description of Artificial Sequence: Synthetic oligonucleotide
  Antisense strand to SEQ ID NO: 1219532
ucaggugaucaaugaugcc

SEQ ID NO: 1219534 - RNA, 19 nt, Artificial Sequence
  Description of Artificial Sequence: Synthetic oligonucleotide
  Sense strand starting at position 696 of SEQ ID NO: 917236
ccuuauguaggucagaaau

SEQ ID NO: 1219535 - RNA, 19 nt, Artificial Sequence
  Description of Artificial Sequence: Synthetic oligonucleotide
  Antisense strand to SEQ ID NO: 1219534
auuucugaccuacauaagg

SEQ ID NO: 1219536 - RNA, 19 nt, Artificial Sequence
  Description of Artificial Sequence: Synthetic oligonucleotide
  Sense strand starting at position 702 of SEQ ID NO: 917236
guaggucagaaauggaacu

SEQ ID NO: 1219537 - RNA, 19 nt, Artificial Sequence
  Description of Artificial Sequence: Synthetic oligonucleotide
  Antisense strand to SEQ ID NO: 1219536
aguuccauuucugaccuac

SEQ ID NO: 1219538 - RNA, 19 nt, Artificial Sequence
  Description of Artificial Sequence: Synthetic oligonucleotide
  Sense strand starting at position 762 of SEQ ID NO: 917236
gucagaaccucacuuguuu

SEQ ID NO: 1219539 - RNA, 19 nt, Artificial Sequence
  Description of Artificial Sequence: Synthetic oligonucleotide
  Antisense strand to SEQ ID NO: 1219538
aaacaagugagguucugac

SEQ ID NO: 1219540 - RNA, 19 nt, Artificial Sequence
  Description of Artificial Sequence: Synthetic oligonucleotide
  Sense strand starting at position 794 of SEQ ID NO: 917236
gcacaauauuuggacuaua

SEQ ID NO: 1219541 - RNA, 19 nt, Artificial Sequence
  Description of Artificial Sequence: Synthetic oligonucleotide
  Antisense strand to SEQ ID NO: 1219540
uauaguccaaauauugugc

SEQ ID NO: 1219542 - RNA, 19 nt, Artificial Sequence
  Description of Artificial Sequence: Synthetic oligonucleotide
  Sense strand starting at position 898 of SEQ ID NO: 917236
ugcagaugccucuauauac

SEQ ID NO: 1219543 - RNA, 19 nt, Artificial Sequence
  Description of Artificial Sequence: Synthetic oligonucleotide
  Antisense strand to SEQ ID NO: 1219542
guauauagaggcaucugca

SEQ ID NO: 1219544 - RNA, 19 nt, Artificial Sequence
  Description of Artificial Sequence: Synthetic oligonucleotide
  Sense strand starting at position 1132 of SEQ ID NO: 917236
agggcugccucacuugaaa

SEQ ID NO: 1219545 - RNA, 19 nt, Artificial Sequence
  Description of Artificial Sequence: Synthetic oligonucleotide
  Antisense strand to SEQ ID NO: 1219544
uuucaagugaggcagcccu

SEQ ID NO: 1219546 - RNA, 19 nt, Artificial Sequence
  Description of Artificial Sequence: Synthetic oligonucleotide
  Sense strand starting at position 1346 of SEQ ID NO: 917236
aacauauguguccaguuga

SEQ ID NO: 1219547 - RNA, 19 nt, Artificial Sequence
  Description of Artificial Sequence: Synthetic oligonucleotide
  Antisense strand to SEQ ID NO: 1219546
ucaacuggacacauauguu

SEQ ID NO: 1219548 - RNA, 19 nt, Artificial Sequence
  Description of Artificial Sequence: Synthetic oligonucleotide
  Sense strand starting at position 1372 of SEQ ID NO: 917236
ugucuccagccuuaugcaa

SEQ ID NO: 1219549 - RNA, 19 nt, Artificial Sequence
  Description of Artificial Sequence: Synthetic oligonucleotide
  Antisense strand to SEQ ID NO: 1219548
uugcauaaggcuggagaca

SEQ ID NO: 1219550 - RNA, 19 nt, Artificial Sequence
  Description of Artificial Sequence: Synthetic oligonucleotide
  Sense strand starting at position 2056 of SEQ ID NO: 917236
ggaggaauuucccagcuuc

SEQ ID NO: 1219551 - RNA, 19 nt, Artificial Sequence
  Description of Artificial Sequence: Synthetic oligonucleotide
  Antisense strand to SEQ ID NO: 1219550
gaagcugggaaauuccucc

SEQ ID NO: 1219552 - RNA, 19 nt, Artificial Sequence
  Description of Artificial Sequence: Synthetic oligonucleotide
  Sense strand starting at position 2145 of SEQ ID NO: 917236
gugucugucccugaaauaa

SEQ ID NO: 1219553 - RNA, 19 nt, Artificial Sequence
  Description of Artificial Sequence: Synthetic oligonucleotide
  Antisense strand to SEQ ID NO: 1219552
uuauuucagggacagacac

SEQ ID NO: 1219554 - RNA, 19 nt, Artificial Sequence
  Description of Artificial Sequence: Synthetic oligonucleotide
  Sense strand starting at position 2592 of SEQ ID NO: 917236
gauaucagguguccugauu

SEQ ID NO: 1219555 - RNA, 19 nt, Artificial Sequence
  Description of Artificial Sequence: Synthetic oligonucleotide
  Antisense strand to SEQ ID NO: 1219554
aaucaggacaccugauauc

SEQ ID NO: 1219556 - RNA, 19 nt, Artificial Sequence
  Description of Artificial Sequence: Synthetic oligonucleotide
  Sense strand starting at position 2681 of SEQ ID NO: 917236
augacagguuauguuggaa

SEQ ID NO: 1219557 - RNA, 19 nt, Artificial Sequence
  Description of Artificial Sequence: Synthetic oligonucleotide
  Antisense strand to SEQ ID NO: 1219556
uuccaacauaaccugucau

SEQ ID NO: 1219558 - RNA, 19 nt, Artificial Sequence
  Description of Artificial Sequence: Synthetic oligonucleotide
  Sense strand starting at position 2686 of SEQ ID NO: 917236
agguuauguuggaagaggu

SEQ ID NO: 1219559 - RNA, 19 nt, Artificial Sequence
  Description of Artificial Sequence: Synthetic oligonucleotide
  Antisense strand to SEQ ID NO: 1219558
accucuuccaacauaaccu

SEQ ID NO: 1219560 - RNA, 19 nt, Artificial Sequence
  Description of Artificial Sequence: Synthetic oligonucleotide
  Sense strand starting at position 2824 of SEQ ID NO: 917236
agcaaauguugggcuaacu

SEQ ID NO: 1219561 - RNA, 19 nt, Artificial Sequence
  Description of Artificial Sequence: Synthetic oligonucleotide
  Antisense strand to SEQ ID NO: 1219560
aguuagcccaacauuugcu

SEQ ID NO: 1219562 - RNA, 19 nt, Artificial Sequence
  Description of Artificial Sequence: Synthetic oligonucleotide
  Sense strand starting at position 2970 of SEQ ID NO: 917236
cuagaacuauguucugaaa

SEQ ID NO: 1219563 - RNA, 19 nt, Artificial Sequence
  Description of Artificial Sequence: Synthetic oligonucleotide
  Antisense strand to SEQ ID NO: 1219562
uuucagaacauaguucuag

SEQ ID NO: 1219564 - RNA, 19 nt, Artificial Sequence
  Description of Artificial Sequence: Synthetic oligonucleotide
  Sense strand starting at position 3140 of SEQ ID NO: 917236
gcauacuagaguugcugaa

SEQ ID NO: 1219565 - RNA, 19 nt, Artificial Sequence
  Description of Artificial Sequence: Synthetic oligonucleotide
  Antisense strand to SEQ ID NO: 1219564
uucagcaacucuaguaugc

SEQ ID NO: 1219566 - RNA, 19 nt, Artificial Sequence
  Description of Artificial Sequence: Synthetic oligonucleotide
  Sense strand starting at position 3142 of SEQ ID NO: 917236
auacuagaguugcugaacu

SEQ ID NO: 1219567 - RNA, 19 nt, Artificial Sequence
  Description of Artificial Sequence: Synthetic oligonucleotide
  Antisense strand to SEQ ID NO: 1219566
aguucagcaacucuaguau

SEQ ID NO: 1219568 - RNA, 19 nt, Artificial Sequence
  Description of Artificial Sequence: Synthetic oligonucleotide
  Sense strand starting at position 3144 of SEQ ID NO: 917236
acuagaguugcugaacuga

SEQ ID NO: 1219569 - RNA, 19 nt, Artificial Sequence
  Description of Artificial Sequence: Synthetic oligonucleotide
  Antisense strand to SEQ ID NO: 1219568
ucaguucagcaacucuagu

SEQ ID NO: 1219570 - RNA, 19 nt, Artificial Sequence
  Description of Artificial Sequence: Synthetic oligonucleotide
  Sense strand starting at position 3168 of SEQ ID NO: 917236
ucacuuguacuuugaaugu

SEQ ID NO: 1219571 - RNA, 19 nt, Artificial Sequence
  Description of Artificial Sequence: Synthetic oligonucleotide
  Antisense strand to SEQ ID NO: 1219570
acauucaaaguacaaguga

SEQ ID NO: 1219572 - RNA, 19 nt, Artificial Sequence
  Description of Artificial Sequence: Synthetic oligonucleotide
  Sense strand starting at position 3174 of SEQ ID NO: 917236
guacuuugaauguauggau

SEQ ID NO: 1219573 - RNA, 19 nt, Artificial Sequence
  Description of Artificial Sequence: Synthetic oligonucleotide
  Antisense strand to SEQ ID NO: 1219572
auccauacauucaaaguac

SEQ ID NO: 1219574 - RNA, 19 nt, Artificial Sequence
  Description of Artificial Sequence: Synthetic oligonucleotide
  Sense strand starting at position 3287 of SEQ ID NO: 917236
cucagauggcagugaauga

SEQ ID NO: 1219575 - RNA, 19 nt, Artificial Sequence
  Description of Artificial Sequence: Synthetic oligonucleotide
  Antisense strand to SEQ ID NO: 1219574
ucauucacugccaucugag

SEQ ID NO: 1219576 - RNA, 19 nt, Artificial Sequence
  Description of Artificial Sequence: Synthetic oligonucleotide
  Sense strand starting at position 3471 of SEQ ID NO: 917236
uuccuauaguuguuggaaa

SEQ ID NO: 1219577 - RNA, 19 nt, Artificial Sequence
  Description of Artificial Sequence: Synthetic oligonucleotide
  Antisense strand to SEQ ID NO: 1219576
uuuccaacaacuauaggaa

SEQ ID NO: 1219578 - RNA, 19 nt, Artificial Sequence
  Description of Artificial Sequence: Synthetic oligonucleotide
  Sense strand starting at position 3473 of SEQ ID NO: 917236
ccuauaguuguuggaaaca

SEQ ID NO: 1219579 - RNA, 19 nt, Artificial Sequence
  Description of Artificial Sequence: Synthetic oligonucleotide
  Antisense strand to SEQ ID NO: 1219578
uguuuccaacaacuauagg

SEQ ID NO: 1219580 - RNA, 19 nt, Artificial Sequence
  Description of Artificial Sequence: Synthetic oligonucleotide
  Sense strand starting at position 3527 of SEQ ID NO: 917237
guaucuugcccauaguuaa

SEQ ID NO: 1219581 - RNA, 19 nt, Artificial Sequence
  Description of Artificial Sequence: Synthetic oligonucleotide
  Antisense strand to SEQ ID NO: 1219580
uuaacuaugggcaagauac

SEQ ID NO: 1219582 - RNA, 19 nt, Artificial Sequence
  Description of Artificial Sequence: Synthetic oligonucleotide
  Sense strand starting at position 24 of SEQ ID NO: 917237
gggacugacuugggaagaa

SEQ ID NO: 1219583 - RNA, 19 nt, Artificial Sequence
  Description of Artificial Sequence: Synthetic oligonucleotide
  Antisense strand to SEQ ID NO: 1219582
uucuucccaagucaguccc

SEQ ID NO: 1219584 - RNA, 19 nt, Artificial Sequence
  Description of Artificial Sequence: Synthetic oligonucleotide
  Sense strand starting at position 59 of SEQ ID NO: 917237
ggcagcguccagucugauu

SEQ ID NO: 1219585 - RNA, 19 nt, Artificial Sequence
  Description of Artificial Sequence: Synthetic oligonucleotide
  Antisense strand to SEQ ID NO: 1219584
aaucagacuggacgcugcc

SEQ ID NO: 1219586 - RNA, 19 nt, Artificial Sequence
  Description of Artificial Sequence: Synthetic oligonucleotide
  Sense strand starting at position 61 of SEQ ID NO: 917237
cagcguccagucugauuga

SEQ ID NO: 1219587 - RNA, 19 nt, Artificial Sequence
  Description of Artificial Sequence: Synthetic oligonucleotide
  Antisense strand to SEQ ID NO: 1219586
ucaaucagacuggacgcug

SEQ ID NO: 1219588 - RNA, 19 nt, Artificial Sequence
  Description of Artificial Sequence: Synthetic oligonucleotide
  Sense strand starting at position 64 of SEQ ID NO: 917237
cguccagucugauugacau

SEQ ID NO: 1219589 - RNA, 19 nt, Artificial Sequence
  Description of Artificial Sequence: Synthetic oligonucleotide
  Antisense strand to SEQ ID NO: 1219588
augucaaucagacuggacg

SEQ ID NO: 1219590 - RNA, 19 nt, Artificial Sequence
  Description of Artificial Sequence: Synthetic oligonucleotide
  Sense strand starting at position 227 of SEQ ID NO: 917237
cgcagaauguuccggguga

SEQ ID NO: 1219591 - RNA, 19 nt, Artificial Sequence
  Description of Artificial Sequence: Synthetic oligonucleotide
  Antisense strand to SEQ ID NO: 1219590
ucacccggaacauucugcg

SEQ ID NO: 1219592 - RNA, 19 nt, Artificial Sequence
  Description of Artificial Sequence: Synthetic oligonucleotide
  Sense strand starting at position 228 of SEQ ID NO: 917237
gcagaauguuccgggugag

SEQ ID NO: 1219593 - RNA, 19 nt, Artificial Sequence
  Description of Artificial Sequence: Synthetic oligonucleotide
  Antisense strand to SEQ ID NO: 1219592
cucacccggaacauucugc

SEQ ID NO: 1219594 - RNA, 19 nt, Artificial Sequence
  Description of Artificial Sequence: Synthetic oligonucleotide
  Sense strand starting at position 231 of SEQ ID NO: 917237
gaauguuccgggugaggac

SEQ ID NO: 1219595 - RNA, 19 nt, Artificial Sequence
  Description of Artificial Sequence: Synthetic oligonucleotide
  Antisense strand to SEQ ID NO: 1219594
guccucacccggaacauuc

SEQ ID NO: 1219596 - RNA, 19 nt, Artificial Sequence
  Description of Artificial Sequence: Synthetic oligonucleotide
  Sense strand starting at position 479 of SEQ ID NO: 917237
gcgucaucucugcagggau

SEQ ID NO: 1219597 - RNA, 19 nt, Artificial Sequence
  Description of Artificial Sequence: Synthetic oligonucleotide
  Antisense strand to SEQ ID NO: 1219596
aucccugcagagaugacgc

SEQ ID NO: 1219598 - RNA, 19 nt, Artificial Sequence
  Description of Artificial Sequence: Synthetic oligonucleotide
  Sense strand starting at position 481 of SEQ ID NO: 917237
gucaucucugcagggauga

SEQ ID NO: 1219599 - RNA, 19 nt, Artificial Sequence
  Description of Artificial Sequence: Synthetic oligonucleotide
  Antisense strand to SEQ ID NO: 1219598
ucaucccugcagagaugac

SEQ ID NO: 1219600 - RNA, 19 nt, Artificial Sequence
  Description of Artificial Sequence: Synthetic oligonucleotide
  Sense strand starting at position 496 of SEQ ID NO: 917237
augagcuauguccacaagu

SEQ ID NO: 1219601 - RNA, 19 nt, Artificial Sequence
  Description of Artificial Sequence: Synthetic oligonucleotide
  Antisense strand to SEQ ID NO: 1219600
acuuguggacauagcucau

SEQ ID NO: 1219602 - RNA, 19 nt, Artificial Sequence
  Description of Artificial Sequence: Synthetic oligonucleotide
  Sense strand starting at position 582 of SEQ ID NO: 917237
cuagaaauguaagcggaaa

SEQ ID NO: 1219603 - RNA, 19 nt, Artificial Sequence
  Description of Artificial Sequence: Synthetic oligonucleotide
  Antisense strand to SEQ ID NO: 1219602
uuuccgcuuacauuucuag

SEQ ID NO: 1219604 - RNA, 19 nt, Artificial Sequence
  Description of Artificial Sequence: Synthetic oligonucleotide
  Sense strand starting at position 584 of SEQ ID NO: 917237
agaaauguaagcggaaaca

SEQ ID NO: 1219605 - RNA, 19 nt, Artificial Sequence
  Description of Artificial Sequence: Synthetic oligonucleotide
  Antisense strand to SEQ ID NO: 1219604
uguuuccgcuuacauuucu

SEQ ID NO: 1219606 - RNA, 19 nt, Artificial Sequence
  Description of Artificial Sequence: Synthetic oligonucleotide
  Sense strand starting at position 996 of SEQ ID NO: 917237
gcucgauuccuggaaucuu

SEQ ID NO: 1219607 - RNA, 19 nt, Artificial Sequence
  Description of Artificial Sequence: Synthetic oligonucleotide
  Antisense strand to SEQ ID NO: 1219606
aagauuccaggaaucgagc

SEQ ID NO: 1219608 - RNA, 19 nt, Artificial Sequence
  Description of Artificial Sequence: Synthetic oligonucleotide
  Sense strand starting at position 1184 of SEQ ID NO: 917237
uuguguuucucucgcacuu

SEQ ID NO: 1219609 - RNA, 19 nt, Artificial Sequence
  Description of Artificial Sequence: Synthetic oligonucleotide
  Antisense strand to SEQ ID NO: 1219608
aagugcgagagaaacacaa

SEQ ID NO: 1219610 - RNA, 19 nt, Artificial Sequence
  Description of Artificial Sequence: Synthetic oligonucleotide
  Sense strand starting at position 2202 of SEQ ID NO: 917237
gaccauauuccagguguca

SEQ ID NO: 1219611 - RNA, 19 nt, Artificial Sequence
  Description of Artificial Sequence: Synthetic oligonucleotide
  Antisense strand to SEQ ID NO: 1219610
ugacaccuggaauaugguc

SEQ ID NO: 1219612 - RNA, 19 nt, Artificial Sequence
  Description of Artificial Sequence: Synthetic oligonucleotide
  Sense strand starting at position 2211 of SEQ ID NO: 917237
ccaggugucaugugaagau

SEQ ID NO: 1219613 - RNA, 19 nt, Artificial Sequence
  Description of Artificial Sequence: Synthetic oligonucleotide
  Antisense strand to SEQ ID NO: 1219612
aucuucacaugacaccugg

SEQ ID NO: 1219614 - RNA, 19 nt, Artificial Sequence
  Description of Artificial Sequence: Synthetic oligonucleotide
  Sense strand starting at position 2437 of SEQ ID NO: 917237
gagguuucccaguagauau

SEQ ID NO: 1219615 - RNA, 19 nt, Artificial Sequence
  Description of Artificial Sequence: Synthetic oligonucleotide
  Antisense strand to SEQ ID NO: 1219614
auaucuacugggaaaccuc

SEQ ID NO: 1219616 - RNA, 19 nt, Artificial Sequence
  Description of Artificial Sequence: Synthetic oligonucleotide
  Sense strand starting at position 2467 of SEQ ID NO: 917237
gcaacauugugcuugucuu

SEQ ID NO: 1219617 - RNA, 19 nt, Artificial Sequence
  Description of Artificial Sequence: Synthetic oligonucleotide
  Antisense strand to SEQ ID NO: 1219616
aagacaagcacaauguugc

SEQ ID NO: 1219618 - RNA, 19 nt, Artificial Sequence
  Description of Artificial Sequence: Synthetic oligonucleotide
  Sense strand starting at position 2492 of SEQ ID NO: 917237
ccaagacuuucuggcucuu

SEQ ID NO: 1219619 - RNA, 19 nt, Artificial Sequence
  Description of Artificial Sequence: Synthetic oligonucleotide
  Antisense strand to SEQ ID NO: 1219618
aagagccagaaagucuugg

SEQ ID NO: 1219620 - RNA, 19 nt, Artificial Sequence
  Description of Artificial Sequence: Synthetic oligonucleotide
  Sense strand starting at position 2503 of SEQ ID NO: 917237
uggcucuugucuuggaaua

SEQ ID NO: 1219621 - RNA, 19 nt, Artificial Sequence
  Description of Artificial Sequence: Synthetic oligonucleotide
  Antisense strand to SEQ ID NO: 1219620
uauuccaagacaagagcca

SEQ ID NO: 1219622 - RNA, 19 nt, Artificial Sequence
  Description of Artificial Sequence: Synthetic oligonucleotide
  Sense strand starting at position 2504 of SEQ ID NO: 917237
ggcucuugucuuggaauau

SEQ ID NO: 1219623 - RNA, 19 nt, Artificial Sequence
  Description of Artificial Sequence: Synthetic oligonucleotide
  Antisense strand to SEQ ID NO: 1219622
auauuccaagacaagagcc

SEQ ID NO: 1219624 - RNA, 19 nt, Artificial Sequence
  Description of Artificial Sequence: Synthetic oligonucleotide
  Sense strand starting at position 2505 of SEQ ID NO: 917237
gcucuugucuuggaauauu

SEQ ID NO: 1219625 - RNA, 19 nt, Artificial Sequence
  Description of Artificial Sequence: Synthetic oligonucleotide
  Antisense strand to SEQ ID NO: 1219624
aauauuccaagacaagagc

SEQ ID NO: 1219626 - RNA, 19 nt, Artificial Sequence
  Description of Artificial Sequence: Synthetic oligonucleotide
  Sense strand starting at position 2513 of SEQ ID NO: 917237
cuuggaauauuucgcaaag

SEQ ID NO: 1219627 - RNA, 19 nt, Artificial Sequence
  Description of Artificial Sequence: Synthetic oligonucleotide
  Antisense strand to SEQ ID NO: 1219626
cuuugcgaaauauuccaag

SEQ ID NO: 1219628 - RNA, 19 nt, Artificial Sequence
  Description of Artificial Sequence: Synthetic oligonucleotide
  Sense strand starting at position 2515 of SEQ ID NO: 917237
uggaauauuucgcaaaguc

SEQ ID NO: 1219629 - RNA, 19 nt, Artificial Sequence
  Description of Artificial Sequence: Synthetic oligonucleotide
  Antisense strand to SEQ ID NO: 1219628
gacuuugcgaaauauucca

SEQ ID NO: 1219630 - RNA, 19 nt, Artificial Sequence
  Description of Artificial Sequence: Synthetic oligonucleotide
  Sense strand starting at position 2523 of SEQ ID NO: 917237
uucgcaaagucauaggcaa

SEQ ID NO: 1219631 - RNA, 19 nt, Artificial Sequence
  Description of Artificial Sequence: Synthetic oligonucleotide
  Antisense strand to SEQ ID NO: 1219630
uugccuaugacuuugcgaa

SEQ ID NO: 1219632 - RNA, 19 nt, Artificial Sequence
  Description of Artificial Sequence: Synthetic oligonucleotide
  Sense strand starting at position 2643 of SEQ ID NO: 917237
ggauacuccucucuggaga

SEQ ID NO: 1219633 - RNA, 19 nt, Artificial Sequence
  Description of Artificial Sequence: Synthetic oligonucleotide
  Antisense strand to SEQ ID NO: 1219632
ucuccagagaggaguaucc

SEQ ID NO: 1219634 - RNA, 19 nt, Artificial Sequence
  Description of Artificial Sequence: Synthetic oligonucleotide
  Sense strand starting at position 2645 of SEQ ID NO: 917237
auacuccucucuggagaau

SEQ ID NO: 1219635 - RNA, 19 nt, Artificial Sequence
  Description of Artificial Sequence: Synthetic oligonucleotide
  Antisense strand to SEQ ID NO: 1219634
auucuccagagaggaguau

SEQ ID NO: 1219636 - RNA, 19 nt, Artificial Sequence
  Description of Artificial Sequence: Synthetic oligonucleotide
  Sense strand starting at position 2657 of SEQ ID NO: 917237
ggagaauccugcucuggaa

SEQ ID NO: 1219637 - RNA, 19 nt, Artificial Sequence
  Description of Artificial Sequence: Synthetic oligonucleotide
  Antisense strand to SEQ ID NO: 1219636
uuccagagcaggauucucc

SEQ ID NO: 1219638 - RNA, 19 nt, Artificial Sequence
  Description of Artificial Sequence: Synthetic oligonucleotide
  Sense strand starting at position 2792 of SEQ ID NO: 917237
gcuuucuguaauuggaaga

SEQ ID NO: 1219639 - RNA, 19 nt, Artificial Sequence
  Description of Artificial Sequence: Synthetic oligonucleotide
  Antisense strand to SEQ ID NO: 1219638
ucuuccaauuacagaaagc

SEQ ID NO: 1219640 - RNA, 19 nt, Artificial Sequence
  Description of Artificial Sequence: Synthetic oligonucleotide
  Sense strand starting at position 2817 of SEQ ID NO: 917237
uaggauugcugcuagaaau

SEQ ID NO: 1219641 - RNA, 19 nt, Artificial Sequence
  Description of Artificial Sequence: Synthetic oligonucleotide
  Antisense strand to SEQ ID NO: 1219640
auuucuagcagcaauccua

SEQ ID NO: 1219642 - RNA, 19 nt, Artificial Sequence
  Description of Artificial Sequence: Synthetic oligonucleotide
  Sense strand starting at position 2827 of SEQ ID NO: 917237
gcuagaaaucuuugagguc

SEQ ID NO: 1219643 - RNA, 19 nt, Artificial Sequence
  Description of Artificial Sequence: Synthetic oligonucleotide
  Antisense strand to SEQ ID NO: 1219642
gaccucaaagauuucuagc

SEQ ID NO: 1219644 - RNA, 19 nt, Artificial Sequence
  Description of Artificial Sequence: Synthetic oligonucleotide
  Sense strand starting at position 2830 of SEQ ID NO: 917237
agaaaucuuugaggucacu

SEQ ID NO: 1219645 - RNA, 19 nt, Artificial Sequence
  Description of Artificial Sequence: Synthetic oligonucleotide
  Antisense strand to SEQ ID NO: 1219644
agugaccucaaagauuucu

SEQ ID NO: 1219646 - RNA, 19 nt, Artificial Sequence
  Description of Artificial Sequence: Synthetic oligonucleotide
  Sense strand starting at position 2839 of SEQ ID NO: 917237
ugaggucacugguuugaaa

SEQ ID NO: 1219647 - RNA, 19 nt, Artificial Sequence
  Description of Artificial Sequence: Synthetic oligonucleotide
  Antisense strand to SEQ ID NO: 1219646
uuucaaaccagugaccuca

SEQ ID NO: 1219648 - RNA, 19 nt, Artificial Sequence
  Description of Artificial Sequence: Synthetic oligonucleotide
  Sense strand starting at position 2841 of SEQ ID NO: 917237
aggucacugguuugaaagu

SEQ ID NO: 1219649 - RNA, 19 nt, Artificial Sequence
  Description of Artificial Sequence: Synthetic oligonucleotide
  Antisense strand to SEQ ID NO: 1219648
acuuucaaaccagugaccu

SEQ ID NO: 1219650 - RNA, 19 nt, Artificial Sequence
  Description of Artificial Sequence: Synthetic oligonucleotide
  Sense strand starting at position 2847 of SEQ ID NO: 917237
cugguuugaaagugggauu

SEQ ID NO: 1219651 - RNA, 19 nt, Artificial Sequence
  Description of Artificial Sequence: Synthetic oligonucleotide
  Antisense strand to SEQ ID NO: 1219650
aaucccacuuucaaaccag

SEQ ID NO: 1219652 - RNA, 19 nt, Artificial Sequence
  Description of Artificial Sequence: Synthetic oligonucleotide
  Sense strand starting at position 2848 of SEQ ID NO: 917237
ugguuugaaagugggauua

SEQ ID NO: 1219653 - RNA, 19 nt, Artificial Sequence
  Description of Artificial Sequence: Synthetic oligonucleotide
  Antisense strand to SEQ ID NO: 1219652
uaaucccacuuucaaacca

SEQ ID NO: 1219654 - RNA, 19 nt, Artificial Sequence
  Description of Artificial Sequence: Synthetic oligonucleotide
  Sense strand starting at position 2850 of SEQ ID NO: 917237
guuugaaagugggauuaug

SEQ ID NO: 1219655 - RNA, 19 nt, Artificial Sequence
  Description of Artificial Sequence: Synthetic oligonucleotide
  Antisense strand to SEQ ID NO: 1219654
cauaaucccacuuucaaac

SEQ ID NO: 1219656 - RNA, 19 nt, Artificial Sequence
  Description of Artificial Sequence: Synthetic oligonucleotide
  Sense strand starting at position 2858 of SEQ ID NO: 917238
gugggauuaugagcaugaa

SEQ ID NO: 1219657 - RNA, 19 nt, Artificial Sequence
  Description of Artificial Sequence: Synthetic oligonucleotide
  Antisense strand to SEQ ID NO: 1219656
uucaugcucauaaucccac

SEQ ID NO: 1219658 - RNA, 19 nt, Artificial Sequence
  Description of Artificial Sequence: Synthetic oligonucleotide
  Sense strand starting at position 100 of SEQ ID NO: 917238
cugccuuauccugaguagu

SEQ ID NO: 1219659 - RNA, 19 nt, Artificial Sequence
  Description of Artificial Sequence: Synthetic oligonucleotide
  Antisense strand to SEQ ID NO: 1219658
acuacucaggauaaggcag

SEQ ID NO: 1219660 - RNA, 19 nt, Artificial Sequence
  Description of Artificial Sequence: Synthetic oligonucleotide
  Sense strand starting at position 174 of SEQ ID NO: 917238
ggcagucauguuuaauuga

SEQ ID NO: 1219661 - RNA, 19 nt, Artificial Sequence
  Description of Artificial Sequence: Synthetic oligonucleotide
  Antisense strand to SEQ ID NO: 1219660
ucaauuaaacaugacugcc

SEQ ID NO: 1219662 - RNA, 19 nt, Artificial Sequence
  Description of Artificial Sequence: Synthetic oligonucleotide
  Sense strand starting at position 177 of SEQ ID NO: 917238
agucauguuuaauugagaa

SEQ ID NO: 1219663 - RNA, 19 nt, Artificial Sequence
  Description of Artificial Sequence: Synthetic oligonucleotide
  Antisense strand to SEQ ID NO: 1219662
uucucaauuaaacaugacu

SEQ ID NO: 1219664 - RNA, 19 nt, Artificial Sequence
  Description of Artificial Sequence: Synthetic oligonucleotide
  Sense strand starting at position 208 of SEQ ID NO: 917238
cuaauagaguuugccuaga

SEQ ID NO: 1219665 - RNA, 19 nt, Artificial Sequence
  Description of Artificial Sequence: Synthetic oligonucleotide
  Antisense strand to SEQ ID NO: 1219664
ucuaggcaaacucuauuag

SEQ ID NO: 1219666 - RNA, 19 nt, Artificial Sequence
  Description of Artificial Sequence: Synthetic oligonucleotide
  Sense strand starting at position 210 of SEQ ID NO: 917238
aauagaguuugccuagaug

SEQ ID NO: 1219667 - RNA, 19 nt, Artificial Sequence
  Description of Artificial Sequence: Synthetic oligonucleotide
  Antisense strand to SEQ ID NO: 1219666
caucuaggcaaacucuauu

SEQ ID NO: 1219668 - RNA, 19 nt, Artificial Sequence
  Description of Artificial Sequence: Synthetic oligonucleotide
  Sense strand starting at position 213 of SEQ ID NO: 917238
agaguuugccuagauggag

SEQ ID NO: 1219669 - RNA, 19 nt, Artificial Sequence
  Description of Artificial Sequence: Synthetic oligonucleotide
  Antisense strand to SEQ ID NO: 1219668
cuccaucuaggcaaacucu

SEQ ID NO: 1219670 - RNA, 19 nt, Artificial Sequence
  Description of Artificial Sequence: Synthetic oligonucleotide
  Sense strand starting at position 237 of SEQ ID NO: 917238
ucuaaagagggcugcgaau

SEQ ID NO: 1219671 - RNA, 19 nt, Artificial Sequence
  Description of Artificial Sequence: Synthetic oligonucleotide
  Antisense strand to SEQ ID NO: 1219670
auucgcagcccucuuuaga

SEQ ID NO: 1219672 - RNA, 19 nt, Artificial Sequence
  Description of Artificial Sequence: Synthetic oligonucleotide
  Sense strand starting at position 239 of SEQ ID NO: 917238
uaaagagggcugcgaauau

SEQ ID NO: 1219673 - RNA, 19 nt, Artificial Sequence
  Description of Artificial Sequence: Synthetic oligonucleotide
  Antisense strand to SEQ ID NO: 1219672
auauucgcagcccucuuua

SEQ ID NO: 1219674 - RNA, 19 nt, Artificial Sequence
  Description of Artificial Sequence: Synthetic oligonucleotide
  Sense strand starting at position 249 of SEQ ID NO: 917238
ugcgaauauuucguguuuc

SEQ ID NO: 1219675 - RNA, 19 nt, Artificial Sequence
  Description of Artificial Sequence: Synthetic oligonucleotide
  Antisense strand to SEQ ID NO: 1219674
gaaacacgaaauauucgca

SEQ ID NO: 1219676 - RNA, 19 nt, Artificial Sequence
  Description of Artificial Sequence: Synthetic oligonucleotide
  Sense strand starting at position 348 of SEQ ID NO: 917238
guguccuaaucacugguaa

SEQ ID NO: 1219677 - RNA, 19 nt, Artificial Sequence
  Description of Artificial Sequence: Synthetic oligonucleotide
  Antisense strand to SEQ ID NO: 1219676
uuaccagugauuaggacac

SEQ ID NO: 1219678 - RNA, 19 nt, Artificial Sequence
  Description of Artificial Sequence: Synthetic oligonucleotide
  Sense strand starting at position 349 of SEQ ID NO: 917238
uguccuaaucacugguaag

SEQ ID NO: 1219679 - RNA, 19 nt, Artificial Sequence
  Description of Artificial Sequence: Synthetic oligonucleotide
  Antisense strand to SEQ ID NO: 1219678
cuuaccagugauuaggaca

SEQ ID NO: 1219680 - RNA, 19 nt, Artificial Sequence
  Description of Artificial Sequence: Synthetic oligonucleotide
  Sense strand starting at position 350 of SEQ ID NO: 917238
guccuaaucacugguaagg

SEQ ID NO: 1219681 - RNA, 19 nt, Artificial Sequence
  Description of Artificial Sequence: Synthetic oligonucleotide
  Antisense strand to SEQ ID NO: 1219680
ccuuaccagugauuaggac

SEQ ID NO: 1219682 - RNA, 19 nt, Artificial Sequence
  Description of Artificial Sequence: Synthetic oligonucleotide
  Sense strand starting at position 429 of SEQ ID NO: 917238
uuggaaaucuuacuaguaa

SEQ ID NO: 1219683 - RNA, 19 nt, Artificial Sequence
  Description of Artificial Sequence: Synthetic oligonucleotide
  Antisense strand to SEQ ID NO: 1219682
uuacuaguaagauuuccaa

SEQ ID NO: 1219684 - RNA, 19 nt, Artificial Sequence
  Description of Artificial Sequence: Synthetic oligonucleotide
  Sense strand starting at position 578 of SEQ ID NO: 917238
agcccaaaguauuuccgua

SEQ ID NO: 1219685 - RNA, 19 nt, Artificial Sequence
  Description of Artificial Sequence: Synthetic oligonucleotide
  Antisense strand to SEQ ID NO: 1219684
uacggaaauacuuugggcu

SEQ ID NO: 1219686 - RNA, 19 nt, Artificial Sequence
  Description of Artificial Sequence: Synthetic oligonucleotide
  Sense strand starting at position 649 of SEQ ID NO: 917238
auacgaaucucugcuagaa

SEQ ID NO: 1219687 - RNA, 19 nt, Artificial Sequence
  Description of Artificial Sequence: Synthetic oligonucleotide
  Antisense strand to SEQ ID NO: 1219686
uucuagcagagauucguau

SEQ ID NO: 1219688 - RNA, 19 nt, Artificial Sequence
  Description of Artificial Sequence: Synthetic oligonucleotide
  Sense strand starting at position 696 of SEQ ID NO: 917238
uggcuucuucugggaauag

SEQ ID NO: 1219689 - RNA, 19 nt, Artificial Sequence
  Description of Artificial Sequence: Synthetic oligonucleotide
  Antisense strand to SEQ ID NO: 1219688
cuauucccagaagaagcca

SEQ ID NO: 1219690 - RNA, 19 nt, Artificial Sequence
  Description of Artificial Sequence: Synthetic oligonucleotide
  Sense strand starting at position 848 of SEQ ID NO: 917238
guguguaagaccuacacuu

SEQ ID NO: 1219691 - RNA, 19 nt, Artificial Sequence
  Description of Artificial Sequence: Synthetic oligonucleotide
  Antisense strand to SEQ ID NO: 1219690
aaguguaggucuuacacac

SEQ ID NO: 1219692 - RNA, 19 nt, Artificial Sequence
  Description of Artificial Sequence: Synthetic oligonucleotide
  Sense strand starting at position 850 of SEQ ID NO: 917238
guguaagaccuacacuuua

SEQ ID NO: 1219693 - RNA, 19 nt, Artificial Sequence
  Description of Artificial Sequence: Synthetic oligonucleotide
  Antisense strand to SEQ ID NO: 1219692
uaaaguguaggucuuacac

SEQ ID NO: 1219694 - RNA, 19 nt, Artificial Sequence
  Description of Artificial Sequence: Synthetic oligonucleotide
  Sense strand starting at position 1082 of SEQ ID NO: 917238
aaauaagcugggcgugaua

SEQ ID NO: 1219695 - RNA, 19 nt, Artificial Sequence
  Description of Artificial Sequence: Synthetic oligonucleotide
  Antisense strand to SEQ ID NO: 1219694
uaucacgcccagcuuauuu

SEQ ID NO: 1219696 - RNA, 19 nt, Artificial Sequence
  Description of Artificial Sequence: Synthetic oligonucleotide
  Sense strand starting at position 1290 of SEQ ID NO: 917238
caacuaagcguggaguuaa

SEQ ID NO: 1219697 - RNA, 19 nt, Artificial Sequence
  Description of Artificial Sequence: Synthetic oligonucleotide
  Antisense strand to SEQ ID NO: 1219696
uuaacuccacgcuuaguug

SEQ ID NO: 1219698 - RNA, 19 nt, Artificial Sequence
  Description of Artificial Sequence: Synthetic oligonucleotide
  Sense strand starting at position 1358 of SEQ ID NO: 917238
guccuuggcccacagagua

SEQ ID NO: 1219699 - RNA, 19 nt, Artificial Sequence
  Description of Artificial Sequence: Synthetic oligonucleotide
  Antisense strand to SEQ ID NO: 1219698
uacucugugggccaaggac

SEQ ID NO: 1219700 - RNA, 19 nt, Artificial Sequence
  Description of Artificial Sequence: Synthetic oligonucleotide
  Sense strand starting at position 1397 of SEQ ID NO: 917238
auuaauaaucaaggcagua

SEQ ID NO: 1219701 - RNA, 19 nt, Artificial Sequence
  Description of Artificial Sequence: Synthetic oligonucleotide
  Antisense strand to SEQ ID NO: 1219700
uacugccuugauuauuaau

SEQ ID NO: 1219702 - RNA, 19 nt, Artificial Sequence
  Description of Artificial Sequence: Synthetic oligonucleotide
  Sense strand starting at position 1614 of SEQ ID NO: 917238
ggcugucacgcuuccuuua

SEQ ID NO: 1219703 - RNA, 19 nt, Artificial Sequence
  Description of Artificial Sequence: Synthetic oligonucleotide
  Antisense strand to SEQ ID NO: 1219702
uaaaggaagcgugacagcc

SEQ ID NO: 1219704 - RNA, 19 nt, Artificial Sequence
  Description of Artificial Sequence: Synthetic oligonucleotide
  Sense strand starting at position 2663 of SEQ ID NO: 917238
ggguuaaagcaaugccacu

SEQ ID NO: 1219705 - RNA, 19 nt, Artificial Sequence
  Description of Artificial Sequence: Synthetic oligonucleotide
  Antisense strand to SEQ ID NO: 1219704
aguggcauugcuuuaaccc

SEQ ID NO: 1219706 - RNA, 19 nt, Artificial Sequence
  Description of Artificial Sequence: Synthetic oligonucleotide
  Sense strand starting at position 2695 of SEQ ID NO: 917238
guaggaaugguacagcuau

SEQ ID NO: 1219707 - RNA, 19 nt, Artificial Sequence
  Description of Artificial Sequence: Synthetic oligonucleotide
  Antisense strand to SEQ ID NO: 1219706
auagcuguaccauuccuac

SEQ ID NO: 1219708 - RNA, 19 nt, Artificial Sequence
  Description of Artificial Sequence: Synthetic oligonucleotide
  Sense strand starting at position 2724 of SEQ ID NO: 917238
acacuucugucucuccgaa

SEQ ID NO: 1219709 - RNA, 19 nt, Artificial Sequence
  Description of Artificial Sequence: Synthetic oligonucleotide
  Antisense strand to SEQ ID NO: 1219708
uucggagagacagaagugu

SEQ ID NO: 1219710 - RNA, 19 nt, Artificial Sequence
  Description of Artificial Sequence: Synthetic oligonucleotide
  Sense strand starting at position 2726 of SEQ ID NO: 917238
acuucugucucuccgaaag

SEQ ID NO: 1219711 - RNA, 19 nt, Artificial Sequence
  Description of Artificial Sequence: Synthetic oligonucleotide
  Antisense strand to SEQ ID NO: 1219710
cuuucggagagacagaagu

SEQ ID NO: 1219712 - RNA, 19 nt, Artificial Sequence
  Description of Artificial Sequence: Synthetic oligonucleotide
  Sense strand starting at position 2743 of SEQ ID NO: 917238
agacacaaaucuguguuua

SEQ ID NO: 1219713 - RNA, 19 nt, Artificial Sequence
  Description of Artificial Sequence: Synthetic oligonucleotide
  Antisense strand to SEQ ID NO: 1219712
uaaacacagauuugugucu

SEQ ID NO: 1219714 - RNA, 19 nt, Artificial Sequence
  Description of Artificial Sequence: Synthetic oligonucleotide
  Sense strand starting at position 2745 of SEQ ID NO: 917238
acacaaaucuguguuuauc

SEQ ID NO: 1219715 - RNA, 19 nt, Artificial Sequence
  Description of Artificial Sequence: Synthetic oligonucleotide
  Antisense strand to SEQ ID NO: 1219714
gauaaacacagauuugugu

SEQ ID NO: 1219716 - RNA, 19 nt, Artificial Sequence
  Description of Artificial Sequence: Synthetic oligonucleotide
  Sense strand starting at position 2747 of SEQ ID NO: 917238
acaaaucuguguuuaucag

SEQ ID NO: 1219717 - RNA, 19 nt, Artificial Sequence
  Description of Artificial Sequence: Synthetic oligonucleotide
  Antisense strand to SEQ ID NO: 1219716
cugauaaacacagauuugu

SEQ ID NO: 1219718 - RNA, 19 nt, Artificial Sequence
  Description of Artificial Sequence: Synthetic oligonucleotide
  Sense strand starting at position 2756 of SEQ ID NO: 917238
uguuuaucagauuagcaau

SEQ ID NO: 1219719 - RNA, 19 nt, Artificial Sequence
  Description of Artificial Sequence: Synthetic oligonucleotide
  Antisense strand to SEQ ID NO: 1219718
auugcuaaucugauaaaca

SEQ ID NO: 1219720 - RNA, 19 nt, Artificial Sequence
  Description of Artificial Sequence: Synthetic oligonucleotide
  Sense strand starting at position 2813 of SEQ ID NO: 917238
auggauguggacugauuga

SEQ ID NO: 1219721 - RNA, 19 nt, Artificial Sequence
  Description of Artificial Sequence: Synthetic oligonucleotide
  Antisense strand to SEQ ID NO: 1219720
ucaaucaguccacauccau

SEQ ID NO: 1219722 - RNA, 19 nt, Artificial Sequence
  Description of Artificial Sequence: Synthetic oligonucleotide
  Sense strand starting at position 3008 of SEQ ID NO: 917238
ccuugucuagcucauauua

SEQ ID NO: 1219723 - RNA, 19 nt, Artificial Sequence
  Description of Artificial Sequence: Synthetic oligonucleotide
  Antisense strand to SEQ ID NO: 1219722
uaauaugagcuagacaagg

SEQ ID NO: 1219724 - RNA, 19 nt, Artificial Sequence
  Description of Artificial Sequence: Synthetic oligonucleotide
  Sense strand starting at position 3382 of SEQ ID NO: 917238
gcgaaagaaugauuccacu

SEQ ID NO: 1219725 - RNA, 19 nt, Artificial Sequence
  Description of Artificial Sequence: Synthetic oligonucleotide
  Antisense strand to SEQ ID NO: 1219724
aguggaaucauucuuucgc

SEQ ID NO: 1219726 - RNA, 19 nt, Artificial Sequence
  Description of Artificial Sequence: Synthetic oligonucleotide
  Sense strand starting at position 3437 of SEQ ID NO: 917238
aaaggaaagugagacaaau

SEQ ID NO: 1219727 - RNA, 19 nt, Artificial Sequence
  Description of Artificial Sequence: Synthetic oligonucleotide
  Antisense strand to SEQ ID NO: 1219726
auuugucucacuuuccuuu

SEQ ID NO: 1219728 - RNA, 19 nt, Artificial Sequence
  Description of Artificial Sequence: Synthetic oligonucleotide
  Sense strand starting at position 3805 of SEQ ID NO: 917238
agccaagacaaguguuaag

SEQ ID NO: 1219729 - RNA, 19 nt, Artificial Sequence
  Description of Artificial Sequence: Synthetic oligonucleotide
  Antisense strand to SEQ ID NO: 1219728
cuuaacacuugucuuggcu

SEQ ID NO: 1219730 - RNA, 19 nt, Artificial Sequence
  Description of Artificial Sequence: Synthetic oligonucleotide
  Sense strand starting at position 3862 of SEQ ID NO: 917238
uagaauaggcucuguggga

SEQ ID NO: 1219731 - RNA, 19 nt, Artificial Sequence
  Description of Artificial Sequence: Synthetic oligonucleotide
  Antisense strand to SEQ ID NO: 1219730
ucccacagagccuauucua

SEQ ID NO: 1219732 - RNA, 19 nt, Artificial Sequence
  Description of Artificial Sequence: Synthetic oligonucleotide
  Sense strand starting at position 3863 of SEQ ID NO: 917238
agaauaggcucugugggau

SEQ ID NO: 1219733 - RNA, 19 nt, Artificial Sequence
  Description of Artificial Sequence: Synthetic oligonucleotide
  Antisense strand to SEQ ID NO: 1219732
aucccacagagccuauucu

SEQ ID NO: 1219734 - RNA, 19 nt, Artificial Sequence
  Description of Artificial Sequence: Synthetic oligonucleotide
  Sense strand starting at position 3866 of SEQ ID NO: 917238
auaggcucugugggaugaa

SEQ ID NO: 1219735 - RNA, 19 nt, Artificial Sequence
  Description of Artificial Sequence: Synthetic oligonucleotide
  Antisense strand to SEQ ID NO: 1219734
uucaucccacagagccuau

SEQ ID NO: 1219736 - RNA, 19 nt, Artificial Sequence
  Description of Artificial Sequence: Synthetic oligonucleotide
  Sense strand starting at position 3934 of SEQ ID NO: 917239
uuugaaauguggucccagu

SEQ ID NO: 1219737 - RNA, 19 nt, Artificial Sequence
  Description of Artificial Sequence: Synthetic oligonucleotide
  Antisense strand to SEQ ID NO: 1219736
acugggaccacauuucaaa

SEQ ID NO: 1219738 - RNA, 19 nt, Artificial Sequence
  Description of Artificial Sequence: Synthetic oligonucleotide
  Sense strand starting at position 55 of SEQ ID NO: 917239
gaagaagaauuaggcauaa

SEQ ID NO: 1219739 - RNA, 19 nt, Artificial Sequence
  Description of Artificial Sequence: Synthetic oligonucleotide
  Antisense strand to SEQ ID NO: 1219738
uuaugccuaauucuucuuc

SEQ ID NO: 1219740 - RNA, 19 nt, Artificial Sequence
  Description of Artificial Sequence: Synthetic oligonucleotide
  Sense strand starting at position 143 of SEQ ID NO: 917239
agggaagcaccuugcuauu

SEQ ID NO: 1219741 - RNA, 19 nt, Artificial Sequence
  Description of Artificial Sequence: Synthetic oligonucleotide
  Antisense strand to SEQ ID NO: 1219740
aauagcaaggugcuucccu

SEQ ID NO: 1219742 - RNA, 19 nt, Artificial Sequence
  Description of Artificial Sequence: Synthetic oligonucleotide
  Sense strand starting at position 155 of SEQ ID NO: 917239
ugcuauucguaucucaaca

SEQ ID NO: 1219743 - RNA, 19 nt, Artificial Sequence
  Description of Artificial Sequence: Synthetic oligonucleotide
  Antisense strand to SEQ ID NO: 1219742
uguugagauacgaauagca

SEQ ID NO: 1219744 - RNA, 19 nt, Artificial Sequence
  Description of Artificial Sequence: Synthetic oligonucleotide
  Sense strand starting at position 195 of SEQ ID NO: 917239
acugaaagauugguuccuu

SEQ ID NO: 1219745 - RNA, 19 nt, Artificial Sequence
  Description of Artificial Sequence: Synthetic oligonucleotide
  Antisense strand to SEQ ID NO: 1219744
aaggaaccaaucuuucagu

SEQ ID NO: 1219746 - RNA, 19 nt, Artificial Sequence
  Description of Artificial Sequence: Synthetic oligonucleotide
  Sense strand starting at position 196 of SEQ ID NO: 917239
cugaaagauugguuccuuu

SEQ ID NO: 1219747 - RNA, 19 nt, Artificial Sequence
  Description of Artificial Sequence: Synthetic oligonucleotide
  Antisense strand to SEQ ID NO: 1219746
aaaggaaccaaucuuucag

SEQ ID NO: 1219748 - RNA, 19 nt, Artificial Sequence
  Description of Artificial Sequence: Synthetic oligonucleotide
  Sense strand starting at position 913 of SEQ ID NO: 917239
ccuggcugugcucagauaa

SEQ ID NO: 1219749 - RNA, 19 nt, Artificial Sequence
  Description of Artificial Sequence: Synthetic oligonucleotide
  Antisense strand to SEQ ID NO: 1219748
uuaucugagcacagccagg

SEQ ID NO: 1219750 - RNA, 19 nt, Artificial Sequence
  Description of Artificial Sequence: Synthetic oligonucleotide
  Sense strand starting at position 925 of SEQ ID NO: 917239
cagauaaggcguuacuuac

SEQ ID NO: 1219751 - RNA, 19 nt, Artificial Sequence
  Description of Artificial Sequence: Synthetic oligonucleotide
  Antisense strand to SEQ ID NO: 1219750
guaaguaacgccuuaucug

SEQ ID NO: 1219752 - RNA, 19 nt, Artificial Sequence
  Description of Artificial Sequence: Synthetic oligonucleotide
  Sense strand starting at position 935 of SEQ ID NO: 917239
guuacuuaccgacgcagau

SEQ ID NO: 1219753 - RNA, 19 nt, Artificial Sequence
  Description of Artificial Sequence: Synthetic oligonucleotide
  Antisense strand to SEQ ID NO: 1219752
aucugcgucgguaaguaac

SEQ ID NO: 1219754 - RNA, 19 nt, Artificial Sequence
  Description of Artificial Sequence: Synthetic oligonucleotide
  Sense strand starting at position 1130 of SEQ ID NO: 917239
uggugacuuccuugaugug

SEQ ID NO: 1219755 - RNA, 19 nt, Artificial Sequence
  Description of Artificial Sequence: Synthetic oligonucleotide
  Antisense strand to SEQ ID NO: 1219754
cacaucaaggaagucacca

SEQ ID NO: 1219756 - RNA, 19 nt, Artificial Sequence
  Description of Artificial Sequence: Synthetic oligonucleotide
  Sense strand starting at position 1131 of SEQ ID NO: 917239
ggugacuuccuugaugugu

SEQ ID NO: 1219757 - RNA, 19 nt, Artificial Sequence
  Description of Artificial Sequence: Synthetic oligonucleotide
  Antisense strand to SEQ ID NO: 1219756
acacaucaaggaagucacc

SEQ ID NO: 1219758 - RNA, 19 nt, Artificial Sequence
  Description of Artificial Sequence: Synthetic oligonucleotide
  Sense strand starting at position 1270 of SEQ ID NO: 917239
gccacccuucucugaggaa

SEQ ID NO: 1219759 - RNA, 19 nt, Artificial Sequence
  Description of Artificial Sequence: Synthetic oligonucleotide
  Antisense strand to SEQ ID NO: 1219758
uuccucagagaaggguggc

SEQ ID NO: 1219760 - RNA, 19 nt, Artificial Sequence
  Description of Artificial Sequence: Synthetic oligonucleotide
  Sense strand starting at position 1629 of SEQ ID NO: 917239
cuaccugagcccugcagaa

SEQ ID NO: 1219761 - RNA, 19 nt, Artificial Sequence
  Description of Artificial Sequence: Synthetic oligonucleotide
  Antisense strand to SEQ ID NO: 1219760
uucugcagggcucagguag

SEQ ID NO: 1219762 - RNA, 19 nt, Artificial Sequence
  Description of Artificial Sequence: Synthetic oligonucleotide
  Sense strand starting at position 1988 of SEQ ID NO: 917239
agaagugauuugugugaaa

SEQ ID NO: 1219763 - RNA, 19 nt, Artificial Sequence
  Description of Artificial Sequence: Synthetic oligonucleotide
  Antisense strand to SEQ ID NO: 1219762
uuucacacaaaucacuucu

SEQ ID NO: 1219764 - RNA, 19 nt, Artificial Sequence
  Description of Artificial Sequence: Synthetic oligonucleotide
  Sense strand starting at position 1991 of SEQ ID NO: 917239
agugauuugugugaaagug

SEQ ID NO: 1219765 - RNA, 19 nt, Artificial Sequence
  Description of Artificial Sequence: Synthetic oligonucleotide
  Antisense strand to SEQ ID NO: 1219764
cacuuucacacaaaucacu

SEQ ID NO: 1219766 - RNA, 19 nt, Artificial Sequence
  Description of Artificial Sequence: Synthetic oligonucleotide
  Sense strand starting at position 2168 of SEQ ID NO: 917239
ugcggcuauccaggaaaca

SEQ ID NO: 1219767 - RNA, 19 nt, Artificial Sequence
  Description of Artificial Sequence: Synthetic oligonucleotide
  Antisense strand to SEQ ID NO: 1219766
uguuuccuggauagccgca

SEQ ID NO: 1219768 - RNA, 19 nt, Artificial Sequence
  Description of Artificial Sequence: Synthetic oligonucleotide
  Sense strand starting at position 2425 of SEQ ID NO: 917239
ggcacauugcacuaggaaa

SEQ ID NO: 1219769 - RNA, 19 nt, Artificial Sequence
  Description of Artificial Sequence: Synthetic oligonucleotide
  Antisense strand to SEQ ID NO: 1219768
uuuccuagugcaaugugcc

SEQ ID NO: 1219770 - RNA, 19 nt, Artificial Sequence
  Description of Artificial Sequence: Synthetic oligonucleotide
  Sense strand starting at position 2492 of SEQ ID NO: 917239
ugggccuggccaugugaua

SEQ ID NO: 1219771 - RNA, 19 nt, Artificial Sequence
  Description of Artificial Sequence: Synthetic oligonucleotide
  Antisense strand to SEQ ID NO: 1219770
uaucacauggccaggccca

SEQ ID NO: 1219772 - RNA, 19 nt, Artificial Sequence
  Description of Artificial Sequence: Synthetic oligonucleotide
  Sense strand starting at position 2503 of SEQ ID NO: 917239
augugauagcccugggaca

SEQ ID NO: 1219773 - RNA, 19 nt, Artificial Sequence
  Description of Artificial Sequence: Synthetic oligonucleotide
  Antisense strand to SEQ ID NO: 1219772
ugucccagggcuaucacau

SEQ ID NO: 1219774 - RNA, 19 nt, Artificial Sequence
  Description of Artificial Sequence: Synthetic oligonucleotide
  Sense strand starting at position 2570 of SEQ ID NO: 917239
uaggaaaguugagauguga

SEQ ID NO: 1219775 - RNA, 19 nt, Artificial Sequence
  Description of Artificial Sequence: Synthetic oligonucleotide
  Antisense strand to SEQ ID NO: 1219774
ucacaucucaacuuuccua

SEQ ID NO: 1219776 - RNA, 19 nt, Artificial Sequence
  Description of Artificial Sequence: Synthetic oligonucleotide
  Sense strand starting at position 2742 of SEQ ID NO: 917239
gaagcagcugucuacaaca

SEQ ID NO: 1219777 - RNA, 19 nt, Artificial Sequence
  Description of Artificial Sequence: Synthetic oligonucleotide
  Antisense strand to SEQ ID NO: 1219776
uguuguagacagcugcuuc

SEQ ID NO: 1219778 - RNA, 19 nt, Artificial Sequence
  Description of Artificial Sequence: Synthetic oligonucleotide
  Sense strand starting at position 2798 of SEQ ID NO: 917239
gggcgaugaugguuuggau

SEQ ID NO: 1219779 - RNA, 19 nt, Artificial Sequence
  Description of Artificial Sequence: Synthetic oligonucleotide
  Antisense strand to SEQ ID NO: 1219778
auccaaaccaucaucgccc

SEQ ID NO: 1219780 - RNA, 19 nt, Artificial Sequence
  Description of Artificial Sequence: Synthetic oligonucleotide
  Sense strand starting at position 3006 of SEQ ID NO: 917239
cccagaggguccuugucaa

SEQ ID NO: 1219781 - RNA, 19 nt, Artificial Sequence
  Description of Artificial Sequence: Synthetic oligonucleotide
  Antisense strand to SEQ ID NO: 1219780
uugacaaggacccucuggg

SEQ ID NO: 1219782 - RNA, 19 nt, Artificial Sequence
  Description of Artificial Sequence: Synthetic oligonucleotide
  Sense strand starting at position 3168 of SEQ ID NO: 917239
ucugguugucguuauagca

SEQ ID NO: 1219783 - RNA, 19 nt, Artificial Sequence
  Description of Artificial Sequence: Synthetic oligonucleotide
  Antisense strand to SEQ ID NO: 1219782
ugcuauaacgacaaccaga

SEQ ID NO: 1219784 - RNA, 19 nt, Artificial Sequence
  Description of Artificial Sequence: Synthetic oligonucleotide
  Sense strand starting at position 3186 of SEQ ID NO: 917239
acacgugcucucuaaauca

SEQ ID NO: 1219785 - RNA, 19 nt, Artificial Sequence
  Description of Artificial Sequence: Synthetic oligonucleotide
  Antisense strand to SEQ ID NO: 1219784
ugauuuagagagcacgugu

SEQ ID NO: 1219786 - RNA, 19 nt, Artificial Sequence
  Description of Artificial Sequence: Synthetic oligonucleotide
  Sense strand starting at position 3197 of SEQ ID NO: 917239
cuaaaucacuggucuuguu

SEQ ID NO: 1219787 - RNA, 19 nt, Artificial Sequence
  Description of Artificial Sequence: Synthetic oligonucleotide
  Antisense strand to SEQ ID NO: 1219786
aacaagaccagugauuuag

SEQ ID NO: 1219788 - RNA, 19 nt, Artificial Sequence
  Description of Artificial Sequence: Synthetic oligonucleotide
  Sense strand starting at position 3251 of SEQ ID NO: 917239
gaaacuguuugguccagca

SEQ ID NO: 1219789 - RNA, 19 nt, Artificial Sequence
  Description of Artificial Sequence: Synthetic oligonucleotide
  Antisense strand to SEQ ID NO: 1219788
ugcuggaccaaacaguuuc

SEQ ID NO: 1219790 - RNA, 19 nt, Artificial Sequence
  Description of Artificial Sequence: Synthetic oligonucleotide
  Sense strand starting at position 3376 of SEQ ID NO: 917239
ccuggcuuucccugaugca

SEQ ID NO: 1219791 - RNA, 19 nt, Artificial Sequence
  Description of Artificial Sequence: Synthetic oligonucleotide
  Antisense strand to SEQ ID NO: 1219790
ugcaucagggaaagccagg

SEQ ID NO: 1219792 - RNA, 19 nt, Artificial Sequence
  Description of Artificial Sequence: Synthetic oligonucleotide
  Sense strand starting at position 3423 of SEQ ID NO: 917239
gucaauagauugcuuugua

SEQ ID NO: 1219793 - RNA, 19 nt, Artificial Sequence
  Description of Artificial Sequence: Synthetic oligonucleotide
  Antisense strand to SEQ ID NO: 1219792
uacaaagcaaucuauugac

SEQ ID NO: 1219794 - RNA, 19 nt, Artificial Sequence
  Description of Artificial Sequence: Synthetic oligonucleotide
  Sense strand starting at position 3424 of SEQ ID NO: 917239
ucaauagauugcuuuguaa

SEQ ID NO: 1219795 - RNA, 19 nt, Artificial Sequence
  Description of Artificial Sequence: Synthetic oligonucleotide
  Antisense strand to SEQ ID NO: 1219794
uuacaaagcaaucuauuga

SEQ ID NO: 1219796 - RNA, 19 nt, Artificial Sequence
  Description of Artificial Sequence: Synthetic oligonucleotide
  Sense strand starting at position 3426 of SEQ ID NO: 917239
aauagauugcuuuguaaga

SEQ ID NO: 1219797 - RNA, 19 nt, Artificial Sequence
  Description of Artificial Sequence: Synthetic oligonucleotide
  Antisense strand to SEQ ID NO: 1219796
ucuuacaaagcaaucuauu

SEQ ID NO: 1219798 - RNA, 19 nt, Artificial Sequence
  Description of Artificial Sequence: Synthetic oligonucleotide
  Sense strand starting at position 3427 of SEQ ID NO: 917239
auagauugcuuuguaagaa

SEQ ID NO: 1219799 - RNA, 19 nt, Artificial Sequence
  Description of Artificial Sequence: Synthetic oligonucleotide
  Antisense strand to SEQ ID NO: 1219798
uucuuacaaagcaaucuau

SEQ ID NO: 1219800 - RNA, 19 nt, Artificial Sequence
  Description of Artificial Sequence: Synthetic oligonucleotide
  Sense strand starting at position 3596 of SEQ ID NO: 917239
ugagcauagugguucuaaa

SEQ ID NO: 1219801 - RNA, 19 nt, Artificial Sequence
  Description of Artificial Sequence: Synthetic oligonucleotide
  Antisense strand to SEQ ID NO: 1219800
uuuagaaccacuaugcuca

SEQ ID NO: 1219802 - RNA, 19 nt, Artificial Sequence
  Description of Artificial Sequence: Synthetic oligonucleotide
  Sense strand starting at position 3619 of SEQ ID NO: 917239
agacuuuaacugugugacu

SEQ ID NO: 1219803 - RNA, 19 nt, Artificial Sequence
  Description of Artificial Sequence: Synthetic oligonucleotide
  Antisense strand to SEQ ID NO: 1219802
agucacacaguuaaagucu

SEQ ID NO: 1219804 - RNA, 19 nt, Artificial Sequence
  Description of Artificial Sequence: Synthetic oligonucleotide
  Sense strand starting at position 3620 of SEQ ID NO: 917239
gacuuuaacugugugacuu

SEQ ID NO: 1219805 - RNA, 19 nt, Artificial Sequence
  Description of Artificial Sequence: Synthetic oligonucleotide
  Antisense strand to SEQ ID NO: 1219804
aagucacacaguuaaaguc

SEQ ID NO: 1219806 - RNA, 19 nt, Artificial Sequence
  Description of Artificial Sequence: Synthetic oligonucleotide
  Sense strand starting at position 3621 of SEQ ID NO: 917239
acuuuaacugugugacuuu

SEQ ID NO: 1219807 - RNA, 19 nt, Artificial Sequence
  Description of Artificial Sequence: Synthetic oligonucleotide
  Antisense strand to SEQ ID NO: 1219806
aaagucacacaguuaaagu

SEQ ID NO: 1219808 - RNA, 19 nt, Artificial Sequence
  Description of Artificial Sequence: Synthetic oligonucleotide
  Sense strand starting at position 3747 of SEQ ID NO: 917239
gugugaucugcugacaugu

SEQ ID NO: 1219809 - RNA, 19 nt, Artificial Sequence
  Description of Artificial Sequence: Synthetic oligonucleotide
  Antisense strand to SEQ ID NO: 1219808
acaugucagcagaucacac

SEQ ID NO: 1219810 - RNA, 19 nt, Artificial Sequence
  Description of Artificial Sequence: Synthetic oligonucleotide
  Sense strand starting at position 3778 of SEQ ID NO: 917239
ugcugucaucacuguagaa

SEQ ID NO: 1219811 - RNA, 19 nt, Artificial Sequence
  Description of Artificial Sequence: Synthetic oligonucleotide
  Antisense strand to SEQ ID NO: 1219810
uucuacagugaugacagca

SEQ ID NO: 1219812 - RNA, 19 nt, Artificial Sequence
  Description of Artificial Sequence: Synthetic oligonucleotide
  Sense strand starting at position 3881 of SEQ ID NO: 917239
gcauuagaaccaugcaaac

SEQ ID NO: 1219813 - RNA, 19 nt, Artificial Sequence
  Description of Artificial Sequence: Synthetic oligonucleotide
  Antisense strand to SEQ ID NO: 1219812
guuugcaugguucuaaugc

SEQ ID NO: 1219814 - RNA, 19 nt, Artificial Sequence
  Description of Artificial Sequence: Synthetic oligonucleotide
  Sense strand starting at position 3900 of SEQ ID NO: 917239
acggcucuuggcuaagaca

SEQ ID NO: 1219815 - RNA, 19 nt, Artificial Sequence
  Description of Artificial Sequence: Synthetic oligonucleotide
  Antisense strand to SEQ ID NO: 1219814
ugucuuagccaagagccgu

SEQ ID NO: 1219816 - RNA, 19 nt, Artificial Sequence
  Description of Artificial Sequence: Synthetic oligonucleotide
  Sense strand starting at position 3920 of SEQ ID NO: 917240
agagcauacuaugauuaca

SEQ ID NO: 1219817 - RNA, 19 nt, Artificial Sequence
  Description of Artificial Sequence: Synthetic oligonucleotide
  Antisense strand to SEQ ID NO: 1219816
uguaaucauaguaugcucu

SEQ ID NO: 1219818 - RNA, 19 nt, Artificial Sequence
  Description of Artificial Sequence: Synthetic oligonucleotide
  Sense strand starting at position 2 of SEQ ID NO: 917240
gccuuuaagcauuauacag

SEQ ID NO: 1219819 - RNA, 19 nt, Artificial Sequence
  Description of Artificial Sequence: Synthetic oligonucleotide
  Antisense strand to SEQ ID NO: 1219818
cuguauaaugcuuaaaggc

SEQ ID NO: 1219820 - RNA, 19 nt, Artificial Sequence
  Description of Artificial Sequence: Synthetic oligonucleotide
  Sense strand starting at position 254 of SEQ ID NO: 917240
auguaaguacuacauagua

SEQ ID NO: 1219821 - RNA, 19 nt, Artificial Sequence
  Description of Artificial Sequence: Synthetic oligonucleotide
  Antisense strand to SEQ ID NO: 1219820
uacuauguaguacuuacau

SEQ ID NO: 1219822 - RNA, 19 nt, Artificial Sequence
  Description of Artificial Sequence: Synthetic oligonucleotide
  Sense strand starting at position 624 of SEQ ID NO: 917240
aacgguuccugguuaagaa

SEQ ID NO: 1219823 - RNA, 19 nt, Artificial Sequence
  Description of Artificial Sequence: Synthetic oligonucleotide
  Antisense strand to SEQ ID NO: 1219822
uucuuaaccaggaaccguu

SEQ ID NO: 1219824 - RNA, 19 nt, Artificial Sequence
  Description of Artificial Sequence: Synthetic oligonucleotide
  Sense strand starting at position 625 of SEQ ID NO: 917240
acgguuccugguuaagaaa

SEQ ID NO: 1219825 - RNA, 19 nt, Artificial Sequence
  Description of Artificial Sequence: Synthetic oligonucleotide
  Antisense strand to SEQ ID NO: 1219824
uuucuuaaccaggaaccgu

SEQ ID NO: 1219826 - RNA, 19 nt, Artificial Sequence
  Description of Artificial Sequence: Synthetic oligonucleotide
  Sense strand starting at position 645 of SEQ ID NO: 917240
aguacugucugauuuguua

SEQ ID NO: 1219827 - RNA, 19 nt, Artificial Sequence
  Description of Artificial Sequence: Synthetic oligonucleotide
  Antisense strand to SEQ ID NO: 1219826
uaacaaaucagacaguacu

SEQ ID NO: 1219828 - RNA, 19 nt, Artificial Sequence
  Description of Artificial Sequence: Synthetic oligonucleotide
  Sense strand starting at position 649 of SEQ ID NO: 917240
cugucugauuuguuagagu

SEQ ID NO: 1219829 - RNA, 19 nt, Artificial Sequence
  Description of Artificial Sequence: Synthetic oligonucleotide
  Antisense strand to SEQ ID NO: 1219828
acucuaacaaaucagacag

SEQ ID NO: 1219830 - RNA, 19 nt, Artificial Sequence
  Description of Artificial Sequence: Synthetic oligonucleotide
  Sense strand starting at position 662 of SEQ ID NO: 917240
uagaguaguaccguuucgu

SEQ ID NO: 1219831 - RNA, 19 nt, Artificial Sequence
  Description of Artificial Sequence: Synthetic oligonucleotide
  Antisense strand to SEQ ID NO: 1219830
acgaaacgguacuacucua

SEQ ID NO: 1219832 - RNA, 19 nt, Artificial Sequence
  Description of Artificial Sequence: Synthetic oligonucleotide
  Sense strand starting at position 706 of SEQ ID NO: 917240
augcauugcccuuaugaga

SEQ ID NO: 1219833 - RNA, 19 nt, Artificial Sequence
  Description of Artificial Sequence: Synthetic oligonucleotide
  Antisense strand to SEQ ID NO: 1219832
ucucauaagggcaaugcau

SEQ ID NO: 1219834 - RNA, 19 nt, Artificial Sequence
  Description of Artificial Sequence: Synthetic oligonucleotide
  Sense strand starting at position 719 of SEQ ID NO: 917240
augagaugcuuaucucgau

SEQ ID NO: 1219835 - RNA, 19 nt, Artificial Sequence
  Description of Artificial Sequence: Synthetic oligonucleotide
  Antisense strand to SEQ ID NO: 1219834
aucgagauaagcaucucau

SEQ ID NO: 1219836 - RNA, 19 nt, Artificial Sequence
  Description of Artificial Sequence: Synthetic oligonucleotide
  Sense strand starting at position 720 of SEQ ID NO: 917240
ugagaugcuuaucucgaua

SEQ ID NO: 1219837 - RNA, 19 nt, Artificial Sequence
  Description of Artificial Sequence: Synthetic oligonucleotide
  Antisense strand to SEQ ID NO: 1219836
uaucgagauaagcaucuca

SEQ ID NO: 1219838 - RNA, 19 nt, Artificial Sequence
  Description of Artificial Sequence: Synthetic oligonucleotide
  Sense strand starting at position 723 of SEQ ID NO: 917240
gaugcuuaucucgauauga

SEQ ID NO: 1219839 - RNA, 19 nt, Artificial Sequence
  Description of Artificial Sequence: Synthetic oligonucleotide
  Antisense strand to SEQ ID NO: 1219838
ucauaucgagauaagcauc

SEQ ID NO: 1219840 - RNA, 19 nt, Artificial Sequence
  Description of Artificial Sequence: Synthetic oligonucleotide
  Sense strand starting at position 725 of SEQ ID NO: 917240
ugcuuaucucgauaugaac

SEQ ID NO: 1219841 - RNA, 19 nt, Artificial Sequence
  Description of Artificial Sequence: Synthetic oligonucleotide
  Antisense strand to SEQ ID NO: 1219840
guucauaucgagauaagca

SEQ ID NO: 1219842 - RNA, 19 nt, Artificial Sequence
  Description of Artificial Sequence: Synthetic oligonucleotide
  Sense strand starting at position 758 of SEQ ID NO: 917240
gguggaaucugugccaaac

SEQ ID NO: 1219843 - RNA, 19 nt, Artificial Sequence
  Description of Artificial Sequence: Synthetic oligonucleotide
  Antisense strand to SEQ ID NO: 1219842
guuuggcacagauuccacc

SEQ ID NO: 1219844 - RNA, 19 nt, Artificial Sequence
  Description of Artificial Sequence: Synthetic oligonucleotide
  Sense strand starting at position 778 of SEQ ID NO: 917240
agcugauguuuacuuugaa

SEQ ID NO: 1219845 - RNA, 19 nt, Artificial Sequence
  Description of Artificial Sequence: Synthetic oligonucleotide
  Antisense strand to SEQ ID NO: 1219844
uucaaaguaaacaucagcu

SEQ ID NO: 1219846 - RNA, 19 nt, Artificial Sequence
  Description of Artificial Sequence: Synthetic oligonucleotide
  Sense strand starting at position 779 of SEQ ID NO: 917240
gcugauguuuacuuugaac

SEQ ID NO: 1219847 - RNA, 19 nt, Artificial Sequence
  Description of Artificial Sequence: Synthetic oligonucleotide
  Antisense strand to SEQ ID NO: 1219846
guucaaaguaaacaucagc

SEQ ID NO: 1219848 - RNA, 19 nt, Artificial Sequence
  Description of Artificial Sequence: Synthetic oligonucleotide
  Sense strand starting at position 781 of SEQ ID NO: 917240
ugauguuuacuuugaacac

SEQ ID NO: 1219849 - RNA, 19 nt, Artificial Sequence
  Description of Artificial Sequence: Synthetic oligonucleotide
  Antisense strand to SEQ ID NO: 1219848
guguucaaaguaaacauca

SEQ ID NO: 1219850 - RNA, 19 nt, Artificial Sequence
  Description of Artificial Sequence: Synthetic oligonucleotide
  Sense strand starting at position 850 of SEQ ID NO: 917240
guuugucuugcacauggau

SEQ ID NO: 1219851 - RNA, 19 nt, Artificial Sequence
  Description of Artificial Sequence: Synthetic oligonucleotide
  Antisense strand to SEQ ID NO: 1219850
auccaugugcaagacaaac

SEQ ID NO: 1219852 - RNA, 19 nt, Artificial Sequence
  Description of Artificial Sequence: Synthetic oligonucleotide
  Sense strand starting at position 879 of SEQ ID NO: 917240
ugaagugaugcgcacauca

SEQ ID NO: 1219853 - RNA, 19 nt, Artificial Sequence
  Description of Artificial Sequence: Synthetic oligonucleotide
  Antisense strand to SEQ ID NO: 1219852
ugaugugcgcaucacuuca

SEQ ID NO: 1219854 - RNA, 19 nt, Artificial Sequence
  Description of Artificial Sequence: Synthetic oligonucleotide
  Sense strand starting at position 881 of SEQ ID NO: 917240
aagugaugcgcacaucaua

SEQ ID NO: 1219855 - RNA, 19 nt, Artificial Sequence
  Description of Artificial Sequence: Synthetic oligonucleotide
  Antisense strand to SEQ ID NO: 1219854
uaugaugugcgcaucacuu

SEQ ID NO: 1219856 - RNA, 19 nt, Artificial Sequence
  Description of Artificial Sequence: Synthetic oligonucleotide
  Sense strand starting at position 884 of SEQ ID NO: 917240
ugaugcgcacaucauaaau

SEQ ID NO: 1219857 - RNA, 19 nt, Artificial Sequence
  Description of Artificial Sequence: Synthetic oligonucleotide
  Antisense strand to SEQ ID NO: 1219856
auuuaugaugugcgcauca

SEQ ID NO: 1219858 - RNA, 19 nt, Artificial Sequence
  Description of Artificial Sequence: Synthetic oligonucleotide
  Sense strand starting at position 944 of SEQ ID NO: 917240
gcuugucagcuguuuguau

SEQ ID NO: 1219859 - RNA, 19 nt, Artificial Sequence
  Description of Artificial Sequence: Synthetic oligonucleotide
  Antisense strand to SEQ ID NO: 1219858
auacaaacagcugacaagc

SEQ ID NO: 1219860 - RNA, 19 nt, Artificial Sequence
  Description of Artificial Sequence: Synthetic oligonucleotide
  Sense strand starting at position 1048 of SEQ ID NO: 917240
ccgagaacucuacauggua

SEQ ID NO: 1219861 - RNA, 19 nt, Artificial Sequence
  Description of Artificial Sequence: Synthetic oligonucleotide
  Antisense strand to SEQ ID NO: 1219860
uaccauguagaguucucgg

SEQ ID NO: 1219862 - RNA, 19 nt, Artificial Sequence
  Description of Artificial Sequence: Synthetic oligonucleotide
  Sense strand starting at position 1409 of SEQ ID NO: 917240
ggugacaucugcuuagagu

SEQ ID NO: 1219863 - RNA, 19 nt, Artificial Sequence
  Description of Artificial Sequence: Synthetic oligonucleotide
  Antisense strand to SEQ ID NO: 1219862
acucuaagcagaugucacc

SEQ ID NO: 1219864 - RNA, 19 nt, Artificial Sequence
  Description of Artificial Sequence: Synthetic oligonucleotide
  Sense strand starting at position 1410 of SEQ ID NO: 917240
gugacaucugcuuagaguu

SEQ ID NO: 1219865 - RNA, 19 nt, Artificial Sequence
  Description of Artificial Sequence: Synthetic oligonucleotide
  Antisense strand to SEQ ID NO: 1219864
aacucuaagcagaugucac

SEQ ID NO: 1219866 - RNA, 19 nt, Artificial Sequence
  Description of Artificial Sequence: Synthetic oligonucleotide
  Sense strand starting at position 2996 of SEQ ID NO: 917240
guuugaccagccugggaua

SEQ ID NO: 1219867 - RNA, 19 nt, Artificial Sequence
  Description of Artificial Sequence: Synthetic oligonucleotide
  Antisense strand to SEQ ID NO: 1219866
uaucccaggcuggucaaac

SEQ ID NO: 1219868 - RNA, 19 nt, Artificial Sequence
  Description of Artificial Sequence: Synthetic oligonucleotide
  Sense strand starting at position 2998 of SEQ ID NO: 917240
uugaccagccugggauauu

SEQ ID NO: 1219869 - RNA, 19 nt, Artificial Sequence
  Description of Artificial Sequence: Synthetic oligonucleotide
  Antisense strand to SEQ ID NO: 1219868
aauaucccaggcuggucaa

SEQ ID NO: 1219870 - RNA, 19 nt, Artificial Sequence
  Description of Artificial Sequence: Synthetic oligonucleotide
  Sense strand starting at position 3016 of SEQ ID NO: 917240
uaacaaauaucgguggacu

SEQ ID NO: 1219871 - RNA, 19 nt, Artificial Sequence
  Description of Artificial Sequence: Synthetic oligonucleotide
  Antisense strand to SEQ ID NO: 1219870
aguccaccgauauuuguua

SEQ ID NO: 1219872 - RNA, 19 nt, Artificial Sequence
  Description of Artificial Sequence: Synthetic oligonucleotide
  Sense strand starting at position 3031 of SEQ ID NO: 917240
gacugcauuucggugauca

SEQ ID NO: 1219873 - RNA, 19 nt, Artificial Sequence
  Description of Artificial Sequence: Synthetic oligonucleotide
  Antisense strand to SEQ ID NO: 1219872
ugaucaccgaaaugcaguc

SEQ ID NO: 1219874 - RNA, 19 nt, Artificial Sequence
  Description of Artificial Sequence: Synthetic oligonucleotide
  Sense strand starting at position 3032 of SEQ ID NO: 917240
acugcauuucggugaucau

SEQ ID NO: 1219875 - RNA, 19 nt, Artificial Sequence
  Description of Artificial Sequence: Synthetic oligonucleotide
  Antisense strand to SEQ ID NO: 1219874
augaucaccgaaaugcagu

SEQ ID NO: 1219876 - RNA, 19 nt, Artificial Sequence
  Description of Artificial Sequence: Synthetic oligonucleotide
  Sense strand starting at position 3093 of SEQ ID NO: 917240
aaguuuauuccaggaaugu

SEQ ID NO: 1219877 - RNA, 19 nt, Artificial Sequence
  Description of Artificial Sequence: Synthetic oligonucleotide
  Antisense strand to SEQ ID NO: 1219876
acauuccuggaauaaacuu

SEQ ID NO: 1219878 - RNA, 19 nt, Artificial Sequence
  Description of Artificial Sequence: Synthetic oligonucleotide
  Sense strand starting at position 3094 of SEQ ID NO: 917240
aguuuauuccaggaaugug

SEQ ID NO: 1219879 - RNA, 19 nt, Artificial Sequence
  Description of Artificial Sequence: Synthetic oligonucleotide
  Antisense strand to SEQ ID NO: 1219878
cacauuccuggaauaaacu

SEQ ID NO: 1219880 - RNA, 19 nt, Artificial Sequence
  Description of Artificial Sequence: Synthetic oligonucleotide
  Sense strand starting at position 3167 of SEQ ID NO: 917240
gccuucguuagcguuuaga

SEQ ID NO: 1219881 - RNA, 19 nt, Artificial Sequence
  Description of Artificial Sequence: Synthetic oligonucleotide
  Antisense strand to SEQ ID NO: 1219880
ucuaaacgcuaacgaaggc

SEQ ID NO: 1219882 - RNA, 19 nt, Artificial Sequence
  Description of Artificial Sequence: Synthetic oligonucleotide
  Sense strand starting at position 3169 of SEQ ID NO: 917240
cuucguuagcguuuagauc

SEQ ID NO: 1219883 - RNA, 19 nt, Artificial Sequence
  Description of Artificial Sequence: Synthetic oligonucleotide
  Antisense strand to SEQ ID NO: 1219882
gaucuaaacgcuaacgaag

SEQ ID NO: 1219884 - RNA, 19 nt, Artificial Sequence
  Description of Artificial Sequence: Synthetic oligonucleotide
  Sense strand starting at position 3222 of SEQ ID NO: 917240
gcguuuguucugcugagau

SEQ ID NO: 1219885 - RNA, 19 nt, Artificial Sequence
  Description of Artificial Sequence: Synthetic oligonucleotide
  Antisense strand to SEQ ID NO: 1219884
aucucagcagaacaaacgc

SEQ ID NO: 1219886 - RNA, 19 nt, Artificial Sequence
  Description of Artificial Sequence: Synthetic oligonucleotide
  Sense strand starting at position 3224 of SEQ ID NO: 917240
guuuguucugcugagaucu

SEQ ID NO: 1219887 - RNA, 19 nt, Artificial Sequence
  Description of Artificial Sequence: Synthetic oligonucleotide
  Antisense strand to SEQ ID NO: 1219886
agaucucagcagaacaaac

SEQ ID NO: 1219888 - RNA, 19 nt, Artificial Sequence
  Description of Artificial Sequence: Synthetic oligonucleotide
  Sense strand starting at position 3341 of SEQ ID NO: 917240
guaguaguuacggagacuu

SEQ ID NO: 1219889 - RNA, 19 nt, Artificial Sequence
  Description of Artificial Sequence: Synthetic oligonucleotide
  Antisense strand to SEQ ID NO: 1219888
aagucuccguaacuacuac

SEQ ID NO: 1219890 - RNA, 19 nt, Artificial Sequence
  Description of Artificial Sequence: Synthetic oligonucleotide
  Sense strand starting at position 3381 of SEQ ID NO: 917240
aaaugcuaccuuugaaggu

SEQ ID NO: 1219891 - RNA, 19 nt, Artificial Sequence
  Description of Artificial Sequence: Synthetic oligonucleotide
  Antisense strand to SEQ ID NO: 1219890
accuucaaagguagcauuu

SEQ ID NO: 1219892 - RNA, 19 nt, Artificial Sequence
  Description of Artificial Sequence: Synthetic oligonucleotide
  Sense strand starting at position 3385 of SEQ ID NO: 917240
gcuaccuuugaaggucuua

SEQ ID NO: 1219893 - RNA, 19 nt, Artificial Sequence
  Description of Artificial Sequence: Synthetic oligonucleotide
  Antisense strand to SEQ ID NO: 1219892
uaagaccuucaaagguagc

SEQ ID NO: 1219894 - RNA, 19 nt, Artificial Sequence
  Description of Artificial Sequence: Synthetic oligonucleotide
  Sense strand starting at position 3717 of SEQ ID NO: 917240
gcauaccuacaguggaaua

SEQ ID NO: 1219895 - RNA, 19 nt, Artificial Sequence
  Description of Artificial Sequence: Synthetic oligonucleotide
  Antisense strand to SEQ ID NO: 1219894
uauuccacuguagguaugc

SEQ ID NO: 1219896 - RNA, 19 nt, Artificial Sequence
  Description of Artificial Sequence: Synthetic oligonucleotide
  Sense strand starting at position 3944 of SEQ ID NO: 917241
agaguuucauagguacgga

SEQ ID NO: 1219897 - RNA, 19 nt, Artificial Sequence
  Description of Artificial Sequence: Synthetic oligonucleotide
  Antisense strand to SEQ ID NO: 1219896
uccguaccuaugaaacucu

SEQ ID NO: 1219898 - RNA, 19 nt, Artificial Sequence
  Description of Artificial Sequence: Synthetic oligonucleotide
  Sense strand starting at position 10 of SEQ ID NO: 917241
agagguggccacgaaaguu

SEQ ID NO: 1219899 - RNA, 19 nt, Artificial Sequence
  Description of Artificial Sequence: Synthetic oligonucleotide
  Antisense strand to SEQ ID NO: 1219898
aacuuucguggccaccucu

SEQ ID NO: 1219900 - RNA, 19 nt, Artificial Sequence
  Description of Artificial Sequence: Synthetic oligonucleotide
  Sense strand starting at position 26 of SEQ ID NO: 917241
guuacaucagauugacaua

SEQ ID NO: 1219901 - RNA, 19 nt, Artificial Sequence
  Description of Artificial Sequence: Synthetic oligonucleotide
  Antisense strand to SEQ ID NO: 1219900
uaugucaaucugauguaac

SEQ ID NO: 1219902 - RNA, 19 nt, Artificial Sequence
  Description of Artificial Sequence: Synthetic oligonucleotide
  Sense strand starting at position 37 of SEQ ID NO: 917241
uugacauaggccugugaaa

SEQ ID NO: 1219903 - RNA, 19 nt, Artificial Sequence
  Description of Artificial Sequence: Synthetic oligonucleotide
  Antisense strand to SEQ ID NO: 1219902
uuucacaggccuaugucaa

SEQ ID NO: 1219904 - RNA, 19 nt, Artificial Sequence
  Description of Artificial Sequence: Synthetic oligonucleotide
  Sense strand starting at position 39 of SEQ ID NO: 917241
gacauaggccugugaaaca

SEQ ID NO: 1219905 - RNA, 19 nt, Artificial Sequence
  Description of Artificial Sequence: Synthetic oligonucleotide
  Antisense strand to SEQ ID NO: 1219904
uguuucacaggccuauguc

SEQ ID NO: 1219906 - RNA, 19 nt, Artificial Sequence
  Description of Artificial Sequence: Synthetic oligonucleotide
  Sense strand starting at position 287 of SEQ ID NO: 917241
ggcccucacugaguggaaa

SEQ ID NO: 1219907 - RNA, 19 nt, Artificial Sequence
  Description of Artificial Sequence: Synthetic oligonucleotide
  Antisense strand to SEQ ID NO: 1219906
uuuccacucagugagggcc

SEQ ID NO: 1219908 - RNA, 19 nt, Artificial Sequence
  Description of Artificial Sequence: Synthetic oligonucleotide
  Sense strand starting at position 322 of SEQ ID NO: 917241
aguaaacucucuccugguu

SEQ ID NO: 1219909 - RNA, 19 nt, Artificial Sequence
  Description of Artificial Sequence: Synthetic oligonucleotide
  Antisense strand to SEQ ID NO: 1219908
aaccaggagagaguuuacu

SEQ ID NO: 1219910 - RNA, 19 nt, Artificial Sequence
  Description of Artificial Sequence: Synthetic oligonucleotide
  Sense strand starting at position 409 of SEQ ID NO: 917241
cugccaaacccaggucaua

SEQ ID NO: 1219911 - RNA, 19 nt, Artificial Sequence
  Description of Artificial Sequence: Synthetic oligonucleotide
  Antisense strand to SEQ ID NO: 1219910
uaugaccuggguuuggcag

SEQ ID NO: 1219912 - RNA, 19 nt, Artificial Sequence
  Description of Artificial Sequence: Synthetic oligonucleotide
  Sense strand starting at position 479 of SEQ ID NO: 917241
cgagaaacccuauauuguu

SEQ ID NO: 1219913 - RNA, 19 nt, Artificial Sequence
  Description of Artificial Sequence: Synthetic oligonucleotide
  Antisense strand to SEQ ID NO: 1219912
aacaauauaggguuucucg

SEQ ID NO: 1219914 - RNA, 19 nt, Artificial Sequence
  Description of Artificial Sequence: Synthetic oligonucleotide
  Sense strand starting at position 500 of SEQ ID NO: 917241
uuuauaaagcuugaguuga

SEQ ID NO: 1219915 - RNA, 19 nt, Artificial Sequence
  Description of Artificial Sequence: Synthetic oligonucleotide
  Antisense strand to SEQ ID NO: 1219914
ucaacucaagcuuuauaaa

SEQ ID NO: 1219916 - RNA, 19 nt, Artificial Sequence
  Description of Artificial Sequence: Synthetic oligonucleotide
  Sense strand starting at position 553 of SEQ ID NO: 917241
ggaguaaauuaagauuuac

SEQ ID NO: 1219917 - RNA, 19 nt, Artificial Sequence
  Description of Artificial Sequence: Synthetic oligonucleotide
  Antisense strand to SEQ ID NO: 1219916
guaaaucuuaauuuacucc

SEQ ID NO: 1219918 - RNA, 19 nt, Artificial Sequence
  Description of Artificial Sequence: Synthetic oligonucleotide
  Sense strand starting at position 760 of SEQ ID NO: 917241
gguucaguuccuuagggaa

SEQ ID NO: 1219919 - RNA, 19 nt, Artificial Sequence
  Description of Artificial Sequence: Synthetic oligonucleotide
  Antisense strand to SEQ ID NO: 1219918
uucccuaaggaacugaacc

SEQ ID NO: 1219920 - RNA, 19 nt, Artificial Sequence
  Description of Artificial Sequence: Synthetic oligonucleotide
  Sense strand starting at position 783 of SEQ ID NO: 917241
cuaggugaaucaccaggau

SEQ ID NO: 1219921 - RNA, 19 nt, Artificial Sequence
  Description of Artificial Sequence: Synthetic oligonucleotide
  Antisense strand to SEQ ID NO: 1219920
auccuggugauucaccuag

SEQ ID NO: 1219922 - RNA, 19 nt, Artificial Sequence
  Description of Artificial Sequence: Synthetic oligonucleotide
  Sense strand starting at position 786 of SEQ ID NO: 917241
ggugaaucaccaggaucca

SEQ ID NO: 1219923 - RNA, 19 nt, Artificial Sequence
  Description of Artificial Sequence: Synthetic oligonucleotide
  Antisense strand to SEQ ID NO: 1219922
uggauccuggugauucacc

SEQ ID NO: 1219924 - RNA, 19 nt, Artificial Sequence
  Description of Artificial Sequence: Synthetic oligonucleotide
  Sense strand starting at position 1088 of SEQ ID NO: 917241
gcaggaucgaggcacugau

SEQ ID NO: 1219925 - RNA, 19 nt, Artificial Sequence
  Description of Artificial Sequence: Synthetic oligonucleotide
  Antisense strand to SEQ ID NO: 1219924
aucagugccucgauccugc

SEQ ID NO: 1219926 - RNA, 19 nt, Artificial Sequence
  Description of Artificial Sequence: Synthetic oligonucleotide
  Sense strand starting at position 1212 of SEQ ID NO: 917241
ucgugaaguguuuaggaaa

SEQ ID NO: 1219927 - RNA, 19 nt, Artificial Sequence
  Description of Artificial Sequence: Synthetic oligonucleotide
  Antisense strand to SEQ ID NO: 1219926
uuuccuaaacacuucacga

SEQ ID NO: 1219928 - RNA, 19 nt, Artificial Sequence
  Description of Artificial Sequence: Synthetic oligonucleotide
  Sense strand starting at position 1418 of SEQ ID NO: 917241
cuaagcuuucggugaauuu

SEQ ID NO: 1219929 - RNA, 19 nt, Artificial Sequence
  Description of Artificial Sequence: Synthetic oligonucleotide
  Antisense strand to SEQ ID NO: 1219928
aaauucaccgaaagcuuag

SEQ ID NO: 1219930 - RNA, 19 nt, Artificial Sequence
  Description of Artificial Sequence: Synthetic oligonucleotide
  Sense strand starting at position 2392 of SEQ ID NO: 917241
gcgagaggacuuggcauuu

SEQ ID NO: 1219931 - RNA, 19 nt, Artificial Sequence
  Description of Artificial Sequence: Synthetic oligonucleotide
  Antisense strand to SEQ ID NO: 1219930
aaaugccaaguccucucgc

SEQ ID NO: 1219932 - RNA, 19 nt, Artificial Sequence
  Description of Artificial Sequence: Synthetic oligonucleotide
  Sense strand starting at position 2404 of SEQ ID NO: 917241
ggcauuuaugagcgcuucu

SEQ ID NO: 1219933 - RNA, 19 nt, Artificial Sequence
  Description of Artificial Sequence: Synthetic oligonucleotide
  Antisense strand to SEQ ID NO: 1219932
agaagcgcucauaaaugcc

SEQ ID NO: 1219934 - RNA, 19 nt, Artificial Sequence
  Description of Artificial Sequence: Synthetic oligonucleotide
  Sense strand starting at position 2411 of SEQ ID NO: 917241
augagcgcuucuuuaauuu

SEQ ID NO: 1219935 - RNA, 19 nt, Artificial Sequence
  Description of Artificial Sequence: Synthetic oligonucleotide
  Antisense strand to SEQ ID NO: 1219934
aaauuaaagaagcgcucau

SEQ ID NO: 1219936 - RNA, 19 nt, Artificial Sequence
  Description of Artificial Sequence: Synthetic oligonucleotide
  Sense strand starting at position 2462 of SEQ ID NO: 917241
gacugaagaucuguucgag

SEQ ID NO: 1219937 - RNA, 19 nt, Artificial Sequence
  Description of Artificial Sequence: Synthetic oligonucleotide
  Antisense strand to SEQ ID NO: 1219936
cucgaacagaucuucaguc

SEQ ID NO: 1219938 - RNA, 19 nt, Artificial Sequence
  Description of Artificial Sequence: Synthetic oligonucleotide
  Sense strand starting at position 3015 of SEQ ID NO: 917241
ucuggauaccgugaaacuu

SEQ ID NO: 1219939 - RNA, 19 nt, Artificial Sequence
  Description of Artificial Sequence: Synthetic oligonucleotide
  Antisense strand to SEQ ID NO: 1219938
aaguuucacgguauccaga

SEQ ID NO: 1219940 - RNA, 19 nt, Artificial Sequence
  Description of Artificial Sequence: Synthetic oligonucleotide
  Sense strand starting at position 3024 of SEQ ID NO: 917241
cgugaaacuuugucucaga

SEQ ID NO: 1219941 - RNA, 19 nt, Artificial Sequence
  Description of Artificial Sequence: Synthetic oligonucleotide
  Antisense strand to SEQ ID NO: 1219940
ucugagacaaaguuucacg

SEQ ID NO: 1219942 - RNA, 19 nt, Artificial Sequence
  Description of Artificial Sequence: Synthetic oligonucleotide
  Sense strand starting at position 3025 of SEQ ID NO: 917241
gugaaacuuugucucagau

SEQ ID NO: 1219943 - RNA, 19 nt, Artificial Sequence
  Description of Artificial Sequence: Synthetic oligonucleotide
  Antisense strand to SEQ ID NO: 1219942
aucugagacaaaguuucac

SEQ ID NO: 1219944 - RNA, 19 nt, Artificial Sequence
  Description of Artificial Sequence: Synthetic oligonucleotide
  Sense strand starting at position 3048 of SEQ ID NO: 917241
aggucucaguauuugcauu

SEQ ID NO: 1219945 - RNA, 19 nt, Artificial Sequence
  Description of Artificial Sequence: Synthetic oligonucleotide
  Antisense strand to SEQ ID NO: 1219944
aaugcaaauacugagaccu

SEQ ID NO: 1219946 - RNA, 19 nt, Artificial Sequence
  Description of Artificial Sequence: Synthetic oligonucleotide
  Sense strand starting at position 3081 of SEQ ID NO: 917241
gaugucuugcgauacaaau

SEQ ID NO: 1219947 - RNA, 19 nt, Artificial Sequence
  Description of Artificial Sequence: Synthetic oligonucleotide
  Antisense strand to SEQ ID NO: 1219946
auuuguaucgcaagacauc

SEQ ID NO: 1219948 - RNA, 19 nt, Artificial Sequence
  Description of Artificial Sequence: Synthetic oligonucleotide
  Sense strand starting at position 3083 of SEQ ID NO: 917241
ugucuugcgauacaaauga

SEQ ID NO: 1219949 - RNA, 19 nt, Artificial Sequence
  Description of Artificial Sequence: Synthetic oligonucleotide
  Antisense strand to SEQ ID NO: 1219948
ucauuuguaucgcaagaca

SEQ ID NO: 1219950 - RNA, 19 nt, Artificial Sequence
  Description of Artificial Sequence: Synthetic oligonucleotide
  Sense strand starting at position 3087 of SEQ ID NO: 917241
uugcgauacaaaugacaga

SEQ ID NO: 1219951 - RNA, 19 nt, Artificial Sequence
  Description of Artificial Sequence: Synthetic oligonucleotide
  Antisense strand to SEQ ID NO: 1219950
ucugucauuuguaucgcaa

SEQ ID NO: 1219952 - RNA, 19 nt, Artificial Sequence
  Description of Artificial Sequence: Synthetic oligonucleotide
  Sense strand starting at position 3292 of SEQ ID NO: 917241
guucgaaguuaaguggaaa

SEQ ID NO: 1219953 - RNA, 19 nt, Artificial Sequence
  Description of Artificial Sequence: Synthetic oligonucleotide
  Antisense strand to SEQ ID NO: 1219952
uuuccacuuaacuucgaac

SEQ ID NO: 1219954 - RNA, 19 nt, Artificial Sequence
  Description of Artificial Sequence: Synthetic oligonucleotide
  Sense strand starting at position 3293 of SEQ ID NO: 917241
uucgaaguuaaguggaaau

SEQ ID NO: 1219955 - RNA, 19 nt, Artificial Sequence
  Description of Artificial Sequence: Synthetic oligonucleotide
  Antisense strand to SEQ ID NO: 1219954
auuuccacuuaacuucgaa

SEQ ID NO: 1219956 - RNA, 19 nt, Artificial Sequence
  Description of Artificial Sequence: Synthetic oligonucleotide
  Sense strand starting at position 3348 of SEQ ID NO: 917241
auggauuucccgugauugc

SEQ ID NO: 1219957 - RNA, 19 nt, Artificial Sequence
  Description of Artificial Sequence: Synthetic oligonucleotide
  Antisense strand to SEQ ID NO: 1219956
gcaaucacgggaaauccau

SEQ ID NO: 1219958 - RNA, 19 nt, Artificial Sequence
  Description of Artificial Sequence: Synthetic oligonucleotide
  Sense strand starting at position 3358 of SEQ ID NO: 917241
cgugauugccaccauuauu

SEQ ID NO: 1219959 - RNA, 19 nt, Artificial Sequence
  Description of Artificial Sequence: Synthetic oligonucleotide
  Antisense strand to SEQ ID NO: 1219958
aauaaugguggcaaucacg

SEQ ID NO: 1219960 - RNA, 19 nt, Artificial Sequence
  Description of Artificial Sequence: Synthetic oligonucleotide
  Sense strand starting at position 3505 of SEQ ID NO: 917241
gagggagugucugcucaug

SEQ ID NO: 1219961 - RNA, 19 nt, Artificial Sequence
  Description of Artificial Sequence: Synthetic oligonucleotide
  Antisense strand to SEQ ID NO: 1219960
caugagcagacacucccuc

SEQ ID NO: 1219962 - RNA, 19 nt, Artificial Sequence
  Description of Artificial Sequence: Synthetic oligonucleotide
  Sense strand starting at position 3507 of SEQ ID NO: 917241
gggagugucugcucaugaa

SEQ ID NO: 1219963 - RNA, 19 nt, Artificial Sequence
  Description of Artificial Sequence: Synthetic oligonucleotide
  Antisense strand to SEQ ID NO: 1219962
uucaugagcagacacuccc

SEQ ID NO: 1219964 - RNA, 19 nt, Artificial Sequence
  Description of Artificial Sequence: Synthetic oligonucleotide
  Sense strand starting at position 3579 of SEQ ID NO: 917241
ugcugagucggcuuguuaa

SEQ ID NO: 1219965 - RNA, 19 nt, Artificial Sequence
  Description of Artificial Sequence: Synthetic oligonucleotide
  Antisense strand to SEQ ID NO: 1219964
uuaacaagccgacucagca

SEQ ID NO: 1219966 - RNA, 19 nt, Artificial Sequence
  Description of Artificial Sequence: Synthetic oligonucleotide
  Sense strand starting at position 3732 of SEQ ID NO: 917241
uguuuaugagucuguugga

SEQ ID NO: 1219967 - RNA, 19 nt, Artificial Sequence
  Description of Artificial Sequence: Synthetic oligonucleotide
  Antisense strand to SEQ ID NO: 1219966
uccaacagacucauaaaca

SEQ ID NO: 1219968 - RNA, 19 nt, Artificial Sequence
  Description of Artificial Sequence: Synthetic oligonucleotide
  Sense strand starting at position 3733 of SEQ ID NO: 917241
guuuaugagucuguuggaa

SEQ ID NO: 1219969 - RNA, 19 nt, Artificial Sequence
  Description of Artificial Sequence: Synthetic oligonucleotide
  Antisense strand to SEQ ID NO: 1219968
uuccaacagacucauaaac

SEQ ID NO: 1219970 - RNA, 19 nt, Artificial Sequence
  Description of Artificial Sequence: Synthetic oligonucleotide
  Sense strand starting at position 3746 of SEQ ID NO: 917241
uuggaauccugguuggguu

SEQ ID NO: 1219971 - RNA, 19 nt, Artificial Sequence
  Description of Artificial Sequence: Synthetic oligonucleotide
  Antisense strand to SEQ ID NO: 1219970
aacccaaccaggauuccaa

SEQ ID NO: 1219972 - RNA, 19 nt, Artificial Sequence
  Description of Artificial Sequence: Synthetic oligonucleotide
  Sense strand starting at position 3793 of SEQ ID NO: 917241
ugggaagcucgcuaguaaa

SEQ ID NO: 1219973 - RNA, 19 nt, Artificial Sequence
  Description of Artificial Sequence: Synthetic oligonucleotide
  Antisense strand to SEQ ID NO: 1219972
uuuacuagcgagcuuccca

SEQ ID NO: 1219974 - RNA, 19 nt, Artificial Sequence
  Description of Artificial Sequence: Synthetic oligonucleotide
  Sense strand starting at position 3825 of SEQ ID NO: 917241
ucggaaguugacugacuuu

SEQ ID NO: 1219975 - RNA, 19 nt, Artificial Sequence
  Description of Artificial Sequence: Synthetic oligonucleotide
  Antisense strand to SEQ ID NO: 1219974
aaagucagucaacuuccga

SEQ ID NO: 1219976 - RNA, 19 nt, Artificial Sequence
  Description of Artificial Sequence: Synthetic oligonucleotide
  Sense strand starting at position 3887 of SEQ ID NO: 917242
cgauuauaggcucaacuuu

SEQ ID NO: 1219977 - RNA, 19 nt, Artificial Sequence
  Description of Artificial Sequence: Synthetic oligonucleotide
  Antisense strand to SEQ ID NO: 1219976
aaaguugagccuauaaucg

SEQ ID NO: 1219978 - RNA, 19 nt, Artificial Sequence
  Description of Artificial Sequence: Synthetic oligonucleotide
  Sense strand starting at position 13 of SEQ ID NO: 917242
ugggucuuguuagcaauau

SEQ ID NO: 1219979 - RNA, 19 nt, Artificial Sequence
  Description of Artificial Sequence: Synthetic oligonucleotide
  Antisense strand to SEQ ID NO: 1219978
auauugcuaacaagaccca

SEQ ID NO: 1219980 - RNA, 19 nt, Artificial Sequence
  Description of Artificial Sequence: Synthetic oligonucleotide
  Sense strand starting at position 17 of SEQ ID NO: 917242
ucuuguuagcaauauaugu

SEQ ID NO: 1219981 - RNA, 19 nt, Artificial Sequence
  Description of Artificial Sequence: Synthetic oligonucleotide
  Antisense strand to SEQ ID NO: 1219980
acauauauugcuaacaaga

SEQ ID NO: 1219982 - RNA, 19 nt, Artificial Sequence
  Description of Artificial Sequence: Synthetic oligonucleotide
  Sense strand starting at position 200 of SEQ ID NO: 917242
agguuaugcccucacagac

SEQ ID NO: 1219983 - RNA, 19 nt, Artificial Sequence
  Description of Artificial Sequence: Synthetic oligonucleotide
  Antisense strand to SEQ ID NO: 1219982
gucugugagggcauaaccu

SEQ ID NO: 1219984 - RNA, 19 nt, Artificial Sequence
  Description of Artificial Sequence: Synthetic oligonucleotide
  Sense strand starting at position 219 of SEQ ID NO: 917242
caagaagcuugggucagaa

SEQ ID NO: 1219985 - RNA, 19 nt, Artificial Sequence
  Description of Artificial Sequence: Synthetic oligonucleotide
  Antisense strand to SEQ ID NO: 1219984
uucugacccaagcuucuug

SEQ ID NO: 1219986 - RNA, 19 nt, Artificial Sequence
  Description of Artificial Sequence: Synthetic oligonucleotide
  Sense strand starting at position 339 of SEQ ID NO: 917242
gggcguacaaguuagaauu

SEQ ID NO: 1219987 - RNA, 19 nt, Artificial Sequence
  Description of Artificial Sequence: Synthetic oligonucleotide
  Antisense strand to SEQ ID NO: 1219986
aauucuaacuuguacgccc

SEQ ID NO: 1219988 - RNA, 19 nt, Artificial Sequence
  Description of Artificial Sequence: Synthetic oligonucleotide
  Sense strand starting at position 358 of SEQ ID NO: 917242
uuucuuucgccauacagaa

SEQ ID NO: 1219989 - RNA, 19 nt, Artificial Sequence
  Description of Artificial Sequence: Synthetic oligonucleotide
  Antisense strand to SEQ ID NO: 1219988
uucuguauggcgaaagaaa

SEQ ID NO: 1219990 - RNA, 19 nt, Artificial Sequence
  Description of Artificial Sequence: Synthetic oligonucleotide
  Sense strand starting at position 373 of SEQ ID NO: 917242
agaaauuguuuagccagau

SEQ ID NO: 1219991 - RNA, 19 nt, Artificial Sequence
  Description of Artificial Sequence: Synthetic oligonucleotide
  Antisense strand to SEQ ID NO: 1219990
aucuggcuaaacaauuucu

SEQ ID NO: 1219992 - RNA, 19 nt, Artificial Sequence
  Description of Artificial Sequence: Synthetic oligonucleotide
  Sense strand starting at position 374 of SEQ ID NO: 917242
gaaauuguuuagccagauc

SEQ ID NO: 1219993 - RNA, 19 nt, Artificial Sequence
  Description of Artificial Sequence: Synthetic oligonucleotide
  Antisense strand to SEQ ID NO: 1219992
gaucuggcuaaacaauuuc

SEQ ID NO: 1219994 - RNA, 19 nt, Artificial Sequence
  Description of Artificial Sequence: Synthetic oligonucleotide
  Sense strand starting at position 377 of SEQ ID NO: 917242
auuguuuagccagaucuuc

SEQ ID NO: 1219995 - RNA, 19 nt, Artificial Sequence
  Description of Artificial Sequence: Synthetic oligonucleotide
  Antisense strand to SEQ ID NO: 1219994
gaagaucuggcuaaacaau

SEQ ID NO: 1219996 - RNA, 19 nt, Artificial Sequence
  Description of Artificial Sequence: Synthetic oligonucleotide
  Sense strand starting at position 522 of SEQ ID NO: 917242
gcgucuucccagcuuuagu

SEQ ID NO: 1219997 - RNA, 19 nt, Artificial Sequence
  Description of Artificial Sequence: Synthetic oligonucleotide
  Antisense strand to SEQ ID NO: 1219996
acuaaagcugggaagacgc

SEQ ID NO: 1219998 - RNA, 19 nt, Artificial Sequence
  Description of Artificial Sequence: Synthetic oligonucleotide
  Sense strand starting at position 576 of SEQ ID NO: 917242
aguuaugugacaggcuaga

SEQ ID NO: 1219999 - RNA, 19 nt, Artificial Sequence
  Description of Artificial Sequence: Synthetic oligonucleotide
  Antisense strand to SEQ ID NO: 1219998
ucuagccugucacauaacu

SEQ ID NO: 1220000 - RNA, 19 nt, Artificial Sequence
  Description of Artificial Sequence: Synthetic oligonucleotide
  Sense strand starting at position 762 of SEQ ID NO: 917242
cuagaacacugguuagauu

SEQ ID NO: 1220001 - RNA, 19 nt, Artificial Sequence
  Description of Artificial Sequence: Synthetic oligonucleotide
  Antisense strand to SEQ ID NO: 1220000
aaucuaaccaguguucuag

SEQ ID NO: 1220002 - RNA, 19 nt, Artificial Sequence
  Description of Artificial Sequence: Synthetic oligonucleotide
  Sense strand starting at position 771 of SEQ ID NO: 917242
ugguuagauucugcuagaa

SEQ ID NO: 1220003 - RNA, 19 nt, Artificial Sequence
  Description of Artificial Sequence: Synthetic oligonucleotide
  Antisense strand to SEQ ID NO: 1220002
uucuagcagaaucuaacca

SEQ ID NO: 1220004 - RNA, 19 nt, Artificial Sequence
  Description of Artificial Sequence: Synthetic oligonucleotide
  Sense strand starting at position 812 of SEQ ID NO: 917242
uggcauaaagucuacuuga

SEQ ID NO: 1220005 - RNA, 19 nt, Artificial Sequence
  Description of Artificial Sequence: Synthetic oligonucleotide
  Antisense strand to SEQ ID NO: 1220004
ucaaguagacuuuaugcca

SEQ ID NO: 1220006 - RNA, 19 nt, Artificial Sequence
  Description of Artificial Sequence: Synthetic oligonucleotide
  Sense strand starting at position 1241 of SEQ ID NO: 917242
aguugaggguuugucugaa

SEQ ID NO: 1220007 - RNA, 19 nt, Artificial Sequence
  Description of Artificial Sequence: Synthetic oligonucleotide
  Antisense strand to SEQ ID NO: 1220006
uucagacaaacccucaacu

SEQ ID NO: 1220008 - RNA, 19 nt, Artificial Sequence
  Description of Artificial Sequence: Synthetic oligonucleotide
  Sense strand starting at position 2334 of SEQ ID NO: 917242
agggaacucuuccucccua

SEQ ID NO: 1220009 - RNA, 19 nt, Artificial Sequence
  Description of Artificial Sequence: Synthetic oligonucleotide
  Antisense strand to SEQ ID NO: 1220008
uagggaggaagaguucccu

SEQ ID NO: 1220010 - RNA, 19 nt, Artificial Sequence
  Description of Artificial Sequence: Synthetic oligonucleotide
  Sense strand starting at position 2409 of SEQ ID NO: 917242
ucagucuuucugggugauc

SEQ ID NO: 1220011 - RNA, 19 nt, Artificial Sequence
  Description of Artificial Sequence: Synthetic oligonucleotide
  Antisense strand to SEQ ID NO: 1220010
gaucacccagaaagacuga

SEQ ID NO: 1220012 - RNA, 19 nt, Artificial Sequence
  Description of Artificial Sequence: Synthetic oligonucleotide
  Sense strand starting at position 2411 of SEQ ID NO: 917242
agucuuucugggugaucca

SEQ ID NO: 1220013 - RNA, 19 nt, Artificial Sequence
  Description of Artificial Sequence: Synthetic oligonucleotide
  Antisense strand to SEQ ID NO: 1220012
uggaucacccagaaagacu

SEQ ID NO: 1220014 - RNA, 19 nt, Artificial Sequence
  Description of Artificial Sequence: Synthetic oligonucleotide
  Sense strand starting at position 2474 of SEQ ID NO: 917242
ccuggagguucuuuauuaa

SEQ ID NO: 1220015 - RNA, 19 nt, Artificial Sequence
  Description of Artificial Sequence: Synthetic oligonucleotide
  Antisense strand to SEQ ID NO: 1220014
uuaauaaagaaccuccagg

SEQ ID NO: 1220016 - RNA, 19 nt, Artificial Sequence
  Description of Artificial Sequence: Synthetic oligonucleotide
  Sense strand starting at position 2477 of SEQ ID NO: 917242
ggagguucuuuauuaauua

SEQ ID NO: 1220017 - RNA, 19 nt, Artificial Sequence
  Description of Artificial Sequence: Synthetic oligonucleotide
  Antisense strand to SEQ ID NO: 1220016
uaauuaauaaagaaccucc

SEQ ID NO: 1220018 - RNA, 19 nt, Artificial Sequence
  Description of Artificial Sequence: Synthetic oligonucleotide
  Sense strand starting at position 2751 of SEQ ID NO: 917242
agaugugugacuugcuuau

SEQ ID NO: 1220019 - RNA, 19 nt, Artificial Sequence
  Description of Artificial Sequence: Synthetic oligonucleotide
  Antisense strand to SEQ ID NO: 1220018
auaagcaagucacacaucu

SEQ ID NO: 1220020 - RNA, 19 nt, Artificial Sequence
  Description of Artificial Sequence: Synthetic oligonucleotide
  Sense strand starting at position 2755 of SEQ ID NO: 917242
gugugacuugcuuauucua

SEQ ID NO: 1220021 - RNA, 19 nt, Artificial Sequence
  Description of Artificial Sequence: Synthetic oligonucleotide
  Antisense strand to SEQ ID NO: 1220020
uagaauaagcaagucacac

SEQ ID NO: 1220022 - RNA, 19 nt, Artificial Sequence
  Description of Artificial Sequence: Synthetic oligonucleotide
  Sense strand starting at position 2757 of SEQ ID NO: 917242
gugacuugcuuauucuaca

SEQ ID NO: 1220023 - RNA, 19 nt, Artificial Sequence
  Description of Artificial Sequence: Synthetic oligonucleotide
  Antisense strand to SEQ ID NO: 1220022
uguagaauaagcaagucac

SEQ ID NO: 1220024 - RNA, 19 nt, Artificial Sequence
  Description of Artificial Sequence: Synthetic oligonucleotide
  Sense strand starting at position 2825 of SEQ ID NO: 917242
gggucauauucucccacga

SEQ ID NO: 1220025 - RNA, 19 nt, Artificial Sequence
  Description of Artificial Sequence: Synthetic oligonucleotide
  Antisense strand to SEQ ID NO: 1220024
ucgugggagaauaugaccc

SEQ ID NO: 1220026 - RNA, 19 nt, Artificial Sequence
  Description of Artificial Sequence: Synthetic oligonucleotide
  Sense strand starting at position 2985 of SEQ ID NO: 917242
cugaaauggccuugaacuu

SEQ ID NO: 1220027 - RNA, 19 nt, Artificial Sequence
  Description of Artificial Sequence: Synthetic oligonucleotide
  Antisense strand to SEQ ID NO: 1220026
aaguucaaggccauuucag

SEQ ID NO: 1220028 - RNA, 19 nt, Artificial Sequence
  Description of Artificial Sequence: Synthetic oligonucleotide
  Sense strand starting at position 2992 of SEQ ID NO: 917242
ggccuugaacuuggagagu

SEQ ID NO: 1220029 - RNA, 19 nt, Artificial Sequence
  Description of Artificial Sequence: Synthetic oligonucleotide
  Antisense strand to SEQ ID NO: 1220028
acucuccaaguucaaggcc

SEQ ID NO: 1220030 - RNA, 19 nt, Artificial Sequence
  Description of Artificial Sequence: Synthetic oligonucleotide
  Sense strand starting at position 3657 of SEQ ID NO: 917242
ccaugaguauuugaauauu

SEQ ID NO: 1220031 - RNA, 19 nt, Artificial Sequence
  Description of Artificial Sequence: Synthetic oligonucleotide
  Antisense strand to SEQ ID NO: 1220030
aauauucaaauacucaugg

SEQ ID NO: 1220032 - RNA, 19 nt, Artificial Sequence
  Description of Artificial Sequence: Synthetic oligonucleotide
  Sense strand starting at position 3666 of SEQ ID NO: 917242
uuugaauauugcuuggcaa

SEQ ID NO: 1220033 - RNA, 19 nt, Artificial Sequence
  Description of Artificial Sequence: Synthetic oligonucleotide
  Antisense strand to SEQ ID NO: 1220032
uugccaagcaauauucaaa

SEQ ID NO: 1220034 - RNA, 19 nt, Artificial Sequence
  Description of Artificial Sequence: Synthetic oligonucleotide
  Sense strand starting at position 3667 of SEQ ID NO: 917242
uugaauauugcuuggcaaa

SEQ ID NO: 1220035 - RNA, 19 nt, Artificial Sequence
  Description of Artificial Sequence: Synthetic oligonucleotide
  Antisense strand to SEQ ID NO: 1220034
uuugccaagcaauauucaa

SEQ ID NO: 1220036 - RNA, 19 nt, Artificial Sequence
  Description of Artificial Sequence: Synthetic oligonucleotide
  Sense strand starting at position 3668 of SEQ ID NO: 917242
ugaauauugcuuggcaaag

SEQ ID NO: 1220037 - RNA, 19 nt, Artificial Sequence
  Description of Artificial Sequence: Synthetic oligonucleotide
  Antisense strand to SEQ ID NO: 1220036
cuuugccaagcaauauuca

SEQ ID NO: 1220038 - RNA, 19 nt, Artificial Sequence
  Description of Artificial Sequence: Synthetic oligonucleotide
  Sense strand starting at position 3669 of SEQ ID NO: 917242
gaauauugcuuggcaaagc

SEQ ID NO: 1220039 - RNA, 19 nt, Artificial Sequence
  Description of Artificial Sequence: Synthetic oligonucleotide
  Antisense strand to SEQ ID NO: 1220038
gcuuugccaagcaauauuc

SEQ ID NO: 1220040 - RNA, 19 nt, Artificial Sequence
  Description of Artificial Sequence: Synthetic oligonucleotide
  Sense strand starting at position 3700 of SEQ ID NO: 917242
gcagauaguccuggaaaua

SEQ ID NO: 1220041 - RNA, 19 nt, Artificial Sequence
  Description of Artificial Sequence: Synthetic oligonucleotide
  Antisense strand to SEQ ID NO: 1220040
uauuuccaggacuaucugc

SEQ ID NO: 1220042 - RNA, 19 nt, Artificial Sequence
  Description of Artificial Sequence: Synthetic oligonucleotide
  Sense strand starting at position 3776 of SEQ ID NO: 917242
uacugugucugagcauuga

SEQ ID NO: 1220043 - RNA, 19 nt, Artificial Sequence
  Description of Artificial Sequence: Synthetic oligonucleotide
  Antisense strand to SEQ ID NO: 1220042
ucaaugcucagacacagua

SEQ ID NO: 1220044 - RNA, 19 nt, Artificial Sequence
  Description of Artificial Sequence: Synthetic oligonucleotide
  Sense strand starting at position 3806 of SEQ ID NO: 917242
aguggaaauuguucuagga

SEQ ID NO: 1220045 - RNA, 19 nt, Artificial Sequence
  Description of Artificial Sequence: Synthetic oligonucleotide
  Antisense strand to SEQ ID NO: 1220044
uccuagaacaauuuccacu

SEQ ID NO: 1220046 - RNA, 19 nt, Artificial Sequence
  Description of Artificial Sequence: Synthetic oligonucleotide
  Sense strand starting at position 3859 of SEQ ID NO: 917242
cacagagaauguguugcau

SEQ ID NO: 1220047 - RNA, 19 nt, Artificial Sequence
  Description of Artificial Sequence: Synthetic oligonucleotide
  Antisense strand to SEQ ID NO: 1220046
augcaacacauucucugug

SEQ ID NO: 1220048 - RNA, 19 nt, Artificial Sequence
  Description of Artificial Sequence: Synthetic oligonucleotide
  Sense strand starting at position 3871 of SEQ ID NO: 917242
guugcauuugcucaugugu

SEQ ID NO: 1220049 - RNA, 19 nt, Artificial Sequence
  Description of Artificial Sequence: Synthetic oligonucleotide
  Antisense strand to SEQ ID NO: 1220048
acacaugagcaaaugcaac

SEQ ID NO: 1220050 - RNA, 19 nt, Artificial Sequence
  Description of Artificial Sequence: Synthetic oligonucleotide
  Sense strand starting at position 3876 of SEQ ID NO: 917242
auuugcucaugugugcaaa

SEQ ID NO: 1220051 - RNA, 19 nt, Artificial Sequence
  Description of Artificial Sequence: Synthetic oligonucleotide
  Antisense strand to SEQ ID NO: 1220050
uuugcacacaugagcaaau

SEQ ID NO: 1220052 - RNA, 19 nt, Artificial Sequence
  Description of Artificial Sequence: Synthetic oligonucleotide
  Sense strand starting at position 3902 of SEQ ID NO: 917242
ccaucucaucacuguguaa

SEQ ID NO: 1220053 - RNA, 19 nt, Artificial Sequence
  Description of Artificial Sequence: Synthetic oligonucleotide
  Antisense strand to SEQ ID NO: 1220052
uuacacagugaugagaugg

SEQ ID NO: 1220054 - RNA, 19 nt, Artificial Sequence
  Description of Artificial Sequence: Synthetic oligonucleotide
  Sense strand starting at position 3938 of SEQ ID NO: 917242
ucagguuaucuauauuagu

SEQ ID NO: 1220055 - RNA, 19 nt, Artificial Sequence
  Description of Artificial Sequence: Synthetic oligonucleotide
  Antisense strand to SEQ ID NO: 1220054
acuaauauagauaaccuga

SEQ ID NO: 1220056 - RNA, 19 nt, Artificial Sequence
  Description of Artificial Sequence: Synthetic oligonucleotide
  Sense strand starting at position 3956 of SEQ ID NO: 917242
ucugcauggccuuaacauu

SEQ ID NO: 1220057 - RNA, 19 nt, Artificial Sequence
  Description of Artificial Sequence: Synthetic oligonucleotide
  Antisense strand to SEQ ID NO: 1220056
aauguuaaggccaugcaga

SEQ ID NO: 1220058 - RNA, 19 nt, Artificial Sequence
  Description of Artificial Sequence: Synthetic oligonucleotide
  Sense strand starting at position 3956 of SEQ ID NO: 917243
ucugcauggccuuaacauu

SEQ ID NO: 1220059 - RNA, 19 nt, Artificial Sequence
  Description of Artificial Sequence: Synthetic oligonucleotide
  Antisense strand to SEQ ID NO: 1220058
aauguuaaggccaugcaga

SEQ ID NO: 1220060 - RNA, 19 nt, Artificial Sequence
  Description of Artificial Sequence: Synthetic oligonucleotide
  Sense strand starting at position 7 of SEQ ID NO: 917243
cccgguucuagugauucuu

SEQ ID NO: 1220061 - RNA, 19 nt, Artificial Sequence
  Description of Artificial Sequence: Synthetic oligonucleotide
  Antisense strand to SEQ ID NO: 1220060
aagaaucacuagaaccggg

SEQ ID NO: 1220062 - RNA, 19 nt, Artificial Sequence
  Description of Artificial Sequence: Synthetic oligonucleotide
  Sense strand starting at position 217 of SEQ ID NO: 917243
uggccaucuagggaguagu

SEQ ID NO: 1220063 - RNA, 19 nt, Artificial Sequence
  Description of Artificial Sequence: Synthetic oligonucleotide
  Antisense strand to SEQ ID NO: 1220062
acuacucccuagauggcca

SEQ ID NO: 1220064 - RNA, 19 nt, Artificial Sequence
  Description of Artificial Sequence: Synthetic oligonucleotide
  Sense strand starting at position 220 of SEQ ID NO: 917243
ccaucuagggaguaguuga

SEQ ID NO: 1220065 - RNA, 19 nt, Artificial Sequence
  Description of Artificial Sequence: Synthetic oligonucleotide
  Antisense strand to SEQ ID NO: 1220064
ucaacuacucccuagaugg

SEQ ID NO: 1220066 - RNA, 19 nt, Artificial Sequence
  Description of Artificial Sequence: Synthetic oligonucleotide
  Sense strand starting at position 274 of SEQ ID NO: 917243
cgaaguuagcuuuggauag

SEQ ID NO: 1220067 - RNA, 19 nt, Artificial Sequence
  Description of Artificial Sequence: Synthetic oligonucleotide
  Antisense strand to SEQ ID NO: 1220066
cuauccaaagcuaacuucg

SEQ ID NO: 1220068 - RNA, 19 nt, Artificial Sequence
  Description of Artificial Sequence: Synthetic oligonucleotide
  Sense strand starting at position 472 of SEQ ID NO: 917243
ugaugauacgaaugucaau

SEQ ID NO: 1220069 - RNA, 19 nt, Artificial Sequence
  Description of Artificial Sequence: Synthetic oligonucleotide
  Antisense strand to SEQ ID NO: 1220068
auugacauucguaucauca

SEQ ID NO: 1220070 - RNA, 19 nt, Artificial Sequence
  Description of Artificial Sequence: Synthetic oligonucleotide
  Sense strand starting at position 592 of SEQ ID NO: 917243
ugaauaaacuuugugggua

SEQ ID NO: 1220071 - RNA, 19 nt, Artificial Sequence
  Description of Artificial Sequence: Synthetic oligonucleotide
  Antisense strand to SEQ ID NO: 1220070
uacccacaaaguuuauuca

SEQ ID NO: 1220072 - RNA, 19 nt, Artificial Sequence
  Description of Artificial Sequence: Synthetic oligonucleotide
  Sense strand starting at position 596 of SEQ ID NO: 917243
uaaacuuuguggguaguuu

SEQ ID NO: 1220073 - RNA, 19 nt, Artificial Sequence
  Description of Artificial Sequence: Synthetic oligonucleotide
  Antisense strand to SEQ ID NO: 1220072
aaacuacccacaaaguuua

SEQ ID NO: 1220074 - RNA, 19 nt, Artificial Sequence
  Description of Artificial Sequence: Synthetic oligonucleotide
  Sense strand starting at position 630 of SEQ ID NO: 917243
acuguuaugagguaaguuc

SEQ ID NO: 1220075 - RNA, 19 nt, Artificial Sequence
  Description of Artificial Sequence: Synthetic oligonucleotide
  Antisense strand to SEQ ID NO: 1220074
gaacuuaccucauaacagu

SEQ ID NO: 1220076 - RNA, 19 nt, Artificial Sequence
  Description of Artificial Sequence: Synthetic oligonucleotide
  Sense strand starting at position 669 of SEQ ID NO: 917243
ugcucuaugcuuugaacac

SEQ ID NO: 1220077 - RNA, 19 nt, Artificial Sequence
  Description of Artificial Sequence: Synthetic oligonucleotide
  Antisense strand to SEQ ID NO: 1220076
guguucaaagcauagagca

SEQ ID NO: 1220078 - RNA, 19 nt, Artificial Sequence
  Description of Artificial Sequence: Synthetic oligonucleotide
  Sense strand starting at position 701 of SEQ ID NO: 917243
aggugcucuuuaguaggau

SEQ ID NO: 1220079 - RNA, 19 nt, Artificial Sequence
  Description of Artificial Sequence: Synthetic oligonucleotide
  Antisense strand to SEQ ID NO: 1220078
auccuacuaaagagcaccu

SEQ ID NO: 1220080 - RNA, 19 nt, Artificial Sequence
  Description of Artificial Sequence: Synthetic oligonucleotide
  Sense strand starting at position 713 of SEQ ID NO: 917243
guaggauccuuucccuauc

SEQ ID NO: 1220081 - RNA, 19 nt, Artificial Sequence
  Description of Artificial Sequence: Synthetic oligonucleotide
  Antisense strand to SEQ ID NO: 1220080
gauagggaaaggauccuac

SEQ ID NO: 1220082 - RNA, 19 nt, Artificial Sequence
  Description of Artificial Sequence: Synthetic oligonucleotide
  Sense strand starting at position 764 of SEQ ID NO: 917243
agcccacuccuugagcaaa

SEQ ID NO: 1220083 - RNA, 19 nt, Artificial Sequence
  Description of Artificial Sequence: Synthetic oligonucleotide
  Antisense strand to SEQ ID NO: 1220082
uuugcucaaggagugggcu

SEQ ID NO: 1220084 - RNA, 19 nt, Artificial Sequence
  Description of Artificial Sequence: Synthetic oligonucleotide
  Sense strand starting at position 967 of SEQ ID NO: 917243
agcaacuguccugauagag

SEQ ID NO: 1220085 - RNA, 19 nt, Artificial Sequence
  Description of Artificial Sequence: Synthetic oligonucleotide
  Antisense strand to SEQ ID NO: 1220084
cucuaucaggacaguugcu

SEQ ID NO: 1220086 - RNA, 19 nt, Artificial Sequence
  Description of Artificial Sequence: Synthetic oligonucleotide
  Sense strand starting at position 993 of SEQ ID NO: 917243
uagugauaacaauggguca

SEQ ID NO: 1220087 - RNA, 19 nt, Artificial Sequence
  Description of Artificial Sequence: Synthetic oligonucleotide
  Antisense strand to SEQ ID NO: 1220086
ugacccauuguuaucacua

SEQ ID NO: 1220088 - RNA, 19 nt, Artificial Sequence
  Description of Artificial Sequence: Synthetic oligonucleotide
  Sense strand starting at position 1059 of SEQ ID NO: 917243
gucuguggagucuagaugu

SEQ ID NO: 1220089 - RNA, 19 nt, Artificial Sequence
  Description of Artificial Sequence: Synthetic oligonucleotide
  Antisense strand to SEQ ID NO: 1220088
acaucuagacuccacagac

SEQ ID NO: 1220090 - RNA, 19 nt, Artificial Sequence
  Description of Artificial Sequence: Synthetic oligonucleotide
  Sense strand starting at position 1175 of SEQ ID NO: 917243
ugggucuuguuagcaauau

SEQ ID NO: 1220091 - RNA, 19 nt, Artificial Sequence
  Description of Artificial Sequence: Synthetic oligonucleotide
  Antisense strand to SEQ ID NO: 1220090
auauugcuaacaagaccca

SEQ ID NO: 1220092 - RNA, 19 nt, Artificial Sequence
  Description of Artificial Sequence: Synthetic oligonucleotide
  Sense strand starting at position 1179 of SEQ ID NO: 917243
ucuuguuagcaauauaugu

SEQ ID NO: 1220093 - RNA, 19 nt, Artificial Sequence
  Description of Artificial Sequence: Synthetic oligonucleotide
  Antisense strand to SEQ ID NO: 1220092
acauauauugcuaacaaga

SEQ ID NO: 1220094 - RNA, 19 nt, Artificial Sequence
  Description of Artificial Sequence: Synthetic oligonucleotide
  Sense strand starting at position 1362 of SEQ ID NO: 917243
agguuaugcccucacagac

SEQ ID NO: 1220095 - RNA, 19 nt, Artificial Sequence
  Description of Artificial Sequence: Synthetic oligonucleotide
  Antisense strand to SEQ ID NO: 1220094
gucugugagggcauaaccu

SEQ ID NO: 1220096 - RNA, 19 nt, Artificial Sequence
  Description of Artificial Sequence: Synthetic oligonucleotide
  Sense strand starting at position 1381 of SEQ ID NO: 917243
caagaagcuugggucagaa

SEQ ID NO: 1220097 - RNA, 19 nt, Artificial Sequence
  Description of Artificial Sequence: Synthetic oligonucleotide
  Antisense strand to SEQ ID NO: 1220096
uucugacccaagcuucuug

SEQ ID NO: 1220098 - RNA, 19 nt, Artificial Sequence
  Description of Artificial Sequence: Synthetic oligonucleotide
  Sense strand starting at position 1501 of SEQ ID NO: 917243
gggcguacaaguuagaauu

SEQ ID NO: 1220099 - RNA, 19 nt, Artificial Sequence
  Description of Artificial Sequence: Synthetic oligonucleotide
  Antisense strand to SEQ ID NO: 1220098
aauucuaacuuguacgccc

SEQ ID NO: 1220100 - RNA, 19 nt, Artificial Sequence
  Description of Artificial Sequence: Synthetic oligonucleotide
  Sense strand starting at position 1520 of SEQ ID NO: 917243
uuucuuucgccauacagaa

SEQ ID NO: 1220101 - RNA, 19 nt, Artificial Sequence
  Description of Artificial Sequence: Synthetic oligonucleotide
  Antisense strand to SEQ ID NO: 1220100
uucuguauggcgaaagaaa

SEQ ID NO: 1220102 - RNA, 19 nt, Artificial Sequence
  Description of Artificial Sequence: Synthetic oligonucleotide
  Sense strand starting at position 1535 of SEQ ID NO: 917243
agaaauuguuuagccagau

SEQ ID NO: 1220103 - RNA, 19 nt, Artificial Sequence
  Description of Artificial Sequence: Synthetic oligonucleotide
  Antisense strand to SEQ ID NO: 1220102
aucuggcuaaacaauuucu

SEQ ID NO: 1220104 - RNA, 19 nt, Artificial Sequence
  Description of Artificial Sequence: Synthetic oligonucleotide
  Sense strand starting at position 1536 of SEQ ID NO: 917243
gaaauuguuuagccagauc

SEQ ID NO: 1220105 - RNA, 19 nt, Artificial Sequence
  Description of Artificial Sequence: Synthetic oligonucleotide
  Antisense strand to SEQ ID NO: 1220104
gaucuggcuaaacaauuuc

SEQ ID NO: 1220106 - RNA, 19 nt, Artificial Sequence
  Description of Artificial Sequence: Synthetic oligonucleotide
  Sense strand starting at position 1539 of SEQ ID NO: 917243
auuguuuagccagaucuuc

SEQ ID NO: 1220107 - RNA, 19 nt, Artificial Sequence
  Description of Artificial Sequence: Synthetic oligonucleotide
  Antisense strand to SEQ ID NO: 1220106
gaagaucuggcuaaacaau

SEQ ID NO: 1220108 - RNA, 19 nt, Artificial Sequence
  Description of Artificial Sequence: Synthetic oligonucleotide
  Sense strand starting at position 1547 of SEQ ID NO: 917243
gccagaucuucuguacuuc

SEQ ID NO: 1220109 - RNA, 19 nt, Artificial Sequence
  Description of Artificial Sequence: Synthetic oligonucleotide
  Antisense strand to SEQ ID NO: 1220108
gaaguacagaagaucuggc

SEQ ID NO: 1220110 - RNA, 19 nt, Artificial Sequence
  Description of Artificial Sequence: Synthetic oligonucleotide
  Sense strand starting at position 1684 of SEQ ID NO: 917243
gcgucuucccagcuuuagu

SEQ ID NO: 1220111 - RNA, 19 nt, Artificial Sequence
  Description of Artificial Sequence: Synthetic oligonucleotide
  Antisense strand to SEQ ID NO: 1220110
acuaaagcugggaagacgc

SEQ ID NO: 1220112 - RNA, 19 nt, Artificial Sequence
  Description of Artificial Sequence: Synthetic oligonucleotide
  Sense strand starting at position 1738 of SEQ ID NO: 917243
aguuaugugacaggcuaga

SEQ ID NO: 1220113 - RNA, 19 nt, Artificial Sequence
  Description of Artificial Sequence: Synthetic oligonucleotide
  Antisense strand to SEQ ID NO: 1220112
ucuagccugucacauaacu

SEQ ID NO: 1220114 - RNA, 19 nt, Artificial Sequence
  Description of Artificial Sequence: Synthetic oligonucleotide
  Sense strand starting at position 1924 of SEQ ID NO: 917243
cuagaacacugguuagauu

SEQ ID NO: 1220115 - RNA, 19 nt, Artificial Sequence
  Description of Artificial Sequence: Synthetic oligonucleotide
  Antisense strand to SEQ ID NO: 1220114
aaucuaaccaguguucuag

SEQ ID NO: 1220116 - RNA, 19 nt, Artificial Sequence
  Description of Artificial Sequence: Synthetic oligonucleotide
  Sense strand starting at position 1933 of SEQ ID NO: 917243
ugguuagauucugcuagaa

SEQ ID NO: 1220117 - RNA, 19 nt, Artificial Sequence
  Description of Artificial Sequence: Synthetic oligonucleotide
  Antisense strand to SEQ ID NO: 1220116
uucuagcagaaucuaacca

SEQ ID NO: 1220118 - RNA, 19 nt, Artificial Sequence
  Description of Artificial Sequence: Synthetic oligonucleotide
  Sense strand starting at position 1974 of SEQ ID NO: 917243
uggcauaaagucuacuuga

SEQ ID NO: 1220119 - RNA, 19 nt, Artificial Sequence
  Description of Artificial Sequence: Synthetic oligonucleotide
  Antisense strand to SEQ ID NO: 1220118
ucaaguagacuuuaugcca

SEQ ID NO: 1220120 - RNA, 19 nt, Artificial Sequence
  Description of Artificial Sequence: Synthetic oligonucleotide
  Sense strand starting at position 2274 of SEQ ID NO: 917243
uaagaugugucgccaauua

SEQ ID NO: 1220121 - RNA, 19 nt, Artificial Sequence
  Description of Artificial Sequence: Synthetic oligonucleotide
  Antisense strand to SEQ ID NO: 1220120
uaauuggcgacacaucuua

SEQ ID NO: 1220122 - RNA, 19 nt, Artificial Sequence
  Description of Artificial Sequence: Synthetic oligonucleotide
  Sense strand starting at position 2403 of SEQ ID NO: 917243
aguugaggguuugucugaa

SEQ ID NO: 1220123 - RNA, 19 nt, Artificial Sequence
  Description of Artificial Sequence: Synthetic oligonucleotide
  Antisense strand to SEQ ID NO: 1220122
uucagacaaacccucaacu

SEQ ID NO: 1220124 - RNA, 19 nt, Artificial Sequence
  Description of Artificial Sequence: Synthetic oligonucleotide
  Sense strand starting at position 3496 of SEQ ID NO: 917243
agggaacucuuccucccua

SEQ ID NO: 1220125 - RNA, 19 nt, Artificial Sequence
  Description of Artificial Sequence: Synthetic oligonucleotide
  Antisense strand to SEQ ID NO: 1220124
uagggaggaagaguucccu

SEQ ID NO: 1220126 - RNA, 19 nt, Artificial Sequence
  Description of Artificial Sequence: Synthetic oligonucleotide
  Sense strand starting at position 3571 of SEQ ID NO: 917243
ucagucuuucugggugauc

SEQ ID NO: 1220127 - RNA, 19 nt, Artificial Sequence
  Description of Artificial Sequence: Synthetic oligonucleotide
  Antisense strand to SEQ ID NO: 1220126
gaucacccagaaagacuga

SEQ ID NO: 1220128 - RNA, 19 nt, Artificial Sequence
  Description of Artificial Sequence: Synthetic oligonucleotide
  Sense strand starting at position 3573 of SEQ ID NO: 917243
agucuuucugggugaucca

SEQ ID NO: 1220129 - RNA, 19 nt, Artificial Sequence
  Description of Artificial Sequence: Synthetic oligonucleotide
  Antisense strand to SEQ ID NO: 1220128
uggaucacccagaaagacu

SEQ ID NO: 1220130 - RNA, 19 nt, Artificial Sequence
  Description of Artificial Sequence: Synthetic oligonucleotide
  Sense strand starting at position 3636 of SEQ ID NO: 917243
ccuggagguucuuuauuaa

SEQ ID NO: 1220131 - RNA, 19 nt, Artificial Sequence
  Description of Artificial Sequence: Synthetic oligonucleotide
  Antisense strand to SEQ ID NO: 1220130
uuaauaaagaaccuccagg

SEQ ID NO: 1220132 - RNA, 19 nt, Artificial Sequence
  Description of Artificial Sequence: Synthetic oligonucleotide
  Sense strand starting at position 3639 of SEQ ID NO: 917243
ggagguucuuuauuaauua

SEQ ID NO: 1220133 - RNA, 19 nt, Artificial Sequence
  Description of Artificial Sequence: Synthetic oligonucleotide
  Antisense strand to SEQ ID NO: 1220132
uaauuaauaaagaaccucc

SEQ ID NO: 1220134 - RNA, 19 nt, Artificial Sequence
  Description of Artificial Sequence: Synthetic oligonucleotide
  Sense strand starting at position 3913 of SEQ ID NO: 917243
agaugugugacuugcuuau

SEQ ID NO: 1220135 - RNA, 19 nt, Artificial Sequence
  Description of Artificial Sequence: Synthetic oligonucleotide
  Antisense strand to SEQ ID NO: 1220134
auaagcaagucacacaucu

SEQ ID NO: 1220136 - RNA, 19 nt, Artificial Sequence
  Description of Artificial Sequence: Synthetic oligonucleotide
  Sense strand starting at position 3917 of SEQ ID NO: 917243
gugugacuugcuuauucua

SEQ ID NO: 1220137 - RNA, 19 nt, Artificial Sequence
  Description of Artificial Sequence: Synthetic oligonucleotide
  Antisense strand to SEQ ID NO: 1220136
uagaauaagcaagucacac

SEQ ID NO: 1220138 - RNA, 19 nt, Artificial Sequence
  Description of Artificial Sequence: Synthetic oligonucleotide
  Sense strand starting at position 3919 of SEQ ID NO: 917244
gugacuugcuuauucuaca

SEQ ID NO: 1220139 - RNA, 19 nt, Artificial Sequence
  Description of Artificial Sequence: Synthetic oligonucleotide
  Antisense strand to SEQ ID NO: 1220138
uguagaauaagcaagucac

SEQ ID NO: 1220140 - RNA, 19 nt, Artificial Sequence
  Description of Artificial Sequence: Synthetic oligonucleotide
  Sense strand starting at position 2 of SEQ ID NO: 917244
gggagauuauguguuuaaa

SEQ ID NO: 1220141 - RNA, 19 nt, Artificial Sequence
  Description of Artificial Sequence: Synthetic oligonucleotide
  Antisense strand to SEQ ID NO: 1220140
uuuaaacacauaaucuccc

SEQ ID NO: 1220142 - RNA, 19 nt, Artificial Sequence
  Description of Artificial Sequence: Synthetic oligonucleotide
  Sense strand starting at position 22 of SEQ ID NO: 917244
ugacacacuacguguaaga

SEQ ID NO: 1220143 - RNA, 19 nt, Artificial Sequence
  Description of Artificial Sequence: Synthetic oligonucleotide
  Antisense strand to SEQ ID NO: 1220142
ucuuacacguaguguguca

SEQ ID NO: 1220144 - RNA, 19 nt, Artificial Sequence
  Description of Artificial Sequence: Synthetic oligonucleotide
  Sense strand starting at position 24 of SEQ ID NO: 917244
acacacuacguguaagaua

SEQ ID NO: 1220145 - RNA, 19 nt, Artificial Sequence
  Description of Artificial Sequence: Synthetic oligonucleotide
  Antisense strand to SEQ ID NO: 1220144
uaucuuacacguagugugu

SEQ ID NO: 1220146 - RNA, 19 nt, Artificial Sequence
  Description of Artificial Sequence: Synthetic oligonucleotide
  Sense strand starting at position 39 of SEQ ID NO: 917244
gauauugugcuugacgaag

SEQ ID NO: 1220147 - RNA, 19 nt, Artificial Sequence
  Description of Artificial Sequence: Synthetic oligonucleotide
  Antisense strand to SEQ ID NO: 1220146
cuucgucaagcacaauauc

SEQ ID NO: 1220148 - RNA, 19 nt, Artificial Sequence
  Description of Artificial Sequence: Synthetic oligonucleotide
  Sense strand starting at position 45 of SEQ ID NO: 917244
gugcuugacgaagagaagu

SEQ ID NO: 1220149 - RNA, 19 nt, Artificial Sequence
  Description of Artificial Sequence: Synthetic oligonucleotide
  Antisense strand to SEQ ID NO: 1220148
acuucucuucgucaagcac

SEQ ID NO: 1220150 - RNA, 19 nt, Artificial Sequence
  Description of Artificial Sequence: Synthetic oligonucleotide
  Sense strand starting at position 795 of SEQ ID NO: 917244
gggccuguaguagaaacau

SEQ ID NO: 1220151 - RNA, 19 nt, Artificial Sequence
  Description of Artificial Sequence: Synthetic oligonucleotide
  Antisense strand to SEQ ID NO: 1220150
auguuucuacuacaggccc

SEQ ID NO: 1220152 - RNA, 19 nt, Artificial Sequence
  Description of Artificial Sequence: Synthetic oligonucleotide
  Sense strand starting at position 848 of SEQ ID NO: 917244
cagaaauggcaggguuacu

SEQ ID NO: 1220153 - RNA, 19 nt, Artificial Sequence
  Description of Artificial Sequence: Synthetic oligonucleotide
  Antisense strand to SEQ ID NO: 1220152
aguaacccugccauuucug

SEQ ID NO: 1220154 - RNA, 19 nt, Artificial Sequence
  Description of Artificial Sequence: Synthetic oligonucleotide
  Sense strand starting at position 948 of SEQ ID NO: 917244
gccggaauccgagaagcau

SEQ ID NO: 1220155 - RNA, 19 nt, Artificial Sequence
  Description of Artificial Sequence: Synthetic oligonucleotide
  Antisense strand to SEQ ID NO: 1220154
augcuucucggauuccggc

SEQ ID NO: 1220156 - RNA, 19 nt, Artificial Sequence
  Description of Artificial Sequence: Synthetic oligonucleotide
  Sense strand starting at position 1028 of SEQ ID NO: 917244
gagacagauuaugucgaca

SEQ ID NO: 1220157 - RNA, 19 nt, Artificial Sequence
  Description of Artificial Sequence: Synthetic oligonucleotide
  Antisense strand to SEQ ID NO: 1220156
ugucgacauaaucugucuc

SEQ ID NO: 1220158 - RNA, 19 nt, Artificial Sequence
  Description of Artificial Sequence: Synthetic oligonucleotide
  Sense strand starting at position 1184 of SEQ ID NO: 917244
gggagaaguuugucaguua

SEQ ID NO: 1220159 - RNA, 19 nt, Artificial Sequence
  Description of Artificial Sequence: Synthetic oligonucleotide
  Antisense strand to SEQ ID NO: 1220158
uaacugacaaacuucuccc

SEQ ID NO: 1220160 - RNA, 19 nt, Artificial Sequence
  Description of Artificial Sequence: Synthetic oligonucleotide
  Sense strand starting at position 1195 of SEQ ID NO: 917244
gucaguuauguuuaggaau

SEQ ID NO: 1220161 - RNA, 19 nt, Artificial Sequence
  Description of Artificial Sequence: Synthetic oligonucleotide
  Antisense strand to SEQ ID NO: 1220160
auuccuaaacauaacugac

SEQ ID NO: 1220162 - RNA, 19 nt, Artificial Sequence
  Description of Artificial Sequence: Synthetic oligonucleotide
  Sense strand starting at position 1234 of SEQ ID NO: 917244
agccuagagcguuaaggaa

SEQ ID NO: 1220163 - RNA, 19 nt, Artificial Sequence
  Description of Artificial Sequence: Synthetic oligonucleotide
  Antisense strand to SEQ ID NO: 1220162
uuccuuaacgcucuaggcu

SEQ ID NO: 1220164 - RNA, 19 nt, Artificial Sequence
  Description of Artificial Sequence: Synthetic oligonucleotide
  Sense strand starting at position 1260 of SEQ ID NO: 917244
gcaacucagacuggauuga

SEQ ID NO: 1220165 - RNA, 19 nt, Artificial Sequence
  Description of Artificial Sequence: Synthetic oligonucleotide
  Antisense strand to SEQ ID NO: 1220164
ucaauccagucugaguugc

SEQ ID NO: 1220166 - RNA, 19 nt, Artificial Sequence
  Description of Artificial Sequence: Synthetic oligonucleotide
  Sense strand starting at position 1264 of SEQ ID NO: 917244
cucagacuggauugaguau

SEQ ID NO: 1220167 - RNA, 19 nt, Artificial Sequence
  Description of Artificial Sequence: Synthetic oligonucleotide
  Antisense strand to SEQ ID NO: 1220166
auacucaauccagucugag

SEQ ID NO: 1220168 - RNA, 19 nt, Artificial Sequence
  Description of Artificial Sequence: Synthetic oligonucleotide
  Sense strand starting at position 1362 of SEQ ID NO: 917244
agguucuuguaaucagaag

SEQ ID NO: 1220169 - RNA, 19 nt, Artificial Sequence
  Description of Artificial Sequence: Synthetic oligonucleotide
  Antisense strand to SEQ ID NO: 1220168
cuucugauuacaagaaccu

SEQ ID NO: 1220170 - RNA, 19 nt, Artificial Sequence
  Description of Artificial Sequence: Synthetic oligonucleotide
  Sense strand starting at position 1368 of SEQ ID NO: 917244
uuguaaucagaaggcaaua

SEQ ID NO: 1220171 - RNA, 19 nt, Artificial Sequence
  Description of Artificial Sequence: Synthetic oligonucleotide
  Antisense strand to SEQ ID NO: 1220170
uauugccuucugauuacaa

SEQ ID NO: 1220172 - RNA, 19 nt, Artificial Sequence
  Description of Artificial Sequence: Synthetic oligonucleotide
  Sense strand starting at position 1439 of SEQ ID NO: 917244
cuagcaguaugaucuagac

SEQ ID NO: 1220173 - RNA, 19 nt, Artificial Sequence
  Description of Artificial Sequence: Synthetic oligonucleotide
  Antisense strand to SEQ ID NO: 1220172
gucuagaucauacugcuag

SEQ ID NO: 1220174 - RNA, 19 nt, Artificial Sequence
  Description of Artificial Sequence: Synthetic oligonucleotide
  Sense strand starting at position 1509 of SEQ ID NO: 917244
ucuuauacggcuuaaauga

SEQ ID NO: 1220175 - RNA, 19 nt, Artificial Sequence
  Description of Artificial Sequence: Synthetic oligonucleotide
  Antisense strand to SEQ ID NO: 1220174
ucauuuaagccguauaaga

SEQ ID NO: 1220176 - RNA, 19 nt, Artificial Sequence
  Description of Artificial Sequence: Synthetic oligonucleotide
  Sense strand starting at position 1520 of SEQ ID NO: 917244
uuaaaugacugagugggua

SEQ ID NO: 1220177 - RNA, 19 nt, Artificial Sequence
  Description of Artificial Sequence: Synthetic oligonucleotide
  Antisense strand to SEQ ID NO: 1220176
uacccacucagucauuuaa

SEQ ID NO: 1220178 - RNA, 19 nt, Artificial Sequence
  Description of Artificial Sequence: Synthetic oligonucleotide
  Sense strand starting at position 1532 of SEQ ID NO: 917244
guggguaucagucaguuag

SEQ ID NO: 1220179 - RNA, 19 nt, Artificial Sequence
  Description of Artificial Sequence: Synthetic oligonucleotide
  Antisense strand to SEQ ID NO: 1220178
cuaacugacugauacccac

SEQ ID NO: 1220180 - RNA, 19 nt, Artificial Sequence
  Description of Artificial Sequence: Synthetic oligonucleotide
  Sense strand starting at position 1574 of SEQ ID NO: 917244
gcuaaaugagaauguauua

SEQ ID NO: 1220181 - RNA, 19 nt, Artificial Sequence
  Description of Artificial Sequence: Synthetic oligonucleotide
  Antisense strand to SEQ ID NO: 1220180
uaauacauucucauuuagc

SEQ ID NO: 1220182 - RNA, 19 nt, Artificial Sequence
  Description of Artificial Sequence: Synthetic oligonucleotide
  Sense strand starting at position 1585 of SEQ ID NO: 917244
auguauuaucaucacgaag

SEQ ID NO: 1220183 - RNA, 19 nt, Artificial Sequence
  Description of Artificial Sequence: Synthetic oligonucleotide
  Antisense strand to SEQ ID NO: 1220182
cuucgugaugauaauacau

SEQ ID NO: 1220184 - RNA, 19 nt, Artificial Sequence
  Description of Artificial Sequence: Synthetic oligonucleotide
  Sense strand starting at position 1611 of SEQ ID NO: 917244
acgccaaagcucguuucua

SEQ ID NO: 1220185 - RNA, 19 nt, Artificial Sequence
  Description of Artificial Sequence: Synthetic oligonucleotide
  Antisense strand to SEQ ID NO: 1220184
uagaaacgagcuuuggcgu

SEQ ID NO: 1220186 - RNA, 19 nt, Artificial Sequence
  Description of Artificial Sequence: Synthetic oligonucleotide
  Sense strand starting at position 2041 of SEQ ID NO: 917244
uguaguucacgguaaagga

SEQ ID NO: 1220187 - RNA, 19 nt, Artificial Sequence
  Description of Artificial Sequence: Synthetic oligonucleotide
  Antisense strand to SEQ ID NO: 1220186
uccuuuaccgugaacuaca

SEQ ID NO: 1220188 - RNA, 19 nt, Artificial Sequence
  Description of Artificial Sequence: Synthetic oligonucleotide
  Sense strand starting at position 2632 of SEQ ID NO: 917244
cuuggagucuggucauuag

SEQ ID NO: 1220189 - RNA, 19 nt, Artificial Sequence
  Description of Artificial Sequence: Synthetic oligonucleotide
  Antisense strand to SEQ ID NO: 1220188
cuaaugaccagacuccaag

SEQ ID NO: 1220190 - RNA, 19 nt, Artificial Sequence
  Description of Artificial Sequence: Synthetic oligonucleotide
  Sense strand starting at position 2636 of SEQ ID NO: 917244
gagucuggucauuagcauc

SEQ ID NO: 1220191 - RNA, 19 nt, Artificial Sequence
  Description of Artificial Sequence: Synthetic oligonucleotide
  Antisense strand to SEQ ID NO: 1220190
gaugcuaaugaccagacuc

SEQ ID NO: 1220192 - RNA, 19 nt, Artificial Sequence
  Description of Artificial Sequence: Synthetic oligonucleotide
  Sense strand starting at position 2832 of SEQ ID NO: 917244
uaugucugacuagaauguu

SEQ ID NO: 1220193 - RNA, 19 nt, Artificial Sequence
  Description of Artificial Sequence: Synthetic oligonucleotide
  Antisense strand to SEQ ID NO: 1220192
aacauucuagucagacaua

SEQ ID NO: 1220194 - RNA, 19 nt, Artificial Sequence
  Description of Artificial Sequence: Synthetic oligonucleotide
  Sense strand starting at position 2888 of SEQ ID NO: 917244
uugaauuccgacuauguac

SEQ ID NO: 1220195 - RNA, 19 nt, Artificial Sequence
  Description of Artificial Sequence: Synthetic oligonucleotide
  Antisense strand to SEQ ID NO: 1220194
guacauagucggaauucaa

SEQ ID NO: 1220196 - RNA, 19 nt, Artificial Sequence
  Description of Artificial Sequence: Synthetic oligonucleotide
  Sense strand starting at position 2905 of SEQ ID NO: 917244
accagaaucuggguauaua

SEQ ID NO: 1220197 - RNA, 19 nt, Artificial Sequence
  Description of Artificial Sequence: Synthetic oligonucleotide
  Antisense strand to SEQ ID NO: 1220196
uauauacccagauucuggu

SEQ ID NO: 1220198 - RNA, 19 nt, Artificial Sequence
  Description of Artificial Sequence: Synthetic oligonucleotide
  Sense strand starting at position 2917 of SEQ ID NO: 917244
guauauagcagugagcaga

SEQ ID NO: 1220199 - RNA, 19 nt, Artificial Sequence
  Description of Artificial Sequence: Synthetic oligonucleotide
  Antisense strand to SEQ ID NO: 1220198
ucugcucacugcuauauac

SEQ ID NO: 1220200 - RNA, 19 nt, Artificial Sequence
  Description of Artificial Sequence: Synthetic oligonucleotide
  Sense strand starting at position 3060 of SEQ ID NO: 917244
ugguaaguagugcaggauu

SEQ ID NO: 1220201 - RNA, 19 nt, Artificial Sequence
  Description of Artificial Sequence: Synthetic oligonucleotide
  Antisense strand to SEQ ID NO: 1220200
aauccugcacuacuuacca

SEQ ID NO: 1220202 - RNA, 19 nt, Artificial Sequence
  Description of Artificial Sequence: Synthetic oligonucleotide
  Sense strand starting at position 3456 of SEQ ID NO: 917244
ggugacauaugagcgaaga

SEQ ID NO: 1220203 - RNA, 19 nt, Artificial Sequence
  Description of Artificial Sequence: Synthetic oligonucleotide
  Antisense strand to SEQ ID NO: 1220202
ucuucgcucauaugucacc

SEQ ID NO: 1220204 - RNA, 19 nt, Artificial Sequence
  Description of Artificial Sequence: Synthetic oligonucleotide
  Sense strand starting at position 3502 of SEQ ID NO: 917244
ugcauacaacugggagaau

SEQ ID NO: 1220205 - RNA, 19 nt, Artificial Sequence
  Description of Artificial Sequence: Synthetic oligonucleotide
  Antisense strand to SEQ ID NO: 1220204
auucucccaguuguaugca

SEQ ID NO: 1220206 - RNA, 19 nt, Artificial Sequence
  Description of Artificial Sequence: Synthetic oligonucleotide
  Sense strand starting at position 3605 of SEQ ID NO: 917244
gaggacugagucuggagua

SEQ ID NO: 1220207 - RNA, 19 nt, Artificial Sequence
  Description of Artificial Sequence: Synthetic oligonucleotide
  Antisense strand to SEQ ID NO: 1220206
uacuccagacucaguccuc

SEQ ID NO: 1220208 - RNA, 19 nt, Artificial Sequence
  Description of Artificial Sequence: Synthetic oligonucleotide
  Sense strand starting at position 3610 of SEQ ID NO: 917244
cugagucuggaguauaauu

SEQ ID NO: 1220209 - RNA, 19 nt, Artificial Sequence
  Description of Artificial Sequence: Synthetic oligonucleotide
  Antisense strand to SEQ ID NO: 1220208
aauuauacuccagacucag

SEQ ID NO: 1220210 - RNA, 19 nt, Artificial Sequence
  Description of Artificial Sequence: Synthetic oligonucleotide
  Sense strand starting at position 3615 of SEQ ID NO: 917244
ucuggaguauaauuguaga

SEQ ID NO: 1220211 - RNA, 19 nt, Artificial Sequence
  Description of Artificial Sequence: Synthetic oligonucleotide
  Antisense strand to SEQ ID NO: 1220210
ucuacaauuauacuccaga

SEQ ID NO: 1220212 - RNA, 19 nt, Artificial Sequence
  Description of Artificial Sequence: Synthetic oligonucleotide
  Sense strand starting at position 3645 of SEQ ID NO: 917244
gaggguaagaccugguaug

SEQ ID NO: 1220213 - RNA, 19 nt, Artificial Sequence
  Description of Artificial Sequence: Synthetic oligonucleotide
  Antisense strand to SEQ ID NO: 1220212
cauaccaggucuuacccuc

SEQ ID NO: 1220214 - RNA, 19 nt, Artificial Sequence
  Description of Artificial Sequence: Synthetic oligonucleotide
  Sense strand starting at position 3646 of SEQ ID NO: 917244
aggguaagaccugguaugu

SEQ ID NO: 1220215 - RNA, 19 nt, Artificial Sequence
  Description of Artificial Sequence: Synthetic oligonucleotide
  Antisense strand to SEQ ID NO: 1220214
acauaccaggucuuacccu

SEQ ID NO: 1220216 - RNA, 19 nt, Artificial Sequence
  Description of Artificial Sequence: Synthetic oligonucleotide
  Sense strand starting at position 3746 of SEQ ID NO: 917244
agaggauuaaugugucugu

SEQ ID NO: 1220217 - RNA, 19 nt, Artificial Sequence
  Description of Artificial Sequence: Synthetic oligonucleotide
  Antisense strand to SEQ ID NO: 1220216
acagacacauuaauccucu

SEQ ID NO: 1220218 - RNA, 19 nt, Artificial Sequence
  Description of Artificial Sequence: Synthetic oligonucleotide
  Sense strand starting at position 3763 of SEQ ID NO: 917245
guuggugagaacugacuga

SEQ ID NO: 1220219 - RNA, 19 nt, Artificial Sequence
  Description of Artificial Sequence: Synthetic oligonucleotide
  Antisense strand to SEQ ID NO: 1220218
ucagucaguucucaccaac

SEQ ID NO: 1220220 - RNA, 19 nt, Artificial Sequence
  Description of Artificial Sequence: Synthetic oligonucleotide
  Sense strand starting at position 55 of SEQ ID NO: 917245
ccaauaaagugagauuuau

SEQ ID NO: 1220221 - RNA, 19 nt, Artificial Sequence
  Description of Artificial Sequence: Synthetic oligonucleotide
  Antisense strand to SEQ ID NO: 1220220
auaaaucucacuuuauugg

SEQ ID NO: 1220222 - RNA, 19 nt, Artificial Sequence
  Description of Artificial Sequence: Synthetic oligonucleotide
  Sense strand starting at position 107 of SEQ ID NO: 917245
agaucuauaaggcgauauu

SEQ ID NO: 1220223 - RNA, 19 nt, Artificial Sequence
  Description of Artificial Sequence: Synthetic oligonucleotide
  Antisense strand to SEQ ID NO: 1220222
aauaucgccuuauagaucu

SEQ ID NO: 1220224 - RNA, 19 nt, Artificial Sequence
  Description of Artificial Sequence: Synthetic oligonucleotide
  Sense strand starting at position 136 of SEQ ID NO: 917245
auagaagaaucgcccuaaa

SEQ ID NO: 1220225 - RNA, 19 nt, Artificial Sequence
  Description of Artificial Sequence: Synthetic oligonucleotide
  Antisense strand to SEQ ID NO: 1220224
uuuagggcgauucuucuau

SEQ ID NO: 1220226 - RNA, 19 nt, Artificial Sequence
  Description of Artificial Sequence: Synthetic oligonucleotide
  Sense strand starting at position 139 of SEQ ID NO: 917245
gaagaaucgcccuaaacug

SEQ ID NO: 1220227 - RNA, 19 nt, Artificial Sequence
  Description of Artificial Sequence: Synthetic oligonucleotide
  Antisense strand to SEQ ID NO: 1220226
caguuuagggcgauucuuc

SEQ ID NO: 1220228 - RNA, 19 nt, Artificial Sequence
  Description of Artificial Sequence: Synthetic oligonucleotide
  Sense strand starting at position 217 of SEQ ID NO: 917245
aaagaaauagcuggguuua

SEQ ID NO: 1220229 - RNA, 19 nt, Artificial Sequence
  Description of Artificial Sequence: Synthetic oligonucleotide
  Antisense strand to SEQ ID NO: 1220228
uaaacccagcuauuucuuu

SEQ ID NO: 1220230 - RNA, 19 nt, Artificial Sequence
  Description of Artificial Sequence: Synthetic oligonucleotide
  Sense strand starting at position 219 of SEQ ID NO: 917245
agaaauagcuggguuuaag

SEQ ID NO: 1220231 - RNA, 19 nt, Artificial Sequence
  Description of Artificial Sequence: Synthetic oligonucleotide
  Antisense strand to SEQ ID NO: 1220230
cuuaaacccagcuauuucu

SEQ ID NO: 1220232 - RNA, 19 nt, Artificial Sequence
  Description of Artificial Sequence: Synthetic oligonucleotide
  Sense strand starting at position 228 of SEQ ID NO: 917245
uggguuuaagacuggucau

SEQ ID NO: 1220233 - RNA, 19 nt, Artificial Sequence
  Description of Artificial Sequence: Synthetic oligonucleotide
  Antisense strand to SEQ ID NO: 1220232
augaccagucuuaaaccca

SEQ ID NO: 1220234 - RNA, 19 nt, Artificial Sequence
  Description of Artificial Sequence: Synthetic oligonucleotide
  Sense strand starting at position 229 of SEQ ID NO: 917245
ggguuuaagacuggucaug

SEQ ID NO: 1220235 - RNA, 19 nt, Artificial Sequence
  Description of Artificial Sequence: Synthetic oligonucleotide
  Antisense strand to SEQ ID NO: 1220234
caugaccagucuuaaaccc

SEQ ID NO: 1220236 - RNA, 19 nt, Artificial Sequence
  Description of Artificial Sequence: Synthetic oligonucleotide
  Sense strand starting at position 231 of SEQ ID NO: 917245
guuuaagacuggucaugua

SEQ ID NO: 1220237 - RNA, 19 nt, Artificial Sequence
  Description of Artificial Sequence: Synthetic oligonucleotide
  Antisense strand to SEQ ID NO: 1220236
uacaugaccagucuuaaac

SEQ ID NO: 1220238 - RNA, 19 nt, Artificial Sequence
  Description of Artificial Sequence: Synthetic oligonucleotide
  Sense strand starting at position 390 of SEQ ID NO: 917245
ggacuuuagacuuaagcgu

SEQ ID NO: 1220239 - RNA, 19 nt, Artificial Sequence
  Description of Artificial Sequence: Synthetic oligonucleotide
  Antisense strand to SEQ ID NO: 1220238
acgcuuaagucuaaagucc

SEQ ID NO: 1220240 - RNA, 19 nt, Artificial Sequence
  Description of Artificial Sequence: Synthetic oligonucleotide
  Sense strand starting at position 496 of SEQ ID NO: 917245
gugagaucuuacuuagcuc

SEQ ID NO: 1220241 - RNA, 19 nt, Artificial Sequence
  Description of Artificial Sequence: Synthetic oligonucleotide
  Antisense strand to SEQ ID NO: 1220240
gagcuaaguaagaucucac

SEQ ID NO: 1220242 - RNA, 19 nt, Artificial Sequence
  Description of Artificial Sequence: Synthetic oligonucleotide
  Sense strand starting at position 521 of SEQ ID NO: 917245
ccugcuauugcguuugaca

SEQ ID NO: 1220243 - RNA, 19 nt, Artificial Sequence
  Description of Artificial Sequence: Synthetic oligonucleotide
  Antisense strand to SEQ ID NO: 1220242
ugucaaacgcaauagcagg

SEQ ID NO: 1220244 - RNA, 19 nt, Artificial Sequence
  Description of Artificial Sequence: Synthetic oligonucleotide
  Sense strand starting at position 532 of SEQ ID NO: 917245
guuugacagcuaugaccua

SEQ ID NO: 1220245 - RNA, 19 nt, Artificial Sequence
  Description of Artificial Sequence: Synthetic oligonucleotide
  Antisense strand to SEQ ID NO: 1220244
uaggucauagcugucaaac

SEQ ID NO: 1220246 - RNA, 19 nt, Artificial Sequence
  Description of Artificial Sequence: Synthetic oligonucleotide
  Sense strand starting at position 1063 of SEQ ID NO: 917245
ggaaauuccuacucggaag

SEQ ID NO: 1220247 - RNA, 19 nt, Artificial Sequence
  Description of Artificial Sequence: Synthetic oligonucleotide
  Antisense strand to SEQ ID NO: 1220246
cuuccgaguaggaauuucc

SEQ ID NO: 1220248 - RNA, 19 nt, Artificial Sequence
  Description of Artificial Sequence: Synthetic oligonucleotide
  Sense strand starting at position 2146 of SEQ ID NO: 917245
gcgacaucgaugcaaauaa

SEQ ID NO: 1220249 - RNA, 19 nt, Artificial Sequence
  Description of Artificial Sequence: Synthetic oligonucleotide
  Antisense strand to SEQ ID NO: 1220248
uuauuugcaucgaugucgc

SEQ ID NO: 1220250 - RNA, 19 nt, Artificial Sequence
  Description of Artificial Sequence: Synthetic oligonucleotide
  Sense strand starting at position 2238 of SEQ ID NO: 917245
uaaauagggucagagaaga

SEQ ID NO: 1220251 - RNA, 19 nt, Artificial Sequence
  Description of Artificial Sequence: Synthetic oligonucleotide
  Antisense strand to SEQ ID NO: 1220250
ucuucucugacccuauuua

SEQ ID NO: 1220252 - RNA, 19 nt, Artificial Sequence
  Description of Artificial Sequence: Synthetic oligonucleotide
  Sense strand starting at position 2295 of SEQ ID NO: 917245
ucaucuauguaaucaaggu

SEQ ID NO: 1220253 - RNA, 19 nt, Artificial Sequence
  Description of Artificial Sequence: Synthetic oligonucleotide
  Antisense strand to SEQ ID NO: 1220252
accuugauuacauagauga

SEQ ID NO: 1220254 - RNA, 19 nt, Artificial Sequence
  Description of Artificial Sequence: Synthetic oligonucleotide
  Sense strand starting at position 2421 of SEQ ID NO: 917245
acacuuagguuguuaaaga

SEQ ID NO: 1220255 - RNA, 19 nt, Artificial Sequence
  Description of Artificial Sequence: Synthetic oligonucleotide
  Antisense strand to SEQ ID NO: 1220254
ucuuuaacaaccuaagugu

SEQ ID NO: 1220256 - RNA, 19 nt, Artificial Sequence
  Description of Artificial Sequence: Synthetic oligonucleotide
  Sense strand starting at position 2683 of SEQ ID NO: 917245
gagagcaauuaaguuaaga

SEQ ID NO: 1220257 - RNA, 19 nt, Artificial Sequence
  Description of Artificial Sequence: Synthetic oligonucleotide
  Antisense strand to SEQ ID NO: 1220256
ucuuaacuuaauugcucuc

SEQ ID NO: 1220258 - RNA, 19 nt, Artificial Sequence
  Description of Artificial Sequence: Synthetic oligonucleotide
  Sense strand starting at position 2713 of SEQ ID NO: 917245
aguuccuuacaaggaauau

SEQ ID NO: 1220259 - RNA, 19 nt, Artificial Sequence
  Description of Artificial Sequence: Synthetic oligonucleotide
  Antisense strand to SEQ ID NO: 1220258
auauuccuuguaaggaacu

SEQ ID NO: 1220260 - RNA, 19 nt, Artificial Sequence
  Description of Artificial Sequence: Synthetic oligonucleotide
  Sense strand starting at position 2791 of SEQ ID NO: 917245
uuaugagaggaaugcauua

SEQ ID NO: 1220261 - RNA, 19 nt, Artificial Sequence
  Description of Artificial Sequence: Synthetic oligonucleotide
  Antisense strand to SEQ ID NO: 1220260
uaaugcauuccucucauaa

SEQ ID NO: 1220262 - RNA, 19 nt, Artificial Sequence
  Description of Artificial Sequence: Synthetic oligonucleotide
  Sense strand starting at position 2840 of SEQ ID NO: 917245
uuuaaaugugguugacuca

SEQ ID NO: 1220263 - RNA, 19 nt, Artificial Sequence
  Description of Artificial Sequence: Synthetic oligonucleotide
  Antisense strand to SEQ ID NO: 1220262
ugagucaaccacauuuaaa

SEQ ID NO: 1220264 - RNA, 19 nt, Artificial Sequence
  Description of Artificial Sequence: Synthetic oligonucleotide
  Sense strand starting at position 2841 of SEQ ID NO: 917245
uuaaaugugguugacucaa

SEQ ID NO: 1220265 - RNA, 19 nt, Artificial Sequence
  Description of Artificial Sequence: Synthetic oligonucleotide
  Antisense strand to SEQ ID NO: 1220264
uugagucaaccacauuuaa

SEQ ID NO: 1220266 - RNA, 19 nt, Artificial Sequence
  Description of Artificial Sequence: Synthetic oligonucleotide
  Sense strand starting at position 2843 of SEQ ID NO: 917245
aaaugugguugacucaaca

SEQ ID NO: 1220267 - RNA, 19 nt, Artificial Sequence
  Description of Artificial Sequence: Synthetic oligonucleotide
  Antisense strand to SEQ ID NO: 1220266
uguugagucaaccacauuu

SEQ ID NO: 1220268 - RNA, 19 nt, Artificial Sequence
  Description of Artificial Sequence: Synthetic oligonucleotide
  Sense strand starting at position 2860 of SEQ ID NO: 917245
caacuaagccuguaagagu

SEQ ID NO: 1220269 - RNA, 19 nt, Artificial Sequence
  Description of Artificial Sequence: Synthetic oligonucleotide
  Antisense strand to SEQ ID NO: 1220268
acucuuacaggcuuaguug

SEQ ID NO: 1220270 - RNA, 19 nt, Artificial Sequence
  Description of Artificial Sequence: Synthetic oligonucleotide
  Sense strand starting at position 2869 of SEQ ID NO: 917245
cuguaagagugucucaauc

SEQ ID NO: 1220271 - RNA, 19 nt, Artificial Sequence
  Description of Artificial Sequence: Synthetic oligonucleotide
  Antisense strand to SEQ ID NO: 1220270
gauugagacacucuuacag

SEQ ID NO: 1220272 - RNA, 19 nt, Artificial Sequence
  Description of Artificial Sequence: Synthetic oligonucleotide
  Sense strand starting at position 3027 of SEQ ID NO: 917245
cuuuaugucuuagugaaga

SEQ ID NO: 1220273 - RNA, 19 nt, Artificial Sequence
  Description of Artificial Sequence: Synthetic oligonucleotide
  Antisense strand to SEQ ID NO: 1220272
ucuucacuaagacauaaag

SEQ ID NO: 1220274 - RNA, 19 nt, Artificial Sequence
  Description of Artificial Sequence: Synthetic oligonucleotide
  Sense strand starting at position 3260 of SEQ ID NO: 917245
ggaagccaccuauaucuau

SEQ ID NO: 1220275 - RNA, 19 nt, Artificial Sequence
  Description of Artificial Sequence: Synthetic oligonucleotide
  Antisense strand to SEQ ID NO: 1220274
auagauauagguggcuucc

SEQ ID NO: 1220276 - RNA, 19 nt, Artificial Sequence
  Description of Artificial Sequence: Synthetic oligonucleotide
  Sense strand starting at position 3314 of SEQ ID NO: 917245
gugcuuaugggccagauaa

SEQ ID NO: 1220277 - RNA, 19 nt, Artificial Sequence
  Description of Artificial Sequence: Synthetic oligonucleotide
  Antisense strand to SEQ ID NO: 1220276
uuaucuggcccauaagcac

SEQ ID NO: 1220278 - RNA, 19 nt, Artificial Sequence
  Description of Artificial Sequence: Synthetic oligonucleotide
  Sense strand starting at position 3316 of SEQ ID NO: 917245
gcuuaugggccagauaaua

SEQ ID NO: 1220279 - RNA, 19 nt, Artificial Sequence
  Description of Artificial Sequence: Synthetic oligonucleotide
  Antisense strand to SEQ ID NO: 1220278
uauuaucuggcccauaagc

SEQ ID NO: 1220280 - RNA, 19 nt, Artificial Sequence
  Description of Artificial Sequence: Synthetic oligonucleotide
  Sense strand starting at position 3446 of SEQ ID NO: 917245
ugaagugacuuacugaaug

SEQ ID NO: 1220281 - RNA, 19 nt, Artificial Sequence
  Description of Artificial Sequence: Synthetic oligonucleotide
  Antisense strand to SEQ ID NO: 1220280
cauucaguaagucacuuca

SEQ ID NO: 1220282 - RNA, 19 nt, Artificial Sequence
  Description of Artificial Sequence: Synthetic oligonucleotide
  Sense strand starting at position 3451 of SEQ ID NO: 917245
ugacuuacugaaugccuaa

SEQ ID NO: 1220283 - RNA, 19 nt, Artificial Sequence
  Description of Artificial Sequence: Synthetic oligonucleotide
  Antisense strand to SEQ ID NO: 1220282
uuaggcauucaguaaguca

SEQ ID NO: 1220284 - RNA, 19 nt, Artificial Sequence
  Description of Artificial Sequence: Synthetic oligonucleotide
  Sense strand starting at position 3464 of SEQ ID NO: 917245
gccuaagguaagugacaaa

SEQ ID NO: 1220285 - RNA, 19 nt, Artificial Sequence
  Description of Artificial Sequence: Synthetic oligonucleotide
  Antisense strand to SEQ ID NO: 1220284
uuugucacuuaccuuaggc

SEQ ID NO: 1220286 - RNA, 19 nt, Artificial Sequence
  Description of Artificial Sequence: Synthetic oligonucleotide
  Sense strand starting at position 3532 of SEQ ID NO: 917245
agaggcucuccuugacuau

SEQ ID NO: 1220287 - RNA, 19 nt, Artificial Sequence
  Description of Artificial Sequence: Synthetic oligonucleotide
  Antisense strand to SEQ ID NO: 1220286
auagucaaggagagccucu

SEQ ID NO: 1220288 - RNA, 19 nt, Artificial Sequence
  Description of Artificial Sequence: Synthetic oligonucleotide
  Sense strand starting at position 3533 of SEQ ID NO: 917245
gaggcucuccuugacuauu

SEQ ID NO: 1220289 - RNA, 19 nt, Artificial Sequence
  Description of Artificial Sequence: Synthetic oligonucleotide
  Antisense strand to SEQ ID NO: 1220288
aauagucaaggagagccuc

SEQ ID NO: 1220290 - RNA, 19 nt, Artificial Sequence
  Description of Artificial Sequence: Synthetic oligonucleotide
  Sense strand starting at position 3543 of SEQ ID NO: 917245
uugacuauucugugguaca

SEQ ID NO: 1220291 - RNA, 19 nt, Artificial Sequence
  Description of Artificial Sequence: Synthetic oligonucleotide
  Antisense strand to SEQ ID NO: 1220290
uguaccacagaauagucaa

SEQ ID NO: 1220292 - RNA, 19 nt, Artificial Sequence
  Description of Artificial Sequence: Synthetic oligonucleotide
  Sense strand starting at position 3672 of SEQ ID NO: 917245
uguauucuacuggaauuau

SEQ ID NO: 1220293 - RNA, 19 nt, Artificial Sequence
  Description of Artificial Sequence: Synthetic oligonucleotide
  Antisense strand to SEQ ID NO: 1220292
auaauuccaguagaauaca

SEQ ID NO: 1220294 - RNA, 19 nt, Artificial Sequence
  Description of Artificial Sequence: Synthetic oligonucleotide
  Sense strand starting at position 3690 of SEQ ID NO: 917245
uguguaucucuauauaagg

SEQ ID NO: 1220295 - RNA, 19 nt, Artificial Sequence
  Description of Artificial Sequence: Synthetic oligonucleotide
  Antisense strand to SEQ ID NO: 1220294
ccuuauauagagauacaca

SEQ ID NO: 1220296 - RNA, 19 nt, Artificial Sequence
  Description of Artificial Sequence: Synthetic oligonucleotide
  Sense strand starting at position 3849 of SEQ ID NO: 917245
ugugucuugcaaggauaaa

SEQ ID NO: 1220297 - RNA, 19 nt, Artificial Sequence
  Description of Artificial Sequence: Synthetic oligonucleotide
  Antisense strand to SEQ ID NO: 1220296
uuuauccuugcaagacaca

SEQ ID NO: 1220298 - RNA, 19 nt, Artificial Sequence
  Description of Artificial Sequence: Synthetic oligonucleotide
  Sense strand starting at position 3961 of SEQ ID NO: 917246
uaggcuuaacaggaguuua

SEQ ID NO: 1220299 - RNA, 19 nt, Artificial Sequence
  Description of Artificial Sequence: Synthetic oligonucleotide
  Antisense strand to SEQ ID NO: 1220298
uaaacuccuguuaagccua

SEQ ID NO: 1220300 - RNA, 19 nt, Artificial Sequence
  Description of Artificial Sequence: Synthetic oligonucleotide
  Sense strand starting at position 286 of SEQ ID NO: 917246
caaguugucggagaccaag

SEQ ID NO: 1220301 - RNA, 19 nt, Artificial Sequence
  Description of Artificial Sequence: Synthetic oligonucleotide
  Antisense strand to SEQ ID NO: 1220300
cuuggucuccgacaacuug

SEQ ID NO: 1220302 - RNA, 19 nt, Artificial Sequence
  Description of Artificial Sequence: Synthetic oligonucleotide
  Sense strand starting at position 812 of SEQ ID NO: 917246
gucgcaguucuuccaaguu

SEQ ID NO: 1220303 - RNA, 19 nt, Artificial Sequence
  Description of Artificial Sequence: Synthetic oligonucleotide
  Antisense strand to SEQ ID NO: 1220302
aacuuggaagaacugcgac

SEQ ID NO: 1220304 - RNA, 19 nt, Artificial Sequence
  Description of Artificial Sequence: Synthetic oligonucleotide
  Sense strand starting at position 2099 of SEQ ID NO: 917246
ucuuccuagucgguagaaa

SEQ ID NO: 1220305 - RNA, 19 nt, Artificial Sequence
  Description of Artificial Sequence: Synthetic oligonucleotide
  Antisense strand to SEQ ID NO: 1220304
uuucuaccgacuaggaaga

SEQ ID NO: 1220306 - RNA, 19 nt, Artificial Sequence
  Description of Artificial Sequence: Synthetic oligonucleotide
  Sense strand starting at position 2100 of SEQ ID NO: 917246
cuuccuagucgguagaaag

SEQ ID NO: 1220307 - RNA, 19 nt, Artificial Sequence
  Description of Artificial Sequence: Synthetic oligonucleotide
  Antisense strand to SEQ ID NO: 1220306
cuuucuaccgacuaggaag

SEQ ID NO: 1220308 - RNA, 19 nt, Artificial Sequence
  Description of Artificial Sequence: Synthetic oligonucleotide
  Sense strand starting at position 2233 of SEQ ID NO: 917246
acauguuauuaagcuguau

SEQ ID NO: 1220309 - RNA, 19 nt, Artificial Sequence
  Description of Artificial Sequence: Synthetic oligonucleotide
  Antisense strand to SEQ ID NO: 1220308
auacagcuuaauaacaugu

SEQ ID NO: 1220310 - RNA, 19 nt, Artificial Sequence
  Description of Artificial Sequence: Synthetic oligonucleotide
  Sense strand starting at position 2351 of SEQ ID NO: 917246
ggaguucauggguggcaga

SEQ ID NO: 1220311 - RNA, 19 nt, Artificial Sequence
  Description of Artificial Sequence: Synthetic oligonucleotide
  Antisense strand to SEQ ID NO: 1220310
ucugccacccaugaacucc

SEQ ID NO: 1220312 - RNA, 19 nt, Artificial Sequence
  Description of Artificial Sequence: Synthetic oligonucleotide
  Sense strand starting at position 2393 of SEQ ID NO: 917246
ugccuaauuucuguuugac

SEQ ID NO: 1220313 - RNA, 19 nt, Artificial Sequence
  Description of Artificial Sequence: Synthetic oligonucleotide
  Antisense strand to SEQ ID NO: 1220312
gucaaacagaaauuaggca

SEQ ID NO: 1220314 - RNA, 19 nt, Artificial Sequence
  Description of Artificial Sequence: Synthetic oligonucleotide
  Sense strand starting at position 2438 of SEQ ID NO: 917246
acagacugguaguucuuaa

SEQ ID NO: 1220315 - RNA, 19 nt, Artificial Sequence
  Description of Artificial Sequence: Synthetic oligonucleotide
  Antisense strand to SEQ ID NO: 1220314
uuaagaacuaccagucugu

SEQ ID NO: 1220316 - RNA, 19 nt, Artificial Sequence
  Description of Artificial Sequence: Synthetic oligonucleotide
  Sense strand starting at position 2515 of SEQ ID NO: 917246
auagccuucgaucagaaau

SEQ ID NO: 1220317 - RNA, 19 nt, Artificial Sequence
  Description of Artificial Sequence: Synthetic oligonucleotide
  Antisense strand to SEQ ID NO: 1220316
auuucugaucgaaggcuau

SEQ ID NO: 1220318 - RNA, 19 nt, Artificial Sequence
  Description of Artificial Sequence: Synthetic oligonucleotide
  Sense strand starting at position 2538 of SEQ ID NO: 917246
augcuuagguuucuaaugu

SEQ ID NO: 1220319 - RNA, 19 nt, Artificial Sequence
  Description of Artificial Sequence: Synthetic oligonucleotide
  Antisense strand to SEQ ID NO: 1220318
acauuagaaaccuaagcau

SEQ ID NO: 1220320 - RNA, 19 nt, Artificial Sequence
  Description of Artificial Sequence: Synthetic oligonucleotide
  Sense strand starting at position 2546 of SEQ ID NO: 917246
guuucuaauguguggagga

SEQ ID NO: 1220321 - RNA, 19 nt, Artificial Sequence
  Description of Artificial Sequence: Synthetic oligonucleotide
  Antisense strand to SEQ ID NO: 1220320
uccuccacacauuagaaac

SEQ ID NO: 1220322 - RNA, 19 nt, Artificial Sequence
  Description of Artificial Sequence: Synthetic oligonucleotide
  Sense strand starting at position 2615 of SEQ ID NO: 917246
aagggucagaggugcauaa

SEQ ID NO: 1220323 - RNA, 19 nt, Artificial Sequence
  Description of Artificial Sequence: Synthetic oligonucleotide
  Antisense strand to SEQ ID NO: 1220322
uuaugcaccucugacccuu

SEQ ID NO: 1220324 - RNA, 19 nt, Artificial Sequence
  Description of Artificial Sequence: Synthetic oligonucleotide
  Sense strand starting at position 2656 of SEQ ID NO: 917246
ggugauuccuucccucuca

SEQ ID NO: 1220325 - RNA, 19 nt, Artificial Sequence
  Description of Artificial Sequence: Synthetic oligonucleotide
  Antisense strand to SEQ ID NO: 1220324
ugagagggaaggaaucacc

SEQ ID NO: 1220326 - RNA, 19 nt, Artificial Sequence
  Description of Artificial Sequence: Synthetic oligonucleotide
  Sense strand starting at position 2777 of SEQ ID NO: 917246
auguucugugaacgggaua

SEQ ID NO: 1220327 - RNA, 19 nt, Artificial Sequence
  Description of Artificial Sequence: Synthetic oligonucleotide
  Antisense strand to SEQ ID NO: 1220326
uaucccguucacagaacau

SEQ ID NO: 1220328 - RNA, 19 nt, Artificial Sequence
  Description of Artificial Sequence: Synthetic oligonucleotide
  Sense strand starting at position 2778 of SEQ ID NO: 917246
uguucugugaacgggauaa

SEQ ID NO: 1220329 - RNA, 19 nt, Artificial Sequence
  Description of Artificial Sequence: Synthetic oligonucleotide
  Antisense strand to SEQ ID NO: 1220328
uuaucccguucacagaaca

SEQ ID NO: 1220330 - RNA, 19 nt, Artificial Sequence
  Description of Artificial Sequence: Synthetic oligonucleotide
  Sense strand starting at position 2809 of SEQ ID NO: 917246
agguuugccuaauugacuu

SEQ ID NO: 1220331 - RNA, 19 nt, Artificial Sequence
  Description of Artificial Sequence: Synthetic oligonucleotide
  Antisense strand to SEQ ID NO: 1220330
aagucaauuaggcaaaccu

SEQ ID NO: 1220332 - RNA, 19 nt, Artificial Sequence
  Description of Artificial Sequence: Synthetic oligonucleotide
  Sense strand starting at position 2816 of SEQ ID NO: 917246
ccuaauugacuuuguuaug

SEQ ID NO: 1220333 - RNA, 19 nt, Artificial Sequence
  Description of Artificial Sequence: Synthetic oligonucleotide
  Antisense strand to SEQ ID NO: 1220332
cauaacaaagucaauuagg

SEQ ID NO: 1220334 - RNA, 19 nt, Artificial Sequence
  Description of Artificial Sequence: Synthetic oligonucleotide
  Sense strand starting at position 2879 of SEQ ID NO: 917246
cccagagcuccugaaacua

SEQ ID NO: 1220335 - RNA, 19 nt, Artificial Sequence
  Description of Artificial Sequence: Synthetic oligonucleotide
  Antisense strand to SEQ ID NO: 1220334
uaguuucaggagcucuggg

SEQ ID NO: 1220336 - RNA, 19 nt, Artificial Sequence
  Description of Artificial Sequence: Synthetic oligonucleotide
  Sense strand starting at position 2895 of SEQ ID NO: 917246
cuacuaagauaguuuaaug

SEQ ID NO: 1220337 - RNA, 19 nt, Artificial Sequence
  Description of Artificial Sequence: Synthetic oligonucleotide
  Antisense strand to SEQ ID NO: 1220336
cauuaaacuaucuuaguag

SEQ ID NO: 1220338 - RNA, 19 nt, Artificial Sequence
  Description of Artificial Sequence: Synthetic oligonucleotide
  Sense strand starting at position 2968 of SEQ ID NO: 917246
ugucauaggucagcacauu

SEQ ID NO: 1220339 - RNA, 19 nt, Artificial Sequence
  Description of Artificial Sequence: Synthetic oligonucleotide
  Antisense strand to SEQ ID NO: 1220338
aaugugcugaccuaugaca

SEQ ID NO: 1220340 - RNA, 19 nt, Artificial Sequence
  Description of Artificial Sequence: Synthetic oligonucleotide
  Sense strand starting at position 2969 of SEQ ID NO: 917246
gucauaggucagcacauua

SEQ ID NO: 1220341 - RNA, 19 nt, Artificial Sequence
  Description of Artificial Sequence: Synthetic oligonucleotide
  Antisense strand to SEQ ID NO: 1220340
uaaugugcugaccuaugac

SEQ ID NO: 1220342 - RNA, 19 nt, Artificial Sequence
  Description of Artificial Sequence: Synthetic oligonucleotide
  Sense strand starting at position 3023 of SEQ ID NO: 917246
ggagcucaccuaugaagcu

SEQ ID NO: 1220343 - RNA, 19 nt, Artificial Sequence
  Description of Artificial Sequence: Synthetic oligonucleotide
  Antisense strand to SEQ ID NO: 1220342
agcuucauaggugagcucc

SEQ ID NO: 1220344 - RNA, 19 nt, Artificial Sequence
  Description of Artificial Sequence: Synthetic oligonucleotide
  Sense strand starting at position 3102 of SEQ ID NO: 917246
aucuuugaguuugucauua

SEQ ID NO: 1220345 - RNA, 19 nt, Artificial Sequence
  Description of Artificial Sequence: Synthetic oligonucleotide
  Antisense strand to SEQ ID NO: 1220344
uaaugacaaacucaaagau

SEQ ID NO: 1220346 - RNA, 19 nt, Artificial Sequence
  Description of Artificial Sequence: Synthetic oligonucleotide
  Sense strand starting at position 3106 of SEQ ID NO: 917246
uugaguuugucauuaucau

SEQ ID NO: 1220347 - RNA, 19 nt, Artificial Sequence
  Description of Artificial Sequence: Synthetic oligonucleotide
  Antisense strand to SEQ ID NO: 1220346
augauaaugacaaacucaa

SEQ ID NO: 1220348 - RNA, 19 nt, Artificial Sequence
  Description of Artificial Sequence: Synthetic oligonucleotide
  Sense strand starting at position 3107 of SEQ ID NO: 917246
ugaguuugucauuaucauc

SEQ ID NO: 1220349 - RNA, 19 nt, Artificial Sequence
  Description of Artificial Sequence: Synthetic oligonucleotide
  Antisense strand to SEQ ID NO: 1220348
gaugauaaugacaaacuca

SEQ ID NO: 1220350 - RNA, 19 nt, Artificial Sequence
  Description of Artificial Sequence: Synthetic oligonucleotide
  Sense strand starting at position 3429 of SEQ ID NO: 917246
ugcuaacuggcagaucuua

SEQ ID NO: 1220351 - RNA, 19 nt, Artificial Sequence
  Description of Artificial Sequence: Synthetic oligonucleotide
  Antisense strand to SEQ ID NO: 1220350
uaagaucugccaguuagca

SEQ ID NO: 1220352 - RNA, 19 nt, Artificial Sequence
  Description of Artificial Sequence: Synthetic oligonucleotide
  Sense strand starting at position 3498 of SEQ ID NO: 917246
cugguuauguuuguggaca

SEQ ID NO: 1220353 - RNA, 19 nt, Artificial Sequence
  Description of Artificial Sequence: Synthetic oligonucleotide
  Antisense strand to SEQ ID NO: 1220352
uguccacaaacauaaccag

SEQ ID NO: 1220354 - RNA, 19 nt, Artificial Sequence
  Description of Artificial Sequence: Synthetic oligonucleotide
  Sense strand starting at position 3525 of SEQ ID NO: 917246
gguugauaggcucaggaau

SEQ ID NO: 1220355 - RNA, 19 nt, Artificial Sequence
  Description of Artificial Sequence: Synthetic oligonucleotide
  Antisense strand to SEQ ID NO: 1220354
auuccugagccuaucaacc

SEQ ID NO: 1220356 - RNA, 19 nt, Artificial Sequence
  Description of Artificial Sequence: Synthetic oligonucleotide
  Sense strand starting at position 3538 of SEQ ID NO: 917246
aggaauugcagucaaguua

SEQ ID NO: 1220357 - RNA, 19 nt, Artificial Sequence
  Description of Artificial Sequence: Synthetic oligonucleotide
  Antisense strand to SEQ ID NO: 1220356
uaacuugacugcaauuccu

SEQ ID NO: 1220358 - RNA, 19 nt, Artificial Sequence
  Description of Artificial Sequence: Synthetic oligonucleotide
  Sense strand starting at position 3553 of SEQ ID NO: 917246
guuauuacuucugucauau

SEQ ID NO: 1220359 - RNA, 19 nt, Artificial Sequence
  Description of Artificial Sequence: Synthetic oligonucleotide
  Antisense strand to SEQ ID NO: 1220358
auaugacagaaguaauaac

SEQ ID NO: 1220360 - RNA, 19 nt, Artificial Sequence
  Description of Artificial Sequence: Synthetic oligonucleotide
  Sense strand starting at position 3557 of SEQ ID NO: 917246
uuacuucugucauauuuga

SEQ ID NO: 1220361 - RNA, 19 nt, Artificial Sequence
  Description of Artificial Sequence: Synthetic oligonucleotide
  Antisense strand to SEQ ID NO: 1220360
ucaaauaugacagaaguaa

SEQ ID NO: 1220362 - RNA, 19 nt, Artificial Sequence
  Description of Artificial Sequence: Synthetic oligonucleotide
  Sense strand starting at position 3678 of SEQ ID NO: 917246
ugggacucauuguaauuua

SEQ ID NO: 1220363 - RNA, 19 nt, Artificial Sequence
  Description of Artificial Sequence: Synthetic oligonucleotide
  Antisense strand to SEQ ID NO: 1220362
uaaauuacaaugaguccca

SEQ ID NO: 1220364 - RNA, 19 nt, Artificial Sequence
  Description of Artificial Sequence: Synthetic oligonucleotide
  Sense strand starting at position 3703 of SEQ ID NO: 917246
cucaguauagcagauaauu

SEQ ID NO: 1220365 - RNA, 19 nt, Artificial Sequence
  Description of Artificial Sequence: Synthetic oligonucleotide
  Antisense strand to SEQ ID NO: 1220364
aauuaucugcuauacugag

SEQ ID NO: 1220366 - RNA, 19 nt, Artificial Sequence
  Description of Artificial Sequence: Synthetic oligonucleotide
  Sense strand starting at position 3792 of SEQ ID NO: 917246
aucagcuaauuguuaagua

SEQ ID NO: 1220367 - RNA, 19 nt, Artificial Sequence
  Description of Artificial Sequence: Synthetic oligonucleotide
  Antisense strand to SEQ ID NO: 1220366
uacuuaacaauuagcugau

SEQ ID NO: 1220368 - RNA, 19 nt, Artificial Sequence
  Description of Artificial Sequence: Synthetic oligonucleotide
  Sense strand starting at position 3796 of SEQ ID NO: 917246
gcuaauuguuaaguauuga

SEQ ID NO: 1220369 - RNA, 19 nt, Artificial Sequence
  Description of Artificial Sequence: Synthetic oligonucleotide
  Antisense strand to SEQ ID NO: 1220368
ucaauacuuaacaauuagc

SEQ ID NO: 1220370 - RNA, 19 nt, Artificial Sequence
  Description of Artificial Sequence: Synthetic oligonucleotide
  Sense strand starting at position 3874 of SEQ ID NO: 917246
aaaugaucuuaggauuugu

SEQ ID NO: 1220371 - RNA, 19 nt, Artificial Sequence
  Description of Artificial Sequence: Synthetic oligonucleotide
  Antisense strand to SEQ ID NO: 1220370
acaaauccuaagaucauuu

SEQ ID NO: 1220372 - RNA, 19 nt, Artificial Sequence
  Description of Artificial Sequence: Synthetic oligonucleotide
  Sense strand starting at position 3883 of SEQ ID NO: 917246
uaggauuuguggcaaagau

SEQ ID NO: 1220373 - RNA, 19 nt, Artificial Sequence
  Description of Artificial Sequence: Synthetic oligonucleotide
  Antisense strand to SEQ ID NO: 1220372
aucuuugccacaaauccua

SEQ ID NO: 1220374 - RNA, 19 nt, Artificial Sequence
  Description of Artificial Sequence: Synthetic oligonucleotide
  Sense strand starting at position 3899 of SEQ ID NO: 917246
gauauuacaugagacgaau

SEQ ID NO: 1220375 - RNA, 19 nt, Artificial Sequence
  Description of Artificial Sequence: Synthetic oligonucleotide
  Antisense strand to SEQ ID NO: 1220374
auucgucucauguaauauc

SEQ ID NO: 1220376 - RNA, 19 nt, Artificial Sequence
  Description of Artificial Sequence: Synthetic oligonucleotide
  Sense strand starting at position 3950 of SEQ ID NO: 917246
agucaaauaguuuagggua

SEQ ID NO: 1220377 - RNA, 19 nt, Artificial Sequence
  Description of Artificial Sequence: Synthetic oligonucleotide
  Antisense strand to SEQ ID NO: 1220376
uacccuaaacuauuugacu

SEQ ID NO: 1220378 - RNA, 19 nt, Artificial Sequence
  Description of Artificial Sequence: Synthetic oligonucleotide
  Sense strand starting at position 3962 of SEQ ID NO: 917247
uaggguagguuugugaacu

SEQ ID NO: 1220379 - RNA, 19 nt, Artificial Sequence
  Description of Artificial Sequence: Synthetic oligonucleotide
  Antisense strand to SEQ ID NO: 1220378
aguucacaaaccuacccua

SEQ ID NO: 1220380 - RNA, 19 nt, Artificial Sequence
  Description of Artificial Sequence: Synthetic oligonucleotide
  Sense strand starting at position 117 of SEQ ID NO: 917247
uggaucucuugguuucuga

SEQ ID NO: 1220381 - RNA, 19 nt, Artificial Sequence
  Description of Artificial Sequence: Synthetic oligonucleotide
  Antisense strand to SEQ ID NO: 1220380
ucagaaaccaagagaucca

SEQ ID NO: 1220382 - RNA, 19 nt, Artificial Sequence
  Description of Artificial Sequence: Synthetic oligonucleotide
  Sense strand starting at position 120 of SEQ ID NO: 917247
aucucuugguuucugaaag

SEQ ID NO: 1220383 - RNA, 19 nt, Artificial Sequence
  Description of Artificial Sequence: Synthetic oligonucleotide
  Antisense strand to SEQ ID NO: 1220382
cuuucagaaaccaagagau

SEQ ID NO: 1220384 - RNA, 19 nt, Artificial Sequence
  Description of Artificial Sequence: Synthetic oligonucleotide
  Sense strand starting at position 138 of SEQ ID NO: 917247
gcauauaugacaggguuga

SEQ ID NO: 1220385 - RNA, 19 nt, Artificial Sequence
  Description of Artificial Sequence: Synthetic oligonucleotide
  Antisense strand to SEQ ID NO: 1220384
ucaacccugucauauaugc

SEQ ID NO: 1220386 - RNA, 19 nt, Artificial Sequence
  Description of Artificial Sequence: Synthetic oligonucleotide
  Sense strand starting at position 139 of SEQ ID NO: 917247
cauauaugacaggguugau

SEQ ID NO: 1220387 - RNA, 19 nt, Artificial Sequence
  Description of Artificial Sequence: Synthetic oligonucleotide
  Antisense strand to SEQ ID NO: 1220386
aucaacccugucauauaug

SEQ ID NO: 1220388 - RNA, 19 nt, Artificial Sequence
  Description of Artificial Sequence: Synthetic oligonucleotide
  Sense strand starting at position 274 of SEQ ID NO: 917247
ggaugauagccagggugga

SEQ ID NO: 1220389 - RNA, 19 nt, Artificial Sequence
  Description of Artificial Sequence: Synthetic oligonucleotide
  Antisense strand to SEQ ID NO: 1220388
uccacccuggcuaucaucc

SEQ ID NO: 1220390 - RNA, 19 nt, Artificial Sequence
  Description of Artificial Sequence: Synthetic oligonucleotide
  Sense strand starting at position 388 of SEQ ID NO: 917247
ggauguagagcugaagcau

SEQ ID NO: 1220391 - RNA, 19 nt, Artificial Sequence
  Description of Artificial Sequence: Synthetic oligonucleotide
  Antisense strand to SEQ ID NO: 1220390
augcuucagcucuacaucc

SEQ ID NO: 1220392 - RNA, 19 nt, Artificial Sequence
  Description of Artificial Sequence: Synthetic oligonucleotide
  Sense strand starting at position 400 of SEQ ID NO: 917247
gaagcaugagcgcaaacau

SEQ ID NO: 1220393 - RNA, 19 nt, Artificial Sequence
  Description of Artificial Sequence: Synthetic oligonucleotide
  Antisense strand to SEQ ID NO: 1220392
auguuugcgcucaugcuuc

SEQ ID NO: 1220394 - RNA, 19 nt, Artificial Sequence
  Description of Artificial Sequence: Synthetic oligonucleotide
  Sense strand starting at position 558 of SEQ ID NO: 917247
acgagcaugacauagguaa

SEQ ID NO: 1220395 - RNA, 19 nt, Artificial Sequence
  Description of Artificial Sequence: Synthetic oligonucleotide
  Antisense strand to SEQ ID NO: 1220394
uuaccuaugucaugcucgu

SEQ ID NO: 1220396 - RNA, 19 nt, Artificial Sequence
  Description of Artificial Sequence: Synthetic oligonucleotide
  Sense strand starting at position 562 of SEQ ID NO: 917247
gcaugacauagguaaacgu

SEQ ID NO: 1220397 - RNA, 19 nt, Artificial Sequence
  Description of Artificial Sequence: Synthetic oligonucleotide
  Antisense strand to SEQ ID NO: 1220396
acguuuaccuaugucaugc

SEQ ID NO: 1220398 - RNA, 19 nt, Artificial Sequence
  Description of Artificial Sequence: Synthetic oligonucleotide
  Sense strand starting at position 622 of SEQ ID NO: 917247
agagguagcggucaacagu

SEQ ID NO: 1220399 - RNA, 19 nt, Artificial Sequence
  Description of Artificial Sequence: Synthetic oligonucleotide
  Antisense strand to SEQ ID NO: 1220398
acuguugaccgcuaccucu

SEQ ID NO: 1220400 - RNA, 19 nt, Artificial Sequence
  Description of Artificial Sequence: Synthetic oligonucleotide
  Sense strand starting at position 790 of SEQ ID NO: 917247
ugccuauuagcaggaacau

SEQ ID NO: 1220401 - RNA, 19 nt, Artificial Sequence
  Description of Artificial Sequence: Synthetic oligonucleotide
  Antisense strand to SEQ ID NO: 1220400
auguuccugcuaauaggca

SEQ ID NO: 1220402 - RNA, 19 nt, Artificial Sequence
  Description of Artificial Sequence: Synthetic oligonucleotide
  Sense strand starting at position 1002 of SEQ ID NO: 917247
cgaggcagcccgcuuaaau

SEQ ID NO: 1220403 - RNA, 19 nt, Artificial Sequence
  Description of Artificial Sequence: Synthetic oligonucleotide
  Antisense strand to SEQ ID NO: 1220402
auuuaagcgggcugccucg

SEQ ID NO: 1220404 - RNA, 19 nt, Artificial Sequence
  Description of Artificial Sequence: Synthetic oligonucleotide
  Sense strand starting at position 1397 of SEQ ID NO: 917247
acgaacaacuguuugacau

SEQ ID NO: 1220405 - RNA, 19 nt, Artificial Sequence
  Description of Artificial Sequence: Synthetic oligonucleotide
  Antisense strand to SEQ ID NO: 1220404
augucaaacaguuguucgu

SEQ ID NO: 1220406 - RNA, 19 nt, Artificial Sequence
  Description of Artificial Sequence: Synthetic oligonucleotide
  Sense strand starting at position 1398 of SEQ ID NO: 917247
cgaacaacuguuugacauc

SEQ ID NO: 1220407 - RNA, 19 nt, Artificial Sequence
  Description of Artificial Sequence: Synthetic oligonucleotide
  Antisense strand to SEQ ID NO: 1220406
gaugucaaacaguuguucg

SEQ ID NO: 1220408 - RNA, 19 nt, Artificial Sequence
  Description of Artificial Sequence: Synthetic oligonucleotide
  Sense strand starting at position 1470 of SEQ ID NO: 917247
gccauccucgauggaauau

SEQ ID NO: 1220409 - RNA, 19 nt, Artificial Sequence
  Description of Artificial Sequence: Synthetic oligonucleotide
  Antisense strand to SEQ ID NO: 1220408
auauuccaucgaggauggc

SEQ ID NO: 1220410 - RNA, 19 nt, Artificial Sequence
  Description of Artificial Sequence: Synthetic oligonucleotide
  Sense strand starting at position 1496 of SEQ ID NO: 917247
gccuauuuccaucgaacuc

SEQ ID NO: 1220411 - RNA, 19 nt, Artificial Sequence
  Description of Artificial Sequence: Synthetic oligonucleotide
  Antisense strand to SEQ ID NO: 1220410
gaguucgauggaaauaggc

SEQ ID NO: 1220412 - RNA, 19 nt, Artificial Sequence
  Description of Artificial Sequence: Synthetic oligonucleotide
  Sense strand starting at position 2188 of SEQ ID NO: 917247
ggcugagaacugcauggua

SEQ ID NO: 1220413 - RNA, 19 nt, Artificial Sequence
  Description of Artificial Sequence: Synthetic oligonucleotide
  Antisense strand to SEQ ID NO: 1220412
uaccaugcaguucucagcc

SEQ ID NO: 1220414 - RNA, 19 nt, Artificial Sequence
  Description of Artificial Sequence: Synthetic oligonucleotide
  Sense strand starting at position 2299 of SEQ ID NO: 917247
ugaccuauuucguuccugu

SEQ ID NO: 1220415 - RNA, 19 nt, Artificial Sequence
  Description of Artificial Sequence: Synthetic oligonucleotide
  Antisense strand to SEQ ID NO: 1220414
acaggaacgaaauagguca

SEQ ID NO: 1220416 - RNA, 19 nt, Artificial Sequence
  Description of Artificial Sequence: Synthetic oligonucleotide
  Sense strand starting at position 2551 of SEQ ID NO: 917247
uuugcuugacuggauagau

SEQ ID NO: 1220417 - RNA, 19 nt, Artificial Sequence
  Description of Artificial Sequence: Synthetic oligonucleotide
  Antisense strand to SEQ ID NO: 1220416
aucuauccagucaagcaaa

SEQ ID NO: 1220418 - RNA, 19 nt, Artificial Sequence
  Description of Artificial Sequence: Synthetic oligonucleotide
  Sense strand starting at position 2575 of SEQ ID NO: 917247
ugcucuguggaucaucauu

SEQ ID NO: 1220419 - RNA, 19 nt, Artificial Sequence
  Description of Artificial Sequence: Synthetic oligonucleotide
  Antisense strand to SEQ ID NO: 1220418
aaugaugauccacagagca

SEQ ID NO: 1220420 - RNA, 19 nt, Artificial Sequence
  Description of Artificial Sequence: Synthetic oligonucleotide
  Sense strand starting at position 2577 of SEQ ID NO: 917247
cucuguggaucaucauuau

SEQ ID NO: 1220421 - RNA, 19 nt, Artificial Sequence
  Description of Artificial Sequence: Synthetic oligonucleotide
  Antisense strand to SEQ ID NO: 1220420
auaaugaugauccacagag

SEQ ID NO: 1220422 - RNA, 19 nt, Artificial Sequence
  Description of Artificial Sequence: Synthetic oligonucleotide
  Sense strand starting at position 2580 of SEQ ID NO: 917247
uguggaucaucauuaucau

SEQ ID NO: 1220423 - RNA, 19 nt, Artificial Sequence
  Description of Artificial Sequence: Synthetic oligonucleotide
  Antisense strand to SEQ ID NO: 1220422
augauaaugaugauccaca

SEQ ID NO: 1220424 - RNA, 19 nt, Artificial Sequence
  Description of Artificial Sequence: Synthetic oligonucleotide
  Sense strand starting at position 2581 of SEQ ID NO: 917247
guggaucaucauuaucauc

SEQ ID NO: 1220425 - RNA, 19 nt, Artificial Sequence
  Description of Artificial Sequence: Synthetic oligonucleotide
  Antisense strand to SEQ ID NO: 1220424
gaugauaaugaugauccac

SEQ ID NO: 1220426 - RNA, 19 nt, Artificial Sequence
  Description of Artificial Sequence: Synthetic oligonucleotide
  Sense strand starting at position 2658 of SEQ ID NO: 917247
ugaguucuuguagaagcuu

SEQ ID NO: 1220427 - RNA, 19 nt, Artificial Sequence
  Description of Artificial Sequence: Synthetic oligonucleotide
  Antisense strand to SEQ ID NO: 1220426
aagcuucuacaagaacuca

SEQ ID NO: 1220428 - RNA, 19 nt, Artificial Sequence
  Description of Artificial Sequence: Synthetic oligonucleotide
  Sense strand starting at position 2669 of SEQ ID NO: 917247
agaagcuuccugcagacau

SEQ ID NO: 1220429 - RNA, 19 nt, Artificial Sequence
  Description of Artificial Sequence: Synthetic oligonucleotide
  Antisense strand to SEQ ID NO: 1220428
augucugcaggaagcuucu

SEQ ID NO: 1220430 - RNA, 19 nt, Artificial Sequence
  Description of Artificial Sequence: Synthetic oligonucleotide
  Sense strand starting at position 2805 of SEQ ID NO: 917247
augccuccucuggauauaa

SEQ ID NO: 1220431 - RNA, 19 nt, Artificial Sequence
  Description of Artificial Sequence: Synthetic oligonucleotide
  Antisense strand to SEQ ID NO: 1220430
uuauauccagaggaggcau

SEQ ID NO: 1220432 - RNA, 19 nt, Artificial Sequence
  Description of Artificial Sequence: Synthetic oligonucleotide
  Sense strand starting at position 2853 of SEQ ID NO: 917247
ccaagaugauccuccaguu

SEQ ID NO: 1220433 - RNA, 19 nt, Artificial Sequence
  Description of Artificial Sequence: Synthetic oligonucleotide
  Antisense strand to SEQ ID NO: 1220432
aacuggaggaucaucuugg

SEQ ID NO: 1220434 - RNA, 19 nt, Artificial Sequence
  Description of Artificial Sequence: Synthetic oligonucleotide
  Sense strand starting at position 2965 of SEQ ID NO: 917247
ucuuguaugaauggagaug

SEQ ID NO: 1220435 - RNA, 19 nt, Artificial Sequence
  Description of Artificial Sequence: Synthetic oligonucleotide
  Antisense strand to SEQ ID NO: 1220434
caucuccauucauacaaga

SEQ ID NO: 1220436 - RNA, 19 nt, Artificial Sequence
  Description of Artificial Sequence: Synthetic oligonucleotide
  Sense strand starting at position 2977 of SEQ ID NO: 917247
ggagauggucugcaggcaa

SEQ ID NO: 1220437 - RNA, 19 nt, Artificial Sequence
  Description of Artificial Sequence: Synthetic oligonucleotide
  Antisense strand to SEQ ID NO: 1220436
uugccugcagaccaucucc

SEQ ID NO: 1220438 - RNA, 19 nt, Artificial Sequence
  Description of Artificial Sequence: Synthetic oligonucleotide
  Sense strand starting at position 3280 of SEQ ID NO: 917247
acaucuauuccaugauguc

SEQ ID NO: 1220439 - RNA, 19 nt, Artificial Sequence
  Description of Artificial Sequence: Synthetic oligonucleotide
  Antisense strand to SEQ ID NO: 1220438
gacaucauggaauagaugu

SEQ ID NO: 1220440 - RNA, 19 nt, Artificial Sequence
  Description of Artificial Sequence: Synthetic oligonucleotide
  Sense strand starting at position 3308 of SEQ ID NO: 917247
cugcuaccuccagaauagu

SEQ ID NO: 1220441 - RNA, 19 nt, Artificial Sequence
  Description of Artificial Sequence: Synthetic oligonucleotide
  Antisense strand to SEQ ID NO: 1220440
acuauucuggagguagcag

SEQ ID NO: 1220442 - RNA, 19 nt, Artificial Sequence
  Description of Artificial Sequence: Synthetic oligonucleotide
  Sense strand starting at position 3316 of SEQ ID NO: 917247
uccagaauagucugaacuu

SEQ ID NO: 1220443 - RNA, 19 nt, Artificial Sequence
  Description of Artificial Sequence: Synthetic oligonucleotide
  Antisense strand to SEQ ID NO: 1220442
aaguucagacuauucugga

SEQ ID NO: 1220444 - RNA, 19 nt, Artificial Sequence
  Description of Artificial Sequence: Synthetic oligonucleotide
  Sense strand starting at position 3343 of SEQ ID NO: 917247
gacagauucugcucaguag

SEQ ID NO: 1220445 - RNA, 19 nt, Artificial Sequence
  Description of Artificial Sequence: Synthetic oligonucleotide
  Antisense strand to SEQ ID NO: 1220444
cuacugagcagaaucuguc

SEQ ID NO: 1220446 - RNA, 19 nt, Artificial Sequence
  Description of Artificial Sequence: Synthetic oligonucleotide
  Sense strand starting at position 3344 of SEQ ID NO: 917247
acagauucugcucaguagu

SEQ ID NO: 1220447 - RNA, 19 nt, Artificial Sequence
  Description of Artificial Sequence: Synthetic oligonucleotide
  Antisense strand to SEQ ID NO: 1220446
acuacugagcagaaucugu

SEQ ID NO: 1220448 - RNA, 19 nt, Artificial Sequence
  Description of Artificial Sequence: Synthetic oligonucleotide
  Sense strand starting at position 3619 of SEQ ID NO: 917247
gcugucaugaagggaugua

SEQ ID NO: 1220449 - RNA, 19 nt, Artificial Sequence
  Description of Artificial Sequence: Synthetic oligonucleotide
  Antisense strand to SEQ ID NO: 1220448
uacaucccuucaugacagc

SEQ ID NO: 1220450 - RNA, 19 nt, Artificial Sequence
  Description of Artificial Sequence: Synthetic oligonucleotide
  Sense strand starting at position 3674 of SEQ ID NO: 917247
uuuagaaugaagcgaugaa

SEQ ID NO: 1220451 - RNA, 19 nt, Artificial Sequence
  Description of Artificial Sequence: Synthetic oligonucleotide
  Antisense strand to SEQ ID NO: 1220450
uucaucgcuucauucuaaa

SEQ ID NO: 1220452 - RNA, 19 nt, Artificial Sequence
  Description of Artificial Sequence: Synthetic oligonucleotide
  Sense strand starting at position 3778 of SEQ ID NO: 917247
ggcauugcaguuuagggaa

SEQ ID NO: 1220453 - RNA, 19 nt, Artificial Sequence
  Description of Artificial Sequence: Synthetic oligonucleotide
  Antisense strand to SEQ ID NO: 1220452
uucccuaaacugcaaugcc

SEQ ID NO: 1220454 - RNA, 19 nt, Artificial Sequence
  Description of Artificial Sequence: Synthetic oligonucleotide
  Sense strand starting at position 3809 of SEQ ID NO: 917247
gggcuagccagacacuauu

SEQ ID NO: 1220455 - RNA, 19 nt, Artificial Sequence
  Description of Artificial Sequence: Synthetic oligonucleotide
  Antisense strand to SEQ ID NO: 1220454
aauagugucuggcuagccc

SEQ ID NO: 1220456 - RNA, 19 nt, Artificial Sequence
  Description of Artificial Sequence: Synthetic oligonucleotide
  Sense strand starting at position 3937 of SEQ ID NO: 917247
cugaguguuggaggagaga

SEQ ID NO: 1220457 - RNA, 19 nt, Artificial Sequence
  Description of Artificial Sequence: Synthetic oligonucleotide
  Antisense strand to SEQ ID NO: 1220456
ucucuccuccaacacucag

SEQ ID NO: 1220458 - RNA, 19 nt, Artificial Sequence
  Description of Artificial Sequence: Synthetic oligonucleotide
  Sense strand starting at position 3967 of SEQ ID NO: 917248
aggugaauggcagagguau

SEQ ID NO: 1220459 - RNA, 19 nt, Artificial Sequence
  Description of Artificial Sequence: Synthetic oligonucleotide
  Antisense strand to SEQ ID NO: 1220458
auaccucugccauucaccu

SEQ ID NO: 1220460 - RNA, 19 nt, Artificial Sequence
  Description of Artificial Sequence: Synthetic oligonucleotide
  Sense strand starting at position 9 of SEQ ID NO: 917248
cacaauugggaguacguaa

SEQ ID NO: 1220461 - RNA, 19 nt, Artificial Sequence
  Description of Artificial Sequence: Synthetic oligonucleotide
  Antisense strand to SEQ ID NO: 1220460
uuacguacucccaauugug

SEQ ID NO: 1220462 - RNA, 19 nt, Artificial Sequence
  Description of Artificial Sequence: Synthetic oligonucleotide
  Sense strand starting at position 99 of SEQ ID NO: 917248
aaagcuagugccguuagua

SEQ ID NO: 1220463 - RNA, 19 nt, Artificial Sequence
  Description of Artificial Sequence: Synthetic oligonucleotide
  Antisense strand to SEQ ID NO: 1220462
uacuaacggcacuagcuuu

SEQ ID NO: 1220464 - RNA, 19 nt, Artificial Sequence
  Description of Artificial Sequence: Synthetic oligonucleotide
  Sense strand starting at position 100 of SEQ ID NO: 917248
aagcuagugccguuaguaa

SEQ ID NO: 1220465 - RNA, 19 nt, Artificial Sequence
  Description of Artificial Sequence: Synthetic oligonucleotide
  Antisense strand to SEQ ID NO: 1220464
uuacuaacggcacuagcuu

SEQ ID NO: 1220466 - RNA, 19 nt, Artificial Sequence
  Description of Artificial Sequence: Synthetic oligonucleotide
  Sense strand starting at position 413 of SEQ ID NO: 917248
gcugcaaugagauggaauc

SEQ ID NO: 1220467 - RNA, 19 nt, Artificial Sequence
  Description of Artificial Sequence: Synthetic oligonucleotide
  Antisense strand to SEQ ID NO: 1220466
gauuccaucucauugcagc

SEQ ID NO: 1220468 - RNA, 19 nt, Artificial Sequence
  Description of Artificial Sequence: Synthetic oligonucleotide
  Sense strand starting at position 444 of SEQ ID NO: 917248
uuguaauauggagguggau

SEQ ID NO: 1220469 - RNA, 19 nt, Artificial Sequence
  Description of Artificial Sequence: Synthetic oligonucleotide
  Antisense strand to SEQ ID NO: 1220468
auccaccuccauauuacaa

SEQ ID NO: 1220470 - RNA, 19 nt, Artificial Sequence
  Description of Artificial Sequence: Synthetic oligonucleotide
  Sense strand starting at position 446 of SEQ ID NO: 917248
guaauauggagguggauga

SEQ ID NO: 1220471 - RNA, 19 nt, Artificial Sequence
  Description of Artificial Sequence: Synthetic oligonucleotide
  Antisense strand to SEQ ID NO: 1220470
ucauccaccuccauauuac

SEQ ID NO: 1220472 - RNA, 19 nt, Artificial Sequence
  Description of Artificial Sequence: Synthetic oligonucleotide
  Sense strand starting at position 548 of SEQ ID NO: 917248
gagauuugcugucuguggu

SEQ ID NO: 1220473 - RNA, 19 nt, Artificial Sequence
  Description of Artificial Sequence: Synthetic oligonucleotide
  Antisense strand to SEQ ID NO: 1220472
accacagacagcaaaucuc

SEQ ID NO: 1220474 - RNA, 19 nt, Artificial Sequence
  Description of Artificial Sequence: Synthetic oligonucleotide
  Sense strand starting at position 731 of SEQ ID NO: 917248
uuaggagcauaauucuaua

SEQ ID NO: 1220475 - RNA, 19 nt, Artificial Sequence
  Description of Artificial Sequence: Synthetic oligonucleotide
  Antisense strand to SEQ ID NO: 1220474
uauagaauuaugcuccuaa

SEQ ID NO: 1220476 - RNA, 19 nt, Artificial Sequence
  Description of Artificial Sequence: Synthetic oligonucleotide
  Sense strand starting at position 774 of SEQ ID NO: 917248
caaauauuggugugacuag

SEQ ID NO: 1220477 - RNA, 19 nt, Artificial Sequence
  Description of Artificial Sequence: Synthetic oligonucleotide
  Antisense strand to SEQ ID NO: 1220476
cuagucacaccaauauuug

SEQ ID NO: 1220478 - RNA, 19 nt, Artificial Sequence
  Description of Artificial Sequence: Synthetic oligonucleotide
  Sense strand starting at position 860 of SEQ ID NO: 917248
gagaguaaucuuggaggcu

SEQ ID NO: 1220479 - RNA, 19 nt, Artificial Sequence
  Description of Artificial Sequence: Synthetic oligonucleotide
  Antisense strand to SEQ ID NO: 1220478
agccuccaagauuacucuc

SEQ ID NO: 1220480 - RNA, 19 nt, Artificial Sequence
  Description of Artificial Sequence: Synthetic oligonucleotide
  Sense strand starting at position 863 of SEQ ID NO: 917248
aguaaucuuggaggcuuaa

SEQ ID NO: 1220481 - RNA, 19 nt, Artificial Sequence
  Description of Artificial Sequence: Synthetic oligonucleotide
  Antisense strand to SEQ ID NO: 1220480
uuaagccuccaagauuacu

SEQ ID NO: 1220482 - RNA, 19 nt, Artificial Sequence
  Description of Artificial Sequence: Synthetic oligonucleotide
  Sense strand starting at position 896 of SEQ ID NO: 917248
uggaaugcauucuuauuaa

SEQ ID NO: 1220483 - RNA, 19 nt, Artificial Sequence
  Description of Artificial Sequence: Synthetic oligonucleotide
  Antisense strand to SEQ ID NO: 1220482
uuaauaagaaugcauucca

SEQ ID NO: 1220484 - RNA, 19 nt, Artificial Sequence
  Description of Artificial Sequence: Synthetic oligonucleotide
  Sense strand starting at position 964 of SEQ ID NO: 917248
uuaguauugcaucaggacu

SEQ ID NO: 1220485 - RNA, 19 nt, Artificial Sequence
  Description of Artificial Sequence: Synthetic oligonucleotide
  Antisense strand to SEQ ID NO: 1220484
aguccugaugcaauacuaa

SEQ ID NO: 1220486 - RNA, 19 nt, Artificial Sequence
  Description of Artificial Sequence: Synthetic oligonucleotide
  Sense strand starting at position 1015 of SEQ ID NO: 917248
acauaaguccuguacuuac

SEQ ID NO: 1220487 - RNA, 19 nt, Artificial Sequence
  Description of Artificial Sequence: Synthetic oligonucleotide
  Antisense strand to SEQ ID NO: 1220486
guaaguacaggacuuaugu

SEQ ID NO: 1220488 - RNA, 19 nt, Artificial Sequence
  Description of Artificial Sequence: Synthetic oligonucleotide
  Sense strand starting at position 1059 of SEQ ID NO: 917248
cguuaugcucaagcuguuu

SEQ ID NO: 1220489 - RNA, 19 nt, Artificial Sequence
  Description of Artificial Sequence: Synthetic oligonucleotide
  Antisense strand to SEQ ID NO: 1220488
aaacagcuugagcauaacg

SEQ ID NO: 1220490 - RNA, 19 nt, Artificial Sequence
  Description of Artificial Sequence: Synthetic oligonucleotide
  Sense strand starting at position 1211 of SEQ ID NO: 917248
agugauugacuuuaaaguc

SEQ ID NO: 1220491 - RNA, 19 nt, Artificial Sequence
  Description of Artificial Sequence: Synthetic oligonucleotide
  Antisense strand to SEQ ID NO: 1220490
gacuuuaaagucaaucacu

SEQ ID NO: 1220492 - RNA, 19 nt, Artificial Sequence
  Description of Artificial Sequence: Synthetic oligonucleotide
  Sense strand starting at position 1660 of SEQ ID NO: 917248
uuugaaaugcaguacauaa

SEQ ID NO: 1220493 - RNA, 19 nt, Artificial Sequence
  Description of Artificial Sequence: Synthetic oligonucleotide
  Antisense strand to SEQ ID NO: 1220492
uuauguacugcauuucaaa

SEQ ID NO: 1220494 - RNA, 19 nt, Artificial Sequence
  Description of Artificial Sequence: Synthetic oligonucleotide
  Sense strand starting at position 1774 of SEQ ID NO: 917248
uccacuucugucgaaggga

SEQ ID NO: 1220495 - RNA, 19 nt, Artificial Sequence
  Description of Artificial Sequence: Synthetic oligonucleotide
  Antisense strand to SEQ ID NO: 1220494
ucccuucgacagaagugga

SEQ ID NO: 1220496 - RNA, 19 nt, Artificial Sequence
  Description of Artificial Sequence: Synthetic oligonucleotide
  Sense strand starting at position 1777 of SEQ ID NO: 917248
acuucugucgaagggauau

SEQ ID NO: 1220497 - RNA, 19 nt, Artificial Sequence
  Description of Artificial Sequence: Synthetic oligonucleotide
  Antisense strand to SEQ ID NO: 1220496
auaucccuucgacagaagu

SEQ ID NO: 1220498 - RNA, 19 nt, Artificial Sequence
  Description of Artificial Sequence: Synthetic oligonucleotide
  Sense strand starting at position 1787 of SEQ ID NO: 917248
aagggauaucuuugaguug

SEQ ID NO: 1220499 - RNA, 19 nt, Artificial Sequence
  Description of Artificial Sequence: Synthetic oligonucleotide
  Antisense strand to SEQ ID NO: 1220498
caacucaaagauaucccuu

SEQ ID NO: 1220500 - RNA, 19 nt, Artificial Sequence
  Description of Artificial Sequence: Synthetic oligonucleotide
  Sense strand starting at position 1961 of SEQ ID NO: 917248
ggaagugcucucugaaaua

SEQ ID NO: 1220501 - RNA, 19 nt, Artificial Sequence
  Description of Artificial Sequence: Synthetic oligonucleotide
  Antisense strand to SEQ ID NO: 1220500
uauuucagagagcacuucc

SEQ ID NO: 1220502 - RNA, 19 nt, Artificial Sequence
  Description of Artificial Sequence: Synthetic oligonucleotide
  Sense strand starting at position 1992 of SEQ ID NO: 917248
uuaugacuuuacccuggau

SEQ ID NO: 1220503 - RNA, 19 nt, Artificial Sequence
  Description of Artificial Sequence: Synthetic oligonucleotide
  Antisense strand to SEQ ID NO: 1220502
auccaggguaaagucauaa

SEQ ID NO: 1220504 - RNA, 19 nt, Artificial Sequence
  Description of Artificial Sequence: Synthetic oligonucleotide
  Sense strand starting at position 1994 of SEQ ID NO: 917248
augacuuuacccuggaugu

SEQ ID NO: 1220505 - RNA, 19 nt, Artificial Sequence
  Description of Artificial Sequence: Synthetic oligonucleotide
  Antisense strand to SEQ ID NO: 1220504
acauccaggguaaagucau

SEQ ID NO: 1220506 - RNA, 19 nt, Artificial Sequence
  Description of Artificial Sequence: Synthetic oligonucleotide
  Sense strand starting at position 2068 of SEQ ID NO: 917248
ccuugaaaugauggcauau

SEQ ID NO: 1220507 - RNA, 19 nt, Artificial Sequence
  Description of Artificial Sequence: Synthetic oligonucleotide
  Antisense strand to SEQ ID NO: 1220506
auaugccaucauuucaagg

SEQ ID NO: 1220508 - RNA, 19 nt, Artificial Sequence
  Description of Artificial Sequence: Synthetic oligonucleotide
  Sense strand starting at position 2144 of SEQ ID NO: 917248
ugaagucugcaucaucuau

SEQ ID NO: 1220509 - RNA, 19 nt, Artificial Sequence
  Description of Artificial Sequence: Synthetic oligonucleotide
  Antisense strand to SEQ ID NO: 1220508
auagaugaugcagacuuca

SEQ ID NO: 1220510 - RNA, 19 nt, Artificial Sequence
  Description of Artificial Sequence: Synthetic oligonucleotide
  Sense strand starting at position 2150 of SEQ ID NO: 917248
cugcaucaucuauggaaag

SEQ ID NO: 1220511 - RNA, 19 nt, Artificial Sequence
  Description of Artificial Sequence: Synthetic oligonucleotide
  Antisense strand to SEQ ID NO: 1220510
cuuuccauagaugaugcag

SEQ ID NO: 1220512 - RNA, 19 nt, Artificial Sequence
  Description of Artificial Sequence: Synthetic oligonucleotide
  Sense strand starting at position 2377 of SEQ ID NO: 917248
cuuaguagguacuccuaaa

SEQ ID NO: 1220513 - RNA, 19 nt, Artificial Sequence
  Description of Artificial Sequence: Synthetic oligonucleotide
  Antisense strand to SEQ ID NO: 1220512
uuuaggaguaccuacuaag

SEQ ID NO: 1220514 - RNA, 19 nt, Artificial Sequence
  Description of Artificial Sequence: Synthetic oligonucleotide
  Sense strand starting at position 2485 of SEQ ID NO: 917248
aaaguaggauccuugauua

SEQ ID NO: 1220515 - RNA, 19 nt, Artificial Sequence
  Description of Artificial Sequence: Synthetic oligonucleotide
  Antisense strand to SEQ ID NO: 1220514
uaaucaaggauccuacuuu

SEQ ID NO: 1220516 - RNA, 19 nt, Artificial Sequence
  Description of Artificial Sequence: Synthetic oligonucleotide
  Sense strand starting at position 2614 of SEQ ID NO: 917248
cugcaaaucuuagcagaaa

SEQ ID NO: 1220517 - RNA, 19 nt, Artificial Sequence
  Description of Artificial Sequence: Synthetic oligonucleotide
  Antisense strand to SEQ ID NO: 1220516
uuucugcuaagauuugcag

SEQ ID NO: 1220518 - RNA, 19 nt, Artificial Sequence
  Description of Artificial Sequence: Synthetic oligonucleotide
  Sense strand starting at position 2636 of SEQ ID NO: 917248
cucugaagucuuuagugga

SEQ ID NO: 1220519 - RNA, 19 nt, Artificial Sequence
  Description of Artificial Sequence: Synthetic oligonucleotide
  Antisense strand to SEQ ID NO: 1220518
uccacuaaagacuucagag

SEQ ID NO: 1220520 - RNA, 19 nt, Artificial Sequence
  Description of Artificial Sequence: Synthetic oligonucleotide
  Sense strand starting at position 2640 of SEQ ID NO: 917248
gaagucuuuaguggacuga

SEQ ID NO: 1220521 - RNA, 19 nt, Artificial Sequence
  Description of Artificial Sequence: Synthetic oligonucleotide
  Antisense strand to SEQ ID NO: 1220520
ucaguccacuaaagacuuc

SEQ ID NO: 1220522 - RNA, 19 nt, Artificial Sequence
  Description of Artificial Sequence: Synthetic oligonucleotide
  Sense strand starting at position 2641 of SEQ ID NO: 917248
aagucuuuaguggacugau

SEQ ID NO: 1220523 - RNA, 19 nt, Artificial Sequence
  Description of Artificial Sequence: Synthetic oligonucleotide
  Antisense strand to SEQ ID NO: 1220522
aucaguccacuaaagacuu

SEQ ID NO: 1220524 - RNA, 19 nt, Artificial Sequence
  Description of Artificial Sequence: Synthetic oligonucleotide
  Sense strand starting at position 2651 of SEQ ID NO: 917248
uggacugauuuacauauua

SEQ ID NO: 1220525 - RNA, 19 nt, Artificial Sequence
  Description of Artificial Sequence: Synthetic oligonucleotide
  Antisense strand to SEQ ID NO: 1220524
uaauauguaaaucagucca

SEQ ID NO: 1220526 - RNA, 19 nt, Artificial Sequence
  Description of Artificial Sequence: Synthetic oligonucleotide
  Sense strand starting at position 3036 of SEQ ID NO: 917248
uuuagaaguguuggagaca

SEQ ID NO: 1220527 - RNA, 19 nt, Artificial Sequence
  Description of Artificial Sequence: Synthetic oligonucleotide
  Antisense strand to SEQ ID NO: 1220526
ugucuccaacacuucuaaa

SEQ ID NO: 1220528 - RNA, 19 nt, Artificial Sequence
  Description of Artificial Sequence: Synthetic oligonucleotide
  Sense strand starting at position 3147 of SEQ ID NO: 917248
uguaauaacuucuuaugag

SEQ ID NO: 1220529 - RNA, 19 nt, Artificial Sequence
  Description of Artificial Sequence: Synthetic oligonucleotide
  Antisense strand to SEQ ID NO: 1220528
cucauaagaaguuauuaca

SEQ ID NO: 1220530 - RNA, 19 nt, Artificial Sequence
  Description of Artificial Sequence: Synthetic oligonucleotide
  Sense strand starting at position 3196 of SEQ ID NO: 917248
acuucuuauggcugaauca

SEQ ID NO: 1220531 - RNA, 19 nt, Artificial Sequence
  Description of Artificial Sequence: Synthetic oligonucleotide
  Antisense strand to SEQ ID NO: 1220530
ugauucagccauaagaagu

SEQ ID NO: 1220532 - RNA, 19 nt, Artificial Sequence
  Description of Artificial Sequence: Synthetic oligonucleotide
  Sense strand starting at position 3404 of SEQ ID NO: 917248
auggcaugugucuagaaga

SEQ ID NO: 1220533 - RNA, 19 nt, Artificial Sequence
  Description of Artificial Sequence: Synthetic oligonucleotide
  Antisense strand to SEQ ID NO: 1220532
ucuucuagacacaugccau

SEQ ID NO: 1220534 - RNA, 19 nt, Artificial Sequence
  Description of Artificial Sequence: Synthetic oligonucleotide
  Sense strand starting at position 3474 of SEQ ID NO: 917248
ucugaauugccagacucuu

SEQ ID NO: 1220535 - RNA, 19 nt, Artificial Sequence
  Description of Artificial Sequence: Synthetic oligonucleotide
  Antisense strand to SEQ ID NO: 1220534
aagagucuggcaauucaga

SEQ ID NO: 1220536 - RNA, 19 nt, Artificial Sequence
  Description of Artificial Sequence: Synthetic oligonucleotide
  Sense strand starting at position 3881 of SEQ ID NO: 917248
auugcauuccuugagaguu

SEQ ID NO: 1220537 - RNA, 19 nt, Artificial Sequence
  Description of Artificial Sequence: Synthetic oligonucleotide
  Antisense strand to SEQ ID NO: 1220536
aacucucaaggaaugcaau

SEQ ID NO: 1220538 - RNA, 19 nt, Artificial Sequence
  Description of Artificial Sequence: Synthetic oligonucleotide
  Sense strand starting at position 3909 of SEQ ID NO: 917248
ugcauauguguguagagaa

SEQ ID NO: 1220539 - RNA, 19 nt, Artificial Sequence
  Description of Artificial Sequence: Synthetic oligonucleotide
  Antisense strand to SEQ ID NO: 1220538
uucucuacacacauaugca

SEQ ID NO: 1220540 - RNA, 19 nt, Artificial Sequence
  Description of Artificial Sequence: Synthetic oligonucleotide
  Sense strand starting at position 3909 of SEQ ID NO: 917249
ugcauauguguguagagaa

SEQ ID NO: 1220541 - RNA, 19 nt, Artificial Sequence
  Description of Artificial Sequence: Synthetic oligonucleotide
  Antisense strand to SEQ ID NO: 1220540
uucucuacacacauaugca

SEQ ID NO: 1220542 - RNA, 19 nt, Artificial Sequence
  Description of Artificial Sequence: Synthetic oligonucleotide
  Sense strand starting at position 10 of SEQ ID NO: 917249
aguuauugccucuagggaa

SEQ ID NO: 1220543 - RNA, 19 nt, Artificial Sequence
  Description of Artificial Sequence: Synthetic oligonucleotide
  Antisense strand to SEQ ID NO: 1220542
uucccuagaggcaauaacu

SEQ ID NO: 1220544 - RNA, 19 nt, Artificial Sequence
  Description of Artificial Sequence: Synthetic oligonucleotide
  Sense strand starting at position 265 of SEQ ID NO: 917249
ugcauuccgaguuacaguu

SEQ ID NO: 1220545 - RNA, 19 nt, Artificial Sequence
  Description of Artificial Sequence: Synthetic oligonucleotide
  Antisense strand to SEQ ID NO: 1220544
aacuguaacucggaaugca

SEQ ID NO: 1220546 - RNA, 19 nt, Artificial Sequence
  Description of Artificial Sequence: Synthetic oligonucleotide
  Sense strand starting at position 272 of SEQ ID NO: 917249
cgaguuacaguucauuguu

SEQ ID NO: 1220547 - RNA, 19 nt, Artificial Sequence
  Description of Artificial Sequence: Synthetic oligonucleotide
  Antisense strand to SEQ ID NO: 1220546
aacaaugaacuguaacucg

SEQ ID NO: 1220548 - RNA, 19 nt, Artificial Sequence
  Description of Artificial Sequence: Synthetic oligonucleotide
  Sense strand starting at position 423 of SEQ ID NO: 917249
aucugaauuuaguacaugu

SEQ ID NO: 1220549 - RNA, 19 nt, Artificial Sequence
  Description of Artificial Sequence: Synthetic oligonucleotide
  Antisense strand to SEQ ID NO: 1220548
acauguacuaaauucagau

SEQ ID NO: 1220550 - RNA, 19 nt, Artificial Sequence
  Description of Artificial Sequence: Synthetic oligonucleotide
  Sense strand starting at position 449 of SEQ ID NO: 917249
ccacguuuaccagaugauc

SEQ ID NO: 1220551 - RNA, 19 nt, Artificial Sequence
  Description of Artificial Sequence: Synthetic oligonucleotide
  Antisense strand to SEQ ID NO: 1220550
gaucaucugguaaacgugg

SEQ ID NO: 1220552 - RNA, 19 nt, Artificial Sequence
  Description of Artificial Sequence: Synthetic oligonucleotide
  Sense strand starting at position 473 of SEQ ID NO: 917249
gaacuaugaggucguccaa

SEQ ID NO: 1220553 - RNA, 19 nt, Artificial Sequence
  Description of Artificial Sequence: Synthetic oligonucleotide
  Antisense strand to SEQ ID NO: 1220552
uuggacgaccucauaguuc

SEQ ID NO: 1220554 - RNA, 19 nt, Artificial Sequence
  Description of Artificial Sequence: Synthetic oligonucleotide
  Sense strand starting at position 571 of SEQ ID NO: 917249
uaagacaguggcugucaau

SEQ ID NO: 1220555 - RNA, 19 nt, Artificial Sequence
  Description of Artificial Sequence: Synthetic oligonucleotide
  Antisense strand to SEQ ID NO: 1220554
auugacagccacugucuua

SEQ ID NO: 1220556 - RNA, 19 nt, Artificial Sequence
  Description of Artificial Sequence: Synthetic oligonucleotide
  Sense strand starting at position 577 of SEQ ID NO: 917249
aguggcugucaauacucaa

SEQ ID NO: 1220557 - RNA, 19 nt, Artificial Sequence
  Description of Artificial Sequence: Synthetic oligonucleotide
  Antisense strand to SEQ ID NO: 1220556
uugaguauugacagccacu

SEQ ID NO: 1220558 - RNA, 19 nt, Artificial Sequence
  Description of Artificial Sequence: Synthetic oligonucleotide
  Sense strand starting at position 580 of SEQ ID NO: 917249
ggcugucaauacucaaagu

SEQ ID NO: 1220559 - RNA, 19 nt, Artificial Sequence
  Description of Artificial Sequence: Synthetic oligonucleotide
  Antisense strand to SEQ ID NO: 1220558
acuuugaguauugacagcc

SEQ ID NO: 1220560 - RNA, 19 nt, Artificial Sequence
  Description of Artificial Sequence: Synthetic oligonucleotide
  Sense strand starting at position 591 of SEQ ID NO: 917249
cucaaaguaugguuacagu

SEQ ID NO: 1220561 - RNA, 19 nt, Artificial Sequence
  Description of Artificial Sequence: Synthetic oligonucleotide
  Antisense strand to SEQ ID NO: 1220560
acuguaaccauacuuugag

SEQ ID NO: 1220562 - RNA, 19 nt, Artificial Sequence
  Description of Artificial Sequence: Synthetic oligonucleotide
  Sense strand starting at position 606 of SEQ ID NO: 917249
caguccguugaaugagaaa

SEQ ID NO: 1220563 - RNA, 19 nt, Artificial Sequence
  Description of Artificial Sequence: Synthetic oligonucleotide
  Antisense strand to SEQ ID NO: 1220562
uuucucauucaacggacug

SEQ ID NO: 1220564 - RNA, 19 nt, Artificial Sequence
  Description of Artificial Sequence: Synthetic oligonucleotide
  Sense strand starting at position 916 of SEQ ID NO: 917249
ugcuaaagacuguacaaau

SEQ ID NO: 1220565 - RNA, 19 nt, Artificial Sequence
  Description of Artificial Sequence: Synthetic oligonucleotide
  Antisense strand to SEQ ID NO: 1220564
auuuguacagucuuuagca

SEQ ID NO: 1220566 - RNA, 19 nt, Artificial Sequence
  Description of Artificial Sequence: Synthetic oligonucleotide
  Sense strand starting at position 941 of SEQ ID NO: 917249
uccuaaugucaucaaggca

SEQ ID NO: 1220567 - RNA, 19 nt, Artificial Sequence
  Description of Artificial Sequence: Synthetic oligonucleotide
  Antisense strand to SEQ ID NO: 1220566
ugccuugaugacauuagga

SEQ ID NO: 1220568 - RNA, 19 nt, Artificial Sequence
  Description of Artificial Sequence: Synthetic oligonucleotide
  Sense strand starting at position 1162 of SEQ ID NO: 917249
gggagcuuccaagaugcua

SEQ ID NO: 1220569 - RNA, 19 nt, Artificial Sequence
  Description of Artificial Sequence: Synthetic oligonucleotide
  Antisense strand to SEQ ID NO: 1220568
uagcaucuuggaagcuccc

SEQ ID NO: 1220570 - RNA, 19 nt, Artificial Sequence
  Description of Artificial Sequence: Synthetic oligonucleotide
  Sense strand starting at position 1170 of SEQ ID NO: 917249
ccaagaugcuacuuaaaug

SEQ ID NO: 1220571 - RNA, 19 nt, Artificial Sequence
  Description of Artificial Sequence: Synthetic oligonucleotide
  Antisense strand to SEQ ID NO: 1220570
cauuuaaguagcaucuugg

SEQ ID NO: 1220572 - RNA, 19 nt, Artificial Sequence
  Description of Artificial Sequence: Synthetic oligonucleotide
  Sense strand starting at position 1199 of SEQ ID NO: 917249
agcuuaauucuaggccuua

SEQ ID NO: 1220573 - RNA, 19 nt, Artificial Sequence
  Description of Artificial Sequence: Synthetic oligonucleotide
  Antisense strand to SEQ ID NO: 1220572
uaaggccuagaauuaagcu

SEQ ID NO: 1220574 - RNA, 19 nt, Artificial Sequence
  Description of Artificial Sequence: Synthetic oligonucleotide
  Sense strand starting at position 1200 of SEQ ID NO: 917249
gcuuaauucuaggccuuac

SEQ ID NO: 1220575 - RNA, 19 nt, Artificial Sequence
  Description of Artificial Sequence: Synthetic oligonucleotide
  Antisense strand to SEQ ID NO: 1220574
guaaggccuagaauuaagc

SEQ ID NO: 1220576 - RNA, 19 nt, Artificial Sequence
  Description of Artificial Sequence: Synthetic oligonucleotide
  Sense strand starting at position 1211 of SEQ ID NO: 917249
ggccuuacugcccauagua

SEQ ID NO: 1220577 - RNA, 19 nt, Artificial Sequence
  Description of Artificial Sequence: Synthetic oligonucleotide
  Antisense strand to SEQ ID NO: 1220576
uacuaugggcaguaaggcc

SEQ ID NO: 1220578 - RNA, 19 nt, Artificial Sequence
  Description of Artificial Sequence: Synthetic oligonucleotide
  Sense strand starting at position 1332 of SEQ ID NO: 917249
ucaggaaauuggucuuuaa

SEQ ID NO: 1220579 - RNA, 19 nt, Artificial Sequence
  Description of Artificial Sequence: Synthetic oligonucleotide
  Antisense strand to SEQ ID NO: 1220578
uuaaagaccaauuuccuga

SEQ ID NO: 1220580 - RNA, 19 nt, Artificial Sequence
  Description of Artificial Sequence: Synthetic oligonucleotide
  Sense strand starting at position 1372 of SEQ ID NO: 917249
aauuuaaguuucuaggguu

SEQ ID NO: 1220581 - RNA, 19 nt, Artificial Sequence
  Description of Artificial Sequence: Synthetic oligonucleotide
  Antisense strand to SEQ ID NO: 1220580
aacccuagaaacuuaaauu

SEQ ID NO: 1220582 - RNA, 19 nt, Artificial Sequence
  Description of Artificial Sequence: Synthetic oligonucleotide
  Sense strand starting at position 1386 of SEQ ID NO: 917249
ggguuaaauucucccguca

SEQ ID NO: 1220583 - RNA, 19 nt, Artificial Sequence
  Description of Artificial Sequence: Synthetic oligonucleotide
  Antisense strand to SEQ ID NO: 1220582
ugacgggagaauuuaaccc

SEQ ID NO: 1220584 - RNA, 19 nt, Artificial Sequence
  Description of Artificial Sequence: Synthetic oligonucleotide
  Sense strand starting at position 1436 of SEQ ID NO: 917249
gcuucuuugcgggaaggau

SEQ ID NO: 1220585 - RNA, 19 nt, Artificial Sequence
  Description of Artificial Sequence: Synthetic oligonucleotide
  Antisense strand to SEQ ID NO: 1220584
auccuucccgcaaagaagc

SEQ ID NO: 1220586 - RNA, 19 nt, Artificial Sequence
  Description of Artificial Sequence: Synthetic oligonucleotide
  Sense strand starting at position 1444 of SEQ ID NO: 917249
gcgggaaggaucuggaaag

SEQ ID NO: 1220587 - RNA, 19 nt, Artificial Sequence
  Description of Artificial Sequence: Synthetic oligonucleotide
  Antisense strand to SEQ ID NO: 1220586
cuuuccagauccuucccgc

SEQ ID NO: 1220588 - RNA, 19 nt, Artificial Sequence
  Description of Artificial Sequence: Synthetic oligonucleotide
  Sense strand starting at position 2183 of SEQ ID NO: 917249
ggaggauguugcuucaggu

SEQ ID NO: 1220589 - RNA, 19 nt, Artificial Sequence
  Description of Artificial Sequence: Synthetic oligonucleotide
  Antisense strand to SEQ ID NO: 1220588
accugaagcaacauccucc

SEQ ID NO: 1220590 - RNA, 19 nt, Artificial Sequence
  Description of Artificial Sequence: Synthetic oligonucleotide
  Sense strand starting at position 2335 of SEQ ID NO: 917249
gacuguuucuggccgagag

SEQ ID NO: 1220591 - RNA, 19 nt, Artificial Sequence
  Description of Artificial Sequence: Synthetic oligonucleotide
  Antisense strand to SEQ ID NO: 1220590
cucucggccagaaacaguc

SEQ ID NO: 1220592 - RNA, 19 nt, Artificial Sequence
  Description of Artificial Sequence: Synthetic oligonucleotide
  Sense strand starting at position 2336 of SEQ ID NO: 917249
acuguuucuggccgagaga

SEQ ID NO: 1220593 - RNA, 19 nt, Artificial Sequence
  Description of Artificial Sequence: Synthetic oligonucleotide
  Antisense strand to SEQ ID NO: 1220592
ucucucggccagaaacagu

SEQ ID NO: 1220594 - RNA, 19 nt, Artificial Sequence
  Description of Artificial Sequence: Synthetic oligonucleotide
  Sense strand starting at position 2338 of SEQ ID NO: 917249
uguuucuggccgagagagu

SEQ ID NO: 1220595 - RNA, 19 nt, Artificial Sequence
  Description of Artificial Sequence: Synthetic oligonucleotide
  Antisense strand to SEQ ID NO: 1220594
acucucucggccagaaaca

SEQ ID NO: 1220596 - RNA, 19 nt, Artificial Sequence
  Description of Artificial Sequence: Synthetic oligonucleotide
  Sense strand starting at position 2339 of SEQ ID NO: 917249
guuucuggccgagagaguu

SEQ ID NO: 1220597 - RNA, 19 nt, Artificial Sequence
  Description of Artificial Sequence: Synthetic oligonucleotide
  Antisense strand to SEQ ID NO: 1220596
aacucucucggccagaaac

SEQ ID NO: 1220598 - RNA, 19 nt, Artificial Sequence
  Description of Artificial Sequence: Synthetic oligonucleotide
  Sense strand starting at position 2355 of SEQ ID NO: 917249
guuaaacucccgcaaagaa

SEQ ID NO: 1220599 - RNA, 19 nt, Artificial Sequence
  Description of Artificial Sequence: Synthetic oligonucleotide
  Antisense strand to SEQ ID NO: 1220598
uucuuugcgggaguuuaac

SEQ ID NO: 1220600 - RNA, 19 nt, Artificial Sequence
  Description of Artificial Sequence: Synthetic oligonucleotide
  Sense strand starting at position 2422 of SEQ ID NO: 917249
acaggacguguccgauuua

SEQ ID NO: 1220601 - RNA, 19 nt, Artificial Sequence
  Description of Artificial Sequence: Synthetic oligonucleotide
  Antisense strand to SEQ ID NO: 1220600
uaaaucggacacguccugu

SEQ ID NO: 1220602 - RNA, 19 nt, Artificial Sequence
  Description of Artificial Sequence: Synthetic oligonucleotide
  Sense strand starting at position 2627 of SEQ ID NO: 917249
caauaacaaguguggauua

SEQ ID NO: 1220603 - RNA, 19 nt, Artificial Sequence
  Description of Artificial Sequence: Synthetic oligonucleotide
  Antisense strand to SEQ ID NO: 1220602
uaauccacacuuguuauug

SEQ ID NO: 1220604 - RNA, 19 nt, Artificial Sequence
  Description of Artificial Sequence: Synthetic oligonucleotide
  Sense strand starting at position 2803 of SEQ ID NO: 917249
ugcacuugccuugaaaggu

SEQ ID NO: 1220605 - RNA, 19 nt, Artificial Sequence
  Description of Artificial Sequence: Synthetic oligonucleotide
  Antisense strand to SEQ ID NO: 1220604
accuuucaaggcaagugca

SEQ ID NO: 1220606 - RNA, 19 nt, Artificial Sequence
  Description of Artificial Sequence: Synthetic oligonucleotide
  Sense strand starting at position 2812 of SEQ ID NO: 917249
cuugaaagguucucaauug

SEQ ID NO: 1220607 - RNA, 19 nt, Artificial Sequence
  Description of Artificial Sequence: Synthetic oligonucleotide
  Antisense strand to SEQ ID NO: 1220606
caauugagaaccuuucaag

SEQ ID NO: 1220608 - RNA, 19 nt, Artificial Sequence
  Description of Artificial Sequence: Synthetic oligonucleotide
  Sense strand starting at position 2965 of SEQ ID NO: 917249
ugaucccucuggcuagaau

SEQ ID NO: 1220609 - RNA, 19 nt, Artificial Sequence
  Description of Artificial Sequence: Synthetic oligonucleotide
  Antisense strand to SEQ ID NO: 1220608
auucuagccagagggauca

SEQ ID NO: 1220610 - RNA, 19 nt, Artificial Sequence
  Description of Artificial Sequence: Synthetic oligonucleotide
  Sense strand starting at position 2989 of SEQ ID NO: 917249
ugcuuauuccaacacugga

SEQ ID NO: 1220611 - RNA, 19 nt, Artificial Sequence
  Description of Artificial Sequence: Synthetic oligonucleotide
  Antisense strand to SEQ ID NO: 1220610
uccaguguuggaauaagca

SEQ ID NO: 1220612 - RNA, 19 nt, Artificial Sequence
  Description of Artificial Sequence: Synthetic oligonucleotide
  Sense strand starting at position 3167 of SEQ ID NO: 917249
ucugaaaucuccgccucua

SEQ ID NO: 1220613 - RNA, 19 nt, Artificial Sequence
  Description of Artificial Sequence: Synthetic oligonucleotide
  Antisense strand to SEQ ID NO: 1220612
uagaggcggagauuucaga

SEQ ID NO: 1220614 - RNA, 19 nt, Artificial Sequence
  Description of Artificial Sequence: Synthetic oligonucleotide
  Sense strand starting at position 3506 of SEQ ID NO: 917249
ggcuauaccugucuuaaug

SEQ ID NO: 1220615 - RNA, 19 nt, Artificial Sequence
  Description of Artificial Sequence: Synthetic oligonucleotide
  Antisense strand to SEQ ID NO: 1220614
cauuaagacagguauagcc

SEQ ID NO: 1220616 - RNA, 19 nt, Artificial Sequence
  Description of Artificial Sequence: Synthetic oligonucleotide
  Sense strand starting at position 3685 of SEQ ID NO: 917249
uaagaaauuggcugucccu

SEQ ID NO: 1220617 - RNA, 19 nt, Artificial Sequence
  Description of Artificial Sequence: Synthetic oligonucleotide
  Antisense strand to SEQ ID NO: 1220616
agggacagccaauuucuua

SEQ ID NO: 1220618 - RNA, 19 nt, Artificial Sequence
  Description of Artificial Sequence: Synthetic oligonucleotide
  Sense strand starting at position 3754 of SEQ ID NO: 917249
cuuuguaacucuguaacau

SEQ ID NO: 1220619 - RNA, 19 nt, Artificial Sequence
  Description of Artificial Sequence: Synthetic oligonucleotide
  Antisense strand to SEQ ID NO: 1220618
auguuacagaguuacaaag

SEQ ID NO: 1220620 - RNA, 19 nt, Artificial Sequence
  Description of Artificial Sequence: Synthetic oligonucleotide
  Sense strand starting at position 3755 of SEQ ID NO: 917250
uuuguaacucuguaacauu

SEQ ID NO: 1220621 - RNA, 19 nt, Artificial Sequence
  Description of Artificial Sequence: Synthetic oligonucleotide
  Antisense strand to SEQ ID NO: 1220620
aauguuacagaguuacaaa

SEQ ID NO: 1220622 - RNA, 19 nt, Artificial Sequence
  Description of Artificial Sequence: Synthetic oligonucleotide
  Sense strand starting at position 135 of SEQ ID NO: 917250
ccauuaacugacuggucau

SEQ ID NO: 1220623 - RNA, 19 nt, Artificial Sequence
  Description of Artificial Sequence: Synthetic oligonucleotide
  Antisense strand to SEQ ID NO: 1220622
augaccagucaguuaaugg

SEQ ID NO: 1220624 - RNA, 19 nt, Artificial Sequence
  Description of Artificial Sequence: Synthetic oligonucleotide
  Sense strand starting at position 197 of SEQ ID NO: 917250
aagggaucauuaccauugu

SEQ ID NO: 1220625 - RNA, 19 nt, Artificial Sequence
  Description of Artificial Sequence: Synthetic oligonucleotide
  Antisense strand to SEQ ID NO: 1220624
acaaugguaaugaucccuu

SEQ ID NO: 1220626 - RNA, 19 nt, Artificial Sequence
  Description of Artificial Sequence: Synthetic oligonucleotide
  Sense strand starting at position 215 of SEQ ID NO: 917250
ucacuaacgcgauacauaa

SEQ ID NO: 1220627 - RNA, 19 nt, Artificial Sequence
  Description of Artificial Sequence: Synthetic oligonucleotide
  Antisense strand to SEQ ID NO: 1220626
uuauguaucgcguuaguga

SEQ ID NO: 1220628 - RNA, 19 nt, Artificial Sequence
  Description of Artificial Sequence: Synthetic oligonucleotide
  Sense strand starting at position 223 of SEQ ID NO: 917250
gcgauacauaaacauguga

SEQ ID NO: 1220629 - RNA, 19 nt, Artificial Sequence
  Description of Artificial Sequence: Synthetic oligonucleotide
  Antisense strand to SEQ ID NO: 1220628
ucacauguuuauguaucgc

SEQ ID NO: 1220630 - RNA, 19 nt, Artificial Sequence
  Description of Artificial Sequence: Synthetic oligonucleotide
  Sense strand starting at position 231 of SEQ ID NO: 917250
uaaacaugugagugaacau

SEQ ID NO: 1220631 - RNA, 19 nt, Artificial Sequence
  Description of Artificial Sequence: Synthetic oligonucleotide
  Antisense strand to SEQ ID NO: 1220630
auguucacucacauguuua

SEQ ID NO: 1220632 - RNA, 19 nt, Artificial Sequence
  Description of Artificial Sequence: Synthetic oligonucleotide
  Sense strand starting at position 367 of SEQ ID NO: 917250
ugugaucauccauagacuc

SEQ ID NO: 1220633 - RNA, 19 nt, Artificial Sequence
  Description of Artificial Sequence: Synthetic oligonucleotide
  Antisense strand to SEQ ID NO: 1220632
gagucuauggaugaucaca

SEQ ID NO: 1220634 - RNA, 19 nt, Artificial Sequence
  Description of Artificial Sequence: Synthetic oligonucleotide
  Sense strand starting at position 836 of SEQ ID NO: 917250
aggacuuggcaguaguaau

SEQ ID NO: 1220635 - RNA, 19 nt, Artificial Sequence
  Description of Artificial Sequence: Synthetic oligonucleotide
  Antisense strand to SEQ ID NO: 1220634
auuacuacugccaaguccu

SEQ ID NO: 1220636 - RNA, 19 nt, Artificial Sequence
  Description of Artificial Sequence: Synthetic oligonucleotide
  Sense strand starting at position 885 of SEQ ID NO: 917250
gccagauauuagguaacuu

SEQ ID NO: 1220637 - RNA, 19 nt, Artificial Sequence
  Description of Artificial Sequence: Synthetic oligonucleotide
  Antisense strand to SEQ ID NO: 1220636
aaguuaccuaauaucuggc

SEQ ID NO: 1220638 - RNA, 19 nt, Artificial Sequence
  Description of Artificial Sequence: Synthetic oligonucleotide
  Sense strand starting at position 973 of SEQ ID NO: 917250
acuauauuguacucagagu

SEQ ID NO: 1220639 - RNA, 19 nt, Artificial Sequence
  Description of Artificial Sequence: Synthetic oligonucleotide
  Antisense strand to SEQ ID NO: 1220638
acucugaguacaauauagu

SEQ ID NO: 1220640 - RNA, 19 nt, Artificial Sequence
  Description of Artificial Sequence: Synthetic oligonucleotide
  Sense strand starting at position 1412 of SEQ ID NO: 917250
cugagauucuauccugaga

SEQ ID NO: 1220641 - RNA, 19 nt, Artificial Sequence
  Description of Artificial Sequence: Synthetic oligonucleotide
  Antisense strand to SEQ ID NO: 1220640
ucucaggauagaaucucag

SEQ ID NO: 1220642 - RNA, 19 nt, Artificial Sequence
  Description of Artificial Sequence: Synthetic oligonucleotide
  Sense strand starting at position 1574 of SEQ ID NO: 917250
gaguuuauacaguaguaca

SEQ ID NO: 1220643 - RNA, 19 nt, Artificial Sequence
  Description of Artificial Sequence: Synthetic oligonucleotide
  Antisense strand to SEQ ID NO: 1220642
uguacuacuguauaaacuc

SEQ ID NO: 1220644 - RNA, 19 nt, Artificial Sequence
  Description of Artificial Sequence: Synthetic oligonucleotide
  Sense strand starting at position 1717 of SEQ ID NO: 917250
uuuguuagaagugauggua

SEQ ID NO: 1220645 - RNA, 19 nt, Artificial Sequence
  Description of Artificial Sequence: Synthetic oligonucleotide
  Antisense strand to SEQ ID NO: 1220644
uaccaucacuucuaacaaa

SEQ ID NO: 1220646 - RNA, 19 nt, Artificial Sequence
  Description of Artificial Sequence: Synthetic oligonucleotide
  Sense strand starting at position 1869 of SEQ ID NO: 917250
uguguaguagcugugagua

SEQ ID NO: 1220647 - RNA, 19 nt, Artificial Sequence
  Description of Artificial Sequence: Synthetic oligonucleotide
  Antisense strand to SEQ ID NO: 1220646
uacucacagcuacuacaca

SEQ ID NO: 1220648 - RNA, 19 nt, Artificial Sequence
  Description of Artificial Sequence: Synthetic oligonucleotide
  Sense strand starting at position 1872 of SEQ ID NO: 917250
guaguagcugugaguaguu

SEQ ID NO: 1220649 - RNA, 19 nt, Artificial Sequence
  Description of Artificial Sequence: Synthetic oligonucleotide
  Antisense strand to SEQ ID NO: 1220648
aacuacucacagcuacuac

SEQ ID NO: 1220650 - RNA, 19 nt, Artificial Sequence
  Description of Artificial Sequence: Synthetic oligonucleotide
  Sense strand starting at position 1882 of SEQ ID NO: 917250
ugaguaguuguccaaacug

SEQ ID NO: 1220651 - RNA, 19 nt, Artificial Sequence
  Description of Artificial Sequence: Synthetic oligonucleotide
  Antisense strand to SEQ ID NO: 1220650
caguuuggacaacuacuca

SEQ ID NO: 1220652 - RNA, 19 nt, Artificial Sequence
  Description of Artificial Sequence: Synthetic oligonucleotide
  Sense strand starting at position 2121 of SEQ ID NO: 917250
aauuguugauaucugugga

SEQ ID NO: 1220653 - RNA, 19 nt, Artificial Sequence
  Description of Artificial Sequence: Synthetic oligonucleotide
  Antisense strand to SEQ ID NO: 1220652
uccacagauaucaacaauu

SEQ ID NO: 1220654 - RNA, 19 nt, Artificial Sequence
  Description of Artificial Sequence: Synthetic oligonucleotide
  Sense strand starting at position 2122 of SEQ ID NO: 917250
auuguugauaucuguggaa

SEQ ID NO: 1220655 - RNA, 19 nt, Artificial Sequence
  Description of Artificial Sequence: Synthetic oligonucleotide
  Antisense strand to SEQ ID NO: 1220654
uuccacagauaucaacaau

SEQ ID NO: 1220656 - RNA, 19 nt, Artificial Sequence
  Description of Artificial Sequence: Synthetic oligonucleotide
  Sense strand starting at position 2126 of SEQ ID NO: 917250
uugauaucuguggaacuuu

SEQ ID NO: 1220657 - RNA, 19 nt, Artificial Sequence
  Description of Artificial Sequence: Synthetic oligonucleotide
  Antisense strand to SEQ ID NO: 1220656
aaaguuccacagauaucaa

SEQ ID NO: 1220658 - RNA, 19 nt, Artificial Sequence
  Description of Artificial Sequence: Synthetic oligonucleotide
  Sense strand starting at position 2154 of SEQ ID NO: 917250
ucuguaaagguuuaaguau

SEQ ID NO: 1220659 - RNA, 19 nt, Artificial Sequence
  Description of Artificial Sequence: Synthetic oligonucleotide
  Antisense strand to SEQ ID NO: 1220658
auacuuaaaccuuuacaga

SEQ ID NO: 1220660 - RNA, 19 nt, Artificial Sequence
  Description of Artificial Sequence: Synthetic oligonucleotide
  Sense strand starting at position 2329 of SEQ ID NO: 917250
cuugguaucagggaguagu

SEQ ID NO: 1220661 - RNA, 19 nt, Artificial Sequence
  Description of Artificial Sequence: Synthetic oligonucleotide
  Antisense strand to SEQ ID NO: 1220660
acuacucccugauaccaag

SEQ ID NO: 1220662 - RNA, 19 nt, Artificial Sequence
  Description of Artificial Sequence: Synthetic oligonucleotide
  Sense strand starting at position 2332 of SEQ ID NO: 917250
gguaucagggaguaguuua

SEQ ID NO: 1220663 - RNA, 19 nt, Artificial Sequence
  Description of Artificial Sequence: Synthetic oligonucleotide
  Antisense strand to SEQ ID NO: 1220662
uaaacuacucccugauacc

SEQ ID NO: 1220664 - RNA, 19 nt, Artificial Sequence
  Description of Artificial Sequence: Synthetic oligonucleotide
  Sense strand starting at position 2362 of SEQ ID NO: 917250
uuauccacagcuuaugaga

SEQ ID NO: 1220665 - RNA, 19 nt, Artificial Sequence
  Description of Artificial Sequence: Synthetic oligonucleotide
  Antisense strand to SEQ ID NO: 1220664
ucucauaagcuguggauaa

SEQ ID NO: 1220666 - RNA, 19 nt, Artificial Sequence
  Description of Artificial Sequence: Synthetic oligonucleotide
  Sense strand starting at position 2425 of SEQ ID NO: 917250
uguggaguggacuggauua

SEQ ID NO: 1220667 - RNA, 19 nt, Artificial Sequence
  Description of Artificial Sequence: Synthetic oligonucleotide
  Antisense strand to SEQ ID NO: 1220666
uaauccaguccacuccaca

SEQ ID NO: 1220668 - RNA, 19 nt, Artificial Sequence
  Description of Artificial Sequence: Synthetic oligonucleotide
  Sense strand starting at position 2435 of SEQ ID NO: 917250
acuggauuagucgccguuu

SEQ ID NO: 1220669 - RNA, 19 nt, Artificial Sequence
  Description of Artificial Sequence: Synthetic oligonucleotide
  Antisense strand to SEQ ID NO: 1220668
aaacggcgacuaauccagu

SEQ ID NO: 1220670 - RNA, 19 nt, Artificial Sequence
  Description of Artificial Sequence: Synthetic oligonucleotide
  Sense strand starting at position 2484 of SEQ ID NO: 917250
gugugaguacuugaauaac

SEQ ID NO: 1220671 - RNA, 19 nt, Artificial Sequence
  Description of Artificial Sequence: Synthetic oligonucleotide
  Antisense strand to SEQ ID NO: 1220670
guuauucaaguacucacac

SEQ ID NO: 1220672 - RNA, 19 nt, Artificial Sequence
  Description of Artificial Sequence: Synthetic oligonucleotide
  Sense strand starting at position 2638 of SEQ ID NO: 917250
guuuauuuguaggcuaaau

SEQ ID NO: 1220673 - RNA, 19 nt, Artificial Sequence
  Description of Artificial Sequence: Synthetic oligonucleotide
  Antisense strand to SEQ ID NO: 1220672
auuuagccuacaaauaaac

SEQ ID NO: 1220674 - RNA, 19 nt, Artificial Sequence
  Description of Artificial Sequence: Synthetic oligonucleotide
  Sense strand starting at position 2650 of SEQ ID NO: 917250
gcuaaauuaccagauaugu

SEQ ID NO: 1220675 - RNA, 19 nt, Artificial Sequence
  Description of Artificial Sequence: Synthetic oligonucleotide
  Antisense strand to SEQ ID NO: 1220674
acauaucugguaauuuagc

SEQ ID NO: 1220676 - RNA, 19 nt, Artificial Sequence
  Description of Artificial Sequence: Synthetic oligonucleotide
  Sense strand starting at position 2684 of SEQ ID NO: 917250
agaggugauguuuacacuu

SEQ ID NO: 1220677 - RNA, 19 nt, Artificial Sequence
  Description of Artificial Sequence: Synthetic oligonucleotide
  Antisense strand to SEQ ID NO: 1220676
aaguguaaacaucaccucu

SEQ ID NO: 1220678 - RNA, 19 nt, Artificial Sequence
  Description of Artificial Sequence: Synthetic oligonucleotide
  Sense strand starting at position 2705 of SEQ ID NO: 917250
ucaggacugaucuggccau

SEQ ID NO: 1220679 - RNA, 19 nt, Artificial Sequence
  Description of Artificial Sequence: Synthetic oligonucleotide
  Antisense strand to SEQ ID NO: 1220678
auggccagaucaguccuga

SEQ ID NO: 1220680 - RNA, 19 nt, Artificial Sequence
  Description of Artificial Sequence: Synthetic oligonucleotide
  Sense strand starting at position 2903 of SEQ ID NO: 917250
gcuugugucagucuuccua

SEQ ID NO: 1220681 - RNA, 19 nt, Artificial Sequence
  Description of Artificial Sequence: Synthetic oligonucleotide
  Antisense strand to SEQ ID NO: 1220680
uaggaagacugacacaagc

SEQ ID NO: 1220682 - RNA, 19 nt, Artificial Sequence
  Description of Artificial Sequence: Synthetic oligonucleotide
  Sense strand starting at position 2981 of SEQ ID NO: 917250
agaugagagucauucccaa

SEQ ID NO: 1220683 - RNA, 19 nt, Artificial Sequence
  Description of Artificial Sequence: Synthetic oligonucleotide
  Antisense strand to SEQ ID NO: 1220682
uugggaaugacucucaucu

SEQ ID NO: 1220684 - RNA, 19 nt, Artificial Sequence
  Description of Artificial Sequence: Synthetic oligonucleotide
  Sense strand starting at position 3030 of SEQ ID NO: 917250
gcuguuucuuauuuagaug

SEQ ID NO: 1220685 - RNA, 19 nt, Artificial Sequence
  Description of Artificial Sequence: Synthetic oligonucleotide
  Antisense strand to SEQ ID NO: 1220684
caucuaaauaagaaacagc

SEQ ID NO: 1220686 - RNA, 19 nt, Artificial Sequence
  Description of Artificial Sequence: Synthetic oligonucleotide
  Sense strand starting at position 3042 of SEQ ID NO: 917250
uuagaugcuugaguaaacu

SEQ ID NO: 1220687 - RNA, 19 nt, Artificial Sequence
  Description of Artificial Sequence: Synthetic oligonucleotide
  Antisense strand to SEQ ID NO: 1220686
aguuuacucaagcaucuaa

SEQ ID NO: 1220688 - RNA, 19 nt, Artificial Sequence
  Description of Artificial Sequence: Synthetic oligonucleotide
  Sense strand starting at position 3092 of SEQ ID NO: 917250
ugaaucauuugguaggaau

SEQ ID NO: 1220689 - RNA, 19 nt, Artificial Sequence
  Description of Artificial Sequence: Synthetic oligonucleotide
  Antisense strand to SEQ ID NO: 1220688
auuccuaccaaaugauuca

SEQ ID NO: 1220690 - RNA, 19 nt, Artificial Sequence
  Description of Artificial Sequence: Synthetic oligonucleotide
  Sense strand starting at position 3183 of SEQ ID NO: 917250
cacagaugucauuagguuc

SEQ ID NO: 1220691 - RNA, 19 nt, Artificial Sequence
  Description of Artificial Sequence: Synthetic oligonucleotide
  Antisense strand to SEQ ID NO: 1220690
gaaccuaaugacaucugug

SEQ ID NO: 1220692 - RNA, 19 nt, Artificial Sequence
  Description of Artificial Sequence: Synthetic oligonucleotide
  Sense strand starting at position 3435 of SEQ ID NO: 917250
aaacuuaggcugcagagua

SEQ ID NO: 1220693 - RNA, 19 nt, Artificial Sequence
  Description of Artificial Sequence: Synthetic oligonucleotide
  Antisense strand to SEQ ID NO: 1220692
uacucugcagccuaaguuu

SEQ ID NO: 1220694 - RNA, 19 nt, Artificial Sequence
  Description of Artificial Sequence: Synthetic oligonucleotide
  Sense strand starting at position 3462 of SEQ ID NO: 917250
agacacuguugauaaauuu

SEQ ID NO: 1220695 - RNA, 19 nt, Artificial Sequence
  Description of Artificial Sequence: Synthetic oligonucleotide
  Antisense strand to SEQ ID NO: 1220694
aaauuuaucaacagugucu

SEQ ID NO: 1220696 - RNA, 19 nt, Artificial Sequence
  Description of Artificial Sequence: Synthetic oligonucleotide
  Sense strand starting at position 3930 of SEQ ID NO: 917250
agaguagucaggcagauga

SEQ ID NO: 1220697 - RNA, 19 nt, Artificial Sequence
  Description of Artificial Sequence: Synthetic oligonucleotide
  Antisense strand to SEQ ID NO: 1220696
ucaucugccugacuacucu

SEQ ID NO: 1220698 - RNA, 19 nt, Artificial Sequence
  Description of Artificial Sequence: Synthetic oligonucleotide
  Sense strand starting at position 3964 of SEQ ID NO: 917250
gucauuauccuguaagagg

SEQ ID NO: 1220699 - RNA, 19 nt, Artificial Sequence
  Description of Artificial Sequence: Synthetic oligonucleotide
  Antisense strand to SEQ ID NO: 1220698
ccucuuacaggauaaugac

SEQ ID NO: 1220700 - RNA, 19 nt, Artificial Sequence
  Description of Artificial Sequence: Synthetic oligonucleotide
  Sense strand starting at position 3982 of SEQ ID NO: 917251
gccgcugaagcuguauauu

SEQ ID NO: 1220701 - RNA, 19 nt, Artificial Sequence
  Description of Artificial Sequence: Synthetic oligonucleotide
  Antisense strand to SEQ ID NO: 1220700
aauauacagcuucagcggc

SEQ ID NO: 1220702 - RNA, 19 nt, Artificial Sequence
  Description of Artificial Sequence: Synthetic oligonucleotide
  Sense strand starting at position 41 of SEQ ID NO: 917251
auugaacgaguuuguaagu

SEQ ID NO: 1220703 - RNA, 19 nt, Artificial Sequence
  Description of Artificial Sequence: Synthetic oligonucleotide
  Antisense strand to SEQ ID NO: 1220702
acuuacaaacucguucaau

SEQ ID NO: 1220704 - RNA, 19 nt, Artificial Sequence
  Description of Artificial Sequence: Synthetic oligonucleotide
  Sense strand starting at position 51 of SEQ ID NO: 917251
uuuguaagugucuggauaa

SEQ ID NO: 1220705 - RNA, 19 nt, Artificial Sequence
  Description of Artificial Sequence: Synthetic oligonucleotide
  Antisense strand to SEQ ID NO: 1220704
uuauccagacacuuacaaa

SEQ ID NO: 1220706 - RNA, 19 nt, Artificial Sequence
  Description of Artificial Sequence: Synthetic oligonucleotide
  Sense strand starting at position 52 of SEQ ID NO: 917251
uuguaagugucuggauaag

SEQ ID NO: 1220707 - RNA, 19 nt, Artificial Sequence
  Description of Artificial Sequence: Synthetic oligonucleotide
  Antisense strand to SEQ ID NO: 1220706
cuuauccagacacuuacaa

SEQ ID NO: 1220708 - RNA, 19 nt, Artificial Sequence
  Description of Artificial Sequence: Synthetic oligonucleotide
  Sense strand starting at position 75 of SEQ ID NO: 917251
gcacaucccucuuugaaga

SEQ ID NO: 1220709 - RNA, 19 nt, Artificial Sequence
  Description of Artificial Sequence: Synthetic oligonucleotide
  Antisense strand to SEQ ID NO: 1220708
ucuucaaagagggaugugc

SEQ ID NO: 1220710 - RNA, 19 nt, Artificial Sequence
  Description of Artificial Sequence: Synthetic oligonucleotide
  Sense strand starting at position 92 of SEQ ID NO: 917251
gagggaauuccugaugucg

SEQ ID NO: 1220711 - RNA, 19 nt, Artificial Sequence
  Description of Artificial Sequence: Synthetic oligonucleotide
  Antisense strand to SEQ ID NO: 1220710
cgacaucaggaauucccuc

SEQ ID NO: 1220712 - RNA, 19 nt, Artificial Sequence
  Description of Artificial Sequence: Synthetic oligonucleotide
  Sense strand starting at position 94 of SEQ ID NO: 917251
gggaauuccugaugucgga

SEQ ID NO: 1220713 - RNA, 19 nt, Artificial Sequence
  Description of Artificial Sequence: Synthetic oligonucleotide
  Antisense strand to SEQ ID NO: 1220712
uccgacaucaggaauuccc

SEQ ID NO: 1220714 - RNA, 19 nt, Artificial Sequence
  Description of Artificial Sequence: Synthetic oligonucleotide
  Sense strand starting at position 138 of SEQ ID NO: 917251
agguguucaguugauguca

SEQ ID NO: 1220715 - RNA, 19 nt, Artificial Sequence
  Description of Artificial Sequence: Synthetic oligonucleotide
  Antisense strand to SEQ ID NO: 1220714
ugacaucaacugaacaccu

SEQ ID NO: 1220716 - RNA, 19 nt, Artificial Sequence
  Description of Artificial Sequence: Synthetic oligonucleotide
  Sense strand starting at position 140 of SEQ ID NO: 917251
guguucaguugaugucagu

SEQ ID NO: 1220717 - RNA, 19 nt, Artificial Sequence
  Description of Artificial Sequence: Synthetic oligonucleotide
  Antisense strand to SEQ ID NO: 1220716
acugacaucaacugaacac

SEQ ID NO: 1220718 - RNA, 19 nt, Artificial Sequence
  Description of Artificial Sequence: Synthetic oligonucleotide
  Sense strand starting at position 146 of SEQ ID NO: 917251
aguugaugucaguauggag

SEQ ID NO: 1220719 - RNA, 19 nt, Artificial Sequence
  Description of Artificial Sequence: Synthetic oligonucleotide
  Antisense strand to SEQ ID NO: 1220718
cuccauacugacaucaacu

SEQ ID NO: 1220720 - RNA, 19 nt, Artificial Sequence
  Description of Artificial Sequence: Synthetic oligonucleotide
  Sense strand starting at position 163 of SEQ ID NO: 917251
aguucaguuuggugacgga

SEQ ID NO: 1220721 - RNA, 19 nt, Artificial Sequence
  Description of Artificial Sequence: Synthetic oligonucleotide
  Antisense strand to SEQ ID NO: 1220720
uccgucaccaaacugaacu

SEQ ID NO: 1220722 - RNA, 19 nt, Artificial Sequence
  Description of Artificial Sequence: Synthetic oligonucleotide
  Sense strand starting at position 166 of SEQ ID NO: 917251
ucaguuuggugacggaagu

SEQ ID NO: 1220723 - RNA, 19 nt, Artificial Sequence
  Description of Artificial Sequence: Synthetic oligonucleotide
  Antisense strand to SEQ ID NO: 1220722
acuuccgucaccaaacuga

SEQ ID NO: 1220724 - RNA, 19 nt, Artificial Sequence
  Description of Artificial Sequence: Synthetic oligonucleotide
  Sense strand starting at position 193 of SEQ ID NO: 917251
gaggcugaauguuggguua

SEQ ID NO: 1220725 - RNA, 19 nt, Artificial Sequence
  Description of Artificial Sequence: Synthetic oligonucleotide
  Antisense strand to SEQ ID NO: 1220724
uaacccaacauucagccuc

SEQ ID NO: 1220726 - RNA, 19 nt, Artificial Sequence
  Description of Artificial Sequence: Synthetic oligonucleotide
  Sense strand starting at position 195 of SEQ ID NO: 917251
ggcugaauguuggguuaaa

SEQ ID NO: 1220727 - RNA, 19 nt, Artificial Sequence
  Description of Artificial Sequence: Synthetic oligonucleotide
  Antisense strand to SEQ ID NO: 1220726
uuuaacccaacauucagcc

SEQ ID NO: 1220728 - RNA, 19 nt, Artificial Sequence
  Description of Artificial Sequence: Synthetic oligonucleotide
  Sense strand starting at position 196 of SEQ ID NO: 917251
gcugaauguuggguuaaau

SEQ ID NO: 1220729 - RNA, 19 nt, Artificial Sequence
  Description of Artificial Sequence: Synthetic oligonucleotide
  Antisense strand to SEQ ID NO: 1220728
auuuaacccaacauucagc

SEQ ID NO: 1220730 - RNA, 19 nt, Artificial Sequence
  Description of Artificial Sequence: Synthetic oligonucleotide
  Sense strand starting at position 206 of SEQ ID NO: 917251
ggguuaaauuuacaguuag

SEQ ID NO: 1220731 - RNA, 19 nt, Artificial Sequence
  Description of Artificial Sequence: Synthetic oligonucleotide
  Antisense strand to SEQ ID NO: 1220730
cuaacuguaaauuuaaccc

SEQ ID NO: 1220732 - RNA, 19 nt, Artificial Sequence
  Description of Artificial Sequence: Synthetic oligonucleotide
  Sense strand starting at position 244 of SEQ ID NO: 917251
ggaauuagaugucaagaaa

SEQ ID NO: 1220733 - RNA, 19 nt, Artificial Sequence
  Description of Artificial Sequence: Synthetic oligonucleotide
  Antisense strand to SEQ ID NO: 1220732
uuucuugacaucuaauucc

SEQ ID NO: 1220734 - RNA, 19 nt, Artificial Sequence
  Description of Artificial Sequence: Synthetic oligonucleotide
  Sense strand starting at position 324 of SEQ ID NO: 917251
gcgagaacacgcagauguu

SEQ ID NO: 1220735 - RNA, 19 nt, Artificial Sequence
  Description of Artificial Sequence: Synthetic oligonucleotide
  Antisense strand to SEQ ID NO: 1220734
aacaucugcguguucucgc

SEQ ID NO: 1220736 - RNA, 19 nt, Artificial Sequence
  Description of Artificial Sequence: Synthetic oligonucleotide
  Sense strand starting at position 362 of SEQ ID NO: 917251
cugugagcaccugguauuu

SEQ ID NO: 1220737 - RNA, 19 nt, Artificial Sequence
  Description of Artificial Sequence: Synthetic oligonucleotide
  Antisense strand to SEQ ID NO: 1220736
aaauaccaggugcucacag

SEQ ID NO: 1220738 - RNA, 19 nt, Artificial Sequence
  Description of Artificial Sequence: Synthetic oligonucleotide
  Sense strand starting at position 793 of SEQ ID NO: 917251
ccugcauucgcugcgauca

SEQ ID NO: 1220739 - RNA, 19 nt, Artificial Sequence
  Description of Artificial Sequence: Synthetic oligonucleotide
  Antisense strand to SEQ ID NO: 1220738
ugaucgcagcgaaugcagg

SEQ ID NO: 1220740 - RNA, 19 nt, Artificial Sequence
  Description of Artificial Sequence: Synthetic oligonucleotide
  Sense strand starting at position 795 of SEQ ID NO: 917251
ugcauucgcugcgaucaga

SEQ ID NO: 1220741 - RNA, 19 nt, Artificial Sequence
  Description of Artificial Sequence: Synthetic oligonucleotide
  Antisense strand to SEQ ID NO: 1220740
ucugaucgcagcgaaugca

SEQ ID NO: 1220742 - RNA, 19 nt, Artificial Sequence
  Description of Artificial Sequence: Synthetic oligonucleotide
  Sense strand starting at position 825 of SEQ ID NO: 917251
ccuggaaagucuuccacag

SEQ ID NO: 1220743 - RNA, 19 nt, Artificial Sequence
  Description of Artificial Sequence: Synthetic oligonucleotide
  Antisense strand to SEQ ID NO: 1220742
cuguggaagacuuuccagg

SEQ ID NO: 1220744 - RNA, 19 nt, Artificial Sequence
  Description of Artificial Sequence: Synthetic oligonucleotide
  Sense strand starting at position 827 of SEQ ID NO: 917251
uggaaagucuuccacaguc

SEQ ID NO: 1220745 - RNA, 19 nt, Artificial Sequence
  Description of Artificial Sequence: Synthetic oligonucleotide
  Antisense strand to SEQ ID NO: 1220744
gacuguggaagacuuucca

SEQ ID NO: 1220746 - RNA, 19 nt, Artificial Sequence
  Description of Artificial Sequence: Synthetic oligonucleotide
  Sense strand starting at position 835 of SEQ ID NO: 917251
cuuccacagucauggcaaa

SEQ ID NO: 1220747 - RNA, 19 nt, Artificial Sequence
  Description of Artificial Sequence: Synthetic oligonucleotide
  Antisense strand to SEQ ID NO: 1220746
uuugccaugacuguggaag

SEQ ID NO: 1220748 - RNA, 19 nt, Artificial Sequence
  Description of Artificial Sequence: Synthetic oligonucleotide
  Sense strand starting at position 918 of SEQ ID NO: 917251
cuagucugugguuggugaa

SEQ ID NO: 1220749 - RNA, 19 nt, Artificial Sequence
  Description of Artificial Sequence: Synthetic oligonucleotide
  Antisense strand to SEQ ID NO: 1220748
uucaccaaccacagacuag

SEQ ID NO: 1220750 - RNA, 19 nt, Artificial Sequence
  Description of Artificial Sequence: Synthetic oligonucleotide
  Sense strand starting at position 919 of SEQ ID NO: 917251
uagucugugguuggugaaa

SEQ ID NO: 1220751 - RNA, 19 nt, Artificial Sequence
  Description of Artificial Sequence: Synthetic oligonucleotide
  Antisense strand to SEQ ID NO: 1220750
uuucaccaaccacagacua

SEQ ID NO: 1220752 - RNA, 19 nt, Artificial Sequence
  Description of Artificial Sequence: Synthetic oligonucleotide
  Sense strand starting at position 2183 of SEQ ID NO: 917251
ggaauccgauuagaucauu

SEQ ID NO: 1220753 - RNA, 19 nt, Artificial Sequence
  Description of Artificial Sequence: Synthetic oligonucleotide
  Antisense strand to SEQ ID NO: 1220752
aaugaucuaaucggauucc

SEQ ID NO: 1220754 - RNA, 19 nt, Artificial Sequence
  Description of Artificial Sequence: Synthetic oligonucleotide
  Sense strand starting at position 2354 of SEQ ID NO: 917251
ccugcuguuuccuugggau

SEQ ID NO: 1220755 - RNA, 19 nt, Artificial Sequence
  Description of Artificial Sequence: Synthetic oligonucleotide
  Antisense strand to SEQ ID NO: 1220754
aucccaaggaaacagcagg

SEQ ID NO: 1220756 - RNA, 19 nt, Artificial Sequence
  Description of Artificial Sequence: Synthetic oligonucleotide
  Sense strand starting at position 2356 of SEQ ID NO: 917251
ugcuguuuccuugggaugu

SEQ ID NO: 1220757 - RNA, 19 nt, Artificial Sequence
  Description of Artificial Sequence: Synthetic oligonucleotide
  Antisense strand to SEQ ID NO: 1220756
acaucccaaggaaacagca

SEQ ID NO: 1220758 - RNA, 19 nt, Artificial Sequence
  Description of Artificial Sequence: Synthetic oligonucleotide
  Sense strand starting at position 2357 of SEQ ID NO: 917251
gcuguuuccuugggaugug

SEQ ID NO: 1220759 - RNA, 19 nt, Artificial Sequence
  Description of Artificial Sequence: Synthetic oligonucleotide
  Antisense strand to SEQ ID NO: 1220758
cacaucccaaggaaacagc

SEQ ID NO: 1220760 - RNA, 19 nt, Artificial Sequence
  Description of Artificial Sequence: Synthetic oligonucleotide
  Sense strand starting at position 2396 of SEQ ID NO: 917251
gccggaagaaaccguaauu

SEQ ID NO: 1220761 - RNA, 19 nt, Artificial Sequence
  Description of Artificial Sequence: Synthetic oligonucleotide
  Antisense strand to SEQ ID NO: 1220760
aauuacgguuucuuccggc

SEQ ID NO: 1220762 - RNA, 19 nt, Artificial Sequence
  Description of Artificial Sequence: Synthetic oligonucleotide
  Sense strand starting at position 2475 of SEQ ID NO: 917251
accugauaauaggaauuua

SEQ ID NO: 1220763 - RNA, 19 nt, Artificial Sequence
  Description of Artificial Sequence: Synthetic oligonucleotide
  Antisense strand to SEQ ID NO: 1220762
uaaauuccuauuaucaggu

SEQ ID NO: 1220764 - RNA, 19 nt, Artificial Sequence
  Description of Artificial Sequence: Synthetic oligonucleotide
  Sense strand starting at position 2573 of SEQ ID NO: 917251
cccagucauuugucuucuu

SEQ ID NO: 1220765 - RNA, 19 nt, Artificial Sequence
  Description of Artificial Sequence: Synthetic oligonucleotide
  Antisense strand to SEQ ID NO: 1220764
aagaagacaaaugacuggg

SEQ ID NO: 1220766 - RNA, 19 nt, Artificial Sequence
  Description of Artificial Sequence: Synthetic oligonucleotide
  Sense strand starting at position 2702 of SEQ ID NO: 917251
gagggacgcauauggaaua

SEQ ID NO: 1220767 - RNA, 19 nt, Artificial Sequence
  Description of Artificial Sequence: Synthetic oligonucleotide
  Antisense strand to SEQ ID NO: 1220766
uauuccauaugcgucccuc

SEQ ID NO: 1220768 - RNA, 19 nt, Artificial Sequence
  Description of Artificial Sequence: Synthetic oligonucleotide
  Sense strand starting at position 3709 of SEQ ID NO: 917251
cugggaugcaccugagaca

SEQ ID NO: 1220769 - RNA, 19 nt, Artificial Sequence
  Description of Artificial Sequence: Synthetic oligonucleotide
  Antisense strand to SEQ ID NO: 1220768
ugucucaggugcaucccag

SEQ ID NO: 1220770 - RNA, 19 nt, Artificial Sequence
  Description of Artificial Sequence: Synthetic oligonucleotide
  Sense strand starting at position 3967 of SEQ ID NO: 917252
ccaauaggauugucagcuu

SEQ ID NO: 1220771 - RNA, 19 nt, Artificial Sequence
  Description of Artificial Sequence: Synthetic oligonucleotide
  Antisense strand to SEQ ID NO: 1220770
aagcugacaauccuauugg

SEQ ID NO: 1220772 - RNA, 19 nt, Artificial Sequence
  Description of Artificial Sequence: Synthetic oligonucleotide
  Sense strand starting at position 230 of SEQ ID NO: 917252
cacguuccacuggaaacau

SEQ ID NO: 1220773 - RNA, 19 nt, Artificial Sequence
  Description of Artificial Sequence: Synthetic oligonucleotide
  Antisense strand to SEQ ID NO: 1220772
auguuuccaguggaacgug

SEQ ID NO: 1220774 - RNA, 19 nt, Artificial Sequence
  Description of Artificial Sequence: Synthetic oligonucleotide
  Sense strand starting at position 277 of SEQ ID NO: 917252
acaugaugcauucguggga

SEQ ID NO: 1220775 - RNA, 19 nt, Artificial Sequence
  Description of Artificial Sequence: Synthetic oligonucleotide
  Antisense strand to SEQ ID NO: 1220774
ucccacgaaugcaucaugu

SEQ ID NO: 1220776 - RNA, 19 nt, Artificial Sequence
  Description of Artificial Sequence: Synthetic oligonucleotide
  Sense strand starting at position 278 of SEQ ID NO: 917252
caugaugcauucgugggaa

SEQ ID NO: 1220777 - RNA, 19 nt, Artificial Sequence
  Description of Artificial Sequence: Synthetic oligonucleotide
  Antisense strand to SEQ ID NO: 1220776
uucccacgaaugcaucaug

SEQ ID NO: 1220778 - RNA, 19 nt, Artificial Sequence
  Description of Artificial Sequence: Synthetic oligonucleotide
  Sense strand starting at position 281 of SEQ ID NO: 917252
gaugcauucgugggaagca

SEQ ID NO: 1220779 - RNA, 19 nt, Artificial Sequence
  Description of Artificial Sequence: Synthetic oligonucleotide
  Antisense strand to SEQ ID NO: 1220778
ugcuucccacgaaugcauc

SEQ ID NO: 1220780 - RNA, 19 nt, Artificial Sequence
  Description of Artificial Sequence: Synthetic oligonucleotide
  Sense strand starting at position 282 of SEQ ID NO: 917252
augcauucgugggaagcau

SEQ ID NO: 1220781 - RNA, 19 nt, Artificial Sequence
  Description of Artificial Sequence: Synthetic oligonucleotide
  Antisense strand to SEQ ID NO: 1220780
augcuucccacgaaugcau

SEQ ID NO: 1220782 - RNA, 19 nt, Artificial Sequence
  Description of Artificial Sequence: Synthetic oligonucleotide
  Sense strand starting at position 293 of SEQ ID NO: 917252
ggaagcauauaggauauua

SEQ ID NO: 1220783 - RNA, 19 nt, Artificial Sequence
  Description of Artificial Sequence: Synthetic oligonucleotide
  Antisense strand to SEQ ID NO: 1220782
uaauauccuauaugcuucc

SEQ ID NO: 1220784 - RNA, 19 nt, Artificial Sequence
  Description of Artificial Sequence: Synthetic oligonucleotide
  Sense strand starting at position 460 of SEQ ID NO: 917252
gggauacccugucucaaau

SEQ ID NO: 1220785 - RNA, 19 nt, Artificial Sequence
  Description of Artificial Sequence: Synthetic oligonucleotide
  Antisense strand to SEQ ID NO: 1220784
auuugagacaggguauccc

SEQ ID NO: 1220786 - RNA, 19 nt, Artificial Sequence
  Description of Artificial Sequence: Synthetic oligonucleotide
  Sense strand starting at position 711 of SEQ ID NO: 917252
ccacuucucugaguuccua

SEQ ID NO: 1220787 - RNA, 19 nt, Artificial Sequence
  Description of Artificial Sequence: Synthetic oligonucleotide
  Antisense strand to SEQ ID NO: 1220786
uaggaacucagagaagugg

SEQ ID NO: 1220788 - RNA, 19 nt, Artificial Sequence
  Description of Artificial Sequence: Synthetic oligonucleotide
  Sense strand starting at position 828 of SEQ ID NO: 917252
aggacugagcagugaauga

SEQ ID NO: 1220789 - RNA, 19 nt, Artificial Sequence
  Description of Artificial Sequence: Synthetic oligonucleotide
  Antisense strand to SEQ ID NO: 1220788
ucauucacugcucaguccu

SEQ ID NO: 1220790 - RNA, 19 nt, Artificial Sequence
  Description of Artificial Sequence: Synthetic oligonucleotide
  Sense strand starting at position 1367 of SEQ ID NO: 917252
uuugauccaucccgauaug

SEQ ID NO: 1220791 - RNA, 19 nt, Artificial Sequence
  Description of Artificial Sequence: Synthetic oligonucleotide
  Antisense strand to SEQ ID NO: 1220790
cauaucgggauggaucaaa

SEQ ID NO: 1220792 - RNA, 19 nt, Artificial Sequence
  Description of Artificial Sequence: Synthetic oligonucleotide
  Sense strand starting at position 1370 of SEQ ID NO: 917252
gauccaucccgauauggcu

SEQ ID NO: 1220793 - RNA, 19 nt, Artificial Sequence
  Description of Artificial Sequence: Synthetic oligonucleotide
  Antisense strand to SEQ ID NO: 1220792
agccauaucgggauggauc

SEQ ID NO: 1220794 - RNA, 19 nt, Artificial Sequence
  Description of Artificial Sequence: Synthetic oligonucleotide
  Sense strand starting at position 2409 of SEQ ID NO: 917252
aggagcuucuucugcgauu

SEQ ID NO: 1220795 - RNA, 19 nt, Artificial Sequence
  Description of Artificial Sequence: Synthetic oligonucleotide
  Antisense strand to SEQ ID NO: 1220794
aaucgcagaagaagcuccu

SEQ ID NO: 1220796 - RNA, 19 nt, Artificial Sequence
  Description of Artificial Sequence: Synthetic oligonucleotide
  Sense strand starting at position 2604 of SEQ ID NO: 917252
gagccaggccugggagaau

SEQ ID NO: 1220797 - RNA, 19 nt, Artificial Sequence
  Description of Artificial Sequence: Synthetic oligonucleotide
  Antisense strand to SEQ ID NO: 1220796
auucucccaggccuggcuc

SEQ ID NO: 1220798 - RNA, 19 nt, Artificial Sequence
  Description of Artificial Sequence: Synthetic oligonucleotide
  Sense strand starting at position 2658 of SEQ ID NO: 917252
guccgcauccaaugacauu

SEQ ID NO: 1220799 - RNA, 19 nt, Artificial Sequence
  Description of Artificial Sequence: Synthetic oligonucleotide
  Antisense strand to SEQ ID NO: 1220798
aaugucauuggaugcggac

SEQ ID NO: 1220800 - RNA, 19 nt, Artificial Sequence
  Description of Artificial Sequence: Synthetic oligonucleotide
  Sense strand starting at position 2667 of SEQ ID NO: 917252
caaugacauuguccugaga

SEQ ID NO: 1220801 - RNA, 19 nt, Artificial Sequence
  Description of Artificial Sequence: Synthetic oligonucleotide
  Antisense strand to SEQ ID NO: 1220800
ucucaggacaaugucauug

SEQ ID NO: 1220802 - RNA, 19 nt, Artificial Sequence
  Description of Artificial Sequence: Synthetic oligonucleotide
  Sense strand starting at position 2669 of SEQ ID NO: 917252
augacauuguccugagauu

SEQ ID NO: 1220803 - RNA, 19 nt, Artificial Sequence
  Description of Artificial Sequence: Synthetic oligonucleotide
  Antisense strand to SEQ ID NO: 1220802
aaucucaggacaaugucau

SEQ ID NO: 1220804 - RNA, 19 nt, Artificial Sequence
  Description of Artificial Sequence: Synthetic oligonucleotide
  Sense strand starting at position 2715 of SEQ ID NO: 917252
ccggaaauuugccagaacu

SEQ ID NO: 1220805 - RNA, 19 nt, Artificial Sequence
  Description of Artificial Sequence: Synthetic oligonucleotide
  Antisense strand to SEQ ID NO: 1220804
aguucuggcaaauuuccgg

SEQ ID NO: 1220806 - RNA, 19 nt, Artificial Sequence
  Description of Artificial Sequence: Synthetic oligonucleotide
  Sense strand starting at position 2922 of SEQ ID NO: 917252
gacgcacuuuccugugaga

SEQ ID NO: 1220807 - RNA, 19 nt, Artificial Sequence
  Description of Artificial Sequence: Synthetic oligonucleotide
  Antisense strand to SEQ ID NO: 1220806
ucucacaggaaagugcguc

SEQ ID NO: 1220808 - RNA, 19 nt, Artificial Sequence
  Description of Artificial Sequence: Synthetic oligonucleotide
  Sense strand starting at position 2924 of SEQ ID NO: 917252
cgcacuuuccugugagaag

SEQ ID NO: 1220809 - RNA, 19 nt, Artificial Sequence
  Description of Artificial Sequence: Synthetic oligonucleotide
  Antisense strand to SEQ ID NO: 1220808
cuucucacaggaaagugcg

SEQ ID NO: 1220810 - RNA, 19 nt, Artificial Sequence
  Description of Artificial Sequence: Synthetic oligonucleotide
  Sense strand starting at position 2925 of SEQ ID NO: 917252
gcacuuuccugugagaagc

SEQ ID NO: 1220811 - RNA, 19 nt, Artificial Sequence
  Description of Artificial Sequence: Synthetic oligonucleotide
  Antisense strand to SEQ ID NO: 1220810
gcuucucacaggaaagugc

SEQ ID NO: 1220812 - RNA, 19 nt, Artificial Sequence
  Description of Artificial Sequence: Synthetic oligonucleotide
  Sense strand starting at position 3036 of SEQ ID NO: 917252
auggguguuuccggaaugu

SEQ ID NO: 1220813 - RNA, 19 nt, Artificial Sequence
  Description of Artificial Sequence: Synthetic oligonucleotide
  Antisense strand to SEQ ID NO: 1220812
acauuccggaaacacccau

SEQ ID NO: 1220814 - RNA, 19 nt, Artificial Sequence
  Description of Artificial Sequence: Synthetic oligonucleotide
  Sense strand starting at position 3040 of SEQ ID NO: 917252
guguuuccggaauguucca

SEQ ID NO: 1220815 - RNA, 19 nt, Artificial Sequence
  Description of Artificial Sequence: Synthetic oligonucleotide
  Antisense strand to SEQ ID NO: 1220814
uggaacauuccggaaacac

SEQ ID NO: 1220816 - RNA, 19 nt, Artificial Sequence
  Description of Artificial Sequence: Synthetic oligonucleotide
  Sense strand starting at position 3045 of SEQ ID NO: 917252
uccggaauguuccaugcga

SEQ ID NO: 1220817 - RNA, 19 nt, Artificial Sequence
  Description of Artificial Sequence: Synthetic oligonucleotide
  Antisense strand to SEQ ID NO: 1220816
ucgcauggaacauuccgga

SEQ ID NO: 1220818 - RNA, 19 nt, Artificial Sequence
  Description of Artificial Sequence: Synthetic oligonucleotide
  Sense strand starting at position 3046 of SEQ ID NO: 917252
ccggaauguuccaugcgag

SEQ ID NO: 1220819 - RNA, 19 nt, Artificial Sequence
  Description of Artificial Sequence: Synthetic oligonucleotide
  Antisense strand to SEQ ID NO: 1220818
cucgcauggaacauuccgg

SEQ ID NO: 1220820 - RNA, 19 nt, Artificial Sequence
  Description of Artificial Sequence: Synthetic oligonucleotide
  Sense strand starting at position 3296 of SEQ ID NO: 917252
cggcgucccucauuugaaa

SEQ ID NO: 1220821 - RNA, 19 nt, Artificial Sequence
  Description of Artificial Sequence: Synthetic oligonucleotide
  Antisense strand to SEQ ID NO: 1220820
uuucaaaugagggacgccg

SEQ ID NO: 1220822 - RNA, 19 nt, Artificial Sequence
  Description of Artificial Sequence: Synthetic oligonucleotide
  Sense strand starting at position 3298 of SEQ ID NO: 917252
gcgucccucauuugaaaga

SEQ ID NO: 1220823 - RNA, 19 nt, Artificial Sequence
  Description of Artificial Sequence: Synthetic oligonucleotide
  Antisense strand to SEQ ID NO: 1220822
ucuuucaaaugagggacgc

SEQ ID NO: 1220824 - RNA, 19 nt, Artificial Sequence
  Description of Artificial Sequence: Synthetic oligonucleotide
  Sense strand starting at position 3299 of SEQ ID NO: 917252
cgucccucauuugaaagau

SEQ ID NO: 1220825 - RNA, 19 nt, Artificial Sequence
  Description of Artificial Sequence: Synthetic oligonucleotide
  Antisense strand to SEQ ID NO: 1220824
aucuuucaaaugagggacg

SEQ ID NO: 1220826 - RNA, 19 nt, Artificial Sequence
  Description of Artificial Sequence: Synthetic oligonucleotide
  Sense strand starting at position 3338 of SEQ ID NO: 917252
gucugaccuccuugggaug

SEQ ID NO: 1220827 - RNA, 19 nt, Artificial Sequence
  Description of Artificial Sequence: Synthetic oligonucleotide
  Antisense strand to SEQ ID NO: 1220826
caucccaaggaggucagac

SEQ ID NO: 1220828 - RNA, 19 nt, Artificial Sequence
  Description of Artificial Sequence: Synthetic oligonucleotide
  Sense strand starting at position 3349 of SEQ ID NO: 917252
uugggauguuuagacccaa

SEQ ID NO: 1220829 - RNA, 19 nt, Artificial Sequence
  Description of Artificial Sequence: Synthetic oligonucleotide
  Antisense strand to SEQ ID NO: 1220828
uugggucuaaacaucccaa

SEQ ID NO: 1220830 - RNA, 19 nt, Artificial Sequence
  Description of Artificial Sequence: Synthetic oligonucleotide
  Sense strand starting at position 3696 of SEQ ID NO: 917252
gccuucuggccauggagau

SEQ ID NO: 1220831 - RNA, 19 nt, Artificial Sequence
  Description of Artificial Sequence: Synthetic oligonucleotide
  Antisense strand to SEQ ID NO: 1220830
aucuccauggccagaaggc

SEQ ID NO: 1220832 - RNA, 19 nt, Artificial Sequence
  Description of Artificial Sequence: Synthetic oligonucleotide
  Sense strand starting at position 3860 of SEQ ID NO: 917252
gggagcaggucagauaaga

SEQ ID NO: 1220833 - RNA, 19 nt, Artificial Sequence
  Description of Artificial Sequence: Synthetic oligonucleotide
  Antisense strand to SEQ ID NO: 1220832
ucuuaucugaccugcuccc

SEQ ID NO: 1220834 - RNA, 19 nt, Artificial Sequence
  Description of Artificial Sequence: Synthetic oligonucleotide
  Sense strand starting at position 3860 of SEQ ID NO: 917253
gggagcaggucagauaaga

SEQ ID NO: 1220835 - RNA, 19 nt, Artificial Sequence
  Description of Artificial Sequence: Synthetic oligonucleotide
  Antisense strand to SEQ ID NO: 1220834
ucuuaucugaccugcuccc

SEQ ID NO: 1220836 - RNA, 19 nt, Artificial Sequence
  Description of Artificial Sequence: Synthetic oligonucleotide
  Sense strand starting at position 32 of SEQ ID NO: 917253
auggauacuacgggcgaaa

SEQ ID NO: 1220837 - RNA, 19 nt, Artificial Sequence
  Description of Artificial Sequence: Synthetic oligonucleotide
  Antisense strand to SEQ ID NO: 1220836
uuucgcccguaguauccau

SEQ ID NO: 1220838 - RNA, 19 nt, Artificial Sequence
  Description of Artificial Sequence: Synthetic oligonucleotide
  Sense strand starting at position 34 of SEQ ID NO: 917253
ggauacuacgggcgaaauu

SEQ ID NO: 1220839 - RNA, 19 nt, Artificial Sequence
  Description of Artificial Sequence: Synthetic oligonucleotide
  Antisense strand to SEQ ID NO: 1220838
aauuucgcccguaguaucc

SEQ ID NO: 1220840 - RNA, 19 nt, Artificial Sequence
  Description of Artificial Sequence: Synthetic oligonucleotide
  Sense strand starting at position 44 of SEQ ID NO: 917253
ggcgaaauuuaucaucugu

SEQ ID NO: 1220841 - RNA, 19 nt, Artificial Sequence
  Description of Artificial Sequence: Synthetic oligonucleotide
  Antisense strand to SEQ ID NO: 1220840
acagaugauaaauuucgcc

SEQ ID NO: 1220842 - RNA, 19 nt, Artificial Sequence
  Description of Artificial Sequence: Synthetic oligonucleotide
  Sense strand starting at position 51 of SEQ ID NO: 917253
uuuaucaucugugagagga

SEQ ID NO: 1220843 - RNA, 19 nt, Artificial Sequence
  Description of Artificial Sequence: Synthetic oligonucleotide
  Antisense strand to SEQ ID NO: 1220842
uccucucacagaugauaaa

SEQ ID NO: 1220844 - RNA, 19 nt, Artificial Sequence
  Description of Artificial Sequence: Synthetic oligonucleotide
  Sense strand starting at position 1144 of SEQ ID NO: 917253
ggcggucgccagaauccua

SEQ ID NO: 1220845 - RNA, 19 nt, Artificial Sequence
  Description of Artificial Sequence: Synthetic oligonucleotide
  Antisense strand to SEQ ID NO: 1220844
uaggauucuggcgaccgcc

SEQ ID NO: 1220846 - RNA, 19 nt, Artificial Sequence
  Description of Artificial Sequence: Synthetic oligonucleotide
  Sense strand starting at position 1151 of SEQ ID NO: 917253
gccagaauccuacgacuuu

SEQ ID NO: 1220847 - RNA, 19 nt, Artificial Sequence
  Description of Artificial Sequence: Synthetic oligonucleotide
  Antisense strand to SEQ ID NO: 1220846
aaagucguaggauucuggc

SEQ ID NO: 1220848 - RNA, 19 nt, Artificial Sequence
  Description of Artificial Sequence: Synthetic oligonucleotide
  Sense strand starting at position 1160 of SEQ ID NO: 917253
cuacgacuuugaccucuua

SEQ ID NO: 1220849 - RNA, 19 nt, Artificial Sequence
  Description of Artificial Sequence: Synthetic oligonucleotide
  Antisense strand to SEQ ID NO: 1220848
uaagaggucaaagucguag

SEQ ID NO: 1220850 - RNA, 19 nt, Artificial Sequence
  Description of Artificial Sequence: Synthetic oligonucleotide
  Sense strand starting at position 1247 of SEQ ID NO: 917253
ccugauucucccggaguca

SEQ ID NO: 1220851 - RNA, 19 nt, Artificial Sequence
  Description of Artificial Sequence: Synthetic oligonucleotide
  Antisense strand to SEQ ID NO: 1220850
ugacuccgggagaaucagg

SEQ ID NO: 1220852 - RNA, 19 nt, Artificial Sequence
  Description of Artificial Sequence: Synthetic oligonucleotide
  Sense strand starting at position 1248 of SEQ ID NO: 917253
cugauucucccggagucau

SEQ ID NO: 1220853 - RNA, 19 nt, Artificial Sequence
  Description of Artificial Sequence: Synthetic oligonucleotide
  Antisense strand to SEQ ID NO: 1220852
augacuccgggagaaucag

SEQ ID NO: 1220854 - RNA, 19 nt, Artificial Sequence
  Description of Artificial Sequence: Synthetic oligonucleotide
  Sense strand starting at position 1533 of SEQ ID NO: 917253
cccgcuuacccacagagau

SEQ ID NO: 1220855 - RNA, 19 nt, Artificial Sequence
  Description of Artificial Sequence: Synthetic oligonucleotide
  Antisense strand to SEQ ID NO: 1220854
aucucuguggguaagcggg

SEQ ID NO: 1220856 - RNA, 19 nt, Artificial Sequence
  Description of Artificial Sequence: Synthetic oligonucleotide
  Sense strand starting at position 2150 of SEQ ID NO: 917253
agcgcuaguggugcugaaa

SEQ ID NO: 1220857 - RNA, 19 nt, Artificial Sequence
  Description of Artificial Sequence: Synthetic oligonucleotide
  Antisense strand to SEQ ID NO: 1220856
uuucagcaccacuagcgcu

SEQ ID NO: 1220858 - RNA, 19 nt, Artificial Sequence
  Description of Artificial Sequence: Synthetic oligonucleotide
  Sense strand starting at position 2191 of SEQ ID NO: 917253
uaggacuauugccauguga

SEQ ID NO: 1220859 - RNA, 19 nt, Artificial Sequence
  Description of Artificial Sequence: Synthetic oligonucleotide
  Antisense strand to SEQ ID NO: 1220858
ucacauggcaauaguccua

SEQ ID NO: 1220860 - RNA, 19 nt, Artificial Sequence
  Description of Artificial Sequence: Synthetic oligonucleotide
  Sense strand starting at position 2193 of SEQ ID NO: 917253
ggacuauugccaugugaug

SEQ ID NO: 1220861 - RNA, 19 nt, Artificial Sequence
  Description of Artificial Sequence: Synthetic oligonucleotide
  Antisense strand to SEQ ID NO: 1220860
caucacauggcaauagucc

SEQ ID NO: 1220862 - RNA, 19 nt, Artificial Sequence
  Description of Artificial Sequence: Synthetic oligonucleotide
  Sense strand starting at position 2195 of SEQ ID NO: 917253
acuauugccaugugaugga

SEQ ID NO: 1220863 - RNA, 19 nt, Artificial Sequence
  Description of Artificial Sequence: Synthetic oligonucleotide
  Antisense strand to SEQ ID NO: 1220862
uccaucacauggcaauagu

SEQ ID NO: 1220864 - RNA, 19 nt, Artificial Sequence
  Description of Artificial Sequence: Synthetic oligonucleotide
  Sense strand starting at position 2325 of SEQ ID NO: 917253
uguacucuauucuugucaa

SEQ ID NO: 1220865 - RNA, 19 nt, Artificial Sequence
  Description of Artificial Sequence: Synthetic oligonucleotide
  Antisense strand to SEQ ID NO: 1220864
uugacaagaauagaguaca

SEQ ID NO: 1220866 - RNA, 19 nt, Artificial Sequence
  Description of Artificial Sequence: Synthetic oligonucleotide
  Sense strand starting at position 2404 of SEQ ID NO: 917253
cucauucucccgcgauuua

SEQ ID NO: 1220867 - RNA, 19 nt, Artificial Sequence
  Description of Artificial Sequence: Synthetic oligonucleotide
  Antisense strand to SEQ ID NO: 1220866
uaaaucgcgggagaaugag

SEQ ID NO: 1220868 - RNA, 19 nt, Artificial Sequence
  Description of Artificial Sequence: Synthetic oligonucleotide
  Sense strand starting at position 2405 of SEQ ID NO: 917253
ucauucucccgcgauuuaa

SEQ ID NO: 1220869 - RNA, 19 nt, Artificial Sequence
  Description of Artificial Sequence: Synthetic oligonucleotide
  Antisense strand to SEQ ID NO: 1220868
uuaaaucgcgggagaauga

SEQ ID NO: 1220870 - RNA, 19 nt, Artificial Sequence
  Description of Artificial Sequence: Synthetic oligonucleotide
  Sense strand starting at position 2705 of SEQ ID NO: 917253
ucucucugcgucggaagaa

SEQ ID NO: 1220871 - RNA, 19 nt, Artificial Sequence
  Description of Artificial Sequence: Synthetic oligonucleotide
  Antisense strand to SEQ ID NO: 1220870
uucuuccgacgcagagaga

SEQ ID NO: 1220872 - RNA, 19 nt, Artificial Sequence
  Description of Artificial Sequence: Synthetic oligonucleotide
  Sense strand starting at position 2731 of SEQ ID NO: 917253
cggguucccgcgugaagga

SEQ ID NO: 1220873 - RNA, 19 nt, Artificial Sequence
  Description of Artificial Sequence: Synthetic oligonucleotide
  Antisense strand to SEQ ID NO: 1220872
uccuucacgcgggaacccg

SEQ ID NO: 1220874 - RNA, 19 nt, Artificial Sequence
  Description of Artificial Sequence: Synthetic oligonucleotide
  Sense strand starting at position 2871 of SEQ ID NO: 917253
ccagucuuuguucgguaga

SEQ ID NO: 1220875 - RNA, 19 nt, Artificial Sequence
  Description of Artificial Sequence: Synthetic oligonucleotide
  Antisense strand to SEQ ID NO: 1220874
ucuaccgaacaaagacugg

SEQ ID NO: 1220876 - RNA, 19 nt, Artificial Sequence
  Description of Artificial Sequence: Synthetic oligonucleotide
  Sense strand starting at position 2873 of SEQ ID NO: 917253
agucuuuguucgguagaug

SEQ ID NO: 1220877 - RNA, 19 nt, Artificial Sequence
  Description of Artificial Sequence: Synthetic oligonucleotide
  Antisense strand to SEQ ID NO: 1220876
caucuaccgaacaaagacu

SEQ ID NO: 1220878 - RNA, 19 nt, Artificial Sequence
  Description of Artificial Sequence: Synthetic oligonucleotide
  Sense strand starting at position 2951 of SEQ ID NO: 917253
gucucugagcguuacgaac

SEQ ID NO: 1220879 - RNA, 19 nt, Artificial Sequence
  Description of Artificial Sequence: Synthetic oligonucleotide
  Antisense strand to SEQ ID NO: 1220878
guucguaacgcucagagac

SEQ ID NO: 1220880 - RNA, 19 nt, Artificial Sequence
  Description of Artificial Sequence: Synthetic oligonucleotide
  Sense strand starting at position 3096 of SEQ ID NO: 917253
ccagcagugcgcugggaaa

SEQ ID NO: 1220881 - RNA, 19 nt, Artificial Sequence
  Description of Artificial Sequence: Synthetic oligonucleotide
  Antisense strand to SEQ ID NO: 1220880
uuucccagcgcacugcugg

SEQ ID NO: 1220882 - RNA, 19 nt, Artificial Sequence
  Description of Artificial Sequence: Synthetic oligonucleotide
  Sense strand starting at position 3116 of SEQ ID NO: 917253
cgcugccaucucuuaguuu

SEQ ID NO: 1220883 - RNA, 19 nt, Artificial Sequence
  Description of Artificial Sequence: Synthetic oligonucleotide
  Antisense strand to SEQ ID NO: 1220882
aaacuaagagauggcagcg

SEQ ID NO: 1220884 - RNA, 19 nt, Artificial Sequence
  Description of Artificial Sequence: Synthetic oligonucleotide
  Sense strand starting at position 3141 of SEQ ID NO: 917253
gcgcgaagggcgguuguau

SEQ ID NO: 1220885 - RNA, 19 nt, Artificial Sequence
  Description of Artificial Sequence: Synthetic oligonucleotide
  Antisense strand to SEQ ID NO: 1220884
auacaaccgcccuucgcgc

SEQ ID NO: 1220886 - RNA, 19 nt, Artificial Sequence
  Description of Artificial Sequence: Synthetic oligonucleotide
  Sense strand starting at position 3142 of SEQ ID NO: 917253
cgcgaagggcgguuguauu

SEQ ID NO: 1220887 - RNA, 19 nt, Artificial Sequence
  Description of Artificial Sequence: Synthetic oligonucleotide
  Antisense strand to SEQ ID NO: 1220886
aauacaaccgcccuucgcg

SEQ ID NO: 1220888 - RNA, 19 nt, Artificial Sequence
  Description of Artificial Sequence: Synthetic oligonucleotide
  Sense strand starting at position 3150 of SEQ ID NO: 917253
gcgguuguauuccuggcau

SEQ ID NO: 1220889 - RNA, 19 nt, Artificial Sequence
  Description of Artificial Sequence: Synthetic oligonucleotide
  Antisense strand to SEQ ID NO: 1220888
augccaggaauacaaccgc

SEQ ID NO: 1220890 - RNA, 19 nt, Artificial Sequence
  Description of Artificial Sequence: Synthetic oligonucleotide
  Sense strand starting at position 3248 of SEQ ID NO: 917253
cuggucacacaaugguuaa

SEQ ID NO: 1220891 - RNA, 19 nt, Artificial Sequence
  Description of Artificial Sequence: Synthetic oligonucleotide
  Antisense strand to SEQ ID NO: 1220890
uuaaccauugugugaccag

SEQ ID NO: 1220892 - RNA, 19 nt, Artificial Sequence
  Description of Artificial Sequence: Synthetic oligonucleotide
  Sense strand starting at position 3251 of SEQ ID NO: 917253
gucacacaaugguuaaaca

SEQ ID NO: 1220893 - RNA, 19 nt, Artificial Sequence
  Description of Artificial Sequence: Synthetic oligonucleotide
  Antisense strand to SEQ ID NO: 1220892
uguuuaaccauugugugac

SEQ ID NO: 1220894 - RNA, 19 nt, Artificial Sequence
  Description of Artificial Sequence: Synthetic oligonucleotide
  Sense strand starting at position 3411 of SEQ ID NO: 917253
ggagacguuuacuuucgau

SEQ ID NO: 1220895 - RNA, 19 nt, Artificial Sequence
  Description of Artificial Sequence: Synthetic oligonucleotide
  Antisense strand to SEQ ID NO: 1220894
aucgaaaguaaacgucucc

SEQ ID NO: 1220896 - RNA, 19 nt, Artificial Sequence
  Description of Artificial Sequence: Synthetic oligonucleotide
  Sense strand starting at position 3575 of SEQ ID NO: 917253
uuggcaacaucuuugcaau

SEQ ID NO: 1220897 - RNA, 19 nt, Artificial Sequence
  Description of Artificial Sequence: Synthetic oligonucleotide
  Antisense strand to SEQ ID NO: 1220896
auugcaaagauguugccaa

SEQ ID NO: 1220898 - RNA, 19 nt, Artificial Sequence
  Description of Artificial Sequence: Synthetic oligonucleotide
  Sense strand starting at position 3576 of SEQ ID NO: 917253
uggcaacaucuuugcaaua

SEQ ID NO: 1220899 - RNA, 19 nt, Artificial Sequence
  Description of Artificial Sequence: Synthetic oligonucleotide
  Antisense strand to SEQ ID NO: 1220898
uauugcaaagauguugcca

SEQ ID NO: 1220900 - RNA, 19 nt, Artificial Sequence
  Description of Artificial Sequence: Synthetic oligonucleotide
  Sense strand starting at position 3577 of SEQ ID NO: 917253
ggcaacaucuuugcaauaa

SEQ ID NO: 1220901 - RNA, 19 nt, Artificial Sequence
  Description of Artificial Sequence: Synthetic oligonucleotide
  Antisense strand to SEQ ID NO: 1220900
uuauugcaaagauguugcc

SEQ ID NO: 1220902 - RNA, 19 nt, Artificial Sequence
  Description of Artificial Sequence: Synthetic oligonucleotide
  Sense strand starting at position 3710 of SEQ ID NO: 917253
uggcaucuagcaggaguaa

SEQ ID NO: 1220903 - RNA, 19 nt, Artificial Sequence
  Description of Artificial Sequence: Synthetic oligonucleotide
  Antisense strand to SEQ ID NO: 1220902
uuacuccugcuagaugcca

SEQ ID NO: 1220904 - RNA, 19 nt, Artificial Sequence
  Description of Artificial Sequence: Synthetic oligonucleotide
  Sense strand starting at position 3722 of SEQ ID NO: 917253
ggaguaaggguucaauguu

SEQ ID NO: 1220905 - RNA, 19 nt, Artificial Sequence
  Description of Artificial Sequence: Synthetic oligonucleotide
  Antisense strand to SEQ ID NO: 1220904
aacauugaacccuuacucc

SEQ ID NO: 1220906 - RNA, 19 nt, Artificial Sequence
  Description of Artificial Sequence: Synthetic oligonucleotide
  Sense strand starting at position 3771 of SEQ ID NO: 917253
aaggcugcccucugagaca

SEQ ID NO: 1220907 - RNA, 19 nt, Artificial Sequence
  Description of Artificial Sequence: Synthetic oligonucleotide
  Antisense strand to SEQ ID NO: 1220906
ugucucagagggcagccuu

SEQ ID NO: 1220908 - RNA, 19 nt, Artificial Sequence
  Description of Artificial Sequence: Synthetic oligonucleotide
  Sense strand starting at position 3871 of SEQ ID NO: 917253
ucuaauugcucucugggaa

SEQ ID NO: 1220909 - RNA, 19 nt, Artificial Sequence
  Description of Artificial Sequence: Synthetic oligonucleotide
  Antisense strand to SEQ ID NO: 1220908
uucccagagagcaauuaga

SEQ ID NO: 1220910 - RNA, 19 nt, Artificial Sequence
  Description of Artificial Sequence: Synthetic oligonucleotide
  Sense strand starting at position 3872 of SEQ ID NO: 917253
cuaauugcucucugggaaa

SEQ ID NO: 1220911 - RNA, 19 nt, Artificial Sequence
  Description of Artificial Sequence: Synthetic oligonucleotide
  Antisense strand to SEQ ID NO: 1220910
uuucccagagagcaauuag

SEQ ID NO: 1220912 - RNA, 19 nt, Artificial Sequence
  Description of Artificial Sequence: Synthetic oligonucleotide
  Sense strand starting at position 3875 of SEQ ID NO: 917253
auugcucucugggaaauuu

SEQ ID NO: 1220913 - RNA, 19 nt, Artificial Sequence
  Description of Artificial Sequence: Synthetic oligonucleotide
  Antisense strand to SEQ ID NO: 1220912
aaauuucccagagagcaau

SEQ ID NO: 1220914 - RNA, 19 nt, Artificial Sequence
  Description of Artificial Sequence: Synthetic oligonucleotide
  Sense strand starting at position 3948 of SEQ ID NO: 917254
gggcuuuccgcugggcaga

SEQ ID NO: 1220915 - RNA, 19 nt, Artificial Sequence
  Description of Artificial Sequence: Synthetic oligonucleotide
  Antisense strand to SEQ ID NO: 1220914
ucugcccagcggaaagccc

SEQ ID NO: 1220916 - RNA, 19 nt, Artificial Sequence
  Description of Artificial Sequence: Synthetic oligonucleotide
  Sense strand starting at position 324 of SEQ ID NO: 917254
augacaaucugaguauaug

SEQ ID NO: 1220917 - RNA, 19 nt, Artificial Sequence
  Description of Artificial Sequence: Synthetic oligonucleotide
  Antisense strand to SEQ ID NO: 1220916
cauauacucagauugucau

SEQ ID NO: 1220918 - RNA, 19 nt, Artificial Sequence
  Description of Artificial Sequence: Synthetic oligonucleotide
  Sense strand starting at position 658 of SEQ ID NO: 917254
ucacacugaguuuggaaau

SEQ ID NO: 1220919 - RNA, 19 nt, Artificial Sequence
  Description of Artificial Sequence: Synthetic oligonucleotide
  Antisense strand to SEQ ID NO: 1220918
auuuccaaacucaguguga

SEQ ID NO: 1220920 - RNA, 19 nt, Artificial Sequence
  Description of Artificial Sequence: Synthetic oligonucleotide
  Sense strand starting at position 772 of SEQ ID NO: 917254
aacacuauucuggguauga

SEQ ID NO: 1220921 - RNA, 19 nt, Artificial Sequence
  Description of Artificial Sequence: Synthetic oligonucleotide
  Antisense strand to SEQ ID NO: 1220920
ucauacccagaauaguguu

SEQ ID NO: 1220922 - RNA, 19 nt, Artificial Sequence
  Description of Artificial Sequence: Synthetic oligonucleotide
  Sense strand starting at position 773 of SEQ ID NO: 917254
acacuauucuggguaugac

SEQ ID NO: 1220923 - RNA, 19 nt, Artificial Sequence
  Description of Artificial Sequence: Synthetic oligonucleotide
  Antisense strand to SEQ ID NO: 1220922
gucauacccagaauagugu

SEQ ID NO: 1220924 - RNA, 19 nt, Artificial Sequence
  Description of Artificial Sequence: Synthetic oligonucleotide
  Sense strand starting at position 844 of SEQ ID NO: 917254
gguaaccaacuuugaacau

SEQ ID NO: 1220925 - RNA, 19 nt, Artificial Sequence
  Description of Artificial Sequence: Synthetic oligonucleotide
  Antisense strand to SEQ ID NO: 1220924
auguucaaaguugguuacc

SEQ ID NO: 1220926 - RNA, 19 nt, Artificial Sequence
  Description of Artificial Sequence: Synthetic oligonucleotide
  Sense strand starting at position 892 of SEQ ID NO: 917254
aagugcuuugaagaaugua

SEQ ID NO: 1220927 - RNA, 19 nt, Artificial Sequence
  Description of Artificial Sequence: Synthetic oligonucleotide
  Antisense strand to SEQ ID NO: 1220926
uacauucuucaaagcacuu

SEQ ID NO: 1220928 - RNA, 19 nt, Artificial Sequence
  Description of Artificial Sequence: Synthetic oligonucleotide
  Sense strand starting at position 895 of SEQ ID NO: 917254
ugcuuugaagaauguaaua

SEQ ID NO: 1220929 - RNA, 19 nt, Artificial Sequence
  Description of Artificial Sequence: Synthetic oligonucleotide
  Antisense strand to SEQ ID NO: 1220928
uauuacauucuucaaagca

SEQ ID NO: 1220930 - RNA, 19 nt, Artificial Sequence
  Description of Artificial Sequence: Synthetic oligonucleotide
  Sense strand starting at position 914 of SEQ ID NO: 917254
cacaucugucguguuagca

SEQ ID NO: 1220931 - RNA, 19 nt, Artificial Sequence
  Description of Artificial Sequence: Synthetic oligonucleotide
  Antisense strand to SEQ ID NO: 1220930
ugcuaacacgacagaugug

SEQ ID NO: 1220932 - RNA, 19 nt, Artificial Sequence
  Description of Artificial Sequence: Synthetic oligonucleotide
  Sense strand starting at position 982 of SEQ ID NO: 917254
agauuuaauugacgagaac

SEQ ID NO: 1220933 - RNA, 19 nt, Artificial Sequence
  Description of Artificial Sequence: Synthetic oligonucleotide
  Antisense strand to SEQ ID NO: 1220932
guucucgucaauuaaaucu

SEQ ID NO: 1220934 - RNA, 19 nt, Artificial Sequence
  Description of Artificial Sequence: Synthetic oligonucleotide
  Sense strand starting at position 994 of SEQ ID NO: 917254
cgagaacucagccauguga

SEQ ID NO: 1220935 - RNA, 19 nt, Artificial Sequence
  Description of Artificial Sequence: Synthetic oligonucleotide
  Antisense strand to SEQ ID NO: 1220934
ucacauggcugaguucucg

SEQ ID NO: 1220936 - RNA, 19 nt, Artificial Sequence
  Description of Artificial Sequence: Synthetic oligonucleotide
  Sense strand starting at position 996 of SEQ ID NO: 917254
agaacucagccaugugaua

SEQ ID NO: 1220937 - RNA, 19 nt, Artificial Sequence
  Description of Artificial Sequence: Synthetic oligonucleotide
  Antisense strand to SEQ ID NO: 1220936
uaucacauggcugaguucu

SEQ ID NO: 1220938 - RNA, 19 nt, Artificial Sequence
  Description of Artificial Sequence: Synthetic oligonucleotide
  Sense strand starting at position 1201 of SEQ ID NO: 917254
cguuuauugacggccaguu

SEQ ID NO: 1220939 - RNA, 19 nt, Artificial Sequence
  Description of Artificial Sequence: Synthetic oligonucleotide
  Antisense strand to SEQ ID NO: 1220938
aacuggccgucaauaaacg

SEQ ID NO: 1220940 - RNA, 19 nt, Artificial Sequence
  Description of Artificial Sequence: Synthetic oligonucleotide
  Sense strand starting at position 1521 of SEQ ID NO: 917254
ccaggaaagccgugagaaa

SEQ ID NO: 1220941 - RNA, 19 nt, Artificial Sequence
  Description of Artificial Sequence: Synthetic oligonucleotide
  Antisense strand to SEQ ID NO: 1220940
uuucucacggcuuuccugg

SEQ ID NO: 1220942 - RNA, 19 nt, Artificial Sequence
  Description of Artificial Sequence: Synthetic oligonucleotide
  Sense strand starting at position 1541 of SEQ ID NO: 917254
agaucuaguccaggcagau

SEQ ID NO: 1220943 - RNA, 19 nt, Artificial Sequence
  Description of Artificial Sequence: Synthetic oligonucleotide
  Antisense strand to SEQ ID NO: 1220942
aucugccuggacuagaucu

SEQ ID NO: 1220944 - RNA, 19 nt, Artificial Sequence
  Description of Artificial Sequence: Synthetic oligonucleotide
  Sense strand starting at position 1562 of SEQ ID NO: 917254
agaguaguaacuggcugaa

SEQ ID NO: 1220945 - RNA, 19 nt, Artificial Sequence
  Description of Artificial Sequence: Synthetic oligonucleotide
  Antisense strand to SEQ ID NO: 1220944
uucagccaguuacuacucu

SEQ ID NO: 1220946 - RNA, 19 nt, Artificial Sequence
  Description of Artificial Sequence: Synthetic oligonucleotide
  Sense strand starting at position 1565 of SEQ ID NO: 917254
guaguaacuggcugaaaga

SEQ ID NO: 1220947 - RNA, 19 nt, Artificial Sequence
  Description of Artificial Sequence: Synthetic oligonucleotide
  Antisense strand to SEQ ID NO: 1220946
ucuuucagccaguuacuac

SEQ ID NO: 1220948 - RNA, 19 nt, Artificial Sequence
  Description of Artificial Sequence: Synthetic oligonucleotide
  Sense strand starting at position 1711 of SEQ ID NO: 917254
ggcucaaguuacuuaaacu

SEQ ID NO: 1220949 - RNA, 19 nt, Artificial Sequence
  Description of Artificial Sequence: Synthetic oligonucleotide
  Antisense strand to SEQ ID NO: 1220948
aguuuaaguaacuugagcc

SEQ ID NO: 1220950 - RNA, 19 nt, Artificial Sequence
  Description of Artificial Sequence: Synthetic oligonucleotide
  Sense strand starting at position 1726 of SEQ ID NO: 917254
aacuauacuuguguuagga

SEQ ID NO: 1220951 - RNA, 19 nt, Artificial Sequence
  Description of Artificial Sequence: Synthetic oligonucleotide
  Antisense strand to SEQ ID NO: 1220950
uccuaacacaaguauaguu

SEQ ID NO: 1220952 - RNA, 19 nt, Artificial Sequence
  Description of Artificial Sequence: Synthetic oligonucleotide
  Sense strand starting at position 1766 of SEQ ID NO: 917254
cgaacauuaccuugacuag

SEQ ID NO: 1220953 - RNA, 19 nt, Artificial Sequence
  Description of Artificial Sequence: Synthetic oligonucleotide
  Antisense strand to SEQ ID NO: 1220952
cuagucaagguaauguucg

SEQ ID NO: 1220954 - RNA, 19 nt, Artificial Sequence
  Description of Artificial Sequence: Synthetic oligonucleotide
  Sense strand starting at position 2109 of SEQ ID NO: 917254
gaugucugcaucugaggga

SEQ ID NO: 1220955 - RNA, 19 nt, Artificial Sequence
  Description of Artificial Sequence: Synthetic oligonucleotide
  Antisense strand to SEQ ID NO: 1220954
ucccucagaugcagacauc

SEQ ID NO: 1220956 - RNA, 19 nt, Artificial Sequence
  Description of Artificial Sequence: Synthetic oligonucleotide
  Sense strand starting at position 2113 of SEQ ID NO: 917254
ucugcaucugagggauuaa

SEQ ID NO: 1220957 - RNA, 19 nt, Artificial Sequence
  Description of Artificial Sequence: Synthetic oligonucleotide
  Antisense strand to SEQ ID NO: 1220956
uuaaucccucagaugcaga

SEQ ID NO: 1220958 - RNA, 19 nt, Artificial Sequence
  Description of Artificial Sequence: Synthetic oligonucleotide
  Sense strand starting at position 2153 of SEQ ID NO: 917254
aaacguuagcaauguauuu

SEQ ID NO: 1220959 - RNA, 19 nt, Artificial Sequence
  Description of Artificial Sequence: Synthetic oligonucleotide
  Antisense strand to SEQ ID NO: 1220958
aaauacauugcuaacguuu

SEQ ID NO: 1220960 - RNA, 19 nt, Artificial Sequence
  Description of Artificial Sequence: Synthetic oligonucleotide
  Sense strand starting at position 2173 of SEQ ID NO: 917254
aagacauggucagcauaac

SEQ ID NO: 1220961 - RNA, 19 nt, Artificial Sequence
  Description of Artificial Sequence: Synthetic oligonucleotide
  Antisense strand to SEQ ID NO: 1220960
guuaugcugaccaugucuu

SEQ ID NO: 1220962 - RNA, 19 nt, Artificial Sequence
  Description of Artificial Sequence: Synthetic oligonucleotide
  Sense strand starting at position 2174 of SEQ ID NO: 917254
agacauggucagcauaacu

SEQ ID NO: 1220963 - RNA, 19 nt, Artificial Sequence
  Description of Artificial Sequence: Synthetic oligonucleotide
  Antisense strand to SEQ ID NO: 1220962
aguuaugcugaccaugucu

SEQ ID NO: 1220964 - RNA, 19 nt, Artificial Sequence
  Description of Artificial Sequence: Synthetic oligonucleotide
  Sense strand starting at position 2367 of SEQ ID NO: 917254
uagccuuggguauauugaa

SEQ ID NO: 1220965 - RNA, 19 nt, Artificial Sequence
  Description of Artificial Sequence: Synthetic oligonucleotide
  Antisense strand to SEQ ID NO: 1220964
uucaauauacccaaggcua

SEQ ID NO: 1220966 - RNA, 19 nt, Artificial Sequence
  Description of Artificial Sequence: Synthetic oligonucleotide
  Sense strand starting at position 2445 of SEQ ID NO: 917254
agcuguucugaugaagcaa

SEQ ID NO: 1220967 - RNA, 19 nt, Artificial Sequence
  Description of Artificial Sequence: Synthetic oligonucleotide
  Antisense strand to SEQ ID NO: 1220966
uugcuucaucagaacagcu

SEQ ID NO: 1220968 - RNA, 19 nt, Artificial Sequence
  Description of Artificial Sequence: Synthetic oligonucleotide
  Sense strand starting at position 2487 of SEQ ID NO: 917254
cccggaagucuguaacgaa

SEQ ID NO: 1220969 - RNA, 19 nt, Artificial Sequence
  Description of Artificial Sequence: Synthetic oligonucleotide
  Antisense strand to SEQ ID NO: 1220968
uucguuacagacuuccggg

SEQ ID NO: 1220970 - RNA, 19 nt, Artificial Sequence
  Description of Artificial Sequence: Synthetic oligonucleotide
  Sense strand starting at position 2571 of SEQ ID NO: 917254
uugccucuagaauaaaguu

SEQ ID NO: 1220971 - RNA, 19 nt, Artificial Sequence
  Description of Artificial Sequence: Synthetic oligonucleotide
  Antisense strand to SEQ ID NO: 1220970
aacuuuauucuagaggcaa

SEQ ID NO: 1220972 - RNA, 19 nt, Artificial Sequence
  Description of Artificial Sequence: Synthetic oligonucleotide
  Sense strand starting at position 2702 of SEQ ID NO: 917254
gaaucuucgucggucauuu

SEQ ID NO: 1220973 - RNA, 19 nt, Artificial Sequence
  Description of Artificial Sequence: Synthetic oligonucleotide
  Antisense strand to SEQ ID NO: 1220972
aaaugaccgacgaagauuc

SEQ ID NO: 1220974 - RNA, 19 nt, Artificial Sequence
  Description of Artificial Sequence: Synthetic oligonucleotide
  Sense strand starting at position 2706 of SEQ ID NO: 917254
cuucgucggucauuucaga

SEQ ID NO: 1220975 - RNA, 19 nt, Artificial Sequence
  Description of Artificial Sequence: Synthetic oligonucleotide
  Antisense strand to SEQ ID NO: 1220974
ucugaaaugaccgacgaag

SEQ ID NO: 1220976 - RNA, 19 nt, Artificial Sequence
  Description of Artificial Sequence: Synthetic oligonucleotide
  Sense strand starting at position 2838 of SEQ ID NO: 917254
ugucacuuccuaugagauc

SEQ ID NO: 1220977 - RNA, 19 nt, Artificial Sequence
  Description of Artificial Sequence: Synthetic oligonucleotide
  Antisense strand to SEQ ID NO: 1220976
gaucucauaggaagugaca

SEQ ID NO: 1220978 - RNA, 19 nt, Artificial Sequence
  Description of Artificial Sequence: Synthetic oligonucleotide
  Sense strand starting at position 2951 of SEQ ID NO: 917254
cuuugcuuuccagacaaug

SEQ ID NO: 1220979 - RNA, 19 nt, Artificial Sequence
  Description of Artificial Sequence: Synthetic oligonucleotide
  Antisense strand to SEQ ID NO: 1220978
cauugucuggaaagcaaag

SEQ ID NO: 1220980 - RNA, 19 nt, Artificial Sequence
  Description of Artificial Sequence: Synthetic oligonucleotide
  Sense strand starting at position 2985 of SEQ ID NO: 917254
gaaagagcuuuauugaggu

SEQ ID NO: 1220981 - RNA, 19 nt, Artificial Sequence
  Description of Artificial Sequence: Synthetic oligonucleotide
  Antisense strand to SEQ ID NO: 1220980
accucaauaaagcucuuuc

SEQ ID NO: 1220982 - RNA, 19 nt, Artificial Sequence
  Description of Artificial Sequence: Synthetic oligonucleotide
  Sense strand starting at position 3087 of SEQ ID NO: 917254
guaggcuuugggugaaaga

SEQ ID NO: 1220983 - RNA, 19 nt, Artificial Sequence
  Description of Artificial Sequence: Synthetic oligonucleotide
  Antisense strand to SEQ ID NO: 1220982
ucuuucacccaaagccuac

SEQ ID NO: 1220984 - RNA, 19 nt, Artificial Sequence
  Description of Artificial Sequence: Synthetic oligonucleotide
  Sense strand starting at position 3100 of SEQ ID NO: 917254
gaaagaacauucgcugaag

SEQ ID NO: 1220985 - RNA, 19 nt, Artificial Sequence
  Description of Artificial Sequence: Synthetic oligonucleotide
  Antisense strand to SEQ ID NO: 1220984
cuucagcgaauguucuuuc

SEQ ID NO: 1220986 - RNA, 19 nt, Artificial Sequence
  Description of Artificial Sequence: Synthetic oligonucleotide
  Sense strand starting at position 3102 of SEQ ID NO: 917254
aagaacauucgcugaagag

SEQ ID NO: 1220987 - RNA, 19 nt, Artificial Sequence
  Description of Artificial Sequence: Synthetic oligonucleotide
  Antisense strand to SEQ ID NO: 1220986
cucuucagcgaauguucuu

SEQ ID NO: 1220988 - RNA, 19 nt, Artificial Sequence
  Description of Artificial Sequence: Synthetic oligonucleotide
  Sense strand starting at position 3283 of SEQ ID NO: 917254
agaccaggaguguguugaa

SEQ ID NO: 1220989 - RNA, 19 nt, Artificial Sequence
  Description of Artificial Sequence: Synthetic oligonucleotide
  Antisense strand to SEQ ID NO: 1220988
uucaacacacuccuggucu

SEQ ID NO: 1220990 - RNA, 19 nt, Artificial Sequence
  Description of Artificial Sequence: Synthetic oligonucleotide
  Sense strand starting at position 3288 of SEQ ID NO: 917254
aggaguguguugaagauga

SEQ ID NO: 1220991 - RNA, 19 nt, Artificial Sequence
  Description of Artificial Sequence: Synthetic oligonucleotide
  Antisense strand to SEQ ID NO: 1220990
ucaucuucaacacacuccu

SEQ ID NO: 1220992 - RNA, 19 nt, Artificial Sequence
  Description of Artificial Sequence: Synthetic oligonucleotide
  Sense strand starting at position 3293 of SEQ ID NO: 917254
uguguugaagaugaaaguu

SEQ ID NO: 1220993 - RNA, 19 nt, Artificial Sequence
  Description of Artificial Sequence: Synthetic oligonucleotide
  Antisense strand to SEQ ID NO: 1220992
aacuuucaucuucaacaca

SEQ ID NO: 1220994 - RNA, 19 nt, Artificial Sequence
  Description of Artificial Sequence: Synthetic oligonucleotide
  Sense strand starting at position 3701 of SEQ ID NO: 917255
uauaaagaguaagcagauu

SEQ ID NO: 1220995 - RNA, 19 nt, Artificial Sequence
  Description of Artificial Sequence: Synthetic oligonucleotide
  Antisense strand to SEQ ID NO: 1220994
aaucugcuuacucuuuaua

SEQ ID NO: 1220996 - RNA, 19 nt, Artificial Sequence
  Description of Artificial Sequence: Synthetic oligonucleotide
  Sense strand starting at position 82 of SEQ ID NO: 917255
accaguuuggugcaucaaa

SEQ ID NO: 1220997 - RNA, 19 nt, Artificial Sequence
  Description of Artificial Sequence: Synthetic oligonucleotide
  Antisense strand to SEQ ID NO: 1220996
uuugaugcaccaaacuggu

SEQ ID NO: 1220998 - RNA, 19 nt, Artificial Sequence
  Description of Artificial Sequence: Synthetic oligonucleotide
  Sense strand starting at position 142 of SEQ ID NO: 917255
cgaggccuccaugagagua

SEQ ID NO: 1220999 - RNA, 19 nt, Artificial Sequence
  Description of Artificial Sequence: Synthetic oligonucleotide
  Antisense strand to SEQ ID NO: 1220998
uacucucauggaggccucg

SEQ ID NO: 1221000 - RNA, 19 nt, Artificial Sequence
  Description of Artificial Sequence: Synthetic oligonucleotide
  Sense strand starting at position 152 of SEQ ID NO: 917255
augagaguacuaggagcaa

SEQ ID NO: 1221001 - RNA, 19 nt, Artificial Sequence
  Description of Artificial Sequence: Synthetic oligonucleotide
  Antisense strand to SEQ ID NO: 1221000
uugcuccuaguacucucau

SEQ ID NO: 1221002 - RNA, 19 nt, Artificial Sequence
  Description of Artificial Sequence: Synthetic oligonucleotide
  Sense strand starting at position 281 of SEQ ID NO: 917255
gcaugagagaucugggaca

SEQ ID NO: 1221003 - RNA, 19 nt, Artificial Sequence
  Description of Artificial Sequence: Synthetic oligonucleotide
  Antisense strand to SEQ ID NO: 1221002
ugucccagaucucucaugc

SEQ ID NO: 1221004 - RNA, 19 nt, Artificial Sequence
  Description of Artificial Sequence: Synthetic oligonucleotide
  Sense strand starting at position 399 of SEQ ID NO: 917255
cguggaucuacugguaaua

SEQ ID NO: 1221005 - RNA, 19 nt, Artificial Sequence
  Description of Artificial Sequence: Synthetic oligonucleotide
  Antisense strand to SEQ ID NO: 1221004
uauuaccaguagauccacg

SEQ ID NO: 1221006 - RNA, 19 nt, Artificial Sequence
  Description of Artificial Sequence: Synthetic oligonucleotide
  Sense strand starting at position 632 of SEQ ID NO: 917255
uccagugcuggagagguua

SEQ ID NO: 1221007 - RNA, 19 nt, Artificial Sequence
  Description of Artificial Sequence: Synthetic oligonucleotide
  Antisense strand to SEQ ID NO: 1221006
uaaccucuccagcacugga

SEQ ID NO: 1221008 - RNA, 19 nt, Artificial Sequence
  Description of Artificial Sequence: Synthetic oligonucleotide
  Sense strand starting at position 730 of SEQ ID NO: 917255
agcccagugguuuaagaaa

SEQ ID NO: 1221009 - RNA, 19 nt, Artificial Sequence
  Description of Artificial Sequence: Synthetic oligonucleotide
  Antisense strand to SEQ ID NO: 1221008
uuucuuaaaccacugggcu

SEQ ID NO: 1221010 - RNA, 19 nt, Artificial Sequence
  Description of Artificial Sequence: Synthetic oligonucleotide
  Sense strand starting at position 805 of SEQ ID NO: 917255
ugggcagauuccuugaccu

SEQ ID NO: 1221011 - RNA, 19 nt, Artificial Sequence
  Description of Artificial Sequence: Synthetic oligonucleotide
  Antisense strand to SEQ ID NO: 1221010
aggucaaggaaucugccca

SEQ ID NO: 1221012 - RNA, 19 nt, Artificial Sequence
  Description of Artificial Sequence: Synthetic oligonucleotide
  Sense strand starting at position 872 of SEQ ID NO: 917255
auaucaugguaucugacau

SEQ ID NO: 1221013 - RNA, 19 nt, Artificial Sequence
  Description of Artificial Sequence: Synthetic oligonucleotide
  Antisense strand to SEQ ID NO: 1221012
augucagauaccaugauau

SEQ ID NO: 1221014 - RNA, 19 nt, Artificial Sequence
  Description of Artificial Sequence: Synthetic oligonucleotide
  Sense strand starting at position 949 of SEQ ID NO: 917255
uggugaucuccgcacccaa

SEQ ID NO: 1221015 - RNA, 19 nt, Artificial Sequence
  Description of Artificial Sequence: Synthetic oligonucleotide
  Antisense strand to SEQ ID NO: 1221014
uugggugcggagaucacca

SEQ ID NO: 1221016 - RNA, 19 nt, Artificial Sequence
  Description of Artificial Sequence: Synthetic oligonucleotide
  Sense strand starting at position 1032 of SEQ ID NO: 917255
aaaugucugcauggcuaga

SEQ ID NO: 1221017 - RNA, 19 nt, Artificial Sequence
  Description of Artificial Sequence: Synthetic oligonucleotide
  Antisense strand to SEQ ID NO: 1221016
ucuagccaugcagacauuu

SEQ ID NO: 1221018 - RNA, 19 nt, Artificial Sequence
  Description of Artificial Sequence: Synthetic oligonucleotide
  Sense strand starting at position 1381 of SEQ ID NO: 917255
aucaaugacugcuuaguaa

SEQ ID NO: 1221019 - RNA, 19 nt, Artificial Sequence
  Description of Artificial Sequence: Synthetic oligonucleotide
  Antisense strand to SEQ ID NO: 1221018
uuacuaagcagucauugau

SEQ ID NO: 1221020 - RNA, 19 nt, Artificial Sequence
  Description of Artificial Sequence: Synthetic oligonucleotide
  Sense strand starting at position 1418 of SEQ ID NO: 917255
ggauaucaaggucgcagaa

SEQ ID NO: 1221021 - RNA, 19 nt, Artificial Sequence
  Description of Artificial Sequence: Synthetic oligonucleotide
  Antisense strand to SEQ ID NO: 1221020
uucugcgaccuugauaucc

SEQ ID NO: 1221022 - RNA, 19 nt, Artificial Sequence
  Description of Artificial Sequence: Synthetic oligonucleotide
  Sense strand starting at position 1479 of SEQ ID NO: 917255
ccaaguccuggaugucaaa

SEQ ID NO: 1221023 - RNA, 19 nt, Artificial Sequence
  Description of Artificial Sequence: Synthetic oligonucleotide
  Antisense strand to SEQ ID NO: 1221022
uuugacauccaggacuugg

SEQ ID NO: 1221024 - RNA, 19 nt, Artificial Sequence
  Description of Artificial Sequence: Synthetic oligonucleotide
  Sense strand starting at position 2037 of SEQ ID NO: 917255
cccugucagcccuggauga

SEQ ID NO: 1221025 - RNA, 19 nt, Artificial Sequence
  Description of Artificial Sequence: Synthetic oligonucleotide
  Antisense strand to SEQ ID NO: 1221024
ucauccagggcugacaggg

SEQ ID NO: 1221026 - RNA, 19 nt, Artificial Sequence
  Description of Artificial Sequence: Synthetic oligonucleotide
  Sense strand starting at position 2039 of SEQ ID NO: 917255
cugucagcccuggaugaga

SEQ ID NO: 1221027 - RNA, 19 nt, Artificial Sequence
  Description of Artificial Sequence: Synthetic oligonucleotide
  Antisense strand to SEQ ID NO: 1221026
ucucauccagggcugacag

SEQ ID NO: 1221028 - RNA, 19 nt, Artificial Sequence
  Description of Artificial Sequence: Synthetic oligonucleotide
  Sense strand starting at position 2278 of SEQ ID NO: 917255
agagguuccuaagcucaga

SEQ ID NO: 1221029 - RNA, 19 nt, Artificial Sequence
  Description of Artificial Sequence: Synthetic oligonucleotide
  Antisense strand to SEQ ID NO: 1221028
ucugagcuuaggaaccucu

SEQ ID NO: 1221030 - RNA, 19 nt, Artificial Sequence
  Description of Artificial Sequence: Synthetic oligonucleotide
  Sense strand starting at position 2320 of SEQ ID NO: 917255
ucccgaagccuagaggaua

SEQ ID NO: 1221031 - RNA, 19 nt, Artificial Sequence
  Description of Artificial Sequence: Synthetic oligonucleotide
  Antisense strand to SEQ ID NO: 1221030
uauccucuaggcuucggga

SEQ ID NO: 1221032 - RNA, 19 nt, Artificial Sequence
  Description of Artificial Sequence: Synthetic oligonucleotide
  Sense strand starting at position 2394 of SEQ ID NO: 917255
ggaaacuuccuaggugauu

SEQ ID NO: 1221033 - RNA, 19 nt, Artificial Sequence
  Description of Artificial Sequence: Synthetic oligonucleotide
  Antisense strand to SEQ ID NO: 1221032
aaucaccuaggaaguuucc

SEQ ID NO: 1221034 - RNA, 19 nt, Artificial Sequence
  Description of Artificial Sequence: Synthetic oligonucleotide
  Sense strand starting at position 2405 of SEQ ID NO: 917255
aggugauuucaaugcgcag

SEQ ID NO: 1221035 - RNA, 19 nt, Artificial Sequence
  Description of Artificial Sequence: Synthetic oligonucleotide
  Antisense strand to SEQ ID NO: 1221034
cugcgcauugaaaucaccu

SEQ ID NO: 1221036 - RNA, 19 nt, Artificial Sequence
  Description of Artificial Sequence: Synthetic oligonucleotide
  Sense strand starting at position 2627 of SEQ ID NO: 917255
gcccuagagccuugaugac

SEQ ID NO: 1221037 - RNA, 19 nt, Artificial Sequence
  Description of Artificial Sequence: Synthetic oligonucleotide
  Antisense strand to SEQ ID NO: 1221036
gucaucaaggcucuagggc

SEQ ID NO: 1221038 - RNA, 19 nt, Artificial Sequence
  Description of Artificial Sequence: Synthetic oligonucleotide
  Sense strand starting at position 2713 of SEQ ID NO: 917255
gaaugaauaugaguaucuu

SEQ ID NO: 1221039 - RNA, 19 nt, Artificial Sequence
  Description of Artificial Sequence: Synthetic oligonucleotide
  Antisense strand to SEQ ID NO: 1221038
aagauacucauauucauuc

SEQ ID NO: 1221040 - RNA, 19 nt, Artificial Sequence
  Description of Artificial Sequence: Synthetic oligonucleotide
  Sense strand starting at position 2717 of SEQ ID NO: 917255
gaauaugaguaucuuaguu

SEQ ID NO: 1221041 - RNA, 19 nt, Artificial Sequence
  Description of Artificial Sequence: Synthetic oligonucleotide
  Antisense strand to SEQ ID NO: 1221040
aacuaagauacucauauuc

SEQ ID NO: 1221042 - RNA, 19 nt, Artificial Sequence
  Description of Artificial Sequence: Synthetic oligonucleotide
  Sense strand starting at position 2721 of SEQ ID NO: 917255
augaguaucuuaguuuaug

SEQ ID NO: 1221043 - RNA, 19 nt, Artificial Sequence
  Description of Artificial Sequence: Synthetic oligonucleotide
  Antisense strand to SEQ ID NO: 1221042
cauaaacuaagauacucau

SEQ ID NO: 1221044 - RNA, 19 nt, Artificial Sequence
  Description of Artificial Sequence: Synthetic oligonucleotide
  Sense strand starting at position 2722 of SEQ ID NO: 917255
ugaguaucuuaguuuauga

SEQ ID NO: 1221045 - RNA, 19 nt, Artificial Sequence
  Description of Artificial Sequence: Synthetic oligonucleotide
  Antisense strand to SEQ ID NO: 1221044
ucauaaacuaagauacuca

SEQ ID NO: 1221046 - RNA, 19 nt, Artificial Sequence
  Description of Artificial Sequence: Synthetic oligonucleotide
  Sense strand starting at position 2797 of SEQ ID NO: 917255
ggauguucgccagauccau

SEQ ID NO: 1221047 - RNA, 19 nt, Artificial Sequence
  Description of Artificial Sequence: Synthetic oligonucleotide
  Antisense strand to SEQ ID NO: 1221046
auggaucuggcgaacaucc

SEQ ID NO: 1221048 - RNA, 19 nt, Artificial Sequence
  Description of Artificial Sequence: Synthetic oligonucleotide
  Sense strand starting at position 2853 of SEQ ID NO: 917255
cuugucggaaugugaugaa

SEQ ID NO: 1221049 - RNA, 19 nt, Artificial Sequence
  Description of Artificial Sequence: Synthetic oligonucleotide
  Antisense strand to SEQ ID NO: 1221048
uucaucacauuccgacaag

SEQ ID NO: 1221050 - RNA, 19 nt, Artificial Sequence
  Description of Artificial Sequence: Synthetic oligonucleotide
  Sense strand starting at position 2888 of SEQ ID NO: 917255
agugcaguucuggaaacaa

SEQ ID NO: 1221051 - RNA, 19 nt, Artificial Sequence
  Description of Artificial Sequence: Synthetic oligonucleotide
  Antisense strand to SEQ ID NO: 1221050
uuguuuccagaacugcacu

SEQ ID NO: 1221052 - RNA, 19 nt, Artificial Sequence
  Description of Artificial Sequence: Synthetic oligonucleotide
  Sense strand starting at position 2924 of SEQ ID NO: 917255
gugcuuaugaacugaguau

SEQ ID NO: 1221053 - RNA, 19 nt, Artificial Sequence
  Description of Artificial Sequence: Synthetic oligonucleotide
  Antisense strand to SEQ ID NO: 1221052
auacucaguucauaagcac

SEQ ID NO: 1221054 - RNA, 19 nt, Artificial Sequence
  Description of Artificial Sequence: Synthetic oligonucleotide
  Sense strand starting at position 2931 of SEQ ID NO: 917255
ugaacugaguauuccaguu

SEQ ID NO: 1221055 - RNA, 19 nt, Artificial Sequence
  Description of Artificial Sequence: Synthetic oligonucleotide
  Antisense strand to SEQ ID NO: 1221054
aacuggaauacucaguuca

SEQ ID NO: 1221056 - RNA, 19 nt, Artificial Sequence
  Description of Artificial Sequence: Synthetic oligonucleotide
  Sense strand starting at position 2968 of SEQ ID NO: 917255
ucagucugcucaucuugaa

SEQ ID NO: 1221057 - RNA, 19 nt, Artificial Sequence
  Description of Artificial Sequence: Synthetic oligonucleotide
  Antisense strand to SEQ ID NO: 1221056
uucaagaugagcagacuga

SEQ ID NO: 1221058 - RNA, 19 nt, Artificial Sequence
  Description of Artificial Sequence: Synthetic oligonucleotide
  Sense strand starting at position 3099 of SEQ ID NO: 917255
uguccauggaugggagaau

SEQ ID NO: 1221059 - RNA, 19 nt, Artificial Sequence
  Description of Artificial Sequence: Synthetic oligonucleotide
  Antisense strand to SEQ ID NO: 1221058
auucucccauccauggaca

SEQ ID NO: 1221060 - RNA, 19 nt, Artificial Sequence
  Description of Artificial Sequence: Synthetic oligonucleotide
  Sense strand starting at position 3218 of SEQ ID NO: 917255
cacgguaaaucucugagau

SEQ ID NO: 1221061 - RNA, 19 nt, Artificial Sequence
  Description of Artificial Sequence: Synthetic oligonucleotide
  Antisense strand to SEQ ID NO: 1221060
aucucagagauuuaccgug

SEQ ID NO: 1221062 - RNA, 19 nt, Artificial Sequence
  Description of Artificial Sequence: Synthetic oligonucleotide
  Sense strand starting at position 3219 of SEQ ID NO: 917255
acgguaaaucucugagauc

SEQ ID NO: 1221063 - RNA, 19 nt, Artificial Sequence
  Description of Artificial Sequence: Synthetic oligonucleotide
  Antisense strand to SEQ ID NO: 1221062
gaucucagagauuuaccgu

SEQ ID NO: 1221064 - RNA, 19 nt, Artificial Sequence
  Description of Artificial Sequence: Synthetic oligonucleotide
  Sense strand starting at position 3275 of SEQ ID NO: 917255
gcagcauagccauacucau

SEQ ID NO: 1221065 - RNA, 19 nt, Artificial Sequence
  Description of Artificial Sequence: Synthetic oligonucleotide
  Antisense strand to SEQ ID NO: 1221064
augaguauggcuaugcugc

SEQ ID NO: 1221066 - RNA, 19 nt, Artificial Sequence
  Description of Artificial Sequence: Synthetic oligonucleotide
  Sense strand starting at position 3474 of SEQ ID NO: 917255
cucuuugaguuucuuaucu

SEQ ID NO: 1221067 - RNA, 19 nt, Artificial Sequence
  Description of Artificial Sequence: Synthetic oligonucleotide
  Antisense strand to SEQ ID NO: 1221066
agauaagaaacucaaagag

SEQ ID NO: 1221068 - RNA, 19 nt, Artificial Sequence
  Description of Artificial Sequence: Synthetic oligonucleotide
  Sense strand starting at position 3493 of SEQ ID NO: 917255
uuaaacugagacuguuaau

SEQ ID NO: 1221069 - RNA, 19 nt, Artificial Sequence
  Description of Artificial Sequence: Synthetic oligonucleotide
  Antisense strand to SEQ ID NO: 1221068
auuaacagucucaguuuaa

SEQ ID NO: 1221070 - RNA, 19 nt, Artificial Sequence
  Description of Artificial Sequence: Synthetic oligonucleotide
  Sense strand starting at position 3550 of SEQ ID NO: 917255
ucuauuaaccaauaguugu

SEQ ID NO: 1221071 - RNA, 19 nt, Artificial Sequence
  Description of Artificial Sequence: Synthetic oligonucleotide
  Antisense strand to SEQ ID NO: 1221070
acaacuauugguuaauaga

SEQ ID NO: 1221072 - RNA, 19 nt, Artificial Sequence
  Description of Artificial Sequence: Synthetic oligonucleotide
  Sense strand starting at position 3659 of SEQ ID NO: 917255
ccaggucacucuguauacu

SEQ ID NO: 1221073 - RNA, 19 nt, Artificial Sequence
  Description of Artificial Sequence: Synthetic oligonucleotide
  Antisense strand to SEQ ID NO: 1221072
aguauacagagugaccugg

SEQ ID NO: 1221074 - RNA, 19 nt, Artificial Sequence
  Description of Artificial Sequence: Synthetic oligonucleotide
  Sense strand starting at position 3662 of SEQ ID NO: 917256
ggucacucuguauacucaa

SEQ ID NO: 1221075 - RNA, 19 nt, Artificial Sequence
  Description of Artificial Sequence: Synthetic oligonucleotide
  Antisense strand to SEQ ID NO: 1221074
uugaguauacagagugacc

SEQ ID NO: 1221076 - RNA, 19 nt, Artificial Sequence
  Description of Artificial Sequence: Synthetic oligonucleotide
  Sense strand starting at position 31 of SEQ ID NO: 917256
ugcucugaaugaguaucua

SEQ ID NO: 1221077 - RNA, 19 nt, Artificial Sequence
  Description of Artificial Sequence: Synthetic oligonucleotide
  Antisense strand to SEQ ID NO: 1221076
uagauacucauucagagca

SEQ ID NO: 1221078 - RNA, 19 nt, Artificial Sequence
  Description of Artificial Sequence: Synthetic oligonucleotide
  Sense strand starting at position 39 of SEQ ID NO: 917256
augaguaucuaacugguca

SEQ ID NO: 1221079 - RNA, 19 nt, Artificial Sequence
  Description of Artificial Sequence: Synthetic oligonucleotide
  Antisense strand to SEQ ID NO: 1221078
ugaccaguuagauacucau

SEQ ID NO: 1221080 - RNA, 19 nt, Artificial Sequence
  Description of Artificial Sequence: Synthetic oligonucleotide
  Sense strand starting at position 43 of SEQ ID NO: 917256
guaucuaacuggucacuua

SEQ ID NO: 1221081 - RNA, 19 nt, Artificial Sequence
  Description of Artificial Sequence: Synthetic oligonucleotide
  Antisense strand to SEQ ID NO: 1221080
uaagugaccaguuagauac

SEQ ID NO: 1221082 - RNA, 19 nt, Artificial Sequence
  Description of Artificial Sequence: Synthetic oligonucleotide
  Sense strand starting at position 132 of SEQ ID NO: 917256
guggcuuugcacuagauag

SEQ ID NO: 1221083 - RNA, 19 nt, Artificial Sequence
  Description of Artificial Sequence: Synthetic oligonucleotide
  Antisense strand to SEQ ID NO: 1221082
cuaucuagugcaaagccac

SEQ ID NO: 1221084 - RNA, 19 nt, Artificial Sequence
  Description of Artificial Sequence: Synthetic oligonucleotide
  Sense strand starting at position 337 of SEQ ID NO: 917256
ccucguuuccuaucgguuu

SEQ ID NO: 1221085 - RNA, 19 nt, Artificial Sequence
  Description of Artificial Sequence: Synthetic oligonucleotide
  Antisense strand to SEQ ID NO: 1221084
aaaccgauaggaaacgagg

SEQ ID NO: 1221086 - RNA, 19 nt, Artificial Sequence
  Description of Artificial Sequence: Synthetic oligonucleotide
  Sense strand starting at position 365 of SEQ ID NO: 917256
auguauuucuguucugacu

SEQ ID NO: 1221087 - RNA, 19 nt, Artificial Sequence
  Description of Artificial Sequence: Synthetic oligonucleotide
  Antisense strand to SEQ ID NO: 1221086
agucagaacagaaauacau

SEQ ID NO: 1221088 - RNA, 19 nt, Artificial Sequence
  Description of Artificial Sequence: Synthetic oligonucleotide
  Sense strand starting at position 401 of SEQ ID NO: 917256
aguuucuccgaguaaacaa

SEQ ID NO: 1221089 - RNA, 19 nt, Artificial Sequence
  Description of Artificial Sequence: Synthetic oligonucleotide
  Antisense strand to SEQ ID NO: 1221088
uuguuuacucggagaaacu

SEQ ID NO: 1221090 - RNA, 19 nt, Artificial Sequence
  Description of Artificial Sequence: Synthetic oligonucleotide
  Sense strand starting at position 2061 of SEQ ID NO: 917256
ucccauuguccugaccaga

SEQ ID NO: 1221091 - RNA, 19 nt, Artificial Sequence
  Description of Artificial Sequence: Synthetic oligonucleotide
  Antisense strand to SEQ ID NO: 1221090
ucuggucaggacaauggga

SEQ ID NO: 1221092 - RNA, 19 nt, Artificial Sequence
  Description of Artificial Sequence: Synthetic oligonucleotide
  Sense strand starting at position 2108 of SEQ ID NO: 917256
acacgucaucaaggauuga

SEQ ID NO: 1221093 - RNA, 19 nt, Artificial Sequence
  Description of Artificial Sequence: Synthetic oligonucleotide
  Antisense strand to SEQ ID NO: 1221092
ucaauccuugaugacgugu

SEQ ID NO: 1221094 - RNA, 19 nt, Artificial Sequence
  Description of Artificial Sequence: Synthetic oligonucleotide
  Sense strand starting at position 2381 of SEQ ID NO: 917256
cccaaagccguugagauaa

SEQ ID NO: 1221095 - RNA, 19 nt, Artificial Sequence
  Description of Artificial Sequence: Synthetic oligonucleotide
  Antisense strand to SEQ ID NO: 1221094
uuaucucaacggcuuuggg

SEQ ID NO: 1221096 - RNA, 19 nt, Artificial Sequence
  Description of Artificial Sequence: Synthetic oligonucleotide
  Sense strand starting at position 2516 of SEQ ID NO: 917256
ccucaaaggucucugauug

SEQ ID NO: 1221097 - RNA, 19 nt, Artificial Sequence
  Description of Artificial Sequence: Synthetic oligonucleotide
  Antisense strand to SEQ ID NO: 1221096
caaucagagaccuuugagg

SEQ ID NO: 1221098 - RNA, 19 nt, Artificial Sequence
  Description of Artificial Sequence: Synthetic oligonucleotide
  Sense strand starting at position 2540 of SEQ ID NO: 917256
cacuuuaggucucuggaaa

SEQ ID NO: 1221099 - RNA, 19 nt, Artificial Sequence
  Description of Artificial Sequence: Synthetic oligonucleotide
  Antisense strand to SEQ ID NO: 1221098
uuuccagagaccuaaagug

SEQ ID NO: 1221100 - RNA, 19 nt, Artificial Sequence
  Description of Artificial Sequence: Synthetic oligonucleotide
  Sense strand starting at position 2541 of SEQ ID NO: 917256
acuuuaggucucuggaaag

SEQ ID NO: 1221101 - RNA, 19 nt, Artificial Sequence
  Description of Artificial Sequence: Synthetic oligonucleotide
  Antisense strand to SEQ ID NO: 1221100
cuuuccagagaccuaaagu

SEQ ID NO: 1221102 - RNA, 19 nt, Artificial Sequence
  Description of Artificial Sequence: Synthetic oligonucleotide
  Sense strand starting at position 2655 of SEQ ID NO: 917256
agcugaaaucuugagucag

SEQ ID NO: 1221103 - RNA, 19 nt, Artificial Sequence
  Description of Artificial Sequence: Synthetic oligonucleotide
  Antisense strand to SEQ ID NO: 1221102
cugacucaagauuucagcu

SEQ ID NO: 1221104 - RNA, 19 nt, Artificial Sequence
  Description of Artificial Sequence: Synthetic oligonucleotide
  Sense strand starting at position 2657 of SEQ ID NO: 917256
cugaaaucuugagucagug

SEQ ID NO: 1221105 - RNA, 19 nt, Artificial Sequence
  Description of Artificial Sequence: Synthetic oligonucleotide
  Antisense strand to SEQ ID NO: 1221104
cacugacucaagauuucag

SEQ ID NO: 1221106 - RNA, 19 nt, Artificial Sequence
  Description of Artificial Sequence: Synthetic oligonucleotide
  Sense strand starting at position 2721 of SEQ ID NO: 917256
acagcaugucuagaacuuu

SEQ ID NO: 1221107 - RNA, 19 nt, Artificial Sequence
  Description of Artificial Sequence: Synthetic oligonucleotide
  Antisense strand to SEQ ID NO: 1221106
aaaguucuagacaugcugu

SEQ ID NO: 1221108 - RNA, 19 nt, Artificial Sequence
  Description of Artificial Sequence: Synthetic oligonucleotide
  Sense strand starting at position 2759 of SEQ ID NO: 917256
ugucuuaacuuccuggaaa

SEQ ID NO: 1221109 - RNA, 19 nt, Artificial Sequence
  Description of Artificial Sequence: Synthetic oligonucleotide
  Antisense strand to SEQ ID NO: 1221108
uuuccaggaaguuaagaca

SEQ ID NO: 1221110 - RNA, 19 nt, Artificial Sequence
  Description of Artificial Sequence: Synthetic oligonucleotide
  Sense strand starting at position 2829 of SEQ ID NO: 917256
guacucuagcaggaaaugu

SEQ ID NO: 1221111 - RNA, 19 nt, Artificial Sequence
  Description of Artificial Sequence: Synthetic oligonucleotide
  Antisense strand to SEQ ID NO: 1221110
acauuuccugcuagaguac

SEQ ID NO: 1221112 - RNA, 19 nt, Artificial Sequence
  Description of Artificial Sequence: Synthetic oligonucleotide
  Sense strand starting at position 2858 of SEQ ID NO: 917256
cugguagaauuagcaaauu

SEQ ID NO: 1221113 - RNA, 19 nt, Artificial Sequence
  Description of Artificial Sequence: Synthetic oligonucleotide
  Antisense strand to SEQ ID NO: 1221112
aauuugcuaauucuaccag

SEQ ID NO: 1221114 - RNA, 19 nt, Artificial Sequence
  Description of Artificial Sequence: Synthetic oligonucleotide
  Sense strand starting at position 2916 of SEQ ID NO: 917256
ugacuugguguggauuacu

SEQ ID NO: 1221115 - RNA, 19 nt, Artificial Sequence
  Description of Artificial Sequence: Synthetic oligonucleotide
  Antisense strand to SEQ ID NO: 1221114
aguaauccacaccaaguca

SEQ ID NO: 1221116 - RNA, 19 nt, Artificial Sequence
  Description of Artificial Sequence: Synthetic oligonucleotide
  Sense strand starting at position 2942 of SEQ ID NO: 917256
ucaaacgaauccuugugau

SEQ ID NO: 1221117 - RNA, 19 nt, Artificial Sequence
  Description of Artificial Sequence: Synthetic oligonucleotide
  Antisense strand to SEQ ID NO: 1221116
aucacaaggauucguuuga

SEQ ID NO: 1221118 - RNA, 19 nt, Artificial Sequence
  Description of Artificial Sequence: Synthetic oligonucleotide
  Sense strand starting at position 2996 of SEQ ID NO: 917256
ccauguaacugcucuagga

SEQ ID NO: 1221119 - RNA, 19 nt, Artificial Sequence
  Description of Artificial Sequence: Synthetic oligonucleotide
  Antisense strand to SEQ ID NO: 1221118
uccuagagcaguuacaugg

SEQ ID NO: 1221120 - RNA, 19 nt, Artificial Sequence
  Description of Artificial Sequence: Synthetic oligonucleotide
  Sense strand starting at position 2998 of SEQ ID NO: 917256
auguaacugcucuaggauu

SEQ ID NO: 1221121 - RNA, 19 nt, Artificial Sequence
  Description of Artificial Sequence: Synthetic oligonucleotide
  Antisense strand to SEQ ID NO: 1221120
aauccuagagcaguuacau

SEQ ID NO: 1221122 - RNA, 19 nt, Artificial Sequence
  Description of Artificial Sequence: Synthetic oligonucleotide
  Sense strand starting at position 3009 of SEQ ID NO: 917256
cuaggauuacaggaguugu

SEQ ID NO: 1221123 - RNA, 19 nt, Artificial Sequence
  Description of Artificial Sequence: Synthetic oligonucleotide
  Antisense strand to SEQ ID NO: 1221122
acaacuccuguaauccuag

SEQ ID NO: 1221124 - RNA, 19 nt, Artificial Sequence
  Description of Artificial Sequence: Synthetic oligonucleotide
  Sense strand starting at position 3017 of SEQ ID NO: 917256
acaggaguuguagguauau

SEQ ID NO: 1221125 - RNA, 19 nt, Artificial Sequence
  Description of Artificial Sequence: Synthetic oligonucleotide
  Antisense strand to SEQ ID NO: 1221124
auauaccuacaacuccugu

SEQ ID NO: 1221126 - RNA, 19 nt, Artificial Sequence
  Description of Artificial Sequence: Synthetic oligonucleotide
  Sense strand starting at position 3029 of SEQ ID NO: 917256
gguauaugguuacccgaag

SEQ ID NO: 1221127 - RNA, 19 nt, Artificial Sequence
  Description of Artificial Sequence: Synthetic oligonucleotide
  Antisense strand to SEQ ID NO: 1221126
cuucggguaaccauauacc

SEQ ID NO: 1221128 - RNA, 19 nt, Artificial Sequence
  Description of Artificial Sequence: Synthetic oligonucleotide
  Sense strand starting at position 3134 of SEQ ID NO: 917256
uacuuacgucuguagagaa

SEQ ID NO: 1221129 - RNA, 19 nt, Artificial Sequence
  Description of Artificial Sequence: Synthetic oligonucleotide
  Antisense strand to SEQ ID NO: 1221128
uucucuacagacguaagua

SEQ ID NO: 1221130 - RNA, 19 nt, Artificial Sequence
  Description of Artificial Sequence: Synthetic oligonucleotide
  Sense strand starting at position 3171 of SEQ ID NO: 917256
gccaguucugaagacucua

SEQ ID NO: 1221131 - RNA, 19 nt, Artificial Sequence
  Description of Artificial Sequence: Synthetic oligonucleotide
  Antisense strand to SEQ ID NO: 1221130
uagagucuucagaacuggc

SEQ ID NO: 1221132 - RNA, 19 nt, Artificial Sequence
  Description of Artificial Sequence: Synthetic oligonucleotide
  Sense strand starting at position 3176 of SEQ ID NO: 917256
uucugaagacucuacaguu

SEQ ID NO: 1221133 - RNA, 19 nt, Artificial Sequence
  Description of Artificial Sequence: Synthetic oligonucleotide
  Antisense strand to SEQ ID NO: 1221132
aacuguagagucuucagaa

SEQ ID NO: 1221134 - RNA, 19 nt, Artificial Sequence
  Description of Artificial Sequence: Synthetic oligonucleotide
  Sense strand starting at position 3193 of SEQ ID NO: 917256
uuauaucaguccuuuauga

SEQ ID NO: 1221135 - RNA, 19 nt, Artificial Sequence
  Description of Artificial Sequence: Synthetic oligonucleotide
  Antisense strand to SEQ ID NO: 1221134
ucauaaaggacugauauaa

SEQ ID NO: 1221136 - RNA, 19 nt, Artificial Sequence
  Description of Artificial Sequence: Synthetic oligonucleotide
  Sense strand starting at position 3445 of SEQ ID NO: 917256
acuugagaguaagcuuaga

SEQ ID NO: 1221137 - RNA, 19 nt, Artificial Sequence
  Description of Artificial Sequence: Synthetic oligonucleotide
  Antisense strand to SEQ ID NO: 1221136
ucuaagcuuacucucaagu

SEQ ID NO: 1221138 - RNA, 19 nt, Artificial Sequence
  Description of Artificial Sequence: Synthetic oligonucleotide
  Sense strand starting at position 3520 of SEQ ID NO: 917256
cagggauuauagucuuggu

SEQ ID NO: 1221139 - RNA, 19 nt, Artificial Sequence
  Description of Artificial Sequence: Synthetic oligonucleotide
  Antisense strand to SEQ ID NO: 1221138
accaagacuauaaucccug

SEQ ID NO: 1221140 - RNA, 19 nt, Artificial Sequence
  Description of Artificial Sequence: Synthetic oligonucleotide
  Sense strand starting at position 3524 of SEQ ID NO: 917256
gauuauagucuuggugaau

SEQ ID NO: 1221141 - RNA, 19 nt, Artificial Sequence
  Description of Artificial Sequence: Synthetic oligonucleotide
  Antisense strand to SEQ ID NO: 1221140
auucaccaagacuauaauc

SEQ ID NO: 1221142 - RNA, 19 nt, Artificial Sequence
  Description of Artificial Sequence: Synthetic oligonucleotide
  Sense strand starting at position 3525 of SEQ ID NO: 917256
auuauagucuuggugaaug

SEQ ID NO: 1221143 - RNA, 19 nt, Artificial Sequence
  Description of Artificial Sequence: Synthetic oligonucleotide
  Antisense strand to SEQ ID NO: 1221142
cauucaccaagacuauaau

SEQ ID NO: 1221144 - RNA, 19 nt, Artificial Sequence
  Description of Artificial Sequence: Synthetic oligonucleotide
  Sense strand starting at position 3527 of SEQ ID NO: 917256
uauagucuuggugaaugga

SEQ ID NO: 1221145 - RNA, 19 nt, Artificial Sequence
  Description of Artificial Sequence: Synthetic oligonucleotide
  Antisense strand to SEQ ID NO: 1221144
uccauucaccaagacuaua

SEQ ID NO: 1221146 - RNA, 19 nt, Artificial Sequence
  Description of Artificial Sequence: Synthetic oligonucleotide
  Sense strand starting at position 3590 of SEQ ID NO: 917256
ggauauaaauugguauacu

SEQ ID NO: 1221147 - RNA, 19 nt, Artificial Sequence
  Description of Artificial Sequence: Synthetic oligonucleotide
  Antisense strand to SEQ ID NO: 1221146
aguauaccaauuuauaucc

SEQ ID NO: 1221148 - RNA, 19 nt, Artificial Sequence
  Description of Artificial Sequence: Synthetic oligonucleotide
  Sense strand starting at position 3611 of SEQ ID NO: 917256
acaugcaguguuuaaagau

SEQ ID NO: 1221149 - RNA, 19 nt, Artificial Sequence
  Description of Artificial Sequence: Synthetic oligonucleotide
  Antisense strand to SEQ ID NO: 1221148
aucuuuaaacacugcaugu

SEQ ID NO: 1221150 - RNA, 19 nt, Artificial Sequence
  Description of Artificial Sequence: Synthetic oligonucleotide
  Sense strand starting at position 3808 of SEQ ID NO: 917256
aguggcaucgaugauauua

SEQ ID NO: 1221151 - RNA, 19 nt, Artificial Sequence
  Description of Artificial Sequence: Synthetic oligonucleotide
  Antisense strand to SEQ ID NO: 1221150
uaauaucaucgaugccacu

SEQ ID NO: 1221152 - RNA, 19 nt, Artificial Sequence
  Description of Artificial Sequence: Synthetic oligonucleotide
  Sense strand starting at position 3830 of SEQ ID NO: 917256
uuugacgauuaguugaaua

SEQ ID NO: 1221153 - RNA, 19 nt, Artificial Sequence
  Description of Artificial Sequence: Synthetic oligonucleotide
  Antisense strand to SEQ ID NO: 1221152
uauucaacuaaucgucaaa

SEQ ID NO: 1221154 - RNA, 19 nt, Artificial Sequence
  Description of Artificial Sequence: Synthetic oligonucleotide
  Sense strand starting at position 3835 of SEQ ID NO: 917257
cgauuaguugaauauggca

SEQ ID NO: 1221155 - RNA, 19 nt, Artificial Sequence
  Description of Artificial Sequence: Synthetic oligonucleotide
  Antisense strand to SEQ ID NO: 1221154
ugccauauucaacuaaucg

SEQ ID NO: 1221156 - RNA, 19 nt, Artificial Sequence
  Description of Artificial Sequence: Synthetic oligonucleotide
  Sense strand starting at position 481 of SEQ ID NO: 917257
uuaacagaaaggugguaau

SEQ ID NO: 1221157 - RNA, 19 nt, Artificial Sequence
  Description of Artificial Sequence: Synthetic oligonucleotide
  Antisense strand to SEQ ID NO: 1221156
auuaccaccuuucuguuaa

SEQ ID NO: 1221158 - RNA, 19 nt, Artificial Sequence
  Description of Artificial Sequence: Synthetic oligonucleotide
  Sense strand starting at position 503 of SEQ ID NO: 917257
gggaaugaaucucacauau

SEQ ID NO: 1221159 - RNA, 19 nt, Artificial Sequence
  Description of Artificial Sequence: Synthetic oligonucleotide
  Antisense strand to SEQ ID NO: 1221158
auaugugagauucauuccc

SEQ ID NO: 1221160 - RNA, 19 nt, Artificial Sequence
  Description of Artificial Sequence: Synthetic oligonucleotide
  Sense strand starting at position 594 of SEQ ID NO: 917257
auguauaaguaacuccaua

SEQ ID NO: 1221161 - RNA, 19 nt, Artificial Sequence
  Description of Artificial Sequence: Synthetic oligonucleotide
  Antisense strand to SEQ ID NO: 1221160
uauggaguuacuuauacau

SEQ ID NO: 1221162 - RNA, 19 nt, Artificial Sequence
  Description of Artificial Sequence: Synthetic oligonucleotide
  Sense strand starting at position 645 of SEQ ID NO: 917257
accugaguuuguuuccacu

SEQ ID NO: 1221163 - RNA, 19 nt, Artificial Sequence
  Description of Artificial Sequence: Synthetic oligonucleotide
  Antisense strand to SEQ ID NO: 1221162
aguggaaacaaacucaggu

SEQ ID NO: 1221164 - RNA, 19 nt, Artificial Sequence
  Description of Artificial Sequence: Synthetic oligonucleotide
  Sense strand starting at position 647 of SEQ ID NO: 917257
cugaguuuguuuccacuga

SEQ ID NO: 1221165 - RNA, 19 nt, Artificial Sequence
  Description of Artificial Sequence: Synthetic oligonucleotide
  Antisense strand to SEQ ID NO: 1221164
ucaguggaaacaaacucag

SEQ ID NO: 1221166 - RNA, 19 nt, Artificial Sequence
  Description of Artificial Sequence: Synthetic oligonucleotide
  Sense strand starting at position 665 of SEQ ID NO: 917257
acaguaucucaucaguacu

SEQ ID NO: 1221167 - RNA, 19 nt, Artificial Sequence
  Description of Artificial Sequence: Synthetic oligonucleotide
  Antisense strand to SEQ ID NO: 1221166
aguacugaugagauacugu

SEQ ID NO: 1221168 - RNA, 19 nt, Artificial Sequence
  Description of Artificial Sequence: Synthetic oligonucleotide
  Sense strand starting at position 849 of SEQ ID NO: 917257
uucugcuaacguuaaggau

SEQ ID NO: 1221169 - RNA, 19 nt, Artificial Sequence
  Description of Artificial Sequence: Synthetic oligonucleotide
  Antisense strand to SEQ ID NO: 1221168
auccuuaacguuagcagaa

SEQ ID NO: 1221170 - RNA, 19 nt, Artificial Sequence
  Description of Artificial Sequence: Synthetic oligonucleotide
  Sense strand starting at position 890 of SEQ ID NO: 917257
aguugaaaucuuugcuauc

SEQ ID NO: 1221171 - RNA, 19 nt, Artificial Sequence
  Description of Artificial Sequence: Synthetic oligonucleotide
  Antisense strand to SEQ ID NO: 1221170
gauagcaaagauuucaacu

SEQ ID NO: 1221172 - RNA, 19 nt, Artificial Sequence
  Description of Artificial Sequence: Synthetic oligonucleotide
  Sense strand starting at position 891 of SEQ ID NO: 917257
guugaaaucuuugcuaucu

SEQ ID NO: 1221173 - RNA, 19 nt, Artificial Sequence
  Description of Artificial Sequence: Synthetic oligonucleotide
  Antisense strand to SEQ ID NO: 1221172
agauagcaaagauuucaac

SEQ ID NO: 1221174 - RNA, 19 nt, Artificial Sequence
  Description of Artificial Sequence: Synthetic oligonucleotide
  Sense strand starting at position 921 of SEQ ID NO: 917257
accauuaucccaugauguc

SEQ ID NO: 1221175 - RNA, 19 nt, Artificial Sequence
  Description of Artificial Sequence: Synthetic oligonucleotide
  Antisense strand to SEQ ID NO: 1221174
gacaucaugggauaauggu

SEQ ID NO: 1221176 - RNA, 19 nt, Artificial Sequence
  Description of Artificial Sequence: Synthetic oligonucleotide
  Sense strand starting at position 922 of SEQ ID NO: 917257
ccauuaucccaugauguca

SEQ ID NO: 1221177 - RNA, 19 nt, Artificial Sequence
  Description of Artificial Sequence: Synthetic oligonucleotide
  Antisense strand to SEQ ID NO: 1221176
ugacaucaugggauaaugg

SEQ ID NO: 1221178 - RNA, 19 nt, Artificial Sequence
  Description of Artificial Sequence: Synthetic oligonucleotide
  Sense strand starting at position 948 of SEQ ID NO: 917257
uuaauucuaccugggcaau

SEQ ID NO: 1221179 - RNA, 19 nt, Artificial Sequence
  Description of Artificial Sequence: Synthetic oligonucleotide
  Antisense strand to SEQ ID NO: 1221178
auugcccagguagaauuaa

SEQ ID NO: 1221180 - RNA, 19 nt, Artificial Sequence
  Description of Artificial Sequence: Synthetic oligonucleotide
  Sense strand starting at position 1027 of SEQ ID NO: 917257
guacuuaacuggcuucuga

SEQ ID NO: 1221181 - RNA, 19 nt, Artificial Sequence
  Description of Artificial Sequence: Synthetic oligonucleotide
  Antisense strand to SEQ ID NO: 1221180
ucagaagccaguuaaguac

SEQ ID NO: 1221182 - RNA, 19 nt, Artificial Sequence
  Description of Artificial Sequence: Synthetic oligonucleotide
  Sense strand starting at position 1042 of SEQ ID NO: 917257
cugaguguuaugcauggaa

SEQ ID NO: 1221183 - RNA, 19 nt, Artificial Sequence
  Description of Artificial Sequence: Synthetic oligonucleotide
  Antisense strand to SEQ ID NO: 1221182
uuccaugcauaacacucag

SEQ ID NO: 1221184 - RNA, 19 nt, Artificial Sequence
  Description of Artificial Sequence: Synthetic oligonucleotide
  Sense strand starting at position 1044 of SEQ ID NO: 917257
gaguguuaugcauggaagu

SEQ ID NO: 1221185 - RNA, 19 nt, Artificial Sequence
  Description of Artificial Sequence: Synthetic oligonucleotide
  Antisense strand to SEQ ID NO: 1221184
acuuccaugcauaacacuc

SEQ ID NO: 1221186 - RNA, 19 nt, Artificial Sequence
  Description of Artificial Sequence: Synthetic oligonucleotide
  Sense strand starting at position 1045 of SEQ ID NO: 917257
aguguuaugcauggaaguu

SEQ ID NO: 1221187 - RNA, 19 nt, Artificial Sequence
  Description of Artificial Sequence: Synthetic oligonucleotide
  Antisense strand to SEQ ID NO: 1221186
aacuuccaugcauaacacu

SEQ ID NO: 1221188 - RNA, 19 nt, Artificial Sequence
  Description of Artificial Sequence: Synthetic oligonucleotide
  Sense strand starting at position 1046 of SEQ ID NO: 917257
guguuaugcauggaaguua

SEQ ID NO: 1221189 - RNA, 19 nt, Artificial Sequence
  Description of Artificial Sequence: Synthetic oligonucleotide
  Antisense strand to SEQ ID NO: 1221188
uaacuuccaugcauaacac

SEQ ID NO: 1221190 - RNA, 19 nt, Artificial Sequence
  Description of Artificial Sequence: Synthetic oligonucleotide
  Sense strand starting at position 1058 of SEQ ID NO: 917257
gaaguuacacaguggaauu

SEQ ID NO: 1221191 - RNA, 19 nt, Artificial Sequence
  Description of Artificial Sequence: Synthetic oligonucleotide
  Antisense strand to SEQ ID NO: 1221190
aauuccacuguguaacuuc

SEQ ID NO: 1221192 - RNA, 19 nt, Artificial Sequence
  Description of Artificial Sequence: Synthetic oligonucleotide
  Sense strand starting at position 1090 of SEQ ID NO: 917257
aauaaaguacucggaggau

SEQ ID NO: 1221193 - RNA, 19 nt, Artificial Sequence
  Description of Artificial Sequence: Synthetic oligonucleotide
  Antisense strand to SEQ ID NO: 1221192
auccuccgaguacuuuauu

SEQ ID NO: 1221194 - RNA, 19 nt, Artificial Sequence
  Description of Artificial Sequence: Synthetic oligonucleotide
  Sense strand starting at position 1226 of SEQ ID NO: 917257
augguuaggugucccuauu

SEQ ID NO: 1221195 - RNA, 19 nt, Artificial Sequence
  Description of Artificial Sequence: Synthetic oligonucleotide
  Antisense strand to SEQ ID NO: 1221194
aauagggacaccuaaccau

SEQ ID NO: 1221196 - RNA, 19 nt, Artificial Sequence
  Description of Artificial Sequence: Synthetic oligonucleotide
  Sense strand starting at position 1254 of SEQ ID NO: 917257
agcaauuacuuguuggaug

SEQ ID NO: 1221197 - RNA, 19 nt, Artificial Sequence
  Description of Artificial Sequence: Synthetic oligonucleotide
  Antisense strand to SEQ ID NO: 1221196
cauccaacaaguaauugcu

SEQ ID NO: 1221198 - RNA, 19 nt, Artificial Sequence
  Description of Artificial Sequence: Synthetic oligonucleotide
  Sense strand starting at position 1256 of SEQ ID NO: 917257
caauuacuuguuggaugaa

SEQ ID NO: 1221199 - RNA, 19 nt, Artificial Sequence
  Description of Artificial Sequence: Synthetic oligonucleotide
  Antisense strand to SEQ ID NO: 1221198
uucauccaacaaguaauug

SEQ ID NO: 1221200 - RNA, 19 nt, Artificial Sequence
  Description of Artificial Sequence: Synthetic oligonucleotide
  Sense strand starting at position 1336 of SEQ ID NO: 917257
ugucuacuugcuggaacua

SEQ ID NO: 1221201 - RNA, 19 nt, Artificial Sequence
  Description of Artificial Sequence: Synthetic oligonucleotide
  Antisense strand to SEQ ID NO: 1221200
uaguuccagcaaguagaca

SEQ ID NO: 1221202 - RNA, 19 nt, Artificial Sequence
  Description of Artificial Sequence: Synthetic oligonucleotide
  Sense strand starting at position 1364 of SEQ ID NO: 917257
ugaugacaagacugucuua

SEQ ID NO: 1221203 - RNA, 19 nt, Artificial Sequence
  Description of Artificial Sequence: Synthetic oligonucleotide
  Antisense strand to SEQ ID NO: 1221202
uaagacagucuugucauca

SEQ ID NO: 1221204 - RNA, 19 nt, Artificial Sequence
  Description of Artificial Sequence: Synthetic oligonucleotide
  Sense strand starting at position 1367 of SEQ ID NO: 917257
ugacaagacugucuuacuu

SEQ ID NO: 1221205 - RNA, 19 nt, Artificial Sequence
  Description of Artificial Sequence: Synthetic oligonucleotide
  Antisense strand to SEQ ID NO: 1221204
aaguaagacagucuuguca

SEQ ID NO: 1221206 - RNA, 19 nt, Artificial Sequence
  Description of Artificial Sequence: Synthetic oligonucleotide
  Sense strand starting at position 1560 of SEQ ID NO: 917257
cagcgacccggcuuguaau

SEQ ID NO: 1221207 - RNA, 19 nt, Artificial Sequence
  Description of Artificial Sequence: Synthetic oligonucleotide
  Antisense strand to SEQ ID NO: 1221206
auuacaagccgggucgcug

SEQ ID NO: 1221208 - RNA, 19 nt, Artificial Sequence
  Description of Artificial Sequence: Synthetic oligonucleotide
  Sense strand starting at position 2144 of SEQ ID NO: 917257
gccaguguucaguaagguu

SEQ ID NO: 1221209 - RNA, 19 nt, Artificial Sequence
  Description of Artificial Sequence: Synthetic oligonucleotide
  Antisense strand to SEQ ID NO: 1221208
aaccuuacugaacacuggc

SEQ ID NO: 1221210 - RNA, 19 nt, Artificial Sequence
  Description of Artificial Sequence: Synthetic oligonucleotide
  Sense strand starting at position 2215 of SEQ ID NO: 917257
gggcgugaucaguugugca

SEQ ID NO: 1221211 - RNA, 19 nt, Artificial Sequence
  Description of Artificial Sequence: Synthetic oligonucleotide
  Antisense strand to SEQ ID NO: 1221210
ugcacaacugaucacgccc

SEQ ID NO: 1221212 - RNA, 19 nt, Artificial Sequence
  Description of Artificial Sequence: Synthetic oligonucleotide
  Sense strand starting at position 2217 of SEQ ID NO: 917257
gcgugaucaguugugcaaa

SEQ ID NO: 1221213 - RNA, 19 nt, Artificial Sequence
  Description of Artificial Sequence: Synthetic oligonucleotide
  Antisense strand to SEQ ID NO: 1221212
uuugcacaacugaucacgc

SEQ ID NO: 1221214 - RNA, 19 nt, Artificial Sequence
  Description of Artificial Sequence: Synthetic oligonucleotide
  Sense strand starting at position 2239 of SEQ ID NO: 917257
uacagaugaucagucuguu

SEQ ID NO: 1221215 - RNA, 19 nt, Artificial Sequence
  Description of Artificial Sequence: Synthetic oligonucleotide
  Antisense strand to SEQ ID NO: 1221214
aacagacugaucaucugua

SEQ ID NO: 1221216 - RNA, 19 nt, Artificial Sequence
  Description of Artificial Sequence: Synthetic oligonucleotide
  Sense strand starting at position 2587 of SEQ ID NO: 917257
ugaugccucagcuggagua

SEQ ID NO: 1221217 - RNA, 19 nt, Artificial Sequence
  Description of Artificial Sequence: Synthetic oligonucleotide
  Antisense strand to SEQ ID NO: 1221216
uacuccagcugaggcauca

SEQ ID NO: 1221218 - RNA, 19 nt, Artificial Sequence
  Description of Artificial Sequence: Synthetic oligonucleotide
  Sense strand starting at position 2588 of SEQ ID NO: 917257
gaugccucagcuggaguaa

SEQ ID NO: 1221219 - RNA, 19 nt, Artificial Sequence
  Description of Artificial Sequence: Synthetic oligonucleotide
  Antisense strand to SEQ ID NO: 1221218
uuacuccagcugaggcauc

SEQ ID NO: 1221220 - RNA, 19 nt, Artificial Sequence
  Description of Artificial Sequence: Synthetic oligonucleotide
  Sense strand starting at position 2597 of SEQ ID NO: 917257
gcuggaguaacuggaagaa

SEQ ID NO: 1221221 - RNA, 19 nt, Artificial Sequence
  Description of Artificial Sequence: Synthetic oligonucleotide
  Antisense strand to SEQ ID NO: 1221220
uucuuccaguuacuccagc

SEQ ID NO: 1221222 - RNA, 19 nt, Artificial Sequence
  Description of Artificial Sequence: Synthetic oligonucleotide
  Sense strand starting at position 2729 of SEQ ID NO: 917257
ucgugaucuugacucacua

SEQ ID NO: 1221223 - RNA, 19 nt, Artificial Sequence
  Description of Artificial Sequence: Synthetic oligonucleotide
  Antisense strand to SEQ ID NO: 1221222
uagugagucaagaucacga

SEQ ID NO: 1221224 - RNA, 19 nt, Artificial Sequence
  Description of Artificial Sequence: Synthetic oligonucleotide
  Sense strand starting at position 2791 of SEQ ID NO: 917257
uccagauuagcuggagauu

SEQ ID NO: 1221225 - RNA, 19 nt, Artificial Sequence
  Description of Artificial Sequence: Synthetic oligonucleotide
  Antisense strand to SEQ ID NO: 1221224
aaucuccagcuaaucugga

SEQ ID NO: 1221226 - RNA, 19 nt, Artificial Sequence
  Description of Artificial Sequence: Synthetic oligonucleotide
  Sense strand starting at position 2807 of SEQ ID NO: 917257
auuagcagccuccagauua

SEQ ID NO: 1221227 - RNA, 19 nt, Artificial Sequence
  Description of Artificial Sequence: Synthetic oligonucleotide
  Antisense strand to SEQ ID NO: 1221226
uaaucuggaggcugcuaau

SEQ ID NO: 1221228 - RNA, 19 nt, Artificial Sequence
  Description of Artificial Sequence: Synthetic oligonucleotide
  Sense strand starting at position 2817 of SEQ ID NO: 917257
uccagauuagcauacgaca

SEQ ID NO: 1221229 - RNA, 19 nt, Artificial Sequence
  Description of Artificial Sequence: Synthetic oligonucleotide
  Antisense strand to SEQ ID NO: 1221228
ugucguaugcuaaucugga

SEQ ID NO: 1221230 - RNA, 19 nt, Artificial Sequence
  Description of Artificial Sequence: Synthetic oligonucleotide
  Sense strand starting at position 3386 of SEQ ID NO: 917257
cuugccuuagagugaacau

SEQ ID NO: 1221231 - RNA, 19 nt, Artificial Sequence
  Description of Artificial Sequence: Synthetic oligonucleotide
  Antisense strand to SEQ ID NO: 1221230
auguucacucuaaggcaag

SEQ ID NO: 1221232 - RNA, 19 nt, Artificial Sequence
  Description of Artificial Sequence: Synthetic oligonucleotide
  Sense strand starting at position 3871 of SEQ ID NO: 917257
aggucuuauucuuucuaua

SEQ ID NO: 1221233 - RNA, 19 nt, Artificial Sequence
  Description of Artificial Sequence: Synthetic oligonucleotide
  Antisense strand to SEQ ID NO: 1221232
uauagaaagaauaagaccu

SEQ ID NO: 1221234 - RNA, 19 nt, Artificial Sequence
  Description of Artificial Sequence: Synthetic oligonucleotide
  Sense strand starting at position 3970 of SEQ ID NO: 917257
ucucuaugaccaggaguuc

SEQ ID NO: 1221235 - RNA, 19 nt, Artificial Sequence
  Description of Artificial Sequence: Synthetic oligonucleotide
  Antisense strand to SEQ ID NO: 1221234
gaacuccuggucauagaga

SEQ ID NO: 1221236 - RNA, 19 nt, Artificial Sequence
  Description of Artificial Sequence: Synthetic oligonucleotide
  Sense strand starting at position 3970 of SEQ ID NO: 917258
ucucuaugaccaggaguuc

SEQ ID NO: 1221237 - RNA, 19 nt, Artificial Sequence
  Description of Artificial Sequence: Synthetic oligonucleotide
  Antisense strand to SEQ ID NO: 1221236
gaacuccuggucauagaga

SEQ ID NO: 1221238 - RNA, 19 nt, Artificial Sequence
  Description of Artificial Sequence: Synthetic oligonucleotide
  Sense strand starting at position 18 of SEQ ID NO: 917258
ucugaagaauugccagagu

SEQ ID NO: 1221239 - RNA, 19 nt, Artificial Sequence
  Description of Artificial Sequence: Synthetic oligonucleotide
  Antisense strand to SEQ ID NO: 1221238
acucuggcaauucuucaga

SEQ ID NO: 1221240 - RNA, 19 nt, Artificial Sequence
  Description of Artificial Sequence: Synthetic oligonucleotide
  Sense strand starting at position 58 of SEQ ID NO: 917258
uugcucauucuuggagaaa

SEQ ID NO: 1221241 - RNA, 19 nt, Artificial Sequence
  Description of Artificial Sequence: Synthetic oligonucleotide
  Antisense strand to SEQ ID NO: 1221240
uuucuccaagaaugagcaa

SEQ ID NO: 1221242 - RNA, 19 nt, Artificial Sequence
  Description of Artificial Sequence: Synthetic oligonucleotide
  Sense strand starting at position 92 of SEQ ID NO: 917258
ugcuucagugguggugaau

SEQ ID NO: 1221243 - RNA, 19 nt, Artificial Sequence
  Description of Artificial Sequence: Synthetic oligonucleotide
  Antisense strand to SEQ ID NO: 1221242
auucaccaccacugaagca

SEQ ID NO: 1221244 - RNA, 19 nt, Artificial Sequence
  Description of Artificial Sequence: Synthetic oligonucleotide
  Sense strand starting at position 111 of SEQ ID NO: 917258
uccagaaucuggguagcuu

SEQ ID NO: 1221245 - RNA, 19 nt, Artificial Sequence
  Description of Artificial Sequence: Synthetic oligonucleotide
  Antisense strand to SEQ ID NO: 1221244
aagcuacccagauucugga

SEQ ID NO: 1221246 - RNA, 19 nt, Artificial Sequence
  Description of Artificial Sequence: Synthetic oligonucleotide
  Sense strand starting at position 122 of SEQ ID NO: 917258
gguagcuuccaguaaauga

SEQ ID NO: 1221247 - RNA, 19 nt, Artificial Sequence
  Description of Artificial Sequence: Synthetic oligonucleotide
  Antisense strand to SEQ ID NO: 1221246
ucauuuacuggaagcuacc

SEQ ID NO: 1221248 - RNA, 19 nt, Artificial Sequence
  Description of Artificial Sequence: Synthetic oligonucleotide
  Sense strand starting at position 184 of SEQ ID NO: 917258
acauaaucagcuugagcuu

SEQ ID NO: 1221249 - RNA, 19 nt, Artificial Sequence
  Description of Artificial Sequence: Synthetic oligonucleotide
  Antisense strand to SEQ ID NO: 1221248
aagcucaagcugauuaugu

SEQ ID NO: 1221250 - RNA, 19 nt, Artificial Sequence
  Description of Artificial Sequence: Synthetic oligonucleotide
  Sense strand starting at position 506 of SEQ ID NO: 917258
aagggauguuauguuaucu

SEQ ID NO: 1221251 - RNA, 19 nt, Artificial Sequence
  Description of Artificial Sequence: Synthetic oligonucleotide
  Antisense strand to SEQ ID NO: 1221250
agauaacauaacaucccuu

SEQ ID NO: 1221252 - RNA, 19 nt, Artificial Sequence
  Description of Artificial Sequence: Synthetic oligonucleotide
  Sense strand starting at position 582 of SEQ ID NO: 917258
uuuggaauaaguugaugua

SEQ ID NO: 1221253 - RNA, 19 nt, Artificial Sequence
  Description of Artificial Sequence: Synthetic oligonucleotide
  Antisense strand to SEQ ID NO: 1221252
uacaucaacuuauuccaaa

SEQ ID NO: 1221254 - RNA, 19 nt, Artificial Sequence
  Description of Artificial Sequence: Synthetic oligonucleotide
  Sense strand starting at position 619 of SEQ ID NO: 917258
ggaaaucuuucugaggaca

SEQ ID NO: 1221255 - RNA, 19 nt, Artificial Sequence
  Description of Artificial Sequence: Synthetic oligonucleotide
  Antisense strand to SEQ ID NO: 1221254
uguccucagaaagauuucc

SEQ ID NO: 1221256 - RNA, 19 nt, Artificial Sequence
  Description of Artificial Sequence: Synthetic oligonucleotide
  Sense strand starting at position 684 of SEQ ID NO: 917258
gaauuagaguuaucuaucg

SEQ ID NO: 1221257 - RNA, 19 nt, Artificial Sequence
  Description of Artificial Sequence: Synthetic oligonucleotide
  Antisense strand to SEQ ID NO: 1221256
cgauagauaacucuaauuc

SEQ ID NO: 1221258 - RNA, 19 nt, Artificial Sequence
  Description of Artificial Sequence: Synthetic oligonucleotide
  Sense strand starting at position 694 of SEQ ID NO: 917258
uaucuaucgcgguagaaca

SEQ ID NO: 1221259 - RNA, 19 nt, Artificial Sequence
  Description of Artificial Sequence: Synthetic oligonucleotide
  Antisense strand to SEQ ID NO: 1221258
uguucuaccgcgauagaua

SEQ ID NO: 1221260 - RNA, 19 nt, Artificial Sequence
  Description of Artificial Sequence: Synthetic oligonucleotide
  Sense strand starting at position 711 of SEQ ID NO: 917258
caggaauuugcacgugugu

SEQ ID NO: 1221261 - RNA, 19 nt, Artificial Sequence
  Description of Artificial Sequence: Synthetic oligonucleotide
  Antisense strand to SEQ ID NO: 1221260
acacacgugcaaauuccug

SEQ ID NO: 1221262 - RNA, 19 nt, Artificial Sequence
  Description of Artificial Sequence: Synthetic oligonucleotide
  Sense strand starting at position 713 of SEQ ID NO: 917258
ggaauuugcacgugugucu

SEQ ID NO: 1221263 - RNA, 19 nt, Artificial Sequence
  Description of Artificial Sequence: Synthetic oligonucleotide
  Antisense strand to SEQ ID NO: 1221262
agacacacgugcaaauucc

SEQ ID NO: 1221264 - RNA, 19 nt, Artificial Sequence
  Description of Artificial Sequence: Synthetic oligonucleotide
  Sense strand starting at position 737 of SEQ ID NO: 917258
guggcaucaagaggauuga

SEQ ID NO: 1221265 - RNA, 19 nt, Artificial Sequence
  Description of Artificial Sequence: Synthetic oligonucleotide
  Antisense strand to SEQ ID NO: 1221264
ucaauccucuugaugccac

SEQ ID NO: 1221266 - RNA, 19 nt, Artificial Sequence
  Description of Artificial Sequence: Synthetic oligonucleotide
  Sense strand starting at position 748 of SEQ ID NO: 917258
aggauugacuguuuccuga

SEQ ID NO: 1221267 - RNA, 19 nt, Artificial Sequence
  Description of Artificial Sequence: Synthetic oligonucleotide
  Antisense strand to SEQ ID NO: 1221266
ucaggaaacagucaauccu

SEQ ID NO: 1221268 - RNA, 19 nt, Artificial Sequence
  Description of Artificial Sequence: Synthetic oligonucleotide
  Sense strand starting at position 781 of SEQ ID NO: 917258
gccacuuagggagggauua

SEQ ID NO: 1221269 - RNA, 19 nt, Artificial Sequence
  Description of Artificial Sequence: Synthetic oligonucleotide
  Antisense strand to SEQ ID NO: 1221268
uaaucccucccuaaguggc

SEQ ID NO: 1221270 - RNA, 19 nt, Artificial Sequence
  Description of Artificial Sequence: Synthetic oligonucleotide
  Sense strand starting at position 791 of SEQ ID NO: 917258
gagggauuauacucgucuc

SEQ ID NO: 1221271 - RNA, 19 nt, Artificial Sequence
  Description of Artificial Sequence: Synthetic oligonucleotide
  Antisense strand to SEQ ID NO: 1221270
gagacgaguauaaucccuc

SEQ ID NO: 1221272 - RNA, 19 nt, Artificial Sequence
  Description of Artificial Sequence: Synthetic oligonucleotide
  Sense strand starting at position 794 of SEQ ID NO: 917258
ggauuauacucgucuccag

SEQ ID NO: 1221273 - RNA, 19 nt, Artificial Sequence
  Description of Artificial Sequence: Synthetic oligonucleotide
  Antisense strand to SEQ ID NO: 1221272
cuggagacgaguauaaucc

SEQ ID NO: 1221274 - RNA, 19 nt, Artificial Sequence
  Description of Artificial Sequence: Synthetic oligonucleotide
  Sense strand starting at position 1028 of SEQ ID NO: 917258
gcacaucuuagagggugaa

SEQ ID NO: 1221275 - RNA, 19 nt, Artificial Sequence
  Description of Artificial Sequence: Synthetic oligonucleotide
  Antisense strand to SEQ ID NO: 1221274
uucacccucuaagaugugc

SEQ ID NO: 1221276 - RNA, 19 nt, Artificial Sequence
  Description of Artificial Sequence: Synthetic oligonucleotide
  Sense strand starting at position 1102 of SEQ ID NO: 917258
aggcacuauccggagguuu

SEQ ID NO: 1221277 - RNA, 19 nt, Artificial Sequence
  Description of Artificial Sequence: Synthetic oligonucleotide
  Antisense strand to SEQ ID NO: 1221276
aaaccuccggauagugccu

SEQ ID NO: 1221278 - RNA, 19 nt, Artificial Sequence
  Description of Artificial Sequence: Synthetic oligonucleotide
  Sense strand starting at position 1104 of SEQ ID NO: 917258
gcacuauccggagguuucu

SEQ ID NO: 1221279 - RNA, 19 nt, Artificial Sequence
  Description of Artificial Sequence: Synthetic oligonucleotide
  Antisense strand to SEQ ID NO: 1221278
agaaaccuccggauagugc

SEQ ID NO: 1221280 - RNA, 19 nt, Artificial Sequence
  Description of Artificial Sequence: Synthetic oligonucleotide
  Sense strand starting at position 2978 of SEQ ID NO: 917258
gcagcuucucugucuggua

SEQ ID NO: 1221281 - RNA, 19 nt, Artificial Sequence
  Description of Artificial Sequence: Synthetic oligonucleotide
  Antisense strand to SEQ ID NO: 1221280
uaccagacagagaagcugc

SEQ ID NO: 1221282 - RNA, 19 nt, Artificial Sequence
  Description of Artificial Sequence: Synthetic oligonucleotide
  Sense strand starting at position 3128 of SEQ ID NO: 917258
aagacauucuaacuggugu

SEQ ID NO: 1221283 - RNA, 19 nt, Artificial Sequence
  Description of Artificial Sequence: Synthetic oligonucleotide
  Antisense strand to SEQ ID NO: 1221282
acaccaguuagaaugucuu

SEQ ID NO: 1221284 - RNA, 19 nt, Artificial Sequence
  Description of Artificial Sequence: Synthetic oligonucleotide
  Sense strand starting at position 3135 of SEQ ID NO: 917258
ucuaacugguguucgaguu

SEQ ID NO: 1221285 - RNA, 19 nt, Artificial Sequence
  Description of Artificial Sequence: Synthetic oligonucleotide
  Antisense strand to SEQ ID NO: 1221284
aacucgaacaccaguuaga

SEQ ID NO: 1221286 - RNA, 19 nt, Artificial Sequence
  Description of Artificial Sequence: Synthetic oligonucleotide
  Sense strand starting at position 3159 of SEQ ID NO: 917258
gugguccucccuuaauaac

SEQ ID NO: 1221287 - RNA, 19 nt, Artificial Sequence
  Description of Artificial Sequence: Synthetic oligonucleotide
  Antisense strand to SEQ ID NO: 1221286
guuauuaagggaggaccac

SEQ ID NO: 1221288 - RNA, 19 nt, Artificial Sequence
  Description of Artificial Sequence: Synthetic oligonucleotide
  Sense strand starting at position 3227 of SEQ ID NO: 917258
ccauuaagcgccuaacugu

SEQ ID NO: 1221289 - RNA, 19 nt, Artificial Sequence
  Description of Artificial Sequence: Synthetic oligonucleotide
  Antisense strand to SEQ ID NO: 1221288
acaguuaggcgcuuaaugg

SEQ ID NO: 1221290 - RNA, 19 nt, Artificial Sequence
  Description of Artificial Sequence: Synthetic oligonucleotide
  Sense strand starting at position 3417 of SEQ ID NO: 917258
gguggaagauaacacuuaa

SEQ ID NO: 1221291 - RNA, 19 nt, Artificial Sequence
  Description of Artificial Sequence: Synthetic oligonucleotide
  Antisense strand to SEQ ID NO: 1221290
uuaaguguuaucuuccacc

SEQ ID NO: 1221292 - RNA, 19 nt, Artificial Sequence
  Description of Artificial Sequence: Synthetic oligonucleotide
  Sense strand starting at position 3662 of SEQ ID NO: 917258
uguuaaaggcaauguguga

SEQ ID NO: 1221293 - RNA, 19 nt, Artificial Sequence
  Description of Artificial Sequence: Synthetic oligonucleotide
  Antisense strand to SEQ ID NO: 1221292
ucacacauugccuuuaaca

SEQ ID NO: 1221294 - RNA, 19 nt, Artificial Sequence
  Description of Artificial Sequence: Synthetic oligonucleotide
  Sense strand starting at position 3680 of SEQ ID NO: 917258
aggacaaugcagugugauu

SEQ ID NO: 1221295 - RNA, 19 nt, Artificial Sequence
  Description of Artificial Sequence: Synthetic oligonucleotide
  Antisense strand to SEQ ID NO: 1221294
aaucacacugcauuguccu

SEQ ID NO: 1221296 - RNA, 19 nt, Artificial Sequence
  Description of Artificial Sequence: Synthetic oligonucleotide
  Sense strand starting at position 3741 of SEQ ID NO: 917258
auuccacaggugugcuaua

SEQ ID NO: 1221297 - RNA, 19 nt, Artificial Sequence
  Description of Artificial Sequence: Synthetic oligonucleotide
  Antisense strand to SEQ ID NO: 1221296
uauagcacaccuguggaau

SEQ ID NO: 1221298 - RNA, 19 nt, Artificial Sequence
  Description of Artificial Sequence: Synthetic oligonucleotide
  Sense strand starting at position 3746 of SEQ ID NO: 917258
acaggugugcuauaauauu

SEQ ID NO: 1221299 - RNA, 19 nt, Artificial Sequence
  Description of Artificial Sequence: Synthetic oligonucleotide
  Antisense strand to SEQ ID NO: 1221298
aauauuauagcacaccugu

SEQ ID NO: 1221300 - RNA, 19 nt, Artificial Sequence
  Description of Artificial Sequence: Synthetic oligonucleotide
  Sense strand starting at position 3810 of SEQ ID NO: 917258
acuuguuucuuccugagac

SEQ ID NO: 1221301 - RNA, 19 nt, Artificial Sequence
  Description of Artificial Sequence: Synthetic oligonucleotide
  Antisense strand to SEQ ID NO: 1221300
gucucaggaagaaacaagu

SEQ ID NO: 1221302 - RNA, 19 nt, Artificial Sequence
  Description of Artificial Sequence: Synthetic oligonucleotide
  Sense strand starting at position 3812 of SEQ ID NO: 917258
uuguuucuuccugagacac

SEQ ID NO: 1221303 - RNA, 19 nt, Artificial Sequence
  Description of Artificial Sequence: Synthetic oligonucleotide
  Antisense strand to SEQ ID NO: 1221302
gugucucaggaagaaacaa

SEQ ID NO: 1221304 - RNA, 19 nt, Artificial Sequence
  Description of Artificial Sequence: Synthetic oligonucleotide
  Sense strand starting at position 3867 of SEQ ID NO: 917258
ugcagccaucagugaagau

SEQ ID NO: 1221305 - RNA, 19 nt, Artificial Sequence
  Description of Artificial Sequence: Synthetic oligonucleotide
  Antisense strand to SEQ ID NO: 1221304
aucuucacugauggcugca

SEQ ID NO: 1221306 - RNA, 19 nt, Artificial Sequence
  Description of Artificial Sequence: Synthetic oligonucleotide
  Sense strand starting at position 3868 of SEQ ID NO: 917258
gcagccaucagugaagauc

SEQ ID NO: 1221307 - RNA, 19 nt, Artificial Sequence
  Description of Artificial Sequence: Synthetic oligonucleotide
  Antisense strand to SEQ ID NO: 1221306
gaucuucacugauggcugc

SEQ ID NO: 1221308 - RNA, 19 nt, Artificial Sequence
  Description of Artificial Sequence: Synthetic oligonucleotide
  Sense strand starting at position 3903 of SEQ ID NO: 917258
augcuaaaguuugcccaua

SEQ ID NO: 1221309 - RNA, 19 nt, Artificial Sequence
  Description of Artificial Sequence: Synthetic oligonucleotide
  Antisense strand to SEQ ID NO: 1221308
uaugggcaaacuuuagcau

SEQ ID NO: 1221310 - RNA, 19 nt, Artificial Sequence
  Description of Artificial Sequence: Synthetic oligonucleotide
  Sense strand starting at position 3908 of SEQ ID NO: 917258
aaaguuugcccauaggaua

SEQ ID NO: 1221311 - RNA, 19 nt, Artificial Sequence
  Description of Artificial Sequence: Synthetic oligonucleotide
  Antisense strand to SEQ ID NO: 1221310
uauccuaugggcaaacuuu

SEQ ID NO: 1221312 - RNA, 19 nt, Artificial Sequence
  Description of Artificial Sequence: Synthetic oligonucleotide
  Sense strand starting at position 3935 of SEQ ID NO: 917258
cuuguuuagacagguggaa

SEQ ID NO: 1221313 - RNA, 19 nt, Artificial Sequence
  Description of Artificial Sequence: Synthetic oligonucleotide
  Antisense strand to SEQ ID NO: 1221312
uuccaccugucuaaacaag

SEQ ID NO: 1221314 - RNA, 19 nt, Artificial Sequence
  Description of Artificial Sequence: Synthetic oligonucleotide
  Sense strand starting at position 3937 of SEQ ID NO: 917258
uguuuagacagguggaauu

SEQ ID NO: 1221315 - RNA, 19 nt, Artificial Sequence
  Description of Artificial Sequence: Synthetic oligonucleotide
  Antisense strand to SEQ ID NO: 1221314
aauuccaccugucuaaaca

SEQ ID NO: 1221316 - RNA, 19 nt, Artificial Sequence
  Description of Artificial Sequence: Synthetic oligonucleotide
  Sense strand starting at position 3948 of SEQ ID NO: 917259
guggaauucuucucaauaa

SEQ ID NO: 1221317 - RNA, 19 nt, Artificial Sequence
  Description of Artificial Sequence: Synthetic oligonucleotide
  Antisense strand to SEQ ID NO: 1221316
uuauugagaagaauuccac

SEQ ID NO: 1221318 - RNA, 19 nt, Artificial Sequence
  Description of Artificial Sequence: Synthetic oligonucleotide
  Sense strand starting at position 67 of SEQ ID NO: 917259
accuguugucuuugauuuc

SEQ ID NO: 1221319 - RNA, 19 nt, Artificial Sequence
  Description of Artificial Sequence: Synthetic oligonucleotide
  Antisense strand to SEQ ID NO: 1221318
gaaaucaaagacaacaggu

SEQ ID NO: 1221320 - RNA, 19 nt, Artificial Sequence
  Description of Artificial Sequence: Synthetic oligonucleotide
  Sense strand starting at position 179 of SEQ ID NO: 917259
aacuguaucuaggcaugaa

SEQ ID NO: 1221321 - RNA, 19 nt, Artificial Sequence
  Description of Artificial Sequence: Synthetic oligonucleotide
  Antisense strand to SEQ ID NO: 1221320
uucaugccuagauacaguu

SEQ ID NO: 1221322 - RNA, 19 nt, Artificial Sequence
  Description of Artificial Sequence: Synthetic oligonucleotide
  Sense strand starting at position 191 of SEQ ID NO: 917259
gcaugaaagccugaaauac

SEQ ID NO: 1221323 - RNA, 19 nt, Artificial Sequence
  Description of Artificial Sequence: Synthetic oligonucleotide
  Antisense strand to SEQ ID NO: 1221322
guauuucaggcuuucaugc

SEQ ID NO: 1221324 - RNA, 19 nt, Artificial Sequence
  Description of Artificial Sequence: Synthetic oligonucleotide
  Sense strand starting at position 733 of SEQ ID NO: 917259
gguuuacaauuccucauga

SEQ ID NO: 1221325 - RNA, 19 nt, Artificial Sequence
  Description of Artificial Sequence: Synthetic oligonucleotide
  Antisense strand to SEQ ID NO: 1221324
ucaugaggaauuguaaacc

SEQ ID NO: 1221326 - RNA, 19 nt, Artificial Sequence
  Description of Artificial Sequence: Synthetic oligonucleotide
  Sense strand starting at position 741 of SEQ ID NO: 917259
auuccucaugaauggcaaa

SEQ ID NO: 1221327 - RNA, 19 nt, Artificial Sequence
  Description of Artificial Sequence: Synthetic oligonucleotide
  Antisense strand to SEQ ID NO: 1221326
uuugccauucaugaggaau

SEQ ID NO: 1221328 - RNA, 19 nt, Artificial Sequence
  Description of Artificial Sequence: Synthetic oligonucleotide
  Sense strand starting at position 789 of SEQ ID NO: 917259
gacaaugaucccgggcauu

SEQ ID NO: 1221329 - RNA, 19 nt, Artificial Sequence
  Description of Artificial Sequence: Synthetic oligonucleotide
  Antisense strand to SEQ ID NO: 1221328
aaugcccgggaucauuguc

SEQ ID NO: 1221330 - RNA, 19 nt, Artificial Sequence
  Description of Artificial Sequence: Synthetic oligonucleotide
  Sense strand starting at position 801 of SEQ ID NO: 917259
gggcauuaaggccaacaau

SEQ ID NO: 1221331 - RNA, 19 nt, Artificial Sequence
  Description of Artificial Sequence: Synthetic oligonucleotide
  Antisense strand to SEQ ID NO: 1221330
auuguuggccuuaaugccc

SEQ ID NO: 1221332 - RNA, 19 nt, Artificial Sequence
  Description of Artificial Sequence: Synthetic oligonucleotide
  Sense strand starting at position 952 of SEQ ID NO: 917259
cgagauucacaaugcggaa

SEQ ID NO: 1221333 - RNA, 19 nt, Artificial Sequence
  Description of Artificial Sequence: Synthetic oligonucleotide
  Antisense strand to SEQ ID NO: 1221332
uuccgcauugugaaucucg

SEQ ID NO: 1221334 - RNA, 19 nt, Artificial Sequence
  Description of Artificial Sequence: Synthetic oligonucleotide
  Sense strand starting at position 1004 of SEQ ID NO: 917259
aaagauaugcgcgaaggga

SEQ ID NO: 1221335 - RNA, 19 nt, Artificial Sequence
  Description of Artificial Sequence: Synthetic oligonucleotide
  Antisense strand to SEQ ID NO: 1221334
ucccuucgcgcauaucuuu

SEQ ID NO: 1221336 - RNA, 19 nt, Artificial Sequence
  Description of Artificial Sequence: Synthetic oligonucleotide
  Sense strand starting at position 1238 of SEQ ID NO: 917259
ccgugaaucccugagacaa

SEQ ID NO: 1221337 - RNA, 19 nt, Artificial Sequence
  Description of Artificial Sequence: Synthetic oligonucleotide
  Antisense strand to SEQ ID NO: 1221336
uugucucagggauucacgg

SEQ ID NO: 1221338 - RNA, 19 nt, Artificial Sequence
  Description of Artificial Sequence: Synthetic oligonucleotide
  Sense strand starting at position 1913 of SEQ ID NO: 917259
auguaucgcacugaucaga

SEQ ID NO: 1221339 - RNA, 19 nt, Artificial Sequence
  Description of Artificial Sequence: Synthetic oligonucleotide
  Antisense strand to SEQ ID NO: 1221338
ucugaucagugcgauacau

SEQ ID NO: 1221340 - RNA, 19 nt, Artificial Sequence
  Description of Artificial Sequence: Synthetic oligonucleotide
  Sense strand starting at position 2008 of SEQ ID NO: 917259
ucgagccuucuggaaagau

SEQ ID NO: 1221341 - RNA, 19 nt, Artificial Sequence
  Description of Artificial Sequence: Synthetic oligonucleotide
  Antisense strand to SEQ ID NO: 1221340
aucuuuccagaaggcucga

SEQ ID NO: 1221342 - RNA, 19 nt, Artificial Sequence
  Description of Artificial Sequence: Synthetic oligonucleotide
  Sense strand starting at position 2360 of SEQ ID NO: 917259
agaagugugcgccuugcau

SEQ ID NO: 1221343 - RNA, 19 nt, Artificial Sequence
  Description of Artificial Sequence: Synthetic oligonucleotide
  Antisense strand to SEQ ID NO: 1221342
augcaaggcgcacacuucu

SEQ ID NO: 1221344 - RNA, 19 nt, Artificial Sequence
  Description of Artificial Sequence: Synthetic oligonucleotide
  Sense strand starting at position 2528 of SEQ ID NO: 917259
cuucuauuauugucuggau

SEQ ID NO: 1221345 - RNA, 19 nt, Artificial Sequence
  Description of Artificial Sequence: Synthetic oligonucleotide
  Antisense strand to SEQ ID NO: 1221344
auccagacaauaauagaag

SEQ ID NO: 1221346 - RNA, 19 nt, Artificial Sequence
  Description of Artificial Sequence: Synthetic oligonucleotide
  Sense strand starting at position 2529 of SEQ ID NO: 917259
uucuauuauugucuggauu

SEQ ID NO: 1221347 - RNA, 19 nt, Artificial Sequence
  Description of Artificial Sequence: Synthetic oligonucleotide
  Antisense strand to SEQ ID NO: 1221346
aauccagacaauaauagaa

SEQ ID NO: 1221348 - RNA, 19 nt, Artificial Sequence
  Description of Artificial Sequence: Synthetic oligonucleotide
  Sense strand starting at position 2530 of SEQ ID NO: 917259
ucuauuauugucuggauua

SEQ ID NO: 1221349 - RNA, 19 nt, Artificial Sequence
  Description of Artificial Sequence: Synthetic oligonucleotide
  Antisense strand to SEQ ID NO: 1221348
uaauccagacaauaauaga

SEQ ID NO: 1221350 - RNA, 19 nt, Artificial Sequence
  Description of Artificial Sequence: Synthetic oligonucleotide
  Sense strand starting at position 2562 of SEQ ID NO: 917259
ugcguuacgacuuaggaga

SEQ ID NO: 1221351 - RNA, 19 nt, Artificial Sequence
  Description of Artificial Sequence: Synthetic oligonucleotide
  Antisense strand to SEQ ID NO: 1221350
ucuccuaagucguaacgca

SEQ ID NO: 1221352 - RNA, 19 nt, Artificial Sequence
  Description of Artificial Sequence: Synthetic oligonucleotide
  Sense strand starting at position 2622 of SEQ ID NO: 917259
uuguguuaaguguucuugu

SEQ ID NO: 1221353 - RNA, 19 nt, Artificial Sequence
  Description of Artificial Sequence: Synthetic oligonucleotide
  Antisense strand to SEQ ID NO: 1221352
acaagaacacuuaacacaa

SEQ ID NO: 1221354 - RNA, 19 nt, Artificial Sequence
  Description of Artificial Sequence: Synthetic oligonucleotide
  Sense strand starting at position 2659 of SEQ ID NO: 917259
ugaucucuuguggaguaaa

SEQ ID NO: 1221355 - RNA, 19 nt, Artificial Sequence
  Description of Artificial Sequence: Synthetic oligonucleotide
  Antisense strand to SEQ ID NO: 1221354
uuuacuccacaagagauca

SEQ ID NO: 1221356 - RNA, 19 nt, Artificial Sequence
  Description of Artificial Sequence: Synthetic oligonucleotide
  Sense strand starting at position 2939 of SEQ ID NO: 917259
aacuguguugcugauaacu

SEQ ID NO: 1221357 - RNA, 19 nt, Artificial Sequence
  Description of Artificial Sequence: Synthetic oligonucleotide
  Antisense strand to SEQ ID NO: 1221356
aguuaucagcaacacaguu

SEQ ID NO: 1221358 - RNA, 19 nt, Artificial Sequence
  Description of Artificial Sequence: Synthetic oligonucleotide
  Sense strand starting at position 2948 of SEQ ID NO: 917259
gcugauaacuuaucagguc

SEQ ID NO: 1221359 - RNA, 19 nt, Artificial Sequence
  Description of Artificial Sequence: Synthetic oligonucleotide
  Antisense strand to SEQ ID NO: 1221358
gaccugauaaguuaucagc

SEQ ID NO: 1221360 - RNA, 19 nt, Artificial Sequence
  Description of Artificial Sequence: Synthetic oligonucleotide
  Sense strand starting at position 3008 of SEQ ID NO: 917259
cugaguuuaccuuauguca

SEQ ID NO: 1221361 - RNA, 19 nt, Artificial Sequence
  Description of Artificial Sequence: Synthetic oligonucleotide
  Antisense strand to SEQ ID NO: 1221360
ugacauaagguaaacucag

SEQ ID NO: 1221362 - RNA, 19 nt, Artificial Sequence
  Description of Artificial Sequence: Synthetic oligonucleotide
  Sense strand starting at position 3064 of SEQ ID NO: 917259
uggauaagcguguaauuga

SEQ ID NO: 1221363 - RNA, 19 nt, Artificial Sequence
  Description of Artificial Sequence: Synthetic oligonucleotide
  Antisense strand to SEQ ID NO: 1221362
ucaauuacacgcuuaucca

SEQ ID NO: 1221364 - RNA, 19 nt, Artificial Sequence
  Description of Artificial Sequence: Synthetic oligonucleotide
  Sense strand starting at position 3072 of SEQ ID NO: 917259
cguguaauugaauaaggag

SEQ ID NO: 1221365 - RNA, 19 nt, Artificial Sequence
  Description of Artificial Sequence: Synthetic oligonucleotide
  Antisense strand to SEQ ID NO: 1221364
cuccuuauucaauuacacg

SEQ ID NO: 1221366 - RNA, 19 nt, Artificial Sequence
  Description of Artificial Sequence: Synthetic oligonucleotide
  Sense strand starting at position 3087 of SEQ ID NO: 917259
ggaguuguaaccuaaaguu

SEQ ID NO: 1221367 - RNA, 19 nt, Artificial Sequence
  Description of Artificial Sequence: Synthetic oligonucleotide
  Antisense strand to SEQ ID NO: 1221366
aacuuuagguuacaacucc

SEQ ID NO: 1221368 - RNA, 19 nt, Artificial Sequence
  Description of Artificial Sequence: Synthetic oligonucleotide
  Sense strand starting at position 3132 of SEQ ID NO: 917259
gggaauuccuccuugucua

SEQ ID NO: 1221369 - RNA, 19 nt, Artificial Sequence
  Description of Artificial Sequence: Synthetic oligonucleotide
  Antisense strand to SEQ ID NO: 1221368
uagacaaggaggaauuccc

SEQ ID NO: 1221370 - RNA, 19 nt, Artificial Sequence
  Description of Artificial Sequence: Synthetic oligonucleotide
  Sense strand starting at position 3133 of SEQ ID NO: 917259
ggaauuccuccuugucuau

SEQ ID NO: 1221371 - RNA, 19 nt, Artificial Sequence
  Description of Artificial Sequence: Synthetic oligonucleotide
  Antisense strand to SEQ ID NO: 1221370
auagacaaggaggaauucc

SEQ ID NO: 1221372 - RNA, 19 nt, Artificial Sequence
  Description of Artificial Sequence: Synthetic oligonucleotide
  Sense strand starting at position 3163 of SEQ ID NO: 917259
gguuaagucagaggcaaga

SEQ ID NO: 1221373 - RNA, 19 nt, Artificial Sequence
  Description of Artificial Sequence: Synthetic oligonucleotide
  Antisense strand to SEQ ID NO: 1221372
ucuugccucugacuuaacc

SEQ ID NO: 1221374 - RNA, 19 nt, Artificial Sequence
  Description of Artificial Sequence: Synthetic oligonucleotide
  Sense strand starting at position 3190 of SEQ ID NO: 917259
ccagguuuacauuacaugu

SEQ ID NO: 1221375 - RNA, 19 nt, Artificial Sequence
  Description of Artificial Sequence: Synthetic oligonucleotide
  Antisense strand to SEQ ID NO: 1221374
acauguaauguaaaccugg

SEQ ID NO: 1221376 - RNA, 19 nt, Artificial Sequence
  Description of Artificial Sequence: Synthetic oligonucleotide
  Sense strand starting at position 3243 of SEQ ID NO: 917259
uuagguggcuuacuuaaca

SEQ ID NO: 1221377 - RNA, 19 nt, Artificial Sequence
  Description of Artificial Sequence: Synthetic oligonucleotide
  Antisense strand to SEQ ID NO: 1221376
uguuaaguaagccaccuaa

SEQ ID NO: 1221378 - RNA, 19 nt, Artificial Sequence
  Description of Artificial Sequence: Synthetic oligonucleotide
  Sense strand starting at position 3333 of SEQ ID NO: 917259
gacauauaguuagcuguaa

SEQ ID NO: 1221379 - RNA, 19 nt, Artificial Sequence
  Description of Artificial Sequence: Synthetic oligonucleotide
  Antisense strand to SEQ ID NO: 1221378
uuacagcuaacuauauguc

SEQ ID NO: 1221380 - RNA, 19 nt, Artificial Sequence
  Description of Artificial Sequence: Synthetic oligonucleotide
  Sense strand starting at position 3644 of SEQ ID NO: 917259
gccuccuggagucagacau

SEQ ID NO: 1221381 - RNA, 19 nt, Artificial Sequence
  Description of Artificial Sequence: Synthetic oligonucleotide
  Antisense strand to SEQ ID NO: 1221380
augucugacuccaggaggc

SEQ ID NO: 1221382 - RNA, 19 nt, Artificial Sequence
  Description of Artificial Sequence: Synthetic oligonucleotide
  Sense strand starting at position 3656 of SEQ ID NO: 917259
cagacaucaugggcuugaa

SEQ ID NO: 1221383 - RNA, 19 nt, Artificial Sequence
  Description of Artificial Sequence: Synthetic oligonucleotide
  Antisense strand to SEQ ID NO: 1221382
uucaagcccaugaugucug

SEQ ID NO: 1221384 - RNA, 19 nt, Artificial Sequence
  Description of Artificial Sequence: Synthetic oligonucleotide
  Sense strand starting at position 3685 of SEQ ID NO: 917259
ucuuauuugugagcugugu

SEQ ID NO: 1221385 - RNA, 19 nt, Artificial Sequence
  Description of Artificial Sequence: Synthetic oligonucleotide
  Antisense strand to SEQ ID NO: 1221384
acacagcucacaaauaaga

SEQ ID NO: 1221386 - RNA, 19 nt, Artificial Sequence
  Description of Artificial Sequence: Synthetic oligonucleotide
  Sense strand starting at position 3687 of SEQ ID NO: 917259
uuauuugugagcuguguga

SEQ ID NO: 1221387 - RNA, 19 nt, Artificial Sequence
  Description of Artificial Sequence: Synthetic oligonucleotide
  Antisense strand to SEQ ID NO: 1221386
ucacacagcucacaaauaa

SEQ ID NO: 1221388 - RNA, 19 nt, Artificial Sequence
  Description of Artificial Sequence: Synthetic oligonucleotide
  Sense strand starting at position 3689 of SEQ ID NO: 917259
auuugugagcugugugaug

SEQ ID NO: 1221389 - RNA, 19 nt, Artificial Sequence
  Description of Artificial Sequence: Synthetic oligonucleotide
  Antisense strand to SEQ ID NO: 1221388
caucacacagcucacaaau

SEQ ID NO: 1221390 - RNA, 19 nt, Artificial Sequence
  Description of Artificial Sequence: Synthetic oligonucleotide
  Sense strand starting at position 3696 of SEQ ID NO: 917259
agcugugugauguugcgau

SEQ ID NO: 1221391 - RNA, 19 nt, Artificial Sequence
  Description of Artificial Sequence: Synthetic oligonucleotide
  Antisense strand to SEQ ID NO: 1221390
aucgcaacaucacacagcu

SEQ ID NO: 1221392 - RNA, 19 nt, Artificial Sequence
  Description of Artificial Sequence: Synthetic oligonucleotide
  Sense strand starting at position 3751 of SEQ ID NO: 917259
uuauguaaugauggaaacu

SEQ ID NO: 1221393 - RNA, 19 nt, Artificial Sequence
  Description of Artificial Sequence: Synthetic oligonucleotide
  Antisense strand to SEQ ID NO: 1221392
aguuuccaucauuacauaa

SEQ ID NO: 1221394 - RNA, 19 nt, Artificial Sequence
  Description of Artificial Sequence: Synthetic oligonucleotide
  Sense strand starting at position 3802 of SEQ ID NO: 917259
acauauaaagucugucauc

SEQ ID NO: 1221395 - RNA, 19 nt, Artificial Sequence
  Description of Artificial Sequence: Synthetic oligonucleotide
  Antisense strand to SEQ ID NO: 1221394
gaugacagacuuuauaugu

SEQ ID NO: 1221396 - RNA, 19 nt, Artificial Sequence
  Description of Artificial Sequence: Synthetic oligonucleotide
  Sense strand starting at position 3967 of SEQ ID NO: 917260
cagugaaagucaguacaaa

SEQ ID NO: 1221397 - RNA, 19 nt, Artificial Sequence
  Description of Artificial Sequence: Synthetic oligonucleotide
  Antisense strand to SEQ ID NO: 1221396
uuuguacugacuuucacug

SEQ ID NO: 1221398 - RNA, 19 nt, Artificial Sequence
  Description of Artificial Sequence: Synthetic oligonucleotide
  Sense strand starting at position 366 of SEQ ID NO: 917260
gguuuacaauuccucauga

SEQ ID NO: 1221399 - RNA, 19 nt, Artificial Sequence
  Description of Artificial Sequence: Synthetic oligonucleotide
  Antisense strand to SEQ ID NO: 1221398
ucaugaggaauuguaaacc

SEQ ID NO: 1221400 - RNA, 19 nt, Artificial Sequence
  Description of Artificial Sequence: Synthetic oligonucleotide
  Sense strand starting at position 374 of SEQ ID NO: 917260
auuccucaugaauggcaaa

SEQ ID NO: 1221401 - RNA, 19 nt, Artificial Sequence
  Description of Artificial Sequence: Synthetic oligonucleotide
  Antisense strand to SEQ ID NO: 1221400
uuugccauucaugaggaau

SEQ ID NO: 1221402 - RNA, 19 nt, Artificial Sequence
  Description of Artificial Sequence: Synthetic oligonucleotide
  Sense strand starting at position 422 of SEQ ID NO: 917260
gacaaugaucccgggcauu

SEQ ID NO: 1221403 - RNA, 19 nt, Artificial Sequence
  Description of Artificial Sequence: Synthetic oligonucleotide
  Antisense strand to SEQ ID NO: 1221402
aaugcccgggaucauuguc

SEQ ID NO: 1221404 - RNA, 19 nt, Artificial Sequence
  Description of Artificial Sequence: Synthetic oligonucleotide
  Sense strand starting at position 434 of SEQ ID NO: 917260
gggcauuaaggccaacaau

SEQ ID NO: 1221405 - RNA, 19 nt, Artificial Sequence
  Description of Artificial Sequence: Synthetic oligonucleotide
  Antisense strand to SEQ ID NO: 1221404
auuguuggccuuaaugccc

SEQ ID NO: 1221406 - RNA, 19 nt, Artificial Sequence
  Description of Artificial Sequence: Synthetic oligonucleotide
  Sense strand starting at position 585 of SEQ ID NO: 917260
cgagauucacaaugcggaa

SEQ ID NO: 1221407 - RNA, 19 nt, Artificial Sequence
  Description of Artificial Sequence: Synthetic oligonucleotide
  Antisense strand to SEQ ID NO: 1221406
uuccgcauugugaaucucg

SEQ ID NO: 1221408 - RNA, 19 nt, Artificial Sequence
  Description of Artificial Sequence: Synthetic oligonucleotide
  Sense strand starting at position 637 of SEQ ID NO: 917260
aaagauaugcgcgaaggga

SEQ ID NO: 1221409 - RNA, 19 nt, Artificial Sequence
  Description of Artificial Sequence: Synthetic oligonucleotide
  Antisense strand to SEQ ID NO: 1221408
ucccuucgcgcauaucuuu

SEQ ID NO: 1221410 - RNA, 19 nt, Artificial Sequence
  Description of Artificial Sequence: Synthetic oligonucleotide
  Sense strand starting at position 871 of SEQ ID NO: 917260
ccgugaaucccugagacaa

SEQ ID NO: 1221411 - RNA, 19 nt, Artificial Sequence
  Description of Artificial Sequence: Synthetic oligonucleotide
  Antisense strand to SEQ ID NO: 1221410
uugucucagggauucacgg

SEQ ID NO: 1221412 - RNA, 19 nt, Artificial Sequence
  Description of Artificial Sequence: Synthetic oligonucleotide
  Sense strand starting at position 1546 of SEQ ID NO: 917260
auguaucgcacugaucaga

SEQ ID NO: 1221413 - RNA, 19 nt, Artificial Sequence
  Description of Artificial Sequence: Synthetic oligonucleotide
  Antisense strand to SEQ ID NO: 1221412
ucugaucagugcgauacau

SEQ ID NO: 1221414 - RNA, 19 nt, Artificial Sequence
  Description of Artificial Sequence: Synthetic oligonucleotide
  Sense strand starting at position 1641 of SEQ ID NO: 917260
ucgagccuucuggaaagau

SEQ ID NO: 1221415 - RNA, 19 nt, Artificial Sequence
  Description of Artificial Sequence: Synthetic oligonucleotide
  Antisense strand to SEQ ID NO: 1221414
aucuuuccagaaggcucga

SEQ ID NO: 1221416 - RNA, 19 nt, Artificial Sequence
  Description of Artificial Sequence: Synthetic oligonucleotide
  Sense strand starting at position 1824 of SEQ ID NO: 917260
ucggaauagucacaauuua

SEQ ID NO: 1221417 - RNA, 19 nt, Artificial Sequence
  Description of Artificial Sequence: Synthetic oligonucleotide
  Antisense strand to SEQ ID NO: 1221416
uaaauugugacuauuccga

SEQ ID NO: 1221418 - RNA, 19 nt, Artificial Sequence
  Description of Artificial Sequence: Synthetic oligonucleotide
  Sense strand starting at position 1993 of SEQ ID NO: 917260
agaagugugcgccuugcau

SEQ ID NO: 1221419 - RNA, 19 nt, Artificial Sequence
  Description of Artificial Sequence: Synthetic oligonucleotide
  Antisense strand to SEQ ID NO: 1221418
augcaaggcgcacacuucu

SEQ ID NO: 1221420 - RNA, 19 nt, Artificial Sequence
  Description of Artificial Sequence: Synthetic oligonucleotide
  Sense strand starting at position 2161 of SEQ ID NO: 917260
cuucuauuauugucuggau

SEQ ID NO: 1221421 - RNA, 19 nt, Artificial Sequence
  Description of Artificial Sequence: Synthetic oligonucleotide
  Antisense strand to SEQ ID NO: 1221420
auccagacaauaauagaag

SEQ ID NO: 1221422 - RNA, 19 nt, Artificial Sequence
  Description of Artificial Sequence: Synthetic oligonucleotide
  Sense strand starting at position 2162 of SEQ ID NO: 917260
uucuauuauugucuggauu

SEQ ID NO: 1221423 - RNA, 19 nt, Artificial Sequence
  Description of Artificial Sequence: Synthetic oligonucleotide
  Antisense strand to SEQ ID NO: 1221422
aauccagacaauaauagaa

SEQ ID NO: 1221424 - RNA, 19 nt, Artificial Sequence
  Description of Artificial Sequence: Synthetic oligonucleotide
  Sense strand starting at position 2163 of SEQ ID NO: 917260
ucuauuauugucuggauua

SEQ ID NO: 1221425 - RNA, 19 nt, Artificial Sequence
  Description of Artificial Sequence: Synthetic oligonucleotide
  Antisense strand to SEQ ID NO: 1221424
uaauccagacaauaauaga

SEQ ID NO: 1221426 - RNA, 19 nt, Artificial Sequence
  Description of Artificial Sequence: Synthetic oligonucleotide
  Sense strand starting at position 2195 of SEQ ID NO: 917260
ugcguuacgacuuaggaga

SEQ ID NO: 1221427 - RNA, 19 nt, Artificial Sequence
  Description of Artificial Sequence: Synthetic oligonucleotide
  Antisense strand to SEQ ID NO: 1221426
ucuccuaagucguaacgca

SEQ ID NO: 1221428 - RNA, 19 nt, Artificial Sequence
  Description of Artificial Sequence: Synthetic oligonucleotide
  Sense strand starting at position 2255 of SEQ ID NO: 917260
uuguguuaaguguucuugu

SEQ ID NO: 1221429 - RNA, 19 nt, Artificial Sequence
  Description of Artificial Sequence: Synthetic oligonucleotide
  Antisense strand to SEQ ID NO: 1221428
acaagaacacuuaacacaa

SEQ ID NO: 1221430 - RNA, 19 nt, Artificial Sequence
  Description of Artificial Sequence: Synthetic oligonucleotide
  Sense strand starting at position 2292 of SEQ ID NO: 917260
ugaucucuuguggaguaaa

SEQ ID NO: 1221431 - RNA, 19 nt, Artificial Sequence
  Description of Artificial Sequence: Synthetic oligonucleotide
  Antisense strand to SEQ ID NO: 1221430
uuuacuccacaagagauca

SEQ ID NO: 1221432 - RNA, 19 nt, Artificial Sequence
  Description of Artificial Sequence: Synthetic oligonucleotide
  Sense strand starting at position 2572 of SEQ ID NO: 917260
aacuguguugcugauaacu

SEQ ID NO: 1221433 - RNA, 19 nt, Artificial Sequence
  Description of Artificial Sequence: Synthetic oligonucleotide
  Antisense strand to SEQ ID NO: 1221432
aguuaucagcaacacaguu

SEQ ID NO: 1221434 - RNA, 19 nt, Artificial Sequence
  Description of Artificial Sequence: Synthetic oligonucleotide
  Sense strand starting at position 2581 of SEQ ID NO: 917260
gcugauaacuuaucagguc

SEQ ID NO: 1221435 - RNA, 19 nt, Artificial Sequence
  Description of Artificial Sequence: Synthetic oligonucleotide
  Antisense strand to SEQ ID NO: 1221434
gaccugauaaguuaucagc

SEQ ID NO: 1221436 - RNA, 19 nt, Artificial Sequence
  Description of Artificial Sequence: Synthetic oligonucleotide
  Sense strand starting at position 2641 of SEQ ID NO: 917260
cugaguuuaccuuauguca

SEQ ID NO: 1221437 - RNA, 19 nt, Artificial Sequence
  Description of Artificial Sequence: Synthetic oligonucleotide
  Antisense strand to SEQ ID NO: 1221436
ugacauaagguaaacucag

SEQ ID NO: 1221438 - RNA, 19 nt, Artificial Sequence
  Description of Artificial Sequence: Synthetic oligonucleotide
  Sense strand starting at position 2697 of SEQ ID NO: 917260
uggauaagcguguaauuga

SEQ ID NO: 1221439 - RNA, 19 nt, Artificial Sequence
  Description of Artificial Sequence: Synthetic oligonucleotide
  Antisense strand to SEQ ID NO: 1221438
ucaauuacacgcuuaucca

SEQ ID NO: 1221440 - RNA, 19 nt, Artificial Sequence
  Description of Artificial Sequence: Synthetic oligonucleotide
  Sense strand starting at position 2705 of SEQ ID NO: 917260
cguguaauugaauaaggag

SEQ ID NO: 1221441 - RNA, 19 nt, Artificial Sequence
  Description of Artificial Sequence: Synthetic oligonucleotide
  Antisense strand to SEQ ID NO: 1221440
cuccuuauucaauuacacg

SEQ ID NO: 1221442 - RNA, 19 nt, Artificial Sequence
  Description of Artificial Sequence: Synthetic oligonucleotide
  Sense strand starting at position 2720 of SEQ ID NO: 917260
ggaguuguaaccuaaaguu

SEQ ID NO: 1221443 - RNA, 19 nt, Artificial Sequence
  Description of Artificial Sequence: Synthetic oligonucleotide
  Antisense strand to SEQ ID NO: 1221442
aacuuuagguuacaacucc

SEQ ID NO: 1221444 - RNA, 19 nt, Artificial Sequence
  Description of Artificial Sequence: Synthetic oligonucleotide
  Sense strand starting at position 2765 of SEQ ID NO: 917260
gggaauuccuccuugucua

SEQ ID NO: 1221445 - RNA, 19 nt, Artificial Sequence
  Description of Artificial Sequence: Synthetic oligonucleotide
  Antisense strand to SEQ ID NO: 1221444
uagacaaggaggaauuccc

SEQ ID NO: 1221446 - RNA, 19 nt, Artificial Sequence
  Description of Artificial Sequence: Synthetic oligonucleotide
  Sense strand starting at position 2766 of SEQ ID NO: 917260
ggaauuccuccuugucuau

SEQ ID NO: 1221447 - RNA, 19 nt, Artificial Sequence
  Description of Artificial Sequence: Synthetic oligonucleotide
  Antisense strand to SEQ ID NO: 1221446
auagacaaggaggaauucc

SEQ ID NO: 1221448 - RNA, 19 nt, Artificial Sequence
  Description of Artificial Sequence: Synthetic oligonucleotide
  Sense strand starting at position 2796 of SEQ ID NO: 917260
gguuaagucagaggcaaga

SEQ ID NO: 1221449 - RNA, 19 nt, Artificial Sequence
  Description of Artificial Sequence: Synthetic oligonucleotide
  Antisense strand to SEQ ID NO: 1221448
ucuugccucugacuuaacc

SEQ ID NO: 1221450 - RNA, 19 nt, Artificial Sequence
  Description of Artificial Sequence: Synthetic oligonucleotide
  Sense strand starting at position 2823 of SEQ ID NO: 917260
ccagguuuacauuacaugu

SEQ ID NO: 1221451 - RNA, 19 nt, Artificial Sequence
  Description of Artificial Sequence: Synthetic oligonucleotide
  Antisense strand to SEQ ID NO: 1221450
acauguaauguaaaccugg

SEQ ID NO: 1221452 - RNA, 19 nt, Artificial Sequence
  Description of Artificial Sequence: Synthetic oligonucleotide
  Sense strand starting at position 2876 of SEQ ID NO: 917260
uuagguggcuuacuuaaca

SEQ ID NO: 1221453 - RNA, 19 nt, Artificial Sequence
  Description of Artificial Sequence: Synthetic oligonucleotide
  Antisense strand to SEQ ID NO: 1221452
uguuaaguaagccaccuaa

SEQ ID NO: 1221454 - RNA, 19 nt, Artificial Sequence
  Description of Artificial Sequence: Synthetic oligonucleotide
  Sense strand starting at position 2966 of SEQ ID NO: 917260
gacauauaguuagcuguaa

SEQ ID NO: 1221455 - RNA, 19 nt, Artificial Sequence
  Description of Artificial Sequence: Synthetic oligonucleotide
  Antisense strand to SEQ ID NO: 1221454
uuacagcuaacuauauguc

SEQ ID NO: 1221456 - RNA, 19 nt, Artificial Sequence
  Description of Artificial Sequence: Synthetic oligonucleotide
  Sense strand starting at position 3277 of SEQ ID NO: 917260
gccuccuggagucagacau

SEQ ID NO: 1221457 - RNA, 19 nt, Artificial Sequence
  Description of Artificial Sequence: Synthetic oligonucleotide
  Antisense strand to SEQ ID NO: 1221456
augucugacuccaggaggc

SEQ ID NO: 1221458 - RNA, 19 nt, Artificial Sequence
  Description of Artificial Sequence: Synthetic oligonucleotide
  Sense strand starting at position 3289 of SEQ ID NO: 917260
cagacaucaugggcuugaa

SEQ ID NO: 1221459 - RNA, 19 nt, Artificial Sequence
  Description of Artificial Sequence: Synthetic oligonucleotide
  Antisense strand to SEQ ID NO: 1221458
uucaagcccaugaugucug

SEQ ID NO: 1221460 - RNA, 19 nt, Artificial Sequence
  Description of Artificial Sequence: Synthetic oligonucleotide
  Sense strand starting at position 3318 of SEQ ID NO: 917260
ucuuauuugugagcugugu

SEQ ID NO: 1221461 - RNA, 19 nt, Artificial Sequence
  Description of Artificial Sequence: Synthetic oligonucleotide
  Antisense strand to SEQ ID NO: 1221460
acacagcucacaaauaaga

SEQ ID NO: 1221462 - RNA, 19 nt, Artificial Sequence
  Description of Artificial Sequence: Synthetic oligonucleotide
  Sense strand starting at position 3320 of SEQ ID NO: 917260
uuauuugugagcuguguga

SEQ ID NO: 1221463 - RNA, 19 nt, Artificial Sequence
  Description of Artificial Sequence: Synthetic oligonucleotide
  Antisense strand to SEQ ID NO: 1221462
ucacacagcucacaaauaa

SEQ ID NO: 1221464 - RNA, 19 nt, Artificial Sequence
  Description of Artificial Sequence: Synthetic oligonucleotide
  Sense strand starting at position 3322 of SEQ ID NO: 917260
auuugugagcugugugaug

SEQ ID NO: 1221465 - RNA, 19 nt, Artificial Sequence
  Description of Artificial Sequence: Synthetic oligonucleotide
  Antisense strand to SEQ ID NO: 1221464
caucacacagcucacaaau

SEQ ID NO: 1221466 - RNA, 19 nt, Artificial Sequence
  Description of Artificial Sequence: Synthetic oligonucleotide
  Sense strand starting at position 3329 of SEQ ID NO: 917260
agcugugugauguugcgau

SEQ ID NO: 1221467 - RNA, 19 nt, Artificial Sequence
  Description of Artificial Sequence: Synthetic oligonucleotide
  Antisense strand to SEQ ID NO: 1221466
aucgcaacaucacacagcu

SEQ ID NO: 1221468 - RNA, 19 nt, Artificial Sequence
  Description of Artificial Sequence: Synthetic oligonucleotide
  Sense strand starting at position 3384 of SEQ ID NO: 917260
uuauguaaugauggaaacu

SEQ ID NO: 1221469 - RNA, 19 nt, Artificial Sequence
  Description of Artificial Sequence: Synthetic oligonucleotide
  Antisense strand to SEQ ID NO: 1221468
aguuuccaucauuacauaa

SEQ ID NO: 1221470 - RNA, 19 nt, Artificial Sequence
  Description of Artificial Sequence: Synthetic oligonucleotide
  Sense strand starting at position 3435 of SEQ ID NO: 917260
acauauaaagucugucauc

SEQ ID NO: 1221471 - RNA, 19 nt, Artificial Sequence
  Description of Artificial Sequence: Synthetic oligonucleotide
  Antisense strand to SEQ ID NO: 1221470
gaugacagacuuuauaugu

SEQ ID NO: 1221472 - RNA, 19 nt, Artificial Sequence
  Description of Artificial Sequence: Synthetic oligonucleotide
  Sense strand starting at position 3559 of SEQ ID NO: 917260
ggugguauuugauaaauug

SEQ ID NO: 1221473 - RNA, 19 nt, Artificial Sequence
  Description of Artificial Sequence: Synthetic oligonucleotide
  Antisense strand to SEQ ID NO: 1221472
caauuuaucaaauaccacc

SEQ ID NO: 1221474 - RNA, 19 nt, Artificial Sequence
  Description of Artificial Sequence: Synthetic oligonucleotide
  Sense strand starting at position 3600 of SEQ ID NO: 917260
cagugaaagucaguacaaa

SEQ ID NO: 1221475 - RNA, 19 nt, Artificial Sequence
  Description of Artificial Sequence: Synthetic oligonucleotide
  Antisense strand to SEQ ID NO: 1221474
uuuguacugacuuucacug

SEQ ID NO: 1221476 - RNA, 19 nt, Artificial Sequence
  Description of Artificial Sequence: Synthetic oligonucleotide
  Sense strand starting at position 3900 of SEQ ID NO: 917260
gaacaagagucugucucua

SEQ ID NO: 1221477 - RNA, 19 nt, Artificial Sequence
  Description of Artificial Sequence: Synthetic oligonucleotide
  Antisense strand to SEQ ID NO: 1221476
uagagacagacucuuguuc

SEQ ID NO: 1221478 - RNA, 19 nt, Artificial Sequence
  Description of Artificial Sequence: Synthetic oligonucleotide
  Sense strand starting at position 3900 of SEQ ID NO: 917259
gaacaagagucugucucua

SEQ ID NO: 1221479 - RNA, 19 nt, Artificial Sequence
  Description of Artificial Sequence: Synthetic oligonucleotide
  Antisense strand to SEQ ID NO: 1221478
uagagacagacucuuguuc

SEQ ID NO: 1221480 - RNA, 19 nt, Artificial Sequence
  Description of Artificial Sequence: Synthetic oligonucleotide
  Sense strand starting at position 3967 of SEQ ID NO: 917261
cagugaaagucaguacaaa

SEQ ID NO: 1221481 - RNA, 19 nt, Artificial Sequence
  Description of Artificial Sequence: Synthetic oligonucleotide
  Antisense strand to SEQ ID NO: 1221480
uuuguacugacuuucacug

SEQ ID NO: 1221482 - RNA, 19 nt, Artificial Sequence
  Description of Artificial Sequence: Synthetic oligonucleotide
  Sense strand starting at position 12 of SEQ ID NO: 917261
uguccugaaggcuggaaua

SEQ ID NO: 1221483 - RNA, 19 nt, Artificial Sequence
  Description of Artificial Sequence: Synthetic oligonucleotide
  Antisense strand to SEQ ID NO: 1221482
uauuccagccuucaggaca

SEQ ID NO: 1221484 - RNA, 19 nt, Artificial Sequence
  Description of Artificial Sequence: Synthetic oligonucleotide
  Sense strand starting at position 22 of SEQ ID NO: 917261
gcuggaauauugguuggga

SEQ ID NO: 1221485 - RNA, 19 nt, Artificial Sequence
  Description of Artificial Sequence: Synthetic oligonucleotide
  Antisense strand to SEQ ID NO: 1221484
ucccaaccaauauuccagc

SEQ ID NO: 1221486 - RNA, 19 nt, Artificial Sequence
  Description of Artificial Sequence: Synthetic oligonucleotide
  Sense strand starting at position 68 of SEQ ID NO: 917261
ucagaaugauggguaaguu

SEQ ID NO: 1221487 - RNA, 19 nt, Artificial Sequence
  Description of Artificial Sequence: Synthetic oligonucleotide
  Antisense strand to SEQ ID NO: 1221486
aacuuacccaucauucuga

SEQ ID NO: 1221488 - RNA, 19 nt, Artificial Sequence
  Description of Artificial Sequence: Synthetic oligonucleotide
  Sense strand starting at position 82 of SEQ ID NO: 917261
aaguuauugguuuaugacu

SEQ ID NO: 1221489 - RNA, 19 nt, Artificial Sequence
  Description of Artificial Sequence: Synthetic oligonucleotide
  Antisense strand to SEQ ID NO: 1221488
agucauaaaccaauaacuu

SEQ ID NO: 1221490 - RNA, 19 nt, Artificial Sequence
  Description of Artificial Sequence: Synthetic oligonucleotide
  Sense strand starting at position 289 of SEQ ID NO: 917261
ggcucuagucuauaaacaa

SEQ ID NO: 1221491 - RNA, 19 nt, Artificial Sequence
  Description of Artificial Sequence: Synthetic oligonucleotide
  Antisense strand to SEQ ID NO: 1221490
uuguuuauagacuagagcc

SEQ ID NO: 1221492 - RNA, 19 nt, Artificial Sequence
  Description of Artificial Sequence: Synthetic oligonucleotide
  Sense strand starting at position 388 of SEQ ID NO: 917261
cgaauauagcugggaaacu

SEQ ID NO: 1221493 - RNA, 19 nt, Artificial Sequence
  Description of Artificial Sequence: Synthetic oligonucleotide
  Antisense strand to SEQ ID NO: 1221492
aguuucccagcuauauucg

SEQ ID NO: 1221494 - RNA, 19 nt, Artificial Sequence
  Description of Artificial Sequence: Synthetic oligonucleotide
  Sense strand starting at position 419 of SEQ ID NO: 917261
cauacaggaugguuaacau

SEQ ID NO: 1221495 - RNA, 19 nt, Artificial Sequence
  Description of Artificial Sequence: Synthetic oligonucleotide
  Antisense strand to SEQ ID NO: 1221494
auguuaaccauccuguaug

SEQ ID NO: 1221496 - RNA, 19 nt, Artificial Sequence
  Description of Artificial Sequence: Synthetic oligonucleotide
  Sense strand starting at position 493 of SEQ ID NO: 917261
aggaaauaguugguggcau

SEQ ID NO: 1221497 - RNA, 19 nt, Artificial Sequence
  Description of Artificial Sequence: Synthetic oligonucleotide
  Antisense strand to SEQ ID NO: 1221496
augccaccaacuauuuccu

SEQ ID NO: 1221498 - RNA, 19 nt, Artificial Sequence
  Description of Artificial Sequence: Synthetic oligonucleotide
  Sense strand starting at position 540 of SEQ ID NO: 917261
caugaugacgaguauguuu

SEQ ID NO: 1221499 - RNA, 19 nt, Artificial Sequence
  Description of Artificial Sequence: Synthetic oligonucleotide
  Antisense strand to SEQ ID NO: 1221498
aaacauacucgucaucaug

SEQ ID NO: 1221500 - RNA, 19 nt, Artificial Sequence
  Description of Artificial Sequence: Synthetic oligonucleotide
  Sense strand starting at position 662 of SEQ ID NO: 917261
aggaaagguugguucgauu

SEQ ID NO: 1221501 - RNA, 19 nt, Artificial Sequence
  Description of Artificial Sequence: Synthetic oligonucleotide
  Antisense strand to SEQ ID NO: 1221500
aaucgaaccaaccuuuccu

SEQ ID NO: 1221502 - RNA, 19 nt, Artificial Sequence
  Description of Artificial Sequence: Synthetic oligonucleotide
  Sense strand starting at position 698 of SEQ ID NO: 917261
aguuaaaugcaucagaagu

SEQ ID NO: 1221503 - RNA, 19 nt, Artificial Sequence
  Description of Artificial Sequence: Synthetic oligonucleotide
  Antisense strand to SEQ ID NO: 1221502
acuucugaugcauuuaacu

SEQ ID NO: 1221504 - RNA, 19 nt, Artificial Sequence
  Description of Artificial Sequence: Synthetic oligonucleotide
  Sense strand starting at position 728 of SEQ ID NO: 917261
cggaguuaaagucauuacu

SEQ ID NO: 1221505 - RNA, 19 nt, Artificial Sequence
  Description of Artificial Sequence: Synthetic oligonucleotide
  Antisense strand to SEQ ID NO: 1221504
aguaaugacuuuaacuccg

SEQ ID NO: 1221506 - RNA, 19 nt, Artificial Sequence
  Description of Artificial Sequence: Synthetic oligonucleotide
  Sense strand starting at position 731 of SEQ ID NO: 917261
aguuaaagucauuacugua

SEQ ID NO: 1221507 - RNA, 19 nt, Artificial Sequence
  Description of Artificial Sequence: Synthetic oligonucleotide
  Antisense strand to SEQ ID NO: 1221506
uacaguaaugacuuuaacu

SEQ ID NO: 1221508 - RNA, 19 nt, Artificial Sequence
  Description of Artificial Sequence: Synthetic oligonucleotide
  Sense strand starting at position 786 of SEQ ID NO: 917261
cguaguugagcucaaagaa

SEQ ID NO: 1221509 - RNA, 19 nt, Artificial Sequence
  Description of Artificial Sequence: Synthetic oligonucleotide
  Antisense strand to SEQ ID NO: 1221508
uucuuugagcucaacuacg

SEQ ID NO: 1221510 - RNA, 19 nt, Artificial Sequence
  Description of Artificial Sequence: Synthetic oligonucleotide
  Sense strand starting at position 825 of SEQ ID NO: 917261
auccaugucuaagccagaa

SEQ ID NO: 1221511 - RNA, 19 nt, Artificial Sequence
  Description of Artificial Sequence: Synthetic oligonucleotide
  Antisense strand to SEQ ID NO: 1221510
uucuggcuuagacauggau

SEQ ID NO: 1221512 - RNA, 19 nt, Artificial Sequence
  Description of Artificial Sequence: Synthetic oligonucleotide
  Sense strand starting at position 855 of SEQ ID NO: 917261
ugagguguagaaggacuaa

SEQ ID NO: 1221513 - RNA, 19 nt, Artificial Sequence
  Description of Artificial Sequence: Synthetic oligonucleotide
  Antisense strand to SEQ ID NO: 1221512
uuaguccuucuacaccuca

SEQ ID NO: 1221514 - RNA, 19 nt, Artificial Sequence
  Description of Artificial Sequence: Synthetic oligonucleotide
  Sense strand starting at position 1137 of SEQ ID NO: 917261
agcgcucgggaagauaaau

SEQ ID NO: 1221515 - RNA, 19 nt, Artificial Sequence
  Description of Artificial Sequence: Synthetic oligonucleotide
  Antisense strand to SEQ ID NO: 1221514
auuuaucuucccgagcgcu

SEQ ID NO: 1221516 - RNA, 19 nt, Artificial Sequence
  Description of Artificial Sequence: Synthetic oligonucleotide
  Sense strand starting at position 1189 of SEQ ID NO: 917261
ugggacucuuguuuaacua

SEQ ID NO: 1221517 - RNA, 19 nt, Artificial Sequence
  Description of Artificial Sequence: Synthetic oligonucleotide
  Antisense strand to SEQ ID NO: 1221516
uaguuaaacaagaguccca

SEQ ID NO: 1221518 - RNA, 19 nt, Artificial Sequence
  Description of Artificial Sequence: Synthetic oligonucleotide
  Sense strand starting at position 1190 of SEQ ID NO: 917261
gggacucuuguuuaacuau

SEQ ID NO: 1221519 - RNA, 19 nt, Artificial Sequence
  Description of Artificial Sequence: Synthetic oligonucleotide
  Antisense strand to SEQ ID NO: 1221518
auaguuaaacaagaguccc

SEQ ID NO: 1221520 - RNA, 19 nt, Artificial Sequence
  Description of Artificial Sequence: Synthetic oligonucleotide
  Sense strand starting at position 1333 of SEQ ID NO: 917261
guguuaaucccauaguaau

SEQ ID NO: 1221521 - RNA, 19 nt, Artificial Sequence
  Description of Artificial Sequence: Synthetic oligonucleotide
  Antisense strand to SEQ ID NO: 1221520
auuacuaugggauuaacac

SEQ ID NO: 1221522 - RNA, 19 nt, Artificial Sequence
  Description of Artificial Sequence: Synthetic oligonucleotide
  Sense strand starting at position 1344 of SEQ ID NO: 917261
auaguaauuggauguacuu

SEQ ID NO: 1221523 - RNA, 19 nt, Artificial Sequence
  Description of Artificial Sequence: Synthetic oligonucleotide
  Antisense strand to SEQ ID NO: 1221522
aaguacauccaauuacuau

SEQ ID NO: 1221524 - RNA, 19 nt, Artificial Sequence
  Description of Artificial Sequence: Synthetic oligonucleotide
  Sense strand starting at position 1716 of SEQ ID NO: 917261
auaguaauuugguuucugu

SEQ ID NO: 1221525 - RNA, 19 nt, Artificial Sequence
  Description of Artificial Sequence: Synthetic oligonucleotide
  Antisense strand to SEQ ID NO: 1221524
acagaaaccaaauuacuau

SEQ ID NO: 1221526 - RNA, 19 nt, Artificial Sequence
  Description of Artificial Sequence: Synthetic oligonucleotide
  Sense strand starting at position 1856 of SEQ ID NO: 917261
ggcacacauuuagaaauca

SEQ ID NO: 1221527 - RNA, 19 nt, Artificial Sequence
  Description of Artificial Sequence: Synthetic oligonucleotide
  Antisense strand to SEQ ID NO: 1221526
ugauuucuaaaugugugcc

SEQ ID NO: 1221528 - RNA, 19 nt, Artificial Sequence
  Description of Artificial Sequence: Synthetic oligonucleotide
  Sense strand starting at position 2152 of SEQ ID NO: 917261
gcagauucccauuaaggua

SEQ ID NO: 1221529 - RNA, 19 nt, Artificial Sequence
  Description of Artificial Sequence: Synthetic oligonucleotide
  Antisense strand to SEQ ID NO: 1221528
uaccuuaaugggaaucugc

SEQ ID NO: 1221530 - RNA, 19 nt, Artificial Sequence
  Description of Artificial Sequence: Synthetic oligonucleotide
  Sense strand starting at position 2357 of SEQ ID NO: 917261
uggugauaacucugauaaa

SEQ ID NO: 1221531 - RNA, 19 nt, Artificial Sequence
  Description of Artificial Sequence: Synthetic oligonucleotide
  Antisense strand to SEQ ID NO: 1221530
uuuaucagaguuaucacca

SEQ ID NO: 1221532 - RNA, 19 nt, Artificial Sequence
  Description of Artificial Sequence: Synthetic oligonucleotide
  Sense strand starting at position 2466 of SEQ ID NO: 917261
ucacaugugguaggaaaua

SEQ ID NO: 1221533 - RNA, 19 nt, Artificial Sequence
  Description of Artificial Sequence: Synthetic oligonucleotide
  Antisense strand to SEQ ID NO: 1221532
uauuuccuaccacauguga

SEQ ID NO: 1221534 - RNA, 19 nt, Artificial Sequence
  Description of Artificial Sequence: Synthetic oligonucleotide
  Sense strand starting at position 2739 of SEQ ID NO: 917261
gcugauuauuucucucagu

SEQ ID NO: 1221535 - RNA, 19 nt, Artificial Sequence
  Description of Artificial Sequence: Synthetic oligonucleotide
  Antisense strand to SEQ ID NO: 1221534
acugagagaaauaaucagc

SEQ ID NO: 1221536 - RNA, 19 nt, Artificial Sequence
  Description of Artificial Sequence: Synthetic oligonucleotide
  Sense strand starting at position 2878 of SEQ ID NO: 917261
auuggcuugcaugauggaa

SEQ ID NO: 1221537 - RNA, 19 nt, Artificial Sequence
  Description of Artificial Sequence: Synthetic oligonucleotide
  Antisense strand to SEQ ID NO: 1221536
uuccaucaugcaagccaau

SEQ ID NO: 1221538 - RNA, 19 nt, Artificial Sequence
  Description of Artificial Sequence: Synthetic oligonucleotide
  Sense strand starting at position 2981 of SEQ ID NO: 917261
ucuguaugcguguuucuca

SEQ ID NO: 1221539 - RNA, 19 nt, Artificial Sequence
  Description of Artificial Sequence: Synthetic oligonucleotide
  Antisense strand to SEQ ID NO: 1221538
ugagaaacacgcauacaga

SEQ ID NO: 1221540 - RNA, 19 nt, Artificial Sequence
  Description of Artificial Sequence: Synthetic oligonucleotide
  Sense strand starting at position 3182 of SEQ ID NO: 917261
ggauccuagcucuaucacu

SEQ ID NO: 1221541 - RNA, 19 nt, Artificial Sequence
  Description of Artificial Sequence: Synthetic oligonucleotide
  Antisense strand to SEQ ID NO: 1221540
agugauagagcuaggaucc

SEQ ID NO: 1221542 - RNA, 19 nt, Artificial Sequence
  Description of Artificial Sequence: Synthetic oligonucleotide
  Sense strand starting at position 3307 of SEQ ID NO: 917261
cugagauaauguguguaag

SEQ ID NO: 1221543 - RNA, 19 nt, Artificial Sequence
  Description of Artificial Sequence: Synthetic oligonucleotide
  Antisense strand to SEQ ID NO: 1221542
cuuacacacauuaucucag

SEQ ID NO: 1221544 - RNA, 19 nt, Artificial Sequence
  Description of Artificial Sequence: Synthetic oligonucleotide
  Sense strand starting at position 3310 of SEQ ID NO: 917261
agauaauguguguaaguau

SEQ ID NO: 1221545 - RNA, 19 nt, Artificial Sequence
  Description of Artificial Sequence: Synthetic oligonucleotide
  Antisense strand to SEQ ID NO: 1221544
auacuuacacacauuaucu

SEQ ID NO: 1221546 - RNA, 19 nt, Artificial Sequence
  Description of Artificial Sequence: Synthetic oligonucleotide
  Sense strand starting at position 3321 of SEQ ID NO: 917261
guaaguauuuggcccaugu

SEQ ID NO: 1221547 - RNA, 19 nt, Artificial Sequence
  Description of Artificial Sequence: Synthetic oligonucleotide
  Antisense strand to SEQ ID NO: 1221546
acaugggccaaauacuuac

SEQ ID NO: 1221548 - RNA, 19 nt, Artificial Sequence
  Description of Artificial Sequence: Synthetic oligonucleotide
  Sense strand starting at position 3334 of SEQ ID NO: 917261
ccaugucuggcuuauagga

SEQ ID NO: 1221549 - RNA, 19 nt, Artificial Sequence
  Description of Artificial Sequence: Synthetic oligonucleotide
  Antisense strand to SEQ ID NO: 1221548
uccuauaagccagacaugg

SEQ ID NO: 1221550 - RNA, 19 nt, Artificial Sequence
  Description of Artificial Sequence: Synthetic oligonucleotide
  Sense strand starting at position 3653 of SEQ ID NO: 917261
uggcaaauucgugcuuagu

SEQ ID NO: 1221551 - RNA, 19 nt, Artificial Sequence
  Description of Artificial Sequence: Synthetic oligonucleotide
  Antisense strand to SEQ ID NO: 1221550
acuaagcacgaauuugcca

SEQ ID NO: 1221552 - RNA, 19 nt, Artificial Sequence
  Description of Artificial Sequence: Synthetic oligonucleotide
  Sense strand starting at position 3654 of SEQ ID NO: 917261
ggcaaauucgugcuuaguu

SEQ ID NO: 1221553 - RNA, 19 nt, Artificial Sequence
  Description of Artificial Sequence: Synthetic oligonucleotide
  Antisense strand to SEQ ID NO: 1221552
aacuaagcacgaauuugcc

SEQ ID NO: 1221554 - RNA, 19 nt, Artificial Sequence
  Description of Artificial Sequence: Synthetic oligonucleotide
  Sense strand starting at position 3801 of SEQ ID NO: 917261
ugacgugaaagccaaauaa

SEQ ID NO: 1221555 - RNA, 19 nt, Artificial Sequence
  Description of Artificial Sequence: Synthetic oligonucleotide
  Antisense strand to SEQ ID NO: 1221554
uuauuuggcuuucacguca

SEQ ID NO: 1221556 - RNA, 19 nt, Artificial Sequence
  Description of Artificial Sequence: Synthetic oligonucleotide
  Sense strand starting at position 3824 of SEQ ID NO: 917261
acauauuugccuggcacau

SEQ ID NO: 1221557 - RNA, 19 nt, Artificial Sequence
  Description of Artificial Sequence: Synthetic oligonucleotide
  Antisense strand to SEQ ID NO: 1221556
augugccaggcaaauaugu

SEQ ID NO: 1221558 - RNA, 19 nt, Artificial Sequence
  Description of Artificial Sequence: Synthetic oligonucleotide
  Sense strand starting at position 3826 of SEQ ID NO: 917261
auauuugccuggcacauuu

SEQ ID NO: 1221559 - RNA, 19 nt, Artificial Sequence
  Description of Artificial Sequence: Synthetic oligonucleotide
  Antisense strand to SEQ ID NO: 1221558
aaaugugccaggcaaauau

SEQ ID NO: 1221560 - RNA, 19 nt, Artificial Sequence
  Description of Artificial Sequence: Synthetic oligonucleotide
  Sense strand starting at position 3979 of SEQ ID NO: 917261
ucauguaagccucauaaag

SEQ ID NO: 1221561 - RNA, 19 nt, Artificial Sequence
  Description of Artificial Sequence: Synthetic oligonucleotide
  Antisense strand to SEQ ID NO: 1221560
cuuuaugaggcuuacauga

SEQ ID NO: 1221562 - RNA, 19 nt, Artificial Sequence
  Description of Artificial Sequence: Synthetic oligonucleotide
  Sense strand starting at position 3979 of SEQ ID NO: 917262
ucauguaagccucauaaag

SEQ ID NO: 1221563 - RNA, 19 nt, Artificial Sequence
  Description of Artificial Sequence: Synthetic oligonucleotide
  Antisense strand to SEQ ID NO: 1221562
cuuuaugaggcuuacauga

SEQ ID NO: 1221564 - RNA, 19 nt, Artificial Sequence
  Description of Artificial Sequence: Synthetic oligonucleotide
  Sense strand starting at position 414 of SEQ ID NO: 917262
auacuaaaccagugguucu

SEQ ID NO: 1221565 - RNA, 19 nt, Artificial Sequence
  Description of Artificial Sequence: Synthetic oligonucleotide
  Antisense strand to SEQ ID NO: 1221564
agaaccacugguuuaguau

SEQ ID NO: 1221566 - RNA, 19 nt, Artificial Sequence
  Description of Artificial Sequence: Synthetic oligonucleotide
  Sense strand starting at position 438 of SEQ ID NO: 917262
ccaagugaugcugaggcua

SEQ ID NO: 1221567 - RNA, 19 nt, Artificial Sequence
  Description of Artificial Sequence: Synthetic oligonucleotide
  Antisense strand to SEQ ID NO: 1221566
uagccucagcaucacuugg

SEQ ID NO: 1221568 - RNA, 19 nt, Artificial Sequence
  Description of Artificial Sequence: Synthetic oligonucleotide
  Sense strand starting at position 516 of SEQ ID NO: 917262
cuauuuaagucagcuuagu

SEQ ID NO: 1221569 - RNA, 19 nt, Artificial Sequence
  Description of Artificial Sequence: Synthetic oligonucleotide
  Antisense strand to SEQ ID NO: 1221568
acuaagcugacuuaaauag

SEQ ID NO: 1221570 - RNA, 19 nt, Artificial Sequence
  Description of Artificial Sequence: Synthetic oligonucleotide
  Sense strand starting at position 542 of SEQ ID NO: 917262
uaaguuauagaaggaagca

SEQ ID NO: 1221571 - RNA, 19 nt, Artificial Sequence
  Description of Artificial Sequence: Synthetic oligonucleotide
  Antisense strand to SEQ ID NO: 1221570
ugcuuccuucuauaacuua

SEQ ID NO: 1221572 - RNA, 19 nt, Artificial Sequence
  Description of Artificial Sequence: Synthetic oligonucleotide
  Sense strand starting at position 578 of SEQ ID NO: 917262
uccuuucugcuagguugua

SEQ ID NO: 1221573 - RNA, 19 nt, Artificial Sequence
  Description of Artificial Sequence: Synthetic oligonucleotide
  Antisense strand to SEQ ID NO: 1221572
uacaaccuagcagaaagga

SEQ ID NO: 1221574 - RNA, 19 nt, Artificial Sequence
  Description of Artificial Sequence: Synthetic oligonucleotide
  Sense strand starting at position 579 of SEQ ID NO: 917262
ccuuucugcuagguuguaa

SEQ ID NO: 1221575 - RNA, 19 nt, Artificial Sequence
  Description of Artificial Sequence: Synthetic oligonucleotide
  Antisense strand to SEQ ID NO: 1221574
uuacaaccuagcagaaagg

SEQ ID NO: 1221576 - RNA, 19 nt, Artificial Sequence
  Description of Artificial Sequence: Synthetic oligonucleotide
  Sense strand starting at position 620 of SEQ ID NO: 917262
uugagacuuuaguugaaua

SEQ ID NO: 1221577 - RNA, 19 nt, Artificial Sequence
  Description of Artificial Sequence: Synthetic oligonucleotide
  Antisense strand to SEQ ID NO: 1221576
uauucaacuaaagucucaa

SEQ ID NO: 1221578 - RNA, 19 nt, Artificial Sequence
  Description of Artificial Sequence: Synthetic oligonucleotide
  Sense strand starting at position 621 of SEQ ID NO: 917262
ugagacuuuaguugaauag

SEQ ID NO: 1221579 - RNA, 19 nt, Artificial Sequence
  Description of Artificial Sequence: Synthetic oligonucleotide
  Antisense strand to SEQ ID NO: 1221578
cuauucaacuaaagucuca

SEQ ID NO: 1221580 - RNA, 19 nt, Artificial Sequence
  Description of Artificial Sequence: Synthetic oligonucleotide
  Sense strand starting at position 636 of SEQ ID NO: 917262
auagacaucuuguggaaca

SEQ ID NO: 1221581 - RNA, 19 nt, Artificial Sequence
  Description of Artificial Sequence: Synthetic oligonucleotide
  Antisense strand to SEQ ID NO: 1221580
uguuccacaagaugucuau

SEQ ID NO: 1221582 - RNA, 19 nt, Artificial Sequence
  Description of Artificial Sequence: Synthetic oligonucleotide
  Sense strand starting at position 677 of SEQ ID NO: 917262
aagugaggccaggaaaguu

SEQ ID NO: 1221583 - RNA, 19 nt, Artificial Sequence
  Description of Artificial Sequence: Synthetic oligonucleotide
  Antisense strand to SEQ ID NO: 1221582
aacuuuccuggccucacuu

SEQ ID NO: 1221584 - RNA, 19 nt, Artificial Sequence
  Description of Artificial Sequence: Synthetic oligonucleotide
  Sense strand starting at position 699 of SEQ ID NO: 917262
gggaaucaagcauggcuaa

SEQ ID NO: 1221585 - RNA, 19 nt, Artificial Sequence
  Description of Artificial Sequence: Synthetic oligonucleotide
  Antisense strand to SEQ ID NO: 1221584
uuagccaugcuugauuccc

SEQ ID NO: 1221586 - RNA, 19 nt, Artificial Sequence
  Description of Artificial Sequence: Synthetic oligonucleotide
  Sense strand starting at position 700 of SEQ ID NO: 917262
ggaaucaagcauggcuaau

SEQ ID NO: 1221587 - RNA, 19 nt, Artificial Sequence
  Description of Artificial Sequence: Synthetic oligonucleotide
  Antisense strand to SEQ ID NO: 1221586
auuagccaugcuugauucc

SEQ ID NO: 1221588 - RNA, 19 nt, Artificial Sequence
  Description of Artificial Sequence: Synthetic oligonucleotide
  Sense strand starting at position 763 of SEQ ID NO: 917262
cuggauucuccaggcaauu

SEQ ID NO: 1221589 - RNA, 19 nt, Artificial Sequence
  Description of Artificial Sequence: Synthetic oligonucleotide
  Antisense strand to SEQ ID NO: 1221588
aauugccuggagaauccag

SEQ ID NO: 1221590 - RNA, 19 nt, Artificial Sequence
  Description of Artificial Sequence: Synthetic oligonucleotide
  Sense strand starting at position 836 of SEQ ID NO: 917262
ugaugccaccuauguuuaa

SEQ ID NO: 1221591 - RNA, 19 nt, Artificial Sequence
  Description of Artificial Sequence: Synthetic oligonucleotide
  Antisense strand to SEQ ID NO: 1221590
uuaaacauagguggcauca

SEQ ID NO: 1221592 - RNA, 19 nt, Artificial Sequence
  Description of Artificial Sequence: Synthetic oligonucleotide
  Sense strand starting at position 889 of SEQ ID NO: 917262
uuaagugaaagguauguuu

SEQ ID NO: 1221593 - RNA, 19 nt, Artificial Sequence
  Description of Artificial Sequence: Synthetic oligonucleotide
  Antisense strand to SEQ ID NO: 1221592
aaacauaccuuucacuuaa

SEQ ID NO: 1221594 - RNA, 19 nt, Artificial Sequence
  Description of Artificial Sequence: Synthetic oligonucleotide
  Sense strand starting at position 1007 of SEQ ID NO: 917262
uucguaaacuuucuggaag

SEQ ID NO: 1221595 - RNA, 19 nt, Artificial Sequence
  Description of Artificial Sequence: Synthetic oligonucleotide
  Antisense strand to SEQ ID NO: 1221594
cuuccagaaaguuuacgaa

SEQ ID NO: 1221596 - RNA, 19 nt, Artificial Sequence
  Description of Artificial Sequence: Synthetic oligonucleotide
  Sense strand starting at position 1010 of SEQ ID NO: 917262
guaaacuuucuggaagcau

SEQ ID NO: 1221597 - RNA, 19 nt, Artificial Sequence
  Description of Artificial Sequence: Synthetic oligonucleotide
  Antisense strand to SEQ ID NO: 1221596
augcuuccagaaaguuuac

SEQ ID NO: 1221598 - RNA, 19 nt, Artificial Sequence
  Description of Artificial Sequence: Synthetic oligonucleotide
  Sense strand starting at position 1259 of SEQ ID NO: 917262
uagaaagaaucuugggaca

SEQ ID NO: 1221599 - RNA, 19 nt, Artificial Sequence
  Description of Artificial Sequence: Synthetic oligonucleotide
  Antisense strand to SEQ ID NO: 1221598
ugucccaagauucuuucua

SEQ ID NO: 1221600 - RNA, 19 nt, Artificial Sequence
  Description of Artificial Sequence: Synthetic oligonucleotide
  Sense strand starting at position 1261 of SEQ ID NO: 917262
gaaagaaucuugggacaac

SEQ ID NO: 1221601 - RNA, 19 nt, Artificial Sequence
  Description of Artificial Sequence: Synthetic oligonucleotide
  Antisense strand to SEQ ID NO: 1221600
guugucccaagauucuuuc

SEQ ID NO: 1221602 - RNA, 19 nt, Artificial Sequence
  Description of Artificial Sequence: Synthetic oligonucleotide
  Sense strand starting at position 1577 of SEQ ID NO: 917262
gggacaccgaugugagaaa

SEQ ID NO: 1221603 - RNA, 19 nt, Artificial Sequence
  Description of Artificial Sequence: Synthetic oligonucleotide
  Antisense strand to SEQ ID NO: 1221602
uuucucacaucgguguccc

SEQ ID NO: 1221604 - RNA, 19 nt, Artificial Sequence
  Description of Artificial Sequence: Synthetic oligonucleotide
  Sense strand starting at position 1602 of SEQ ID NO: 917262
ccgcguuucugaguagaca

SEQ ID NO: 1221605 - RNA, 19 nt, Artificial Sequence
  Description of Artificial Sequence: Synthetic oligonucleotide
  Antisense strand to SEQ ID NO: 1221604
ugucuacucagaaacgcgg

SEQ ID NO: 1221606 - RNA, 19 nt, Artificial Sequence
  Description of Artificial Sequence: Synthetic oligonucleotide
  Sense strand starting at position 1603 of SEQ ID NO: 917262
cgcguuucugaguagacaa

SEQ ID NO: 1221607 - RNA, 19 nt, Artificial Sequence
  Description of Artificial Sequence: Synthetic oligonucleotide
  Antisense strand to SEQ ID NO: 1221606
uugucuacucagaaacgcg

SEQ ID NO: 1221608 - RNA, 19 nt, Artificial Sequence
  Description of Artificial Sequence: Synthetic oligonucleotide
  Sense strand starting at position 2358 of SEQ ID NO: 917262
ugaacucauccguaaagca

SEQ ID NO: 1221609 - RNA, 19 nt, Artificial Sequence
  Description of Artificial Sequence: Synthetic oligonucleotide
  Antisense strand to SEQ ID NO: 1221608
ugcuuuacggaugaguuca

SEQ ID NO: 1221610 - RNA, 19 nt, Artificial Sequence
  Description of Artificial Sequence: Synthetic oligonucleotide
  Sense strand starting at position 2384 of SEQ ID NO: 917262
aaaggaugauaguaagcuu

SEQ ID NO: 1221611 - RNA, 19 nt, Artificial Sequence
  Description of Artificial Sequence: Synthetic oligonucleotide
  Antisense strand to SEQ ID NO: 1221610
aagcuuacuaucauccuuu

SEQ ID NO: 1221612 - RNA, 19 nt, Artificial Sequence
  Description of Artificial Sequence: Synthetic oligonucleotide
  Sense strand starting at position 2387 of SEQ ID NO: 917262
ggaugauaguaagcuuacu

SEQ ID NO: 1221613 - RNA, 19 nt, Artificial Sequence
  Description of Artificial Sequence: Synthetic oligonucleotide
  Antisense strand to SEQ ID NO: 1221612
aguaagcuuacuaucaucc

SEQ ID NO: 1221614 - RNA, 19 nt, Artificial Sequence
  Description of Artificial Sequence: Synthetic oligonucleotide
  Sense strand starting at position 2395 of SEQ ID NO: 917262
guaagcuuacugugacaua

SEQ ID NO: 1221615 - RNA, 19 nt, Artificial Sequence
  Description of Artificial Sequence: Synthetic oligonucleotide
  Antisense strand to SEQ ID NO: 1221614
uaugucacaguaagcuuac

SEQ ID NO: 1221616 - RNA, 19 nt, Artificial Sequence
  Description of Artificial Sequence: Synthetic oligonucleotide
  Sense strand starting at position 2479 of SEQ ID NO: 917262
cgcuuagucacccugugua

SEQ ID NO: 1221617 - RNA, 19 nt, Artificial Sequence
  Description of Artificial Sequence: Synthetic oligonucleotide
  Antisense strand to SEQ ID NO: 1221616
uacacagggugacuaagcg

SEQ ID NO: 1221618 - RNA, 19 nt, Artificial Sequence
  Description of Artificial Sequence: Synthetic oligonucleotide
  Sense strand starting at position 2499 of SEQ ID NO: 917262
aaguuauucugggaugaca

SEQ ID NO: 1221619 - RNA, 19 nt, Artificial Sequence
  Description of Artificial Sequence: Synthetic oligonucleotide
  Antisense strand to SEQ ID NO: 1221618
ugucaucccagaauaacuu

SEQ ID NO: 1221620 - RNA, 19 nt, Artificial Sequence
  Description of Artificial Sequence: Synthetic oligonucleotide
  Sense strand starting at position 2678 of SEQ ID NO: 917262
uguaaagcuuaaucaaugu

SEQ ID NO: 1221621 - RNA, 19 nt, Artificial Sequence
  Description of Artificial Sequence: Synthetic oligonucleotide
  Antisense strand to SEQ ID NO: 1221620
acauugauuaagcuuuaca

SEQ ID NO: 1221622 - RNA, 19 nt, Artificial Sequence
  Description of Artificial Sequence: Synthetic oligonucleotide
  Sense strand starting at position 3157 of SEQ ID NO: 917262
gacaauucuccauggguca

SEQ ID NO: 1221623 - RNA, 19 nt, Artificial Sequence
  Description of Artificial Sequence: Synthetic oligonucleotide
  Antisense strand to SEQ ID NO: 1221622
ugacccauggagaauuguc

SEQ ID NO: 1221624 - RNA, 19 nt, Artificial Sequence
  Description of Artificial Sequence: Synthetic oligonucleotide
  Sense strand starting at position 3229 of SEQ ID NO: 917262
guacuaugauagcugguau

SEQ ID NO: 1221625 - RNA, 19 nt, Artificial Sequence
  Description of Artificial Sequence: Synthetic oligonucleotide
  Antisense strand to SEQ ID NO: 1221624
auaccagcuaucauaguac

SEQ ID NO: 1221626 - RNA, 19 nt, Artificial Sequence
  Description of Artificial Sequence: Synthetic oligonucleotide
  Sense strand starting at position 3265 of SEQ ID NO: 917262
acaguuaaauuagacuuga

SEQ ID NO: 1221627 - RNA, 19 nt, Artificial Sequence
  Description of Artificial Sequence: Synthetic oligonucleotide
  Antisense strand to SEQ ID NO: 1221626
ucaagucuaauuuaacugu

SEQ ID NO: 1221628 - RNA, 19 nt, Artificial Sequence
  Description of Artificial Sequence: Synthetic oligonucleotide
  Sense strand starting at position 3288 of SEQ ID NO: 917262
agcaguugguccuccacaa

SEQ ID NO: 1221629 - RNA, 19 nt, Artificial Sequence
  Description of Artificial Sequence: Synthetic oligonucleotide
  Antisense strand to SEQ ID NO: 1221628
uuguggaggaccaacugcu

SEQ ID NO: 1221630 - RNA, 19 nt, Artificial Sequence
  Description of Artificial Sequence: Synthetic oligonucleotide
  Sense strand starting at position 3316 of SEQ ID NO: 917262
gccucaucccgucaaggga

SEQ ID NO: 1221631 - RNA, 19 nt, Artificial Sequence
  Description of Artificial Sequence: Synthetic oligonucleotide
  Antisense strand to SEQ ID NO: 1221630
ucccuugacgggaugaggc

SEQ ID NO: 1221632 - RNA, 19 nt, Artificial Sequence
  Description of Artificial Sequence: Synthetic oligonucleotide
  Sense strand starting at position 3329 of SEQ ID NO: 917262
aagggaaggucauaagaga

SEQ ID NO: 1221633 - RNA, 19 nt, Artificial Sequence
  Description of Artificial Sequence: Synthetic oligonucleotide
  Antisense strand to SEQ ID NO: 1221632
ucucuuaugaccuucccuu

SEQ ID NO: 1221634 - RNA, 19 nt, Artificial Sequence
  Description of Artificial Sequence: Synthetic oligonucleotide
  Sense strand starting at position 3355 of SEQ ID NO: 917262
aagguccucugaggaagaa

SEQ ID NO: 1221635 - RNA, 19 nt, Artificial Sequence
  Description of Artificial Sequence: Synthetic oligonucleotide
  Antisense strand to SEQ ID NO: 1221634
uucuuccucagaggaccuu

SEQ ID NO: 1221636 - RNA, 19 nt, Artificial Sequence
  Description of Artificial Sequence: Synthetic oligonucleotide
  Sense strand starting at position 3436 of SEQ ID NO: 917262
uaggcuugccagcauuaua

SEQ ID NO: 1221637 - RNA, 19 nt, Artificial Sequence
  Description of Artificial Sequence: Synthetic oligonucleotide
  Antisense strand to SEQ ID NO: 1221636
uauaaugcuggcaagccua

SEQ ID NO: 1221638 - RNA, 19 nt, Artificial Sequence
  Description of Artificial Sequence: Synthetic oligonucleotide
  Sense strand starting at position 3439 of SEQ ID NO: 917262
gcuugccagcauuauaaau

SEQ ID NO: 1221639 - RNA, 19 nt, Artificial Sequence
  Description of Artificial Sequence: Synthetic oligonucleotide
  Antisense strand to SEQ ID NO: 1221638
auuuauaaugcuggcaagc

SEQ ID NO: 1221640 - RNA, 19 nt, Artificial Sequence
  Description of Artificial Sequence: Synthetic oligonucleotide
  Sense strand starting at position 3703 of SEQ ID NO: 917262
agagagugaccggguaagu

SEQ ID NO: 1221641 - RNA, 19 nt, Artificial Sequence
  Description of Artificial Sequence: Synthetic oligonucleotide
  Antisense strand to SEQ ID NO: 1221640
acuuacccggucacucucu

SEQ ID NO: 1221642 - RNA, 19 nt, Artificial Sequence
  Description of Artificial Sequence: Synthetic oligonucleotide
  Sense strand starting at position 3716 of SEQ ID NO: 917262
guaagugguuuggugggaa

SEQ ID NO: 1221643 - RNA, 19 nt, Artificial Sequence
  Description of Artificial Sequence: Synthetic oligonucleotide
  Antisense strand to SEQ ID NO: 1221642
uucccaccaaaccacuuac

SEQ ID NO: 1221644 - RNA, 19 nt, Artificial Sequence
  Description of Artificial Sequence: Synthetic oligonucleotide
  Sense strand starting at position 3716 of SEQ ID NO: 917263
guaagugguuuggugggaa

SEQ ID NO: 1221645 - RNA, 19 nt, Artificial Sequence
  Description of Artificial Sequence: Synthetic oligonucleotide
  Antisense strand to SEQ ID NO: 1221644
uucccaccaaaccacuuac

SEQ ID NO: 1221646 - RNA, 19 nt, Artificial Sequence
  Description of Artificial Sequence: Synthetic oligonucleotide
  Sense strand starting at position 68 of SEQ ID NO: 917263
cuuuguucccgcuugcuau

SEQ ID NO: 1221647 - RNA, 19 nt, Artificial Sequence
  Description of Artificial Sequence: Synthetic oligonucleotide
  Antisense strand to SEQ ID NO: 1221646
auagcaagcgggaacaaag

SEQ ID NO: 1221648 - RNA, 19 nt, Artificial Sequence
  Description of Artificial Sequence: Synthetic oligonucleotide
  Sense strand starting at position 329 of SEQ ID NO: 917263
ugaaaugaccucuguucca

SEQ ID NO: 1221649 - RNA, 19 nt, Artificial Sequence
  Description of Artificial Sequence: Synthetic oligonucleotide
  Antisense strand to SEQ ID NO: 1221648
uggaacagaggucauuuca

SEQ ID NO: 1221650 - RNA, 19 nt, Artificial Sequence
  Description of Artificial Sequence: Synthetic oligonucleotide
  Sense strand starting at position 669 of SEQ ID NO: 917263
auacguguugcauaggaaa

SEQ ID NO: 1221651 - RNA, 19 nt, Artificial Sequence
  Description of Artificial Sequence: Synthetic oligonucleotide
  Antisense strand to SEQ ID NO: 1221650
uuuccuaugcaacacguau

SEQ ID NO: 1221652 - RNA, 19 nt, Artificial Sequence
  Description of Artificial Sequence: Synthetic oligonucleotide
  Sense strand starting at position 2058 of SEQ ID NO: 917263
uucagauucgcgccgagau

SEQ ID NO: 1221653 - RNA, 19 nt, Artificial Sequence
  Description of Artificial Sequence: Synthetic oligonucleotide
  Antisense strand to SEQ ID NO: 1221652
aucucggcgcgaaucugaa

SEQ ID NO: 1221654 - RNA, 19 nt, Artificial Sequence
  Description of Artificial Sequence: Synthetic oligonucleotide
  Sense strand starting at position 2090 of SEQ ID NO: 917263
ggcucuugagcggaauaac

SEQ ID NO: 1221655 - RNA, 19 nt, Artificial Sequence
  Description of Artificial Sequence: Synthetic oligonucleotide
  Antisense strand to SEQ ID NO: 1221654
guuauuccgcucaagagcc

SEQ ID NO: 1221656 - RNA, 19 nt, Artificial Sequence
  Description of Artificial Sequence: Synthetic oligonucleotide
  Sense strand starting at position 2348 of SEQ ID NO: 917263
agauuucucuauuaaggaa

SEQ ID NO: 1221657 - RNA, 19 nt, Artificial Sequence
  Description of Artificial Sequence: Synthetic oligonucleotide
  Antisense strand to SEQ ID NO: 1221656
uuccuuaauagagaaaucu

SEQ ID NO: 1221658 - RNA, 19 nt, Artificial Sequence
  Description of Artificial Sequence: Synthetic oligonucleotide
  Sense strand starting at position 2402 of SEQ ID NO: 917263
cgcucaaacccagagggau

SEQ ID NO: 1221659 - RNA, 19 nt, Artificial Sequence
  Description of Artificial Sequence: Synthetic oligonucleotide
  Antisense strand to SEQ ID NO: 1221658
aucccucuggguuugagcg

SEQ ID NO: 1221660 - RNA, 19 nt, Artificial Sequence
  Description of Artificial Sequence: Synthetic oligonucleotide
  Sense strand starting at position 2414 of SEQ ID NO: 917263
gagggauucuccuuagagc

SEQ ID NO: 1221661 - RNA, 19 nt, Artificial Sequence
  Description of Artificial Sequence: Synthetic oligonucleotide
  Antisense strand to SEQ ID NO: 1221660
gcucuaaggagaaucccuc

SEQ ID NO: 1221662 - RNA, 19 nt, Artificial Sequence
  Description of Artificial Sequence: Synthetic oligonucleotide
  Sense strand starting at position 2415 of SEQ ID NO: 917263
agggauucuccuuagagcu

SEQ ID NO: 1221663 - RNA, 19 nt, Artificial Sequence
  Description of Artificial Sequence: Synthetic oligonucleotide
  Antisense strand to SEQ ID NO: 1221662
agcucuaaggagaaucccu

SEQ ID NO: 1221664 - RNA, 19 nt, Artificial Sequence
  Description of Artificial Sequence: Synthetic oligonucleotide
  Sense strand starting at position 2429 of SEQ ID NO: 917263
gagcuaccucuugagauuc

SEQ ID NO: 1221665 - RNA, 19 nt, Artificial Sequence
  Description of Artificial Sequence: Synthetic oligonucleotide
  Antisense strand to SEQ ID NO: 1221664
gaaucucaagagguagcuc

SEQ ID NO: 1221666 - RNA, 19 nt, Artificial Sequence
  Description of Artificial Sequence: Synthetic oligonucleotide
  Sense strand starting at position 2437 of SEQ ID NO: 917263
ucuugagauucuguacuuc

SEQ ID NO: 1221667 - RNA, 19 nt, Artificial Sequence
  Description of Artificial Sequence: Synthetic oligonucleotide
  Antisense strand to SEQ ID NO: 1221666
gaaguacagaaucucaaga

SEQ ID NO: 1221668 - RNA, 19 nt, Artificial Sequence
  Description of Artificial Sequence: Synthetic oligonucleotide
  Sense strand starting at position 2443 of SEQ ID NO: 917263
gauucuguacuucgaggaa

SEQ ID NO: 1221669 - RNA, 19 nt, Artificial Sequence
  Description of Artificial Sequence: Synthetic oligonucleotide
  Antisense strand to SEQ ID NO: 1221668
uuccucgaaguacagaauc

SEQ ID NO: 1221670 - RNA, 19 nt, Artificial Sequence
  Description of Artificial Sequence: Synthetic oligonucleotide
  Sense strand starting at position 2446 of SEQ ID NO: 917263
ucuguacuucgaggaaauu

SEQ ID NO: 1221671 - RNA, 19 nt, Artificial Sequence
  Description of Artificial Sequence: Synthetic oligonucleotide
  Antisense strand to SEQ ID NO: 1221670
aauuuccucgaaguacaga

SEQ ID NO: 1221672 - RNA, 19 nt, Artificial Sequence
  Description of Artificial Sequence: Synthetic oligonucleotide
  Sense strand starting at position 2447 of SEQ ID NO: 917263
cuguacuucgaggaaauua

SEQ ID NO: 1221673 - RNA, 19 nt, Artificial Sequence
  Description of Artificial Sequence: Synthetic oligonucleotide
  Antisense strand to SEQ ID NO: 1221672
uaauuuccucgaaguacag

SEQ ID NO: 1221674 - RNA, 19 nt, Artificial Sequence
  Description of Artificial Sequence: Synthetic oligonucleotide
  Sense strand starting at position 2618 of SEQ ID NO: 917263
ggcaucucuuggucuauga

SEQ ID NO: 1221675 - RNA, 19 nt, Artificial Sequence
  Description of Artificial Sequence: Synthetic oligonucleotide
  Antisense strand to SEQ ID NO: 1221674
ucauagaccaagagaugcc

SEQ ID NO: 1221676 - RNA, 19 nt, Artificial Sequence
  Description of Artificial Sequence: Synthetic oligonucleotide
  Sense strand starting at position 2653 of SEQ ID NO: 917263
uuccuacuccgugauaacu

SEQ ID NO: 1221677 - RNA, 19 nt, Artificial Sequence
  Description of Artificial Sequence: Synthetic oligonucleotide
  Antisense strand to SEQ ID NO: 1221676
aguuaucacggaguaggaa

SEQ ID NO: 1221678 - RNA, 19 nt, Artificial Sequence
  Description of Artificial Sequence: Synthetic oligonucleotide
  Sense strand starting at position 2662 of SEQ ID NO: 917263
cgugauaacucaguucuaa

SEQ ID NO: 1221679 - RNA, 19 nt, Artificial Sequence
  Description of Artificial Sequence: Synthetic oligonucleotide
  Antisense strand to SEQ ID NO: 1221678
uuagaacugaguuaucacg

SEQ ID NO: 1221680 - RNA, 19 nt, Artificial Sequence
  Description of Artificial Sequence: Synthetic oligonucleotide
  Sense strand starting at position 2695 of SEQ ID NO: 917263
gugaaaugagccugauagu

SEQ ID NO: 1221681 - RNA, 19 nt, Artificial Sequence
  Description of Artificial Sequence: Synthetic oligonucleotide
  Antisense strand to SEQ ID NO: 1221680
acuaucaggcucauuucac

SEQ ID NO: 1221682 - RNA, 19 nt, Artificial Sequence
  Description of Artificial Sequence: Synthetic oligonucleotide
  Sense strand starting at position 2696 of SEQ ID NO: 917263
ugaaaugagccugauaguc

SEQ ID NO: 1221683 - RNA, 19 nt, Artificial Sequence
  Description of Artificial Sequence: Synthetic oligonucleotide
  Antisense strand to SEQ ID NO: 1221682
gacuaucaggcucauuuca

SEQ ID NO: 1221684 - RNA, 19 nt, Artificial Sequence
  Description of Artificial Sequence: Synthetic oligonucleotide
  Sense strand starting at position 2709 of SEQ ID NO: 917263
auagucugcgaaugaagaa

SEQ ID NO: 1221685 - RNA, 19 nt, Artificial Sequence
  Description of Artificial Sequence: Synthetic oligonucleotide
  Antisense strand to SEQ ID NO: 1221684
uucuucauucgcagacuau

SEQ ID NO: 1221686 - RNA, 19 nt, Artificial Sequence
  Description of Artificial Sequence: Synthetic oligonucleotide
  Sense strand starting at position 2910 of SEQ ID NO: 917263
uguaauugaugacucccua

SEQ ID NO: 1221687 - RNA, 19 nt, Artificial Sequence
  Description of Artificial Sequence: Synthetic oligonucleotide
  Antisense strand to SEQ ID NO: 1221686
uagggagucaucaauuaca

SEQ ID NO: 1221688 - RNA, 19 nt, Artificial Sequence
  Description of Artificial Sequence: Synthetic oligonucleotide
  Sense strand starting at position 2961 of SEQ ID NO: 917263
guaaaccauuaguuaaacu

SEQ ID NO: 1221689 - RNA, 19 nt, Artificial Sequence
  Description of Artificial Sequence: Synthetic oligonucleotide
  Antisense strand to SEQ ID NO: 1221688
aguuuaacuaaugguuuac

SEQ ID NO: 1221690 - RNA, 19 nt, Artificial Sequence
  Description of Artificial Sequence: Synthetic oligonucleotide
  Sense strand starting at position 2986 of SEQ ID NO: 917263
caguuaugcuuuguaggaa

SEQ ID NO: 1221691 - RNA, 19 nt, Artificial Sequence
  Description of Artificial Sequence: Synthetic oligonucleotide
  Antisense strand to SEQ ID NO: 1221690
uuccuacaaagcauaacug

SEQ ID NO: 1221692 - RNA, 19 nt, Artificial Sequence
  Description of Artificial Sequence: Synthetic oligonucleotide
  Sense strand starting at position 3015 of SEQ ID NO: 917263
cuaugcauugaauguucua

SEQ ID NO: 1221693 - RNA, 19 nt, Artificial Sequence
  Description of Artificial Sequence: Synthetic oligonucleotide
  Antisense strand to SEQ ID NO: 1221692
uagaacauucaaugcauag

SEQ ID NO: 1221694 - RNA, 19 nt, Artificial Sequence
  Description of Artificial Sequence: Synthetic oligonucleotide
  Sense strand starting at position 3041 of SEQ ID NO: 917263
ggagcuuaguaaucuacug

SEQ ID NO: 1221695 - RNA, 19 nt, Artificial Sequence
  Description of Artificial Sequence: Synthetic oligonucleotide
  Antisense strand to SEQ ID NO: 1221694
caguagauuacuaagcucc

SEQ ID NO: 1221696 - RNA, 19 nt, Artificial Sequence
  Description of Artificial Sequence: Synthetic oligonucleotide
  Sense strand starting at position 3324 of SEQ ID NO: 917263
uccuauaugaggugacaug

SEQ ID NO: 1221697 - RNA, 19 nt, Artificial Sequence
  Description of Artificial Sequence: Synthetic oligonucleotide
  Antisense strand to SEQ ID NO: 1221696
caugucaccucauauagga

SEQ ID NO: 1221698 - RNA, 19 nt, Artificial Sequence
  Description of Artificial Sequence: Synthetic oligonucleotide
  Sense strand starting at position 3349 of SEQ ID NO: 917263
gacuuaguucuguauguua

SEQ ID NO: 1221699 - RNA, 19 nt, Artificial Sequence
  Description of Artificial Sequence: Synthetic oligonucleotide
  Antisense strand to SEQ ID NO: 1221698
uaacauacagaacuaaguc

SEQ ID NO: 1221700 - RNA, 19 nt, Artificial Sequence
  Description of Artificial Sequence: Synthetic oligonucleotide
  Sense strand starting at position 3428 of SEQ ID NO: 917263
cccggauuaccuuggaagu

SEQ ID NO: 1221701 - RNA, 19 nt, Artificial Sequence
  Description of Artificial Sequence: Synthetic oligonucleotide
  Antisense strand to SEQ ID NO: 1221700
acuuccaagguaauccggg

SEQ ID NO: 1221702 - RNA, 19 nt, Artificial Sequence
  Description of Artificial Sequence: Synthetic oligonucleotide
  Sense strand starting at position 3513 of SEQ ID NO: 917263
ucaccuauuuggcagaaca

SEQ ID NO: 1221703 - RNA, 19 nt, Artificial Sequence
  Description of Artificial Sequence: Synthetic oligonucleotide
  Antisense strand to SEQ ID NO: 1221702
uguucugccaaauagguga

SEQ ID NO: 1221704 - RNA, 19 nt, Artificial Sequence
  Description of Artificial Sequence: Synthetic oligonucleotide
  Sense strand starting at position 3533 of SEQ ID NO: 917263
auuugauauuugugagacu

SEQ ID NO: 1221705 - RNA, 19 nt, Artificial Sequence
  Description of Artificial Sequence: Synthetic oligonucleotide
  Antisense strand to SEQ ID NO: 1221704
agucucacaaauaucaaau

SEQ ID NO: 1221706 - RNA, 19 nt, Artificial Sequence
  Description of Artificial Sequence: Synthetic oligonucleotide
  Sense strand starting at position 3534 of SEQ ID NO: 917263
uuugauauuugugagacua

SEQ ID NO: 1221707 - RNA, 19 nt, Artificial Sequence
  Description of Artificial Sequence: Synthetic oligonucleotide
  Antisense strand to SEQ ID NO: 1221706
uagucucacaaauaucaaa

SEQ ID NO: 1221708 - RNA, 19 nt, Artificial Sequence
  Description of Artificial Sequence: Synthetic oligonucleotide
  Sense strand starting at position 3536 of SEQ ID NO: 917263
ugauauuugugagacuaau

SEQ ID NO: 1221709 - RNA, 19 nt, Artificial Sequence
  Description of Artificial Sequence: Synthetic oligonucleotide
  Antisense strand to SEQ ID NO: 1221708
auuagucucacaaauauca

SEQ ID NO: 1221710 - RNA, 19 nt, Artificial Sequence
  Description of Artificial Sequence: Synthetic oligonucleotide
  Sense strand starting at position 3542 of SEQ ID NO: 917263
uugugagacuaaucaguug

SEQ ID NO: 1221711 - RNA, 19 nt, Artificial Sequence
  Description of Artificial Sequence: Synthetic oligonucleotide
  Antisense strand to SEQ ID NO: 1221710
caacugauuagucucacaa

SEQ ID NO: 1221712 - RNA, 19 nt, Artificial Sequence
  Description of Artificial Sequence: Synthetic oligonucleotide
  Sense strand starting at position 3547 of SEQ ID NO: 917263
agacuaaucaguugagagu

SEQ ID NO: 1221713 - RNA, 19 nt, Artificial Sequence
  Description of Artificial Sequence: Synthetic oligonucleotide
  Antisense strand to SEQ ID NO: 1221712
acucucaacugauuagucu

SEQ ID NO: 1221714 - RNA, 19 nt, Artificial Sequence
  Description of Artificial Sequence: Synthetic oligonucleotide
  Sense strand starting at position 3563 of SEQ ID NO: 917263
agucauaaauaggugcaaa

SEQ ID NO: 1221715 - RNA, 19 nt, Artificial Sequence
  Description of Artificial Sequence: Synthetic oligonucleotide
  Antisense strand to SEQ ID NO: 1221714
uuugcaccuauuuaugacu

SEQ ID NO: 1221716 - RNA, 19 nt, Artificial Sequence
  Description of Artificial Sequence: Synthetic oligonucleotide
  Sense strand starting at position 3574 of SEQ ID NO: 917263
ggugcaaauguuuaugagu

SEQ ID NO: 1221717 - RNA, 19 nt, Artificial Sequence
  Description of Artificial Sequence: Synthetic oligonucleotide
  Antisense strand to SEQ ID NO: 1221716
acucauaaacauuugcacc

SEQ ID NO: 1221718 - RNA, 19 nt, Artificial Sequence
  Description of Artificial Sequence: Synthetic oligonucleotide
  Sense strand starting at position 3605 of SEQ ID NO: 917263
ucaacauauuugugaagau

SEQ ID NO: 1221719 - RNA, 19 nt, Artificial Sequence
  Description of Artificial Sequence: Synthetic oligonucleotide
  Antisense strand to SEQ ID NO: 1221718
aucuucacaaauauguuga

SEQ ID NO: 1221720 - RNA, 19 nt, Artificial Sequence
  Description of Artificial Sequence: Synthetic oligonucleotide
  Sense strand starting at position 3606 of SEQ ID NO: 917263
caacauauuugugaagaug

SEQ ID NO: 1221721 - RNA, 19 nt, Artificial Sequence
  Description of Artificial Sequence: Synthetic oligonucleotide
  Antisense strand to SEQ ID NO: 1221720
caucuucacaaauauguug

SEQ ID NO: 1221722 - RNA, 19 nt, Artificial Sequence
  Description of Artificial Sequence: Synthetic oligonucleotide
  Sense strand starting at position 3719 of SEQ ID NO: 917263
accaacauaucuguaaugu

SEQ ID NO: 1221723 - RNA, 19 nt, Artificial Sequence
  Description of Artificial Sequence: Synthetic oligonucleotide
  Antisense strand to SEQ ID NO: 1221722
acauuacagauauguuggu

SEQ ID NO: 1221724 - RNA, 19 nt, Artificial Sequence
  Description of Artificial Sequence: Synthetic oligonucleotide
  Sense strand starting at position 3720 of SEQ ID NO: 917264
ccaacauaucuguaaugug

SEQ ID NO: 1221725 - RNA, 19 nt, Artificial Sequence
  Description of Artificial Sequence: Synthetic oligonucleotide
  Antisense strand to SEQ ID NO: 1221724
cacauuacagauauguugg

SEQ ID NO: 1221726 - RNA, 19 nt, Artificial Sequence
  Description of Artificial Sequence: Synthetic oligonucleotide
  Sense strand starting at position 37 of SEQ ID NO: 917264
cgcugaagcuucucuaaau

SEQ ID NO: 1221727 - RNA, 19 nt, Artificial Sequence
  Description of Artificial Sequence: Synthetic oligonucleotide
  Antisense strand to SEQ ID NO: 1221726
auuuagagaagcuucagcg

SEQ ID NO: 1221728 - RNA, 19 nt, Artificial Sequence
  Description of Artificial Sequence: Synthetic oligonucleotide
  Sense strand starting at position 38 of SEQ ID NO: 917264
gcugaagcuucucuaaaug

SEQ ID NO: 1221729 - RNA, 19 nt, Artificial Sequence
  Description of Artificial Sequence: Synthetic oligonucleotide
  Antisense strand to SEQ ID NO: 1221728
cauuuagagaagcuucagc

SEQ ID NO: 1221730 - RNA, 19 nt, Artificial Sequence
  Description of Artificial Sequence: Synthetic oligonucleotide
  Sense strand starting at position 96 of SEQ ID NO: 917264
uuugaagacuccuagagga

SEQ ID NO: 1221731 - RNA, 19 nt, Artificial Sequence
  Description of Artificial Sequence: Synthetic oligonucleotide
  Antisense strand to SEQ ID NO: 1221730
uccucuaggagucuucaaa

SEQ ID NO: 1221732 - RNA, 19 nt, Artificial Sequence
  Description of Artificial Sequence: Synthetic oligonucleotide
  Sense strand starting at position 146 of SEQ ID NO: 917264
gcccuagucucauauagua

SEQ ID NO: 1221733 - RNA, 19 nt, Artificial Sequence
  Description of Artificial Sequence: Synthetic oligonucleotide
  Antisense strand to SEQ ID NO: 1221732
uacuauaugagacuagggc

SEQ ID NO: 1221734 - RNA, 19 nt, Artificial Sequence
  Description of Artificial Sequence: Synthetic oligonucleotide
  Sense strand starting at position 423 of SEQ ID NO: 917264
aagccuaauuugugggcaa

SEQ ID NO: 1221735 - RNA, 19 nt, Artificial Sequence
  Description of Artificial Sequence: Synthetic oligonucleotide
  Antisense strand to SEQ ID NO: 1221734
uugcccacaaauuaggcuu

SEQ ID NO: 1221736 - RNA, 19 nt, Artificial Sequence
  Description of Artificial Sequence: Synthetic oligonucleotide
  Sense strand starting at position 733 of SEQ ID NO: 917264
uuuaaauugguuuguccaa

SEQ ID NO: 1221737 - RNA, 19 nt, Artificial Sequence
  Description of Artificial Sequence: Synthetic oligonucleotide
  Antisense strand to SEQ ID NO: 1221736
uuggacaaaccaauuuaaa

SEQ ID NO: 1221738 - RNA, 19 nt, Artificial Sequence
  Description of Artificial Sequence: Synthetic oligonucleotide
  Sense strand starting at position 734 of SEQ ID NO: 917264
uuaaauugguuuguccaau

SEQ ID NO: 1221739 - RNA, 19 nt, Artificial Sequence
  Description of Artificial Sequence: Synthetic oligonucleotide
  Antisense strand to SEQ ID NO: 1221738
auuggacaaaccaauuuaa

SEQ ID NO: 1221740 - RNA, 19 nt, Artificial Sequence
  Description of Artificial Sequence: Synthetic oligonucleotide
  Sense strand starting at position 792 of SEQ ID NO: 917264
gaaguucuuuaugaagcga

SEQ ID NO: 1221741 - RNA, 19 nt, Artificial Sequence
  Description of Artificial Sequence: Synthetic oligonucleotide
  Antisense strand to SEQ ID NO: 1221740
ucgcuucauaaagaacuuc

SEQ ID NO: 1221742 - RNA, 19 nt, Artificial Sequence
  Description of Artificial Sequence: Synthetic oligonucleotide
  Sense strand starting at position 930 of SEQ ID NO: 917264
acugaugccuacuaagcaa

SEQ ID NO: 1221743 - RNA, 19 nt, Artificial Sequence
  Description of Artificial Sequence: Synthetic oligonucleotide
  Antisense strand to SEQ ID NO: 1221742
uugcuuaguaggcaucagu

SEQ ID NO: 1221744 - RNA, 19 nt, Artificial Sequence
  Description of Artificial Sequence: Synthetic oligonucleotide
  Sense strand starting at position 952 of SEQ ID NO: 917264
acguuugacuuccuacaga

SEQ ID NO: 1221745 - RNA, 19 nt, Artificial Sequence
  Description of Artificial Sequence: Synthetic oligonucleotide
  Antisense strand to SEQ ID NO: 1221744
ucuguaggaagucaaacgu

SEQ ID NO: 1221746 - RNA, 19 nt, Artificial Sequence
  Description of Artificial Sequence: Synthetic oligonucleotide
  Sense strand starting at position 955 of SEQ ID NO: 917264
uuugacuuccuacagagua

SEQ ID NO: 1221747 - RNA, 19 nt, Artificial Sequence
  Description of Artificial Sequence: Synthetic oligonucleotide
  Antisense strand to SEQ ID NO: 1221746
uacucuguaggaagucaaa

SEQ ID NO: 1221748 - RNA, 19 nt, Artificial Sequence
  Description of Artificial Sequence: Synthetic oligonucleotide
  Sense strand starting at position 968 of SEQ ID NO: 917264
agaguaggucuguggaagu

SEQ ID NO: 1221749 - RNA, 19 nt, Artificial Sequence
  Description of Artificial Sequence: Synthetic oligonucleotide
  Antisense strand to SEQ ID NO: 1221748
acuuccacagaccuacucu

SEQ ID NO: 1221750 - RNA, 19 nt, Artificial Sequence
  Description of Artificial Sequence: Synthetic oligonucleotide
  Sense strand starting at position 971 of SEQ ID NO: 917264
guaggucuguggaagucuu

SEQ ID NO: 1221751 - RNA, 19 nt, Artificial Sequence
  Description of Artificial Sequence: Synthetic oligonucleotide
  Antisense strand to SEQ ID NO: 1221750
aagacuuccacagaccuac

SEQ ID NO: 1221752 - RNA, 19 nt, Artificial Sequence
  Description of Artificial Sequence: Synthetic oligonucleotide
  Sense strand starting at position 1035 of SEQ ID NO: 917264
agcugugacccuugcgaca

SEQ ID NO: 1221753 - RNA, 19 nt, Artificial Sequence
  Description of Artificial Sequence: Synthetic oligonucleotide
  Antisense strand to SEQ ID NO: 1221752
ugucgcaagggucacagcu

SEQ ID NO: 1221754 - RNA, 19 nt, Artificial Sequence
  Description of Artificial Sequence: Synthetic oligonucleotide
  Sense strand starting at position 1048 of SEQ ID NO: 917264
gcgacagauucgcucgcuu

SEQ ID NO: 1221755 - RNA, 19 nt, Artificial Sequence
  Description of Artificial Sequence: Synthetic oligonucleotide
  Antisense strand to SEQ ID NO: 1221754
aagcgagcgaaucugucgc

SEQ ID NO: 1221756 - RNA, 19 nt, Artificial Sequence
  Description of Artificial Sequence: Synthetic oligonucleotide
  Sense strand starting at position 1050 of SEQ ID NO: 917264
gacagauucgcucgcuucu

SEQ ID NO: 1221757 - RNA, 19 nt, Artificial Sequence
  Description of Artificial Sequence: Synthetic oligonucleotide
  Antisense strand to SEQ ID NO: 1221756
agaagcgagcgaaucuguc

SEQ ID NO: 1221758 - RNA, 19 nt, Artificial Sequence
  Description of Artificial Sequence: Synthetic oligonucleotide
  Sense strand starting at position 1114 of SEQ ID NO: 917264
cugugaucuuuccugaagc

SEQ ID NO: 1221759 - RNA, 19 nt, Artificial Sequence
  Description of Artificial Sequence: Synthetic oligonucleotide
  Antisense strand to SEQ ID NO: 1221758
gcuucaggaaagaucacag

SEQ ID NO: 1221760 - RNA, 19 nt, Artificial Sequence
  Description of Artificial Sequence: Synthetic oligonucleotide
  Sense strand starting at position 1116 of SEQ ID NO: 917264
gugaucuuuccugaagcca

SEQ ID NO: 1221761 - RNA, 19 nt, Artificial Sequence
  Description of Artificial Sequence: Synthetic oligonucleotide
  Antisense strand to SEQ ID NO: 1221760
uggcuucaggaaagaucac

SEQ ID NO: 1221762 - RNA, 19 nt, Artificial Sequence
  Description of Artificial Sequence: Synthetic oligonucleotide
  Sense strand starting at position 1219 of SEQ ID NO: 917264
gaacuuugcugucuggaca

SEQ ID NO: 1221763 - RNA, 19 nt, Artificial Sequence
  Description of Artificial Sequence: Synthetic oligonucleotide
  Antisense strand to SEQ ID NO: 1221762
uguccagacagcaaaguuc

SEQ ID NO: 1221764 - RNA, 19 nt, Artificial Sequence
  Description of Artificial Sequence: Synthetic oligonucleotide
  Sense strand starting at position 1273 of SEQ ID NO: 917264
ucuaucgucgaacgaucaa

SEQ ID NO: 1221765 - RNA, 19 nt, Artificial Sequence
  Description of Artificial Sequence: Synthetic oligonucleotide
  Antisense strand to SEQ ID NO: 1221764
uugaucguucgacgauaga

SEQ ID NO: 1221766 - RNA, 19 nt, Artificial Sequence
  Description of Artificial Sequence: Synthetic oligonucleotide
  Sense strand starting at position 2617 of SEQ ID NO: 917264
cggaguacuacccgguacu

SEQ ID NO: 1221767 - RNA, 19 nt, Artificial Sequence
  Description of Artificial Sequence: Synthetic oligonucleotide
  Antisense strand to SEQ ID NO: 1221766
aguaccggguaguacuccg

SEQ ID NO: 1221768 - RNA, 19 nt, Artificial Sequence
  Description of Artificial Sequence: Synthetic oligonucleotide
  Sense strand starting at position 2618 of SEQ ID NO: 917264
ggaguacuacccgguacuu

SEQ ID NO: 1221769 - RNA, 19 nt, Artificial Sequence
  Description of Artificial Sequence: Synthetic oligonucleotide
  Antisense strand to SEQ ID NO: 1221768
aaguaccggguaguacucc

SEQ ID NO: 1221770 - RNA, 19 nt, Artificial Sequence
  Description of Artificial Sequence: Synthetic oligonucleotide
  Sense strand starting at position 2620 of SEQ ID NO: 917264
aguacuacccgguacuuua

SEQ ID NO: 1221771 - RNA, 19 nt, Artificial Sequence
  Description of Artificial Sequence: Synthetic oligonucleotide
  Antisense strand to SEQ ID NO: 1221770
uaaaguaccggguaguacu

SEQ ID NO: 1221772 - RNA, 19 nt, Artificial Sequence
  Description of Artificial Sequence: Synthetic oligonucleotide
  Sense strand starting at position 2627 of SEQ ID NO: 917265
cccgguacuuuauguaaca

SEQ ID NO: 1221773 - RNA, 19 nt, Artificial Sequence
  Description of Artificial Sequence: Synthetic oligonucleotide
  Antisense strand to SEQ ID NO: 1221772
uguuacauaaaguaccggg

SEQ ID NO: 1221774 - RNA, 19 nt, Artificial Sequence
  Description of Artificial Sequence: Synthetic oligonucleotide
  Sense strand starting at position 308 of SEQ ID NO: 917265
uuuaaauugguuuguccaa

SEQ ID NO: 1221775 - RNA, 19 nt, Artificial Sequence
  Description of Artificial Sequence: Synthetic oligonucleotide
  Antisense strand to SEQ ID NO: 1221774
uuggacaaaccaauuuaaa

SEQ ID NO: 1221776 - RNA, 19 nt, Artificial Sequence
  Description of Artificial Sequence: Synthetic oligonucleotide
  Sense strand starting at position 309 of SEQ ID NO: 917265
uuaaauugguuuguccaau

SEQ ID NO: 1221777 - RNA, 19 nt, Artificial Sequence
  Description of Artificial Sequence: Synthetic oligonucleotide
  Antisense strand to SEQ ID NO: 1221776
auuggacaaaccaauuuaa

SEQ ID NO: 1221778 - RNA, 19 nt, Artificial Sequence
  Description of Artificial Sequence: Synthetic oligonucleotide
  Sense strand starting at position 367 of SEQ ID NO: 917265
gaaguucuuuaugaagcga

SEQ ID NO: 1221779 - RNA, 19 nt, Artificial Sequence
  Description of Artificial Sequence: Synthetic oligonucleotide
  Antisense strand to SEQ ID NO: 1221778
ucgcuucauaaagaacuuc

SEQ ID NO: 1221780 - RNA, 19 nt, Artificial Sequence
  Description of Artificial Sequence: Synthetic oligonucleotide
  Sense strand starting at position 505 of SEQ ID NO: 917265
acugaugccuacuaagcaa

SEQ ID NO: 1221781 - RNA, 19 nt, Artificial Sequence
  Description of Artificial Sequence: Synthetic oligonucleotide
  Antisense strand to SEQ ID NO: 1221780
uugcuuaguaggcaucagu

SEQ ID NO: 1221782 - RNA, 19 nt, Artificial Sequence
  Description of Artificial Sequence: Synthetic oligonucleotide
  Sense strand starting at position 527 of SEQ ID NO: 917265
acguuugacuuccuacaga

SEQ ID NO: 1221783 - RNA, 19 nt, Artificial Sequence
  Description of Artificial Sequence: Synthetic oligonucleotide
  Antisense strand to SEQ ID NO: 1221782
ucuguaggaagucaaacgu

SEQ ID NO: 1221784 - RNA, 19 nt, Artificial Sequence
  Description of Artificial Sequence: Synthetic oligonucleotide
  Sense strand starting at position 530 of SEQ ID NO: 917265
uuugacuuccuacagagua

SEQ ID NO: 1221785 - RNA, 19 nt, Artificial Sequence
  Description of Artificial Sequence: Synthetic oligonucleotide
  Antisense strand to SEQ ID NO: 1221784
uacucuguaggaagucaaa

SEQ ID NO: 1221786 - RNA, 19 nt, Artificial Sequence
  Description of Artificial Sequence: Synthetic oligonucleotide
  Sense strand starting at position 543 of SEQ ID NO: 917265
agaguaggucuguggaagu

SEQ ID NO: 1221787 - RNA, 19 nt, Artificial Sequence
  Description of Artificial Sequence: Synthetic oligonucleotide
  Antisense strand to SEQ ID NO: 1221786
acuuccacagaccuacucu

SEQ ID NO: 1221788 - RNA, 19 nt, Artificial Sequence
  Description of Artificial Sequence: Synthetic oligonucleotide
  Sense strand starting at position 546 of SEQ ID NO: 917265
guaggucuguggaagucuu

SEQ ID NO: 1221789 - RNA, 19 nt, Artificial Sequence
  Description of Artificial Sequence: Synthetic oligonucleotide
  Antisense strand to SEQ ID NO: 1221788
aagacuuccacagaccuac

SEQ ID NO: 1221790 - RNA, 19 nt, Artificial Sequence
  Description of Artificial Sequence: Synthetic oligonucleotide
  Sense strand starting at position 610 of SEQ ID NO: 917265
agcugugacccuugcgaca

SEQ ID NO: 1221791 - RNA, 19 nt, Artificial Sequence
  Description of Artificial Sequence: Synthetic oligonucleotide
  Antisense strand to SEQ ID NO: 1221790
ugucgcaagggucacagcu

SEQ ID NO: 1221792 - RNA, 19 nt, Artificial Sequence
  Description of Artificial Sequence: Synthetic oligonucleotide
  Sense strand starting at position 623 of SEQ ID NO: 917265
gcgacagauucgcucgcuu

SEQ ID NO: 1221793 - RNA, 19 nt, Artificial Sequence
  Description of Artificial Sequence: Synthetic oligonucleotide
  Antisense strand to SEQ ID NO: 1221792
aagcgagcgaaucugucgc

SEQ ID NO: 1221794 - RNA, 19 nt, Artificial Sequence
  Description of Artificial Sequence: Synthetic oligonucleotide
  Sense strand starting at position 625 of SEQ ID NO: 917265
gacagauucgcucgcuucu

SEQ ID NO: 1221795 - RNA, 19 nt, Artificial Sequence
  Description of Artificial Sequence: Synthetic oligonucleotide
  Antisense strand to SEQ ID NO: 1221794
agaagcgagcgaaucuguc

SEQ ID NO: 1221796 - RNA, 19 nt, Artificial Sequence
  Description of Artificial Sequence: Synthetic oligonucleotide
  Sense strand starting at position 689 of SEQ ID NO: 917265
cugugaucuuuccugaagc

SEQ ID NO: 1221797 - RNA, 19 nt, Artificial Sequence
  Description of Artificial Sequence: Synthetic oligonucleotide
  Antisense strand to SEQ ID NO: 1221796
gcuucaggaaagaucacag

SEQ ID NO: 1221798 - RNA, 19 nt, Artificial Sequence
  Description of Artificial Sequence: Synthetic oligonucleotide
  Sense strand starting at position 691 of SEQ ID NO: 917265
gugaucuuuccugaagcca

SEQ ID NO: 1221799 - RNA, 19 nt, Artificial Sequence
  Description of Artificial Sequence: Synthetic oligonucleotide
  Antisense strand to SEQ ID NO: 1221798
uggcuucaggaaagaucac

SEQ ID NO: 1221800 - RNA, 19 nt, Artificial Sequence
  Description of Artificial Sequence: Synthetic oligonucleotide
  Sense strand starting at position 794 of SEQ ID NO: 917265
gaacuuugcugucuggaca

SEQ ID NO: 1221801 - RNA, 19 nt, Artificial Sequence
  Description of Artificial Sequence: Synthetic oligonucleotide
  Antisense strand to SEQ ID NO: 1221800
uguccagacagcaaaguuc

SEQ ID NO: 1221802 - RNA, 19 nt, Artificial Sequence
  Description of Artificial Sequence: Synthetic oligonucleotide
  Sense strand starting at position 848 of SEQ ID NO: 917265
ucuaucgucgaacgaucaa

SEQ ID NO: 1221803 - RNA, 19 nt, Artificial Sequence
  Description of Artificial Sequence: Synthetic oligonucleotide
  Antisense strand to SEQ ID NO: 1221802
uugaucguucgacgauaga

SEQ ID NO: 1221804 - RNA, 19 nt, Artificial Sequence
  Description of Artificial Sequence: Synthetic oligonucleotide
  Sense strand starting at position 2192 of SEQ ID NO: 917265
cggaguacuacccgguacu

SEQ ID NO: 1221805 - RNA, 19 nt, Artificial Sequence
  Description of Artificial Sequence: Synthetic oligonucleotide
  Antisense strand to SEQ ID NO: 1221804
aguaccggguaguacuccg

SEQ ID NO: 1221806 - RNA, 19 nt, Artificial Sequence
  Description of Artificial Sequence: Synthetic oligonucleotide
  Sense strand starting at position 2193 of SEQ ID NO: 917265
ggaguacuacccgguacuu

SEQ ID NO: 1221807 - RNA, 19 nt, Artificial Sequence
  Description of Artificial Sequence: Synthetic oligonucleotide
  Antisense strand to SEQ ID NO: 1221806
aaguaccggguaguacucc

SEQ ID NO: 1221808 - RNA, 19 nt, Artificial Sequence
  Description of Artificial Sequence: Synthetic oligonucleotide
  Sense strand starting at position 2195 of SEQ ID NO: 917265
aguacuacccgguacuuua

SEQ ID NO: 1221809 - RNA, 19 nt, Artificial Sequence
  Description of Artificial Sequence: Synthetic oligonucleotide
  Antisense strand to SEQ ID NO: 1221808
uaaaguaccggguaguacu

SEQ ID NO: 1221810 - RNA, 19 nt, Artificial Sequence
  Description of Artificial Sequence: Synthetic oligonucleotide
  Sense strand starting at position 2202 of SEQ ID NO: 917265
cccgguacuuuauguaaca

SEQ ID NO: 1221811 - RNA, 19 nt, Artificial Sequence
  Description of Artificial Sequence: Synthetic oligonucleotide
  Antisense strand to SEQ ID NO: 1221810
uguuacauaaaguaccggg

SEQ ID NO: 1221812 - RNA, 19 nt, Artificial Sequence
  Description of Artificial Sequence: Synthetic oligonucleotide
  Sense strand starting at position 3764 of SEQ ID NO: 917265
cccacagagcaguauaagu

SEQ ID NO: 1221813 - RNA, 19 nt, Artificial Sequence
  Description of Artificial Sequence: Synthetic oligonucleotide
  Antisense strand to SEQ ID NO: 1221812
acuuauacugcucuguggg

SEQ ID NO: 1221814 - RNA, 19 nt, Artificial Sequence
  Description of Artificial Sequence: Synthetic oligonucleotide
  Sense strand starting at position 3891 of SEQ ID NO: 917266
ccggacucuuacuacuaga

SEQ ID NO: 1221815 - RNA, 19 nt, Artificial Sequence
  Description of Artificial Sequence: Synthetic oligonucleotide
  Antisense strand to SEQ ID NO: 1221814
ucuaguaguaagaguccgg

SEQ ID NO: 1221816 - RNA, 19 nt, Artificial Sequence
  Description of Artificial Sequence: Synthetic oligonucleotide
  Sense strand starting at position 1375 of SEQ ID NO: 917266
cccacagagcaguauaagu

SEQ ID NO: 1221817 - RNA, 19 nt, Artificial Sequence
  Description of Artificial Sequence: Synthetic oligonucleotide
  Antisense strand to SEQ ID NO: 1221816
acuuauacugcucuguggg

SEQ ID NO: 1221818 - RNA, 19 nt, Artificial Sequence
  Description of Artificial Sequence: Synthetic oligonucleotide
  Sense strand starting at position 1502 of SEQ ID NO: 917266
ccggacucuuacuacuaga

SEQ ID NO: 1221819 - RNA, 19 nt, Artificial Sequence
  Description of Artificial Sequence: Synthetic oligonucleotide
  Antisense strand to SEQ ID NO: 1221818
ucuaguaguaagaguccgg

SEQ ID NO: 1221820 - RNA, 19 nt, Artificial Sequence
  Description of Artificial Sequence: Synthetic oligonucleotide
  Sense strand starting at position 2000 of SEQ ID NO: 917266
ucccaaagcucccggauuu

SEQ ID NO: 1221821 - RNA, 19 nt, Artificial Sequence
  Description of Artificial Sequence: Synthetic oligonucleotide
  Antisense strand to SEQ ID NO: 1221820
aaauccgggagcuuuggga

SEQ ID NO: 1221822 - RNA, 19 nt, Artificial Sequence
  Description of Artificial Sequence: Synthetic oligonucleotide
  Sense strand starting at position 2407 of SEQ ID NO: 917266
cuguguauuccacgaacua

SEQ ID NO: 1221823 - RNA, 19 nt, Artificial Sequence
  Description of Artificial Sequence: Synthetic oligonucleotide
  Antisense strand to SEQ ID NO: 1221822
uaguucguggaauacacag

SEQ ID NO: 1221824 - RNA, 19 nt, Artificial Sequence
  Description of Artificial Sequence: Synthetic oligonucleotide
  Sense strand starting at position 2408 of SEQ ID NO: 917266
uguguauuccacgaacuaa

SEQ ID NO: 1221825 - RNA, 19 nt, Artificial Sequence
  Description of Artificial Sequence: Synthetic oligonucleotide
  Antisense strand to SEQ ID NO: 1221824
uuaguucguggaauacaca

SEQ ID NO: 1221826 - RNA, 19 nt, Artificial Sequence
  Description of Artificial Sequence: Synthetic oligonucleotide
  Sense strand starting at position 2441 of SEQ ID NO: 917266
ccuugcaguguuucuguau

SEQ ID NO: 1221827 - RNA, 19 nt, Artificial Sequence
  Description of Artificial Sequence: Synthetic oligonucleotide
  Antisense strand to SEQ ID NO: 1221826
auacagaaacacugcaagg

SEQ ID NO: 1221828 - RNA, 19 nt, Artificial Sequence
  Description of Artificial Sequence: Synthetic oligonucleotide
  Sense strand starting at position 2444 of SEQ ID NO: 917266
ugcaguguuucuguaucaa

SEQ ID NO: 1221829 - RNA, 19 nt, Artificial Sequence
  Description of Artificial Sequence: Synthetic oligonucleotide
  Antisense strand to SEQ ID NO: 1221828
uugauacagaaacacugca

SEQ ID NO: 1221830 - RNA, 19 nt, Artificial Sequence
  Description of Artificial Sequence: Synthetic oligonucleotide
  Sense strand starting at position 2588 of SEQ ID NO: 917266
ugcaguugaaauggauaca

SEQ ID NO: 1221831 - RNA, 19 nt, Artificial Sequence
  Description of Artificial Sequence: Synthetic oligonucleotide
  Antisense strand to SEQ ID NO: 1221830
uguauccauuucaacugca

SEQ ID NO: 1221832 - RNA, 19 nt, Artificial Sequence
  Description of Artificial Sequence: Synthetic oligonucleotide
  Sense strand starting at position 2604 of SEQ ID NO: 917266
acacauucuggugguaaga

SEQ ID NO: 1221833 - RNA, 19 nt, Artificial Sequence
  Description of Artificial Sequence: Synthetic oligonucleotide
  Antisense strand to SEQ ID NO: 1221832
ucuuaccaccagaaugugu

SEQ ID NO: 1221834 - RNA, 19 nt, Artificial Sequence
  Description of Artificial Sequence: Synthetic oligonucleotide
  Sense strand starting at position 2615 of SEQ ID NO: 917266
ugguaagauuuggaaacgu

SEQ ID NO: 1221835 - RNA, 19 nt, Artificial Sequence
  Description of Artificial Sequence: Synthetic oligonucleotide
  Antisense strand to SEQ ID NO: 1221834
acguuuccaaaucuuacca

SEQ ID NO: 1221836 - RNA, 19 nt, Artificial Sequence
  Description of Artificial Sequence: Synthetic oligonucleotide
  Sense strand starting at position 2624 of SEQ ID NO: 917266
uuggaaacgugguauuuga

SEQ ID NO: 1221837 - RNA, 19 nt, Artificial Sequence
  Description of Artificial Sequence: Synthetic oligonucleotide
  Antisense strand to SEQ ID NO: 1221836
ucaaauaccacguuuccaa

SEQ ID NO: 1221838 - RNA, 19 nt, Artificial Sequence
  Description of Artificial Sequence: Synthetic oligonucleotide
  Sense strand starting at position 2685 of SEQ ID NO: 917266
aaacguauucuguguaauc

SEQ ID NO: 1221839 - RNA, 19 nt, Artificial Sequence
  Description of Artificial Sequence: Synthetic oligonucleotide
  Antisense strand to SEQ ID NO: 1221838
gauuacacagaauacguuu

SEQ ID NO: 1221840 - RNA, 19 nt, Artificial Sequence
  Description of Artificial Sequence: Synthetic oligonucleotide
  Sense strand starting at position 2687 of SEQ ID NO: 917266
acguauucuguguaaucca

SEQ ID NO: 1221841 - RNA, 19 nt, Artificial Sequence
  Description of Artificial Sequence: Synthetic oligonucleotide
  Antisense strand to SEQ ID NO: 1221840
uggauuacacagaauacgu

SEQ ID NO: 1221842 - RNA, 19 nt, Artificial Sequence
  Description of Artificial Sequence: Synthetic oligonucleotide
  Sense strand starting at position 2713 of SEQ ID NO: 917266
uuuggauucguccaguauu

SEQ ID NO: 1221843 - RNA, 19 nt, Artificial Sequence
  Description of Artificial Sequence: Synthetic oligonucleotide
  Antisense strand to SEQ ID NO: 1221842
aauacuggacgaauccaaa

SEQ ID NO: 1221844 - RNA, 19 nt, Artificial Sequence
  Description of Artificial Sequence: Synthetic oligonucleotide
  Sense strand starting at position 2738 of SEQ ID NO: 917266
guagauuauuaaccgcagu

SEQ ID NO: 1221845 - RNA, 19 nt, Artificial Sequence
  Description of Artificial Sequence: Synthetic oligonucleotide
  Antisense strand to SEQ ID NO: 1221844
acugcgguuaauaaucuac

SEQ ID NO: 1221846 - RNA, 19 nt, Artificial Sequence
  Description of Artificial Sequence: Synthetic oligonucleotide
  Sense strand starting at position 2787 of SEQ ID NO: 917266
uugugcuauggaugugagu

SEQ ID NO: 1221847 - RNA, 19 nt, Artificial Sequence
  Description of Artificial Sequence: Synthetic oligonucleotide
  Antisense strand to SEQ ID NO: 1221846
acucacauccauagcacaa

SEQ ID NO: 1221848 - RNA, 19 nt, Artificial Sequence
  Description of Artificial Sequence: Synthetic oligonucleotide
  Sense strand starting at position 2789 of SEQ ID NO: 917266
gugcuauggaugugaguac

SEQ ID NO: 1221849 - RNA, 19 nt, Artificial Sequence
  Description of Artificial Sequence: Synthetic oligonucleotide
  Antisense strand to SEQ ID NO: 1221848
guacucacauccauagcac

SEQ ID NO: 1221850 - RNA, 19 nt, Artificial Sequence
  Description of Artificial Sequence: Synthetic oligonucleotide
  Sense strand starting at position 2807 of SEQ ID NO: 917266
cggcaaagagacugaauua

SEQ ID NO: 1221851 - RNA, 19 nt, Artificial Sequence
  Description of Artificial Sequence: Synthetic oligonucleotide
  Antisense strand to SEQ ID NO: 1221850
uaauucagucucuuugccg

SEQ ID NO: 1221852 - RNA, 19 nt, Artificial Sequence
  Description of Artificial Sequence: Synthetic oligonucleotide
  Sense strand starting at position 2865 of SEQ ID NO: 917266
cguugcugcaaugauaaau

SEQ ID NO: 1221853 - RNA, 19 nt, Artificial Sequence
  Description of Artificial Sequence: Synthetic oligonucleotide
  Antisense strand to SEQ ID NO: 1221852
auuuaucauugcagcaacg

SEQ ID NO: 1221854 - RNA, 19 nt, Artificial Sequence
  Description of Artificial Sequence: Synthetic oligonucleotide
  Sense strand starting at position 2954 of SEQ ID NO: 917266
gcaggagagcuuuggcuuu

SEQ ID NO: 1221855 - RNA, 19 nt, Artificial Sequence
  Description of Artificial Sequence: Synthetic oligonucleotide
  Antisense strand to SEQ ID NO: 1221854
aaagccaaagcucuccugc

SEQ ID NO: 1221856 - RNA, 19 nt, Artificial Sequence
  Description of Artificial Sequence: Synthetic oligonucleotide
  Sense strand starting at position 2956 of SEQ ID NO: 917266
aggagagcuuuggcuuuga

SEQ ID NO: 1221857 - RNA, 19 nt, Artificial Sequence
  Description of Artificial Sequence: Synthetic oligonucleotide
  Antisense strand to SEQ ID NO: 1221856
ucaaagccaaagcucuccu

SEQ ID NO: 1221858 - RNA, 19 nt, Artificial Sequence
  Description of Artificial Sequence: Synthetic oligonucleotide
  Sense strand starting at position 2960 of SEQ ID NO: 917266
gagcuuuggcuuugauauu

SEQ ID NO: 1221859 - RNA, 19 nt, Artificial Sequence
  Description of Artificial Sequence: Synthetic oligonucleotide
  Antisense strand to SEQ ID NO: 1221858
aauaucaaagccaaagcuc

SEQ ID NO: 1221860 - RNA, 19 nt, Artificial Sequence
  Description of Artificial Sequence: Synthetic oligonucleotide
  Sense strand starting at position 3019 of SEQ ID NO: 917266
cuagucuuggccuaguuaa

SEQ ID NO: 1221861 - RNA, 19 nt, Artificial Sequence
  Description of Artificial Sequence: Synthetic oligonucleotide
  Antisense strand to SEQ ID NO: 1221860
uuaacuaggccaagacuag

SEQ ID NO: 1221862 - RNA, 19 nt, Artificial Sequence
  Description of Artificial Sequence: Synthetic oligonucleotide
  Sense strand starting at position 3040 of SEQ ID NO: 917266
gcaaaugaguacuuuaguu

SEQ ID NO: 1221863 - RNA, 19 nt, Artificial Sequence
  Description of Artificial Sequence: Synthetic oligonucleotide
  Antisense strand to SEQ ID NO: 1221862
aacuaaaguacucauuugc

SEQ ID NO: 1221864 - RNA, 19 nt, Artificial Sequence
  Description of Artificial Sequence: Synthetic oligonucleotide
  Sense strand starting at position 3044 of SEQ ID NO: 917266
augaguacuuuaguuucua

SEQ ID NO: 1221865 - RNA, 19 nt, Artificial Sequence
  Description of Artificial Sequence: Synthetic oligonucleotide
  Antisense strand to SEQ ID NO: 1221864
uagaaacuaaaguacucau

SEQ ID NO: 1221866 - RNA, 19 nt, Artificial Sequence
  Description of Artificial Sequence: Synthetic oligonucleotide
  Sense strand starting at position 3045 of SEQ ID NO: 917266
ugaguacuuuaguuucuac

SEQ ID NO: 1221867 - RNA, 19 nt, Artificial Sequence
  Description of Artificial Sequence: Synthetic oligonucleotide
  Antisense strand to SEQ ID NO: 1221866
guagaaacuaaaguacuca

SEQ ID NO: 1221868 - RNA, 19 nt, Artificial Sequence
  Description of Artificial Sequence: Synthetic oligonucleotide
  Sense strand starting at position 3048 of SEQ ID NO: 917266
guacuuuaguuucuacaag

SEQ ID NO: 1221869 - RNA, 19 nt, Artificial Sequence
  Description of Artificial Sequence: Synthetic oligonucleotide
  Antisense strand to SEQ ID NO: 1221868
cuuguagaaacuaaaguac

SEQ ID NO: 1221870 - RNA, 19 nt, Artificial Sequence
  Description of Artificial Sequence: Synthetic oligonucleotide
  Sense strand starting at position 3078 of SEQ ID NO: 917266
acuacuuggucugcacaaa

SEQ ID NO: 1221871 - RNA, 19 nt, Artificial Sequence
  Description of Artificial Sequence: Synthetic oligonucleotide
  Antisense strand to SEQ ID NO: 1221870
uuugugcagaccaaguagu

SEQ ID NO: 1221872 - RNA, 19 nt, Artificial Sequence
  Description of Artificial Sequence: Synthetic oligonucleotide
  Sense strand starting at position 3165 of SEQ ID NO: 917266
ggcgaauugccugagauca

SEQ ID NO: 1221873 - RNA, 19 nt, Artificial Sequence
  Description of Artificial Sequence: Synthetic oligonucleotide
  Antisense strand to SEQ ID NO: 1221872
ugaucucaggcaauucgcc

SEQ ID NO: 1221874 - RNA, 19 nt, Artificial Sequence
  Description of Artificial Sequence: Synthetic oligonucleotide
  Sense strand starting at position 3375 of SEQ ID NO: 917266
gcaagacuaucuccggaaa

SEQ ID NO: 1221875 - RNA, 19 nt, Artificial Sequence
  Description of Artificial Sequence: Synthetic oligonucleotide
  Antisense strand to SEQ ID NO: 1221874
uuuccggagauagucuugc

SEQ ID NO: 1221876 - RNA, 19 nt, Artificial Sequence
  Description of Artificial Sequence: Synthetic oligonucleotide
  Sense strand starting at position 3443 of SEQ ID NO: 917266
uuaugucgaauacagagua

SEQ ID NO: 1221877 - RNA, 19 nt, Artificial Sequence
  Description of Artificial Sequence: Synthetic oligonucleotide
  Antisense strand to SEQ ID NO: 1221876
uacucuguauucgacauaa

SEQ ID NO: 1221878 - RNA, 19 nt, Artificial Sequence
  Description of Artificial Sequence: Synthetic oligonucleotide
  Sense strand starting at position 3531 of SEQ ID NO: 917266
guacaauaguaagaaauag

SEQ ID NO: 1221879 - RNA, 19 nt, Artificial Sequence
  Description of Artificial Sequence: Synthetic oligonucleotide
  Antisense strand to SEQ ID NO: 1221878
cuauuucuuacuauuguac

SEQ ID NO: 1221880 - RNA, 19 nt, Artificial Sequence
  Description of Artificial Sequence: Synthetic oligonucleotide
  Sense strand starting at position 3554 of SEQ ID NO: 917266
guucuucuauuccuagcau

SEQ ID NO: 1221881 - RNA, 19 nt, Artificial Sequence
  Description of Artificial Sequence: Synthetic oligonucleotide
  Antisense strand to SEQ ID NO: 1221880
augcuaggaauagaagaac

SEQ ID NO: 1221882 - RNA, 19 nt, Artificial Sequence
  Description of Artificial Sequence: Synthetic oligonucleotide
  Sense strand starting at position 3577 of SEQ ID NO: 917266
uggcucuagaaugaauagu

SEQ ID NO: 1221883 - RNA, 19 nt, Artificial Sequence
  Description of Artificial Sequence: Synthetic oligonucleotide
  Antisense strand to SEQ ID NO: 1221882
acuauucauucuagagcca

SEQ ID NO: 1221884 - RNA, 19 nt, Artificial Sequence
  Description of Artificial Sequence: Synthetic oligonucleotide
  Sense strand starting at position 3587 of SEQ ID NO: 917266
augaauaguguuuaucuga

SEQ ID NO: 1221885 - RNA, 19 nt, Artificial Sequence
  Description of Artificial Sequence: Synthetic oligonucleotide
  Antisense strand to SEQ ID NO: 1221884
ucagauaaacacuauucau

SEQ ID NO: 1221886 - RNA, 19 nt, Artificial Sequence
  Description of Artificial Sequence: Synthetic oligonucleotide
  Sense strand starting at position 3652 of SEQ ID NO: 917266
uggaguuuaaccuagguuu

SEQ ID NO: 1221887 - RNA, 19 nt, Artificial Sequence
  Description of Artificial Sequence: Synthetic oligonucleotide
  Antisense strand to SEQ ID NO: 1221886
aaaccuagguuaaacucca

SEQ ID NO: 1221888 - RNA, 19 nt, Artificial Sequence
  Description of Artificial Sequence: Synthetic oligonucleotide
  Sense strand starting at position 3696 of SEQ ID NO: 917266
acaguacaaucugaguaau

SEQ ID NO: 1221889 - RNA, 19 nt, Artificial Sequence
  Description of Artificial Sequence: Synthetic oligonucleotide
  Antisense strand to SEQ ID NO: 1221888
auuacucagauuguacugu

SEQ ID NO: 1221890 - RNA, 19 nt, Artificial Sequence
  Description of Artificial Sequence: Synthetic oligonucleotide
  Sense strand starting at position 3698 of SEQ ID NO: 917266
aguacaaucugaguaauga

SEQ ID NO: 1221891 - RNA, 19 nt, Artificial Sequence
  Description of Artificial Sequence: Synthetic oligonucleotide
  Antisense strand to SEQ ID NO: 1221890
ucauuacucagauuguacu

SEQ ID NO: 1221892 - RNA, 19 nt, Artificial Sequence
  Description of Artificial Sequence: Synthetic oligonucleotide
  Sense strand starting at position 3719 of SEQ ID NO: 917266
uuguuccucuaguuaugua

SEQ ID NO: 1221893 - RNA, 19 nt, Artificial Sequence
  Description of Artificial Sequence: Synthetic oligonucleotide
  Antisense strand to SEQ ID NO: 1221892
uacauaacuagaggaacaa

SEQ ID NO: 1221894 - RNA, 19 nt, Artificial Sequence
  Description of Artificial Sequence: Synthetic oligonucleotide
  Sense strand starting at position 3933 of SEQ ID NO: 917267
ggaacaaacuuagaagauc

SEQ ID NO: 1221895 - RNA, 19 nt, Artificial Sequence
  Description of Artificial Sequence: Synthetic oligonucleotide
  Antisense strand to SEQ ID NO: 1221894
gaucuucuaaguuuguucc

SEQ ID NO: 1221896 - RNA, 19 nt, Artificial Sequence
  Description of Artificial Sequence: Synthetic oligonucleotide
  Sense strand starting at position 443 of SEQ ID NO: 917267
cggaguacuacccgguacu

SEQ ID NO: 1221897 - RNA, 19 nt, Artificial Sequence
  Description of Artificial Sequence: Synthetic oligonucleotide
  Antisense strand to SEQ ID NO: 1221896
aguaccggguaguacuccg

SEQ ID NO: 1221898 - RNA, 19 nt, Artificial Sequence
  Description of Artificial Sequence: Synthetic oligonucleotide
  Sense strand starting at position 444 of SEQ ID NO: 917267
ggaguacuacccgguacuu

SEQ ID NO: 1221899 - RNA, 19 nt, Artificial Sequence
  Description of Artificial Sequence: Synthetic oligonucleotide
  Antisense strand to SEQ ID NO: 1221898
aaguaccggguaguacucc

SEQ ID NO: 1221900 - RNA, 19 nt, Artificial Sequence
  Description of Artificial Sequence: Synthetic oligonucleotide
  Sense strand starting at position 446 of SEQ ID NO: 917267
aguacuacccgguacuuua

SEQ ID NO: 1221901 - RNA, 19 nt, Artificial Sequence
  Description of Artificial Sequence: Synthetic oligonucleotide
  Antisense strand to SEQ ID NO: 1221900
uaaaguaccggguaguacu

SEQ ID NO: 1221902 - RNA, 19 nt, Artificial Sequence
  Description of Artificial Sequence: Synthetic oligonucleotide
  Sense strand starting at position 453 of SEQ ID NO: 917267
cccgguacuuuauguaaca

SEQ ID NO: 1221903 - RNA, 19 nt, Artificial Sequence
  Description of Artificial Sequence: Synthetic oligonucleotide
  Antisense strand to SEQ ID NO: 1221902
uguuacauaaaguaccggg

SEQ ID NO: 1221904 - RNA, 19 nt, Artificial Sequence
  Description of Artificial Sequence: Synthetic oligonucleotide
  Sense strand starting at position 2015 of SEQ ID NO: 917267
cccacagagcaguauaagu

SEQ ID NO: 1221905 - RNA, 19 nt, Artificial Sequence
  Description of Artificial Sequence: Synthetic oligonucleotide
  Antisense strand to SEQ ID NO: 1221904
acuuauacugcucuguggg

SEQ ID NO: 1221906 - RNA, 19 nt, Artificial Sequence
  Description of Artificial Sequence: Synthetic oligonucleotide
  Sense strand starting at position 2142 of SEQ ID NO: 917267
ccggacucuuacuacuaga

SEQ ID NO: 1221907 - RNA, 19 nt, Artificial Sequence
  Description of Artificial Sequence: Synthetic oligonucleotide
  Antisense strand to SEQ ID NO: 1221906
ucuaguaguaagaguccgg

SEQ ID NO: 1221908 - RNA, 19 nt, Artificial Sequence
  Description of Artificial Sequence: Synthetic oligonucleotide
  Sense strand starting at position 2640 of SEQ ID NO: 917267
ucccaaagcucccggauuu

SEQ ID NO: 1221909 - RNA, 19 nt, Artificial Sequence
  Description of Artificial Sequence: Synthetic oligonucleotide
  Antisense strand to SEQ ID NO: 1221908
aaauccgggagcuuuggga

SEQ ID NO: 1221910 - RNA, 19 nt, Artificial Sequence
  Description of Artificial Sequence: Synthetic oligonucleotide
  Sense strand starting at position 2659 of SEQ ID NO: 917267
ugggcuuucugagaagccu

SEQ ID NO: 1221911 - RNA, 19 nt, Artificial Sequence
  Description of Artificial Sequence: Synthetic oligonucleotide
  Antisense strand to SEQ ID NO: 1221910
aggcuucucagaaagccca

SEQ ID NO: 1221912 - RNA, 19 nt, Artificial Sequence
  Description of Artificial Sequence: Synthetic oligonucleotide
  Sense strand starting at position 3045 of SEQ ID NO: 917267
gccuguguauuccacgaac

SEQ ID NO: 1221913 - RNA, 19 nt, Artificial Sequence
  Description of Artificial Sequence: Synthetic oligonucleotide
  Antisense strand to SEQ ID NO: 1221912
guucguggaauacacaggc

SEQ ID NO: 1221914 - RNA, 19 nt, Artificial Sequence
  Description of Artificial Sequence: Synthetic oligonucleotide
  Sense strand starting at position 3047 of SEQ ID NO: 917267
cuguguauuccacgaacua

SEQ ID NO: 1221915 - RNA, 19 nt, Artificial Sequence
  Description of Artificial Sequence: Synthetic oligonucleotide
  Antisense strand to SEQ ID NO: 1221914
uaguucguggaauacacag

SEQ ID NO: 1221916 - RNA, 19 nt, Artificial Sequence
  Description of Artificial Sequence: Synthetic oligonucleotide
  Sense strand starting at position 3048 of SEQ ID NO: 917267
uguguauuccacgaacuaa

SEQ ID NO: 1221917 - RNA, 19 nt, Artificial Sequence
  Description of Artificial Sequence: Synthetic oligonucleotide
  Antisense strand to SEQ ID NO: 1221916
uuaguucguggaauacaca

SEQ ID NO: 1221918 - RNA, 19 nt, Artificial Sequence
  Description of Artificial Sequence: Synthetic oligonucleotide
  Sense strand starting at position 3081 of SEQ ID NO: 917267
ccuugcaguguuucuguau

SEQ ID NO: 1221919 - RNA, 19 nt, Artificial Sequence
  Description of Artificial Sequence: Synthetic oligonucleotide
  Antisense strand to SEQ ID NO: 1221918
auacagaaacacugcaagg

SEQ ID NO: 1221920 - RNA, 19 nt, Artificial Sequence
  Description of Artificial Sequence: Synthetic oligonucleotide
  Sense strand starting at position 3084 of SEQ ID NO: 917267
ugcaguguuucuguaucaa

SEQ ID NO: 1221921 - RNA, 19 nt, Artificial Sequence
  Description of Artificial Sequence: Synthetic oligonucleotide
  Antisense strand to SEQ ID NO: 1221920
uugauacagaaacacugca

SEQ ID NO: 1221922 - RNA, 19 nt, Artificial Sequence
  Description of Artificial Sequence: Synthetic oligonucleotide
  Sense strand starting at position 3179 of SEQ ID NO: 917267
gguuuauccuguugcaaag

SEQ ID NO: 1221923 - RNA, 19 nt, Artificial Sequence
  Description of Artificial Sequence: Synthetic oligonucleotide
  Antisense strand to SEQ ID NO: 1221922
cuuugcaacaggauaaacc

SEQ ID NO: 1221924 - RNA, 19 nt, Artificial Sequence
  Description of Artificial Sequence: Synthetic oligonucleotide
  Sense strand starting at position 3228 of SEQ ID NO: 917267
ugcaguugaaauggauaca

SEQ ID NO: 1221925 - RNA, 19 nt, Artificial Sequence
  Description of Artificial Sequence: Synthetic oligonucleotide
  Antisense strand to SEQ ID NO: 1221924
uguauccauuucaacugca

SEQ ID NO: 1221926 - RNA, 19 nt, Artificial Sequence
  Description of Artificial Sequence: Synthetic oligonucleotide
  Sense strand starting at position 3241 of SEQ ID NO: 917267
gauacacauucugguggua

SEQ ID NO: 1221927 - RNA, 19 nt, Artificial Sequence
  Description of Artificial Sequence: Synthetic oligonucleotide
  Antisense strand to SEQ ID NO: 1221926
uaccaccagaauguguauc

SEQ ID NO: 1221928 - RNA, 19 nt, Artificial Sequence
  Description of Artificial Sequence: Synthetic oligonucleotide
  Sense strand starting at position 3243 of SEQ ID NO: 917267
uacacauucuggugguaag

SEQ ID NO: 1221929 - RNA, 19 nt, Artificial Sequence
  Description of Artificial Sequence: Synthetic oligonucleotide
  Antisense strand to SEQ ID NO: 1221928
cuuaccaccagaaugugua

SEQ ID NO: 1221930 - RNA, 19 nt, Artificial Sequence
  Description of Artificial Sequence: Synthetic oligonucleotide
  Sense strand starting at position 3244 of SEQ ID NO: 917267
acacauucuggugguaaga

SEQ ID NO: 1221931 - RNA, 19 nt, Artificial Sequence
  Description of Artificial Sequence: Synthetic oligonucleotide
  Antisense strand to SEQ ID NO: 1221930
ucuuaccaccagaaugugu

SEQ ID NO: 1221932 - RNA, 19 nt, Artificial Sequence
  Description of Artificial Sequence: Synthetic oligonucleotide
  Sense strand starting at position 3246 of SEQ ID NO: 917267
acauucuggugguaagauu

SEQ ID NO: 1221933 - RNA, 19 nt, Artificial Sequence
  Description of Artificial Sequence: Synthetic oligonucleotide
  Antisense strand to SEQ ID NO: 1221932
aaucuuaccaccagaaugu

SEQ ID NO: 1221934 - RNA, 19 nt, Artificial Sequence
  Description of Artificial Sequence: Synthetic oligonucleotide
  Sense strand starting at position 3255 of SEQ ID NO: 917267
ugguaagauuuggaaacgu

SEQ ID NO: 1221935 - RNA, 19 nt, Artificial Sequence
  Description of Artificial Sequence: Synthetic oligonucleotide
  Antisense strand to SEQ ID NO: 1221934
acguuuccaaaucuuacca

SEQ ID NO: 1221936 - RNA, 19 nt, Artificial Sequence
  Description of Artificial Sequence: Synthetic oligonucleotide
  Sense strand starting at position 3264 of SEQ ID NO: 917267
uuggaaacgugguauuuga

SEQ ID NO: 1221937 - RNA, 19 nt, Artificial Sequence
  Description of Artificial Sequence: Synthetic oligonucleotide
  Antisense strand to SEQ ID NO: 1221936
ucaaauaccacguuuccaa

SEQ ID NO: 1221938 - RNA, 19 nt, Artificial Sequence
  Description of Artificial Sequence: Synthetic oligonucleotide
  Sense strand starting at position 3325 of SEQ ID NO: 917267
aaacguauucuguguaauc

SEQ ID NO: 1221939 - RNA, 19 nt, Artificial Sequence
  Description of Artificial Sequence: Synthetic oligonucleotide
  Antisense strand to SEQ ID NO: 1221938
gauuacacagaauacguuu

SEQ ID NO: 1221940 - RNA, 19 nt, Artificial Sequence
  Description of Artificial Sequence: Synthetic oligonucleotide
  Sense strand starting at position 3327 of SEQ ID NO: 917267
acguauucuguguaaucca

SEQ ID NO: 1221941 - RNA, 19 nt, Artificial Sequence
  Description of Artificial Sequence: Synthetic oligonucleotide
  Antisense strand to SEQ ID NO: 1221940
uggauuacacagaauacgu

SEQ ID NO: 1221942 - RNA, 19 nt, Artificial Sequence
  Description of Artificial Sequence: Synthetic oligonucleotide
  Sense strand starting at position 3353 of SEQ ID NO: 917267
uuuggauucguccaguauu

SEQ ID NO: 1221943 - RNA, 19 nt, Artificial Sequence
  Description of Artificial Sequence: Synthetic oligonucleotide
  Antisense strand to SEQ ID NO: 1221942
aauacuggacgaauccaaa

SEQ ID NO: 1221944 - RNA, 19 nt, Artificial Sequence
  Description of Artificial Sequence: Synthetic oligonucleotide
  Sense strand starting at position 3378 of SEQ ID NO: 917267
guagauuauuaaccgcagu

SEQ ID NO: 1221945 - RNA, 19 nt, Artificial Sequence
  Description of Artificial Sequence: Synthetic oligonucleotide
  Antisense strand to SEQ ID NO: 1221944
acugcgguuaauaaucuac

SEQ ID NO: 1221946 - RNA, 19 nt, Artificial Sequence
  Description of Artificial Sequence: Synthetic oligonucleotide
  Sense strand starting at position 3427 of SEQ ID NO: 917267
uugugcuauggaugugagu

SEQ ID NO: 1221947 - RNA, 19 nt, Artificial Sequence
  Description of Artificial Sequence: Synthetic oligonucleotide
  Antisense strand to SEQ ID NO: 1221946
acucacauccauagcacaa

SEQ ID NO: 1221948 - RNA, 19 nt, Artificial Sequence
  Description of Artificial Sequence: Synthetic oligonucleotide
  Sense strand starting at position 3429 of SEQ ID NO: 917267
gugcuauggaugugaguac

SEQ ID NO: 1221949 - RNA, 19 nt, Artificial Sequence
  Description of Artificial Sequence: Synthetic oligonucleotide
  Antisense strand to SEQ ID NO: 1221948
guacucacauccauagcac

SEQ ID NO: 1221950 - RNA, 19 nt, Artificial Sequence
  Description of Artificial Sequence: Synthetic oligonucleotide
  Sense strand starting at position 3447 of SEQ ID NO: 917267
cggcaaagagacugaauua

SEQ ID NO: 1221951 - RNA, 19 nt, Artificial Sequence
  Description of Artificial Sequence: Synthetic oligonucleotide
  Antisense strand to SEQ ID NO: 1221950
uaauucagucucuuugccg

SEQ ID NO: 1221952 - RNA, 19 nt, Artificial Sequence
  Description of Artificial Sequence: Synthetic oligonucleotide
  Sense strand starting at position 3505 of SEQ ID NO: 917267
cguugcugcaaugauaaau

SEQ ID NO: 1221953 - RNA, 19 nt, Artificial Sequence
  Description of Artificial Sequence: Synthetic oligonucleotide
  Antisense strand to SEQ ID NO: 1221952
auuuaucauugcagcaacg

SEQ ID NO: 1221954 - RNA, 19 nt, Artificial Sequence
  Description of Artificial Sequence: Synthetic oligonucleotide
  Sense strand starting at position 3594 of SEQ ID NO: 917267
gcaggagagcuuuggcuuu

SEQ ID NO: 1221955 - RNA, 19 nt, Artificial Sequence
  Description of Artificial Sequence: Synthetic oligonucleotide
  Antisense strand to SEQ ID NO: 1221954
aaagccaaagcucuccugc

SEQ ID NO: 1221956 - RNA, 19 nt, Artificial Sequence
  Description of Artificial Sequence: Synthetic oligonucleotide
  Sense strand starting at position 3596 of SEQ ID NO: 917267
aggagagcuuuggcuuuga

SEQ ID NO: 1221957 - RNA, 19 nt, Artificial Sequence
  Description of Artificial Sequence: Synthetic oligonucleotide
  Antisense strand to SEQ ID NO: 1221956
ucaaagccaaagcucuccu

SEQ ID NO: 1221958 - RNA, 19 nt, Artificial Sequence
  Description of Artificial Sequence: Synthetic oligonucleotide
  Sense strand starting at position 3600 of SEQ ID NO: 917267
gagcuuuggcuuugauauu

SEQ ID NO: 1221959 - RNA, 19 nt, Artificial Sequence
  Description of Artificial Sequence: Synthetic oligonucleotide
  Antisense strand to SEQ ID NO: 1221958
aauaucaaagccaaagcuc

SEQ ID NO: 1221960 - RNA, 19 nt, Artificial Sequence
  Description of Artificial Sequence: Synthetic oligonucleotide
  Sense strand starting at position 3640 of SEQ ID NO: 917267
acuuacagaucacgcuauu

SEQ ID NO: 1221961 - RNA, 19 nt, Artificial Sequence
  Description of Artificial Sequence: Synthetic oligonucleotide
  Antisense strand to SEQ ID NO: 1221960
aauagcgugaucuguaagu

SEQ ID NO: 1221962 - RNA, 19 nt, Artificial Sequence
  Description of Artificial Sequence: Synthetic oligonucleotide
  Sense strand starting at position 3659 of SEQ ID NO: 917267
cuagucuuggccuaguuaa

SEQ ID NO: 1221963 - RNA, 19 nt, Artificial Sequence
  Description of Artificial Sequence: Synthetic oligonucleotide
  Antisense strand to SEQ ID NO: 1221962
uuaacuaggccaagacuag

SEQ ID NO: 1221964 - RNA, 19 nt, Artificial Sequence
  Description of Artificial Sequence: Synthetic oligonucleotide
  Sense strand starting at position 3680 of SEQ ID NO: 917267
gcaaaugaguacuuuaguu

SEQ ID NO: 1221965 - RNA, 19 nt, Artificial Sequence
  Description of Artificial Sequence: Synthetic oligonucleotide
  Antisense strand to SEQ ID NO: 1221964
aacuaaaguacucauuugc

SEQ ID NO: 1221966 - RNA, 19 nt, Artificial Sequence
  Description of Artificial Sequence: Synthetic oligonucleotide
  Sense strand starting at position 3684 of SEQ ID NO: 917267
augaguacuuuaguuucua

SEQ ID NO: 1221967 - RNA, 19 nt, Artificial Sequence
  Description of Artificial Sequence: Synthetic oligonucleotide
  Antisense strand to SEQ ID NO: 1221966
uagaaacuaaaguacucau

SEQ ID NO: 1221968 - RNA, 19 nt, Artificial Sequence
  Description of Artificial Sequence: Synthetic oligonucleotide
  Sense strand starting at position 3685 of SEQ ID NO: 917267
ugaguacuuuaguuucuac

SEQ ID NO: 1221969 - RNA, 19 nt, Artificial Sequence
  Description of Artificial Sequence: Synthetic oligonucleotide
  Antisense strand to SEQ ID NO: 1221968
guagaaacuaaaguacuca

SEQ ID NO: 1221970 - RNA, 19 nt, Artificial Sequence
  Description of Artificial Sequence: Synthetic oligonucleotide
  Sense strand starting at position 3688 of SEQ ID NO: 917267
guacuuuaguuucuacaag

SEQ ID NO: 1221971 - RNA, 19 nt, Artificial Sequence
  Description of Artificial Sequence: Synthetic oligonucleotide
  Antisense strand to SEQ ID NO: 1221970
cuuguagaaacuaaaguac

SEQ ID NO: 1221972 - RNA, 19 nt, Artificial Sequence
  Description of Artificial Sequence: Synthetic oligonucleotide
  Sense strand starting at position 3718 of SEQ ID NO: 917267
acuacuuggucugcacaaa

SEQ ID NO: 1221973 - RNA, 19 nt, Artificial Sequence
  Description of Artificial Sequence: Synthetic oligonucleotide
  Antisense strand to SEQ ID NO: 1221972
uuugugcagaccaaguagu

SEQ ID NO: 1221974 - RNA, 19 nt, Artificial Sequence
  Description of Artificial Sequence: Synthetic oligonucleotide
  Sense strand starting at position 3805 of SEQ ID NO: 917267
ggcgaauugccugagauca

SEQ ID NO: 1221975 - RNA, 19 nt, Artificial Sequence
  Description of Artificial Sequence: Synthetic oligonucleotide
  Antisense strand to SEQ ID NO: 1221974
ugaucucaggcaauucgcc

SEQ ID NO: 1221976 - RNA, 19 nt, Artificial Sequence
  Description of Artificial Sequence: Synthetic oligonucleotide
  Sense strand starting at position 3805 of SEQ ID NO: 917268
ggcgaauugccugagauca

SEQ ID NO: 1221977 - RNA, 19 nt, Artificial Sequence
  Description of Artificial Sequence: Synthetic oligonucleotide
  Antisense strand to SEQ ID NO: 1221976
ugaucucaggcaauucgcc

SEQ ID NO: 1221978 - RNA, 19 nt, Artificial Sequence
  Description of Artificial Sequence: Synthetic oligonucleotide
  Sense strand starting at position 82 of SEQ ID NO: 917268
uguacacagagccguuaua

SEQ ID NO: 1221979 - RNA, 19 nt, Artificial Sequence
  Description of Artificial Sequence: Synthetic oligonucleotide
  Antisense strand to SEQ ID NO: 1221978
uauaacggcucuguguaca

SEQ ID NO: 1221980 - RNA, 19 nt, Artificial Sequence
  Description of Artificial Sequence: Synthetic oligonucleotide
  Sense strand starting at position 92 of SEQ ID NO: 917268
gccguuauaaucugacguu

SEQ ID NO: 1221981 - RNA, 19 nt, Artificial Sequence
  Description of Artificial Sequence: Synthetic oligonucleotide
  Antisense strand to SEQ ID NO: 1221980
aacgucagauuauaacggc

SEQ ID NO: 1221982 - RNA, 19 nt, Artificial Sequence
  Description of Artificial Sequence: Synthetic oligonucleotide
  Sense strand starting at position 135 of SEQ ID NO: 917268
guugguuuggcuugguuaa

SEQ ID NO: 1221983 - RNA, 19 nt, Artificial Sequence
  Description of Artificial Sequence: Synthetic oligonucleotide
  Antisense strand to SEQ ID NO: 1221982
uuaaccaagccaaaccaac

SEQ ID NO: 1221984 - RNA, 19 nt, Artificial Sequence
  Description of Artificial Sequence: Synthetic oligonucleotide
  Sense strand starting at position 193 of SEQ ID NO: 917268
aaagguggcccaggaauaa

SEQ ID NO: 1221985 - RNA, 19 nt, Artificial Sequence
  Description of Artificial Sequence: Synthetic oligonucleotide
  Antisense strand to SEQ ID NO: 1221984
uuauuccugggccaccuuu

SEQ ID NO: 1221986 - RNA, 19 nt, Artificial Sequence
  Description of Artificial Sequence: Synthetic oligonucleotide
  Sense strand starting at position 235 of SEQ ID NO: 917268
guaguuaacugccuuaaua

SEQ ID NO: 1221987 - RNA, 19 nt, Artificial Sequence
  Description of Artificial Sequence: Synthetic oligonucleotide
  Antisense strand to SEQ ID NO: 1221986
uauuaaggcaguuaacuac

SEQ ID NO: 1221988 - RNA, 19 nt, Artificial Sequence
  Description of Artificial Sequence: Synthetic oligonucleotide
  Sense strand starting at position 303 of SEQ ID NO: 917268
uggguaugugaagguacua

SEQ ID NO: 1221989 - RNA, 19 nt, Artificial Sequence
  Description of Artificial Sequence: Synthetic oligonucleotide
  Antisense strand to SEQ ID NO: 1221988
uaguaccuucacauaccca

SEQ ID NO: 1221990 - RNA, 19 nt, Artificial Sequence
  Description of Artificial Sequence: Synthetic oligonucleotide
  Sense strand starting at position 497 of SEQ ID NO: 917268
uccggcuaacuugaauaaa

SEQ ID NO: 1221991 - RNA, 19 nt, Artificial Sequence
  Description of Artificial Sequence: Synthetic oligonucleotide
  Antisense strand to SEQ ID NO: 1221990
uuuauucaaguuagccgga

SEQ ID NO: 1221992 - RNA, 19 nt, Artificial Sequence
  Description of Artificial Sequence: Synthetic oligonucleotide
  Sense strand starting at position 556 of SEQ ID NO: 917268
ggaaaugucggccauguug

SEQ ID NO: 1221993 - RNA, 19 nt, Artificial Sequence
  Description of Artificial Sequence: Synthetic oligonucleotide
  Antisense strand to SEQ ID NO: 1221992
caacauggccgacauuucc

SEQ ID NO: 1221994 - RNA, 19 nt, Artificial Sequence
  Description of Artificial Sequence: Synthetic oligonucleotide
  Sense strand starting at position 558 of SEQ ID NO: 917268
aaaugucggccauguugau

SEQ ID NO: 1221995 - RNA, 19 nt, Artificial Sequence
  Description of Artificial Sequence: Synthetic oligonucleotide
  Antisense strand to SEQ ID NO: 1221994
aucaacauggccgacauuu

SEQ ID NO: 1221996 - RNA, 19 nt, Artificial Sequence
  Description of Artificial Sequence: Synthetic oligonucleotide
  Sense strand starting at position 746 of SEQ ID NO: 917268
agcauaaugaagggugaau

SEQ ID NO: 1221997 - RNA, 19 nt, Artificial Sequence
  Description of Artificial Sequence: Synthetic oligonucleotide
  Antisense strand to SEQ ID NO: 1221996
auucacccuucauuaugcu

SEQ ID NO: 1221998 - RNA, 19 nt, Artificial Sequence
  Description of Artificial Sequence: Synthetic oligonucleotide
  Sense strand starting at position 827 of SEQ ID NO: 917268
gagggcuguuaccuugaua

SEQ ID NO: 1221999 - RNA, 19 nt, Artificial Sequence
  Description of Artificial Sequence: Synthetic oligonucleotide
  Antisense strand to SEQ ID NO: 1221998
uaucaagguaacagcccuc

SEQ ID NO: 1222000 - RNA, 19 nt, Artificial Sequence
  Description of Artificial Sequence: Synthetic oligonucleotide
  Sense strand starting at position 830 of SEQ ID NO: 917268
ggcuguuaccuugauagca

SEQ ID NO: 1222001 - RNA, 19 nt, Artificial Sequence
  Description of Artificial Sequence: Synthetic oligonucleotide
  Antisense strand to SEQ ID NO: 1222000
ugcuaucaagguaacagcc

SEQ ID NO: 1222002 - RNA, 19 nt, Artificial Sequence
  Description of Artificial Sequence: Synthetic oligonucleotide
  Sense strand starting at position 860 of SEQ ID NO: 917268
uucgaaagugaccagcaua

SEQ ID NO: 1222003 - RNA, 19 nt, Artificial Sequence
  Description of Artificial Sequence: Synthetic oligonucleotide
  Antisense strand to SEQ ID NO: 1222002
uaugcuggucacuuucgaa

SEQ ID NO: 1222004 - RNA, 19 nt, Artificial Sequence
  Description of Artificial Sequence: Synthetic oligonucleotide
  Sense strand starting at position 1357 of SEQ ID NO: 917268
cgugucuaucaggaacagu

SEQ ID NO: 1222005 - RNA, 19 nt, Artificial Sequence
  Description of Artificial Sequence: Synthetic oligonucleotide
  Antisense strand to SEQ ID NO: 1222004
acuguuccugauagacacg

SEQ ID NO: 1222006 - RNA, 19 nt, Artificial Sequence
  Description of Artificial Sequence: Synthetic oligonucleotide
  Sense strand starting at position 1371 of SEQ ID NO: 917268
acaguaagaugggcauagu

SEQ ID NO: 1222007 - RNA, 19 nt, Artificial Sequence
  Description of Artificial Sequence: Synthetic oligonucleotide
  Antisense strand to SEQ ID NO: 1222006
acuaugcccaucuuacugu

SEQ ID NO: 1222008 - RNA, 19 nt, Artificial Sequence
  Description of Artificial Sequence: Synthetic oligonucleotide
  Sense strand starting at position 1549 of SEQ ID NO: 917268
cccgauaguugagaggaaa

SEQ ID NO: 1222009 - RNA, 19 nt, Artificial Sequence
  Description of Artificial Sequence: Synthetic oligonucleotide
  Antisense strand to SEQ ID NO: 1222008
uuuccucucaacuaucggg

SEQ ID NO: 1222010 - RNA, 19 nt, Artificial Sequence
  Description of Artificial Sequence: Synthetic oligonucleotide
  Sense strand starting at position 1817 of SEQ ID NO: 917268
gggcuguugggagaaguuu

SEQ ID NO: 1222011 - RNA, 19 nt, Artificial Sequence
  Description of Artificial Sequence: Synthetic oligonucleotide
  Antisense strand to SEQ ID NO: 1222010
aaacuucucccaacagccc

SEQ ID NO: 1222012 - RNA, 19 nt, Artificial Sequence
  Description of Artificial Sequence: Synthetic oligonucleotide
  Sense strand starting at position 1826 of SEQ ID NO: 917268
ggagaaguuucagggacuc

SEQ ID NO: 1222013 - RNA, 19 nt, Artificial Sequence
  Description of Artificial Sequence: Synthetic oligonucleotide
  Antisense strand to SEQ ID NO: 1222012
gagucccugaaacuucucc

SEQ ID NO: 1222014 - RNA, 19 nt, Artificial Sequence
  Description of Artificial Sequence: Synthetic oligonucleotide
  Sense strand starting at position 2267 of SEQ ID NO: 917268
uuggcuguuggaggugaua

SEQ ID NO: 1222015 - RNA, 19 nt, Artificial Sequence
  Description of Artificial Sequence: Synthetic oligonucleotide
  Antisense strand to SEQ ID NO: 1222014
uaucaccuccaacagccaa

SEQ ID NO: 1222016 - RNA, 19 nt, Artificial Sequence
  Description of Artificial Sequence: Synthetic oligonucleotide
  Sense strand starting at position 2361 of SEQ ID NO: 917268
gguugaguaaaguggacaa

SEQ ID NO: 1222017 - RNA, 19 nt, Artificial Sequence
  Description of Artificial Sequence: Synthetic oligonucleotide
  Antisense strand to SEQ ID NO: 1222016
uuguccacuuuacucaacc

SEQ ID NO: 1222018 - RNA, 19 nt, Artificial Sequence
  Description of Artificial Sequence: Synthetic oligonucleotide
  Sense strand starting at position 2528 of SEQ ID NO: 917268
gugagagguuguuuaugac

SEQ ID NO: 1222019 - RNA, 19 nt, Artificial Sequence
  Description of Artificial Sequence: Synthetic oligonucleotide
  Antisense strand to SEQ ID NO: 1222018
gucauaaacaaccucucac

SEQ ID NO: 1222020 - RNA, 19 nt, Artificial Sequence
  Description of Artificial Sequence: Synthetic oligonucleotide
  Sense strand starting at position 2550 of SEQ ID NO: 917268
ggacuaaucuccuccgcga

SEQ ID NO: 1222021 - RNA, 19 nt, Artificial Sequence
  Description of Artificial Sequence: Synthetic oligonucleotide
  Antisense strand to SEQ ID NO: 1222020
ucgcggaggagauuagucc

SEQ ID NO: 1222022 - RNA, 19 nt, Artificial Sequence
  Description of Artificial Sequence: Synthetic oligonucleotide
  Sense strand starting at position 2678 of SEQ ID NO: 917268
gagcccugucauuggagga

SEQ ID NO: 1222023 - RNA, 19 nt, Artificial Sequence
  Description of Artificial Sequence: Synthetic oligonucleotide
  Antisense strand to SEQ ID NO: 1222022
uccuccaaugacagggcuc

SEQ ID NO: 1222024 - RNA, 19 nt, Artificial Sequence
  Description of Artificial Sequence: Synthetic oligonucleotide
  Sense strand starting at position 2763 of SEQ ID NO: 917268
agacucacauaucgauaaa

SEQ ID NO: 1222025 - RNA, 19 nt, Artificial Sequence
  Description of Artificial Sequence: Synthetic oligonucleotide
  Antisense strand to SEQ ID NO: 1222024
uuuaucgauaugugagucu

SEQ ID NO: 1222026 - RNA, 19 nt, Artificial Sequence
  Description of Artificial Sequence: Synthetic oligonucleotide
  Sense strand starting at position 2797 of SEQ ID NO: 917268
uuuauucucugggaaauac

SEQ ID NO: 1222027 - RNA, 19 nt, Artificial Sequence
  Description of Artificial Sequence: Synthetic oligonucleotide
  Antisense strand to SEQ ID NO: 1222026
guauuucccagagaauaaa

SEQ ID NO: 1222028 - RNA, 19 nt, Artificial Sequence
  Description of Artificial Sequence: Synthetic oligonucleotide
  Sense strand starting at position 2840 of SEQ ID NO: 917268
cugucucuugccguguuua

SEQ ID NO: 1222029 - RNA, 19 nt, Artificial Sequence
  Description of Artificial Sequence: Synthetic oligonucleotide
  Antisense strand to SEQ ID NO: 1222028
uaaacacggcaagagacag

SEQ ID NO: 1222030 - RNA, 19 nt, Artificial Sequence
  Description of Artificial Sequence: Synthetic oligonucleotide
  Sense strand starting at position 2842 of SEQ ID NO: 917268
gucucuugccguguuuacu

SEQ ID NO: 1222031 - RNA, 19 nt, Artificial Sequence
  Description of Artificial Sequence: Synthetic oligonucleotide
  Antisense strand to SEQ ID NO: 1222030
aguaaacacggcaagagac

SEQ ID NO: 1222032 - RNA, 19 nt, Artificial Sequence
  Description of Artificial Sequence: Synthetic oligonucleotide
  Sense strand starting at position 3625 of SEQ ID NO: 917268
ggcagaaaguuguuagaca

SEQ ID NO: 1222033 - RNA, 19 nt, Artificial Sequence
  Description of Artificial Sequence: Synthetic oligonucleotide
  Antisense strand to SEQ ID NO: 1222032
ugucuaacaacuuucugcc

SEQ ID NO: 1222034 - RNA, 19 nt, Artificial Sequence
  Description of Artificial Sequence: Synthetic oligonucleotide
  Sense strand starting at position 3633 of SEQ ID NO: 917268
guuguuagacaccaaauca

SEQ ID NO: 1222035 - RNA, 19 nt, Artificial Sequence
  Description of Artificial Sequence: Synthetic oligonucleotide
  Antisense strand to SEQ ID NO: 1222034
ugauuuggugucuaacaac

SEQ ID NO: 1222036 - RNA, 19 nt, Artificial Sequence
  Description of Artificial Sequence: Synthetic oligonucleotide
  Sense strand starting at position 3705 of SEQ ID NO: 917268
ucagcuuugccuuaguguu

SEQ ID NO: 1222037 - RNA, 19 nt, Artificial Sequence
  Description of Artificial Sequence: Synthetic oligonucleotide
  Antisense strand to SEQ ID NO: 1222036
aacacuaaggcaaagcuga

SEQ ID NO: 1222038 - RNA, 19 nt, Artificial Sequence
  Description of Artificial Sequence: Synthetic oligonucleotide
  Sense strand starting at position 3711 of SEQ ID NO: 917268
uugccuuaguguuucuuaa

SEQ ID NO: 1222039 - RNA, 19 nt, Artificial Sequence
  Description of Artificial Sequence: Synthetic oligonucleotide
  Antisense strand to SEQ ID NO: 1222038
uuaagaaacacuaaggcaa

SEQ ID NO: 1222040 - RNA, 19 nt, Artificial Sequence
  Description of Artificial Sequence: Synthetic oligonucleotide
  Sense strand starting at position 3713 of SEQ ID NO: 917268
gccuuaguguuucuuaaac

SEQ ID NO: 1222041 - RNA, 19 nt, Artificial Sequence
  Description of Artificial Sequence: Synthetic oligonucleotide
  Antisense strand to SEQ ID NO: 1222040
guuuaagaaacacuaaggc

SEQ ID NO: 1222042 - RNA, 19 nt, Artificial Sequence
  Description of Artificial Sequence: Synthetic oligonucleotide
  Sense strand starting at position 3719 of SEQ ID NO: 917268
guguuucuuaaacggauca

SEQ ID NO: 1222043 - RNA, 19 nt, Artificial Sequence
  Description of Artificial Sequence: Synthetic oligonucleotide
  Antisense strand to SEQ ID NO: 1222042
ugauccguuuaagaaacac

SEQ ID NO: 1222044 - RNA, 19 nt, Artificial Sequence
  Description of Artificial Sequence: Synthetic oligonucleotide
  Sense strand starting at position 3747 of SEQ ID NO: 917268
agauaagaaucagaguucu

SEQ ID NO: 1222045 - RNA, 19 nt, Artificial Sequence
  Description of Artificial Sequence: Synthetic oligonucleotide
  Antisense strand to SEQ ID NO: 1222044
agaacucugauucuuaucu

SEQ ID NO: 1222046 - RNA, 19 nt, Artificial Sequence
  Description of Artificial Sequence: Synthetic oligonucleotide
  Sense strand starting at position 3755 of SEQ ID NO: 917268
aucagaguucuauggcaaa

SEQ ID NO: 1222047 - RNA, 19 nt, Artificial Sequence
  Description of Artificial Sequence: Synthetic oligonucleotide
  Antisense strand to SEQ ID NO: 1222046
uuugccauagaacucugau

SEQ ID NO: 1222048 - RNA, 19 nt, Artificial Sequence
  Description of Artificial Sequence: Synthetic oligonucleotide
  Sense strand starting at position 3845 of SEQ ID NO: 917268
auugcucuuuaguucuuua

SEQ ID NO: 1222049 - RNA, 19 nt, Artificial Sequence
  Description of Artificial Sequence: Synthetic oligonucleotide
  Antisense strand to SEQ ID NO: 1222048
uaaagaacuaaagagcaau

SEQ ID NO: 1222050 - RNA, 19 nt, Artificial Sequence
  Description of Artificial Sequence: Synthetic oligonucleotide
  Sense strand starting at position 3848 of SEQ ID NO: 917268
gcucuuuaguucuuuauau

SEQ ID NO: 1222051 - RNA, 19 nt, Artificial Sequence
  Description of Artificial Sequence: Synthetic oligonucleotide
  Antisense strand to SEQ ID NO: 1222050
auauaaagaacuaaagagc

SEQ ID NO: 1222052 - RNA, 19 nt, Artificial Sequence
  Description of Artificial Sequence: Synthetic oligonucleotide
  Sense strand starting at position 3913 of SEQ ID NO: 917268
ucucuaggaucauaagaau

SEQ ID NO: 1222053 - RNA, 19 nt, Artificial Sequence
  Description of Artificial Sequence: Synthetic oligonucleotide
  Antisense strand to SEQ ID NO: 1222052
auucuuaugauccuagaga

SEQ ID NO: 1222054 - RNA, 19 nt, Artificial Sequence
  Description of Artificial Sequence: Synthetic oligonucleotide
  Sense strand starting at position 3916 of SEQ ID NO: 917268
cuaggaucauaagaauuua

SEQ ID NO: 1222055 - RNA, 19 nt, Artificial Sequence
  Description of Artificial Sequence: Synthetic oligonucleotide
  Antisense strand to SEQ ID NO: 1222054
uaaauucuuaugauccuag

SEQ ID NO: 1222056 - RNA, 19 nt, Artificial Sequence
  Description of Artificial Sequence: Synthetic oligonucleotide
  Sense strand starting at position 3966 of SEQ ID NO: 917268
gaaacacugucuuaaagga

SEQ ID NO: 1222057 - RNA, 19 nt, Artificial Sequence
  Description of Artificial Sequence: Synthetic oligonucleotide
  Antisense strand to SEQ ID NO: 1222056
uccuuuaagacaguguuuc

SEQ ID NO: 1222058 - RNA, 19 nt, Artificial Sequence
  Description of Artificial Sequence: Synthetic oligonucleotide
  Sense strand starting at position 3966 of SEQ ID NO: 917269
gaaacacugucuuaaagga

SEQ ID NO: 1222059 - RNA, 19 nt, Artificial Sequence
  Description of Artificial Sequence: Synthetic oligonucleotide
  Antisense strand to SEQ ID NO: 1222058
uccuuuaagacaguguuuc

SEQ ID NO: 1222060 - RNA, 19 nt, Artificial Sequence
  Description of Artificial Sequence: Synthetic oligonucleotide
  Sense strand starting at position 45 of SEQ ID NO: 917269
ggaccaucaagucgguuau

SEQ ID NO: 1222061 - RNA, 19 nt, Artificial Sequence
  Description of Artificial Sequence: Synthetic oligonucleotide
  Antisense strand to SEQ ID NO: 1222060
auaaccgacuugauggucc

SEQ ID NO: 1222062 - RNA, 19 nt, Artificial Sequence
  Description of Artificial Sequence: Synthetic oligonucleotide
  Sense strand starting at position 49 of SEQ ID NO: 917269
caucaagucgguuauguca

SEQ ID NO: 1222063 - RNA, 19 nt, Artificial Sequence
  Description of Artificial Sequence: Synthetic oligonucleotide
  Antisense strand to SEQ ID NO: 1222062
ugacauaaccgacuugaug

SEQ ID NO: 1222064 - RNA, 19 nt, Artificial Sequence
  Description of Artificial Sequence: Synthetic oligonucleotide
  Sense strand starting at position 112 of SEQ ID NO: 917269
cuugcccugaggugaaauu

SEQ ID NO: 1222065 - RNA, 19 nt, Artificial Sequence
  Description of Artificial Sequence: Synthetic oligonucleotide
  Antisense strand to SEQ ID NO: 1222064
aauuucaccucagggcaag

SEQ ID NO: 1222066 - RNA, 19 nt, Artificial Sequence
  Description of Artificial Sequence: Synthetic oligonucleotide
  Sense strand starting at position 121 of SEQ ID NO: 917269
aggugaaauuguucuggaa

SEQ ID NO: 1222067 - RNA, 19 nt, Artificial Sequence
  Description of Artificial Sequence: Synthetic oligonucleotide
  Antisense strand to SEQ ID NO: 1222066
uuccagaacaauuucaccu

SEQ ID NO: 1222068 - RNA, 19 nt, Artificial Sequence
  Description of Artificial Sequence: Synthetic oligonucleotide
  Sense strand starting at position 157 of SEQ ID NO: 917269
uuauauuucugccuguguu

SEQ ID NO: 1222069 - RNA, 19 nt, Artificial Sequence
  Description of Artificial Sequence: Synthetic oligonucleotide
  Antisense strand to SEQ ID NO: 1222068
aacacaggcagaaauauaa

SEQ ID NO: 1222070 - RNA, 19 nt, Artificial Sequence
  Description of Artificial Sequence: Synthetic oligonucleotide
  Sense strand starting at position 203 of SEQ ID NO: 917269
uccaucagacagugucauu

SEQ ID NO: 1222071 - RNA, 19 nt, Artificial Sequence
  Description of Artificial Sequence: Synthetic oligonucleotide
  Antisense strand to SEQ ID NO: 1222070
aaugacacugucugaugga

SEQ ID NO: 1222072 - RNA, 19 nt, Artificial Sequence
  Description of Artificial Sequence: Synthetic oligonucleotide
  Sense strand starting at position 290 of SEQ ID NO: 917269
gugugcuuuggaaggcaga

SEQ ID NO: 1222073 - RNA, 19 nt, Artificial Sequence
  Description of Artificial Sequence: Synthetic oligonucleotide
  Antisense strand to SEQ ID NO: 1222072
ucugccuuccaaagcacac

SEQ ID NO: 1222074 - RNA, 19 nt, Artificial Sequence
  Description of Artificial Sequence: Synthetic oligonucleotide
  Sense strand starting at position 549 of SEQ ID NO: 917269
ccuccugagucccuggaau

SEQ ID NO: 1222075 - RNA, 19 nt, Artificial Sequence
  Description of Artificial Sequence: Synthetic oligonucleotide
  Antisense strand to SEQ ID NO: 1222074
auuccagggacucaggagg

SEQ ID NO: 1222076 - RNA, 19 nt, Artificial Sequence
  Description of Artificial Sequence: Synthetic oligonucleotide
  Sense strand starting at position 551 of SEQ ID NO: 917269
uccugagucccuggaauua

SEQ ID NO: 1222077 - RNA, 19 nt, Artificial Sequence
  Description of Artificial Sequence: Synthetic oligonucleotide
  Antisense strand to SEQ ID NO: 1222076
uaauuccagggacucagga

SEQ ID NO: 1222078 - RNA, 19 nt, Artificial Sequence
  Description of Artificial Sequence: Synthetic oligonucleotide
  Sense strand starting at position 745 of SEQ ID NO: 917269
ggagguuuauaauugcauu

SEQ ID NO: 1222079 - RNA, 19 nt, Artificial Sequence
  Description of Artificial Sequence: Synthetic oligonucleotide
  Antisense strand to SEQ ID NO: 1222078
aaugcaauuauaaaccucc

SEQ ID NO: 1222080 - RNA, 19 nt, Artificial Sequence
  Description of Artificial Sequence: Synthetic oligonucleotide
  Sense strand starting at position 877 of SEQ ID NO: 917269
acuguuuaggaaggucuaa

SEQ ID NO: 1222081 - RNA, 19 nt, Artificial Sequence
  Description of Artificial Sequence: Synthetic oligonucleotide
  Antisense strand to SEQ ID NO: 1222080
uuagaccuuccuaaacagu

SEQ ID NO: 1222082 - RNA, 19 nt, Artificial Sequence
  Description of Artificial Sequence: Synthetic oligonucleotide
  Sense strand starting at position 926 of SEQ ID NO: 917269
uuugacaagucccugguau

SEQ ID NO: 1222083 - RNA, 19 nt, Artificial Sequence
  Description of Artificial Sequence: Synthetic oligonucleotide
  Antisense strand to SEQ ID NO: 1222082
auaccagggacuugucaaa

SEQ ID NO: 1222084 - RNA, 19 nt, Artificial Sequence
  Description of Artificial Sequence: Synthetic oligonucleotide
  Sense strand starting at position 927 of SEQ ID NO: 917269
uugacaagucccugguauc

SEQ ID NO: 1222085 - RNA, 19 nt, Artificial Sequence
  Description of Artificial Sequence: Synthetic oligonucleotide
  Antisense strand to SEQ ID NO: 1222084
gauaccagggacuugucaa

SEQ ID NO: 1222086 - RNA, 19 nt, Artificial Sequence
  Description of Artificial Sequence: Synthetic oligonucleotide
  Sense strand starting at position 928 of SEQ ID NO: 917269
ugacaagucccugguaucu

SEQ ID NO: 1222087 - RNA, 19 nt, Artificial Sequence
  Description of Artificial Sequence: Synthetic oligonucleotide
  Antisense strand to SEQ ID NO: 1222086
agauaccagggacuuguca

SEQ ID NO: 1222088 - RNA, 19 nt, Artificial Sequence
  Description of Artificial Sequence: Synthetic oligonucleotide
  Sense strand starting at position 1010 of SEQ ID NO: 917269
agaaguuaaccaggugguu

SEQ ID NO: 1222089 - RNA, 19 nt, Artificial Sequence
  Description of Artificial Sequence: Synthetic oligonucleotide
  Antisense strand to SEQ ID NO: 1222088
aaccaccugguuaacuucu

SEQ ID NO: 1222090 - RNA, 19 nt, Artificial Sequence
  Description of Artificial Sequence: Synthetic oligonucleotide
  Sense strand starting at position 1107 of SEQ ID NO: 917269
uuuacuugacuuuagugau

SEQ ID NO: 1222091 - RNA, 19 nt, Artificial Sequence
  Description of Artificial Sequence: Synthetic oligonucleotide
  Antisense strand to SEQ ID NO: 1222090
aucacuaaagucaaguaaa

SEQ ID NO: 1222092 - RNA, 19 nt, Artificial Sequence
  Description of Artificial Sequence: Synthetic oligonucleotide
  Sense strand starting at position 1113 of SEQ ID NO: 917269
ugacuuuagugaucucuga

SEQ ID NO: 1222093 - RNA, 19 nt, Artificial Sequence
  Description of Artificial Sequence: Synthetic oligonucleotide
  Antisense strand to SEQ ID NO: 1222092
ucagagaucacuaaaguca

SEQ ID NO: 1222094 - RNA, 19 nt, Artificial Sequence
  Description of Artificial Sequence: Synthetic oligonucleotide
  Sense strand starting at position 1217 of SEQ ID NO: 917269
ggaacaucuugggauuuga

SEQ ID NO: 1222095 - RNA, 19 nt, Artificial Sequence
  Description of Artificial Sequence: Synthetic oligonucleotide
  Antisense strand to SEQ ID NO: 1222094
ucaaaucccaagauguucc

SEQ ID NO: 1222096 - RNA, 19 nt, Artificial Sequence
  Description of Artificial Sequence: Synthetic oligonucleotide
  Sense strand starting at position 1298 of SEQ ID NO: 917269
caggguagauaauccugau

SEQ ID NO: 1222097 - RNA, 19 nt, Artificial Sequence
  Description of Artificial Sequence: Synthetic oligonucleotide
  Antisense strand to SEQ ID NO: 1222096
aucaggauuaucuacccug

SEQ ID NO: 1222098 - RNA, 19 nt, Artificial Sequence
  Description of Artificial Sequence: Synthetic oligonucleotide
  Sense strand starting at position 1302 of SEQ ID NO: 917269
guagauaauccugaugggu

SEQ ID NO: 1222099 - RNA, 19 nt, Artificial Sequence
  Description of Artificial Sequence: Synthetic oligonucleotide
  Antisense strand to SEQ ID NO: 1222098
acccaucaggauuaucuac

SEQ ID NO: 1222100 - RNA, 19 nt, Artificial Sequence
  Description of Artificial Sequence: Synthetic oligonucleotide
  Sense strand starting at position 1465 of SEQ ID NO: 917269
auucuagacucacuugagu

SEQ ID NO: 1222101 - RNA, 19 nt, Artificial Sequence
  Description of Artificial Sequence: Synthetic oligonucleotide
  Antisense strand to SEQ ID NO: 1222100
acucaagugagucuagaau

SEQ ID NO: 1222102 - RNA, 19 nt, Artificial Sequence
  Description of Artificial Sequence: Synthetic oligonucleotide
  Sense strand starting at position 1636 of SEQ ID NO: 917269
gggcaacucuaaucaagug

SEQ ID NO: 1222103 - RNA, 19 nt, Artificial Sequence
  Description of Artificial Sequence: Synthetic oligonucleotide
  Antisense strand to SEQ ID NO: 1222102
cacuugauuagaguugccc

SEQ ID NO: 1222104 - RNA, 19 nt, Artificial Sequence
  Description of Artificial Sequence: Synthetic oligonucleotide
  Sense strand starting at position 1651 of SEQ ID NO: 917269
agugaugccuccuuaagga

SEQ ID NO: 1222105 - RNA, 19 nt, Artificial Sequence
  Description of Artificial Sequence: Synthetic oligonucleotide
  Antisense strand to SEQ ID NO: 1222104
uccuuaaggaggcaucacu

SEQ ID NO: 1222106 - RNA, 19 nt, Artificial Sequence
  Description of Artificial Sequence: Synthetic oligonucleotide
  Sense strand starting at position 1724 of SEQ ID NO: 917269
ucaugaaaucgucauuguu

SEQ ID NO: 1222107 - RNA, 19 nt, Artificial Sequence
  Description of Artificial Sequence: Synthetic oligonucleotide
  Antisense strand to SEQ ID NO: 1222106
aacaaugacgauuucauga

SEQ ID NO: 1222108 - RNA, 19 nt, Artificial Sequence
  Description of Artificial Sequence: Synthetic oligonucleotide
  Sense strand starting at position 1760 of SEQ ID NO: 917269
guagaauguucuccaaauc

SEQ ID NO: 1222109 - RNA, 19 nt, Artificial Sequence
  Description of Artificial Sequence: Synthetic oligonucleotide
  Antisense strand to SEQ ID NO: 1222108
gauuuggagaacauucuac

SEQ ID NO: 1222110 - RNA, 19 nt, Artificial Sequence
  Description of Artificial Sequence: Synthetic oligonucleotide
  Sense strand starting at position 1877 of SEQ ID NO: 917269
ccaguaucacgcuaaauug

SEQ ID NO: 1222111 - RNA, 19 nt, Artificial Sequence
  Description of Artificial Sequence: Synthetic oligonucleotide
  Antisense strand to SEQ ID NO: 1222110
caauuuagcgugauacugg

SEQ ID NO: 1222112 - RNA, 19 nt, Artificial Sequence
  Description of Artificial Sequence: Synthetic oligonucleotide
  Sense strand starting at position 2209 of SEQ ID NO: 917269
ucuauuggccuuugagaac

SEQ ID NO: 1222113 - RNA, 19 nt, Artificial Sequence
  Description of Artificial Sequence: Synthetic oligonucleotide
  Antisense strand to SEQ ID NO: 1222112
guucucaaaggccaauaga

SEQ ID NO: 1222114 - RNA, 19 nt, Artificial Sequence
  Description of Artificial Sequence: Synthetic oligonucleotide
  Sense strand starting at position 2251 of SEQ ID NO: 917269
cacucagauuggguacaaa

SEQ ID NO: 1222115 - RNA, 19 nt, Artificial Sequence
  Description of Artificial Sequence: Synthetic oligonucleotide
  Antisense strand to SEQ ID NO: 1222114
uuuguacccaaucugagug

SEQ ID NO: 1222116 - RNA, 19 nt, Artificial Sequence
  Description of Artificial Sequence: Synthetic oligonucleotide
  Sense strand starting at position 2265 of SEQ ID NO: 917269
acaaaugugucaucaaauu

SEQ ID NO: 1222117 - RNA, 19 nt, Artificial Sequence
  Description of Artificial Sequence: Synthetic oligonucleotide
  Antisense strand to SEQ ID NO: 1222116
aauuugaugacacauuugu

SEQ ID NO: 1222118 - RNA, 19 nt, Artificial Sequence
  Description of Artificial Sequence: Synthetic oligonucleotide
  Sense strand starting at position 2288 of SEQ ID NO: 917269
uuugaaacugucugaguag

SEQ ID NO: 1222119 - RNA, 19 nt, Artificial Sequence
  Description of Artificial Sequence: Synthetic oligonucleotide
  Antisense strand to SEQ ID NO: 1222118
cuacucagacaguuucaaa

SEQ ID NO: 1222120 - RNA, 19 nt, Artificial Sequence
  Description of Artificial Sequence: Synthetic oligonucleotide
  Sense strand starting at position 2416 of SEQ ID NO: 917269
auuacauacguuuauguca

SEQ ID NO: 1222121 - RNA, 19 nt, Artificial Sequence
  Description of Artificial Sequence: Synthetic oligonucleotide
  Antisense strand to SEQ ID NO: 1222120
ugacauaaacguauguaau

SEQ ID NO: 1222122 - RNA, 19 nt, Artificial Sequence
  Description of Artificial Sequence: Synthetic oligonucleotide
  Sense strand starting at position 2432 of SEQ ID NO: 917269
ucaacuggguuugugauua

SEQ ID NO: 1222123 - RNA, 19 nt, Artificial Sequence
  Description of Artificial Sequence: Synthetic oligonucleotide
  Antisense strand to SEQ ID NO: 1222122
uaaucacaaacccaguuga

SEQ ID NO: 1222124 - RNA, 19 nt, Artificial Sequence
  Description of Artificial Sequence: Synthetic oligonucleotide
  Sense strand starting at position 2436 of SEQ ID NO: 917269
cuggguuugugauuaaauu

SEQ ID NO: 1222125 - RNA, 19 nt, Artificial Sequence
  Description of Artificial Sequence: Synthetic oligonucleotide
  Antisense strand to SEQ ID NO: 1222124
aauuuaaucacaaacccag

SEQ ID NO: 1222126 - RNA, 19 nt, Artificial Sequence
  Description of Artificial Sequence: Synthetic oligonucleotide
  Sense strand starting at position 2437 of SEQ ID NO: 917269
uggguuugugauuaaauua

SEQ ID NO: 1222127 - RNA, 19 nt, Artificial Sequence
  Description of Artificial Sequence: Synthetic oligonucleotide
  Antisense strand to SEQ ID NO: 1222126
uaauuuaaucacaaaccca

SEQ ID NO: 1222128 - RNA, 19 nt, Artificial Sequence
  Description of Artificial Sequence: Synthetic oligonucleotide
  Sense strand starting at position 2806 of SEQ ID NO: 917269
agauauuuaugggauguaa

SEQ ID NO: 1222129 - RNA, 19 nt, Artificial Sequence
  Description of Artificial Sequence: Synthetic oligonucleotide
  Antisense strand to SEQ ID NO: 1222128
uuacaucccauaaauaucu

SEQ ID NO: 1222130 - RNA, 19 nt, Artificial Sequence
  Description of Artificial Sequence: Synthetic oligonucleotide
  Sense strand starting at position 3587 of SEQ ID NO: 917269
ggcagacuccuuuguauag

SEQ ID NO: 1222131 - RNA, 19 nt, Artificial Sequence
  Description of Artificial Sequence: Synthetic oligonucleotide
  Antisense strand to SEQ ID NO: 1222130
cuauacaaaggagucugcc

SEQ ID NO: 1222132 - RNA, 19 nt, Artificial Sequence
  Description of Artificial Sequence: Synthetic oligonucleotide
  Sense strand starting at position 3591 of SEQ ID NO: 917269
gacuccuuuguauagguca

SEQ ID NO: 1222133 - RNA, 19 nt, Artificial Sequence
  Description of Artificial Sequence: Synthetic oligonucleotide
  Antisense strand to SEQ ID NO: 1222132
ugaccuauacaaaggaguc

SEQ ID NO: 1222134 - RNA, 19 nt, Artificial Sequence
  Description of Artificial Sequence: Synthetic oligonucleotide
  Sense strand starting at position 3658 of SEQ ID NO: 917269
cccgcauauccugaaaguu

SEQ ID NO: 1222135 - RNA, 19 nt, Artificial Sequence
  Description of Artificial Sequence: Synthetic oligonucleotide
  Antisense strand to SEQ ID NO: 1222134
aacuuucaggauaugcggg

SEQ ID NO: 1222136 - RNA, 19 nt, Artificial Sequence
  Description of Artificial Sequence: Synthetic oligonucleotide
  Sense strand starting at position 3945 of SEQ ID NO: 917269
gaaucagcgauugaauggu

SEQ ID NO: 1222137 - RNA, 19 nt, Artificial Sequence
  Description of Artificial Sequence: Synthetic oligonucleotide
  Antisense strand to SEQ ID NO: 1222136
accauucaaucgcugauuc

SEQ ID NO: 1222138 - RNA, 19 nt, Artificial Sequence
  Description of Artificial Sequence: Synthetic oligonucleotide
  Sense strand starting at position 3951 of SEQ ID NO: 917270
gcgauugaaugguuacaag

SEQ ID NO: 1222139 - RNA, 19 nt, Artificial Sequence
  Description of Artificial Sequence: Synthetic oligonucleotide
  Antisense strand to SEQ ID NO: 1222138
cuuguaaccauucaaucgc

SEQ ID NO: 1222140 - RNA, 19 nt, Artificial Sequence
  Description of Artificial Sequence: Synthetic oligonucleotide
  Sense strand starting at position 164 of SEQ ID NO: 917270
ucaggacauugcuuuggaa

SEQ ID NO: 1222141 - RNA, 19 nt, Artificial Sequence
  Description of Artificial Sequence: Synthetic oligonucleotide
  Antisense strand to SEQ ID NO: 1222140
uuccaaagcaauguccuga

SEQ ID NO: 1222142 - RNA, 19 nt, Artificial Sequence
  Description of Artificial Sequence: Synthetic oligonucleotide
  Sense strand starting at position 166 of SEQ ID NO: 917270
aggacauugcuuuggaaug

SEQ ID NO: 1222143 - RNA, 19 nt, Artificial Sequence
  Description of Artificial Sequence: Synthetic oligonucleotide
  Antisense strand to SEQ ID NO: 1222142
cauuccaaagcaauguccu

SEQ ID NO: 1222144 - RNA, 19 nt, Artificial Sequence
  Description of Artificial Sequence: Synthetic oligonucleotide
  Sense strand starting at position 246 of SEQ ID NO: 917270
cggaaaucccaacaugucu

SEQ ID NO: 1222145 - RNA, 19 nt, Artificial Sequence
  Description of Artificial Sequence: Synthetic oligonucleotide
  Antisense strand to SEQ ID NO: 1222144
agacauguugggauuuccg

SEQ ID NO: 1222146 - RNA, 19 nt, Artificial Sequence
  Description of Artificial Sequence: Synthetic oligonucleotide
  Sense strand starting at position 482 of SEQ ID NO: 917270
agauauuaggucuggauau

SEQ ID NO: 1222147 - RNA, 19 nt, Artificial Sequence
  Description of Artificial Sequence: Synthetic oligonucleotide
  Antisense strand to SEQ ID NO: 1222146
auauccagaccuaauaucu

SEQ ID NO: 1222148 - RNA, 19 nt, Artificial Sequence
  Description of Artificial Sequence: Synthetic oligonucleotide
  Sense strand starting at position 593 of SEQ ID NO: 917270
gcuacacaaucuguuugaa

SEQ ID NO: 1222149 - RNA, 19 nt, Artificial Sequence
  Description of Artificial Sequence: Synthetic oligonucleotide
  Antisense strand to SEQ ID NO: 1222148
uucaaacagauuguguagc

SEQ ID NO: 1222150 - RNA, 19 nt, Artificial Sequence
  Description of Artificial Sequence: Synthetic oligonucleotide
  Sense strand starting at position 721 of SEQ ID NO: 917270
ugggcaauuucugagauau

SEQ ID NO: 1222151 - RNA, 19 nt, Artificial Sequence
  Description of Artificial Sequence: Synthetic oligonucleotide
  Antisense strand to SEQ ID NO: 1222150
auaucucagaaauugccca

SEQ ID NO: 1222152 - RNA, 19 nt, Artificial Sequence
  Description of Artificial Sequence: Synthetic oligonucleotide
  Sense strand starting at position 920 of SEQ ID NO: 917270
gugugaauacaguauacca

SEQ ID NO: 1222153 - RNA, 19 nt, Artificial Sequence
  Description of Artificial Sequence: Synthetic oligonucleotide
  Antisense strand to SEQ ID NO: 1222152
ugguauacuguauucacac

SEQ ID NO: 1222154 - RNA, 19 nt, Artificial Sequence
  Description of Artificial Sequence: Synthetic oligonucleotide
  Sense strand starting at position 1017 of SEQ ID NO: 917270
agcccuagucauugaauac

SEQ ID NO: 1222155 - RNA, 19 nt, Artificial Sequence
  Description of Artificial Sequence: Synthetic oligonucleotide
  Antisense strand to SEQ ID NO: 1222154
guauucaaugacuagggcu

SEQ ID NO: 1222156 - RNA, 19 nt, Artificial Sequence
  Description of Artificial Sequence: Synthetic oligonucleotide
  Sense strand starting at position 1100 of SEQ ID NO: 917270
ccuagaucaugauccggaa

SEQ ID NO: 1222157 - RNA, 19 nt, Artificial Sequence
  Description of Artificial Sequence: Synthetic oligonucleotide
  Antisense strand to SEQ ID NO: 1222156
uuccggaucaugaucuagg

SEQ ID NO: 1222158 - RNA, 19 nt, Artificial Sequence
  Description of Artificial Sequence: Synthetic oligonucleotide
  Sense strand starting at position 1113 of SEQ ID NO: 917270
ccggaagugcuccaaggaa

SEQ ID NO: 1222159 - RNA, 19 nt, Artificial Sequence
  Description of Artificial Sequence: Synthetic oligonucleotide
  Antisense strand to SEQ ID NO: 1222158
uuccuuggagcacuuccgg

SEQ ID NO: 1222160 - RNA, 19 nt, Artificial Sequence
  Description of Artificial Sequence: Synthetic oligonucleotide
  Sense strand starting at position 1184 of SEQ ID NO: 917270
ggacuaacuguuuaucucu

SEQ ID NO: 1222161 - RNA, 19 nt, Artificial Sequence
  Description of Artificial Sequence: Synthetic oligonucleotide
  Antisense strand to SEQ ID NO: 1222160
agagauaaacaguuagucc

SEQ ID NO: 1222162 - RNA, 19 nt, Artificial Sequence
  Description of Artificial Sequence: Synthetic oligonucleotide
  Sense strand starting at position 1391 of SEQ ID NO: 917270
gcaugaucuugacuuacua

SEQ ID NO: 1222163 - RNA, 19 nt, Artificial Sequence
  Description of Artificial Sequence: Synthetic oligonucleotide
  Antisense strand to SEQ ID NO: 1222162
uaguaagucaagaucaugc

SEQ ID NO: 1222164 - RNA, 19 nt, Artificial Sequence
  Description of Artificial Sequence: Synthetic oligonucleotide
  Sense strand starting at position 1523 of SEQ ID NO: 917270
agaaaugggucuuugccau

SEQ ID NO: 1222165 - RNA, 19 nt, Artificial Sequence
  Description of Artificial Sequence: Synthetic oligonucleotide
  Antisense strand to SEQ ID NO: 1222164
auggcaaagacccauuucu

SEQ ID NO: 1222166 - RNA, 19 nt, Artificial Sequence
  Description of Artificial Sequence: Synthetic oligonucleotide
  Sense strand starting at position 1650 of SEQ ID NO: 917270
uuaagacagugacuuagua

SEQ ID NO: 1222167 - RNA, 19 nt, Artificial Sequence
  Description of Artificial Sequence: Synthetic oligonucleotide
  Antisense strand to SEQ ID NO: 1222166
uacuaagucacugucuuaa

SEQ ID NO: 1222168 - RNA, 19 nt, Artificial Sequence
  Description of Artificial Sequence: Synthetic oligonucleotide
  Sense strand starting at position 1654 of SEQ ID NO: 917270
gacagugacuuaguaaaga

SEQ ID NO: 1222169 - RNA, 19 nt, Artificial Sequence
  Description of Artificial Sequence: Synthetic oligonucleotide
  Antisense strand to SEQ ID NO: 1222168
ucuuuacuaagucacuguc

SEQ ID NO: 1222170 - RNA, 19 nt, Artificial Sequence
  Description of Artificial Sequence: Synthetic oligonucleotide
  Sense strand starting at position 1725 of SEQ ID NO: 917270
gauauagaacagugcuaug

SEQ ID NO: 1222171 - RNA, 19 nt, Artificial Sequence
  Description of Artificial Sequence: Synthetic oligonucleotide
  Antisense strand to SEQ ID NO: 1222170
cauagcacuguucuauauc

SEQ ID NO: 1222172 - RNA, 19 nt, Artificial Sequence
  Description of Artificial Sequence: Synthetic oligonucleotide
  Sense strand starting at position 1730 of SEQ ID NO: 917270
agaacagugcuauguacau

SEQ ID NO: 1222173 - RNA, 19 nt, Artificial Sequence
  Description of Artificial Sequence: Synthetic oligonucleotide
  Antisense strand to SEQ ID NO: 1222172
auguacauagcacuguucu

SEQ ID NO: 1222174 - RNA, 19 nt, Artificial Sequence
  Description of Artificial Sequence: Synthetic oligonucleotide
  Sense strand starting at position 1767 of SEQ ID NO: 917270
cgaaguauagaguaaaugu

SEQ ID NO: 1222175 - RNA, 19 nt, Artificial Sequence
  Description of Artificial Sequence: Synthetic oligonucleotide
  Antisense strand to SEQ ID NO: 1222174
acauuuacucuauacuucg

SEQ ID NO: 1222176 - RNA, 19 nt, Artificial Sequence
  Description of Artificial Sequence: Synthetic oligonucleotide
  Sense strand starting at position 2016 of SEQ ID NO: 917270
guguuaggacagggauaca

SEQ ID NO: 1222177 - RNA, 19 nt, Artificial Sequence
  Description of Artificial Sequence: Synthetic oligonucleotide
  Antisense strand to SEQ ID NO: 1222176
uguaucccuguccuaacac

SEQ ID NO: 1222178 - RNA, 19 nt, Artificial Sequence
  Description of Artificial Sequence: Synthetic oligonucleotide
  Sense strand starting at position 2175 of SEQ ID NO: 917270
cuaugugugaggcagagua

SEQ ID NO: 1222179 - RNA, 19 nt, Artificial Sequence
  Description of Artificial Sequence: Synthetic oligonucleotide
  Antisense strand to SEQ ID NO: 1222178
uacucugccucacacauag

SEQ ID NO: 1222180 - RNA, 19 nt, Artificial Sequence
  Description of Artificial Sequence: Synthetic oligonucleotide
  Sense strand starting at position 2177 of SEQ ID NO: 917270
augugugaggcagaguaau

SEQ ID NO: 1222181 - RNA, 19 nt, Artificial Sequence
  Description of Artificial Sequence: Synthetic oligonucleotide
  Antisense strand to SEQ ID NO: 1222180
auuacucugccucacacau

SEQ ID NO: 1222182 - RNA, 19 nt, Artificial Sequence
  Description of Artificial Sequence: Synthetic oligonucleotide
  Sense strand starting at position 2302 of SEQ ID NO: 917270
agaguugugggaggaggau

SEQ ID NO: 1222183 - RNA, 19 nt, Artificial Sequence
  Description of Artificial Sequence: Synthetic oligonucleotide
  Antisense strand to SEQ ID NO: 1222182
auccuccucccacaacucu

SEQ ID NO: 1222184 - RNA, 19 nt, Artificial Sequence
  Description of Artificial Sequence: Synthetic oligonucleotide
  Sense strand starting at position 2347 of SEQ ID NO: 917270
gagauuucugcgggugcag

SEQ ID NO: 1222185 - RNA, 19 nt, Artificial Sequence
  Description of Artificial Sequence: Synthetic oligonucleotide
  Antisense strand to SEQ ID NO: 1222184
cugcacccgcagaaaucuc

SEQ ID NO: 1222186 - RNA, 19 nt, Artificial Sequence
  Description of Artificial Sequence: Synthetic oligonucleotide
  Sense strand starting at position 2520 of SEQ ID NO: 917270
ggugguggaaucugaacau

SEQ ID NO: 1222187 - RNA, 19 nt, Artificial Sequence
  Description of Artificial Sequence: Synthetic oligonucleotide
  Antisense strand to SEQ ID NO: 1222186
auguucagauuccaccacc

SEQ ID NO: 1222188 - RNA, 19 nt, Artificial Sequence
  Description of Artificial Sequence: Synthetic oligonucleotide
  Sense strand starting at position 2547 of SEQ ID NO: 917270
auagguguaacucgacaau

SEQ ID NO: 1222189 - RNA, 19 nt, Artificial Sequence
  Description of Artificial Sequence: Synthetic oligonucleotide
  Antisense strand to SEQ ID NO: 1222188
auugucgaguuacaccuau

SEQ ID NO: 1222190 - RNA, 19 nt, Artificial Sequence
  Description of Artificial Sequence: Synthetic oligonucleotide
  Sense strand starting at position 2550 of SEQ ID NO: 917270
gguguaacucgacaaucag

SEQ ID NO: 1222191 - RNA, 19 nt, Artificial Sequence
  Description of Artificial Sequence: Synthetic oligonucleotide
  Antisense strand to SEQ ID NO: 1222190
cugauugucgaguuacacc

SEQ ID NO: 1222192 - RNA, 19 nt, Artificial Sequence
  Description of Artificial Sequence: Synthetic oligonucleotide
  Sense strand starting at position 2825 of SEQ ID NO: 917270
agcaaauugagauguguca

SEQ ID NO: 1222193 - RNA, 19 nt, Artificial Sequence
  Description of Artificial Sequence: Synthetic oligonucleotide
  Antisense strand to SEQ ID NO: 1222192
ugacacaucucaauuugcu

SEQ ID NO: 1222194 - RNA, 19 nt, Artificial Sequence
  Description of Artificial Sequence: Synthetic oligonucleotide
  Sense strand starting at position 2867 of SEQ ID NO: 917270
uuugaaagcuuaguaggaa

SEQ ID NO: 1222195 - RNA, 19 nt, Artificial Sequence
  Description of Artificial Sequence: Synthetic oligonucleotide
  Antisense strand to SEQ ID NO: 1222194
uuccuacuaagcuuucaaa

SEQ ID NO: 1222196 - RNA, 19 nt, Artificial Sequence
  Description of Artificial Sequence: Synthetic oligonucleotide
  Sense strand starting at position 3220 of SEQ ID NO: 917270
gagugagacuccucucauc

SEQ ID NO: 1222197 - RNA, 19 nt, Artificial Sequence
  Description of Artificial Sequence: Synthetic oligonucleotide
  Antisense strand to SEQ ID NO: 1222196
gaugagaggagucucacuc

SEQ ID NO: 1222198 - RNA, 19 nt, Artificial Sequence
  Description of Artificial Sequence: Synthetic oligonucleotide
  Sense strand starting at position 3278 of SEQ ID NO: 917270
auauaugggauauggugua

SEQ ID NO: 1222199 - RNA, 19 nt, Artificial Sequence
  Description of Artificial Sequence: Synthetic oligonucleotide
  Antisense strand to SEQ ID NO: 1222198
uacaccauaucccauauau

SEQ ID NO: 1222200 - RNA, 19 nt, Artificial Sequence
  Description of Artificial Sequence: Synthetic oligonucleotide
  Sense strand starting at position 3370 of SEQ ID NO: 917270
uuacauaugugacuugaga

SEQ ID NO: 1222201 - RNA, 19 nt, Artificial Sequence
  Description of Artificial Sequence: Synthetic oligonucleotide
  Antisense strand to SEQ ID NO: 1222200
ucucaagucacauauguaa

SEQ ID NO: 1222202 - RNA, 19 nt, Artificial Sequence
  Description of Artificial Sequence: Synthetic oligonucleotide
  Sense strand starting at position 3412 of SEQ ID NO: 917270
gguggagacaucgauacuu

SEQ ID NO: 1222203 - RNA, 19 nt, Artificial Sequence
  Description of Artificial Sequence: Synthetic oligonucleotide
  Antisense strand to SEQ ID NO: 1222202
aaguaucgaugucuccacc

SEQ ID NO: 1222204 - RNA, 19 nt, Artificial Sequence
  Description of Artificial Sequence: Synthetic oligonucleotide
  Sense strand starting at position 3446 of SEQ ID NO: 917270
acuuaagaguagucaucag

SEQ ID NO: 1222205 - RNA, 19 nt, Artificial Sequence
  Description of Artificial Sequence: Synthetic oligonucleotide
  Antisense strand to SEQ ID NO: 1222204
cugaugacuacucuuaagu

SEQ ID NO: 1222206 - RNA, 19 nt, Artificial Sequence
  Description of Artificial Sequence: Synthetic oligonucleotide
  Sense strand starting at position 3454 of SEQ ID NO: 917270
guagucaucagauaauagu

SEQ ID NO: 1222207 - RNA, 19 nt, Artificial Sequence
  Description of Artificial Sequence: Synthetic oligonucleotide
  Antisense strand to SEQ ID NO: 1222206
acuauuaucugaugacuac

SEQ ID NO: 1222208 - RNA, 19 nt, Artificial Sequence
  Description of Artificial Sequence: Synthetic oligonucleotide
  Sense strand starting at position 3464 of SEQ ID NO: 917270
gauaauaguguagggugau

SEQ ID NO: 1222209 - RNA, 19 nt, Artificial Sequence
  Description of Artificial Sequence: Synthetic oligonucleotide
  Antisense strand to SEQ ID NO: 1222208
aucacccuacacuauuauc

SEQ ID NO: 1222210 - RNA, 19 nt, Artificial Sequence
  Description of Artificial Sequence: Synthetic oligonucleotide
  Sense strand starting at position 3647 of SEQ ID NO: 917270
cucuaaagacugugauguc

SEQ ID NO: 1222211 - RNA, 19 nt, Artificial Sequence
  Description of Artificial Sequence: Synthetic oligonucleotide
  Antisense strand to SEQ ID NO: 1222210
gacaucacagucuuuagag

SEQ ID NO: 1222212 - RNA, 19 nt, Artificial Sequence
  Description of Artificial Sequence: Synthetic oligonucleotide
  Sense strand starting at position 3738 of SEQ ID NO: 917270
uaggcaguuguguagagaa

SEQ ID NO: 1222213 - RNA, 19 nt, Artificial Sequence
  Description of Artificial Sequence: Synthetic oligonucleotide
  Antisense strand to SEQ ID NO: 1222212
uucucuacacaacugccua

SEQ ID NO: 1222214 - RNA, 19 nt, Artificial Sequence
  Description of Artificial Sequence: Synthetic oligonucleotide
  Sense strand starting at position 3740 of SEQ ID NO: 917270
ggcaguuguguagagaaug

SEQ ID NO: 1222215 - RNA, 19 nt, Artificial Sequence
  Description of Artificial Sequence: Synthetic oligonucleotide
  Antisense strand to SEQ ID NO: 1222214
cauucucuacacaacugcc

SEQ ID NO: 1222216 - RNA, 19 nt, Artificial Sequence
  Description of Artificial Sequence: Synthetic oligonucleotide
  Sense strand starting at position 3880 of SEQ ID NO: 917270
caaugaugaugggcucagu

SEQ ID NO: 1222217 - RNA, 19 nt, Artificial Sequence
  Description of Artificial Sequence: Synthetic oligonucleotide
  Antisense strand to SEQ ID NO: 1222216
acugagcccaucaucauug

SEQ ID NO: 1222218 - RNA, 19 nt, Artificial Sequence
  Description of Artificial Sequence: Synthetic oligonucleotide
  Sense strand starting at position 3898 of SEQ ID NO: 917271
ugugaacuuguugaauaug

SEQ ID NO: 1222219 - RNA, 19 nt, Artificial Sequence
  Description of Artificial Sequence: Synthetic oligonucleotide
  Antisense strand to SEQ ID NO: 1222218
cauauucaacaaguucaca

SEQ ID NO: 1222220 - RNA, 19 nt, Artificial Sequence
  Description of Artificial Sequence: Synthetic oligonucleotide
  Sense strand starting at position 622 of SEQ ID NO: 917271
ccaggauggucucguggau

SEQ ID NO: 1222221 - RNA, 19 nt, Artificial Sequence
  Description of Artificial Sequence: Synthetic oligonucleotide
  Antisense strand to SEQ ID NO: 1222220
auccacgagaccauccugg

SEQ ID NO: 1222222 - RNA, 19 nt, Artificial Sequence
  Description of Artificial Sequence: Synthetic oligonucleotide
  Sense strand starting at position 625 of SEQ ID NO: 917271
ggauggucucguggauguu

SEQ ID NO: 1222223 - RNA, 19 nt, Artificial Sequence
  Description of Artificial Sequence: Synthetic oligonucleotide
  Antisense strand to SEQ ID NO: 1222222
aacauccacgagaccaucc

SEQ ID NO: 1222224 - RNA, 19 nt, Artificial Sequence
  Description of Artificial Sequence: Synthetic oligonucleotide
  Sense strand starting at position 1117 of SEQ ID NO: 917271
cggcgaaguacucguccuu

SEQ ID NO: 1222225 - RNA, 19 nt, Artificial Sequence
  Description of Artificial Sequence: Synthetic oligonucleotide
  Antisense strand to SEQ ID NO: 1222224
aaggacgaguacuucgccg

SEQ ID NO: 1222226 - RNA, 19 nt, Artificial Sequence
  Description of Artificial Sequence: Synthetic oligonucleotide
  Sense strand starting at position 1123 of SEQ ID NO: 917271
aguacucguccuuggugua

SEQ ID NO: 1222227 - RNA, 19 nt, Artificial Sequence
  Description of Artificial Sequence: Synthetic oligonucleotide
  Antisense strand to SEQ ID NO: 1222226
uacaccaaggacgaguacu

SEQ ID NO: 1222228 - RNA, 19 nt, Artificial Sequence
  Description of Artificial Sequence: Synthetic oligonucleotide
  Sense strand starting at position 1177 of SEQ ID NO: 917271
gcuuguugauguucaggca

SEQ ID NO: 1222229 - RNA, 19 nt, Artificial Sequence
  Description of Artificial Sequence: Synthetic oligonucleotide
  Antisense strand to SEQ ID NO: 1222228
ugccugaacaucaacaagc

SEQ ID NO: 1222230 - RNA, 19 nt, Artificial Sequence
  Description of Artificial Sequence: Synthetic oligonucleotide
  Sense strand starting at position 2008 of SEQ ID NO: 917271
gugaguaacacaucgcgca

SEQ ID NO: 1222231 - RNA, 19 nt, Artificial Sequence
  Description of Artificial Sequence: Synthetic oligonucleotide
  Antisense strand to SEQ ID NO: 1222230
ugcgcgauguguuacucac

SEQ ID NO: 1222232 - RNA, 19 nt, Artificial Sequence
  Description of Artificial Sequence: Synthetic oligonucleotide
  Sense strand starting at position 2292 of SEQ ID NO: 917271
ucauuaaucagcggcuugu

SEQ ID NO: 1222233 - RNA, 19 nt, Artificial Sequence
  Description of Artificial Sequence: Synthetic oligonucleotide
  Antisense strand to SEQ ID NO: 1222232
acaagccgcugauuaauga

SEQ ID NO: 1222234 - RNA, 19 nt, Artificial Sequence
  Description of Artificial Sequence: Synthetic oligonucleotide
  Sense strand starting at position 2417 of SEQ ID NO: 917271
auuaauugggcuugagcuu

SEQ ID NO: 1222235 - RNA, 19 nt, Artificial Sequence
  Description of Artificial Sequence: Synthetic oligonucleotide
  Antisense strand to SEQ ID NO: 1222234
aagcucaagcccaauuaau

SEQ ID NO: 1222236 - RNA, 19 nt, Artificial Sequence
  Description of Artificial Sequence: Synthetic oligonucleotide
  Sense strand starting at position 2843 of SEQ ID NO: 917271
gucagcuugucgggaaguu

SEQ ID NO: 1222237 - RNA, 19 nt, Artificial Sequence
  Description of Artificial Sequence: Synthetic oligonucleotide
  Antisense strand to SEQ ID NO: 1222236
aacuucccgacaagcugac

SEQ ID NO: 1222238 - RNA, 19 nt, Artificial Sequence
  Description of Artificial Sequence: Synthetic oligonucleotide
  Sense strand starting at position 2855 of SEQ ID NO: 917271
ggaaguugaaaucgcguuu

SEQ ID NO: 1222239 - RNA, 19 nt, Artificial Sequence
  Description of Artificial Sequence: Synthetic oligonucleotide
  Antisense strand to SEQ ID NO: 1222238
aaacgcgauuucaacuucc

SEQ ID NO: 1222240 - RNA, 19 nt, Artificial Sequence
  Description of Artificial Sequence: Synthetic oligonucleotide
  Sense strand starting at position 2866 of SEQ ID NO: 917271
ucgcguuugggagguaaua

SEQ ID NO: 1222241 - RNA, 19 nt, Artificial Sequence
  Description of Artificial Sequence: Synthetic oligonucleotide
  Antisense strand to SEQ ID NO: 1222240
uauuaccucccaaacgcga

SEQ ID NO: 1222242 - RNA, 19 nt, Artificial Sequence
  Description of Artificial Sequence: Synthetic oligonucleotide
  Sense strand starting at position 3280 of SEQ ID NO: 917271
uggagaugcccuuggagaa

SEQ ID NO: 1222243 - RNA, 19 nt, Artificial Sequence
  Description of Artificial Sequence: Synthetic oligonucleotide
  Antisense strand to SEQ ID NO: 1222242
uucuccaagggcaucucca

SEQ ID NO: 1222244 - RNA, 19 nt, Artificial Sequence
  Description of Artificial Sequence: Synthetic oligonucleotide
  Sense strand starting at position 3293 of SEQ ID NO: 917271
ggagaacugcuucgaauuc

SEQ ID NO: 1222245 - RNA, 19 nt, Artificial Sequence
  Description of Artificial Sequence: Synthetic oligonucleotide
  Antisense strand to SEQ ID NO: 1222244
gaauucgaagcaguucucc

SEQ ID NO: 1222246 - RNA, 19 nt, Artificial Sequence
  Description of Artificial Sequence: Synthetic oligonucleotide
  Sense strand starting at position 3310 of SEQ ID NO: 917271
ucauguaucuacugggcuu

SEQ ID NO: 1222247 - RNA, 19 nt, Artificial Sequence
  Description of Artificial Sequence: Synthetic oligonucleotide
  Antisense strand to SEQ ID NO: 1222246
aagcccaguagauacauga

SEQ ID NO: 1222248 - RNA, 19 nt, Artificial Sequence
  Description of Artificial Sequence: Synthetic oligonucleotide
  Sense strand starting at position 3366 of SEQ ID NO: 917271
gcaauuacgucuccucaau

SEQ ID NO: 1222249 - RNA, 19 nt, Artificial Sequence
  Description of Artificial Sequence: Synthetic oligonucleotide
  Antisense strand to SEQ ID NO: 1222248
auugaggagacguaauugc

SEQ ID NO: 1222250 - RNA, 19 nt, Artificial Sequence
  Description of Artificial Sequence: Synthetic oligonucleotide
  Sense strand starting at position 3372 of SEQ ID NO: 917271
acgucuccucaaugaccaa

SEQ ID NO: 1222251 - RNA, 19 nt, Artificial Sequence
  Description of Artificial Sequence: Synthetic oligonucleotide
  Antisense strand to SEQ ID NO: 1222250
uuggucauugaggagacgu

SEQ ID NO: 1222252 - RNA, 19 nt, Artificial Sequence
  Description of Artificial Sequence: Synthetic oligonucleotide
  Sense strand starting at position 3405 of SEQ ID NO: 917271
agggcuuccugaguucaga

SEQ ID NO: 1222253 - RNA, 19 nt, Artificial Sequence
  Description of Artificial Sequence: Synthetic oligonucleotide
  Antisense strand to SEQ ID NO: 1222252
ucugaacucaggaagcccu

SEQ ID NO: 1222254 - RNA, 19 nt, Artificial Sequence
  Description of Artificial Sequence: Synthetic oligonucleotide
  Sense strand starting at position 3706 of SEQ ID NO: 917271
ugaagauuguguuggcuaa

SEQ ID NO: 1222255 - RNA, 19 nt, Artificial Sequence
  Description of Artificial Sequence: Synthetic oligonucleotide
  Antisense strand to SEQ ID NO: 1222254
uuagccaacacaaucuuca

SEQ ID NO: 1222256 - RNA, 19 nt, Artificial Sequence
  Description of Artificial Sequence: Synthetic oligonucleotide
  Sense strand starting at position 3707 of SEQ ID NO: 917271
gaagauuguguuggcuaau

SEQ ID NO: 1222257 - RNA, 19 nt, Artificial Sequence
  Description of Artificial Sequence: Synthetic oligonucleotide
  Antisense strand to SEQ ID NO: 1222256
auuagccaacacaaucuuc

SEQ ID NO: 1222258 - RNA, 19 nt, Artificial Sequence
  Description of Artificial Sequence: Synthetic oligonucleotide
  Sense strand starting at position 3708 of SEQ ID NO: 917271
aagauuguguuggcuaauu

SEQ ID NO: 1222259 - RNA, 19 nt, Artificial Sequence
  Description of Artificial Sequence: Synthetic oligonucleotide
  Antisense strand to SEQ ID NO: 1222258
aauuagccaacacaaucuu

SEQ ID NO: 1222260 - RNA, 19 nt, Artificial Sequence
  Description of Artificial Sequence: Synthetic oligonucleotide
  Sense strand starting at position 3752 of SEQ ID NO: 917271
guacaaagauuauagcguu

SEQ ID NO: 1222261 - RNA, 19 nt, Artificial Sequence
  Description of Artificial Sequence: Synthetic oligonucleotide
  Antisense strand to SEQ ID NO: 1222260
aacgcuauaaucuuuguac

SEQ ID NO: 1222262 - RNA, 19 nt, Artificial Sequence
  Description of Artificial Sequence: Synthetic oligonucleotide
  Sense strand starting at position 3784 of SEQ ID NO: 917271
uguauacaguuaggauuau

SEQ ID NO: 1222263 - RNA, 19 nt, Artificial Sequence
  Description of Artificial Sequence: Synthetic oligonucleotide
  Antisense strand to SEQ ID NO: 1222262
auaauccuaacuguauaca

SEQ ID NO: 1222264 - RNA, 19 nt, Artificial Sequence
  Description of Artificial Sequence: Synthetic oligonucleotide
  Sense strand starting at position 3785 of SEQ ID NO: 917271
guauacaguuaggauuauu

SEQ ID NO: 1222265 - RNA, 19 nt, Artificial Sequence
  Description of Artificial Sequence: Synthetic oligonucleotide
  Antisense strand to SEQ ID NO: 1222264
aauaauccuaacuguauac

SEQ ID NO: 1222266 - RNA, 19 nt, Artificial Sequence
  Description of Artificial Sequence: Synthetic oligonucleotide
  Sense strand starting at position 3790 of SEQ ID NO: 917271
caguuaggauuauugauca

SEQ ID NO: 1222267 - RNA, 19 nt, Artificial Sequence
  Description of Artificial Sequence: Synthetic oligonucleotide
  Antisense strand to SEQ ID NO: 1222266
ugaucaauaauccuaacug

SEQ ID NO: 1222268 - RNA, 19 nt, Artificial Sequence
  Description of Artificial Sequence: Synthetic oligonucleotide
  Sense strand starting at position 3794 of SEQ ID NO: 917271
uaggauuauugaucaguag

SEQ ID NO: 1222269 - RNA, 19 nt, Artificial Sequence
  Description of Artificial Sequence: Synthetic oligonucleotide
  Antisense strand to SEQ ID NO: 1222268
cuacugaucaauaauccua

SEQ ID NO: 1222270 - RNA, 19 nt, Artificial Sequence
  Description of Artificial Sequence: Synthetic oligonucleotide
  Sense strand starting at position 3797 of SEQ ID NO: 917271
gauuauugaucaguagccu

SEQ ID NO: 1222271 - RNA, 19 nt, Artificial Sequence
  Description of Artificial Sequence: Synthetic oligonucleotide
  Antisense strand to SEQ ID NO: 1222270
aggcuacugaucaauaauc

SEQ ID NO: 1222272 - RNA, 19 nt, Artificial Sequence
  Description of Artificial Sequence: Synthetic oligonucleotide
  Sense strand starting at position 3801 of SEQ ID NO: 917271
auugaucaguagccugaau

SEQ ID NO: 1222273 - RNA, 19 nt, Artificial Sequence
  Description of Artificial Sequence: Synthetic oligonucleotide
  Antisense strand to SEQ ID NO: 1222272
auucaggcuacugaucaau

SEQ ID NO: 1222274 - RNA, 19 nt, Artificial Sequence
  Description of Artificial Sequence: Synthetic oligonucleotide
  Sense strand starting at position 3810 of SEQ ID NO: 917271
uagccugaauuugggaaga

SEQ ID NO: 1222275 - RNA, 19 nt, Artificial Sequence
  Description of Artificial Sequence: Synthetic oligonucleotide
  Antisense strand to SEQ ID NO: 1222274
ucuucccaaauucaggcua

SEQ ID NO: 1222276 - RNA, 19 nt, Artificial Sequence
  Description of Artificial Sequence: Synthetic oligonucleotide
  Sense strand starting at position 3812 of SEQ ID NO: 917271
gccugaauuugggaagaau

SEQ ID NO: 1222277 - RNA, 19 nt, Artificial Sequence
  Description of Artificial Sequence: Synthetic oligonucleotide
  Antisense strand to SEQ ID NO: 1222276
auucuucccaaauucaggc

SEQ ID NO: 1222278 - RNA, 19 nt, Artificial Sequence
  Description of Artificial Sequence: Synthetic oligonucleotide
  Sense strand starting at position 3871 of SEQ ID NO: 917271
uguguuuaaaguugaucuu

SEQ ID NO: 1222279 - RNA, 19 nt, Artificial Sequence
  Description of Artificial Sequence: Synthetic oligonucleotide
  Antisense strand to SEQ ID NO: 1222278
aagaucaacuuuaaacaca

SEQ ID NO: 1222280 - RNA, 19 nt, Artificial Sequence
  Description of Artificial Sequence: Synthetic oligonucleotide
  Sense strand starting at position 3874 of SEQ ID NO: 917271
guuuaaaguugaucuucca

SEQ ID NO: 1222281 - RNA, 19 nt, Artificial Sequence
  Description of Artificial Sequence: Synthetic oligonucleotide
  Antisense strand to SEQ ID NO: 1222280
uggaagaucaacuuuaaac

SEQ ID NO: 1222282 - RNA, 19 nt, Artificial Sequence
  Description of Artificial Sequence: Synthetic oligonucleotide
  Sense strand starting at position 3960 of SEQ ID NO: 917271
gcaugugugcguguuuguu

SEQ ID NO: 1222283 - RNA, 19 nt, Artificial Sequence
  Description of Artificial Sequence: Synthetic oligonucleotide
  Antisense strand to SEQ ID NO: 1222282
aacaaacacgcacacaugc

SEQ ID NO: 1222284 - RNA, 19 nt, Artificial Sequence
  Description of Artificial Sequence: Synthetic oligonucleotide
  Sense strand starting at position 3962 of SEQ ID NO: 917271
augugugcguguuuguuua

SEQ ID NO: 1222285 - RNA, 19 nt, Artificial Sequence
  Description of Artificial Sequence: Synthetic oligonucleotide
  Antisense strand to SEQ ID NO: 1222284
uaaacaaacacgcacacau

SEQ ID NO: 1222286 - RNA, 19 nt, Artificial Sequence
  Description of Artificial Sequence: Synthetic oligonucleotide
  Sense strand starting at position 3964 of SEQ ID NO: 917271
gugugcguguuuguuuaua

SEQ ID NO: 1222287 - RNA, 19 nt, Artificial Sequence
  Description of Artificial Sequence: Synthetic oligonucleotide
  Antisense strand to SEQ ID NO: 1222286
uauaaacaaacacgcacac

SEQ ID NO: 1222288 - RNA, 19 nt, Artificial Sequence
  Description of Artificial Sequence: Synthetic oligonucleotide
  Sense strand starting at position 3966 of SEQ ID NO: 917271
gugcguguuuguuuauaua

SEQ ID NO: 1222289 - RNA, 19 nt, Artificial Sequence
  Description of Artificial Sequence: Synthetic oligonucleotide
  Antisense strand to SEQ ID NO: 1222288
uauauaaacaaacacgcac

SEQ ID NO: 1222290 - RNA, 19 nt, Artificial Sequence
  Description of Artificial Sequence: Synthetic oligonucleotide
  Sense strand starting at position 3982 of SEQ ID NO: 917272
auaauagauugugugauug

SEQ ID NO: 1222291 - RNA, 19 nt, Artificial Sequence
  Description of Artificial Sequence: Synthetic oligonucleotide
  Antisense strand to SEQ ID NO: 1222290
caaucacacaaucuauuau

SEQ ID NO: 1222292 - RNA, 19 nt, Artificial Sequence
  Description of Artificial Sequence: Synthetic oligonucleotide
  Sense strand starting at position 62 of SEQ ID NO: 917272
uuuagaggcaagugagauu

SEQ ID NO: 1222293 - RNA, 19 nt, Artificial Sequence
  Description of Artificial Sequence: Synthetic oligonucleotide
  Antisense strand to SEQ ID NO: 1222292
aaucucacuugccucuaaa

SEQ ID NO: 1222294 - RNA, 19 nt, Artificial Sequence
  Description of Artificial Sequence: Synthetic oligonucleotide
  Sense strand starting at position 151 of SEQ ID NO: 917272
gagggaggauagcuugauu

SEQ ID NO: 1222295 - RNA, 19 nt, Artificial Sequence
  Description of Artificial Sequence: Synthetic oligonucleotide
  Antisense strand to SEQ ID NO: 1222294
aaucaagcuauccucccuc

SEQ ID NO: 1222296 - RNA, 19 nt, Artificial Sequence
  Description of Artificial Sequence: Synthetic oligonucleotide
  Sense strand starting at position 339 of SEQ ID NO: 917272
agaauuaacuagccaaagu

SEQ ID NO: 1222297 - RNA, 19 nt, Artificial Sequence
  Description of Artificial Sequence: Synthetic oligonucleotide
  Antisense strand to SEQ ID NO: 1222296
acuuuggcuaguuaauucu

SEQ ID NO: 1222298 - RNA, 19 nt, Artificial Sequence
  Description of Artificial Sequence: Synthetic oligonucleotide
  Sense strand starting at position 347 of SEQ ID NO: 917272
cuagccaaagugugacaau

SEQ ID NO: 1222299 - RNA, 19 nt, Artificial Sequence
  Description of Artificial Sequence: Synthetic oligonucleotide
  Antisense strand to SEQ ID NO: 1222298
auugucacacuuuggcuag

SEQ ID NO: 1222300 - RNA, 19 nt, Artificial Sequence
  Description of Artificial Sequence: Synthetic oligonucleotide
  Sense strand starting at position 359 of SEQ ID NO: 917272
ugacaaucgcaguaacuua

SEQ ID NO: 1222301 - RNA, 19 nt, Artificial Sequence
  Description of Artificial Sequence: Synthetic oligonucleotide
  Antisense strand to SEQ ID NO: 1222300
uaaguuacugcgauuguca

SEQ ID NO: 1222302 - RNA, 19 nt, Artificial Sequence
  Description of Artificial Sequence: Synthetic oligonucleotide
  Sense strand starting at position 375 of SEQ ID NO: 917272
uuaauuggugcuuauguga

SEQ ID NO: 1222303 - RNA, 19 nt, Artificial Sequence
  Description of Artificial Sequence: Synthetic oligonucleotide
  Antisense strand to SEQ ID NO: 1222302
ucacauaagcaccaauuaa

SEQ ID NO: 1222304 - RNA, 19 nt, Artificial Sequence
  Description of Artificial Sequence: Synthetic oligonucleotide
  Sense strand starting at position 1006 of SEQ ID NO: 917272
uuugguaguuuaucacuaa

SEQ ID NO: 1222305 - RNA, 19 nt, Artificial Sequence
  Description of Artificial Sequence: Synthetic oligonucleotide
  Antisense strand to SEQ ID NO: 1222304
uuagugauaaacuaccaaa

SEQ ID NO: 1222306 - RNA, 19 nt, Artificial Sequence
  Description of Artificial Sequence: Synthetic oligonucleotide
  Sense strand starting at position 1009 of SEQ ID NO: 917272
gguaguuuaucacuaaauc

SEQ ID NO: 1222307 - RNA, 19 nt, Artificial Sequence
  Description of Artificial Sequence: Synthetic oligonucleotide
  Antisense strand to SEQ ID NO: 1222306
gauuuagugauaaacuacc

SEQ ID NO: 1222308 - RNA, 19 nt, Artificial Sequence
  Description of Artificial Sequence: Synthetic oligonucleotide
  Sense strand starting at position 1010 of SEQ ID NO: 917272
guaguuuaucacuaaaucu

SEQ ID NO: 1222309 - RNA, 19 nt, Artificial Sequence
  Description of Artificial Sequence: Synthetic oligonucleotide
  Antisense strand to SEQ ID NO: 1222308
agauuuagugauaaacuac

SEQ ID NO: 1222310 - RNA, 19 nt, Artificial Sequence
  Description of Artificial Sequence: Synthetic oligonucleotide
  Sense strand starting at position 1190 of SEQ ID NO: 917272
gauagcaucgggcauaauu

SEQ ID NO: 1222311 - RNA, 19 nt, Artificial Sequence
  Description of Artificial Sequence: Synthetic oligonucleotide
  Antisense strand to SEQ ID NO: 1222310
aauuaugcccgaugcuauc

SEQ ID NO: 1222312 - RNA, 19 nt, Artificial Sequence
  Description of Artificial Sequence: Synthetic oligonucleotide
  Sense strand starting at position 1197 of SEQ ID NO: 917272
ucgggcauaauuugcauua

SEQ ID NO: 1222313 - RNA, 19 nt, Artificial Sequence
  Description of Artificial Sequence: Synthetic oligonucleotide
  Antisense strand to SEQ ID NO: 1222312
uaaugcaaauuaugcccga

SEQ ID NO: 1222314 - RNA, 19 nt, Artificial Sequence
  Description of Artificial Sequence: Synthetic oligonucleotide
  Sense strand starting at position 1198 of SEQ ID NO: 917272
cgggcauaauuugcauuaa

SEQ ID NO: 1222315 - RNA, 19 nt, Artificial Sequence
  Description of Artificial Sequence: Synthetic oligonucleotide
  Antisense strand to SEQ ID NO: 1222314
uuaaugcaaauuaugcccg

SEQ ID NO: 1222316 - RNA, 19 nt, Artificial Sequence
  Description of Artificial Sequence: Synthetic oligonucleotide
  Sense strand starting at position 1401 of SEQ ID NO: 917272
ggaauuccuccugauaugu

SEQ ID NO: 1222317 - RNA, 19 nt, Artificial Sequence
  Description of Artificial Sequence: Synthetic oligonucleotide
  Antisense strand to SEQ ID NO: 1222316
acauaucaggaggaauucc

SEQ ID NO: 1222318 - RNA, 19 nt, Artificial Sequence
  Description of Artificial Sequence: Synthetic oligonucleotide
  Sense strand starting at position 1497 of SEQ ID NO: 917272
caauacacgcuguagauau

SEQ ID NO: 1222319 - RNA, 19 nt, Artificial Sequence
  Description of Artificial Sequence: Synthetic oligonucleotide
  Antisense strand to SEQ ID NO: 1222318
auaucuacagcguguauug

SEQ ID NO: 1222320 - RNA, 19 nt, Artificial Sequence
  Description of Artificial Sequence: Synthetic oligonucleotide
  Sense strand starting at position 1624 of SEQ ID NO: 917272
agggcaggucuguacugaa

SEQ ID NO: 1222321 - RNA, 19 nt, Artificial Sequence
  Description of Artificial Sequence: Synthetic oligonucleotide
  Antisense strand to SEQ ID NO: 1222320
uucaguacagaccugcccu

SEQ ID NO: 1222322 - RNA, 19 nt, Artificial Sequence
  Description of Artificial Sequence: Synthetic oligonucleotide
  Sense strand starting at position 2126 of SEQ ID NO: 917272
uuuggacuggccgauauua

SEQ ID NO: 1222323 - RNA, 19 nt, Artificial Sequence
  Description of Artificial Sequence: Synthetic oligonucleotide
  Antisense strand to SEQ ID NO: 1222322
uaauaucggccaguccaaa

SEQ ID NO: 1222324 - RNA, 19 nt, Artificial Sequence
  Description of Artificial Sequence: Synthetic oligonucleotide
  Sense strand starting at position 2128 of SEQ ID NO: 917272
uggacuggccgauauuaaa

SEQ ID NO: 1222325 - RNA, 19 nt, Artificial Sequence
  Description of Artificial Sequence: Synthetic oligonucleotide
  Antisense strand to SEQ ID NO: 1222324
uuuaauaucggccagucca

SEQ ID NO: 1222326 - RNA, 19 nt, Artificial Sequence
  Description of Artificial Sequence: Synthetic oligonucleotide
  Sense strand starting at position 2370 of SEQ ID NO: 917272
gcgugucaugcuuccagcu

SEQ ID NO: 1222327 - RNA, 19 nt, Artificial Sequence
  Description of Artificial Sequence: Synthetic oligonucleotide
  Antisense strand to SEQ ID NO: 1222326
agcuggaagcaugacacgc

SEQ ID NO: 1222328 - RNA, 19 nt, Artificial Sequence
  Description of Artificial Sequence: Synthetic oligonucleotide
  Sense strand starting at position 2423 of SEQ ID NO: 917272
uggugacuuggacaguuua

SEQ ID NO: 1222329 - RNA, 19 nt, Artificial Sequence
  Description of Artificial Sequence: Synthetic oligonucleotide
  Antisense strand to SEQ ID NO: 1222328
uaaacuguccaagucacca

SEQ ID NO: 1222330 - RNA, 19 nt, Artificial Sequence
  Description of Artificial Sequence: Synthetic oligonucleotide
  Sense strand starting at position 2543 of SEQ ID NO: 917272
uggugucauuuacuaagca

SEQ ID NO: 1222331 - RNA, 19 nt, Artificial Sequence
  Description of Artificial Sequence: Synthetic oligonucleotide
  Antisense strand to SEQ ID NO: 1222330
ugcuuaguaaaugacacca

SEQ ID NO: 1222332 - RNA, 19 nt, Artificial Sequence
  Description of Artificial Sequence: Synthetic oligonucleotide
  Sense strand starting at position 2568 of SEQ ID NO: 917272
augugccagucauuuagua

SEQ ID NO: 1222333 - RNA, 19 nt, Artificial Sequence
  Description of Artificial Sequence: Synthetic oligonucleotide
  Antisense strand to SEQ ID NO: 1222332
uacuaaaugacuggcacau

SEQ ID NO: 1222334 - RNA, 19 nt, Artificial Sequence
  Description of Artificial Sequence: Synthetic oligonucleotide
  Sense strand starting at position 2570 of SEQ ID NO: 917272
gugccagucauuuaguaug

SEQ ID NO: 1222335 - RNA, 19 nt, Artificial Sequence
  Description of Artificial Sequence: Synthetic oligonucleotide
  Antisense strand to SEQ ID NO: 1222334
cauacuaaaugacuggcac

SEQ ID NO: 1222336 - RNA, 19 nt, Artificial Sequence
  Description of Artificial Sequence: Synthetic oligonucleotide
  Sense strand starting at position 2572 of SEQ ID NO: 917272
gccagucauuuaguauguu

SEQ ID NO: 1222337 - RNA, 19 nt, Artificial Sequence
  Description of Artificial Sequence: Synthetic oligonucleotide
  Antisense strand to SEQ ID NO: 1222336
aacauacuaaaugacuggc

SEQ ID NO: 1222338 - RNA, 19 nt, Artificial Sequence
  Description of Artificial Sequence: Synthetic oligonucleotide
  Sense strand starting at position 2724 of SEQ ID NO: 917272
cucagaguccaaugagcua

SEQ ID NO: 1222339 - RNA, 19 nt, Artificial Sequence
  Description of Artificial Sequence: Synthetic oligonucleotide
  Antisense strand to SEQ ID NO: 1222338
uagcucauuggacucugag

SEQ ID NO: 1222340 - RNA, 19 nt, Artificial Sequence
  Description of Artificial Sequence: Synthetic oligonucleotide
  Sense strand starting at position 2800 of SEQ ID NO: 917272
gugagaaguuacuuccaga

SEQ ID NO: 1222341 - RNA, 19 nt, Artificial Sequence
  Description of Artificial Sequence: Synthetic oligonucleotide
  Antisense strand to SEQ ID NO: 1222340
ucuggaaguaacuucucac

SEQ ID NO: 1222342 - RNA, 19 nt, Artificial Sequence
  Description of Artificial Sequence: Synthetic oligonucleotide
  Sense strand starting at position 3002 of SEQ ID NO: 917272
gaggaaguuagucguauuu

SEQ ID NO: 1222343 - RNA, 19 nt, Artificial Sequence
  Description of Artificial Sequence: Synthetic oligonucleotide
  Antisense strand to SEQ ID NO: 1222342
aaauacgacuaacuuccuc

SEQ ID NO: 1222344 - RNA, 19 nt, Artificial Sequence
  Description of Artificial Sequence: Synthetic oligonucleotide
  Sense strand starting at position 3074 of SEQ ID NO: 917272
aaauguguagaggguuaua

SEQ ID NO: 1222345 - RNA, 19 nt, Artificial Sequence
  Description of Artificial Sequence: Synthetic oligonucleotide
  Antisense strand to SEQ ID NO: 1222344
uauaacccucuacacauuu

SEQ ID NO: 1222346 - RNA, 19 nt, Artificial Sequence
  Description of Artificial Sequence: Synthetic oligonucleotide
  Sense strand starting at position 3123 of SEQ ID NO: 917272
uaagaagagcacuguacau

SEQ ID NO: 1222347 - RNA, 19 nt, Artificial Sequence
  Description of Artificial Sequence: Synthetic oligonucleotide
  Antisense strand to SEQ ID NO: 1222346
auguacagugcucuucuua

SEQ ID NO: 1222348 - RNA, 19 nt, Artificial Sequence
  Description of Artificial Sequence: Synthetic oligonucleotide
  Sense strand starting at position 3175 of SEQ ID NO: 917272
aaucaucuguggucccaga

SEQ ID NO: 1222349 - RNA, 19 nt, Artificial Sequence
  Description of Artificial Sequence: Synthetic oligonucleotide
  Antisense strand to SEQ ID NO: 1222348
ucugggaccacagaugauu

SEQ ID NO: 1222350 - RNA, 19 nt, Artificial Sequence
  Description of Artificial Sequence: Synthetic oligonucleotide
  Sense strand starting at position 3213 of SEQ ID NO: 917272
gccauaauaggaugggauu

SEQ ID NO: 1222351 - RNA, 19 nt, Artificial Sequence
  Description of Artificial Sequence: Synthetic oligonucleotide
  Antisense strand to SEQ ID NO: 1222350
aaucccauccuauuauggc

SEQ ID NO: 1222352 - RNA, 19 nt, Artificial Sequence
  Description of Artificial Sequence: Synthetic oligonucleotide
  Sense strand starting at position 3305 of SEQ ID NO: 917272
cgaugaagguccucuaauc

SEQ ID NO: 1222353 - RNA, 19 nt, Artificial Sequence
  Description of Artificial Sequence: Synthetic oligonucleotide
  Antisense strand to SEQ ID NO: 1222352
gauuagaggaccuucaucg

SEQ ID NO: 1222354 - RNA, 19 nt, Artificial Sequence
  Description of Artificial Sequence: Synthetic oligonucleotide
  Sense strand starting at position 3496 of SEQ ID NO: 917272
cuucuauugcaaggacaga

SEQ ID NO: 1222355 - RNA, 19 nt, Artificial Sequence
  Description of Artificial Sequence: Synthetic oligonucleotide
  Antisense strand to SEQ ID NO: 1222354
ucuguccuugcaauagaag

SEQ ID NO: 1222356 - RNA, 19 nt, Artificial Sequence
  Description of Artificial Sequence: Synthetic oligonucleotide
  Sense strand starting at position 3580 of SEQ ID NO: 917272
caaagugcggcuuaggaaa

SEQ ID NO: 1222357 - RNA, 19 nt, Artificial Sequence
  Description of Artificial Sequence: Synthetic oligonucleotide
  Antisense strand to SEQ ID NO: 1222356
uuuccuaagccgcacuuug

SEQ ID NO: 1222358 - RNA, 19 nt, Artificial Sequence
  Description of Artificial Sequence: Synthetic oligonucleotide
  Sense strand starting at position 3686 of SEQ ID NO: 917272
gggaauuacuaagucaguu

SEQ ID NO: 1222359 - RNA, 19 nt, Artificial Sequence
  Description of Artificial Sequence: Synthetic oligonucleotide
  Antisense strand to SEQ ID NO: 1222358
aacugacuuaguaauuccc

SEQ ID NO: 1222360 - RNA, 19 nt, Artificial Sequence
  Description of Artificial Sequence: Synthetic oligonucleotide
  Sense strand starting at position 3742 of SEQ ID NO: 917272
agcaucauuugggaacuua

SEQ ID NO: 1222361 - RNA, 19 nt, Artificial Sequence
  Description of Artificial Sequence: Synthetic oligonucleotide
  Antisense strand to SEQ ID NO: 1222360
uaaguucccaaaugaugcu
